United States Patent Application Publication US 2005/0255487 A1 - sequence listing, part 45

SEQ ID NO: 1229757 - RNA, 19 nt, Homo sapiens
  misc_RNA (1)...(19): siRNA sense strand
agaaagaugagcaguuuag

SEQ ID NO: 1229758 - RNA, 19 nt, Homo sapiens
  misc_RNA (1)...(19): siRNA sense strand
gcaguuuagggaaugguuu

SEQ ID NO: 1229759 - RNA, 19 nt, Homo sapiens
  misc_RNA (1)...(19): siRNA sense strand
ggauguggucaaccuugua

SEQ ID NO: 1229760 - RNA, 19 nt, Homo sapiens
  misc_RNA (1)...(19): siRNA sense strand
gaauaugugcagcagaaag

SEQ ID NO: 1229761 - RNA, 19 nt, Homo sapiens
  misc_RNA (1)...(19): siRNA sense strand
gauguggucaaccuuguau

SEQ ID NO: 1229762 - RNA, 19 nt, Homo sapiens
  misc_RNA (1)...(19): siRNA sense strand
cagaaagaugagcaguuua

SEQ ID NO: 1229763 - RNA, 19 nt, Homo sapiens
  misc_RNA (1)...(19): siRNA sense strand
cgucugaauccaugccaua

SEQ ID NO: 1229764 - RNA, 19 nt, Homo sapiens
  misc_RNA (1)...(19): siRNA sense strand
gcgaaucucagcuggaagu

SEQ ID NO: 1229765 - RNA, 19 nt, Homo sapiens
  misc_RNA (1)...(19): siRNA sense strand
gugaccaccuggcgaaucu

SEQ ID NO: 1229766 - RNA, 19 nt, Homo sapiens
  misc_RNA (1)...(19): siRNA sense strand
auacacaucaucagcagaa

SEQ ID NO: 1229767 - RNA, 19 nt, Homo sapiens
  misc_RNA (1)...(19): siRNA sense strand
gggacgagucuggcccuua

SEQ ID NO: 1229768 - RNA, 19 nt, Homo sapiens
  misc_RNA (1)...(19): siRNA sense strand
cgaagccacacaaaccauu

SEQ ID NO: 1229769 - RNA, 19 nt, Homo sapiens
  misc_RNA (1)...(19): siRNA sense strand
aacuuacuuucccuucuua

SEQ ID NO: 1229770 - RNA, 19 nt, Homo sapiens
  misc_RNA (1)...(19): siRNA sense strand
ccaacuuacuuucccuucu

SEQ ID NO: 1229771 - RNA, 19 nt, Homo sapiens
  misc_RNA (1)...(19): siRNA sense strand
aaccagcauugaccgauug

SEQ ID NO: 1229772 - RNA, 19 nt, Homo sapiens
  misc_RNA (1)...(19): siRNA sense strand
caaaccauugggagugaaa

SEQ ID NO: 1229773 - RNA, 19 nt, Homo sapiens
  misc_RNA (1)...(19): siRNA sense strand
gcauugaccgauugaaggu

SEQ ID NO: 1229774 - RNA, 19 nt, Homo sapiens
  misc_RNA (1)...(19): siRNA sense strand
cuaauggagcucacucaga

SEQ ID NO: 1229775 - RNA, 19 nt, Homo sapiens
  misc_RNA (1)...(19): siRNA sense strand
caucuuccuugcacuggau

SEQ ID NO: 1229776 - RNA, 19 nt, Homo sapiens
  misc_RNA (1)...(19): siRNA sense strand
aaauccugcugacuaacaa

SEQ ID NO: 1229777 - RNA, 19 nt, Homo sapiens
  misc_RNA (1)...(19): siRNA sense strand
gcccagggaugaggcagau

SEQ ID NO: 1229778 - RNA, 19 nt, Homo sapiens
  misc_RNA (1)...(19): siRNA sense strand
ugaagguauuuaaggaagu

SEQ ID NO: 1229779 - RNA, 19 nt, Homo sapiens
  misc_RNA (1)...(19): siRNA sense strand
aauaugugcagcagaaaga

SEQ ID NO: 1229780 - RNA, 19 nt, Homo sapiens
  misc_RNA (1)...(19): siRNA sense strand
gcaucguggagcacucaua

SEQ ID NO: 1229781 - RNA, 19 nt, Homo sapiens
  misc_RNA (1)...(19): siRNA sense strand
gucccuugcuggucuuguu

SEQ ID NO: 1229782 - RNA, 19 nt, Homo sapiens
  misc_RNA (1)...(19): siRNA sense strand
ccuugcaaaugguauugaa

SEQ ID NO: 1229783 - RNA, 19 nt, Homo sapiens
  misc_RNA (1)...(19): siRNA sense strand
uggaagugguggucaagca

SEQ ID NO: 1229784 - RNA, 19 nt, Homo sapiens
  misc_RNA (1)...(19): siRNA sense strand
caagcagagagaacgauug

SEQ ID NO: 1229785 - RNA, 19 nt, Homo sapiens
  misc_RNA (1)...(19): siRNA sense strand
ucaagcagagagaacgauu

SEQ ID NO: 1229786 - RNA, 19 nt, Homo sapiens
  misc_RNA (1)...(19): siRNA sense strand
ccugcugacuaacaaugaa

SEQ ID NO: 1229787 - RNA, 19 nt, Homo sapiens
  misc_RNA (1)...(19): siRNA sense strand
cuuagaacauaugcagcua

SEQ ID NO: 1229788 - RNA, 19 nt, Homo sapiens
  misc_RNA (1)...(19): siRNA sense strand
gcuggaggagaaucuaaug

SEQ ID NO: 1229789 - RNA, 19 nt, Homo sapiens
  misc_RNA (1)...(19): siRNA sense strand
ugacugcaaccagcauuga

SEQ ID NO: 1229790 - RNA, 19 nt, Homo sapiens
  misc_RNA (1)...(19): siRNA sense strand
caaauacuuccgggagaga

SEQ ID NO: 1229791 - RNA, 19 nt, Homo sapiens
  misc_RNA (1)...(19): siRNA sense strand
ggaagauccaggaguccau

SEQ ID NO: 1229792 - RNA, 19 nt, Homo sapiens
  misc_RNA (1)...(19): siRNA sense strand
gguauuuaaggaaguuaug

SEQ ID NO: 1229793 - RNA, 19 nt, Homo sapiens
  misc_RNA (1)...(19): siRNA sense strand
cagcauugaccgauugaag

SEQ ID NO: 1229794 - RNA, 19 nt, Homo sapiens
  misc_RNA (1)...(19): siRNA sense strand
ucuacgaagcucugaagaa

SEQ ID NO: 1229795 - RNA, 19 nt, Homo sapiens
  misc_RNA (1)...(19): siRNA sense strand
gagcacucauacacaucau

SEQ ID NO: 1229796 - RNA, 19 nt, Homo sapiens
  misc_RNA (1)...(19): siRNA sense strand
auccaggaguccauagaaa

SEQ ID NO: 1229797 - RNA, 19 nt, Homo sapiens
  misc_RNA (1)...(19): siRNA sense strand
gaaagaugagcaguuuagg

SEQ ID NO: 1229798 - RNA, 19 nt, Homo sapiens
  misc_RNA (1)...(19): siRNA sense strand
ggagcuggaggagaaucua

SEQ ID NO: 1229799 - RNA, 19 nt, Homo sapiens
  misc_RNA (1)...(19): siRNA sense strand
uggucaaccuuguauacga

SEQ ID NO: 1229800 - RNA, 19 nt, Homo sapiens
  misc_RNA (1)...(19): siRNA sense strand
cugaagaagcuuagaacau

SEQ ID NO: 1229801 - RNA, 19 nt, Homo sapiens
  misc_RNA (1)...(19): siRNA sense strand
uugcaaaugguauugaaga

SEQ ID NO: 1229802 - RNA, 19 nt, Homo sapiens
  misc_RNA (1)...(19): siRNA sense strand
gaacgugucugguuauuau

SEQ ID NO: 1229803 - RNA, 19 nt, Homo sapiens
  misc_RNA (1)...(19): siRNA sense strand
gcagaaagaugagcaguuu

SEQ ID NO: 1229804 - RNA, 19 nt, Homo sapiens
  misc_RNA (1)...(19): siRNA sense strand
ugaagaagcuuagaacaua

SEQ ID NO: 1229805 - RNA, 19 nt, Homo sapiens
  misc_RNA (1)...(19): siRNA sense strand
gaacauaugcagcuauuga

SEQ ID NO: 1229806 - RNA, 19 nt, Homo sapiens
  misc_RNA (1)...(19): siRNA sense strand
gaagaagcuuagaacauau

SEQ ID NO: 1229807 - RNA, 19 nt, Homo sapiens
  misc_RNA (1)...(19): siRNA sense strand
ugacaucacacccaacuua

SEQ ID NO: 1229808 - RNA, 19 nt, Homo sapiens
  misc_RNA (1)...(19): siRNA sense strand
gaagguauuuaaggaaguu

SEQ ID NO: 1229809 - RNA, 19 nt, Homo sapiens
  misc_RNA (1)...(19): siRNA sense strand
caacuuacuuucccuucuu

SEQ ID NO: 1229810 - RNA, 19 nt, Homo sapiens
  misc_RNA (1)...(19): siRNA sense strand
gauugaagguauuuaagga

SEQ ID NO: 1229811 - RNA, 19 nt, Homo sapiens
  misc_RNA (1)...(19): siRNA sense strand
uaauggagcucacucagau

SEQ ID NO: 1229812 - RNA, 19 nt, Homo sapiens
  misc_RNA (1)...(19): siRNA sense strand
uggagaacgugucugguua

SEQ ID NO: 1229813 - RNA, 19 nt, Homo sapiens
  misc_RNA (1)...(19): siRNA sense strand
cugaagaggccaccaaaua

SEQ ID NO: 1229814 - RNA, 19 nt, Homo sapiens
  misc_RNA (1)...(19): siRNA sense strand
aagaaacgcuuuacugaag

SEQ ID NO: 1229815 - RNA, 19 nt, Homo sapiens
  misc_RNA (1)...(19): siRNA sense strand
ggacgagucuggcccuuac

SEQ ID NO: 1229816 - RNA, 19 nt, Homo sapiens
  misc_RNA (1)...(19): siRNA sense strand
uagaacauaugcagcuauu

SEQ ID NO: 1229817 - RNA, 19 nt, Homo sapiens
  misc_RNA (1)...(19): siRNA sense strand
gaugagcaguuuagggaau

SEQ ID NO: 1229818 - RNA, 19 nt, Homo sapiens
  misc_RNA (1)...(19): siRNA sense strand
caaccagcauugaccgauu

SEQ ID NO: 1229819 - RNA, 19 nt, Homo sapiens
  misc_RNA (1)...(19): siRNA sense strand
gagaacgugucugguuauu

SEQ ID NO: 1229820 - RNA, 19 nt, Homo sapiens
  misc_RNA (1)...(19): siRNA sense strand
ggagcucacucagaucuau

SEQ ID NO: 1229821 - RNA, 19 nt, Homo sapiens
  misc_RNA (1)...(19): siRNA sense strand
cuacgaagcucugaagaag

SEQ ID NO: 1229822 - RNA, 19 nt, Homo sapiens
  misc_RNA (1)...(19): siRNA sense strand
gaaguuaugcgugacauca

SEQ ID NO: 1229823 - RNA, 19 nt, Homo sapiens
  misc_RNA (1)...(19): siRNA sense strand
ggcagaugcucucuacgaa

SEQ ID NO: 1229824 - RNA, 19 nt, Homo sapiens
  misc_RNA (1)...(19): siRNA sense strand
gaagauccaggaguccaua

SEQ ID NO: 1229825 - RNA, 19 nt, Homo sapiens
  misc_RNA (1)...(19): siRNA sense strand
acgaauaugugcagcagaa

SEQ ID NO: 1229826 - RNA, 19 nt, Homo sapiens
  misc_RNA (1)...(19): siRNA sense strand
agucaaagcacuugcauga

SEQ ID NO: 1229827 - RNA, 19 nt, Homo sapiens
  misc_RNA (1)...(19): siRNA sense strand
ugcaaauccugcugacuaa

SEQ ID NO: 1229828 - RNA, 19 nt, Homo sapiens
  misc_RNA (1)...(19): siRNA sense strand
caaugaagccuggaagaga

SEQ ID NO: 1229829 - RNA, 19 nt, Homo sapiens
  misc_RNA (1)...(19): siRNA sense strand
gcacucauacacaucauca

SEQ ID NO: 1229830 - RNA, 19 nt, Homo sapiens
  misc_RNA (1)...(19): siRNA sense strand
gaaacgcuuuacugaagag

SEQ ID NO: 1229831 - RNA, 19 nt, Homo sapiens
  misc_RNA (1)...(19): siRNA sense strand
gaagaggccaccaaauacu

SEQ ID NO: 1229832 - RNA, 19 nt, Homo sapiens
  misc_RNA (1)...(19): siRNA sense strand
cucaggagcuggaggagaa

SEQ ID NO: 1229833 - RNA, 19 nt, Homo sapiens
  misc_RNA (1)...(19): siRNA sense strand
cugcaaauccugcugacua

SEQ ID NO: 1229834 - RNA, 19 nt, Homo sapiens
  misc_RNA (1)...(19): siRNA sense strand
ggagaacgugucugguuau

SEQ ID NO: 1229835 - RNA, 19 nt, Homo sapiens
  misc_RNA (1)...(19): siRNA sense strand
gauccaggaguccauagaa

SEQ ID NO: 1229836 - RNA, 19 nt, Homo sapiens
  misc_RNA (1)...(19): siRNA sense strand
agaaacgcuuuacugaaga

SEQ ID NO: 1229837 - RNA, 19 nt, Homo sapiens
  misc_RNA (1)...(19): siRNA sense strand
gaagccacacaaaccauug

SEQ ID NO: 1229838 - RNA, 19 nt, Homo sapiens
  misc_RNA (1)...(19): siRNA sense strand
gcucagaacagcuggaucu

SEQ ID NO: 1229839 - RNA, 19 nt, Homo sapiens
  misc_RNA (1)...(19): siRNA sense strand
gaucuugcucacacucuuu

SEQ ID NO: 1229840 - RNA, 19 nt, Homo sapiens
  misc_RNA (1)...(19): siRNA sense strand
cacagaggcugcaccaucu

SEQ ID NO: 1229841 - RNA, 19 nt, Homo sapiens
  misc_RNA (1)...(19): siRNA sense strand
gagcuggaggagaaucuaa

SEQ ID NO: 1229842 - RNA, 19 nt, Homo sapiens
  misc_RNA (1)...(19): siRNA sense strand
cacaaaccauugggaguga

SEQ ID NO: 1229843 - RNA, 19 nt, Homo sapiens
  misc_RNA (1)...(19): siRNA sense strand
caucacacccaacuuacuu

SEQ ID NO: 1229844 - RNA, 19 nt, Homo sapiens
  misc_RNA (1)...(19): siRNA sense strand
aaugaagccuggaagagau

SEQ ID NO: 1229845 - RNA, 19 nt, Homo sapiens
  misc_RNA (1)...(19): siRNA sense strand
ggaucuugcucacacucuu

SEQ ID NO: 1229846 - RNA, 19 nt, Homo sapiens
  misc_RNA (1)...(19): siRNA sense strand
ugaggcagaugcucucuac

SEQ ID NO: 1229847 - RNA, 19 nt, Homo sapiens
  misc_RNA (1)...(19): siRNA sense strand
caaauccugcugacuaaca

SEQ ID NO: 1229848 - RNA, 19 nt, Homo sapiens
  misc_RNA (1)...(19): siRNA sense strand
uggcgaaucucagcuggaa

SEQ ID NO: 1229849 - RNA, 19 nt, Homo sapiens
  misc_RNA (1)...(19): siRNA sense strand
guggagcacucauacacau

SEQ ID NO: 1229850 - RNA, 19 nt, Homo sapiens
  misc_RNA (1)...(19): siRNA sense strand
ugaagaggccaccaaauac

SEQ ID NO: 1229851 - RNA, 19 nt, Homo sapiens
  misc_RNA (1)...(19): siRNA sense strand
gcucugaagaagcuuagaa

SEQ ID NO: 1229852 - RNA, 19 nt, Homo sapiens
  misc_RNA (1)...(19): siRNA sense strand
ggagcacucauacacauca

SEQ ID NO: 1229853 - RNA, 19 nt, Homo sapiens
  misc_RNA (1)...(19): siRNA sense strand
gcugcaccaucuccaaugu

SEQ ID NO: 1229854 - RNA, 19 nt, Homo sapiens
  misc_RNA (1)...(19): siRNA sense strand
agaaagaugagcaguuuag

SEQ ID NO: 1229855 - RNA, 19 nt, Homo sapiens
  misc_RNA (1)...(19): siRNA sense strand
gcaguuuagggaaugguuu

SEQ ID NO: 1229856 - RNA, 19 nt, Homo sapiens
  misc_RNA (1)...(19): siRNA sense strand
ggauguggucaaccuugua

SEQ ID NO: 1229857 - RNA, 19 nt, Homo sapiens
  misc_RNA (1)...(19): siRNA sense strand
gaauaugugcagcagaaag

SEQ ID NO: 1229858 - RNA, 19 nt, Homo sapiens
  misc_RNA (1)...(19): siRNA sense strand
gauguggucaaccuuguau

SEQ ID NO: 1229859 - RNA, 19 nt, Homo sapiens
  misc_RNA (1)...(19): siRNA sense strand
cagaaagaugagcaguuua

SEQ ID NO: 1229860 - RNA, 19 nt, Homo sapiens
  misc_RNA (1)...(19): siRNA sense strand
cgucugaauccaugccaua

SEQ ID NO: 1229861 - RNA, 19 nt, Homo sapiens
  misc_RNA (1)...(19): siRNA sense strand
gcgaaucucagcuggaagu

SEQ ID NO: 1229862 - RNA, 19 nt, Homo sapiens
  misc_RNA (1)...(19): siRNA sense strand
gugaccaccuggcgaaucu

SEQ ID NO: 1229863 - RNA, 19 nt, Homo sapiens
  misc_RNA (1)...(19): siRNA sense strand
auacacaucaucagcagaa

SEQ ID NO: 1229864 - RNA, 19 nt, Homo sapiens
  misc_RNA (1)...(19): siRNA sense strand
gggacgagucuggcccuua

SEQ ID NO: 1229865 - RNA, 19 nt, Homo sapiens
  misc_RNA (1)...(19): siRNA sense strand
cgaagccacacaaaccauu

SEQ ID NO: 1229866 - RNA, 19 nt, Homo sapiens
  misc_RNA (1)...(19): siRNA sense strand
aacuuacuuucccuucuua

SEQ ID NO: 1229867 - RNA, 19 nt, Homo sapiens
  misc_RNA (1)...(19): siRNA sense strand
ccaacuuacuuucccuucu

SEQ ID NO: 1229868 - RNA, 19 nt, Homo sapiens
  misc_RNA (1)...(19): siRNA sense strand
aaccagcauugaccgauug

SEQ ID NO: 1229869 - RNA, 19 nt, Homo sapiens
  misc_RNA (1)...(19): siRNA sense strand
caaaccauugggagugaaa

SEQ ID NO: 1229870 - RNA, 19 nt, Homo sapiens
  misc_RNA (1)...(19): siRNA sense strand
gcccagggaugaggcagau

SEQ ID NO: 1229871 - RNA, 19 nt, Homo sapiens
  misc_RNA (1)...(19): siRNA sense strand
cuaauggagcucacucaga

SEQ ID NO: 1229872 - RNA, 19 nt, Homo sapiens
  misc_RNA (1)...(19): siRNA sense strand
caucuuccuugcacuggau

SEQ ID NO: 1229873 - RNA, 19 nt, Homo sapiens
  misc_RNA (1)...(19): siRNA sense strand
ugaagguauuuaaggaagu

SEQ ID NO: 1229874 - RNA, 19 nt, Homo sapiens
  misc_RNA (1)...(19): siRNA sense strand
gcauugaccgauugaaggu

SEQ ID NO: 1229875 - RNA, 19 nt, Homo sapiens
  misc_RNA (1)...(19): siRNA sense strand
aaauccugcugacuaacaa

SEQ ID NO: 1229876 - RNA, 19 nt, Homo sapiens
  misc_RNA (1)...(19): siRNA sense strand
aauaugugcagcagaaaga

SEQ ID NO: 1229877 - RNA, 19 nt, Homo sapiens
  misc_RNA (1)...(19): siRNA sense strand
gcaucguggagcacucaua

SEQ ID NO: 1229878 - RNA, 19 nt, Homo sapiens
  misc_RNA (1)...(19): siRNA sense strand
gucccuugcuggucuuguu

SEQ ID NO: 1229879 - RNA, 19 nt, Homo sapiens
  misc_RNA (1)...(19): siRNA sense strand
ccuugcaaaugguauugaa

SEQ ID NO: 1229880 - RNA, 19 nt, Homo sapiens
  misc_RNA (1)...(19): siRNA sense strand
uggaagugguggucaagca

SEQ ID NO: 1229881 - RNA, 19 nt, Homo sapiens
  misc_RNA (1)...(19): siRNA sense strand
caagcagagagaacgauug

SEQ ID NO: 1229882 - RNA, 19 nt, Homo sapiens
  misc_RNA (1)...(19): siRNA sense strand
agaacgugucugguuauua

SEQ ID NO: 1229883 - RNA, 19 nt, Homo sapiens
  misc_RNA (1)...(19): siRNA sense strand
ucaagcagagagaacgauu

SEQ ID NO: 1229884 - RNA, 19 nt, Homo sapiens
  misc_RNA (1)...(19): siRNA sense strand
ccugcugacuaacaaugaa

SEQ ID NO: 1229885 - RNA, 19 nt, Homo sapiens
  misc_RNA (1)...(19): siRNA sense strand
cuuagaacauaugcagcua

SEQ ID NO: 1229886 - RNA, 19 nt, Homo sapiens
  misc_RNA (1)...(19): siRNA sense strand
gcuggaggagaaucuaaug

SEQ ID NO: 1229887 - RNA, 19 nt, Homo sapiens
  misc_RNA (1)...(19): siRNA sense strand
caaauacuuccgggagaga

SEQ ID NO: 1229888 - RNA, 19 nt, Homo sapiens
  misc_RNA (1)...(19): siRNA sense strand
ugacugcaaccagcauuga

SEQ ID NO: 1229889 - RNA, 19 nt, Homo sapiens
  misc_RNA (1)...(19): siRNA sense strand
ucagaacagcuggaucuug

SEQ ID NO: 1229890 - RNA, 19 nt, Homo sapiens
  misc_RNA (1)...(19): siRNA sense strand
ucuacgaagcucugaagaa

SEQ ID NO: 1229891 - RNA, 19 nt, Homo sapiens
  misc_RNA (1)...(19): siRNA sense strand
gguauuuaaggaaguuaug

SEQ ID NO: 1229892 - RNA, 19 nt, Homo sapiens
  misc_RNA (1)...(19): siRNA sense strand
cagcauugaccgauugaag

SEQ ID NO: 1229893 - RNA, 19 nt, Homo sapiens
  misc_RNA (1)...(19): siRNA sense strand
gagcacucauacacaucau

SEQ ID NO: 1229894 - RNA, 19 nt, Homo sapiens
  misc_RNA (1)...(19): siRNA sense strand
auccaggaguccauagaaa

SEQ ID NO: 1229895 - RNA, 19 nt, Homo sapiens
  misc_RNA (1)...(19): siRNA sense strand
ggaagauccaggaguccau

SEQ ID NO: 1229896 - RNA, 19 nt, Homo sapiens
  misc_RNA (1)...(19): siRNA sense strand
gaaagaugagcaguuuagg

SEQ ID NO: 1229897 - RNA, 19 nt, Homo sapiens
  misc_RNA (1)...(19): siRNA sense strand
ggagcuggaggagaaucua

SEQ ID NO: 1229898 - RNA, 19 nt, Homo sapiens
  misc_RNA (1)...(19): siRNA sense strand
uggucaaccuuguauacga

SEQ ID NO: 1229899 - RNA, 19 nt, Homo sapiens
  misc_RNA (1)...(19): siRNA sense strand
uugcaaaugguauugaaga

SEQ ID NO: 1229900 - RNA, 19 nt, Homo sapiens
  misc_RNA (1)...(19): siRNA sense strand
cugaagaagcuuagaacau

SEQ ID NO: 1229901 - RNA, 19 nt, Homo sapiens
  misc_RNA (1)...(19): siRNA sense strand
ugacaucacacccaacuua

SEQ ID NO: 1229902 - RNA, 19 nt, Homo sapiens
  misc_RNA (1)...(19): siRNA sense strand
gaagguauuuaaggaaguu

SEQ ID NO: 1229903 - RNA, 19 nt, Homo sapiens
  misc_RNA (1)...(19): siRNA sense strand
caacuuacuuucccuucuu

SEQ ID NO: 1229904 - RNA, 19 nt, Homo sapiens
  misc_RNA (1)...(19): siRNA sense strand
gauugaagguauuuaagga

SEQ ID NO: 1229905 - RNA, 19 nt, Homo sapiens
  misc_RNA (1)...(19): siRNA sense strand
uaauggagcucacucagau

SEQ ID NO: 1229906 - RNA, 19 nt, Homo sapiens
  misc_RNA (1)...(19): siRNA sense strand
ggacgagucuggcccuuac

SEQ ID NO: 1229907 - RNA, 19 nt, Homo sapiens
  misc_RNA (1)...(19): siRNA sense strand
caaccagcauugaccgauu

SEQ ID NO: 1229908 - RNA, 19 nt, Homo sapiens
  misc_RNA (1)...(19): siRNA sense strand
ggagcucacucagaucuau

SEQ ID NO: 1229909 - RNA, 19 nt, Homo sapiens
  misc_RNA (1)...(19): siRNA sense strand
gaaguuaugcgugacauca

SEQ ID NO: 1229910 - RNA, 19 nt, Homo sapiens
  misc_RNA (1)...(19): siRNA sense strand
agucaaagcacuugcauga

SEQ ID NO: 1229911 - RNA, 19 nt, Homo sapiens
  misc_RNA (1)...(19): siRNA sense strand
gcacucauacacaucauca

SEQ ID NO: 1229912 - RNA, 19 nt, Homo sapiens
  misc_RNA (1)...(19): siRNA sense strand
cucaggagcuggaggagaa

SEQ ID NO: 1229913 - RNA, 19 nt, Homo sapiens
  misc_RNA (1)...(19): siRNA sense strand
gaagccacacaaaccauug

SEQ ID NO: 1229914 - RNA, 19 nt, Homo sapiens
  misc_RNA (1)...(19): siRNA sense strand
caucacacccaacuuacuu

SEQ ID NO: 1229915 - RNA, 19 nt, Homo sapiens
  misc_RNA (1)...(19): siRNA sense strand
gagcuggaggagaaucuaa

SEQ ID NO: 1229916 - RNA, 19 nt, Homo sapiens
  misc_RNA (1)...(19): siRNA sense strand
cacaaaccauugggaguga

SEQ ID NO: 1229917 - RNA, 19 nt, Homo sapiens
  misc_RNA (1)...(19): siRNA sense strand
guggagcacucauacacau

SEQ ID NO: 1229918 - RNA, 19 nt, Homo sapiens
  misc_RNA (1)...(19): siRNA sense strand
uggcgaaucucagcuggaa

SEQ ID NO: 1229919 - RNA, 19 nt, Homo sapiens
  misc_RNA (1)...(19): siRNA sense strand
ggagcacucauacacauca

SEQ ID NO: 1229920 - RNA, 19 nt, Homo sapiens
  misc_RNA (1)...(19): siRNA sense strand
ggauguggucaaccuugua

SEQ ID NO: 1229921 - RNA, 19 nt, Homo sapiens
  misc_RNA (1)...(19): siRNA sense strand
gauguggucaaccuuguau

SEQ ID NO: 1229922 - RNA, 19 nt, Homo sapiens
  misc_RNA (1)...(19): siRNA sense strand
gugaccaccuggcgaaucu

SEQ ID NO: 1229923 - RNA, 19 nt, Homo sapiens
  misc_RNA (1)...(19): siRNA sense strand
cgucugaauccaugccaua

SEQ ID NO: 1229924 - RNA, 19 nt, Homo sapiens
  misc_RNA (1)...(19): siRNA sense strand
gcgaaucucagcuggaagu

SEQ ID NO: 1229925 - RNA, 19 nt, Homo sapiens
  misc_RNA (1)...(19): siRNA sense strand
auacacaucaucagcagaa

SEQ ID NO: 1229926 - RNA, 19 nt, Homo sapiens
  misc_RNA (1)...(19): siRNA sense strand
aaccagcauugaccgauug

SEQ ID NO: 1229927 - RNA, 19 nt, Homo sapiens
  misc_RNA (1)...(19): siRNA sense strand
gggacgagucuggcccuua

SEQ ID NO: 1229928 - RNA, 19 nt, Homo sapiens
  misc_RNA (1)...(19): siRNA sense strand
cgaagccacacaaaccauu

SEQ ID NO: 1229929 - RNA, 19 nt, Homo sapiens
  misc_RNA (1)...(19): siRNA sense strand
aacuuacuuucccuucuua

SEQ ID NO: 1229930 - RNA, 19 nt, Homo sapiens
  misc_RNA (1)...(19): siRNA sense strand
ccaacuuacuuucccuucu

SEQ ID NO: 1229931 - RNA, 19 nt, Homo sapiens
  misc_RNA (1)...(19): siRNA sense strand
caaaccauugggagugaaa

SEQ ID NO: 1229932 - RNA, 19 nt, Homo sapiens
  misc_RNA (1)...(19): siRNA sense strand
gcauugaccgauugaaggu

SEQ ID NO: 1229933 - RNA, 19 nt, Homo sapiens
  misc_RNA (1)...(19): siRNA sense strand
cuaauggagcucacucaga

SEQ ID NO: 1229934 - RNA, 19 nt, Homo sapiens
  misc_RNA (1)...(19): siRNA sense strand
caucuuccuugcacuggau

SEQ ID NO: 1229935 - RNA, 19 nt, Homo sapiens
  misc_RNA (1)...(19): siRNA sense strand
ugaagguauuuaaggaagu

SEQ ID NO: 1229936 - RNA, 19 nt, Homo sapiens
  misc_RNA (1)...(19): siRNA sense strand
gucccuugcuggucuuguu

SEQ ID NO: 1229937 - RNA, 19 nt, Homo sapiens
  misc_RNA (1)...(19): siRNA sense strand
gcaucguggagcacucaua

SEQ ID NO: 1229938 - RNA, 19 nt, Homo sapiens
  misc_RNA (1)...(19): siRNA sense strand
uggaagugguggucaagca

SEQ ID NO: 1229939 - RNA, 19 nt, Homo sapiens
  misc_RNA (1)...(19): siRNA sense strand
caagcagagagaacgauug

SEQ ID NO: 1229940 - RNA, 19 nt, Homo sapiens
  misc_RNA (1)...(19): siRNA sense strand
ucaagcagagagaacgauu

SEQ ID NO: 1229941 - RNA, 19 nt, Homo sapiens
  misc_RNA (1)...(19): siRNA sense strand
ugacugcaaccagcauuga

SEQ ID NO: 1229942 - RNA, 19 nt, Homo sapiens
  misc_RNA (1)...(19): siRNA sense strand
gcuggaggagaaucuaaug

SEQ ID NO: 1229943 - RNA, 19 nt, Homo sapiens
  misc_RNA (1)...(19): siRNA sense strand
cagcauugaccgauugaag

SEQ ID NO: 1229944 - RNA, 19 nt, Homo sapiens
  misc_RNA (1)...(19): siRNA sense strand
gagcacucauacacaucau

SEQ ID NO: 1229945 - RNA, 19 nt, Homo sapiens
  misc_RNA (1)...(19): siRNA sense strand
gguauuuaaggaaguuaug

SEQ ID NO: 1229946 - RNA, 19 nt, Homo sapiens
  misc_RNA (1)...(19): siRNA sense strand
uggucaaccuuguauacga

SEQ ID NO: 1229947 - RNA, 19 nt, Homo sapiens
  misc_RNA (1)...(19): siRNA sense strand
ggagcuggaggagaaucua

SEQ ID NO: 1229948 - RNA, 19 nt, Homo sapiens
  misc_RNA (1)...(19): siRNA sense strand
ugacaucacacccaacuua

SEQ ID NO: 1229949 - RNA, 19 nt, Homo sapiens
  misc_RNA (1)...(19): siRNA sense strand
gaagguauuuaaggaaguu

SEQ ID NO: 1229950 - RNA, 19 nt, Homo sapiens
  misc_RNA (1)...(19): siRNA sense strand
caacuuacuuucccuucuu

SEQ ID NO: 1229951 - RNA, 19 nt, Homo sapiens
  misc_RNA (1)...(19): siRNA sense strand
gauugaagguauuuaagga

SEQ ID NO: 1229952 - RNA, 19 nt, Homo sapiens
  misc_RNA (1)...(19): siRNA sense strand
uaauggagcucacucagau

SEQ ID NO: 1229953 - RNA, 19 nt, Homo sapiens
  misc_RNA (1)...(19): siRNA sense strand
ggacgagucuggcccuuac

SEQ ID NO: 1229954 - RNA, 19 nt, Homo sapiens
  misc_RNA (1)...(19): siRNA sense strand
caaccagcauugaccgauu

SEQ ID NO: 1229955 - RNA, 19 nt, Homo sapiens
  misc_RNA (1)...(19): siRNA sense strand
ggagcucacucagaucuau

SEQ ID NO: 1229956 - RNA, 19 nt, Homo sapiens
  misc_RNA (1)...(19): siRNA sense strand
gaaguuaugcgugacauca

SEQ ID NO: 1229957 - RNA, 19 nt, Homo sapiens
  misc_RNA (1)...(19): siRNA sense strand
agucaaagcacuugcauga

SEQ ID NO: 1229958 - RNA, 19 nt, Homo sapiens
  misc_RNA (1)...(19): siRNA sense strand
gcacucauacacaucauca

SEQ ID NO: 1229959 - RNA, 19 nt, Homo sapiens
  misc_RNA (1)...(19): siRNA sense strand
cucaggagcuggaggagaa

SEQ ID NO: 1229960 - RNA, 19 nt, Homo sapiens
  misc_RNA (1)...(19): siRNA sense strand
gaagccacacaaaccauug

SEQ ID NO: 1229961 - RNA, 19 nt, Homo sapiens
  misc_RNA (1)...(19): siRNA sense strand
caucacacccaacuuacuu

SEQ ID NO: 1229962 - RNA, 19 nt, Homo sapiens
  misc_RNA (1)...(19): siRNA sense strand
gagcuggaggagaaucuaa

SEQ ID NO: 1229963 - RNA, 19 nt, Homo sapiens
  misc_RNA (1)...(19): siRNA sense strand
cacaaaccauugggaguga

SEQ ID NO: 1229964 - RNA, 19 nt, Homo sapiens
  misc_RNA (1)...(19): siRNA sense strand
guggagcacucauacacau

SEQ ID NO: 1229965 - RNA, 19 nt, Homo sapiens
  misc_RNA (1)...(19): siRNA sense strand
uggcgaaucucagcuggaa

SEQ ID NO: 1229966 - RNA, 19 nt, Homo sapiens
  misc_RNA (1)...(19): siRNA sense strand
ggagcacucauacacauca

SEQ ID NO: 1229967 - RNA, 19 nt, Homo sapiens
  misc_RNA (1)...(19): siRNA sense strand
ggauguggucaaccuugua

SEQ ID NO: 1229968 - RNA, 19 nt, Homo sapiens
  misc_RNA (1)...(19): siRNA sense strand
gauguggucaaccuuguau

SEQ ID NO: 1229969 - RNA, 19 nt, Homo sapiens
  misc_RNA (1)...(19): siRNA sense strand
gugaccaccuggcgaaucu

SEQ ID NO: 1229970 - RNA, 19 nt, Homo sapiens
  misc_RNA (1)...(19): siRNA sense strand
cgucugaauccaugccaua

SEQ ID NO: 1229971 - RNA, 19 nt, Homo sapiens
  misc_RNA (1)...(19): siRNA sense strand
gcgaaucucagcuggaagu

SEQ ID NO: 1229972 - RNA, 19 nt, Homo sapiens
  misc_RNA (1)...(19): siRNA sense strand
auacacaucaucagcagaa

SEQ ID NO: 1229973 - RNA, 19 nt, Homo sapiens
  misc_RNA (1)...(19): siRNA sense strand
aaccagcauugaccgauug

SEQ ID NO: 1229974 - RNA, 19 nt, Homo sapiens
  misc_RNA (1)...(19): siRNA sense strand
gggacgagucuggcccuua

SEQ ID NO: 1229975 - RNA, 19 nt, Homo sapiens
  misc_RNA (1)...(19): siRNA sense strand
cgaagccacacaaaccauu

SEQ ID NO: 1229976 - RNA, 19 nt, Homo sapiens
  misc_RNA (1)...(19): siRNA sense strand
aacuuacuuucccuucuua

SEQ ID NO: 1229977 - RNA, 19 nt, Homo sapiens
  misc_RNA (1)...(19): siRNA sense strand
ccaacuuacuuucccuucu

SEQ ID NO: 1229978 - RNA, 19 nt, Homo sapiens
  misc_RNA (1)...(19): siRNA sense strand
caaaccauugggagugaaa

SEQ ID NO: 1229979 - RNA, 19 nt, Homo sapiens
  misc_RNA (1)...(19): siRNA sense strand
gcauugaccgauugaaggu

SEQ ID NO: 1229980 - RNA, 19 nt, Homo sapiens
  misc_RNA (1)...(19): siRNA sense strand
cuaauggagcucacucaga

SEQ ID NO: 1229981 - RNA, 19 nt, Homo sapiens
  misc_RNA (1)...(19): siRNA sense strand
caucuuccuugcacuggau

SEQ ID NO: 1229982 - RNA, 19 nt, Homo sapiens
  misc_RNA (1)...(19): siRNA sense strand
ugaagguauuuaaggaagu

SEQ ID NO: 1229983 - RNA, 19 nt, Homo sapiens
  misc_RNA (1)...(19): siRNA sense strand
gucccuugcuggucuuguu

SEQ ID NO: 1229984 - RNA, 19 nt, Homo sapiens
  misc_RNA (1)...(19): siRNA sense strand
gcaucguggagcacucaua

SEQ ID NO: 1229985 - RNA, 19 nt, Homo sapiens
  misc_RNA (1)...(19): siRNA sense strand
uggaagugguggucaagca

SEQ ID NO: 1229986 - RNA, 19 nt, Homo sapiens
  misc_RNA (1)...(19): siRNA sense strand
caagcagagagaacgauug

SEQ ID NO: 1229987 - RNA, 19 nt, Homo sapiens
  misc_RNA (1)...(19): siRNA sense strand
ucaagcagagagaacgauu

SEQ ID NO: 1229988 - RNA, 19 nt, Homo sapiens
  misc_RNA (1)...(19): siRNA sense strand
ugacugcaaccagcauuga

SEQ ID NO: 1229989 - RNA, 19 nt, Homo sapiens
  misc_RNA (1)...(19): siRNA sense strand
gcuggaggagaaucuaaug

SEQ ID NO: 1229990 - RNA, 19 nt, Homo sapiens
  misc_RNA (1)...(19): siRNA sense strand
cagcauugaccgauugaag

SEQ ID NO: 1229991 - RNA, 19 nt, Homo sapiens
  misc_RNA (1)...(19): siRNA sense strand
gagcacucauacacaucau

SEQ ID NO: 1229992 - RNA, 19 nt, Homo sapiens
  misc_RNA (1)...(19): siRNA sense strand
gguauuuaaggaaguuaug

SEQ ID NO: 1229993 - RNA, 19 nt, Homo sapiens
  misc_RNA (1)...(19): siRNA sense strand
uggucaaccuuguauacga

SEQ ID NO: 1229994 - RNA, 19 nt, Homo sapiens
  misc_RNA (1)...(19): siRNA sense strand
ggagcuggaggagaaucua

SEQ ID NO: 1229995 - RNA, 19 nt, Homo sapiens
  misc_RNA (1)...(19): siRNA sense strand
gcagaaagaugagcaguuu

SEQ ID NO: 1229996 - RNA, 19 nt, Homo sapiens
  misc_RNA (1)...(19): siRNA sense strand
ugaagaagcuuagaacaua

SEQ ID NO: 1229997 - RNA, 19 nt, Homo sapiens
  misc_RNA (1)...(19): siRNA sense strand
gaacauaugcagcuauuga

SEQ ID NO: 1229998 - RNA, 19 nt, Homo sapiens
  misc_RNA (1)...(19): siRNA sense strand
gaagaagcuuagaacauau

SEQ ID NO: 1229999 - RNA, 19 nt, Homo sapiens
  misc_RNA (1)...(19): siRNA sense strand
ugacaucacacccaacuua

SEQ ID NO: 1230000 - RNA, 19 nt, Homo sapiens
  misc_RNA (1)...(19): siRNA sense strand
gaagguauuuaaggaaguu

SEQ ID NO: 1230001 - RNA, 19 nt, Homo sapiens
  misc_RNA (1)...(19): siRNA sense strand
caacuuacuuucccuucuu

SEQ ID NO: 1230002 - RNA, 19 nt, Homo sapiens
  misc_RNA (1)...(19): siRNA sense strand
gauugaagguauuuaagga

SEQ ID NO: 1230003 - RNA, 19 nt, Homo sapiens
  misc_RNA (1)...(19): siRNA sense strand
uaauggagcucacucagau

SEQ ID NO: 1230004 - RNA, 19 nt, Homo sapiens
  misc_RNA (1)...(19): siRNA sense strand
cugaagaggccaccaaaua

SEQ ID NO: 1230005 - RNA, 19 nt, Homo sapiens
  misc_RNA (1)...(19): siRNA sense strand
aagaaacgcuuuacugaag

SEQ ID NO: 1230006 - RNA, 19 nt, Homo sapiens
  misc_RNA (1)...(19): siRNA sense strand
ggacgagucuggcccuuac

SEQ ID NO: 1230007 - RNA, 19 nt, Homo sapiens
  misc_RNA (1)...(19): siRNA sense strand
uagaacauaugcagcuauu

SEQ ID NO: 1230008 - RNA, 19 nt, Homo sapiens
  misc_RNA (1)...(19): siRNA sense strand
gaugagcaguuuagggaau

SEQ ID NO: 1230009 - RNA, 19 nt, Homo sapiens
  misc_RNA (1)...(19): siRNA sense strand
caaccagcauugaccgauu

SEQ ID NO: 1230010 - RNA, 19 nt, Homo sapiens
  misc_RNA (1)...(19): siRNA sense strand
ggagcucacucagaucuau

SEQ ID NO: 1230011 - RNA, 19 nt, Homo sapiens
  misc_RNA (1)...(19): siRNA sense strand
cuacgaagcucugaagaag

SEQ ID NO: 1230012 - RNA, 19 nt, Homo sapiens
  misc_RNA (1)...(19): siRNA sense strand
gaaguuaugcgugacauca

SEQ ID NO: 1230013 - RNA, 19 nt, Homo sapiens
  misc_RNA (1)...(19): siRNA sense strand
ggcagaugcucucuacgaa

SEQ ID NO: 1230014 - RNA, 19 nt, Homo sapiens
  misc_RNA (1)...(19): siRNA sense strand
gaagauccaggaguccaua

SEQ ID NO: 1230015 - RNA, 19 nt, Homo sapiens
  misc_RNA (1)...(19): siRNA sense strand
acgaauaugugcagcagaa

SEQ ID NO: 1230016 - RNA, 19 nt, Homo sapiens
  misc_RNA (1)...(19): siRNA sense strand
agucaaagcacuugcauga

SEQ ID NO: 1230017 - RNA, 19 nt, Homo sapiens
  misc_RNA (1)...(19): siRNA sense strand
ugcaaauccugcugacuaa

SEQ ID NO: 1230018 - RNA, 19 nt, Homo sapiens
  misc_RNA (1)...(19): siRNA sense strand
caaugaagccuggaagaga

SEQ ID NO: 1230019 - RNA, 19 nt, Homo sapiens
  misc_RNA (1)...(19): siRNA sense strand
gcacucauacacaucauca

SEQ ID NO: 1230020 - RNA, 19 nt, Homo sapiens
  misc_RNA (1)...(19): siRNA sense strand
gaaacgcuuuacugaagag

SEQ ID NO: 1230021 - RNA, 19 nt, Homo sapiens
  misc_RNA (1)...(19): siRNA sense strand
gaagaggccaccaaauacu

SEQ ID NO: 1230022 - RNA, 19 nt, Homo sapiens
  misc_RNA (1)...(19): siRNA sense strand
cucaggagcuggaggagaa

SEQ ID NO: 1230023 - RNA, 19 nt, Homo sapiens
  misc_RNA (1)...(19): siRNA sense strand
cugcaaauccugcugacua

SEQ ID NO: 1230024 - RNA, 19 nt, Homo sapiens
  misc_RNA (1)...(19): siRNA sense strand
gauccaggaguccauagaa

SEQ ID NO: 1230025 - RNA, 19 nt, Homo sapiens
  misc_RNA (1)...(19): siRNA sense strand
agaaacgcuuuacugaaga

SEQ ID NO: 1230026 - RNA, 19 nt, Homo sapiens
  misc_RNA (1)...(19): siRNA sense strand
gaagccacacaaaccauug

SEQ ID NO: 1230027 - RNA, 19 nt, Homo sapiens
  misc_RNA (1)...(19): siRNA sense strand
cacagaggcugcaccaucu

SEQ ID NO: 1230028 - RNA, 19 nt, Homo sapiens
  misc_RNA (1)...(19): siRNA sense strand
gagcuggaggagaaucuaa

SEQ ID NO: 1230029 - RNA, 19 nt, Homo sapiens
  misc_RNA (1)...(19): siRNA sense strand
cacaaaccauugggaguga

SEQ ID NO: 1230030 - RNA, 19 nt, Homo sapiens
  misc_RNA (1)...(19): siRNA sense strand
caucacacccaacuuacuu

SEQ ID NO: 1230031 - RNA, 19 nt, Homo sapiens
  misc_RNA (1)...(19): siRNA sense strand
ugaggcagaugcucucuac

SEQ ID NO: 1230032 - RNA, 19 nt, Homo sapiens
  misc_RNA (1)...(19): siRNA sense strand
aaugaagccuggaagagau

SEQ ID NO: 1230033 - RNA, 19 nt, Homo sapiens
  misc_RNA (1)...(19): siRNA sense strand
guggagcacucauacacau

SEQ ID NO: 1230034 - RNA, 19 nt, Homo sapiens
  misc_RNA (1)...(19): siRNA sense strand
ugaagaggccaccaaauac

SEQ ID NO: 1230035 - RNA, 19 nt, Homo sapiens
  misc_RNA (1)...(19): siRNA sense strand
caaauccugcugacuaaca

SEQ ID NO: 1230036 - RNA, 19 nt, Homo sapiens
  misc_RNA (1)...(19): siRNA sense strand
uggcgaaucucagcuggaa

SEQ ID NO: 1230037 - RNA, 19 nt, Homo sapiens
  misc_RNA (1)...(19): siRNA sense strand
gcucugaagaagcuuagaa

SEQ ID NO: 1230038 - RNA, 19 nt, Homo sapiens
  misc_RNA (1)...(19): siRNA sense strand
ggagcacucauacacauca

SEQ ID NO: 1230039 - RNA, 19 nt, Homo sapiens
  misc_RNA (1)...(19): siRNA sense strand
gcugcaccaucuccaaugu

SEQ ID NO: 1230040 - RNA, 19 nt, Homo sapiens
  misc_RNA (1)...(19): siRNA sense strand
agaaagaugagcaguuuag

SEQ ID NO: 1230041 - RNA, 19 nt, Homo sapiens
  misc_RNA (1)...(19): siRNA sense strand
gcaguuuagggaaugguuu

SEQ ID NO: 1230042 - RNA, 19 nt, Homo sapiens
  misc_RNA (1)...(19): siRNA sense strand
ggauguggucaaccuugua

SEQ ID NO: 1230043 - RNA, 19 nt, Homo sapiens
  misc_RNA (1)...(19): siRNA sense strand
gaauaugugcagcagaaag

SEQ ID NO: 1230044 - RNA, 19 nt, Homo sapiens
  misc_RNA (1)...(19): siRNA sense strand
gauguggucaaccuuguau

SEQ ID NO: 1230045 - RNA, 19 nt, Homo sapiens
  misc_RNA (1)...(19): siRNA sense strand
cagaaagaugagcaguuua

SEQ ID NO: 1230046 - RNA, 19 nt, Homo sapiens
  misc_RNA (1)...(19): siRNA sense strand
cgucugaauccaugccaua

SEQ ID NO: 1230047 - RNA, 19 nt, Homo sapiens
  misc_RNA (1)...(19): siRNA sense strand
gcgaaucucagcuggaagu

SEQ ID NO: 1230048 - RNA, 19 nt, Homo sapiens
  misc_RNA (1)...(19): siRNA sense strand
gugaccaccuggcgaaucu

SEQ ID NO: 1230049 - RNA, 19 nt, Homo sapiens
  misc_RNA (1)...(19): siRNA sense strand
auacacaucaucagcagaa

SEQ ID NO: 1230050 - RNA, 19 nt, Homo sapiens
  misc_RNA (1)...(19): siRNA sense strand
gggacgagucuggcccuua

SEQ ID NO: 1230051 - RNA, 19 nt, Homo sapiens
  misc_RNA (1)...(19): siRNA sense strand
cgaagccacacaaaccauu

SEQ ID NO: 1230052 - RNA, 19 nt, Homo sapiens
  misc_RNA (1)...(19): siRNA sense strand
aacuuacuuucccuucuua

SEQ ID NO: 1230053 - RNA, 19 nt, Homo sapiens
  misc_RNA (1)...(19): siRNA sense strand
ccaacuuacuuucccuucu

SEQ ID NO: 1230054 - RNA, 19 nt, Homo sapiens
  misc_RNA (1)...(19): siRNA sense strand
aaccagcauugaccgauug

SEQ ID NO: 1230055 - RNA, 19 nt, Homo sapiens
  misc_RNA (1)...(19): siRNA sense strand
caaaccauugggagugaaa

SEQ ID NO: 1230056 - RNA, 19 nt, Homo sapiens
  misc_RNA (1)...(19): siRNA sense strand
gcauugaccgauugaaggu

SEQ ID NO: 1230057 - RNA, 19 nt, Homo sapiens
  misc_RNA (1)...(19): siRNA sense strand
cuaauggagcucacucaga

SEQ ID NO: 1230058 - RNA, 19 nt, Homo sapiens
  misc_RNA (1)...(19): siRNA sense strand
caucuuccuugcacuggau

SEQ ID NO: 1230059 - RNA, 19 nt, Homo sapiens
  misc_RNA (1)...(19): siRNA sense strand
aaauccugcugacuaacaa

SEQ ID NO: 1230060 - RNA, 19 nt, Homo sapiens
  misc_RNA (1)...(19): siRNA sense strand
gcccagggaugaggcagau

SEQ ID NO: 1230061 - RNA, 19 nt, Homo sapiens
  misc_RNA (1)...(19): siRNA sense strand
ugaagguauuuaaggaagu

SEQ ID NO: 1230062 - RNA, 19 nt, Homo sapiens
  misc_RNA (1)...(19): siRNA sense strand
aauaugugcagcagaaaga

SEQ ID NO: 1230063 - RNA, 19 nt, Homo sapiens
  misc_RNA (1)...(19): siRNA sense strand
gcaucguggagcacucaua

SEQ ID NO: 1230064 - RNA, 19 nt, Homo sapiens
  misc_RNA (1)...(19): siRNA sense strand
gucccuugcuggucuuguu

SEQ ID NO: 1230065 - RNA, 19 nt, Homo sapiens
  misc_RNA (1)...(19): siRNA sense strand
ccuugcaaaugguauugaa

SEQ ID NO: 1230066 - RNA, 19 nt, Homo sapiens
  misc_RNA (1)...(19): siRNA sense strand
uggaagugguggucaagca

SEQ ID NO: 1230067 - RNA, 19 nt, Homo sapiens
  misc_RNA (1)...(19): siRNA sense strand
caagcagagagaacgauug

SEQ ID NO: 1230068 - RNA, 19 nt, Homo sapiens
  misc_RNA (1)...(19): siRNA sense strand
ucaagcagagagaacgauu

SEQ ID NO: 1230069 - RNA, 19 nt, Homo sapiens
  misc_RNA (1)...(19): siRNA sense strand
ccugcugacuaacaaugaa

SEQ ID NO: 1230070 - RNA, 19 nt, Homo sapiens
  misc_RNA (1)...(19): siRNA sense strand
cuuagaacauaugcagcua

SEQ ID NO: 1230071 - RNA, 19 nt, Homo sapiens
  misc_RNA (1)...(19): siRNA sense strand
gcuggaggagaaucuaaug

SEQ ID NO: 1230072 - RNA, 19 nt, Homo sapiens
  misc_RNA (1)...(19): siRNA sense strand
ugacugcaaccagcauuga

SEQ ID NO: 1230073 - RNA, 19 nt, Homo sapiens
  misc_RNA (1)...(19): siRNA sense strand
caaauacuuccgggagaga

SEQ ID NO: 1230074 - RNA, 19 nt, Homo sapiens
  misc_RNA (1)...(19): siRNA sense strand
ggaagauccaggaguccau

SEQ ID NO: 1230075 - RNA, 19 nt, Homo sapiens
  misc_RNA (1)...(19): siRNA sense strand
gguauuuaaggaaguuaug

SEQ ID NO: 1230076 - RNA, 19 nt, Homo sapiens
  misc_RNA (1)...(19): siRNA sense strand
cagcauugaccgauugaag

SEQ ID NO: 1230077 - RNA, 19 nt, Homo sapiens
  misc_RNA (1)...(19): siRNA sense strand
ucuacgaagcucugaagaa

SEQ ID NO: 1230078 - RNA, 19 nt, Homo sapiens
  misc_RNA (1)...(19): siRNA sense strand
gagcacucauacacaucau

SEQ ID NO: 1230079 - RNA, 19 nt, Homo sapiens
  misc_RNA (1)...(19): siRNA sense strand
auccaggaguccauagaaa

SEQ ID NO: 1230080 - RNA, 19 nt, Homo sapiens
  misc_RNA (1)...(19): siRNA sense strand
gaaagaugagcaguuuagg

SEQ ID NO: 1230081 - RNA, 19 nt, Homo sapiens
  misc_RNA (1)...(19): siRNA sense strand
ggagcuggaggagaaucua

SEQ ID NO: 1230082 - RNA, 19 nt, Homo sapiens
  misc_RNA (1)...(19): siRNA sense strand
uggucaaccuuguauacga

SEQ ID NO: 1230083 - RNA, 19 nt, Homo sapiens
  misc_RNA (1)...(19): siRNA sense strand
cugaagaagcuuagaacau

SEQ ID NO: 1230084 - RNA, 19 nt, Homo sapiens
  misc_RNA (1)...(19): siRNA sense strand
uugcaaaugguauugaaga

SEQ ID NO: 1230085 - RNA, 19 nt, Homo sapiens
  misc_RNA (1)...(19): siRNA sense strand
gcagaaagaugagcaguuu

SEQ ID NO: 1230086 - RNA, 19 nt, Homo sapiens
  misc_RNA (1)...(19): siRNA sense strand
ugaagaagcuuagaacaua

SEQ ID NO: 1230087 - RNA, 19 nt, Homo sapiens
  misc_RNA (1)...(19): siRNA sense strand
gaacauaugcagcuauuga

SEQ ID NO: 1230088 - RNA, 19 nt, Homo sapiens
  misc_RNA (1)...(19): siRNA sense strand
gaagaagcuuagaacauau

SEQ ID NO: 1230089 - RNA, 19 nt, Homo sapiens
  misc_RNA (1)...(19): siRNA sense strand
ugacaucacacccaacuua

SEQ ID NO: 1230090 - RNA, 19 nt, Homo sapiens
  misc_RNA (1)...(19): siRNA sense strand
gaagguauuuaaggaaguu

SEQ ID NO: 1230091 - RNA, 19 nt, Homo sapiens
  misc_RNA (1)...(19): siRNA sense strand
caacuuacuuucccuucuu

SEQ ID NO: 1230092 - RNA, 19 nt, Homo sapiens
  misc_RNA (1)...(19): siRNA sense strand
gauugaagguauuuaagga

SEQ ID NO: 1230093 - RNA, 19 nt, Homo sapiens
  misc_RNA (1)...(19): siRNA sense strand
uaauggagcucacucagau

SEQ ID NO: 1230094 - RNA, 19 nt, Homo sapiens
  misc_RNA (1)...(19): siRNA sense strand
cugaagaggccaccaaaua

SEQ ID NO: 1230095 - RNA, 19 nt, Homo sapiens
  misc_RNA (1)...(19): siRNA sense strand
aagaaacgcuuuacugaag

SEQ ID NO: 1230096 - RNA, 19 nt, Homo sapiens
  misc_RNA (1)...(19): siRNA sense strand
ggacgagucuggcccuuac

SEQ ID NO: 1230097 - RNA, 19 nt, Homo sapiens
  misc_RNA (1)...(19): siRNA sense strand
uagaacauaugcagcuauu

SEQ ID NO: 1230098 - RNA, 19 nt, Homo sapiens
  misc_RNA (1)...(19): siRNA sense strand
gaugagcaguuuagggaau

SEQ ID NO: 1230099 - RNA, 19 nt, Homo sapiens
  misc_RNA (1)...(19): siRNA sense strand
caaccagcauugaccgauu

SEQ ID NO: 1230100 - RNA, 19 nt, Homo sapiens
  misc_RNA (1)...(19): siRNA sense strand
ggagcucacucagaucuau

SEQ ID NO: 1230101 - RNA, 19 nt, Homo sapiens
  misc_RNA (1)...(19): siRNA sense strand
cuacgaagcucugaagaag

SEQ ID NO: 1230102 - RNA, 19 nt, Homo sapiens
  misc_RNA (1)...(19): siRNA sense strand
gaaguuaugcgugacauca

SEQ ID NO: 1230103 - RNA, 19 nt, Homo sapiens
  misc_RNA (1)...(19): siRNA sense strand
ggcagaugcucucuacgaa

SEQ ID NO: 1230104 - RNA, 19 nt, Homo sapiens
  misc_RNA (1)...(19): siRNA sense strand
gaagauccaggaguccaua

SEQ ID NO: 1230105 - RNA, 19 nt, Homo sapiens
  misc_RNA (1)...(19): siRNA sense strand
acgaauaugugcagcagaa

SEQ ID NO: 1230106 - RNA, 19 nt, Homo sapiens
  misc_RNA (1)...(19): siRNA sense strand
agucaaagcacuugcauga

SEQ ID NO: 1230107 - RNA, 19 nt, Homo sapiens
  misc_RNA (1)...(19): siRNA sense strand
ugcaaauccugcugacuaa

SEQ ID NO: 1230108 - RNA, 19 nt, Homo sapiens
  misc_RNA (1)...(19): siRNA sense strand
caaugaagccuggaagaga

SEQ ID NO: 1230109 - RNA, 19 nt, Homo sapiens
  misc_RNA (1)...(19): siRNA sense strand
gcacucauacacaucauca

SEQ ID NO: 1230110 - RNA, 19 nt, Homo sapiens
  misc_RNA (1)...(19): siRNA sense strand
gaaacgcuuuacugaagag

SEQ ID NO: 1230111 - RNA, 19 nt, Homo sapiens
  misc_RNA (1)...(19): siRNA sense strand
gaagaggccaccaaauacu

SEQ ID NO: 1230112 - RNA, 19 nt, Homo sapiens
  misc_RNA (1)...(19): siRNA sense strand
cucaggagcuggaggagaa

SEQ ID NO: 1230113 - RNA, 19 nt, Homo sapiens
  misc_RNA (1)...(19): siRNA sense strand
cugcaaauccugcugacua

SEQ ID NO: 1230114 - RNA, 19 nt, Homo sapiens
  misc_RNA (1)...(19): siRNA sense strand
gauccaggaguccauagaa

SEQ ID NO: 1230115 - RNA, 19 nt, Homo sapiens
  misc_RNA (1)...(19): siRNA sense strand
agaaacgcuuuacugaaga

SEQ ID NO: 1230116 - RNA, 19 nt, Homo sapiens
  misc_RNA (1)...(19): siRNA sense strand
gaagccacacaaaccauug

SEQ ID NO: 1230117 - RNA, 19 nt, Homo sapiens
  misc_RNA (1)...(19): siRNA sense strand
cacagaggcugcaccaucu

SEQ ID NO: 1230118 - RNA, 19 nt, Homo sapiens
  misc_RNA (1)...(19): siRNA sense strand
gagcuggaggagaaucuaa

SEQ ID NO: 1230119 - RNA, 19 nt, Homo sapiens
  misc_RNA (1)...(19): siRNA sense strand
cacaaaccauugggaguga

SEQ ID NO: 1230120 - RNA, 19 nt, Homo sapiens
  misc_RNA (1)...(19): siRNA sense strand
caucacacccaacuuacuu

SEQ ID NO: 1230121 - RNA, 19 nt, Homo sapiens
  misc_RNA (1)...(19): siRNA sense strand
ugaggcagaugcucucuac

SEQ ID NO: 1230122 - RNA, 19 nt, Homo sapiens
  misc_RNA (1)...(19): siRNA sense strand
aaugaagccuggaagagau

SEQ ID NO: 1230123 - RNA, 19 nt, Homo sapiens
  misc_RNA (1)...(19): siRNA sense strand
guggagcacucauacacau

SEQ ID NO: 1230124 - RNA, 19 nt, Homo sapiens
  misc_RNA (1)...(19): siRNA sense strand
ugaagaggccaccaaauac

SEQ ID NO: 1230125 - RNA, 19 nt, Homo sapiens
  misc_RNA (1)...(19): siRNA sense strand
caaauccugcugacuaaca

SEQ ID NO: 1230126 - RNA, 19 nt, Homo sapiens
  misc_RNA (1)...(19): siRNA sense strand
uggcgaaucucagcuggaa

SEQ ID NO: 1230127 - RNA, 19 nt, Homo sapiens
  misc_RNA (1)...(19): siRNA sense strand
gcucugaagaagcuuagaa

SEQ ID NO: 1230128 - RNA, 19 nt, Homo sapiens
  misc_RNA (1)...(19): siRNA sense strand
ggagcacucauacacauca

SEQ ID NO: 1230129 - RNA, 19 nt, Homo sapiens
  misc_RNA (1)...(19): siRNA sense strand
gcugcaccaucuccaaugu

SEQ ID NO: 1230130 - RNA, 19 nt, Homo sapiens
  misc_RNA (1)...(19): siRNA sense strand
agaaagaugagcaguuuag

SEQ ID NO: 1230131 - RNA, 19 nt, Homo sapiens
  misc_RNA (1)...(19): siRNA sense strand
gcaguuuagggaaugguuu

SEQ ID NO: 1230132 - RNA, 19 nt, Homo sapiens
  misc_RNA (1)...(19): siRNA sense strand
ggauguggucaaccuugua

SEQ ID NO: 1230133 - RNA, 19 nt, Homo sapiens
  misc_RNA (1)...(19): siRNA sense strand
gaauaugugcagcagaaag

SEQ ID NO: 1230134 - RNA, 19 nt, Homo sapiens
  misc_RNA (1)...(19): siRNA sense strand
gauguggucaaccuuguau

SEQ ID NO: 1230135 - RNA, 19 nt, Homo sapiens
  misc_RNA (1)...(19): siRNA sense strand
cagaaagaugagcaguuua

SEQ ID NO: 1230136 - RNA, 19 nt, Homo sapiens
  misc_RNA (1)...(19): siRNA sense strand
cgucugaauccaugccaua

SEQ ID NO: 1230137 - RNA, 19 nt, Homo sapiens
  misc_RNA (1)...(19): siRNA sense strand
gcgaaucucagcuggaagu

SEQ ID NO: 1230138 - RNA, 19 nt, Homo sapiens
  misc_RNA (1)...(19): siRNA sense strand
gugaccaccuggcgaaucu

SEQ ID NO: 1230139 - RNA, 19 nt, Homo sapiens
  misc_RNA (1)...(19): siRNA sense strand
auacacaucaucagcagaa

SEQ ID NO: 1230140 - RNA, 19 nt, Homo sapiens
  misc_RNA (1)...(19): siRNA sense strand
gggacgagucuggcccuua

SEQ ID NO: 1230141 - RNA, 19 nt, Homo sapiens
  misc_RNA (1)...(19): siRNA sense strand
cgaagccacacaaaccauu

SEQ ID NO: 1230142 - RNA, 19 nt, Homo sapiens
  misc_RNA (1)...(19): siRNA sense strand
aacuuacuuucccuucuua

SEQ ID NO: 1230143 - RNA, 19 nt, Homo sapiens
  misc_RNA (1)...(19): siRNA sense strand
ccaacuuacuuucccuucu

SEQ ID NO: 1230144 - RNA, 19 nt, Homo sapiens
  misc_RNA (1)...(19): siRNA sense strand
aaccagcauugaccgauug

SEQ ID NO: 1230145 - RNA, 19 nt, Homo sapiens
  misc_RNA (1)...(19): siRNA sense strand
caaaccauugggagugaaa

SEQ ID NO: 1230146 - RNA, 19 nt, Homo sapiens
  misc_RNA (1)...(19): siRNA sense strand
gcauugaccgauugaaggu

SEQ ID NO: 1230147 - RNA, 19 nt, Homo sapiens
  misc_RNA (1)...(19): siRNA sense strand
cuaauggagcucacucaga

SEQ ID NO: 1230148 - RNA, 19 nt, Homo sapiens
  misc_RNA (1)...(19): siRNA sense strand
caucuuccuugcacuggau

SEQ ID NO: 1230149 - RNA, 19 nt, Homo sapiens
  misc_RNA (1)...(19): siRNA sense strand
aaauccugcugacuaacaa

SEQ ID NO: 1230150 - RNA, 19 nt, Homo sapiens
  misc_RNA (1)...(19): siRNA sense strand
gcccagggaugaggcagau

SEQ ID NO: 1230151 - RNA, 19 nt, Homo sapiens
  misc_RNA (1)...(19): siRNA sense strand
ugaagguauuuaaggaagu

SEQ ID NO: 1230152 - RNA, 19 nt, Homo sapiens
  misc_RNA (1)...(19): siRNA sense strand
aauaugugcagcagaaaga

SEQ ID NO: 1230153 - RNA, 19 nt, Homo sapiens
  misc_RNA (1)...(19): siRNA sense strand
gcaucguggagcacucaua

SEQ ID NO: 1230154 - RNA, 19 nt, Homo sapiens
  misc_RNA (1)...(19): siRNA sense strand
gucccuugcuggucuuguu

SEQ ID NO: 1230155 - RNA, 19 nt, Homo sapiens
  misc_RNA (1)...(19): siRNA sense strand
ccuugcaaaugguauugaa

SEQ ID NO: 1230156 - RNA, 19 nt, Homo sapiens
  misc_RNA (1)...(19): siRNA sense strand
uggaagugguggucaagca

SEQ ID NO: 1230157 - RNA, 19 nt, Homo sapiens
  misc_RNA (1)...(19): siRNA sense strand
caagcagagagaacgauug

SEQ ID NO: 1230158 - RNA, 19 nt, Homo sapiens
  misc_RNA (1)...(19): siRNA sense strand
ucaagcagagagaacgauu

SEQ ID NO: 1230159 - RNA, 19 nt, Homo sapiens
  misc_RNA (1)...(19): siRNA sense strand
ccugcugacuaacaaugaa

SEQ ID NO: 1230160 - RNA, 19 nt, Homo sapiens
  misc_RNA (1)...(19): siRNA sense strand
cuuagaacauaugcagcua

SEQ ID NO: 1230161 - RNA, 19 nt, Homo sapiens
  misc_RNA (1)...(19): siRNA sense strand
gcuggaggagaaucuaaug

SEQ ID NO: 1230162 - RNA, 19 nt, Homo sapiens
  misc_RNA (1)...(19): siRNA sense strand
ugacugcaaccagcauuga

SEQ ID NO: 1230163 - RNA, 19 nt, Homo sapiens
  misc_RNA (1)...(19): siRNA sense strand
caaauacuuccgggagaga

SEQ ID NO: 1230164 - RNA, 19 nt, Homo sapiens
  misc_RNA (1)...(19): siRNA sense strand
ggaagauccaggaguccau

SEQ ID NO: 1230165 - RNA, 19 nt, Homo sapiens
  misc_RNA (1)...(19): siRNA sense strand
gguauuuaaggaaguuaug

SEQ ID NO: 1230166 - RNA, 19 nt, Homo sapiens
  misc_RNA (1)...(19): siRNA sense strand
cagcauugaccgauugaag

SEQ ID NO: 1230167 - RNA, 19 nt, Homo sapiens
  misc_RNA (1)...(19): siRNA sense strand
ucuacgaagcucugaagaa

SEQ ID NO: 1230168 - RNA, 19 nt, Homo sapiens
  misc_RNA (1)...(19): siRNA sense strand
gagcacucauacacaucau

SEQ ID NO: 1230169 - RNA, 19 nt, Homo sapiens
  misc_RNA (1)...(19): siRNA sense strand
auccaggaguccauagaaa

SEQ ID NO: 1230170 - RNA, 19 nt, Homo sapiens
  misc_RNA (1)...(19): siRNA sense strand
gaaagaugagcaguuuagg

SEQ ID NO: 1230171 - RNA, 19 nt, Homo sapiens
  misc_RNA (1)...(19): siRNA sense strand
ggagcuggaggagaaucua

SEQ ID NO: 1230172 - RNA, 19 nt, Homo sapiens
  misc_RNA (1)...(19): siRNA sense strand
uggucaaccuuguauacga

SEQ ID NO: 1230173 - RNA, 19 nt, Homo sapiens
  misc_RNA (1)...(19): siRNA sense strand
cugaagaagcuuagaacau

SEQ ID NO: 1230174 - RNA, 19 nt, Homo sapiens
  misc_RNA (1)...(19): siRNA sense strand
uugcaaaugguauugaaga

SEQ ID NO: 1230175 - RNA, 19 nt, Homo sapiens
  misc_RNA (1)...(19): siRNA sense strand
gcagaaagaugagcaguuu

SEQ ID NO: 1230176 - RNA, 19 nt, Homo sapiens
  misc_RNA (1)...(19): siRNA sense strand
ugaagaagcuuagaacaua

SEQ ID NO: 1230177 - RNA, 19 nt, Homo sapiens
  misc_RNA (1)...(19): siRNA sense strand
gaacauaugcagcuauuga

SEQ ID NO: 1230178 - RNA, 19 nt, Homo sapiens
  misc_RNA (1)...(19): siRNA sense strand
gaagaagcuuagaacauau

SEQ ID NO: 1230179 - RNA, 19 nt, Homo sapiens
  misc_RNA (1)...(19): siRNA sense strand
ugacaucacacccaacuua

SEQ ID NO: 1230180 - RNA, 19 nt, Homo sapiens
  misc_RNA (1)...(19): siRNA sense strand
gaagguauuuaaggaaguu

SEQ ID NO: 1230181 - RNA, 19 nt, Homo sapiens
  misc_RNA (1)...(19): siRNA sense strand
caacuuacuuucccuucuu

SEQ ID NO: 1230182 - RNA, 19 nt, Homo sapiens
  misc_RNA (1)...(19): siRNA sense strand
gauugaagguauuuaagga

SEQ ID NO: 1230183 - RNA, 19 nt, Homo sapiens
  misc_RNA (1)...(19): siRNA sense strand
uaauggagcucacucagau

SEQ ID NO: 1230184 - RNA, 19 nt, Homo sapiens
  misc_RNA (1)...(19): siRNA sense strand
cugaagaggccaccaaaua

SEQ ID NO: 1230185 - RNA, 19 nt, Homo sapiens
  misc_RNA (1)...(19): siRNA sense strand
aagaaacgcuuuacugaag

SEQ ID NO: 1230186 - RNA, 19 nt, Homo sapiens
  misc_RNA (1)...(19): siRNA sense strand
ggacgagucuggcccuuac

SEQ ID NO: 1230187 - RNA, 19 nt, Homo sapiens
  misc_RNA (1)...(19): siRNA sense strand
uagaacauaugcagcuauu

SEQ ID NO: 1230188 - RNA, 19 nt, Homo sapiens
  misc_RNA (1)...(19): siRNA sense strand
gaugagcaguuuagggaau

SEQ ID NO: 1230189 - RNA, 19 nt, Homo sapiens
  misc_RNA (1)...(19): siRNA sense strand
caaccagcauugaccgauu

SEQ ID NO: 1230190 - RNA, 19 nt, Homo sapiens
  misc_RNA (1)...(19): siRNA sense strand
ggagcucacucagaucuau

SEQ ID NO: 1230191 - RNA, 19 nt, Homo sapiens
  misc_RNA (1)...(19): siRNA sense strand
cuacgaagcucugaagaag

SEQ ID NO: 1230192 - RNA, 19 nt, Homo sapiens
  misc_RNA (1)...(19): siRNA sense strand
gaaguuaugcgugacauca

SEQ ID NO: 1230193 - RNA, 19 nt, Homo sapiens
  misc_RNA (1)...(19): siRNA sense strand
ggcagaugcucucuacgaa

SEQ ID NO: 1230194 - RNA, 19 nt, Homo sapiens
  misc_RNA (1)...(19): siRNA sense strand
gaagauccaggaguccaua

SEQ ID NO: 1230195 - RNA, 19 nt, Homo sapiens
  misc_RNA (1)...(19): siRNA sense strand
acgaauaugugcagcagaa

SEQ ID NO: 1230196 - RNA, 19 nt, Homo sapiens
  misc_RNA (1)...(19): siRNA sense strand
agucaaagcacuugcauga

SEQ ID NO: 1230197 - RNA, 19 nt, Homo sapiens
  misc_RNA (1)...(19): siRNA sense strand
ugcaaauccugcugacuaa

SEQ ID NO: 1230198 - RNA, 19 nt, Homo sapiens
  misc_RNA (1)...(19): siRNA sense strand
caaugaagccuggaagaga

SEQ ID NO: 1230199 - RNA, 19 nt, Homo sapiens
  misc_RNA (1)...(19): siRNA sense strand
gcacucauacacaucauca

SEQ ID NO: 1230200 - RNA, 19 nt, Homo sapiens
  misc_RNA (1)...(19): siRNA sense strand
gaaacgcuuuacugaagag

SEQ ID NO: 1230201 - RNA, 19 nt, Homo sapiens
  misc_RNA (1)...(19): siRNA sense strand
gaagaggccaccaaauacu

SEQ ID NO: 1230202 - RNA, 19 nt, Homo sapiens
  misc_RNA (1)...(19): siRNA sense strand
cucaggagcuggaggagaa

SEQ ID NO: 1230203 - RNA, 19 nt, Homo sapiens
  misc_RNA (1)...(19): siRNA sense strand
cugcaaauccugcugacua

SEQ ID NO: 1230204 - RNA, 19 nt, Homo sapiens
  misc_RNA (1)...(19): siRNA sense strand
gauccaggaguccauagaa

SEQ ID NO: 1230205 - RNA, 19 nt, Homo sapiens
  misc_RNA (1)...(19): siRNA sense strand
agaaacgcuuuacugaaga

SEQ ID NO: 1230206 - RNA, 19 nt, Homo sapiens
  misc_RNA (1)...(19): siRNA sense strand
gaagccacacaaaccauug

SEQ ID NO: 1230207 - RNA, 19 nt, Homo sapiens
  misc_RNA (1)...(19): siRNA sense strand
cacagaggcugcaccaucu

SEQ ID NO: 1230208 - RNA, 19 nt, Homo sapiens
  misc_RNA (1)...(19): siRNA sense strand
gagcuggaggagaaucuaa

SEQ ID NO: 1230209 - RNA, 19 nt, Homo sapiens
  misc_RNA (1)...(19): siRNA sense strand
cacaaaccauugggaguga

SEQ ID NO: 1230210 - RNA, 19 nt, Homo sapiens
  misc_RNA (1)...(19): siRNA sense strand
caucacacccaacuuacuu

SEQ ID NO: 1230211 - RNA, 19 nt, Homo sapiens
  misc_RNA (1)...(19): siRNA sense strand
ugaggcagaugcucucuac

SEQ ID NO: 1230212 - RNA, 19 nt, Homo sapiens
  misc_RNA (1)...(19): siRNA sense strand
aaugaagccuggaagagau

SEQ ID NO: 1230213 - RNA, 19 nt, Homo sapiens
  misc_RNA (1)...(19): siRNA sense strand
guggagcacucauacacau

SEQ ID NO: 1230214 - RNA, 19 nt, Homo sapiens
  misc_RNA (1)...(19): siRNA sense strand
ugaagaggccaccaaauac

SEQ ID NO: 1230215 - RNA, 19 nt, Homo sapiens
  misc_RNA (1)...(19): siRNA sense strand
caaauccugcugacuaaca

SEQ ID NO: 1230216 - RNA, 19 nt, Homo sapiens
  misc_RNA (1)...(19): siRNA sense strand
uggcgaaucucagcuggaa

SEQ ID NO: 1230217 - RNA, 19 nt, Homo sapiens
  misc_RNA (1)...(19): siRNA sense strand
gcucugaagaagcuuagaa

SEQ ID NO: 1230218 - RNA, 19 nt, Homo sapiens
  misc_RNA (1)...(19): siRNA sense strand
ggagcacucauacacauca

SEQ ID NO: 1230219 - RNA, 19 nt, Homo sapiens
  misc_RNA (1)...(19): siRNA sense strand
gcugcaccaucuccaaugu

SEQ ID NO: 1230220 - RNA, 19 nt, Homo sapiens
  misc_RNA (1)...(19): siRNA sense strand
agaaagaugagcaguuuag

SEQ ID NO: 1230221 - RNA, 19 nt, Homo sapiens
  misc_RNA (1)...(19): siRNA sense strand
gcaguuuagggaaugguuu

SEQ ID NO: 1230222 - RNA, 19 nt, Homo sapiens
  misc_RNA (1)...(19): siRNA sense strand
ggauguggucaaccuugua

SEQ ID NO: 1230223 - RNA, 19 nt, Homo sapiens
  misc_RNA (1)...(19): siRNA sense strand
gaauaugugcagcagaaag

SEQ ID NO: 1230224 - RNA, 19 nt, Homo sapiens
  misc_RNA (1)...(19): siRNA sense strand
gauguggucaaccuuguau

SEQ ID NO: 1230225 - RNA, 19 nt, Homo sapiens
  misc_RNA (1)...(19): siRNA sense strand
cagaaagaugagcaguuua

SEQ ID NO: 1230226 - RNA, 19 nt, Homo sapiens
  misc_RNA (1)...(19): siRNA sense strand
cgucugaauccaugccaua

SEQ ID NO: 1230227 - RNA, 19 nt, Homo sapiens
  misc_RNA (1)...(19): siRNA sense strand
gcgaaucucagcuggaagu

SEQ ID NO: 1230228 - RNA, 19 nt, Homo sapiens
  misc_RNA (1)...(19): siRNA sense strand
gugaccaccuggcgaaucu

SEQ ID NO: 1230229 - RNA, 19 nt, Homo sapiens
  misc_RNA (1)...(19): siRNA sense strand
auacacaucaucagcagaa

SEQ ID NO: 1230230 - RNA, 19 nt, Homo sapiens
  misc_RNA (1)...(19): siRNA sense strand
gggacgagucuggcccuua

SEQ ID NO: 1230231 - RNA, 19 nt, Homo sapiens
  misc_RNA (1)...(19): siRNA sense strand
cgaagccacacaaaccauu

SEQ ID NO: 1230232 - RNA, 19 nt, Homo sapiens
  misc_RNA (1)...(19): siRNA sense strand
aacuuacuuucccuucuua

SEQ ID NO: 1230233 - RNA, 19 nt, Homo sapiens
  misc_RNA (1)...(19): siRNA sense strand
ccaacuuacuuucccuucu

SEQ ID NO: 1230234 - RNA, 19 nt, Homo sapiens
  misc_RNA (1)...(19): siRNA sense strand
aaccagcauugaccgauug

SEQ ID NO: 1230235 - RNA, 19 nt, Homo sapiens
  misc_RNA (1)...(19): siRNA sense strand
caaaccauugggagugaaa

SEQ ID NO: 1230236 - RNA, 19 nt, Homo sapiens
  misc_RNA (1)...(19): siRNA sense strand
gcauugaccgauugaaggu

SEQ ID NO: 1230237 - RNA, 19 nt, Homo sapiens
  misc_RNA (1)...(19): siRNA sense strand
cuaauggagcucacucaga

SEQ ID NO: 1230238 - RNA, 19 nt, Homo sapiens
  misc_RNA (1)...(19): siRNA sense strand
caucuuccuugcacuggau

SEQ ID NO: 1230239 - RNA, 19 nt, Homo sapiens
  misc_RNA (1)...(19): siRNA sense strand
aaauccugcugacuaacaa

SEQ ID NO: 1230240 - RNA, 19 nt, Homo sapiens
  misc_RNA (1)...(19): siRNA sense strand
gcccagggaugaggcagau

SEQ ID NO: 1230241 - RNA, 19 nt, Homo sapiens
  misc_RNA (1)...(19): siRNA sense strand
ugaagguauuuaaggaagu

SEQ ID NO: 1230242 - RNA, 19 nt, Homo sapiens
  misc_RNA (1)...(19): siRNA sense strand
aauaugugcagcagaaaga

SEQ ID NO: 1230243 - RNA, 19 nt, Homo sapiens
  misc_RNA (1)...(19): siRNA sense strand
gcaucguggagcacucaua

SEQ ID NO: 1230244 - RNA, 19 nt, Homo sapiens
  misc_RNA (1)...(19): siRNA sense strand
gucccuugcuggucuuguu

SEQ ID NO: 1230245 - RNA, 19 nt, Homo sapiens
  misc_RNA (1)...(19): siRNA sense strand
ccuugcaaaugguauugaa

SEQ ID NO: 1230246 - RNA, 19 nt, Homo sapiens
  misc_RNA (1)...(19): siRNA sense strand
uggaagugguggucaagca

SEQ ID NO: 1230247 - RNA, 19 nt, Homo sapiens
  misc_RNA (1)...(19): siRNA sense strand
caagcagagagaacgauug

SEQ ID NO: 1230248 - RNA, 19 nt, Homo sapiens
  misc_RNA (1)...(19): siRNA sense strand
ucaagcagagagaacgauu

SEQ ID NO: 1230249 - RNA, 19 nt, Homo sapiens
  misc_RNA (1)...(19): siRNA sense strand
ccugcugacuaacaaugaa

SEQ ID NO: 1230250 - RNA, 19 nt, Homo sapiens
  misc_RNA (1)...(19): siRNA sense strand
cuuagaacauaugcagcua

SEQ ID NO: 1230251 - RNA, 19 nt, Homo sapiens
  misc_RNA (1)...(19): siRNA sense strand
gcuggaggagaaucuaaug

SEQ ID NO: 1230252 - RNA, 19 nt, Homo sapiens
  misc_RNA (1)...(19): siRNA sense strand
ugacugcaaccagcauuga

SEQ ID NO: 1230253 - RNA, 19 nt, Homo sapiens
  misc_RNA (1)...(19): siRNA sense strand
caaauacuuccgggagaga

SEQ ID NO: 1230254 - RNA, 19 nt, Homo sapiens
  misc_RNA (1)...(19): siRNA sense strand
ggaagauccaggaguccau

SEQ ID NO: 1230255 - RNA, 19 nt, Homo sapiens
  misc_RNA (1)...(19): siRNA sense strand
gguauuuaaggaaguuaug

SEQ ID NO: 1230256 - RNA, 19 nt, Homo sapiens
  misc_RNA (1)...(19): siRNA sense strand
cagcauugaccgauugaag

SEQ ID NO: 1230257 - RNA, 19 nt, Homo sapiens
  misc_RNA (1)...(19): siRNA sense strand
ucuacgaagcucugaagaa

SEQ ID NO: 1230258 - RNA, 19 nt, Homo sapiens
  misc_RNA (1)...(19): siRNA sense strand
gagcacucauacacaucau

SEQ ID NO: 1230259 - RNA, 19 nt, Homo sapiens
  misc_RNA (1)...(19): siRNA sense strand
auccaggaguccauagaaa

SEQ ID NO: 1230260 - RNA, 19 nt, Homo sapiens
  misc_RNA (1)...(19): siRNA sense strand
gaaagaugagcaguuuagg

SEQ ID NO: 1230261 - RNA, 19 nt, Homo sapiens
  misc_RNA (1)...(19): siRNA sense strand
ggagcuggaggagaaucua

SEQ ID NO: 1230262 - RNA, 19 nt, Homo sapiens
  misc_RNA (1)...(19): siRNA sense strand
uggucaaccuuguauacga

SEQ ID NO: 1230263 - RNA, 19 nt, Homo sapiens
  misc_RNA (1)...(19): siRNA sense strand
cugaagaagcuuagaacau

SEQ ID NO: 1230264 - RNA, 19 nt, Homo sapiens
  misc_RNA (1)...(19): siRNA sense strand
uugcaaaugguauugaaga

SEQ ID NO: 1230265 - RNA, 19 nt, Homo sapiens
  misc_RNA (1)...(19): siRNA sense strand
gaacgugucugguuauuau

SEQ ID NO: 1230266 - RNA, 19 nt, Homo sapiens
  misc_RNA (1)...(19): siRNA sense strand
gcagaaagaugagcaguuu

SEQ ID NO: 1230267 - RNA, 19 nt, Homo sapiens
  misc_RNA (1)...(19): siRNA sense strand
ugaagaagcuuagaacaua

SEQ ID NO: 1230268 - RNA, 19 nt, Homo sapiens
  misc_RNA (1)...(19): siRNA sense strand
gaacauaugcagcuauuga

SEQ ID NO: 1230269 - RNA, 19 nt, Homo sapiens
  misc_RNA (1)...(19): siRNA sense strand
gaagaagcuuagaacauau

SEQ ID NO: 1230270 - RNA, 19 nt, Homo sapiens
  misc_RNA (1)...(19): siRNA sense strand
ugacaucacacccaacuua

SEQ ID NO: 1230271 - RNA, 19 nt, Homo sapiens
  misc_RNA (1)...(19): siRNA sense strand
gaagguauuuaaggaaguu

SEQ ID NO: 1230272 - RNA, 19 nt, Homo sapiens
  misc_RNA (1)...(19): siRNA sense strand
caacuuacuuucccuucuu

SEQ ID NO: 1230273 - RNA, 19 nt, Homo sapiens
  misc_RNA (1)...(19): siRNA sense strand
gauugaagguauuuaagga

SEQ ID NO: 1230274 - RNA, 19 nt, Homo sapiens
  misc_RNA (1)...(19): siRNA sense strand
uaauggagcucacucagau

SEQ ID NO: 1230275 - RNA, 19 nt, Homo sapiens
  misc_RNA (1)...(19): siRNA sense strand
uggagaacgugucugguua

SEQ ID NO: 1230276 - RNA, 19 nt, Homo sapiens
  misc_RNA (1)...(19): siRNA sense strand
cugaagaggccaccaaaua

SEQ ID NO: 1230277 - RNA, 19 nt, Homo sapiens
  misc_RNA (1)...(19): siRNA sense strand
aagaaacgcuuuacugaag

SEQ ID NO: 1230278 - RNA, 19 nt, Homo sapiens
  misc_RNA (1)...(19): siRNA sense strand
ggacgagucuggcccuuac

SEQ ID NO: 1230279 - RNA, 19 nt, Homo sapiens
  misc_RNA (1)...(19): siRNA sense strand
uagaacauaugcagcuauu

SEQ ID NO: 1230280 - RNA, 19 nt, Homo sapiens
  misc_RNA (1)...(19): siRNA sense strand
gaugagcaguuuagggaau

SEQ ID NO: 1230281 - RNA, 19 nt, Homo sapiens
  misc_RNA (1)...(19): siRNA sense strand
caaccagcauugaccgauu

SEQ ID NO: 1230282 - RNA, 19 nt, Homo sapiens
  misc_RNA (1)...(19): siRNA sense strand
gagaacgugucugguuauu

SEQ ID NO: 1230283 - RNA, 19 nt, Homo sapiens
  misc_RNA (1)...(19): siRNA sense strand
ggagcucacucagaucuau

SEQ ID NO: 1230284 - RNA, 19 nt, Homo sapiens
  misc_RNA (1)...(19): siRNA sense strand
cuacgaagcucugaagaag

SEQ ID NO: 1230285 - RNA, 19 nt, Homo sapiens
  misc_RNA (1)...(19): siRNA sense strand
gaaguuaugcgugacauca

SEQ ID NO: 1230286 - RNA, 19 nt, Homo sapiens
  misc_RNA (1)...(19): siRNA sense strand
ggcagaugcucucuacgaa

SEQ ID NO: 1230287 - RNA, 19 nt, Homo sapiens
  misc_RNA (1)...(19): siRNA sense strand
gaagauccaggaguccaua

SEQ ID NO: 1230288 - RNA, 19 nt, Homo sapiens
  misc_RNA (1)...(19): siRNA sense strand
acgaauaugugcagcagaa

SEQ ID NO: 1230289 - RNA, 19 nt, Homo sapiens
  misc_RNA (1)...(19): siRNA sense strand
agucaaagcacuugcauga

SEQ ID NO: 1230290 - RNA, 19 nt, Homo sapiens
  misc_RNA (1)...(19): siRNA sense strand
ugcaaauccugcugacuaa

SEQ ID NO: 1230291 - RNA, 19 nt, Homo sapiens
  misc_RNA (1)...(19): siRNA sense strand
caaugaagccuggaagaga

SEQ ID NO: 1230292 - RNA, 19 nt, Homo sapiens
  misc_RNA (1)...(19): siRNA sense strand
gcacucauacacaucauca

SEQ ID NO: 1230293 - RNA, 19 nt, Homo sapiens
  misc_RNA (1)...(19): siRNA sense strand
gaaacgcuuuacugaagag

SEQ ID NO: 1230294 - RNA, 19 nt, Homo sapiens
  misc_RNA (1)...(19): siRNA sense strand
gaagaggccaccaaauacu

SEQ ID NO: 1230295 - RNA, 19 nt, Homo sapiens
  misc_RNA (1)...(19): siRNA sense strand
cucaggagcuggaggagaa

SEQ ID NO: 1230296 - RNA, 19 nt, Homo sapiens
  misc_RNA (1)...(19): siRNA sense strand
cugcaaauccugcugacua

SEQ ID NO: 1230297 - RNA, 19 nt, Homo sapiens
  misc_RNA (1)...(19): siRNA sense strand
ggagaacgugucugguuau

SEQ ID NO: 1230298 - RNA, 19 nt, Homo sapiens
  misc_RNA (1)...(19): siRNA sense strand
gauccaggaguccauagaa

SEQ ID NO: 1230299 - RNA, 19 nt, Homo sapiens
  misc_RNA (1)...(19): siRNA sense strand
agaaacgcuuuacugaaga

SEQ ID NO: 1230300 - RNA, 19 nt, Homo sapiens
  misc_RNA (1)...(19): siRNA sense strand
gaagccacacaaaccauug

SEQ ID NO: 1230301 - RNA, 19 nt, Homo sapiens
  misc_RNA (1)...(19): siRNA sense strand
gcucagaacagcuggaucu

SEQ ID NO: 1230302 - RNA, 19 nt, Homo sapiens
  misc_RNA (1)...(19): siRNA sense strand
gaucuugcucacacucuuu

SEQ ID NO: 1230303 - RNA, 19 nt, Homo sapiens
  misc_RNA (1)...(19): siRNA sense strand
cacagaggcugcaccaucu

SEQ ID NO: 1230304 - RNA, 19 nt, Homo sapiens
  misc_RNA (1)...(19): siRNA sense strand
gagcuggaggagaaucuaa

SEQ ID NO: 1230305 - RNA, 19 nt, Homo sapiens
  misc_RNA (1)...(19): siRNA sense strand
cacaaaccauugggaguga

SEQ ID NO: 1230306 - RNA, 19 nt, Homo sapiens
  misc_RNA (1)...(19): siRNA sense strand
caucacacccaacuuacuu

SEQ ID NO: 1230307 - RNA, 19 nt, Homo sapiens
  misc_RNA (1)...(19): siRNA sense strand
aaugaagccuggaagagau

SEQ ID NO: 1230308 - RNA, 19 nt, Homo sapiens
  misc_RNA (1)...(19): siRNA sense strand
ggaucuugcucacacucuu

SEQ ID NO: 1230309 - RNA, 19 nt, Homo sapiens
  misc_RNA (1)...(19): siRNA sense strand
ugaggcagaugcucucuac

SEQ ID NO: 1230310 - RNA, 19 nt, Homo sapiens
  misc_RNA (1)...(19): siRNA sense strand
caaauccugcugacuaaca

SEQ ID NO: 1230311 - RNA, 19 nt, Homo sapiens
  misc_RNA (1)...(19): siRNA sense strand
uggcgaaucucagcuggaa

SEQ ID NO: 1230312 - RNA, 19 nt, Homo sapiens
  misc_RNA (1)...(19): siRNA sense strand
guggagcacucauacacau

SEQ ID NO: 1230313 - RNA, 19 nt, Homo sapiens
  misc_RNA (1)...(19): siRNA sense strand
ugaagaggccaccaaauac

SEQ ID NO: 1230314 - RNA, 19 nt, Homo sapiens
  misc_RNA (1)...(19): siRNA sense strand
gcucugaagaagcuuagaa

SEQ ID NO: 1230315 - RNA, 19 nt, Homo sapiens
  misc_RNA (1)...(19): siRNA sense strand
ggagcacucauacacauca

SEQ ID NO: 1230316 - RNA, 19 nt, Homo sapiens
  misc_RNA (1)...(19): siRNA sense strand
gcugcaccaucuccaaugu

SEQ ID NO: 1230317 - RNA, 19 nt, Homo sapiens
  misc_RNA (1)...(19): siRNA sense strand
agaaagaugagcaguuuag

SEQ ID NO: 1230318 - RNA, 19 nt, Homo sapiens
  misc_RNA (1)...(19): siRNA sense strand
gcaguuuagggaaugguuu

SEQ ID NO: 1230319 - RNA, 19 nt, Homo sapiens
  misc_RNA (1)...(19): siRNA sense strand
ggauguggucaaccuugua

SEQ ID NO: 1230320 - RNA, 19 nt, Homo sapiens
  misc_RNA (1)...(19): siRNA sense strand
gaauaugugcagcagaaag

SEQ ID NO: 1230321 - RNA, 19 nt, Homo sapiens
  misc_RNA (1)...(19): siRNA sense strand
gauguggucaaccuuguau

SEQ ID NO: 1230322 - RNA, 19 nt, Homo sapiens
  misc_RNA (1)...(19): siRNA sense strand
cagaaagaugagcaguuua

SEQ ID NO: 1230323 - RNA, 19 nt, Homo sapiens
  misc_RNA (1)...(19): siRNA sense strand
cgucugaauccaugccaua

SEQ ID NO: 1230324 - RNA, 19 nt, Homo sapiens
  misc_RNA (1)...(19): siRNA sense strand
gcgaaucucagcuggaagu

SEQ ID NO: 1230325 - RNA, 19 nt, Homo sapiens
  misc_RNA (1)...(19): siRNA sense strand
gugaccaccuggcgaaucu

SEQ ID NO: 1230326 - RNA, 19 nt, Homo sapiens
  misc_RNA (1)...(19): siRNA sense strand
auacacaucaucagcagaa

SEQ ID NO: 1230327 - RNA, 19 nt, Homo sapiens
  misc_RNA (1)...(19): siRNA sense strand
gggacgagucuggcccuua

SEQ ID NO: 1230328 - RNA, 19 nt, Homo sapiens
  misc_RNA (1)...(19): siRNA sense strand
cgaagccacacaaaccauu

SEQ ID NO: 1230329 - RNA, 19 nt, Homo sapiens
  misc_RNA (1)...(19): siRNA sense strand
aacuuacuuucccuucuua

SEQ ID NO: 1230330 - RNA, 19 nt, Homo sapiens
  misc_RNA (1)...(19): siRNA sense strand
ccaacuuacuuucccuucu

SEQ ID NO: 1230331 - RNA, 19 nt, Homo sapiens
  misc_RNA (1)...(19): siRNA sense strand
aaccagcauugaccgauug

SEQ ID NO: 1230332 - RNA, 19 nt, Homo sapiens
  misc_RNA (1)...(19): siRNA sense strand
caaaccauugggagugaaa

SEQ ID NO: 1230333 - RNA, 19 nt, Homo sapiens
  misc_RNA (1)...(19): siRNA sense strand
gcccagggaugaggcagau

SEQ ID NO: 1230334 - RNA, 19 nt, Homo sapiens
  misc_RNA (1)...(19): siRNA sense strand
cuaauggagcucacucaga

SEQ ID NO: 1230335 - RNA, 19 nt, Homo sapiens
  misc_RNA (1)...(19): siRNA sense strand
caucuuccuugcacuggau

SEQ ID NO: 1230336 - RNA, 19 nt, Homo sapiens
  misc_RNA (1)...(19): siRNA sense strand
ugaagguauuuaaggaagu

SEQ ID NO: 1230337 - RNA, 19 nt, Homo sapiens
  misc_RNA (1)...(19): siRNA sense strand
gcauugaccgauugaaggu

SEQ ID NO: 1230338 - RNA, 19 nt, Homo sapiens
  misc_RNA (1)...(19): siRNA sense strand
aaauccugcugacuaacaa

SEQ ID NO: 1230339 - RNA, 19 nt, Homo sapiens
  misc_RNA (1)...(19): siRNA sense strand
aauaugugcagcagaaaga

SEQ ID NO: 1230340 - RNA, 19 nt, Homo sapiens
  misc_RNA (1)...(19): siRNA sense strand
gcaucguggagcacucaua

SEQ ID NO: 1230341 - RNA, 19 nt, Homo sapiens
  misc_RNA (1)...(19): siRNA sense strand
gucccuugcuggucuuguu

SEQ ID NO: 1230342 - RNA, 19 nt, Homo sapiens
  misc_RNA (1)...(19): siRNA sense strand
ccuugcaaaugguauugaa

SEQ ID NO: 1230343 - RNA, 19 nt, Homo sapiens
  misc_RNA (1)...(19): siRNA sense strand
uggaagugguggucaagca

SEQ ID NO: 1230344 - RNA, 19 nt, Homo sapiens
  misc_RNA (1)...(19): siRNA sense strand
caagcagagagaacgauug

SEQ ID NO: 1230345 - RNA, 19 nt, Homo sapiens
  misc_RNA (1)...(19): siRNA sense strand
agaacgugucugguuauua

SEQ ID NO: 1230346 - RNA, 19 nt, Homo sapiens
  misc_RNA (1)...(19): siRNA sense strand
ucaagcagagagaacgauu

SEQ ID NO: 1230347 - RNA, 19 nt, Homo sapiens
  misc_RNA (1)...(19): siRNA sense strand
ccugcugacuaacaaugaa

SEQ ID NO: 1230348 - RNA, 19 nt, Homo sapiens
  misc_RNA (1)...(19): siRNA sense strand
cuuagaacauaugcagcua

SEQ ID NO: 1230349 - RNA, 19 nt, Homo sapiens
  misc_RNA (1)...(19): siRNA sense strand
gcuggaggagaaucuaaug

SEQ ID NO: 1230350 - RNA, 19 nt, Homo sapiens
  misc_RNA (1)...(19): siRNA sense strand
caaauacuuccgggagaga

SEQ ID NO: 1230351 - RNA, 19 nt, Homo sapiens
  misc_RNA (1)...(19): siRNA sense strand
ugacugcaaccagcauuga

SEQ ID NO: 1230352 - RNA, 19 nt, Homo sapiens
  misc_RNA (1)...(19): siRNA sense strand
ucagaacagcuggaucuug

SEQ ID NO: 1230353 - RNA, 19 nt, Homo sapiens
  misc_RNA (1)...(19): siRNA sense strand
ucuacgaagcucugaagaa

SEQ ID NO: 1230354 - RNA, 19 nt, Homo sapiens
  misc_RNA (1)...(19): siRNA sense strand
gguauuuaaggaaguuaug

SEQ ID NO: 1230355 - RNA, 19 nt, Homo sapiens
  misc_RNA (1)...(19): siRNA sense strand
cagcauugaccgauugaag

SEQ ID NO: 1230356 - RNA, 19 nt, Homo sapiens
  misc_RNA (1)...(19): siRNA sense strand
gagcacucauacacaucau

SEQ ID NO: 1230357 - RNA, 19 nt, Homo sapiens
  misc_RNA (1)...(19): siRNA sense strand
auccaggaguccauagaaa

SEQ ID NO: 1230358 - RNA, 19 nt, Homo sapiens
  misc_RNA (1)...(19): siRNA sense strand
ggaagauccaggaguccau

SEQ ID NO: 1230359 - RNA, 19 nt, Homo sapiens
  misc_RNA (1)...(19): siRNA sense strand
gaaagaugagcaguuuagg

SEQ ID NO: 1230360 - RNA, 19 nt, Homo sapiens
  misc_RNA (1)...(19): siRNA sense strand
ggagcuggaggagaaucua

SEQ ID NO: 1230361 - RNA, 19 nt, Homo sapiens
  misc_RNA (1)...(19): siRNA sense strand
uggucaaccuuguauacga

SEQ ID NO: 1230362 - RNA, 19 nt, Homo sapiens
  misc_RNA (1)...(19): siRNA sense strand
uugcaaaugguauugaaga

SEQ ID NO: 1230363 - RNA, 19 nt, Homo sapiens
  misc_RNA (1)...(19): siRNA sense strand
cugaagaagcuuagaacau

SEQ ID NO: 1230364 - RNA, 19 nt, Homo sapiens
  misc_RNA (1)...(19): siRNA sense strand
ugacaucacacccaacuua

SEQ ID NO: 1230365 - RNA, 19 nt, Homo sapiens
  misc_RNA (1)...(19): siRNA sense strand
gaagguauuuaaggaaguu

SEQ ID NO: 1230366 - RNA, 19 nt, Homo sapiens
  misc_RNA (1)...(19): siRNA sense strand
caacuuacuuucccuucuu

SEQ ID NO: 1230367 - RNA, 19 nt, Homo sapiens
  misc_RNA (1)...(19): siRNA sense strand
gauugaagguauuuaagga

SEQ ID NO: 1230368 - RNA, 19 nt, Homo sapiens
  misc_RNA (1)...(19): siRNA sense strand
uaauggagcucacucagau

SEQ ID NO: 1230369 - RNA, 19 nt, Homo sapiens
  misc_RNA (1)...(19): siRNA sense strand
ggacgagucuggcccuuac

SEQ ID NO: 1230370 - RNA, 19 nt, Homo sapiens
  misc_RNA (1)...(19): siRNA sense strand
caaccagcauugaccgauu

SEQ ID NO: 1230371 - RNA, 19 nt, Homo sapiens
  misc_RNA (1)...(19): siRNA sense strand
ggagcucacucagaucuau

SEQ ID NO: 1230372 - RNA, 19 nt, Homo sapiens
  misc_RNA (1)...(19): siRNA sense strand
gaaguuaugcgugacauca

SEQ ID NO: 1230373 - RNA, 19 nt, Homo sapiens
  misc_RNA (1)...(19): siRNA sense strand
agucaaagcacuugcauga

SEQ ID NO: 1230374 - RNA, 19 nt, Homo sapiens
  misc_RNA (1)...(19): siRNA sense strand
gcacucauacacaucauca

SEQ ID NO: 1230375 - RNA, 19 nt, Homo sapiens
  misc_RNA (1)...(19): siRNA sense strand
cucaggagcuggaggagaa

SEQ ID NO: 1230376 - RNA, 19 nt, Homo sapiens
  misc_RNA (1)...(19): siRNA sense strand
gaagccacacaaaccauug

SEQ ID NO: 1230377 - RNA, 19 nt, Homo sapiens
  misc_RNA (1)...(19): siRNA sense strand
caucacacccaacuuacuu

SEQ ID NO: 1230378 - RNA, 19 nt, Homo sapiens
  misc_RNA (1)...(19): siRNA sense strand
gagcuggaggagaaucuaa

SEQ ID NO: 1230379 - RNA, 19 nt, Homo sapiens
  misc_RNA (1)...(19): siRNA sense strand
cacaaaccauugggaguga

SEQ ID NO: 1230380 - RNA, 19 nt, Homo sapiens
  misc_RNA (1)...(19): siRNA sense strand
guggagcacucauacacau

SEQ ID NO: 1230381 - RNA, 19 nt, Homo sapiens
  misc_RNA (1)...(19): siRNA sense strand
uggcgaaucucagcuggaa

SEQ ID NO: 1230382 - RNA, 19 nt, Homo sapiens
  misc_RNA (1)...(19): siRNA sense strand
ggagcacucauacacauca

SEQ ID NO: 1230383 - RNA, 19 nt, Homo sapiens
  misc_RNA (1)...(19): siRNA sense strand
ggauguggucaaccuugua

SEQ ID NO: 1230384 - RNA, 19 nt, Homo sapiens
  misc_RNA (1)...(19): siRNA sense strand
gauguggucaaccuuguau

SEQ ID NO: 1230385 - RNA, 19 nt, Homo sapiens
  misc_RNA (1)...(19): siRNA sense strand
gugaccaccuggcgaaucu

SEQ ID NO: 1230386 - RNA, 19 nt, Homo sapiens
  misc_RNA (1)...(19): siRNA sense strand
cgucugaauccaugccaua

SEQ ID NO: 1230387 - RNA, 19 nt, Homo sapiens
  misc_RNA (1)...(19): siRNA sense strand
gcgaaucucagcuggaagu

SEQ ID NO: 1230388 - RNA, 19 nt, Homo sapiens
  misc_RNA (1)...(19): siRNA sense strand
auacacaucaucagcagaa

SEQ ID NO: 1230389 - RNA, 19 nt, Homo sapiens
  misc_RNA (1)...(19): siRNA sense strand
aaccagcauugaccgauug

SEQ ID NO: 1230390 - RNA, 19 nt, Homo sapiens
  misc_RNA (1)...(19): siRNA sense strand
gggacgagucuggcccuua

SEQ ID NO: 1230391 - RNA, 19 nt, Homo sapiens
  misc_RNA (1)...(19): siRNA sense strand
cgaagccacacaaaccauu

SEQ ID NO: 1230392 - RNA, 19 nt, Homo sapiens
  misc_RNA (1)...(19): siRNA sense strand
aacuuacuuucccuucuua

SEQ ID NO: 1230393 - RNA, 19 nt, Homo sapiens
  misc_RNA (1)...(19): siRNA sense strand
ccaacuuacuuucccuucu

SEQ ID NO: 1230394 - RNA, 19 nt, Homo sapiens
  misc_RNA (1)...(19): siRNA sense strand
caaaccauugggagugaaa

SEQ ID NO: 1230395 - RNA, 19 nt, Homo sapiens
  misc_RNA (1)...(19): siRNA sense strand
gcauugaccgauugaaggu

SEQ ID NO: 1230396 - RNA, 19 nt, Homo sapiens
  misc_RNA (1)...(19): siRNA sense strand
cuaauggagcucacucaga

SEQ ID NO: 1230397 - RNA, 19 nt, Homo sapiens
  misc_RNA (1)...(19): siRNA sense strand
caucuuccuugcacuggau

SEQ ID NO: 1230398 - RNA, 19 nt, Homo sapiens
  misc_RNA (1)...(19): siRNA sense strand
ugaagguauuuaaggaagu

SEQ ID NO: 1230399 - RNA, 19 nt, Homo sapiens
  misc_RNA (1)...(19): siRNA sense strand
gucccuugcuggucuuguu

SEQ ID NO: 1230400 - RNA, 19 nt, Homo sapiens
  misc_RNA (1)...(19): siRNA sense strand
gcaucguggagcacucaua

SEQ ID NO: 1230401 - RNA, 19 nt, Homo sapiens
  misc_RNA (1)...(19): siRNA sense strand
uggaagugguggucaagca

SEQ ID NO: 1230402 - RNA, 19 nt, Homo sapiens
  misc_RNA (1)...(19): siRNA sense strand
caagcagagagaacgauug

SEQ ID NO: 1230403 - RNA, 19 nt, Homo sapiens
  misc_RNA (1)...(19): siRNA sense strand
ucaagcagagagaacgauu

SEQ ID NO: 1230404 - RNA, 19 nt, Homo sapiens
  misc_RNA (1)...(19): siRNA sense strand
ugacugcaaccagcauuga

SEQ ID NO: 1230405 - RNA, 19 nt, Homo sapiens
  misc_RNA (1)...(19): siRNA sense strand
gcuggaggagaaucuaaug

SEQ ID NO: 1230406 - RNA, 19 nt, Homo sapiens
  misc_RNA (1)...(19): siRNA sense strand
cagcauugaccgauugaag

SEQ ID NO: 1230407 - RNA, 19 nt, Homo sapiens
  misc_RNA (1)...(19): siRNA sense strand
gagcacucauacacaucau

SEQ ID NO: 1230408 - RNA, 19 nt, Homo sapiens
  misc_RNA (1)...(19): siRNA sense strand
gguauuuaaggaaguuaug

SEQ ID NO: 1230409 - RNA, 19 nt, Homo sapiens
  misc_RNA (1)...(19): siRNA sense strand
uggucaaccuuguauacga

SEQ ID NO: 1230410 - RNA, 19 nt, Homo sapiens
  misc_RNA (1)...(19): siRNA sense strand
ggagcuggaggagaaucua

SEQ ID NO: 1230411 - RNA, 19 nt, Homo sapiens
  misc_RNA (1)...(19): siRNA sense strand
ugacaucacacccaacuua

SEQ ID NO: 1230412 - RNA, 19 nt, Homo sapiens
  misc_RNA (1)...(19): siRNA sense strand
gaagguauuuaaggaaguu

SEQ ID NO: 1230413 - RNA, 19 nt, Homo sapiens
  misc_RNA (1)...(19): siRNA sense strand
caacuuacuuucccuucuu

SEQ ID NO: 1230414 - RNA, 19 nt, Homo sapiens
  misc_RNA (1)...(19): siRNA sense strand
gauugaagguauuuaagga

SEQ ID NO: 1230415 - RNA, 19 nt, Homo sapiens
  misc_RNA (1)...(19): siRNA sense strand
uaauggagcucacucagau

SEQ ID NO: 1230416 - RNA, 19 nt, Homo sapiens
  misc_RNA (1)...(19): siRNA sense strand
ggacgagucuggcccuuac

SEQ ID NO: 1230417 - RNA, 19 nt, Homo sapiens
  misc_RNA (1)...(19): siRNA sense strand
caaccagcauugaccgauu

SEQ ID NO: 1230418 - RNA, 19 nt, Homo sapiens
  misc_RNA (1)...(19): siRNA sense strand
ggagcucacucagaucuau

SEQ ID NO: 1230419 - RNA, 19 nt, Homo sapiens
  misc_RNA (1)...(19): siRNA sense strand
gaaguuaugcgugacauca

SEQ ID NO: 1230420 - RNA, 19 nt, Homo sapiens
  misc_RNA (1)...(19): siRNA sense strand
agucaaagcacuugcauga

SEQ ID NO: 1230421 - RNA, 19 nt, Homo sapiens
  misc_RNA (1)...(19): siRNA sense strand
gcacucauacacaucauca

SEQ ID NO: 1230422 - RNA, 19 nt, Homo sapiens
  misc_RNA (1)...(19): siRNA sense strand
cucaggagcuggaggagaa

SEQ ID NO: 1230423 - RNA, 19 nt, Homo sapiens
  misc_RNA (1)...(19): siRNA sense strand
gaagccacacaaaccauug

SEQ ID NO: 1230424 - RNA, 19 nt, Homo sapiens
  misc_RNA (1)...(19): siRNA sense strand
caucacacccaacuuacuu

SEQ ID NO: 1230425 - RNA, 19 nt, Homo sapiens
  misc_RNA (1)...(19): siRNA sense strand
gagcuggaggagaaucuaa

SEQ ID NO: 1230426 - RNA, 19 nt, Homo sapiens
  misc_RNA (1)...(19): siRNA sense strand
cacaaaccauugggaguga

SEQ ID NO: 1230427 - RNA, 19 nt, Homo sapiens
  misc_RNA (1)...(19): siRNA sense strand
guggagcacucauacacau

SEQ ID NO: 1230428 - RNA, 19 nt, Homo sapiens
  misc_RNA (1)...(19): siRNA sense strand
uggcgaaucucagcuggaa

SEQ ID NO: 1230429 - RNA, 19 nt, Homo sapiens
  misc_RNA (1)...(19): siRNA sense strand
ggagcacucauacacauca

SEQ ID NO: 1230430 - RNA, 19 nt, Homo sapiens
  misc_RNA (1)...(19): siRNA sense strand
ggauguggucaaccuugua

SEQ ID NO: 1230431 - RNA, 19 nt, Homo sapiens
  misc_RNA (1)...(19): siRNA sense strand
gauguggucaaccuuguau

SEQ ID NO: 1230432 - RNA, 19 nt, Homo sapiens
  misc_RNA (1)...(19): siRNA sense strand
gugaccaccuggcgaaucu

SEQ ID NO: 1230433 - RNA, 19 nt, Homo sapiens
  misc_RNA (1)...(19): siRNA sense strand
cgucugaauccaugccaua

SEQ ID NO: 1230434 - RNA, 19 nt, Homo sapiens
  misc_RNA (1)...(19): siRNA sense strand
gcgaaucucagcuggaagu

SEQ ID NO: 1230435 - RNA, 19 nt, Homo sapiens
  misc_RNA (1)...(19): siRNA sense strand
auacacaucaucagcagaa

SEQ ID NO: 1230436 - RNA, 19 nt, Homo sapiens
  misc_RNA (1)...(19): siRNA sense strand
aaccagcauugaccgauug

SEQ ID NO: 1230437 - RNA, 19 nt, Homo sapiens
  misc_RNA (1)...(19): siRNA sense strand
gggacgagucuggcccuua

SEQ ID NO: 1230438 - RNA, 19 nt, Homo sapiens
  misc_RNA (1)...(19): siRNA sense strand
cgaagccacacaaaccauu

SEQ ID NO: 1230439 - RNA, 19 nt, Homo sapiens
  misc_RNA (1)...(19): siRNA sense strand
aacuuacuuucccuucuua

SEQ ID NO: 1230440 - RNA, 19 nt, Homo sapiens
  misc_RNA (1)...(19): siRNA sense strand
ccaacuuacuuucccuucu

SEQ ID NO: 1230441 - RNA, 19 nt, Homo sapiens
  misc_RNA (1)...(19): siRNA sense strand
caaaccauugggagugaaa

SEQ ID NO: 1230442 - RNA, 19 nt, Homo sapiens
  misc_RNA (1)...(19): siRNA sense strand
gcauugaccgauugaaggu

SEQ ID NO: 1230443 - RNA, 19 nt, Homo sapiens
  misc_RNA (1)...(19): siRNA sense strand
cuaauggagcucacucaga

SEQ ID NO: 1230444 - RNA, 19 nt, Homo sapiens
  misc_RNA (1)...(19): siRNA sense strand
caucuuccuugcacuggau

SEQ ID NO: 1230445 - RNA, 19 nt, Homo sapiens
  misc_RNA (1)...(19): siRNA sense strand
ugaagguauuuaaggaagu

SEQ ID NO: 1230446 - RNA, 19 nt, Homo sapiens
  misc_RNA (1)...(19): siRNA sense strand
gucccuugcuggucuuguu

SEQ ID NO: 1230447 - RNA, 19 nt, Homo sapiens
  misc_RNA (1)...(19): siRNA sense strand
gcaucguggagcacucaua

SEQ ID NO: 1230448 - RNA, 19 nt, Homo sapiens
  misc_RNA (1)...(19): siRNA sense strand
uggaagugguggucaagca

SEQ ID NO: 1230449 - RNA, 19 nt, Homo sapiens
  misc_RNA (1)...(19): siRNA sense strand
caagcagagagaacgauug

SEQ ID NO: 1230450 - RNA, 19 nt, Homo sapiens
  misc_RNA (1)...(19): siRNA sense strand
ucaagcagagagaacgauu

SEQ ID NO: 1230451 - RNA, 19 nt, Homo sapiens
  misc_RNA (1)...(19): siRNA sense strand
ugacugcaaccagcauuga

SEQ ID NO: 1230452 - RNA, 19 nt, Homo sapiens
  misc_RNA (1)...(19): siRNA sense strand
gcuggaggagaaucuaaug

SEQ ID NO: 1230453 - RNA, 19 nt, Homo sapiens
  misc_RNA (1)...(19): siRNA sense strand
cagcauugaccgauugaag

SEQ ID NO: 1230454 - RNA, 19 nt, Homo sapiens
  misc_RNA (1)...(19): siRNA sense strand
gagcacucauacacaucau

SEQ ID NO: 1230455 - RNA, 19 nt, Homo sapiens
  misc_RNA (1)...(19): siRNA sense strand
gguauuuaaggaaguuaug

SEQ ID NO: 1230456 - RNA, 19 nt, Homo sapiens
  misc_RNA (1)...(19): siRNA sense strand
uggucaaccuuguauacga

SEQ ID NO: 1230457 - RNA, 19 nt, Homo sapiens
  misc_RNA (1)...(19): siRNA sense strand
ggagcuggaggagaaucua

SEQ ID NO: 1230458 - RNA, 19 nt, Homo sapiens
  misc_RNA (1)...(19): siRNA sense strand
gcagaaagaugagcaguuu

SEQ ID NO: 1230459 - RNA, 19 nt, Homo sapiens
  misc_RNA (1)...(19): siRNA sense strand
ugaagaagcuuagaacaua

SEQ ID NO: 1230460 - RNA, 19 nt, Homo sapiens
  misc_RNA (1)...(19): siRNA sense strand
gaacauaugcagcuauuga

SEQ ID NO: 1230461 - RNA, 19 nt, Homo sapiens
  misc_RNA (1)...(19): siRNA sense strand
gaagaagcuuagaacauau

SEQ ID NO: 1230462 - RNA, 19 nt, Homo sapiens
  misc_RNA (1)...(19): siRNA sense strand
ugacaucacacccaacuua

SEQ ID NO: 1230463 - RNA, 19 nt, Homo sapiens
  misc_RNA (1)...(19): siRNA sense strand
gaagguauuuaaggaaguu

SEQ ID NO: 1230464 - RNA, 19 nt, Homo sapiens
  misc_RNA (1)...(19): siRNA sense strand
caacuuacuuucccuucuu

SEQ ID NO: 1230465 - RNA, 19 nt, Homo sapiens
  misc_RNA (1)...(19): siRNA sense strand
gauugaagguauuuaagga

SEQ ID NO: 1230466 - RNA, 19 nt, Homo sapiens
  misc_RNA (1)...(19): siRNA sense strand
uaauggagcucacucagau

SEQ ID NO: 1230467 - RNA, 19 nt, Homo sapiens
  misc_RNA (1)...(19): siRNA sense strand
cugaagaggccaccaaaua

SEQ ID NO: 1230468 - RNA, 19 nt, Homo sapiens
  misc_RNA (1)...(19): siRNA sense strand
aagaaacgcuuuacugaag

SEQ ID NO: 1230469 - RNA, 19 nt, Homo sapiens
  misc_RNA (1)...(19): siRNA sense strand
ggacgagucuggcccuuac

SEQ ID NO: 1230470 - RNA, 19 nt, Homo sapiens
  misc_RNA (1)...(19): siRNA sense strand
uagaacauaugcagcuauu

SEQ ID NO: 1230471 - RNA, 19 nt, Homo sapiens
  misc_RNA (1)...(19): siRNA sense strand
gaugagcaguuuagggaau

SEQ ID NO: 1230472 - RNA, 19 nt, Homo sapiens
  misc_RNA (1)...(19): siRNA sense strand
caaccagcauugaccgauu

SEQ ID NO: 1230473 - RNA, 19 nt, Homo sapiens
  misc_RNA (1)...(19): siRNA sense strand
ggagcucacucagaucuau

SEQ ID NO: 1230474 - RNA, 19 nt, Homo sapiens
  misc_RNA (1)...(19): siRNA sense strand
cuacgaagcucugaagaag

SEQ ID NO: 1230475 - RNA, 19 nt, Homo sapiens
  misc_RNA (1)...(19): siRNA sense strand
gaaguuaugcgugacauca

SEQ ID NO: 1230476 - RNA, 19 nt, Homo sapiens
  misc_RNA (1)...(19): siRNA sense strand
ggcagaugcucucuacgaa

SEQ ID NO: 1230477 - RNA, 19 nt, Homo sapiens
  misc_RNA (1)...(19): siRNA sense strand
gaagauccaggaguccaua

SEQ ID NO: 1230478 - RNA, 19 nt, Homo sapiens
  misc_RNA (1)...(19): siRNA sense strand
acgaauaugugcagcagaa

SEQ ID NO: 1230479 - RNA, 19 nt, Homo sapiens
  misc_RNA (1)...(19): siRNA sense strand
agucaaagcacuugcauga

SEQ ID NO: 1230480 - RNA, 19 nt, Homo sapiens
  misc_RNA (1)...(19): siRNA sense strand
ugcaaauccugcugacuaa

SEQ ID NO: 1230481 - RNA, 19 nt, Homo sapiens
  misc_RNA (1)...(19): siRNA sense strand
caaugaagccuggaagaga

SEQ ID NO: 1230482 - RNA, 19 nt, Homo sapiens
  misc_RNA (1)...(19): siRNA sense strand
gcacucauacacaucauca

SEQ ID NO: 1230483 - RNA, 19 nt, Homo sapiens
  misc_RNA (1)...(19): siRNA sense strand
gaaacgcuuuacugaagag

SEQ ID NO: 1230484 - RNA, 19 nt, Homo sapiens
  misc_RNA (1)...(19): siRNA sense strand
gaagaggccaccaaauacu

SEQ ID NO: 1230485 - RNA, 19 nt, Homo sapiens
  misc_RNA (1)...(19): siRNA sense strand
cucaggagcuggaggagaa

SEQ ID NO: 1230486 - RNA, 19 nt, Homo sapiens
  misc_RNA (1)...(19): siRNA sense strand
cugcaaauccugcugacua

SEQ ID NO: 1230487 - RNA, 19 nt, Homo sapiens
  misc_RNA (1)...(19): siRNA sense strand
gauccaggaguccauagaa

SEQ ID NO: 1230488 - RNA, 19 nt, Homo sapiens
  misc_RNA (1)...(19): siRNA sense strand
agaaacgcuuuacugaaga

SEQ ID NO: 1230489 - RNA, 19 nt, Homo sapiens
  misc_RNA (1)...(19): siRNA sense strand
gaagccacacaaaccauug

SEQ ID NO: 1230490 - RNA, 19 nt, Homo sapiens
  misc_RNA (1)...(19): siRNA sense strand
cacagaggcugcaccaucu

SEQ ID NO: 1230491 - RNA, 19 nt, Homo sapiens
  misc_RNA (1)...(19): siRNA sense strand
gagcuggaggagaaucuaa

SEQ ID NO: 1230492 - RNA, 19 nt, Homo sapiens
  misc_RNA (1)...(19): siRNA sense strand
cacaaaccauugggaguga

SEQ ID NO: 1230493 - RNA, 19 nt, Homo sapiens
  misc_RNA (1)...(19): siRNA sense strand
caucacacccaacuuacuu

SEQ ID NO: 1230494 - RNA, 19 nt, Homo sapiens
  misc_RNA (1)...(19): siRNA sense strand
ugaggcagaugcucucuac

SEQ ID NO: 1230495 - RNA, 19 nt, Homo sapiens
  misc_RNA (1)...(19): siRNA sense strand
aaugaagccuggaagagau

SEQ ID NO: 1230496 - RNA, 19 nt, Homo sapiens
  misc_RNA (1)...(19): siRNA sense strand
guggagcacucauacacau

SEQ ID NO: 1230497 - RNA, 19 nt, Homo sapiens
  misc_RNA (1)...(19): siRNA sense strand
ugaagaggccaccaaauac

SEQ ID NO: 1230498 - RNA, 19 nt, Homo sapiens
  misc_RNA (1)...(19): siRNA sense strand
caaauccugcugacuaaca

SEQ ID NO: 1230499 - RNA, 19 nt, Homo sapiens
  misc_RNA (1)...(19): siRNA sense strand
uggcgaaucucagcuggaa

SEQ ID NO: 1230500 - RNA, 19 nt, Homo sapiens
  misc_RNA (1)...(19): siRNA sense strand
gcucugaagaagcuuagaa

SEQ ID NO: 1230501 - RNA, 19 nt, Homo sapiens
  misc_RNA (1)...(19): siRNA sense strand
ggagcacucauacacauca

SEQ ID NO: 1230502 - RNA, 19 nt, Homo sapiens
  misc_RNA (1)...(19): siRNA sense strand
gcugcaccaucuccaaugu

SEQ ID NO: 1230503 - RNA, 19 nt, Homo sapiens
  misc_RNA (1)...(19): siRNA sense strand
agaaagaugagcaguuuag

SEQ ID NO: 1230504 - RNA, 19 nt, Homo sapiens
  misc_RNA (1)...(19): siRNA sense strand
gcaguuuagggaaugguuu

SEQ ID NO: 1230505 - RNA, 19 nt, Homo sapiens
  misc_RNA (1)...(19): siRNA sense strand
ggauguggucaaccuugua

SEQ ID NO: 1230506 - RNA, 19 nt, Homo sapiens
  misc_RNA (1)...(19): siRNA sense strand
gaauaugugcagcagaaag

SEQ ID NO: 1230507 - RNA, 19 nt, Homo sapiens
  misc_RNA (1)...(19): siRNA sense strand
gauguggucaaccuuguau

SEQ ID NO: 1230508 - RNA, 19 nt, Homo sapiens
  misc_RNA (1)...(19): siRNA sense strand
cagaaagaugagcaguuua

SEQ ID NO: 1230509 - RNA, 19 nt, Homo sapiens
  misc_RNA (1)...(19): siRNA sense strand
cgucugaauccaugccaua

SEQ ID NO: 1230510 - RNA, 19 nt, Homo sapiens
  misc_RNA (1)...(19): siRNA sense strand
gcgaaucucagcuggaagu

SEQ ID NO: 1230511 - RNA, 19 nt, Homo sapiens
  misc_RNA (1)...(19): siRNA sense strand
gugaccaccuggcgaaucu

SEQ ID NO: 1230512 - RNA, 19 nt, Homo sapiens
  misc_RNA (1)...(19): siRNA sense strand
auacacaucaucagcagaa

SEQ ID NO: 1230513 - RNA, 19 nt, Homo sapiens
  misc_RNA (1)...(19): siRNA sense strand
gggacgagucuggcccuua

SEQ ID NO: 1230514 - RNA, 19 nt, Homo sapiens
  misc_RNA (1)...(19): siRNA sense strand
cgaagccacacaaaccauu

SEQ ID NO: 1230515 - RNA, 19 nt, Homo sapiens
  misc_RNA (1)...(19): siRNA sense strand
aacuuacuuucccuucuua

SEQ ID NO: 1230516 - RNA, 19 nt, Homo sapiens
  misc_RNA (1)...(19): siRNA sense strand
ccaacuuacuuucccuucu

SEQ ID NO: 1230517 - RNA, 19 nt, Homo sapiens
  misc_RNA (1)...(19): siRNA sense strand
aaccagcauugaccgauug

SEQ ID NO: 1230518 - RNA, 19 nt, Homo sapiens
  misc_RNA (1)...(19): siRNA sense strand
caaaccauugggagugaaa

SEQ ID NO: 1230519 - RNA, 19 nt, Homo sapiens
  misc_RNA (1)...(19): siRNA sense strand
gcauugaccgauugaaggu

SEQ ID NO: 1230520 - RNA, 19 nt, Homo sapiens
  misc_RNA (1)...(19): siRNA sense strand
cuaauggagcucacucaga

SEQ ID NO: 1230521 - RNA, 19 nt, Homo sapiens
  misc_RNA (1)...(19): siRNA sense strand
caucuuccuugcacuggau

SEQ ID NO: 1230522 - RNA, 19 nt, Homo sapiens
  misc_RNA (1)...(19): siRNA sense strand
aaauccugcugacuaacaa

SEQ ID NO: 1230523 - RNA, 19 nt, Homo sapiens
  misc_RNA (1)...(19): siRNA sense strand
gcccagggaugaggcagau

SEQ ID NO: 1230524 - RNA, 19 nt, Homo sapiens
  misc_RNA (1)...(19): siRNA sense strand
ugaagguauuuaaggaagu

SEQ ID NO: 1230525 - RNA, 19 nt, Homo sapiens
  misc_RNA (1)...(19): siRNA sense strand
aauaugugcagcagaaaga

SEQ ID NO: 1230526 - RNA, 19 nt, Homo sapiens
  misc_RNA (1)...(19): siRNA sense strand
gcaucguggagcacucaua

SEQ ID NO: 1230527 - RNA, 19 nt, Homo sapiens
  misc_RNA (1)...(19): siRNA sense strand
gucccuugcuggucuuguu

SEQ ID NO: 1230528 - RNA, 19 nt, Homo sapiens
  misc_RNA (1)...(19): siRNA sense strand
ccuugcaaaugguauugaa

SEQ ID NO: 1230529 - RNA, 19 nt, Homo sapiens
  misc_RNA (1)...(19): siRNA sense strand
uggaagugguggucaagca

SEQ ID NO: 1230530 - RNA, 19 nt, Homo sapiens
  misc_RNA (1)...(19): siRNA sense strand
caagcagagagaacgauug

SEQ ID NO: 1230531 - RNA, 19 nt, Homo sapiens
  misc_RNA (1)...(19): siRNA sense strand
ucaagcagagagaacgauu

SEQ ID NO: 1230532 - RNA, 19 nt, Homo sapiens
  misc_RNA (1)...(19): siRNA sense strand
ccugcugacuaacaaugaa

SEQ ID NO: 1230533 - RNA, 19 nt, Homo sapiens
  misc_RNA (1)...(19): siRNA sense strand
cuuagaacauaugcagcua

SEQ ID NO: 1230534 - RNA, 19 nt, Homo sapiens
  misc_RNA (1)...(19): siRNA sense strand
gcuggaggagaaucuaaug

SEQ ID NO: 1230535 - RNA, 19 nt, Homo sapiens
  misc_RNA (1)...(19): siRNA sense strand
ugacugcaaccagcauuga

SEQ ID NO: 1230536 - RNA, 19 nt, Homo sapiens
  misc_RNA (1)...(19): siRNA sense strand
caaauacuuccgggagaga

SEQ ID NO: 1230537 - RNA, 19 nt, Homo sapiens
  misc_RNA (1)...(19): siRNA sense strand
ggaagauccaggaguccau

SEQ ID NO: 1230538 - RNA, 19 nt, Homo sapiens
  misc_RNA (1)...(19): siRNA sense strand
gguauuuaaggaaguuaug

SEQ ID NO: 1230539 - RNA, 19 nt, Homo sapiens
  misc_RNA (1)...(19): siRNA sense strand
cagcauugaccgauugaag

SEQ ID NO: 1230540 - RNA, 19 nt, Homo sapiens
  misc_RNA (1)...(19): siRNA sense strand
ucuacgaagcucugaagaa

SEQ ID NO: 1230541 - RNA, 19 nt, Homo sapiens
  misc_RNA (1)...(19): siRNA sense strand
gagcacucauacacaucau

SEQ ID NO: 1230542 - RNA, 19 nt, Homo sapiens
  misc_RNA (1)...(19): siRNA sense strand
auccaggaguccauagaaa

SEQ ID NO: 1230543 - RNA, 19 nt, Homo sapiens
  misc_RNA (1)...(19): siRNA sense strand
gaaagaugagcaguuuagg

SEQ ID NO: 1230544 - RNA, 19 nt, Homo sapiens
  misc_RNA (1)...(19): siRNA sense strand
ggagcuggaggagaaucua

SEQ ID NO: 1230545 - RNA, 19 nt, Homo sapiens
  misc_RNA (1)...(19): siRNA sense strand
uggucaaccuuguauacga

SEQ ID NO: 1230546 - RNA, 19 nt, Homo sapiens
  misc_RNA (1)...(19): siRNA sense strand
cugaagaagcuuagaacau

SEQ ID NO: 1230547 - RNA, 19 nt, Homo sapiens
  misc_RNA (1)...(19): siRNA sense strand
uugcaaaugguauugaaga

SEQ ID NO: 1230548 - RNA, 19 nt, Homo sapiens
  misc_RNA (1)...(19): siRNA sense strand
gcagaaagaugagcaguuu

SEQ ID NO: 1230549 - RNA, 19 nt, Homo sapiens
  misc_RNA (1)...(19): siRNA sense strand
ugaagaagcuuagaacaua

SEQ ID NO: 1230550 - RNA, 19 nt, Homo sapiens
  misc_RNA (1)...(19): siRNA sense strand
gaacauaugcagcuauuga

SEQ ID NO: 1230551 - RNA, 19 nt, Homo sapiens
  misc_RNA (1)...(19): siRNA sense strand
gaagaagcuuagaacauau

SEQ ID NO: 1230552 - RNA, 19 nt, Homo sapiens
  misc_RNA (1)...(19): siRNA sense strand
ugacaucacacccaacuua

SEQ ID NO: 1230553 - RNA, 19 nt, Homo sapiens
  misc_RNA (1)...(19): siRNA sense strand
gaagguauuuaaggaaguu

SEQ ID NO: 1230554 - RNA, 19 nt, Homo sapiens
  misc_RNA (1)...(19): siRNA sense strand
caacuuacuuucccuucuu

SEQ ID NO: 1230555 - RNA, 19 nt, Homo sapiens
  misc_RNA (1)...(19): siRNA sense strand
gauugaagguauuuaagga

SEQ ID NO: 1230556 - RNA, 19 nt, Homo sapiens
  misc_RNA (1)...(19): siRNA sense strand
uaauggagcucacucagau

SEQ ID NO: 1230557 - RNA, 19 nt, Homo sapiens
  misc_RNA (1)...(19): siRNA sense strand
cugaagaggccaccaaaua

SEQ ID NO: 1230558 - RNA, 19 nt, Homo sapiens
  misc_RNA (1)...(19): siRNA sense strand
aagaaacgcuuuacugaag

SEQ ID NO: 1230559 - RNA, 19 nt, Homo sapiens
  misc_RNA (1)...(19): siRNA sense strand
ggacgagucuggcccuuac

SEQ ID NO: 1230560 - RNA, 19 nt, Homo sapiens
  misc_RNA (1)...(19): siRNA sense strand
uagaacauaugcagcuauu

SEQ ID NO: 1230561 - RNA, 19 nt, Homo sapiens
  misc_RNA (1)...(19): siRNA sense strand
gaugagcaguuuagggaau

SEQ ID NO: 1230562 - RNA, 19 nt, Homo sapiens
  misc_RNA (1)...(19): siRNA sense strand
caaccagcauugaccgauu

SEQ ID NO: 1230563 - RNA, 19 nt, Homo sapiens
  misc_RNA (1)...(19): siRNA sense strand
ggagcucacucagaucuau

SEQ ID NO: 1230564 - RNA, 19 nt, Homo sapiens
  misc_RNA (1)...(19): siRNA sense strand
cuacgaagcucugaagaag

SEQ ID NO: 1230565 - RNA, 19 nt, Homo sapiens
  misc_RNA (1)...(19): siRNA sense strand
gaaguuaugcgugacauca

SEQ ID NO: 1230566 - RNA, 19 nt, Homo sapiens
  misc_RNA (1)...(19): siRNA sense strand
ggcagaugcucucuacgaa

SEQ ID NO: 1230567 - RNA, 19 nt, Homo sapiens
  misc_RNA (1)...(19): siRNA sense strand
gaagauccaggaguccaua

SEQ ID NO: 1230568 - RNA, 19 nt, Homo sapiens
  misc_RNA (1)...(19): siRNA sense strand
acgaauaugugcagcagaa

SEQ ID NO: 1230569 - RNA, 19 nt, Homo sapiens
  misc_RNA (1)...(19): siRNA sense strand
agucaaagcacuugcauga

SEQ ID NO: 1230570 - RNA, 19 nt, Homo sapiens
  misc_RNA (1)...(19): siRNA sense strand
ugcaaauccugcugacuaa

SEQ ID NO: 1230571 - RNA, 19 nt, Homo sapiens
  misc_RNA (1)...(19): siRNA sense strand
caaugaagccuggaagaga

SEQ ID NO: 1230572 - RNA, 19 nt, Homo sapiens
  misc_RNA (1)...(19): siRNA sense strand
gcacucauacacaucauca

SEQ ID NO: 1230573 - RNA, 19 nt, Homo sapiens
  misc_RNA (1)...(19): siRNA sense strand
gaaacgcuuuacugaagag

SEQ ID NO: 1230574 - RNA, 19 nt, Homo sapiens
  misc_RNA (1)...(19): siRNA sense strand
gaagaggccaccaaauacu

SEQ ID NO: 1230575 - RNA, 19 nt, Homo sapiens
  misc_RNA (1)...(19): siRNA sense strand
cucaggagcuggaggagaa

SEQ ID NO: 1230576 - RNA, 19 nt, Homo sapiens
  misc_RNA (1)...(19): siRNA sense strand
cugcaaauccugcugacua

SEQ ID NO: 1230577 - RNA, 19 nt, Homo sapiens
  misc_RNA (1)...(19): siRNA sense strand
gauccaggaguccauagaa

SEQ ID NO: 1230578 - RNA, 19 nt, Homo sapiens
  misc_RNA (1)...(19): siRNA sense strand
agaaacgcuuuacugaaga

SEQ ID NO: 1230579 - RNA, 19 nt, Homo sapiens
  misc_RNA (1)...(19): siRNA sense strand
gaagccacacaaaccauug

SEQ ID NO: 1230580 - RNA, 19 nt, Homo sapiens
  misc_RNA (1)...(19): siRNA sense strand
cacagaggcugcaccaucu

SEQ ID NO: 1230581 - RNA, 19 nt, Homo sapiens
  misc_RNA (1)...(19): siRNA sense strand
gagcuggaggagaaucuaa

SEQ ID NO: 1230582 - RNA, 19 nt, Homo sapiens
  misc_RNA (1)...(19): siRNA sense strand
cacaaaccauugggaguga

SEQ ID NO: 1230583 - RNA, 19 nt, Homo sapiens
  misc_RNA (1)...(19): siRNA sense strand
caucacacccaacuuacuu

SEQ ID NO: 1230584 - RNA, 19 nt, Homo sapiens
  misc_RNA (1)...(19): siRNA sense strand
ugaggcagaugcucucuac

SEQ ID NO: 1230585 - RNA, 19 nt, Homo sapiens
  misc_RNA (1)...(19): siRNA sense strand
aaugaagccuggaagagau

SEQ ID NO: 1230586 - RNA, 19 nt, Homo sapiens
  misc_RNA (1)...(19): siRNA sense strand
guggagcacucauacacau

SEQ ID NO: 1230587 - RNA, 19 nt, Homo sapiens
  misc_RNA (1)...(19): siRNA sense strand
ugaagaggccaccaaauac

SEQ ID NO: 1230588 - RNA, 19 nt, Homo sapiens
  misc_RNA (1)...(19): siRNA sense strand
caaauccugcugacuaaca

SEQ ID NO: 1230589 - RNA, 19 nt, Homo sapiens
  misc_RNA (1)...(19): siRNA sense strand
uggcgaaucucagcuggaa

SEQ ID NO: 1230590 - RNA, 19 nt, Homo sapiens
  misc_RNA (1)...(19): siRNA sense strand
gcucugaagaagcuuagaa

SEQ ID NO: 1230591 - RNA, 19 nt, Homo sapiens
  misc_RNA (1)...(19): siRNA sense strand
ggagcacucauacacauca

SEQ ID NO: 1230592 - RNA, 19 nt, Homo sapiens
  misc_RNA (1)...(19): siRNA sense strand
gcugcaccaucuccaaugu

SEQ ID NO: 1230593 - RNA, 19 nt, Homo sapiens
  misc_RNA (1)...(19): siRNA sense strand
agaaagaugagcaguuuag

SEQ ID NO: 1230594 - RNA, 19 nt, Homo sapiens
  misc_RNA (1)...(19): siRNA sense strand
gcaguuuagggaaugguuu

SEQ ID NO: 1230595 - RNA, 19 nt, Homo sapiens
  misc_RNA (1)...(19): siRNA sense strand
ggauguggucaaccuugua

SEQ ID NO: 1230596 - RNA, 19 nt, Homo sapiens
  misc_RNA (1)...(19): siRNA sense strand
gaauaugugcagcagaaag

SEQ ID NO: 1230597 - RNA, 19 nt, Homo sapiens
  misc_RNA (1)...(19): siRNA sense strand
gauguggucaaccuuguau

SEQ ID NO: 1230598 - RNA, 19 nt, Homo sapiens
  misc_RNA (1)...(19): siRNA sense strand
cagaaagaugagcaguuua

SEQ ID NO: 1230599 - RNA, 19 nt, Homo sapiens
  misc_RNA (1)...(19): siRNA sense strand
cgucugaauccaugccaua

SEQ ID NO: 1230600 - RNA, 19 nt, Homo sapiens
  misc_RNA (1)...(19): siRNA sense strand
gcgaaucucagcuggaagu

SEQ ID NO: 1230601 - RNA, 19 nt, Homo sapiens
  misc_RNA (1)...(19): siRNA sense strand
gugaccaccuggcgaaucu

SEQ ID NO: 1230602 - RNA, 19 nt, Homo sapiens
  misc_RNA (1)...(19): siRNA sense strand
auacacaucaucagcagaa

SEQ ID NO: 1230603 - RNA, 19 nt, Homo sapiens
  misc_RNA (1)...(19): siRNA sense strand
gggacgagucuggcccuua

SEQ ID NO: 1230604 - RNA, 19 nt, Homo sapiens
  misc_RNA (1)...(19): siRNA sense strand
cgaagccacacaaaccauu

SEQ ID NO: 1230605 - RNA, 19 nt, Homo sapiens
  misc_RNA (1)...(19): siRNA sense strand
aacuuacuuucccuucuua

SEQ ID NO: 1230606 - RNA, 19 nt, Homo sapiens
  misc_RNA (1)...(19): siRNA sense strand
ccaacuuacuuucccuucu

SEQ ID NO: 1230607 - RNA, 19 nt, Homo sapiens
  misc_RNA (1)...(19): siRNA sense strand
aaccagcauugaccgauug

SEQ ID NO: 1230608 - RNA, 19 nt, Homo sapiens
  misc_RNA (1)...(19): siRNA sense strand
caaaccauugggagugaaa

SEQ ID NO: 1230609 - RNA, 19 nt, Homo sapiens
  misc_RNA (1)...(19): siRNA sense strand
gcauugaccgauugaaggu

SEQ ID NO: 1230610 - RNA, 19 nt, Homo sapiens
  misc_RNA (1)...(19): siRNA sense strand
cuaauggagcucacucaga

SEQ ID NO: 1230611 - RNA, 19 nt, Homo sapiens
  misc_RNA (1)...(19): siRNA sense strand
caucuuccuugcacuggau

SEQ ID NO: 1230612 - RNA, 19 nt, Homo sapiens
  misc_RNA (1)...(19): siRNA sense strand
aaauccugcugacuaacaa

SEQ ID NO: 1230613 - RNA, 19 nt, Homo sapiens
  misc_RNA (1)...(19): siRNA sense strand
gcccagggaugaggcagau

SEQ ID NO: 1230614 - RNA, 19 nt, Homo sapiens
  misc_RNA (1)...(19): siRNA sense strand
ugaagguauuuaaggaagu

SEQ ID NO: 1230615 - RNA, 19 nt, Homo sapiens
  misc_RNA (1)...(19): siRNA sense strand
aauaugugcagcagaaaga

SEQ ID NO: 1230616 - RNA, 19 nt, Homo sapiens
  misc_RNA (1)...(19): siRNA sense strand
gcaucguggagcacucaua

SEQ ID NO: 1230617 - RNA, 19 nt, Homo sapiens
  misc_RNA (1)...(19): siRNA sense strand
gucccuugcuggucuuguu

SEQ ID NO: 1230618 - RNA, 19 nt, Homo sapiens
  misc_RNA (1)...(19): siRNA sense strand
ccuugcaaaugguauugaa

SEQ ID NO: 1230619 - RNA, 19 nt, Homo sapiens
  misc_RNA (1)...(19): siRNA sense strand
uggaagugguggucaagca

SEQ ID NO: 1230620 - RNA, 19 nt, Homo sapiens
  misc_RNA (1)...(19): siRNA sense strand
caagcagagagaacgauug

SEQ ID NO: 1230621 - RNA, 19 nt, Homo sapiens
  misc_RNA (1)...(19): siRNA sense strand
ucaagcagagagaacgauu

SEQ ID NO: 1230622 - RNA, 19 nt, Homo sapiens
  misc_RNA (1)...(19): siRNA sense strand
ccugcugacuaacaaugaa

SEQ ID NO: 1230623 - RNA, 19 nt, Homo sapiens
  misc_RNA (1)...(19): siRNA sense strand
cuuagaacauaugcagcua

SEQ ID NO: 1230624 - RNA, 19 nt, Homo sapiens
  misc_RNA (1)...(19): siRNA sense strand
gcuggaggagaaucuaaug

SEQ ID NO: 1230625 - RNA, 19 nt, Homo sapiens
  misc_RNA (1)...(19): siRNA sense strand
ugacugcaaccagcauuga

SEQ ID NO: 1230626 - RNA, 19 nt, Homo sapiens
  misc_RNA (1)...(19): siRNA sense strand
caaauacuuccgggagaga

SEQ ID NO: 1230627 - RNA, 19 nt, Homo sapiens
  misc_RNA (1)...(19): siRNA sense strand
ggaagauccaggaguccau

SEQ ID NO: 1230628 - RNA, 19 nt, Homo sapiens
  misc_RNA (1)...(19): siRNA sense strand
gguauuuaaggaaguuaug

SEQ ID NO: 1230629 - RNA, 19 nt, Homo sapiens
  misc_RNA (1)...(19): siRNA sense strand
cagcauugaccgauugaag

SEQ ID NO: 1230630 - RNA, 19 nt, Homo sapiens
  misc_RNA (1)...(19): siRNA sense strand
ucuacgaagcucugaagaa

SEQ ID NO: 1230631 - RNA, 19 nt, Homo sapiens
  misc_RNA (1)...(19): siRNA sense strand
gagcacucauacacaucau

SEQ ID NO: 1230632 - RNA, 19 nt, Homo sapiens
  misc_RNA (1)...(19): siRNA sense strand
auccaggaguccauagaaa

SEQ ID NO: 1230633 - RNA, 19 nt, Homo sapiens
  misc_RNA (1)...(19): siRNA sense strand
gaaagaugagcaguuuagg

SEQ ID NO: 1230634 - RNA, 19 nt, Homo sapiens
  misc_RNA (1)...(19): siRNA sense strand
ggagcuggaggagaaucua

SEQ ID NO: 1230635 - RNA, 19 nt, Homo sapiens
  misc_RNA (1)...(19): siRNA sense strand
uggucaaccuuguauacga

SEQ ID NO: 1230636 - RNA, 19 nt, Homo sapiens
  misc_RNA (1)...(19): siRNA sense strand
cugaagaagcuuagaacau

SEQ ID NO: 1230637 - RNA, 19 nt, Homo sapiens
  misc_RNA (1)...(19): siRNA sense strand
uugcaaaugguauugaaga

SEQ ID NO: 1230638 - RNA, 19 nt, Homo sapiens
  misc_RNA (1)...(19): siRNA sense strand
gcagaaagaugagcaguuu

SEQ ID NO: 1230639 - RNA, 19 nt, Homo sapiens
  misc_RNA (1)...(19): siRNA sense strand
ugaagaagcuuagaacaua

SEQ ID NO: 1230640 - RNA, 19 nt, Homo sapiens
  misc_RNA (1)...(19): siRNA sense strand
gaacauaugcagcuauuga

SEQ ID NO: 1230641 - RNA, 19 nt, Homo sapiens
  misc_RNA (1)...(19): siRNA sense strand
gaagaagcuuagaacauau

SEQ ID NO: 1230642 - RNA, 19 nt, Homo sapiens
  misc_RNA (1)...(19): siRNA sense strand
ugacaucacacccaacuua

SEQ ID NO: 1230643 - RNA, 19 nt, Homo sapiens
  misc_RNA (1)...(19): siRNA sense strand
gaagguauuuaaggaaguu

SEQ ID NO: 1230644 - RNA, 19 nt, Homo sapiens
  misc_RNA (1)...(19): siRNA sense strand
caacuuacuuucccuucuu

SEQ ID NO: 1230645 - RNA, 19 nt, Homo sapiens
  misc_RNA (1)...(19): siRNA sense strand
gauugaagguauuuaagga

SEQ ID NO: 1230646 - RNA, 19 nt, Homo sapiens
  misc_RNA (1)...(19): siRNA sense strand
uaauggagcucacucagau

SEQ ID NO: 1230647 - RNA, 19 nt, Homo sapiens
  misc_RNA (1)...(19): siRNA sense strand
cugaagaggccaccaaaua

SEQ ID NO: 1230648 - RNA, 19 nt, Homo sapiens
  misc_RNA (1)...(19): siRNA sense strand
aagaaacgcuuuacugaag

SEQ ID NO: 1230649 - RNA, 19 nt, Homo sapiens
  misc_RNA (1)...(19): siRNA sense strand
ggacgagucuggcccuuac

SEQ ID NO: 1230650 - RNA, 19 nt, Homo sapiens
  misc_RNA (1)...(19): siRNA sense strand
uagaacauaugcagcuauu

SEQ ID NO: 1230651 - RNA, 19 nt, Homo sapiens
  misc_RNA (1)...(19): siRNA sense strand
gaugagcaguuuagggaau

SEQ ID NO: 1230652 - RNA, 19 nt, Homo sapiens
  misc_RNA (1)...(19): siRNA sense strand
caaccagcauugaccgauu

SEQ ID NO: 1230653 - RNA, 19 nt, Homo sapiens
  misc_RNA (1)...(19): siRNA sense strand
ggagcucacucagaucuau

SEQ ID NO: 1230654 - RNA, 19 nt, Homo sapiens
  misc_RNA (1)...(19): siRNA sense strand
cuacgaagcucugaagaag

SEQ ID NO: 1230655 - RNA, 19 nt, Homo sapiens
  misc_RNA (1)...(19): siRNA sense strand
gaaguuaugcgugacauca

SEQ ID NO: 1230656 - RNA, 19 nt, Homo sapiens
  misc_RNA (1)...(19): siRNA sense strand
ggcagaugcucucuacgaa

SEQ ID NO: 1230657 - RNA, 19 nt, Homo sapiens
  misc_RNA (1)...(19): siRNA sense strand
gaagauccaggaguccaua

SEQ ID NO: 1230658 - RNA, 19 nt, Homo sapiens
  misc_RNA (1)...(19): siRNA sense strand
acgaauaugugcagcagaa

SEQ ID NO: 1230659 - RNA, 19 nt, Homo sapiens
  misc_RNA (1)...(19): siRNA sense strand
agucaaagcacuugcauga

SEQ ID NO: 1230660 - RNA, 19 nt, Homo sapiens
  misc_RNA (1)...(19): siRNA sense strand
ugcaaauccugcugacuaa

SEQ ID NO: 1230661 - RNA, 19 nt, Homo sapiens
  misc_RNA (1)...(19): siRNA sense strand
caaugaagccuggaagaga

SEQ ID NO: 1230662 - RNA, 19 nt, Homo sapiens
  misc_RNA (1)...(19): siRNA sense strand
gcacucauacacaucauca

SEQ ID NO: 1230663 - RNA, 19 nt, Homo sapiens
  misc_RNA (1)...(19): siRNA sense strand
gaaacgcuuuacugaagag

SEQ ID NO: 1230664 - RNA, 19 nt, Homo sapiens
  misc_RNA (1)...(19): siRNA sense strand
gaagaggccaccaaauacu

SEQ ID NO: 1230665 - RNA, 19 nt, Homo sapiens
  misc_RNA (1)...(19): siRNA sense strand
cucaggagcuggaggagaa

SEQ ID NO: 1230666 - RNA, 19 nt, Homo sapiens
  misc_RNA (1)...(19): siRNA sense strand
cugcaaauccugcugacua

SEQ ID NO: 1230667 - RNA, 19 nt, Homo sapiens
  misc_RNA (1)...(19): siRNA sense strand
gauccaggaguccauagaa

SEQ ID NO: 1230668 - RNA, 19 nt, Homo sapiens
  misc_RNA (1)...(19): siRNA sense strand
agaaacgcuuuacugaaga

SEQ ID NO: 1230669 - RNA, 19 nt, Homo sapiens
  misc_RNA (1)...(19): siRNA sense strand
gaagccacacaaaccauug

SEQ ID NO: 1230670 - RNA, 19 nt, Homo sapiens
  misc_RNA (1)...(19): siRNA sense strand
cacagaggcugcaccaucu

SEQ ID NO: 1230671 - RNA, 19 nt, Homo sapiens
  misc_RNA (1)...(19): siRNA sense strand
gagcuggaggagaaucuaa

SEQ ID NO: 1230672 - RNA, 19 nt, Homo sapiens
  misc_RNA (1)...(19): siRNA sense strand
cacaaaccauugggaguga

SEQ ID NO: 1230673 - RNA, 19 nt, Homo sapiens
  misc_RNA (1)...(19): siRNA sense strand
caucacacccaacuuacuu

SEQ ID NO: 1230674 - RNA, 19 nt, Homo sapiens
  misc_RNA (1)...(19): siRNA sense strand
ugaggcagaugcucucuac

SEQ ID NO: 1230675 - RNA, 19 nt, Homo sapiens
  misc_RNA (1)...(19): siRNA sense strand
aaugaagccuggaagagau

SEQ ID NO: 1230676 - RNA, 19 nt, Homo sapiens
  misc_RNA (1)...(19): siRNA sense strand
guggagcacucauacacau

SEQ ID NO: 1230677 - RNA, 19 nt, Homo sapiens
  misc_RNA (1)...(19): siRNA sense strand
ugaagaggccaccaaauac

SEQ ID NO: 1230678 - RNA, 19 nt, Homo sapiens
  misc_RNA (1)...(19): siRNA sense strand
caaauccugcugacuaaca

SEQ ID NO: 1230679 - RNA, 19 nt, Homo sapiens
  misc_RNA (1)...(19): siRNA sense strand
uggcgaaucucagcuggaa

SEQ ID NO: 1230680 - RNA, 19 nt, Homo sapiens
  misc_RNA (1)...(19): siRNA sense strand
gcucugaagaagcuuagaa

SEQ ID NO: 1230681 - RNA, 19 nt, Homo sapiens
  misc_RNA (1)...(19): siRNA sense strand
ggagcacucauacacauca

SEQ ID NO: 1230682 - RNA, 19 nt, Homo sapiens
  misc_RNA (1)...(19): siRNA sense strand
gcugcaccaucuccaaugu

SEQ ID NO: 1230683 - RNA, 19 nt, Homo sapiens
  misc_RNA (1)...(19): siRNA sense strand
agaaagaugagcaguuuag

SEQ ID NO: 1230684 - RNA, 19 nt, Homo sapiens
  misc_RNA (1)...(19): siRNA sense strand
gcaguuuagggaaugguuu

SEQ ID NO: 1230685 - RNA, 19 nt, Homo sapiens
  misc_RNA (1)...(19): siRNA sense strand
ggauguggucaaccuugua

SEQ ID NO: 1230686 - RNA, 19 nt, Homo sapiens
  misc_RNA (1)...(19): siRNA sense strand
gaauaugugcagcagaaag

SEQ ID NO: 1230687 - RNA, 19 nt, Homo sapiens
  misc_RNA (1)...(19): siRNA sense strand
gauguggucaaccuuguau

SEQ ID NO: 1230688 - RNA, 19 nt, Homo sapiens
  misc_RNA (1)...(19): siRNA sense strand
cagaaagaugagcaguuua

SEQ ID NO: 1230689 - RNA, 19 nt, Homo sapiens
  misc_RNA (1)...(19): siRNA sense strand
cgucugaauccaugccaua

SEQ ID NO: 1230690 - RNA, 19 nt, Homo sapiens
  misc_RNA (1)...(19): siRNA sense strand
gcgaaucucagcuggaagu

SEQ ID NO: 1230691 - RNA, 19 nt, Homo sapiens
  misc_RNA (1)...(19): siRNA sense strand
gugaccaccuggcgaaucu

SEQ ID NO: 1230692 - RNA, 19 nt, Homo sapiens
  misc_RNA (1)...(19): siRNA sense strand
auacacaucaucagcagaa

SEQ ID NO: 1230693 - RNA, 19 nt, Homo sapiens
  misc_RNA (1)...(19): siRNA sense strand
gggacgagucuggcccuua

SEQ ID NO: 1230694 - RNA, 19 nt, Homo sapiens
  misc_RNA (1)...(19): siRNA sense strand
cgaagccacacaaaccauu

SEQ ID NO: 1230695 - RNA, 19 nt, Homo sapiens
  misc_RNA (1)...(19): siRNA sense strand
aacuuacuuucccuucuua

SEQ ID NO: 1230696 - RNA, 19 nt, Homo sapiens
  misc_RNA (1)...(19): siRNA sense strand
ccaacuuacuuucccuucu

SEQ ID NO: 1230697 - RNA, 19 nt, Homo sapiens
  misc_RNA (1)...(19): siRNA sense strand
aaccagcauugaccgauug

SEQ ID NO: 1230698 - RNA, 19 nt, Homo sapiens
  misc_RNA (1)...(19): siRNA sense strand
caaaccauugggagugaaa

SEQ ID NO: 1230699 - RNA, 19 nt, Homo sapiens
  misc_RNA (1)...(19): siRNA sense strand
gcauugaccgauugaaggu

SEQ ID NO: 1230700 - RNA, 19 nt, Homo sapiens
  misc_RNA (1)...(19): siRNA sense strand
cuaauggagcucacucaga

SEQ ID NO: 1230701 - RNA, 19 nt, Homo sapiens
  misc_RNA (1)...(19): siRNA sense strand
caucuuccuugcacuggau

SEQ ID NO: 1230702 - RNA, 19 nt, Homo sapiens
  misc_RNA (1)...(19): siRNA sense strand
aaauccugcugacuaacaa

SEQ ID NO: 1230703 - RNA, 19 nt, Homo sapiens
  misc_RNA (1)...(19): siRNA sense strand
gcccagggaugaggcagau

SEQ ID NO: 1230704 - RNA, 19 nt, Homo sapiens
  misc_RNA (1)...(19): siRNA sense strand
ugaagguauuuaaggaagu

SEQ ID NO: 1230705 - RNA, 19 nt, Homo sapiens
  misc_RNA (1)...(19): siRNA sense strand
aauaugugcagcagaaaga

SEQ ID NO: 1230706 - RNA, 19 nt, Homo sapiens
  misc_RNA (1)...(19): siRNA sense strand
gcaucguggagcacucaua

SEQ ID NO: 1230707 - RNA, 19 nt, Homo sapiens
  misc_RNA (1)...(19): siRNA sense strand
gucccuugcuggucuuguu

SEQ ID NO: 1230708 - RNA, 19 nt, Homo sapiens
  misc_RNA (1)...(19): siRNA sense strand
ccuugcaaaugguauugaa

SEQ ID NO: 1230709 - RNA, 19 nt, Homo sapiens
  misc_RNA (1)...(19): siRNA sense strand
uggaagugguggucaagca

SEQ ID NO: 1230710 - RNA, 19 nt, Homo sapiens
  misc_RNA (1)...(19): siRNA sense strand
caagcagagagaacgauug

SEQ ID NO: 1230711 - RNA, 19 nt, Homo sapiens
  misc_RNA (1)...(19): siRNA sense strand
ucaagcagagagaacgauu

SEQ ID NO: 1230712 - RNA, 19 nt, Homo sapiens
  misc_RNA (1)...(19): siRNA sense strand
ccugcugacuaacaaugaa

SEQ ID NO: 1230713 - RNA, 19 nt, Homo sapiens
  misc_RNA (1)...(19): siRNA sense strand
cuuagaacauaugcagcua

SEQ ID NO: 1230714 - RNA, 19 nt, Homo sapiens
  misc_RNA (1)...(19): siRNA sense strand
gcuggaggagaaucuaaug

SEQ ID NO: 1230715 - RNA, 19 nt, Homo sapiens
  misc_RNA (1)...(19): siRNA sense strand
ugacugcaaccagcauuga

SEQ ID NO: 1230716 - RNA, 19 nt, Homo sapiens
  misc_RNA (1)...(19): siRNA sense strand
caaauacuuccgggagaga

SEQ ID NO: 1230717 - RNA, 19 nt, Homo sapiens
  misc_RNA (1)...(19): siRNA sense strand
ggaagauccaggaguccau

SEQ ID NO: 1230718 - RNA, 19 nt, Homo sapiens
  misc_RNA (1)...(19): siRNA sense strand
gguauuuaaggaaguuaug

SEQ ID NO: 1230719 - RNA, 19 nt, Homo sapiens
  misc_RNA (1)...(19): siRNA sense strand
cagcauugaccgauugaag

SEQ ID NO: 1230720 - RNA, 19 nt, Homo sapiens
  misc_RNA (1)...(19): siRNA sense strand
ucuacgaagcucugaagaa

SEQ ID NO: 1230721 - RNA, 19 nt, Homo sapiens
  misc_RNA (1)...(19): siRNA sense strand
gagcacucauacacaucau

SEQ ID NO: 1230722 - RNA, 19 nt, Homo sapiens
  misc_RNA (1)...(19): siRNA sense strand
auccaggaguccauagaaa

SEQ ID NO: 1230723 - RNA, 19 nt, Homo sapiens
  misc_RNA (1)...(19): siRNA sense strand
gaaagaugagcaguuuagg

SEQ ID NO: 1230724 - RNA, 19 nt, Homo sapiens
  misc_RNA (1)...(19): siRNA sense strand
ggagcuggaggagaaucua

SEQ ID NO: 1230725 - RNA, 19 nt, Homo sapiens
  misc_RNA (1)...(19): siRNA sense strand
uggucaaccuuguauacga

SEQ ID NO: 1230726 - RNA, 19 nt, Homo sapiens
  misc_RNA (1)...(19): siRNA sense strand
cugaagaagcuuagaacau

SEQ ID NO: 1230727 - RNA, 19 nt, Homo sapiens
  misc_RNA (1)...(19): siRNA sense strand
uugcaaaugguauugaaga

SEQ ID NO: 1230728 - RNA, 19 nt, Homo sapiens
  misc_RNA (1)...(19): siRNA sense strand
gaacgugucugguuauuau

SEQ ID NO: 1230729 - RNA, 19 nt, Homo sapiens
  misc_RNA (1)...(19): siRNA sense strand
gcagaaagaugagcaguuu

SEQ ID NO: 1230730 - RNA, 19 nt, Homo sapiens
  misc_RNA (1)...(19): siRNA sense strand
ugaagaagcuuagaacaua

SEQ ID NO: 1230731 - RNA, 19 nt, Homo sapiens
  misc_RNA (1)...(19): siRNA sense strand
gaacauaugcagcuauuga

SEQ ID NO: 1230732 - RNA, 19 nt, Homo sapiens
  misc_RNA (1)...(19): siRNA sense strand
gaagaagcuuagaacauau

SEQ ID NO: 1230733 - RNA, 19 nt, Homo sapiens
  misc_RNA (1)...(19): siRNA sense strand
ugacaucacacccaacuua

SEQ ID NO: 1230734 - RNA, 19 nt, Homo sapiens
  misc_RNA (1)...(19): siRNA sense strand
gaagguauuuaaggaaguu

SEQ ID NO: 1230735 - RNA, 19 nt, Homo sapiens
  misc_RNA (1)...(19): siRNA sense strand
caacuuacuuucccuucuu

SEQ ID NO: 1230736 - RNA, 19 nt, Homo sapiens
  misc_RNA (1)...(19): siRNA sense strand
gauugaagguauuuaagga

SEQ ID NO: 1230737 - RNA, 19 nt, Homo sapiens
  misc_RNA (1)...(19): siRNA sense strand
uaauggagcucacucagau

SEQ ID NO: 1230738 - RNA, 19 nt, Homo sapiens
  misc_RNA (1)...(19): siRNA sense strand
uggagaacgugucugguua

SEQ ID NO: 1230739 - RNA, 19 nt, Homo sapiens
  misc_RNA (1)...(19): siRNA sense strand
cugaagaggccaccaaaua

SEQ ID NO: 1230740 - RNA, 19 nt, Homo sapiens
  misc_RNA (1)...(19): siRNA sense strand
aagaaacgcuuuacugaag

SEQ ID NO: 1230741 - RNA, 19 nt, Homo sapiens
  misc_RNA (1)...(19): siRNA sense strand
ggacgagucuggcccuuac

SEQ ID NO: 1230742 - RNA, 19 nt, Homo sapiens
  misc_RNA (1)...(19): siRNA sense strand
uagaacauaugcagcuauu

SEQ ID NO: 1230743 - RNA, 19 nt, Homo sapiens
  misc_RNA (1)...(19): siRNA sense strand
gaugagcaguuuagggaau

SEQ ID NO: 1230744 - RNA, 19 nt, Homo sapiens
  misc_RNA (1)...(19): siRNA sense strand
caaccagcauugaccgauu

SEQ ID NO: 1230745 - RNA, 19 nt, Homo sapiens
  misc_RNA (1)...(19): siRNA sense strand
gagaacgugucugguuauu

SEQ ID NO: 1230746 - RNA, 19 nt, Homo sapiens
  misc_RNA (1)...(19): siRNA sense strand
ggagcucacucagaucuau

SEQ ID NO: 1230747 - RNA, 19 nt, Homo sapiens
  misc_RNA (1)...(19): siRNA sense strand
cuacgaagcucugaagaag

SEQ ID NO: 1230748 - RNA, 19 nt, Homo sapiens
  misc_RNA (1)...(19): siRNA sense strand
gaaguuaugcgugacauca

SEQ ID NO: 1230749 - RNA, 19 nt, Homo sapiens
  misc_RNA (1)...(19): siRNA sense strand
ggcagaugcucucuacgaa

SEQ ID NO: 1230750 - RNA, 19 nt, Homo sapiens
  misc_RNA (1)...(19): siRNA sense strand
gaagauccaggaguccaua

SEQ ID NO: 1230751 - RNA, 19 nt, Homo sapiens
  misc_RNA (1)...(19): siRNA sense strand
acgaauaugugcagcagaa

SEQ ID NO: 1230752 - RNA, 19 nt, Homo sapiens
  misc_RNA (1)...(19): siRNA sense strand
agucaaagcacuugcauga

SEQ ID NO: 1230753 - RNA, 19 nt, Homo sapiens
  misc_RNA (1)...(19): siRNA sense strand
ugcaaauccugcugacuaa

SEQ ID NO: 1230754 - RNA, 19 nt, Homo sapiens
  misc_RNA (1)...(19): siRNA sense strand
caaugaagccuggaagaga

SEQ ID NO: 1230755 - RNA, 19 nt, Homo sapiens
  misc_RNA (1)...(19): siRNA sense strand
gcacucauacacaucauca

SEQ ID NO: 1230756 - RNA, 19 nt, Homo sapiens
  misc_RNA (1)...(19): siRNA sense strand
gaaacgcuuuacugaagag

SEQ ID NO: 1230757 - RNA, 19 nt, Homo sapiens
  misc_RNA (1)...(19): siRNA sense strand
gaagaggccaccaaauacu

SEQ ID NO: 1230758 - RNA, 19 nt, Homo sapiens
  misc_RNA (1)...(19): siRNA sense strand
cucaggagcuggaggagaa

SEQ ID NO: 1230759 - RNA, 19 nt, Homo sapiens
  misc_RNA (1)...(19): siRNA sense strand
cugcaaauccugcugacua

SEQ ID NO: 1230760 - RNA, 19 nt, Homo sapiens
  misc_RNA (1)...(19): siRNA sense strand
ggagaacgugucugguuau

SEQ ID NO: 1230761 - RNA, 19 nt, Homo sapiens
  misc_RNA (1)...(19): siRNA sense strand
gauccaggaguccauagaa

SEQ ID NO: 1230762 - RNA, 19 nt, Homo sapiens
  misc_RNA (1)...(19): siRNA sense strand
agaaacgcuuuacugaaga

SEQ ID NO: 1230763 - RNA, 19 nt, Homo sapiens
  misc_RNA (1)...(19): siRNA sense strand
gaagccacacaaaccauug

SEQ ID NO: 1230764 - RNA, 19 nt, Homo sapiens
  misc_RNA (1)...(19): siRNA sense strand
gcucagaacagcuggaucu

SEQ ID NO: 1230765 - RNA, 19 nt, Homo sapiens
  misc_RNA (1)...(19): siRNA sense strand
gaucuugcucacacucuuu

SEQ ID NO: 1230766 - RNA, 19 nt, Homo sapiens
  misc_RNA (1)...(19): siRNA sense strand
cacagaggcugcaccaucu

SEQ ID NO: 1230767 - RNA, 19 nt, Homo sapiens
  misc_RNA (1)...(19): siRNA sense strand
gagcuggaggagaaucuaa

SEQ ID NO: 1230768 - RNA, 19 nt, Homo sapiens
  misc_RNA (1)...(19): siRNA sense strand
cacaaaccauugggaguga

SEQ ID NO: 1230769 - RNA, 19 nt, Homo sapiens
  misc_RNA (1)...(19): siRNA sense strand
caucacacccaacuuacuu

SEQ ID NO: 1230770 - RNA, 19 nt, Homo sapiens
  misc_RNA (1)...(19): siRNA sense strand
aaugaagccuggaagagau

SEQ ID NO: 1230771 - RNA, 19 nt, Homo sapiens
  misc_RNA (1)...(19): siRNA sense strand
ggaucuugcucacacucuu

SEQ ID NO: 1230772 - RNA, 19 nt, Homo sapiens
  misc_RNA (1)...(19): siRNA sense strand
ugaggcagaugcucucuac

SEQ ID NO: 1230773 - RNA, 19 nt, Homo sapiens
  misc_RNA (1)...(19): siRNA sense strand
caaauccugcugacuaaca

SEQ ID NO: 1230774 - RNA, 19 nt, Homo sapiens
  misc_RNA (1)...(19): siRNA sense strand
uggcgaaucucagcuggaa

SEQ ID NO: 1230775 - RNA, 19 nt, Homo sapiens
  misc_RNA (1)...(19): siRNA sense strand
guggagcacucauacacau

SEQ ID NO: 1230776 - RNA, 19 nt, Homo sapiens
  misc_RNA (1)...(19): siRNA sense strand
ugaagaggccaccaaauac

SEQ ID NO: 1230777 - RNA, 19 nt, Homo sapiens
  misc_RNA (1)...(19): siRNA sense strand
gcucugaagaagcuuagaa

SEQ ID NO: 1230778 - RNA, 19 nt, Homo sapiens
  misc_RNA (1)...(19): siRNA sense strand
ggagcacucauacacauca

SEQ ID NO: 1230779 - RNA, 19 nt, Homo sapiens
  misc_RNA (1)...(19): siRNA sense strand
gcugcaccaucuccaaugu

SEQ ID NO: 1230780 - RNA, 19 nt, Homo sapiens
  misc_RNA (1)...(19): siRNA sense strand
agaaagaugagcaguuuag

SEQ ID NO: 1230781 - RNA, 19 nt, Homo sapiens
  misc_RNA (1)...(19): siRNA sense strand
gcaguuuagggaaugguuu

SEQ ID NO: 1230782 - RNA, 19 nt, Homo sapiens
  misc_RNA (1)...(19): siRNA sense strand
ggauguggucaaccuugua

SEQ ID NO: 1230783 - RNA, 19 nt, Homo sapiens
  misc_RNA (1)...(19): siRNA sense strand
gaauaugugcagcagaaag

SEQ ID NO: 1230784 - RNA, 19 nt, Homo sapiens
  misc_RNA (1)...(19): siRNA sense strand
gauguggucaaccuuguau

SEQ ID NO: 1230785 - RNA, 19 nt, Homo sapiens
  misc_RNA (1)...(19): siRNA sense strand
cagaaagaugagcaguuua

SEQ ID NO: 1230786 - RNA, 19 nt, Homo sapiens
  misc_RNA (1)...(19): siRNA sense strand
cgucugaauccaugccaua

SEQ ID NO: 1230787 - RNA, 19 nt, Homo sapiens
  misc_RNA (1)...(19): siRNA sense strand
gcgaaucucagcuggaagu

SEQ ID NO: 1230788 - RNA, 19 nt, Homo sapiens
  misc_RNA (1)...(19): siRNA sense strand
gugaccaccuggcgaaucu

SEQ ID NO: 1230789 - RNA, 19 nt, Homo sapiens
  misc_RNA (1)...(19): siRNA sense strand
auacacaucaucagcagaa

SEQ ID NO: 1230790 - RNA, 19 nt, Homo sapiens
  misc_RNA (1)...(19): siRNA sense strand
gggacgagucuggcccuua

SEQ ID NO: 1230791 - RNA, 19 nt, Homo sapiens
  misc_RNA (1)...(19): siRNA sense strand
cgaagccacacaaaccauu

SEQ ID NO: 1230792 - RNA, 19 nt, Homo sapiens
  misc_RNA (1)...(19): siRNA sense strand
aacuuacuuucccuucuua

SEQ ID NO: 1230793 - RNA, 19 nt, Homo sapiens
  misc_RNA (1)...(19): siRNA sense strand
ccaacuuacuuucccuucu

SEQ ID NO: 1230794 - RNA, 19 nt, Homo sapiens
  misc_RNA (1)...(19): siRNA sense strand
aaccagcauugaccgauug

SEQ ID NO: 1230795 - RNA, 19 nt, Homo sapiens
  misc_RNA (1)...(19): siRNA sense strand
caaaccauugggagugaaa

SEQ ID NO: 1230796 - RNA, 19 nt, Homo sapiens
  misc_RNA (1)...(19): siRNA sense strand
gcccagggaugaggcagau

SEQ ID NO: 1230797 - RNA, 19 nt, Homo sapiens
  misc_RNA (1)...(19): siRNA sense strand
cuaauggagcucacucaga

SEQ ID NO: 1230798 - RNA, 19 nt, Homo sapiens
  misc_RNA (1)...(19): siRNA sense strand
caucuuccuugcacuggau

SEQ ID NO: 1230799 - RNA, 19 nt, Homo sapiens
  misc_RNA (1)...(19): siRNA sense strand
ugaagguauuuaaggaagu

SEQ ID NO: 1230800 - RNA, 19 nt, Homo sapiens
  misc_RNA (1)...(19): siRNA sense strand
gcauugaccgauugaaggu

SEQ ID NO: 1230801 - RNA, 19 nt, Homo sapiens
  misc_RNA (1)...(19): siRNA sense strand
aaauccugcugacuaacaa

SEQ ID NO: 1230802 - RNA, 19 nt, Homo sapiens
  misc_RNA (1)...(19): siRNA sense strand
aauaugugcagcagaaaga

SEQ ID NO: 1230803 - RNA, 19 nt, Homo sapiens
  misc_RNA (1)...(19): siRNA sense strand
gcaucguggagcacucaua

SEQ ID NO: 1230804 - RNA, 19 nt, Homo sapiens
  misc_RNA (1)...(19): siRNA sense strand
gucccuugcuggucuuguu

SEQ ID NO: 1230805 - RNA, 19 nt, Homo sapiens
  misc_RNA (1)...(19): siRNA sense strand
ccuugcaaaugguauugaa

SEQ ID NO: 1230806 - RNA, 19 nt, Homo sapiens
  misc_RNA (1)...(19): siRNA sense strand
uggaagugguggucaagca

SEQ ID NO: 1230807 - RNA, 19 nt, Homo sapiens
  misc_RNA (1)...(19): siRNA sense strand
caagcagagagaacgauug

SEQ ID NO: 1230808 - RNA, 19 nt, Homo sapiens
  misc_RNA (1)...(19): siRNA sense strand
agaacgugucugguuauua

SEQ ID NO: 1230809 - RNA, 19 nt, Homo sapiens
  misc_RNA (1)...(19): siRNA sense strand
ucaagcagagagaacgauu

SEQ ID NO: 1230810 - RNA, 19 nt, Homo sapiens
  misc_RNA (1)...(19): siRNA sense strand
ccugcugacuaacaaugaa

SEQ ID NO: 1230811 - RNA, 19 nt, Homo sapiens
  misc_RNA (1)...(19): siRNA sense strand
cuuagaacauaugcagcua

SEQ ID NO: 1230812 - RNA, 19 nt, Homo sapiens
  misc_RNA (1)...(19): siRNA sense strand
gcuggaggagaaucuaaug

SEQ ID NO: 1230813 - RNA, 19 nt, Homo sapiens
  misc_RNA (1)...(19): siRNA sense strand
caaauacuuccgggagaga

SEQ ID NO: 1230814 - RNA, 19 nt, Homo sapiens
  misc_RNA (1)...(19): siRNA sense strand
ugacugcaaccagcauuga

SEQ ID NO: 1230815 - RNA, 19 nt, Homo sapiens
  misc_RNA (1)...(19): siRNA sense strand
ucagaacagcuggaucuug

SEQ ID NO: 1230816 - RNA, 19 nt, Homo sapiens
  misc_RNA (1)...(19): siRNA sense strand
ucuacgaagcucugaagaa

SEQ ID NO: 1230817 - RNA, 19 nt, Homo sapiens
  misc_RNA (1)...(19): siRNA sense strand
gguauuuaaggaaguuaug

SEQ ID NO: 1230818 - RNA, 19 nt, Homo sapiens
  misc_RNA (1)...(19): siRNA sense strand
cagcauugaccgauugaag

SEQ ID NO: 1230819 - RNA, 19 nt, Homo sapiens
  misc_RNA (1)...(19): siRNA sense strand
gagcacucauacacaucau

SEQ ID NO: 1230820 - RNA, 19 nt, Homo sapiens
  misc_RNA (1)...(19): siRNA sense strand
auccaggaguccauagaaa

SEQ ID NO: 1230821 - RNA, 19 nt, Homo sapiens
  misc_RNA (1)...(19): siRNA sense strand
ggaagauccaggaguccau

SEQ ID NO: 1230822 - RNA, 19 nt, Homo sapiens
  misc_RNA (1)...(19): siRNA sense strand
gaaagaugagcaguuuagg

SEQ ID NO: 1230823 - RNA, 19 nt, Homo sapiens
  misc_RNA (1)...(19): siRNA sense strand
ggagcuggaggagaaucua

SEQ ID NO: 1230824 - RNA, 19 nt, Homo sapiens
  misc_RNA (1)...(19): siRNA sense strand
uggucaaccuuguauacga

SEQ ID NO: 1230825 - RNA, 19 nt, Homo sapiens
  misc_RNA (1)...(19): siRNA sense strand
uugcaaaugguauugaaga

SEQ ID NO: 1230826 - RNA, 19 nt, Homo sapiens
  misc_RNA (1)...(19): siRNA sense strand
cugaagaagcuuagaacau

SEQ ID NO: 1230827 - RNA, 19 nt, Homo sapiens
  misc_RNA (1)...(19): siRNA sense strand
ugacaucacacccaacuua

SEQ ID NO: 1230828 - RNA, 19 nt, Homo sapiens
  misc_RNA (1)...(19): siRNA sense strand
gaagguauuuaaggaaguu

SEQ ID NO: 1230829 - RNA, 19 nt, Homo sapiens
  misc_RNA (1)...(19): siRNA sense strand
caacuuacuuucccuucuu

SEQ ID NO: 1230830 - RNA, 19 nt, Homo sapiens
  misc_RNA (1)...(19): siRNA sense strand
gauugaagguauuuaagga

SEQ ID NO: 1230831 - RNA, 19 nt, Homo sapiens
  misc_RNA (1)...(19): siRNA sense strand
uaauggagcucacucagau

SEQ ID NO: 1230832 - RNA, 19 nt, Homo sapiens
  misc_RNA (1)...(19): siRNA sense strand
ggacgagucuggcccuuac

SEQ ID NO: 1230833 - RNA, 19 nt, Homo sapiens
  misc_RNA (1)...(19): siRNA sense strand
caaccagcauugaccgauu

SEQ ID NO: 1230834 - RNA, 19 nt, Homo sapiens
  misc_RNA (1)...(19): siRNA sense strand
ggagcucacucagaucuau

SEQ ID NO: 1230835 - RNA, 19 nt, Homo sapiens
  misc_RNA (1)...(19): siRNA sense strand
gaaguuaugcgugacauca

SEQ ID NO: 1230836 - RNA, 19 nt, Homo sapiens
  misc_RNA (1)...(19): siRNA sense strand
agucaaagcacuugcauga

SEQ ID NO: 1230837 - RNA, 19 nt, Homo sapiens
  misc_RNA (1)...(19): siRNA sense strand
gcacucauacacaucauca

SEQ ID NO: 1230838 - RNA, 19 nt, Homo sapiens
  misc_RNA (1)...(19): siRNA sense strand
cucaggagcuggaggagaa

SEQ ID NO: 1230839 - RNA, 19 nt, Homo sapiens
  misc_RNA (1)...(19): siRNA sense strand
gaagccacacaaaccauug

SEQ ID NO: 1230840 - RNA, 19 nt, Homo sapiens
  misc_RNA (1)...(19): siRNA sense strand
caucacacccaacuuacuu

SEQ ID NO: 1230841 - RNA, 19 nt, Homo sapiens
  misc_RNA (1)...(19): siRNA sense strand
gagcuggaggagaaucuaa

SEQ ID NO: 1230842 - RNA, 19 nt, Homo sapiens
  misc_RNA (1)...(19): siRNA sense strand
cacaaaccauugggaguga

SEQ ID NO: 1230843 - RNA, 19 nt, Homo sapiens
  misc_RNA (1)...(19): siRNA sense strand
guggagcacucauacacau

SEQ ID NO: 1230844 - RNA, 19 nt, Homo sapiens
  misc_RNA (1)...(19): siRNA sense strand
uggcgaaucucagcuggaa

SEQ ID NO: 1230845 - RNA, 19 nt, Homo sapiens
  misc_RNA (1)...(19): siRNA sense strand
ggagcacucauacacauca

SEQ ID NO: 1230846 - RNA, 19 nt, Homo sapiens
  misc_RNA (1)...(19): siRNA sense strand
ggauguggucaaccuugua

SEQ ID NO: 1230847 - RNA, 19 nt, Homo sapiens
  misc_RNA (1)...(19): siRNA sense strand
gauguggucaaccuuguau

SEQ ID NO: 1230848 - RNA, 19 nt, Homo sapiens
  misc_RNA (1)...(19): siRNA sense strand
gugaccaccuggcgaaucu

SEQ ID NO: 1230849 - RNA, 19 nt, Homo sapiens
  misc_RNA (1)...(19): siRNA sense strand
cgucugaauccaugccaua

SEQ ID NO: 1230850 - RNA, 19 nt, Homo sapiens
  misc_RNA (1)...(19): siRNA sense strand
gcgaaucucagcuggaagu

SEQ ID NO: 1230851 - RNA, 19 nt, Homo sapiens
  misc_RNA (1)...(19): siRNA sense strand
auacacaucaucagcagaa

SEQ ID NO: 1230852 - RNA, 19 nt, Homo sapiens
  misc_RNA (1)...(19): siRNA sense strand
aaccagcauugaccgauug

SEQ ID NO: 1230853 - RNA, 19 nt, Homo sapiens
  misc_RNA (1)...(19): siRNA sense strand
gggacgagucuggcccuua

SEQ ID NO: 1230854 - RNA, 19 nt, Homo sapiens
  misc_RNA (1)...(19): siRNA sense strand
cgaagccacacaaaccauu

SEQ ID NO: 1230855 - RNA, 19 nt, Homo sapiens
  misc_RNA (1)...(19): siRNA sense strand
aacuuacuuucccuucuua

SEQ ID NO: 1230856 - RNA, 19 nt, Homo sapiens
  misc_RNA (1)...(19): siRNA sense strand
ccaacuuacuuucccuucu

SEQ ID NO: 1230857 - RNA, 19 nt, Homo sapiens
  misc_RNA (1)...(19): siRNA sense strand
caaaccauugggagugaaa

SEQ ID NO: 1230858 - RNA, 19 nt, Homo sapiens
  misc_RNA (1)...(19): siRNA sense strand
gcauugaccgauugaaggu

SEQ ID NO: 1230859 - RNA, 19 nt, Homo sapiens
  misc_RNA (1)...(19): siRNA sense strand
cuaauggagcucacucaga

SEQ ID NO: 1230860 - RNA, 19 nt, Homo sapiens
  misc_RNA (1)...(19): siRNA sense strand
caucuuccuugcacuggau

SEQ ID NO: 1230861 - RNA, 19 nt, Homo sapiens
  misc_RNA (1)...(19): siRNA sense strand
ugaagguauuuaaggaagu

SEQ ID NO: 1230862 - RNA, 19 nt, Homo sapiens
  misc_RNA (1)...(19): siRNA sense strand
gucccuugcuggucuuguu

SEQ ID NO: 1230863 - RNA, 19 nt, Homo sapiens
  misc_RNA (1)...(19): siRNA sense strand
gcaucguggagcacucaua

SEQ ID NO: 1230864 - RNA, 19 nt, Homo sapiens
  misc_RNA (1)...(19): siRNA sense strand
uggaagugguggucaagca

SEQ ID NO: 1230865 - RNA, 19 nt, Homo sapiens
  misc_RNA (1)...(19): siRNA sense strand
caagcagagagaacgauug

SEQ ID NO: 1230866 - RNA, 19 nt, Homo sapiens
  misc_RNA (1)...(19): siRNA sense strand
ucaagcagagagaacgauu

SEQ ID NO: 1230867 - RNA, 19 nt, Homo sapiens
  misc_RNA (1)...(19): siRNA sense strand
ugacugcaaccagcauuga

SEQ ID NO: 1230868 - RNA, 19 nt, Homo sapiens
  misc_RNA (1)...(19): siRNA sense strand
gcuggaggagaaucuaaug

SEQ ID NO: 1230869 - RNA, 19 nt, Homo sapiens
  misc_RNA (1)...(19): siRNA sense strand
cagcauugaccgauugaag

SEQ ID NO: 1230870 - RNA, 19 nt, Homo sapiens
  misc_RNA (1)...(19): siRNA sense strand
gagcacucauacacaucau

SEQ ID NO: 1230871 - RNA, 19 nt, Homo sapiens
  misc_RNA (1)...(19): siRNA sense strand
gguauuuaaggaaguuaug

SEQ ID NO: 1230872 - RNA, 19 nt, Homo sapiens
  misc_RNA (1)...(19): siRNA sense strand
uggucaaccuuguauacga

SEQ ID NO: 1230873 - RNA, 19 nt, Homo sapiens
  misc_RNA (1)...(19): siRNA sense strand
ggagcuggaggagaaucua

SEQ ID NO: 1230874 - RNA, 19 nt, Homo sapiens
  misc_RNA (1)...(19): siRNA sense strand
ugacaucacacccaacuua

SEQ ID NO: 1230875 - RNA, 19 nt, Homo sapiens
  misc_RNA (1)...(19): siRNA sense strand
gaagguauuuaaggaaguu

SEQ ID NO: 1230876 - RNA, 19 nt, Homo sapiens
  misc_RNA (1)...(19): siRNA sense strand
caacuuacuuucccuucuu

SEQ ID NO: 1230877 - RNA, 19 nt, Homo sapiens
  misc_RNA (1)...(19): siRNA sense strand
gauugaagguauuuaagga

SEQ ID NO: 1230878 - RNA, 19 nt, Homo sapiens
  misc_RNA (1)...(19): siRNA sense strand
uaauggagcucacucagau

SEQ ID NO: 1230879 - RNA, 19 nt, Homo sapiens
  misc_RNA (1)...(19): siRNA sense strand
ggacgagucuggcccuuac

SEQ ID NO: 1230880 - RNA, 19 nt, Homo sapiens
  misc_RNA (1)...(19): siRNA sense strand
caaccagcauugaccgauu

SEQ ID NO: 1230881 - RNA, 19 nt, Homo sapiens
  misc_RNA (1)...(19): siRNA sense strand
ggagcucacucagaucuau

SEQ ID NO: 1230882 - RNA, 19 nt, Homo sapiens
  misc_RNA (1)...(19): siRNA sense strand
gaaguuaugcgugacauca

SEQ ID NO: 1230883 - RNA, 19 nt, Homo sapiens
  misc_RNA (1)...(19): siRNA sense strand
agucaaagcacuugcauga

SEQ ID NO: 1230884 - RNA, 19 nt, Homo sapiens
  misc_RNA (1)...(19): siRNA sense strand
gcacucauacacaucauca

SEQ ID NO: 1230885 - RNA, 19 nt, Homo sapiens
  misc_RNA (1)...(19): siRNA sense strand
cucaggagcuggaggagaa

SEQ ID NO: 1230886 - RNA, 19 nt, Homo sapiens
  misc_RNA (1)...(19): siRNA sense strand
gaagccacacaaaccauug

SEQ ID NO: 1230887 - RNA, 19 nt, Homo sapiens
  misc_RNA (1)...(19): siRNA sense strand
caucacacccaacuuacuu

SEQ ID NO: 1230888 - RNA, 19 nt, Homo sapiens
  misc_RNA (1)...(19): siRNA sense strand
gagcuggaggagaaucuaa

SEQ ID NO: 1230889 - RNA, 19 nt, Homo sapiens
  misc_RNA (1)...(19): siRNA sense strand
cacaaaccauugggaguga

SEQ ID NO: 1230890 - RNA, 19 nt, Homo sapiens
  misc_RNA (1)...(19): siRNA sense strand
guggagcacucauacacau

SEQ ID NO: 1230891 - RNA, 19 nt, Homo sapiens
  misc_RNA (1)...(19): siRNA sense strand
uggcgaaucucagcuggaa

SEQ ID NO: 1230892 - RNA, 19 nt, Homo sapiens
  misc_RNA (1)...(19): siRNA sense strand
ggagcacucauacacauca

SEQ ID NO: 1230893 - RNA, 19 nt, Homo sapiens
  misc_RNA (1)...(19): siRNA sense strand
ggauguggucaaccuugua

SEQ ID NO: 1230894 - RNA, 19 nt, Homo sapiens
  misc_RNA (1)...(19): siRNA sense strand
gauguggucaaccuuguau

SEQ ID NO: 1230895 - RNA, 19 nt, Homo sapiens
  misc_RNA (1)...(19): siRNA sense strand
gugaccaccuggcgaaucu

SEQ ID NO: 1230896 - RNA, 19 nt, Homo sapiens
  misc_RNA (1)...(19): siRNA sense strand
cgucugaauccaugccaua

SEQ ID NO: 1230897 - RNA, 19 nt, Homo sapiens
  misc_RNA (1)...(19): siRNA sense strand
gcgaaucucagcuggaagu

SEQ ID NO: 1230898 - RNA, 19 nt, Homo sapiens
  misc_RNA (1)...(19): siRNA sense strand
auacacaucaucagcagaa

SEQ ID NO: 1230899 - RNA, 19 nt, Homo sapiens
  misc_RNA (1)...(19): siRNA sense strand
aaccagcauugaccgauug

SEQ ID NO: 1230900 - RNA, 19 nt, Homo sapiens
  misc_RNA (1)...(19): siRNA sense strand
gggacgagucuggcccuua

SEQ ID NO: 1230901 - RNA, 19 nt, Homo sapiens
  misc_RNA (1)...(19): siRNA sense strand
cgaagccacacaaaccauu

SEQ ID NO: 1230902 - RNA, 19 nt, Homo sapiens
  misc_RNA (1)...(19): siRNA sense strand
aacuuacuuucccuucuua

SEQ ID NO: 1230903 - RNA, 19 nt, Homo sapiens
  misc_RNA (1)...(19): siRNA sense strand
ccaacuuacuuucccuucu

SEQ ID NO: 1230904 - RNA, 19 nt, Homo sapiens
  misc_RNA (1)...(19): siRNA sense strand
caaaccauugggagugaaa

SEQ ID NO: 1230905 - RNA, 19 nt, Homo sapiens
  misc_RNA (1)...(19): siRNA sense strand
gcauugaccgauugaaggu

SEQ ID NO: 1230906 - RNA, 19 nt, Homo sapiens
  misc_RNA (1)...(19): siRNA sense strand
cuaauggagcucacucaga

SEQ ID NO: 1230907 - RNA, 19 nt, Homo sapiens
  misc_RNA (1)...(19): siRNA sense strand
caucuuccuugcacuggau

SEQ ID NO: 1230908 - RNA, 19 nt, Homo sapiens
  misc_RNA (1)...(19): siRNA sense strand
ugaagguauuuaaggaagu

SEQ ID NO: 1230909 - RNA, 19 nt, Homo sapiens
  misc_RNA (1)...(19): siRNA sense strand
gucccuugcuggucuuguu

SEQ ID NO: 1230910 - RNA, 19 nt, Homo sapiens
  misc_RNA (1)...(19): siRNA sense strand
gcaucguggagcacucaua

SEQ ID NO: 1230911 - RNA, 19 nt, Homo sapiens
  misc_RNA (1)...(19): siRNA sense strand
uggaagugguggucaagca

SEQ ID NO: 1230912 - RNA, 19 nt, Homo sapiens
  misc_RNA (1)...(19): siRNA sense strand
caagcagagagaacgauug

SEQ ID NO: 1230913 - RNA, 19 nt, Homo sapiens
  misc_RNA (1)...(19): siRNA sense strand
ucaagcagagagaacgauu

SEQ ID NO: 1230914 - RNA, 19 nt, Homo sapiens
  misc_RNA (1)...(19): siRNA sense strand
ugacugcaaccagcauuga

SEQ ID NO: 1230915 - RNA, 19 nt, Homo sapiens
  misc_RNA (1)...(19): siRNA sense strand
gcuggaggagaaucuaaug

SEQ ID NO: 1230916 - RNA, 19 nt, Homo sapiens
  misc_RNA (1)...(19): siRNA sense strand
cagcauugaccgauugaag

SEQ ID NO: 1230917 - RNA, 19 nt, Homo sapiens
  misc_RNA (1)...(19): siRNA sense strand
gagcacucauacacaucau

SEQ ID NO: 1230918 - RNA, 19 nt, Homo sapiens
  misc_RNA (1)...(19): siRNA sense strand
gguauuuaaggaaguuaug

SEQ ID NO: 1230919 - RNA, 19 nt, Homo sapiens
  misc_RNA (1)...(19): siRNA sense strand
uggucaaccuuguauacga

SEQ ID NO: 1230920 - RNA, 19 nt, Homo sapiens
  misc_RNA (1)...(19): siRNA sense strand
ggagcuggaggagaaucua

SEQ ID NO: 1230921 - RNA, 19 nt, Homo sapiens
  misc_RNA (1)...(19): siRNA sense strand
gcagaaagaugagcaguuu

SEQ ID NO: 1230922 - RNA, 19 nt, Homo sapiens
  misc_RNA (1)...(19): siRNA sense strand
ugaagaagcuuagaacaua

SEQ ID NO: 1230923 - RNA, 19 nt, Homo sapiens
  misc_RNA (1)...(19): siRNA sense strand
gaacauaugcagcuauuga

SEQ ID NO: 1230924 - RNA, 19 nt, Homo sapiens
  misc_RNA (1)...(19): siRNA sense strand
gaagaagcuuagaacauau

SEQ ID NO: 1230925 - RNA, 19 nt, Homo sapiens
  misc_RNA (1)...(19): siRNA sense strand
ugacaucacacccaacuua

SEQ ID NO: 1230926 - RNA, 19 nt, Homo sapiens
  misc_RNA (1)...(19): siRNA sense strand
gaagguauuuaaggaaguu

SEQ ID NO: 1230927 - RNA, 19 nt, Homo sapiens
  misc_RNA (1)...(19): siRNA sense strand
caacuuacuuucccuucuu

SEQ ID NO: 1230928 - RNA, 19 nt, Homo sapiens
  misc_RNA (1)...(19): siRNA sense strand
gauugaagguauuuaagga

SEQ ID NO: 1230929 - RNA, 19 nt, Homo sapiens
  misc_RNA (1)...(19): siRNA sense strand
uaauggagcucacucagau

SEQ ID NO: 1230930 - RNA, 19 nt, Homo sapiens
  misc_RNA (1)...(19): siRNA sense strand
cugaagaggccaccaaaua

SEQ ID NO: 1230931 - RNA, 19 nt, Homo sapiens
  misc_RNA (1)...(19): siRNA sense strand
aagaaacgcuuuacugaag

SEQ ID NO: 1230932 - RNA, 19 nt, Homo sapiens
  misc_RNA (1)...(19): siRNA sense strand
ggacgagucuggcccuuac

SEQ ID NO: 1230933 - RNA, 19 nt, Homo sapiens
  misc_RNA (1)...(19): siRNA sense strand
uagaacauaugcagcuauu

SEQ ID NO: 1230934 - RNA, 19 nt, Homo sapiens
  misc_RNA (1)...(19): siRNA sense strand
gaugagcaguuuagggaau

SEQ ID NO: 1230935 - RNA, 19 nt, Homo sapiens
  misc_RNA (1)...(19): siRNA sense strand
caaccagcauugaccgauu

SEQ ID NO: 1230936 - RNA, 19 nt, Homo sapiens
  misc_RNA (1)...(19): siRNA sense strand
ggagcucacucagaucuau

SEQ ID NO: 1230937 - RNA, 19 nt, Homo sapiens
  misc_RNA (1)...(19): siRNA sense strand
cuacgaagcucugaagaag

SEQ ID NO: 1230938 - RNA, 19 nt, Homo sapiens
  misc_RNA (1)...(19): siRNA sense strand
gaaguuaugcgugacauca

SEQ ID NO: 1230939 - RNA, 19 nt, Homo sapiens
  misc_RNA (1)...(19): siRNA sense strand
ggcagaugcucucuacgaa

SEQ ID NO: 1230940 - RNA, 19 nt, Homo sapiens
  misc_RNA (1)...(19): siRNA sense strand
gaagauccaggaguccaua

SEQ ID NO: 1230941 - RNA, 19 nt, Homo sapiens
  misc_RNA (1)...(19): siRNA sense strand
acgaauaugugcagcagaa

SEQ ID NO: 1230942 - RNA, 19 nt, Homo sapiens
  misc_RNA (1)...(19): siRNA sense strand
agucaaagcacuugcauga

SEQ ID NO: 1230943 - RNA, 19 nt, Homo sapiens
  misc_RNA (1)...(19): siRNA sense strand
ugcaaauccugcugacuaa

SEQ ID NO: 1230944 - RNA, 19 nt, Homo sapiens
  misc_RNA (1)...(19): siRNA sense strand
caaugaagccuggaagaga

SEQ ID NO: 1230945 - RNA, 19 nt, Homo sapiens
  misc_RNA (1)...(19): siRNA sense strand
gcacucauacacaucauca

SEQ ID NO: 1230946 - RNA, 19 nt, Homo sapiens
  misc_RNA (1)...(19): siRNA sense strand
gaaacgcuuuacugaagag

SEQ ID NO: 1230947 - RNA, 19 nt, Homo sapiens
  misc_RNA (1)...(19): siRNA sense strand
gaagaggccaccaaauacu

SEQ ID NO: 1230948 - RNA, 19 nt, Homo sapiens
  misc_RNA (1)...(19): siRNA sense strand
cucaggagcuggaggagaa

SEQ ID NO: 1230949 - RNA, 19 nt, Homo sapiens
  misc_RNA (1)...(19): siRNA sense strand
cugcaaauccugcugacua

SEQ ID NO: 1230950 - RNA, 19 nt, Homo sapiens
  misc_RNA (1)...(19): siRNA sense strand
gauccaggaguccauagaa

SEQ ID NO: 1230951 - RNA, 19 nt, Homo sapiens
  misc_RNA (1)...(19): siRNA sense strand
agaaacgcuuuacugaaga

SEQ ID NO: 1230952 - RNA, 19 nt, Homo sapiens
  misc_RNA (1)...(19): siRNA sense strand
gaagccacacaaaccauug

SEQ ID NO: 1230953 - RNA, 19 nt, Homo sapiens
  misc_RNA (1)...(19): siRNA sense strand
cacagaggcugcaccaucu

SEQ ID NO: 1230954 - RNA, 19 nt, Homo sapiens
  misc_RNA (1)...(19): siRNA sense strand
gagcuggaggagaaucuaa

SEQ ID NO: 1230955 - RNA, 19 nt, Homo sapiens
  misc_RNA (1)...(19): siRNA sense strand
cacaaaccauugggaguga

SEQ ID NO: 1230956 - RNA, 19 nt, Homo sapiens
  misc_RNA (1)...(19): siRNA sense strand
caucacacccaacuuacuu

SEQ ID NO: 1230957 - RNA, 19 nt, Homo sapiens
  misc_RNA (1)...(19): siRNA sense strand
ugaggcagaugcucucuac

SEQ ID NO: 1230958 - RNA, 19 nt, Homo sapiens
  misc_RNA (1)...(19): siRNA sense strand
aaugaagccuggaagagau

SEQ ID NO: 1230959 - RNA, 19 nt, Homo sapiens
  misc_RNA (1)...(19): siRNA sense strand
guggagcacucauacacau

SEQ ID NO: 1230960 - RNA, 19 nt, Homo sapiens
  misc_RNA (1)...(19): siRNA sense strand
ugaagaggccaccaaauac

SEQ ID NO: 1230961 - RNA, 19 nt, Homo sapiens
  misc_RNA (1)...(19): siRNA sense strand
caaauccugcugacuaaca

SEQ ID NO: 1230962 - RNA, 19 nt, Homo sapiens
  misc_RNA (1)...(19): siRNA sense strand
uggcgaaucucagcuggaa

SEQ ID NO: 1230963 - RNA, 19 nt, Homo sapiens
  misc_RNA (1)...(19): siRNA sense strand
gcucugaagaagcuuagaa

SEQ ID NO: 1230964 - RNA, 19 nt, Homo sapiens
  misc_RNA (1)...(19): siRNA sense strand
ggagcacucauacacauca

SEQ ID NO: 1230965 - RNA, 19 nt, Homo sapiens
  misc_RNA (1)...(19): siRNA sense strand
gcugcaccaucuccaaugu

SEQ ID NO: 1230966 - RNA, 19 nt, Homo sapiens
  misc_RNA (1)...(19): siRNA sense strand
agaaagaugagcaguuuag

SEQ ID NO: 1230967 - RNA, 19 nt, Homo sapiens
  misc_RNA (1)...(19): siRNA sense strand
gcaguuuagggaaugguuu

SEQ ID NO: 1230968 - RNA, 19 nt, Homo sapiens
  misc_RNA (1)...(19): siRNA sense strand
ggauguggucaaccuugua

SEQ ID NO: 1230969 - RNA, 19 nt, Homo sapiens
  misc_RNA (1)...(19): siRNA sense strand
gaauaugugcagcagaaag

SEQ ID NO: 1230970 - RNA, 19 nt, Homo sapiens
  misc_RNA (1)...(19): siRNA sense strand
gauguggucaaccuuguau

SEQ ID NO: 1230971 - RNA, 19 nt, Homo sapiens
  misc_RNA (1)...(19): siRNA sense strand
cagaaagaugagcaguuua

SEQ ID NO: 1230972 - RNA, 19 nt, Homo sapiens
  misc_RNA (1)...(19): siRNA sense strand
cgucugaauccaugccaua

SEQ ID NO: 1230973 - RNA, 19 nt, Homo sapiens
  misc_RNA (1)...(19): siRNA sense strand
gcgaaucucagcuggaagu

SEQ ID NO: 1230974 - RNA, 19 nt, Homo sapiens
  misc_RNA (1)...(19): siRNA sense strand
gugaccaccuggcgaaucu

SEQ ID NO: 1230975 - RNA, 19 nt, Homo sapiens
  misc_RNA (1)...(19): siRNA sense strand
auacacaucaucagcagaa

SEQ ID NO: 1230976 - RNA, 19 nt, Homo sapiens
  misc_RNA (1)...(19): siRNA sense strand
gggacgagucuggcccuua

SEQ ID NO: 1230977 - RNA, 19 nt, Homo sapiens
  misc_RNA (1)...(19): siRNA sense strand
cgaagccacacaaaccauu

SEQ ID NO: 1230978 - RNA, 19 nt, Homo sapiens
  misc_RNA (1)...(19): siRNA sense strand
aacuuacuuucccuucuua

SEQ ID NO: 1230979 - RNA, 19 nt, Homo sapiens
  misc_RNA (1)...(19): siRNA sense strand
ccaacuuacuuucccuucu

SEQ ID NO: 1230980 - RNA, 19 nt, Homo sapiens
  misc_RNA (1)...(19): siRNA sense strand
aaccagcauugaccgauug

SEQ ID NO: 1230981 - RNA, 19 nt, Homo sapiens
  misc_RNA (1)...(19): siRNA sense strand
caaaccauugggagugaaa

SEQ ID NO: 1230982 - RNA, 19 nt, Homo sapiens
  misc_RNA (1)...(19): siRNA sense strand
gcauugaccgauugaaggu

SEQ ID NO: 1230983 - RNA, 19 nt, Homo sapiens
  misc_RNA (1)...(19): siRNA sense strand
cuaauggagcucacucaga

SEQ ID NO: 1230984 - RNA, 19 nt, Homo sapiens
  misc_RNA (1)...(19): siRNA sense strand
caucuuccuugcacuggau

SEQ ID NO: 1230985 - RNA, 19 nt, Homo sapiens
  misc_RNA (1)...(19): siRNA sense strand
aaauccugcugacuaacaa

SEQ ID NO: 1230986 - RNA, 19 nt, Homo sapiens
  misc_RNA (1)...(19): siRNA sense strand
gcccagggaugaggcagau

SEQ ID NO: 1230987 - RNA, 19 nt, Homo sapiens
  misc_RNA (1)...(19): siRNA sense strand
ugaagguauuuaaggaagu

SEQ ID NO: 1230988 - RNA, 19 nt, Homo sapiens
  misc_RNA (1)...(19): siRNA sense strand
aauaugugcagcagaaaga

SEQ ID NO: 1230989 - RNA, 19 nt, Homo sapiens
  misc_RNA (1)...(19): siRNA sense strand
gcaucguggagcacucaua

SEQ ID NO: 1230990 - RNA, 19 nt, Homo sapiens
  misc_RNA (1)...(19): siRNA sense strand
gucccuugcuggucuuguu

SEQ ID NO: 1230991 - RNA, 19 nt, Homo sapiens
  misc_RNA (1)...(19): siRNA sense strand
ccuugcaaaugguauugaa

SEQ ID NO: 1230992 - RNA, 19 nt, Homo sapiens
  misc_RNA (1)...(19): siRNA sense strand
uggaagugguggucaagca

SEQ ID NO: 1230993 - RNA, 19 nt, Homo sapiens
  misc_RNA (1)...(19): siRNA sense strand
caagcagagagaacgauug

SEQ ID NO: 1230994 - RNA, 19 nt, Homo sapiens
  misc_RNA (1)...(19): siRNA sense strand
ucaagcagagagaacgauu

SEQ ID NO: 1230995 - RNA, 19 nt, Homo sapiens
  misc_RNA (1)...(19): siRNA sense strand
ccugcugacuaacaaugaa

SEQ ID NO: 1230996 - RNA, 19 nt, Homo sapiens
  misc_RNA (1)...(19): siRNA sense strand
cuuagaacauaugcagcua

SEQ ID NO: 1230997 - RNA, 19 nt, Homo sapiens
  misc_RNA (1)...(19): siRNA sense strand
gcuggaggagaaucuaaug

SEQ ID NO: 1230998 - RNA, 19 nt, Homo sapiens
  misc_RNA (1)...(19): siRNA sense strand
ugacugcaaccagcauuga

SEQ ID NO: 1230999 - RNA, 19 nt, Homo sapiens
  misc_RNA (1)...(19): siRNA sense strand
caaauacuuccgggagaga

SEQ ID NO: 1231000 - RNA, 19 nt, Homo sapiens
  misc_RNA (1)...(19): siRNA sense strand
ggaagauccaggaguccau

SEQ ID NO: 1231001 - RNA, 19 nt, Homo sapiens
  misc_RNA (1)...(19): siRNA sense strand
gguauuuaaggaaguuaug

SEQ ID NO: 1231002 - RNA, 19 nt, Homo sapiens
  misc_RNA (1)...(19): siRNA sense strand
cagcauugaccgauugaag

SEQ ID NO: 1231003 - RNA, 19 nt, Homo sapiens
  misc_RNA (1)...(19): siRNA sense strand
ucuacgaagcucugaagaa

SEQ ID NO: 1231004 - RNA, 19 nt, Homo sapiens
  misc_RNA (1)...(19): siRNA sense strand
gagcacucauacacaucau

SEQ ID NO: 1231005 - RNA, 19 nt, Homo sapiens
  misc_RNA (1)...(19): siRNA sense strand
auccaggaguccauagaaa

SEQ ID NO: 1231006 - RNA, 19 nt, Homo sapiens
  misc_RNA (1)...(19): siRNA sense strand
gaaagaugagcaguuuagg

SEQ ID NO: 1231007 - RNA, 19 nt, Homo sapiens
  misc_RNA (1)...(19): siRNA sense strand
ggagcuggaggagaaucua

SEQ ID NO: 1231008 - RNA, 19 nt, Homo sapiens
  misc_RNA (1)...(19): siRNA sense strand
uggucaaccuuguauacga

SEQ ID NO: 1231009 - RNA, 19 nt, Homo sapiens
  misc_RNA (1)...(19): siRNA sense strand
cugaagaagcuuagaacau

SEQ ID NO: 1231010 - RNA, 19 nt, Homo sapiens
  misc_RNA (1)...(19): siRNA sense strand
uugcaaaugguauugaaga

SEQ ID NO: 1231011 - RNA, 19 nt, Homo sapiens
  misc_RNA (1)...(19): siRNA sense strand
gcagaaagaugagcaguuu

SEQ ID NO: 1231012 - RNA, 19 nt, Homo sapiens
  misc_RNA (1)...(19): siRNA sense strand
ugaagaagcuuagaacaua

SEQ ID NO: 1231013 - RNA, 19 nt, Homo sapiens
  misc_RNA (1)...(19): siRNA sense strand
gaacauaugcagcuauuga

SEQ ID NO: 1231014 - RNA, 19 nt, Homo sapiens
  misc_RNA (1)...(19): siRNA sense strand
gaagaagcuuagaacauau

SEQ ID NO: 1231015 - RNA, 19 nt, Homo sapiens
  misc_RNA (1)...(19): siRNA sense strand
ugacaucacacccaacuua

SEQ ID NO: 1231016 - RNA, 19 nt, Homo sapiens
  misc_RNA (1)...(19): siRNA sense strand
gaagguauuuaaggaaguu

SEQ ID NO: 1231017 - RNA, 19 nt, Homo sapiens
  misc_RNA (1)...(19): siRNA sense strand
caacuuacuuucccuucuu

SEQ ID NO: 1231018 - RNA, 19 nt, Homo sapiens
  misc_RNA (1)...(19): siRNA sense strand
gauugaagguauuuaagga

SEQ ID NO: 1231019 - RNA, 19 nt, Homo sapiens
  misc_RNA (1)...(19): siRNA sense strand
uaauggagcucacucagau

SEQ ID NO: 1231020 - RNA, 19 nt, Homo sapiens
  misc_RNA (1)...(19): siRNA sense strand
cugaagaggccaccaaaua

SEQ ID NO: 1231021 - RNA, 19 nt, Homo sapiens
  misc_RNA (1)...(19): siRNA sense strand
aagaaacgcuuuacugaag

SEQ ID NO: 1231022 - RNA, 19 nt, Homo sapiens
  misc_RNA (1)...(19): siRNA sense strand
ggacgagucuggcccuuac

SEQ ID NO: 1231023 - RNA, 19 nt, Homo sapiens
  misc_RNA (1)...(19): siRNA sense strand
uagaacauaugcagcuauu

SEQ ID NO: 1231024 - RNA, 19 nt, Homo sapiens
  misc_RNA (1)...(19): siRNA sense strand
gaugagcaguuuagggaau

SEQ ID NO: 1231025 - RNA, 19 nt, Homo sapiens
  misc_RNA (1)...(19): siRNA sense strand
caaccagcauugaccgauu

SEQ ID NO: 1231026 - RNA, 19 nt, Homo sapiens
  misc_RNA (1)...(19): siRNA sense strand
ggagcucacucagaucuau

SEQ ID NO: 1231027 - RNA, 19 nt, Homo sapiens
  misc_RNA (1)...(19): siRNA sense strand
cuacgaagcucugaagaag

SEQ ID NO: 1231028 - RNA, 19 nt, Homo sapiens
  misc_RNA (1)...(19): siRNA sense strand
gaaguuaugcgugacauca

SEQ ID NO: 1231029 - RNA, 19 nt, Homo sapiens
  misc_RNA (1)...(19): siRNA sense strand
ggcagaugcucucuacgaa

SEQ ID NO: 1231030 - RNA, 19 nt, Homo sapiens
  misc_RNA (1)...(19): siRNA sense strand
gaagauccaggaguccaua

SEQ ID NO: 1231031 - RNA, 19 nt, Homo sapiens
  misc_RNA (1)...(19): siRNA sense strand
acgaauaugugcagcagaa

SEQ ID NO: 1231032 - RNA, 19 nt, Homo sapiens
  misc_RNA (1)...(19): siRNA sense strand
agucaaagcacuugcauga

SEQ ID NO: 1231033 - RNA, 19 nt, Homo sapiens
  misc_RNA (1)...(19): siRNA sense strand
ugcaaauccugcugacuaa

SEQ ID NO: 1231034 - RNA, 19 nt, Homo sapiens
  misc_RNA (1)...(19): siRNA sense strand
caaugaagccuggaagaga

SEQ ID NO: 1231035 - RNA, 19 nt, Homo sapiens
  misc_RNA (1)...(19): siRNA sense strand
gcacucauacacaucauca

SEQ ID NO: 1231036 - RNA, 19 nt, Homo sapiens
  misc_RNA (1)...(19): siRNA sense strand
gaaacgcuuuacugaagag

SEQ ID NO: 1231037 - RNA, 19 nt, Homo sapiens
  misc_RNA (1)...(19): siRNA sense strand
gaagaggccaccaaauacu

SEQ ID NO: 1231038 - RNA, 19 nt, Homo sapiens
  misc_RNA (1)...(19): siRNA sense strand
cucaggagcuggaggagaa

SEQ ID NO: 1231039 - RNA, 19 nt, Homo sapiens
  misc_RNA (1)...(19): siRNA sense strand
cugcaaauccugcugacua

SEQ ID NO: 1231040 - RNA, 19 nt, Homo sapiens
  misc_RNA (1)...(19): siRNA sense strand
gauccaggaguccauagaa

SEQ ID NO: 1231041 - RNA, 19 nt, Homo sapiens
  misc_RNA (1)...(19): siRNA sense strand
agaaacgcuuuacugaaga

SEQ ID NO: 1231042 - RNA, 19 nt, Homo sapiens
  misc_RNA (1)...(19): siRNA sense strand
gaagccacacaaaccauug

SEQ ID NO: 1231043 - RNA, 19 nt, Homo sapiens
  misc_RNA (1)...(19): siRNA sense strand
cacagaggcugcaccaucu

SEQ ID NO: 1231044 - RNA, 19 nt, Homo sapiens
  misc_RNA (1)...(19): siRNA sense strand
gagcuggaggagaaucuaa

SEQ ID NO: 1231045 - RNA, 19 nt, Homo sapiens
  misc_RNA (1)...(19): siRNA sense strand
cacaaaccauugggaguga

SEQ ID NO: 1231046 - RNA, 19 nt, Homo sapiens
  misc_RNA (1)...(19): siRNA sense strand
caucacacccaacuuacuu

SEQ ID NO: 1231047 - RNA, 19 nt, Homo sapiens
  misc_RNA (1)...(19): siRNA sense strand
ugaggcagaugcucucuac

SEQ ID NO: 1231048 - RNA, 19 nt, Homo sapiens
  misc_RNA (1)...(19): siRNA sense strand
aaugaagccuggaagagau

SEQ ID NO: 1231049 - RNA, 19 nt, Homo sapiens
  misc_RNA (1)...(19): siRNA sense strand
guggagcacucauacacau

SEQ ID NO: 1231050 - RNA, 19 nt, Homo sapiens
  misc_RNA (1)...(19): siRNA sense strand
ugaagaggccaccaaauac

SEQ ID NO: 1231051 - RNA, 19 nt, Homo sapiens
  misc_RNA (1)...(19): siRNA sense strand
caaauccugcugacuaaca

SEQ ID NO: 1231052 - RNA, 19 nt, Homo sapiens
  misc_RNA (1)...(19): siRNA sense strand
uggcgaaucucagcuggaa

SEQ ID NO: 1231053 - RNA, 19 nt, Homo sapiens
  misc_RNA (1)...(19): siRNA sense strand
gcucugaagaagcuuagaa

SEQ ID NO: 1231054 - RNA, 19 nt, Homo sapiens
  misc_RNA (1)...(19): siRNA sense strand
ggagcacucauacacauca

SEQ ID NO: 1231055 - RNA, 19 nt, Homo sapiens
  misc_RNA (1)...(19): siRNA sense strand
gcugcaccaucuccaaugu

SEQ ID NO: 1231056 - RNA, 19 nt, Homo sapiens
  misc_RNA (1)...(19): siRNA sense strand
agaaagaugagcaguuuag

SEQ ID NO: 1231057 - RNA, 19 nt, Homo sapiens
  misc_RNA (1)...(19): siRNA sense strand
gcaguuuagggaaugguuu

SEQ ID NO: 1231058 - RNA, 19 nt, Homo sapiens
  misc_RNA (1)...(19): siRNA sense strand
ggauguggucaaccuugua

SEQ ID NO: 1231059 - RNA, 19 nt, Homo sapiens
  misc_RNA (1)...(19): siRNA sense strand
gaauaugugcagcagaaag

SEQ ID NO: 1231060 - RNA, 19 nt, Homo sapiens
  misc_RNA (1)...(19): siRNA sense strand
gauguggucaaccuuguau

SEQ ID NO: 1231061 - RNA, 19 nt, Homo sapiens
  misc_RNA (1)...(19): siRNA sense strand
cagaaagaugagcaguuua

SEQ ID NO: 1231062 - RNA, 19 nt, Homo sapiens
  misc_RNA (1)...(19): siRNA sense strand
cgucugaauccaugccaua

SEQ ID NO: 1231063 - RNA, 19 nt, Homo sapiens
  misc_RNA (1)...(19): siRNA sense strand
gcgaaucucagcuggaagu

SEQ ID NO: 1231064 - RNA, 19 nt, Homo sapiens
  misc_RNA (1)...(19): siRNA sense strand
gugaccaccuggcgaaucu

SEQ ID NO: 1231065 - RNA, 19 nt, Homo sapiens
  misc_RNA (1)...(19): siRNA sense strand
auacacaucaucagcagaa

SEQ ID NO: 1231066 - RNA, 19 nt, Homo sapiens
  misc_RNA (1)...(19): siRNA sense strand
gggacgagucuggcccuua

SEQ ID NO: 1231067 - RNA, 19 nt, Homo sapiens
  misc_RNA (1)...(19): siRNA sense strand
cgaagccacacaaaccauu

SEQ ID NO: 1231068 - RNA, 19 nt, Homo sapiens
  misc_RNA (1)...(19): siRNA sense strand
aacuuacuuucccuucuua

SEQ ID NO: 1231069 - RNA, 19 nt, Homo sapiens
  misc_RNA (1)...(19): siRNA sense strand
ccaacuuacuuucccuucu

SEQ ID NO: 1231070 - RNA, 19 nt, Homo sapiens
  misc_RNA (1)...(19): siRNA sense strand
aaccagcauugaccgauug

SEQ ID NO: 1231071 - RNA, 19 nt, Homo sapiens
  misc_RNA (1)...(19): siRNA sense strand
caaaccauugggagugaaa

SEQ ID NO: 1231072 - RNA, 19 nt, Homo sapiens
  misc_RNA (1)...(19): siRNA sense strand
gcauugaccgauugaaggu

SEQ ID NO: 1231073 - RNA, 19 nt, Homo sapiens
  misc_RNA (1)...(19): siRNA sense strand
cuaauggagcucacucaga

SEQ ID NO: 1231074 - RNA, 19 nt, Homo sapiens
  misc_RNA (1)...(19): siRNA sense strand
caucuuccuugcacuggau

SEQ ID NO: 1231075 - RNA, 19 nt, Homo sapiens
  misc_RNA (1)...(19): siRNA sense strand
aaauccugcugacuaacaa

SEQ ID NO: 1231076 - RNA, 19 nt, Homo sapiens
  misc_RNA (1)...(19): siRNA sense strand
gcccagggaugaggcagau

SEQ ID NO: 1231077 - RNA, 19 nt, Homo sapiens
  misc_RNA (1)...(19): siRNA sense strand
ugaagguauuuaaggaagu

SEQ ID NO: 1231078 - RNA, 19 nt, Homo sapiens
  misc_RNA (1)...(19): siRNA sense strand
aauaugugcagcagaaaga

SEQ ID NO: 1231079 - RNA, 19 nt, Homo sapiens
  misc_RNA (1)...(19): siRNA sense strand
gcaucguggagcacucaua

SEQ ID NO: 1231080 - RNA, 19 nt, Homo sapiens
  misc_RNA (1)...(19): siRNA sense strand
gucccuugcuggucuuguu

SEQ ID NO: 1231081 - RNA, 19 nt, Homo sapiens
  misc_RNA (1)...(19): siRNA sense strand
ccuugcaaaugguauugaa

SEQ ID NO: 1231082 - RNA, 19 nt, Homo sapiens
  misc_RNA (1)...(19): siRNA sense strand
uggaagugguggucaagca

SEQ ID NO: 1231083 - RNA, 19 nt, Homo sapiens
  misc_RNA (1)...(19): siRNA sense strand
caagcagagagaacgauug

SEQ ID NO: 1231084 - RNA, 19 nt, Homo sapiens
  misc_RNA (1)...(19): siRNA sense strand
ucaagcagagagaacgauu

SEQ ID NO: 1231085 - RNA, 19 nt, Homo sapiens
  misc_RNA (1)...(19): siRNA sense strand
ccugcugacuaacaaugaa

SEQ ID NO: 1231086 - RNA, 19 nt, Homo sapiens
  misc_RNA (1)...(19): siRNA sense strand
cuuagaacauaugcagcua

SEQ ID NO: 1231087 - RNA, 19 nt, Homo sapiens
  misc_RNA (1)...(19): siRNA sense strand
gcuggaggagaaucuaaug

SEQ ID NO: 1231088 - RNA, 19 nt, Homo sapiens
  misc_RNA (1)...(19): siRNA sense strand
ugacugcaaccagcauuga

SEQ ID NO: 1231089 - RNA, 19 nt, Homo sapiens
  misc_RNA (1)...(19): siRNA sense strand
caaauacuuccgggagaga

SEQ ID NO: 1231090 - RNA, 19 nt, Homo sapiens
  misc_RNA (1)...(19): siRNA sense strand
ggaagauccaggaguccau

SEQ ID NO: 1231091 - RNA, 19 nt, Homo sapiens
  misc_RNA (1)...(19): siRNA sense strand
gguauuuaaggaaguuaug

SEQ ID NO: 1231092 - RNA, 19 nt, Homo sapiens
  misc_RNA (1)...(19): siRNA sense strand
cagcauugaccgauugaag

SEQ ID NO: 1231093 - RNA, 19 nt, Homo sapiens
  misc_RNA (1)...(19): siRNA sense strand
ucuacgaagcucugaagaa

SEQ ID NO: 1231094 - RNA, 19 nt, Homo sapiens
  misc_RNA (1)...(19): siRNA sense strand
gagcacucauacacaucau

SEQ ID NO: 1231095 - RNA, 19 nt, Homo sapiens
  misc_RNA (1)...(19): siRNA sense strand
auccaggaguccauagaaa

SEQ ID NO: 1231096 - RNA, 19 nt, Homo sapiens
  misc_RNA (1)...(19): siRNA sense strand
gaaagaugagcaguuuagg

SEQ ID NO: 1231097 - RNA, 19 nt, Homo sapiens
  misc_RNA (1)...(19): siRNA sense strand
ggagcuggaggagaaucua

SEQ ID NO: 1231098 - RNA, 19 nt, Homo sapiens
  misc_RNA (1)...(19): siRNA sense strand
uggucaaccuuguauacga

SEQ ID NO: 1231099 - RNA, 19 nt, Homo sapiens
  misc_RNA (1)...(19): siRNA sense strand
cugaagaagcuuagaacau

SEQ ID NO: 1231100 - RNA, 19 nt, Homo sapiens
  misc_RNA (1)...(19): siRNA sense strand
uugcaaaugguauugaaga

SEQ ID NO: 1231101 - RNA, 19 nt, Homo sapiens
  misc_RNA (1)...(19): siRNA sense strand
gcagaaagaugagcaguuu

SEQ ID NO: 1231102 - RNA, 19 nt, Homo sapiens
  misc_RNA (1)...(19): siRNA sense strand
ugaagaagcuuagaacaua

SEQ ID NO: 1231103 - RNA, 19 nt, Homo sapiens
  misc_RNA (1)...(19): siRNA sense strand
gaacauaugcagcuauuga

SEQ ID NO: 1231104 - RNA, 19 nt, Homo sapiens
  misc_RNA (1)...(19): siRNA sense strand
gaagaagcuuagaacauau

SEQ ID NO: 1231105 - RNA, 19 nt, Homo sapiens
  misc_RNA (1)...(19): siRNA sense strand
ugacaucacacccaacuua

SEQ ID NO: 1231106 - RNA, 19 nt, Homo sapiens
  misc_RNA (1)...(19): siRNA sense strand
gaagguauuuaaggaaguu

SEQ ID NO: 1231107 - RNA, 19 nt, Homo sapiens
  misc_RNA (1)...(19): siRNA sense strand
caacuuacuuucccuucuu

SEQ ID NO: 1231108 - RNA, 19 nt, Homo sapiens
  misc_RNA (1)...(19): siRNA sense strand
gauugaagguauuuaagga

SEQ ID NO: 1231109 - RNA, 19 nt, Homo sapiens
  misc_RNA (1)...(19): siRNA sense strand
uaauggagcucacucagau

SEQ ID NO: 1231110 - RNA, 19 nt, Homo sapiens
  misc_RNA (1)...(19): siRNA sense strand
cugaagaggccaccaaaua

SEQ ID NO: 1231111 - RNA, 19 nt, Homo sapiens
  misc_RNA (1)...(19): siRNA sense strand
aagaaacgcuuuacugaag

SEQ ID NO: 1231112 - RNA, 19 nt, Homo sapiens
  misc_RNA (1)...(19): siRNA sense strand
ggacgagucuggcccuuac

SEQ ID NO: 1231113 - RNA, 19 nt, Homo sapiens
  misc_RNA (1)...(19): siRNA sense strand
uagaacauaugcagcuauu

SEQ ID NO: 1231114 - RNA, 19 nt, Homo sapiens
  misc_RNA (1)...(19): siRNA sense strand
gaugagcaguuuagggaau

SEQ ID NO: 1231115 - RNA, 19 nt, Homo sapiens
  misc_RNA (1)...(19): siRNA sense strand
caaccagcauugaccgauu

SEQ ID NO: 1231116 - RNA, 19 nt, Homo sapiens
  misc_RNA (1)...(19): siRNA sense strand
ggagcucacucagaucuau

SEQ ID NO: 1231117 - RNA, 19 nt, Homo sapiens
  misc_RNA (1)...(19): siRNA sense strand
cuacgaagcucugaagaag

SEQ ID NO: 1231118 - RNA, 19 nt, Homo sapiens
  misc_RNA (1)...(19): siRNA sense strand
gaaguuaugcgugacauca

SEQ ID NO: 1231119 - RNA, 19 nt, Homo sapiens
  misc_RNA (1)...(19): siRNA sense strand
ggcagaugcucucuacgaa

SEQ ID NO: 1231120 - RNA, 19 nt, Homo sapiens
  misc_RNA (1)...(19): siRNA sense strand
gaagauccaggaguccaua

SEQ ID NO: 1231121 - RNA, 19 nt, Homo sapiens
  misc_RNA (1)...(19): siRNA sense strand
acgaauaugugcagcagaa

SEQ ID NO: 1231122 - RNA, 19 nt, Homo sapiens
  misc_RNA (1)...(19): siRNA sense strand
agucaaagcacuugcauga

SEQ ID NO: 1231123 - RNA, 19 nt, Homo sapiens
  misc_RNA (1)...(19): siRNA sense strand
ugcaaauccugcugacuaa

SEQ ID NO: 1231124 - RNA, 19 nt, Homo sapiens
  misc_RNA (1)...(19): siRNA sense strand
caaugaagccuggaagaga

SEQ ID NO: 1231125 - RNA, 19 nt, Homo sapiens
  misc_RNA (1)...(19): siRNA sense strand
gcacucauacacaucauca

SEQ ID NO: 1231126 - RNA, 19 nt, Homo sapiens
  misc_RNA (1)...(19): siRNA sense strand
gaaacgcuuuacugaagag

SEQ ID NO: 1231127 - RNA, 19 nt, Homo sapiens
  misc_RNA (1)...(19): siRNA sense strand
gaagaggccaccaaauacu

SEQ ID NO: 1231128 - RNA, 19 nt, Homo sapiens
  misc_RNA (1)...(19): siRNA sense strand
cucaggagcuggaggagaa

SEQ ID NO: 1231129 - RNA, 19 nt, Homo sapiens
  misc_RNA (1)...(19): siRNA sense strand
cugcaaauccugcugacua

SEQ ID NO: 1231130 - RNA, 19 nt, Homo sapiens
  misc_RNA (1)...(19): siRNA sense strand
gauccaggaguccauagaa

SEQ ID NO: 1231131 - RNA, 19 nt, Homo sapiens
  misc_RNA (1)...(19): siRNA sense strand
agaaacgcuuuacugaaga

SEQ ID NO: 1231132 - RNA, 19 nt, Homo sapiens
  misc_RNA (1)...(19): siRNA sense strand
gaagccacacaaaccauug

SEQ ID NO: 1231133 - RNA, 19 nt, Homo sapiens
  misc_RNA (1)...(19): siRNA sense strand
cacagaggcugcaccaucu

SEQ ID NO: 1231134 - RNA, 19 nt, Homo sapiens
  misc_RNA (1)...(19): siRNA sense strand
gagcuggaggagaaucuaa

SEQ ID NO: 1231135 - RNA, 19 nt, Homo sapiens
  misc_RNA (1)...(19): siRNA sense strand
cacaaaccauugggaguga

SEQ ID NO: 1231136 - RNA, 19 nt, Homo sapiens
  misc_RNA (1)...(19): siRNA sense strand
caucacacccaacuuacuu

SEQ ID NO: 1231137 - RNA, 19 nt, Homo sapiens
  misc_RNA (1)...(19): siRNA sense strand
ugaggcagaugcucucuac

SEQ ID NO: 1231138 - RNA, 19 nt, Homo sapiens
  misc_RNA (1)...(19): siRNA sense strand
aaugaagccuggaagagau

SEQ ID NO: 1231139 - RNA, 19 nt, Homo sapiens
  misc_RNA (1)...(19): siRNA sense strand
guggagcacucauacacau

SEQ ID NO: 1231140 - RNA, 19 nt, Homo sapiens
  misc_RNA (1)...(19): siRNA sense strand
ugaagaggccaccaaauac

SEQ ID NO: 1231141 - RNA, 19 nt, Homo sapiens
  misc_RNA (1)...(19): siRNA sense strand
caaauccugcugacuaaca

SEQ ID NO: 1231142 - RNA, 19 nt, Homo sapiens
  misc_RNA (1)...(19): siRNA sense strand
uggcgaaucucagcuggaa

SEQ ID NO: 1231143 - RNA, 19 nt, Homo sapiens
  misc_RNA (1)...(19): siRNA sense strand
gcucugaagaagcuuagaa

SEQ ID NO: 1231144 - RNA, 19 nt, Homo sapiens
  misc_RNA (1)...(19): siRNA sense strand
ggagcacucauacacauca

SEQ ID NO: 1231145 - RNA, 19 nt, Homo sapiens
  misc_RNA (1)...(19): siRNA sense strand
gcugcaccaucuccaaugu

SEQ ID NO: 1231146 - RNA, 19 nt, Homo sapiens
  misc_RNA (1)...(19): siRNA sense strand
agaaagaugagcaguuuag

SEQ ID NO: 1231147 - RNA, 19 nt, Homo sapiens
  misc_RNA (1)...(19): siRNA sense strand
gcaguuuagggaaugguuu

SEQ ID NO: 1231148 - RNA, 19 nt, Homo sapiens
  misc_RNA (1)...(19): siRNA sense strand
ggauguggucaaccuugua

SEQ ID NO: 1231149 - RNA, 19 nt, Homo sapiens
  misc_RNA (1)...(19): siRNA sense strand
gaauaugugcagcagaaag

SEQ ID NO: 1231150 - RNA, 19 nt, Homo sapiens
  misc_RNA (1)...(19): siRNA sense strand
gauguggucaaccuuguau

SEQ ID NO: 1231151 - RNA, 19 nt, Homo sapiens
  misc_RNA (1)...(19): siRNA sense strand
cagaaagaugagcaguuua

SEQ ID NO: 1231152 - RNA, 19 nt, Homo sapiens
  misc_RNA (1)...(19): siRNA sense strand
cgucugaauccaugccaua

SEQ ID NO: 1231153 - RNA, 19 nt, Homo sapiens
  misc_RNA (1)...(19): siRNA sense strand
gcgaaucucagcuggaagu

SEQ ID NO: 1231154 - RNA, 19 nt, Homo sapiens
  misc_RNA (1)...(19): siRNA sense strand
gugaccaccuggcgaaucu

SEQ ID NO: 1231155 - RNA, 19 nt, Homo sapiens
  misc_RNA (1)...(19): siRNA sense strand
auacacaucaucagcagaa

SEQ ID NO: 1231156 - RNA, 19 nt, Homo sapiens
  misc_RNA (1)...(19): siRNA sense strand
gggacgagucuggcccuua

SEQ ID NO: 1231157 - RNA, 19 nt, Homo sapiens
  misc_RNA (1)...(19): siRNA sense strand
cgaagccacacaaaccauu

SEQ ID NO: 1231158 - RNA, 19 nt, Homo sapiens
  misc_RNA (1)...(19): siRNA sense strand
aacuuacuuucccuucuua

SEQ ID NO: 1231159 - RNA, 19 nt, Homo sapiens
  misc_RNA (1)...(19): siRNA sense strand
ccaacuuacuuucccuucu

SEQ ID NO: 1231160 - RNA, 19 nt, Homo sapiens
  misc_RNA (1)...(19): siRNA sense strand
aaccagcauugaccgauug

SEQ ID NO: 1231161 - RNA, 19 nt, Homo sapiens
  misc_RNA (1)...(19): siRNA sense strand
caaaccauugggagugaaa

SEQ ID NO: 1231162 - RNA, 19 nt, Homo sapiens
  misc_RNA (1)...(19): siRNA sense strand
gcauugaccgauugaaggu

SEQ ID NO: 1231163 - RNA, 19 nt, Homo sapiens
  misc_RNA (1)...(19): siRNA sense strand
cuaauggagcucacucaga

SEQ ID NO: 1231164 - RNA, 19 nt, Homo sapiens
  misc_RNA (1)...(19): siRNA sense strand
caucuuccuugcacuggau

SEQ ID NO: 1231165 - RNA, 19 nt, Homo sapiens
  misc_RNA (1)...(19): siRNA sense strand
aaauccugcugacuaacaa

SEQ ID NO: 1231166 - RNA, 19 nt, Homo sapiens
  misc_RNA (1)...(19): siRNA sense strand
gcccagggaugaggcagau

SEQ ID NO: 1231167 - RNA, 19 nt, Homo sapiens
  misc_RNA (1)...(19): siRNA sense strand
ugaagguauuuaaggaagu

SEQ ID NO: 1231168 - RNA, 19 nt, Homo sapiens
  misc_RNA (1)...(19): siRNA sense strand
aauaugugcagcagaaaga

SEQ ID NO: 1231169 - RNA, 19 nt, Homo sapiens
  misc_RNA (1)...(19): siRNA sense strand
gcaucguggagcacucaua

SEQ ID NO: 1231170 - RNA, 19 nt, Homo sapiens
  misc_RNA (1)...(19): siRNA sense strand
gucccuugcuggucuuguu

SEQ ID NO: 1231171 - RNA, 19 nt, Homo sapiens
  misc_RNA (1)...(19): siRNA sense strand
ccuugcaaaugguauugaa

SEQ ID NO: 1231172 - RNA, 19 nt, Homo sapiens
  misc_RNA (1)...(19): siRNA sense strand
uggaagugguggucaagca

SEQ ID NO: 1231173 - RNA, 19 nt, Homo sapiens
  misc_RNA (1)...(19): siRNA sense strand
caagcagagagaacgauug

SEQ ID NO: 1231174 - RNA, 19 nt, Homo sapiens
  misc_RNA (1)...(19): siRNA sense strand
ucaagcagagagaacgauu

SEQ ID NO: 1231175 - RNA, 19 nt, Homo sapiens
  misc_RNA (1)...(19): siRNA sense strand
ccugcugacuaacaaugaa

SEQ ID NO: 1231176 - RNA, 19 nt, Homo sapiens
  misc_RNA (1)...(19): siRNA sense strand
cuuagaacauaugcagcua

SEQ ID NO: 1231177 - RNA, 19 nt, Homo sapiens
  misc_RNA (1)...(19): siRNA sense strand
gcuggaggagaaucuaaug

SEQ ID NO: 1231178 - RNA, 19 nt, Homo sapiens
  misc_RNA (1)...(19): siRNA sense strand
ugacugcaaccagcauuga

SEQ ID NO: 1231179 - RNA, 19 nt, Homo sapiens
  misc_RNA (1)...(19): siRNA sense strand
caaauacuuccgggagaga

SEQ ID NO: 1231180 - RNA, 19 nt, Homo sapiens
  misc_RNA (1)...(19): siRNA sense strand
ggaagauccaggaguccau

SEQ ID NO: 1231181 - RNA, 19 nt, Homo sapiens
  misc_RNA (1)...(19): siRNA sense strand
gguauuuaaggaaguuaug

SEQ ID NO: 1231182 - RNA, 19 nt, Homo sapiens
  misc_RNA (1)...(19): siRNA sense strand
cagcauugaccgauugaag

SEQ ID NO: 1231183 - RNA, 19 nt, Homo sapiens
  misc_RNA (1)...(19): siRNA sense strand
ucuacgaagcucugaagaa

SEQ ID NO: 1231184 - RNA, 19 nt, Homo sapiens
  misc_RNA (1)...(19): siRNA sense strand
gagcacucauacacaucau

SEQ ID NO: 1231185 - RNA, 19 nt, Homo sapiens
  misc_RNA (1)...(19): siRNA sense strand
auccaggaguccauagaaa

SEQ ID NO: 1231186 - RNA, 19 nt, Homo sapiens
  misc_RNA (1)...(19): siRNA sense strand
gaaagaugagcaguuuagg

SEQ ID NO: 1231187 - RNA, 19 nt, Homo sapiens
  misc_RNA (1)...(19): siRNA sense strand
ggagcuggaggagaaucua

SEQ ID NO: 1231188 - RNA, 19 nt, Homo sapiens
  misc_RNA (1)...(19): siRNA sense strand
uggucaaccuuguauacga

SEQ ID NO: 1231189 - RNA, 19 nt, Homo sapiens
  misc_RNA (1)...(19): siRNA sense strand
cugaagaagcuuagaacau

SEQ ID NO: 1231190 - RNA, 19 nt, Homo sapiens
  misc_RNA (1)...(19): siRNA sense strand
uugcaaaugguauugaaga

SEQ ID NO: 1231191 - RNA, 19 nt, Homo sapiens
  misc_RNA (1)...(19): siRNA sense strand
gaacgugucugguuauuau

SEQ ID NO: 1231192 - RNA, 19 nt, Homo sapiens
  misc_RNA (1)...(19): siRNA sense strand
gcagaaagaugagcaguuu

SEQ ID NO: 1231193 - RNA, 19 nt, Homo sapiens
  misc_RNA (1)...(19): siRNA sense strand
ugaagaagcuuagaacaua

SEQ ID NO: 1231194 - RNA, 19 nt, Homo sapiens
  misc_RNA (1)...(19): siRNA sense strand
gaacauaugcagcuauuga

SEQ ID NO: 1231195 - RNA, 19 nt, Homo sapiens
  misc_RNA (1)...(19): siRNA sense strand
gaagaagcuuagaacauau

SEQ ID NO: 1231196 - RNA, 19 nt, Homo sapiens
  misc_RNA (1)...(19): siRNA sense strand
ugacaucacacccaacuua

SEQ ID NO: 1231197 - RNA, 19 nt, Homo sapiens
  misc_RNA (1)...(19): siRNA sense strand
gaagguauuuaaggaaguu

SEQ ID NO: 1231198 - RNA, 19 nt, Homo sapiens
  misc_RNA (1)...(19): siRNA sense strand
caacuuacuuucccuucuu

SEQ ID NO: 1231199 - RNA, 19 nt, Homo sapiens
  misc_RNA (1)...(19): siRNA sense strand
gauugaagguauuuaagga

SEQ ID NO: 1231200 - RNA, 19 nt, Homo sapiens
  misc_RNA (1)...(19): siRNA sense strand
uaauggagcucacucagau

SEQ ID NO: 1231201 - RNA, 19 nt, Homo sapiens
  misc_RNA (1)...(19): siRNA sense strand
uggagaacgugucugguua

SEQ ID NO: 1231202 - RNA, 19 nt, Homo sapiens
  misc_RNA (1)...(19): siRNA sense strand
cugaagaggccaccaaaua

SEQ ID NO: 1231203 - RNA, 19 nt, Homo sapiens
  misc_RNA (1)...(19): siRNA sense strand
aagaaacgcuuuacugaag

SEQ ID NO: 1231204 - RNA, 19 nt, Homo sapiens
  misc_RNA (1)...(19): siRNA sense strand
ggacgagucuggcccuuac

SEQ ID NO: 1231205 - RNA, 19 nt, Homo sapiens
  misc_RNA (1)...(19): siRNA sense strand
uagaacauaugcagcuauu

SEQ ID NO: 1231206 - RNA, 19 nt, Homo sapiens
  misc_RNA (1)...(19): siRNA sense strand
gaugagcaguuuagggaau

SEQ ID NO: 1231207 - RNA, 19 nt, Homo sapiens
  misc_RNA (1)...(19): siRNA sense strand
caaccagcauugaccgauu

SEQ ID NO: 1231208 - RNA, 19 nt, Homo sapiens
  misc_RNA (1)...(19): siRNA sense strand
gagaacgugucugguuauu

SEQ ID NO: 1231209 - RNA, 19 nt, Homo sapiens
  misc_RNA (1)...(19): siRNA sense strand
ggagcucacucagaucuau

SEQ ID NO: 1231210 - RNA, 19 nt, Homo sapiens
  misc_RNA (1)...(19): siRNA sense strand
cuacgaagcucugaagaag

SEQ ID NO: 1231211 - RNA, 19 nt, Homo sapiens
  misc_RNA (1)...(19): siRNA sense strand
gaaguuaugcgugacauca

SEQ ID NO: 1231212 - RNA, 19 nt, Homo sapiens
  misc_RNA (1)...(19): siRNA sense strand
ggcagaugcucucuacgaa

SEQ ID NO: 1231213 - RNA, 19 nt, Homo sapiens
  misc_RNA (1)...(19): siRNA sense strand
gaagauccaggaguccaua

SEQ ID NO: 1231214 - RNA, 19 nt, Homo sapiens
  misc_RNA (1)...(19): siRNA sense strand
acgaauaugugcagcagaa

SEQ ID NO: 1231215 - RNA, 19 nt, Homo sapiens
  misc_RNA (1)...(19): siRNA sense strand
agucaaagcacuugcauga

SEQ ID NO: 1231216 - RNA, 19 nt, Homo sapiens
  misc_RNA (1)...(19): siRNA sense strand
ugcaaauccugcugacuaa

SEQ ID NO: 1231217 - RNA, 19 nt, Homo sapiens
  misc_RNA (1)...(19): siRNA sense strand
caaugaagccuggaagaga

SEQ ID NO: 1231218 - RNA, 19 nt, Homo sapiens
  misc_RNA (1)...(19): siRNA sense strand
gcacucauacacaucauca

SEQ ID NO: 1231219 - RNA, 19 nt, Homo sapiens
  misc_RNA (1)...(19): siRNA sense strand
gaaacgcuuuacugaagag

SEQ ID NO: 1231220 - RNA, 19 nt, Homo sapiens
  misc_RNA (1)...(19): siRNA sense strand
gaagaggccaccaaauacu

SEQ ID NO: 1231221 - RNA, 19 nt, Homo sapiens
  misc_RNA (1)...(19): siRNA sense strand
cucaggagcuggaggagaa

SEQ ID NO: 1231222 - RNA, 19 nt, Homo sapiens
  misc_RNA (1)...(19): siRNA sense strand
cugcaaauccugcugacua

SEQ ID NO: 1231223 - RNA, 19 nt, Homo sapiens
  misc_RNA (1)...(19): siRNA sense strand
ggagaacgugucugguuau

SEQ ID NO: 1231224 - RNA, 19 nt, Homo sapiens
  misc_RNA (1)...(19): siRNA sense strand
gauccaggaguccauagaa

SEQ ID NO: 1231225 - RNA, 19 nt, Homo sapiens
  misc_RNA (1)...(19): siRNA sense strand
agaaacgcuuuacugaaga

SEQ ID NO: 1231226 - RNA, 19 nt, Homo sapiens
  misc_RNA (1)...(19): siRNA sense strand
gaagccacacaaaccauug

SEQ ID NO: 1231227 - RNA, 19 nt, Homo sapiens
  misc_RNA (1)...(19): siRNA sense strand
gcucagaacagcuggaucu

SEQ ID NO: 1231228 - RNA, 19 nt, Homo sapiens
  misc_RNA (1)...(19): siRNA sense strand
gaucuugcucacacucuuu

SEQ ID NO: 1231229 - RNA, 19 nt, Homo sapiens
  misc_RNA (1)...(19): siRNA sense strand
cacagaggcugcaccaucu

SEQ ID NO: 1231230 - RNA, 19 nt, Homo sapiens
  misc_RNA (1)...(19): siRNA sense strand
gagcuggaggagaaucuaa

SEQ ID NO: 1231231 - RNA, 19 nt, Homo sapiens
  misc_RNA (1)...(19): siRNA sense strand
cacaaaccauugggaguga

SEQ ID NO: 1231232 - RNA, 19 nt, Homo sapiens
  misc_RNA (1)...(19): siRNA sense strand
caucacacccaacuuacuu

SEQ ID NO: 1231233 - RNA, 19 nt, Homo sapiens
  misc_RNA (1)...(19): siRNA sense strand
aaugaagccuggaagagau

SEQ ID NO: 1231234 - RNA, 19 nt, Homo sapiens
  misc_RNA (1)...(19): siRNA sense strand
ggaucuugcucacacucuu

SEQ ID NO: 1231235 - RNA, 19 nt, Homo sapiens
  misc_RNA (1)...(19): siRNA sense strand
ugaggcagaugcucucuac

SEQ ID NO: 1231236 - RNA, 19 nt, Homo sapiens
  misc_RNA (1)...(19): siRNA sense strand
caaauccugcugacuaaca

SEQ ID NO: 1231237 - RNA, 19 nt, Homo sapiens
  misc_RNA (1)...(19): siRNA sense strand
uggcgaaucucagcuggaa

SEQ ID NO: 1231238 - RNA, 19 nt, Homo sapiens
  misc_RNA (1)...(19): siRNA sense strand
guggagcacucauacacau

SEQ ID NO: 1231239 - RNA, 19 nt, Homo sapiens
  misc_RNA (1)...(19): siRNA sense strand
ugaagaggccaccaaauac

SEQ ID NO: 1231240 - RNA, 19 nt, Homo sapiens
  misc_RNA (1)...(19): siRNA sense strand
gcucugaagaagcuuagaa

SEQ ID NO: 1231241 - RNA, 19 nt, Homo sapiens
  misc_RNA (1)...(19): siRNA sense strand
ggagcacucauacacauca

SEQ ID NO: 1231242 - RNA, 19 nt, Homo sapiens
  misc_RNA (1)...(19): siRNA sense strand
gcugcaccaucuccaaugu

SEQ ID NO: 1231243 - RNA, 19 nt, Homo sapiens
  misc_RNA (1)...(19): siRNA sense strand
agaaagaugagcaguuuag

SEQ ID NO: 1231244 - RNA, 19 nt, Homo sapiens
  misc_RNA (1)...(19): siRNA sense strand
gcaguuuagggaaugguuu

SEQ ID NO: 1231245 - RNA, 19 nt, Homo sapiens
  misc_RNA (1)...(19): siRNA sense strand
ggauguggucaaccuugua

SEQ ID NO: 1231246 - RNA, 19 nt, Homo sapiens
  misc_RNA (1)...(19): siRNA sense strand
gaauaugugcagcagaaag

SEQ ID NO: 1231247 - RNA, 19 nt, Homo sapiens
  misc_RNA (1)...(19): siRNA sense strand
gauguggucaaccuuguau

SEQ ID NO: 1231248 - RNA, 19 nt, Homo sapiens
  misc_RNA (1)...(19): siRNA sense strand
cagaaagaugagcaguuua

SEQ ID NO: 1231249 - RNA, 19 nt, Homo sapiens
  misc_RNA (1)...(19): siRNA sense strand
cgucugaauccaugccaua

SEQ ID NO: 1231250 - RNA, 19 nt, Homo sapiens
  misc_RNA (1)...(19): siRNA sense strand
gcgaaucucagcuggaagu

SEQ ID NO: 1231251 - RNA, 19 nt, Homo sapiens
  misc_RNA (1)...(19): siRNA sense strand
gugaccaccuggcgaaucu

SEQ ID NO: 1231252 - RNA, 19 nt, Homo sapiens
  misc_RNA (1)...(19): siRNA sense strand
auacacaucaucagcagaa

SEQ ID NO: 1231253 - RNA, 19 nt, Homo sapiens
  misc_RNA (1)...(19): siRNA sense strand
gggacgagucuggcccuua

SEQ ID NO: 1231254 - RNA, 19 nt, Homo sapiens
  misc_RNA (1)...(19): siRNA sense strand
cgaagccacacaaaccauu

SEQ ID NO: 1231255 - RNA, 19 nt, Homo sapiens
  misc_RNA (1)...(19): siRNA sense strand
aacuuacuuucccuucuua

SEQ ID NO: 1231256 - RNA, 19 nt, Homo sapiens
  misc_RNA (1)...(19): siRNA sense strand
ccaacuuacuuucccuucu

SEQ ID NO: 1231257 - RNA, 19 nt, Homo sapiens
  misc_RNA (1)...(19): siRNA sense strand
aaccagcauugaccgauug

SEQ ID NO: 1231258 - RNA, 19 nt, Homo sapiens
  misc_RNA (1)...(19): siRNA sense strand
caaaccauugggagugaaa

SEQ ID NO: 1231259 - RNA, 19 nt, Homo sapiens
  misc_RNA (1)...(19): siRNA sense strand
gcccagggaugaggcagau

SEQ ID NO: 1231260 - RNA, 19 nt, Homo sapiens
  misc_RNA (1)...(19): siRNA sense strand
cuaauggagcucacucaga

SEQ ID NO: 1231261 - RNA, 19 nt, Homo sapiens
  misc_RNA (1)...(19): siRNA sense strand
caucuuccuugcacuggau

SEQ ID NO: 1231262 - RNA, 19 nt, Homo sapiens
  misc_RNA (1)...(19): siRNA sense strand
ugaagguauuuaaggaagu

SEQ ID NO: 1231263 - RNA, 19 nt, Homo sapiens
  misc_RNA (1)...(19): siRNA sense strand
gcauugaccgauugaaggu

SEQ ID NO: 1231264 - RNA, 19 nt, Homo sapiens
  misc_RNA (1)...(19): siRNA sense strand
aaauccugcugacuaacaa

SEQ ID NO: 1231265 - RNA, 19 nt, Homo sapiens
  misc_RNA (1)...(19): siRNA sense strand
aauaugugcagcagaaaga

SEQ ID NO: 1231266 - RNA, 19 nt, Homo sapiens
  misc_RNA (1)...(19): siRNA sense strand
gcaucguggagcacucaua

SEQ ID NO: 1231267 - RNA, 19 nt, Homo sapiens
  misc_RNA (1)...(19): siRNA sense strand
gucccuugcuggucuuguu

SEQ ID NO: 1231268 - RNA, 19 nt, Homo sapiens
  misc_RNA (1)...(19): siRNA sense strand
ccuugcaaaugguauugaa

SEQ ID NO: 1231269 - RNA, 19 nt, Homo sapiens
  misc_RNA (1)...(19): siRNA sense strand
uggaagugguggucaagca

SEQ ID NO: 1231270 - RNA, 19 nt, Homo sapiens
  misc_RNA (1)...(19): siRNA sense strand
caagcagagagaacgauug

SEQ ID NO: 1231271 - RNA, 19 nt, Homo sapiens
  misc_RNA (1)...(19): siRNA sense strand
agaacgugucugguuauua

SEQ ID NO: 1231272 - RNA, 19 nt, Homo sapiens
  misc_RNA (1)...(19): siRNA sense strand
ucaagcagagagaacgauu

SEQ ID NO: 1231273 - RNA, 19 nt, Homo sapiens
  misc_RNA (1)...(19): siRNA sense strand
ccugcugacuaacaaugaa

SEQ ID NO: 1231274 - RNA, 19 nt, Homo sapiens
  misc_RNA (1)...(19): siRNA sense strand
cuuagaacauaugcagcua

SEQ ID NO: 1231275 - RNA, 19 nt, Homo sapiens
  misc_RNA (1)...(19): siRNA sense strand
gcuggaggagaaucuaaug

SEQ ID NO: 1231276 - RNA, 19 nt, Homo sapiens
  misc_RNA (1)...(19): siRNA sense strand
caaauacuuccgggagaga

SEQ ID NO: 1231277 - RNA, 19 nt, Homo sapiens
  misc_RNA (1)...(19): siRNA sense strand
ugacugcaaccagcauuga

SEQ ID NO: 1231278 - RNA, 19 nt, Homo sapiens
  misc_RNA (1)...(19): siRNA sense strand
ucagaacagcuggaucuug

SEQ ID NO: 1231279 - RNA, 19 nt, Homo sapiens
  misc_RNA (1)...(19): siRNA sense strand
ucuacgaagcucugaagaa

SEQ ID NO: 1231280 - RNA, 19 nt, Homo sapiens
  misc_RNA (1)...(19): siRNA sense strand
gguauuuaaggaaguuaug

SEQ ID NO: 1231281 - RNA, 19 nt, Homo sapiens
  misc_RNA (1)...(19): siRNA sense strand
cagcauugaccgauugaag

SEQ ID NO: 1231282 - RNA, 19 nt, Homo sapiens
  misc_RNA (1)...(19): siRNA sense strand
gagcacucauacacaucau

SEQ ID NO: 1231283 - RNA, 19 nt, Homo sapiens
  misc_RNA (1)...(19): siRNA sense strand
auccaggaguccauagaaa

SEQ ID NO: 1231284 - RNA, 19 nt, Homo sapiens
  misc_RNA (1)...(19): siRNA sense strand
ggaagauccaggaguccau

SEQ ID NO: 1231285 - RNA, 19 nt, Homo sapiens
  misc_RNA (1)...(19): siRNA sense strand
gaaagaugagcaguuuagg

SEQ ID NO: 1231286 - RNA, 19 nt, Homo sapiens
  misc_RNA (1)...(19): siRNA sense strand
ggagcuggaggagaaucua

SEQ ID NO: 1231287 - RNA, 19 nt, Homo sapiens
  misc_RNA (1)...(19): siRNA sense strand
uggucaaccuuguauacga

SEQ ID NO: 1231288 - RNA, 19 nt, Homo sapiens
  misc_RNA (1)...(19): siRNA sense strand
uugcaaaugguauugaaga

SEQ ID NO: 1231289 - RNA, 19 nt, Homo sapiens
  misc_RNA (1)...(19): siRNA sense strand
cugaagaagcuuagaacau

SEQ ID NO: 1231290 - RNA, 19 nt, Homo sapiens
  misc_RNA (1)...(19): siRNA sense strand
ugacaucacacccaacuua

SEQ ID NO: 1231291 - RNA, 19 nt, Homo sapiens
  misc_RNA (1)...(19): siRNA sense strand
gaagguauuuaaggaaguu

SEQ ID NO: 1231292 - RNA, 19 nt, Homo sapiens
  misc_RNA (1)...(19): siRNA sense strand
caacuuacuuucccuucuu

SEQ ID NO: 1231293 - RNA, 19 nt, Homo sapiens
  misc_RNA (1)...(19): siRNA sense strand
gauugaagguauuuaagga

SEQ ID NO: 1231294 - RNA, 19 nt, Homo sapiens
  misc_RNA (1)...(19): siRNA sense strand
uaauggagcucacucagau

SEQ ID NO: 1231295 - RNA, 19 nt, Homo sapiens
  misc_RNA (1)...(19): siRNA sense strand
ggacgagucuggcccuuac

SEQ ID NO: 1231296 - RNA, 19 nt, Homo sapiens
  misc_RNA (1)...(19): siRNA sense strand
caaccagcauugaccgauu

SEQ ID NO: 1231297 - RNA, 19 nt, Homo sapiens
  misc_RNA (1)...(19): siRNA sense strand
ggagcucacucagaucuau

SEQ ID NO: 1231298 - RNA, 19 nt, Homo sapiens
  misc_RNA (1)...(19): siRNA sense strand
gaaguuaugcgugacauca

SEQ ID NO: 1231299 - RNA, 19 nt, Homo sapiens
  misc_RNA (1)...(19): siRNA sense strand
agucaaagcacuugcauga

SEQ ID NO: 1231300 - RNA, 19 nt, Homo sapiens
  misc_RNA (1)...(19): siRNA sense strand
gcacucauacacaucauca

SEQ ID NO: 1231301 - RNA, 19 nt, Homo sapiens
  misc_RNA (1)...(19): siRNA sense strand
cucaggagcuggaggagaa

SEQ ID NO: 1231302 - RNA, 19 nt, Homo sapiens
  misc_RNA (1)...(19): siRNA sense strand
gaagccacacaaaccauug

SEQ ID NO: 1231303 - RNA, 19 nt, Homo sapiens
  misc_RNA (1)...(19): siRNA sense strand
caucacacccaacuuacuu

SEQ ID NO: 1231304 - RNA, 19 nt, Homo sapiens
  misc_RNA (1)...(19): siRNA sense strand
gagcuggaggagaaucuaa

SEQ ID NO: 1231305 - RNA, 19 nt, Homo sapiens
  misc_RNA (1)...(19): siRNA sense strand
cacaaaccauugggaguga

SEQ ID NO: 1231306 - RNA, 19 nt, Homo sapiens
  misc_RNA (1)...(19): siRNA sense strand
guggagcacucauacacau

SEQ ID NO: 1231307 - RNA, 19 nt, Homo sapiens
  misc_RNA (1)...(19): siRNA sense strand
uggcgaaucucagcuggaa

SEQ ID NO: 1231308 - RNA, 19 nt, Homo sapiens
  misc_RNA (1)...(19): siRNA sense strand
ggagcacucauacacauca

SEQ ID NO: 1231309 - RNA, 19 nt, Homo sapiens
  misc_RNA (1)...(19): siRNA sense strand
ggauguggucaaccuugua

SEQ ID NO: 1231310 - RNA, 19 nt, Homo sapiens
  misc_RNA (1)...(19): siRNA sense strand
gauguggucaaccuuguau

SEQ ID NO: 1231311 - RNA, 19 nt, Homo sapiens
  misc_RNA (1)...(19): siRNA sense strand
gugaccaccuggcgaaucu

SEQ ID NO: 1231312 - RNA, 19 nt, Homo sapiens
  misc_RNA (1)...(19): siRNA sense strand
cgucugaauccaugccaua

SEQ ID NO: 1231313 - RNA, 19 nt, Homo sapiens
  misc_RNA (1)...(19): siRNA sense strand
gcgaaucucagcuggaagu

SEQ ID NO: 1231314 - RNA, 19 nt, Homo sapiens
  misc_RNA (1)...(19): siRNA sense strand
auacacaucaucagcagaa

SEQ ID NO: 1231315 - RNA, 19 nt, Homo sapiens
  misc_RNA (1)...(19): siRNA sense strand
aaccagcauugaccgauug

SEQ ID NO: 1231316 - RNA, 19 nt, Homo sapiens
  misc_RNA (1)...(19): siRNA sense strand
gggacgagucuggcccuua

SEQ ID NO: 1231317 - RNA, 19 nt, Homo sapiens
  misc_RNA (1)...(19): siRNA sense strand
cgaagccacacaaaccauu

SEQ ID NO: 1231318 - RNA, 19 nt, Homo sapiens
  misc_RNA (1)...(19): siRNA sense strand
aacuuacuuucccuucuua

SEQ ID NO: 1231319 - RNA, 19 nt, Homo sapiens
  misc_RNA (1)...(19): siRNA sense strand
ccaacuuacuuucccuucu

SEQ ID NO: 1231320 - RNA, 19 nt, Homo sapiens
  misc_RNA (1)...(19): siRNA sense strand
caaaccauugggagugaaa

SEQ ID NO: 1231321 - RNA, 19 nt, Homo sapiens
  misc_RNA (1)...(19): siRNA sense strand
gcauugaccgauugaaggu

SEQ ID NO: 1231322 - RNA, 19 nt, Homo sapiens
  misc_RNA (1)...(19): siRNA sense strand
cuaauggagcucacucaga

SEQ ID NO: 1231323 - RNA, 19 nt, Homo sapiens
  misc_RNA (1)...(19): siRNA sense strand
caucuuccuugcacuggau

SEQ ID NO: 1231324 - RNA, 19 nt, Homo sapiens
  misc_RNA (1)...(19): siRNA sense strand
ugaagguauuuaaggaagu

SEQ ID NO: 1231325 - RNA, 19 nt, Homo sapiens
  misc_RNA (1)...(19): siRNA sense strand
gucccuugcuggucuuguu

SEQ ID NO: 1231326 - RNA, 19 nt, Homo sapiens
  misc_RNA (1)...(19): siRNA sense strand
gcaucguggagcacucaua

SEQ ID NO: 1231327 - RNA, 19 nt, Homo sapiens
  misc_RNA (1)...(19): siRNA sense strand
uggaagugguggucaagca

SEQ ID NO: 1231328 - RNA, 19 nt, Homo sapiens
  misc_RNA (1)...(19): siRNA sense strand
caagcagagagaacgauug

SEQ ID NO: 1231329 - RNA, 19 nt, Homo sapiens
  misc_RNA (1)...(19): siRNA sense strand
ucaagcagagagaacgauu

SEQ ID NO: 1231330 - RNA, 19 nt, Homo sapiens
  misc_RNA (1)...(19): siRNA sense strand
ugacugcaaccagcauuga

SEQ ID NO: 1231331 - RNA, 19 nt, Homo sapiens
  misc_RNA (1)...(19): siRNA sense strand
gcuggaggagaaucuaaug

SEQ ID NO: 1231332 - RNA, 19 nt, Homo sapiens
  misc_RNA (1)...(19): siRNA sense strand
cagcauugaccgauugaag

SEQ ID NO: 1231333 - RNA, 19 nt, Homo sapiens
  misc_RNA (1)...(19): siRNA sense strand
gagcacucauacacaucau

SEQ ID NO: 1231334 - RNA, 19 nt, Homo sapiens
  misc_RNA (1)...(19): siRNA sense strand
gguauuuaaggaaguuaug

SEQ ID NO: 1231335 - RNA, 19 nt, Homo sapiens
  misc_RNA (1)...(19): siRNA sense strand
uggucaaccuuguauacga

SEQ ID NO: 1231336 - RNA, 19 nt, Homo sapiens
  misc_RNA (1)...(19): siRNA sense strand
ggagcuggaggagaaucua

SEQ ID NO: 1231337 - RNA, 19 nt, Homo sapiens
  misc_RNA (1)...(19): siRNA sense strand
ugacaucacacccaacuua

SEQ ID NO: 1231338 - RNA, 19 nt, Homo sapiens
  misc_RNA (1)...(19): siRNA sense strand
gaagguauuuaaggaaguu

SEQ ID NO: 1231339 - RNA, 19 nt, Homo sapiens
  misc_RNA (1)...(19): siRNA sense strand
caacuuacuuucccuucuu

SEQ ID NO: 1231340 - RNA, 19 nt, Homo sapiens
  misc_RNA (1)...(19): siRNA sense strand
gauugaagguauuuaagga

SEQ ID NO: 1231341 - RNA, 19 nt, Homo sapiens
  misc_RNA (1)...(19): siRNA sense strand
uaauggagcucacucagau

SEQ ID NO: 1231342 - RNA, 19 nt, Homo sapiens
  misc_RNA (1)...(19): siRNA sense strand
ggacgagucuggcccuuac

SEQ ID NO: 1231343 - RNA, 19 nt, Homo sapiens
  misc_RNA (1)...(19): siRNA sense strand
caaccagcauugaccgauu

SEQ ID NO: 1231344 - RNA, 19 nt, Homo sapiens
  misc_RNA (1)...(19): siRNA sense strand
ggagcucacucagaucuau

SEQ ID NO: 1231345 - RNA, 19 nt, Homo sapiens
  misc_RNA (1)...(19): siRNA sense strand
gaaguuaugcgugacauca

SEQ ID NO: 1231346 - RNA, 19 nt, Homo sapiens
  misc_RNA (1)...(19): siRNA sense strand
agucaaagcacuugcauga

SEQ ID NO: 1231347 - RNA, 19 nt, Homo sapiens
  misc_RNA (1)...(19): siRNA sense strand
gcacucauacacaucauca

SEQ ID NO: 1231348 - RNA, 19 nt, Homo sapiens
  misc_RNA (1)...(19): siRNA sense strand
cucaggagcuggaggagaa

SEQ ID NO: 1231349 - RNA, 19 nt, Homo sapiens
  misc_RNA (1)...(19): siRNA sense strand
gaagccacacaaaccauug

SEQ ID NO: 1231350 - RNA, 19 nt, Homo sapiens
  misc_RNA (1)...(19): siRNA sense strand
caucacacccaacuuacuu

SEQ ID NO: 1231351 - RNA, 19 nt, Homo sapiens
  misc_RNA (1)...(19): siRNA sense strand
gagcuggaggagaaucuaa

SEQ ID NO: 1231352 - RNA, 19 nt, Homo sapiens
  misc_RNA (1)...(19): siRNA sense strand
cacaaaccauugggaguga

SEQ ID NO: 1231353 - RNA, 19 nt, Homo sapiens
  misc_RNA (1)...(19): siRNA sense strand
guggagcacucauacacau

SEQ ID NO: 1231354 - RNA, 19 nt, Homo sapiens
  misc_RNA (1)...(19): siRNA sense strand
uggcgaaucucagcuggaa

SEQ ID NO: 1231355 - RNA, 19 nt, Homo sapiens
  misc_RNA (1)...(19): siRNA sense strand
ggagcacucauacacauca

SEQ ID NO: 1231356 - RNA, 19 nt, Homo sapiens
  misc_RNA (1)...(19): siRNA sense strand
ggauguggucaaccuugua

SEQ ID NO: 1231357 - RNA, 19 nt, Homo sapiens
  misc_RNA (1)...(19): siRNA sense strand
gauguggucaaccuuguau

SEQ ID NO: 1231358 - RNA, 19 nt, Homo sapiens
  misc_RNA (1)...(19): siRNA sense strand
gugaccaccuggcgaaucu

SEQ ID NO: 1231359 - RNA, 19 nt, Homo sapiens
  misc_RNA (1)...(19): siRNA sense strand
cgucugaauccaugccaua

SEQ ID NO: 1231360 - RNA, 19 nt, Homo sapiens
  misc_RNA (1)...(19): siRNA sense strand
gcgaaucucagcuggaagu

SEQ ID NO: 1231361 - RNA, 19 nt, Homo sapiens
  misc_RNA (1)...(19): siRNA sense strand
auacacaucaucagcagaa

SEQ ID NO: 1231362 - RNA, 19 nt, Homo sapiens
  misc_RNA (1)...(19): siRNA sense strand
aaccagcauugaccgauug

SEQ ID NO: 1231363 - RNA, 19 nt, Homo sapiens
  misc_RNA (1)...(19): siRNA sense strand
gggacgagucuggcccuua

SEQ ID NO: 1231364 - RNA, 19 nt, Homo sapiens
  misc_RNA (1)...(19): siRNA sense strand
cgaagccacacaaaccauu

SEQ ID NO: 1231365 - RNA, 19 nt, Homo sapiens
  misc_RNA (1)...(19): siRNA sense strand
aacuuacuuucccuucuua

SEQ ID NO: 1231366 - RNA, 19 nt, Homo sapiens
  misc_RNA (1)...(19): siRNA sense strand
ccaacuuacuuucccuucu

SEQ ID NO: 1231367 - RNA, 19 nt, Homo sapiens
  misc_RNA (1)...(19): siRNA sense strand
caaaccauugggagugaaa

SEQ ID NO: 1231368 - RNA, 19 nt, Homo sapiens
  misc_RNA (1)...(19): siRNA sense strand
gcauugaccgauugaaggu

SEQ ID NO: 1231369 - RNA, 19 nt, Homo sapiens
  misc_RNA (1)...(19): siRNA sense strand
cuaauggagcucacucaga

SEQ ID NO: 1231370 - RNA, 19 nt, Homo sapiens
  misc_RNA (1)...(19): siRNA sense strand
caucuuccuugcacuggau

SEQ ID NO: 1231371 - RNA, 19 nt, Homo sapiens
  misc_RNA (1)...(19): siRNA sense strand
ugaagguauuuaaggaagu

SEQ ID NO: 1231372 - RNA, 19 nt, Homo sapiens
  misc_RNA (1)...(19): siRNA sense strand
gucccuugcuggucuuguu

SEQ ID NO: 1231373 - RNA, 19 nt, Homo sapiens
  misc_RNA (1)...(19): siRNA sense strand
gcaucguggagcacucaua

SEQ ID NO: 1231374 - RNA, 19 nt, Homo sapiens
  misc_RNA (1)...(19): siRNA sense strand
uggaagugguggucaagca

SEQ ID NO: 1231375 - RNA, 19 nt, Homo sapiens
  misc_RNA (1)...(19): siRNA sense strand
caagcagagagaacgauug

SEQ ID NO: 1231376 - RNA, 19 nt, Homo sapiens
  misc_RNA (1)...(19): siRNA sense strand
ucaagcagagagaacgauu

SEQ ID NO: 1231377 - RNA, 19 nt, Homo sapiens
  misc_RNA (1)...(19): siRNA sense strand
ugacugcaaccagcauuga

SEQ ID NO: 1231378 - RNA, 19 nt, Homo sapiens
  misc_RNA (1)...(19): siRNA sense strand
gcuggaggagaaucuaaug

SEQ ID NO: 1231379 - RNA, 19 nt, Homo sapiens
  misc_RNA (1)...(19): siRNA sense strand
cagcauugaccgauugaag

SEQ ID NO: 1231380 - RNA, 19 nt, Homo sapiens
  misc_RNA (1)...(19): siRNA sense strand
gagcacucauacacaucau

SEQ ID NO: 1231381 - RNA, 19 nt, Homo sapiens
  misc_RNA (1)...(19): siRNA sense strand
gguauuuaaggaaguuaug

SEQ ID NO: 1231382 - RNA, 19 nt, Homo sapiens
  misc_RNA (1)...(19): siRNA sense strand
uggucaaccuuguauacga

SEQ ID NO: 1231383 - RNA, 19 nt, Homo sapiens
  misc_RNA (1)...(19): siRNA sense strand
ggagcuggaggagaaucua

SEQ ID NO: 1231384 - RNA, 19 nt, Homo sapiens
  misc_RNA (1)...(19): siRNA sense strand
gcagaaagaugagcaguuu

SEQ ID NO: 1231385 - RNA, 19 nt, Homo sapiens
  misc_RNA (1)...(19): siRNA sense strand
ugaagaagcuuagaacaua

SEQ ID NO: 1231386 - RNA, 19 nt, Homo sapiens
  misc_RNA (1)...(19): siRNA sense strand
gaacauaugcagcuauuga

SEQ ID NO: 1231387 - RNA, 19 nt, Homo sapiens
  misc_RNA (1)...(19): siRNA sense strand
gaagaagcuuagaacauau

SEQ ID NO: 1231388 - RNA, 19 nt, Homo sapiens
  misc_RNA (1)...(19): siRNA sense strand
ugacaucacacccaacuua

SEQ ID NO: 1231389 - RNA, 19 nt, Homo sapiens
  misc_RNA (1)...(19): siRNA sense strand
gaagguauuuaaggaaguu

SEQ ID NO: 1231390 - RNA, 19 nt, Homo sapiens
  misc_RNA (1)...(19): siRNA sense strand
caacuuacuuucccuucuu

SEQ ID NO: 1231391 - RNA, 19 nt, Homo sapiens
  misc_RNA (1)...(19): siRNA sense strand
gauugaagguauuuaagga

SEQ ID NO: 1231392 - RNA, 19 nt, Homo sapiens
  misc_RNA (1)...(19): siRNA sense strand
uaauggagcucacucagau

SEQ ID NO: 1231393 - RNA, 19 nt, Homo sapiens
  misc_RNA (1)...(19): siRNA sense strand
cugaagaggccaccaaaua

SEQ ID NO: 1231394 - RNA, 19 nt, Homo sapiens
  misc_RNA (1)...(19): siRNA sense strand
aagaaacgcuuuacugaag

SEQ ID NO: 1231395 - RNA, 19 nt, Homo sapiens
  misc_RNA (1)...(19): siRNA sense strand
ggacgagucuggcccuuac

SEQ ID NO: 1231396 - RNA, 19 nt, Homo sapiens
  misc_RNA (1)...(19): siRNA sense strand
uagaacauaugcagcuauu

SEQ ID NO: 1231397 - RNA, 19 nt, Homo sapiens
  misc_RNA (1)...(19): siRNA sense strand
gaugagcaguuuagggaau

SEQ ID NO: 1231398 - RNA, 19 nt, Homo sapiens
  misc_RNA (1)...(19): siRNA sense strand
caaccagcauugaccgauu

SEQ ID NO: 1231399 - RNA, 19 nt, Homo sapiens
  misc_RNA (1)...(19): siRNA sense strand
ggagcucacucagaucuau

SEQ ID NO: 1231400 - RNA, 19 nt, Homo sapiens
  misc_RNA (1)...(19): siRNA sense strand
cuacgaagcucugaagaag

SEQ ID NO: 1231401 - RNA, 19 nt, Homo sapiens
  misc_RNA (1)...(19): siRNA sense strand
gaaguuaugcgugacauca

SEQ ID NO: 1231402 - RNA, 19 nt, Homo sapiens
  misc_RNA (1)...(19): siRNA sense strand
ggcagaugcucucuacgaa

SEQ ID NO: 1231403 - RNA, 19 nt, Homo sapiens
  misc_RNA (1)...(19): siRNA sense strand
gaagauccaggaguccaua

SEQ ID NO: 1231404 - RNA, 19 nt, Homo sapiens
  misc_RNA (1)...(19): siRNA sense strand
acgaauaugugcagcagaa

SEQ ID NO: 1231405 - RNA, 19 nt, Homo sapiens
  misc_RNA (1)...(19): siRNA sense strand
agucaaagcacuugcauga

SEQ ID NO: 1231406 - RNA, 19 nt, Homo sapiens
  misc_RNA (1)...(19): siRNA sense strand
ugcaaauccugcugacuaa

SEQ ID NO: 1231407 - RNA, 19 nt, Homo sapiens
  misc_RNA (1)...(19): siRNA sense strand
caaugaagccuggaagaga

SEQ ID NO: 1231408 - RNA, 19 nt, Homo sapiens
  misc_RNA (1)...(19): siRNA sense strand
gcacucauacacaucauca

SEQ ID NO: 1231409 - RNA, 19 nt, Homo sapiens
  misc_RNA (1)...(19): siRNA sense strand
gaaacgcuuuacugaagag

SEQ ID NO: 1231410 - RNA, 19 nt, Homo sapiens
  misc_RNA (1)...(19): siRNA sense strand
gaagaggccaccaaauacu

SEQ ID NO: 1231411 - RNA, 19 nt, Homo sapiens
  misc_RNA (1)...(19): siRNA sense strand
cucaggagcuggaggagaa

SEQ ID NO: 1231412 - RNA, 19 nt, Homo sapiens
  misc_RNA (1)...(19): siRNA sense strand
cugcaaauccugcugacua

SEQ ID NO: 1231413 - RNA, 19 nt, Homo sapiens
  misc_RNA (1)...(19): siRNA sense strand
gauccaggaguccauagaa

SEQ ID NO: 1231414 - RNA, 19 nt, Homo sapiens
  misc_RNA (1)...(19): siRNA sense strand
agaaacgcuuuacugaaga

SEQ ID NO: 1231415 - RNA, 19 nt, Homo sapiens
  misc_RNA (1)...(19): siRNA sense strand
gaagccacacaaaccauug

SEQ ID NO: 1231416 - RNA, 19 nt, Homo sapiens
  misc_RNA (1)...(19): siRNA sense strand
cacagaggcugcaccaucu

SEQ ID NO: 1231417 - RNA, 19 nt, Homo sapiens
  misc_RNA (1)...(19): siRNA sense strand
gagcuggaggagaaucuaa

SEQ ID NO: 1231418 - RNA, 19 nt, Homo sapiens
  misc_RNA (1)...(19): siRNA sense strand
cacaaaccauugggaguga

SEQ ID NO: 1231419 - RNA, 19 nt, Homo sapiens
  misc_RNA (1)...(19): siRNA sense strand
caucacacccaacuuacuu

SEQ ID NO: 1231420 - RNA, 19 nt, Homo sapiens
  misc_RNA (1)...(19): siRNA sense strand
ugaggcagaugcucucuac

SEQ ID NO: 1231421 - RNA, 19 nt, Homo sapiens
  misc_RNA (1)...(19): siRNA sense strand
aaugaagccuggaagagau

SEQ ID NO: 1231422 - RNA, 19 nt, Homo sapiens
  misc_RNA (1)...(19): siRNA sense strand
guggagcacucauacacau

SEQ ID NO: 1231423 - RNA, 19 nt, Homo sapiens
  misc_RNA (1)...(19): siRNA sense strand
ugaagaggccaccaaauac

SEQ ID NO: 1231424 - RNA, 19 nt, Homo sapiens
  misc_RNA (1)...(19): siRNA sense strand
caaauccugcugacuaaca

SEQ ID NO: 1231425 - RNA, 19 nt, Homo sapiens
  misc_RNA (1)...(19): siRNA sense strand
uggcgaaucucagcuggaa

SEQ ID NO: 1231426 - RNA, 19 nt, Homo sapiens
  misc_RNA (1)...(19): siRNA sense strand
gcucugaagaagcuuagaa

SEQ ID NO: 1231427 - RNA, 19 nt, Homo sapiens
  misc_RNA (1)...(19): siRNA sense strand
ggagcacucauacacauca

SEQ ID NO: 1231428 - RNA, 19 nt, Homo sapiens
  misc_RNA (1)...(19): siRNA sense strand
gcugcaccaucuccaaugu

SEQ ID NO: 1231429 - RNA, 19 nt, Homo sapiens
  misc_RNA (1)...(19): siRNA sense strand
agaaagaugagcaguuuag

SEQ ID NO: 1231430 - RNA, 19 nt, Homo sapiens
  misc_RNA (1)...(19): siRNA sense strand
gcaguuuagggaaugguuu

SEQ ID NO: 1231431 - RNA, 19 nt, Homo sapiens
  misc_RNA (1)...(19): siRNA sense strand
ggauguggucaaccuugua

SEQ ID NO: 1231432 - RNA, 19 nt, Homo sapiens
  misc_RNA (1)...(19): siRNA sense strand
gaauaugugcagcagaaag

SEQ ID NO: 1231433 - RNA, 19 nt, Homo sapiens
  misc_RNA (1)...(19): siRNA sense strand
gauguggucaaccuuguau

SEQ ID NO: 1231434 - RNA, 19 nt, Homo sapiens
  misc_RNA (1)...(19): siRNA sense strand
cagaaagaugagcaguuua

SEQ ID NO: 1231435 - RNA, 19 nt, Homo sapiens
  misc_RNA (1)...(19): siRNA sense strand
cgucugaauccaugccaua

SEQ ID NO: 1231436 - RNA, 19 nt, Homo sapiens
  misc_RNA (1)...(19): siRNA sense strand
gcgaaucucagcuggaagu

SEQ ID NO: 1231437 - RNA, 19 nt, Homo sapiens
  misc_RNA (1)...(19): siRNA sense strand
gugaccaccuggcgaaucu

SEQ ID NO: 1231438 - RNA, 19 nt, Homo sapiens
  misc_RNA (1)...(19): siRNA sense strand
auacacaucaucagcagaa

SEQ ID NO: 1231439 - RNA, 19 nt, Homo sapiens
  misc_RNA (1)...(19): siRNA sense strand
gggacgagucuggcccuua

SEQ ID NO: 1231440 - RNA, 19 nt, Homo sapiens
  misc_RNA (1)...(19): siRNA sense strand
cgaagccacacaaaccauu

SEQ ID NO: 1231441 - RNA, 19 nt, Homo sapiens
  misc_RNA (1)...(19): siRNA sense strand
aacuuacuuucccuucuua

SEQ ID NO: 1231442 - RNA, 19 nt, Homo sapiens
  misc_RNA (1)...(19): siRNA sense strand
ccaacuuacuuucccuucu

SEQ ID NO: 1231443 - RNA, 19 nt, Homo sapiens
  misc_RNA (1)...(19): siRNA sense strand
aaccagcauugaccgauug

SEQ ID NO: 1231444 - RNA, 19 nt, Homo sapiens
  misc_RNA (1)...(19): siRNA sense strand
caaaccauugggagugaaa

SEQ ID NO: 1231445 - RNA, 19 nt, Homo sapiens
  misc_RNA (1)...(19): siRNA sense strand
gcauugaccgauugaaggu

SEQ ID NO: 1231446 - RNA, 19 nt, Homo sapiens
  misc_RNA (1)...(19): siRNA sense strand
cuaauggagcucacucaga

SEQ ID NO: 1231447 - RNA, 19 nt, Homo sapiens
  misc_RNA (1)...(19): siRNA sense strand
caucuuccuugcacuggau

SEQ ID NO: 1231448 - RNA, 19 nt, Homo sapiens
  misc_RNA (1)...(19): siRNA sense strand
aaauccugcugacuaacaa

SEQ ID NO: 1231449 - RNA, 19 nt, Homo sapiens
  misc_RNA (1)...(19): siRNA sense strand
gcccagggaugaggcagau

SEQ ID NO: 1231450 - RNA, 19 nt, Homo sapiens
  misc_RNA (1)...(19): siRNA sense strand
ugaagguauuuaaggaagu

SEQ ID NO: 1231451 - RNA, 19 nt, Homo sapiens
  misc_RNA (1)...(19): siRNA sense strand
aauaugugcagcagaaaga

SEQ ID NO: 1231452 - RNA, 19 nt, Homo sapiens
  misc_RNA (1)...(19): siRNA sense strand
gcaucguggagcacucaua

SEQ ID NO: 1231453 - RNA, 19 nt, Homo sapiens
  misc_RNA (1)...(19): siRNA sense strand
gucccuugcuggucuuguu

SEQ ID NO: 1231454 - RNA, 19 nt, Homo sapiens
  misc_RNA (1)...(19): siRNA sense strand
ccuugcaaaugguauugaa

SEQ ID NO: 1231455 - RNA, 19 nt, Homo sapiens
  misc_RNA (1)...(19): siRNA sense strand
uggaagugguggucaagca

SEQ ID NO: 1231456 - RNA, 19 nt, Homo sapiens
  misc_RNA (1)...(19): siRNA sense strand
caagcagagagaacgauug

SEQ ID NO: 1231457 - RNA, 19 nt, Homo sapiens
  misc_RNA (1)...(19): siRNA sense strand
ucaagcagagagaacgauu

SEQ ID NO: 1231458 - RNA, 19 nt, Homo sapiens
  misc_RNA (1)...(19): siRNA sense strand
ccugcugacuaacaaugaa

SEQ ID NO: 1231459 - RNA, 19 nt, Homo sapiens
  misc_RNA (1)...(19): siRNA sense strand
cuuagaacauaugcagcua

SEQ ID NO: 1231460 - RNA, 19 nt, Homo sapiens
  misc_RNA (1)...(19): siRNA sense strand
gcuggaggagaaucuaaug

SEQ ID NO: 1231461 - RNA, 19 nt, Homo sapiens
  misc_RNA (1)...(19): siRNA sense strand
ugacugcaaccagcauuga

SEQ ID NO: 1231462 - RNA, 19 nt, Homo sapiens
  misc_RNA (1)...(19): siRNA sense strand
caaauacuuccgggagaga

SEQ ID NO: 1231463 - RNA, 19 nt, Homo sapiens
  misc_RNA (1)...(19): siRNA sense strand
ggaagauccaggaguccau

SEQ ID NO: 1231464 - RNA, 19 nt, Homo sapiens
  misc_RNA (1)...(19): siRNA sense strand
gguauuuaaggaaguuaug

SEQ ID NO: 1231465 - RNA, 19 nt, Homo sapiens
  misc_RNA (1)...(19): siRNA sense strand
cagcauugaccgauugaag

SEQ ID NO: 1231466 - RNA, 19 nt, Homo sapiens
  misc_RNA (1)...(19): siRNA sense strand
ucuacgaagcucugaagaa

SEQ ID NO: 1231467 - RNA, 19 nt, Homo sapiens
  misc_RNA (1)...(19): siRNA sense strand
gagcacucauacacaucau

SEQ ID NO: 1231468 - RNA, 19 nt, Homo sapiens
  misc_RNA (1)...(19): siRNA sense strand
auccaggaguccauagaaa

SEQ ID NO: 1231469 - RNA, 19 nt, Homo sapiens
  misc_RNA (1)...(19): siRNA sense strand
gaaagaugagcaguuuagg

SEQ ID NO: 1231470 - RNA, 19 nt, Homo sapiens
  misc_RNA (1)...(19): siRNA sense strand
ggagcuggaggagaaucua

SEQ ID NO: 1231471 - RNA, 19 nt, Homo sapiens
  misc_RNA (1)...(19): siRNA sense strand
uggucaaccuuguauacga

SEQ ID NO: 1231472 - RNA, 19 nt, Homo sapiens
  misc_RNA (1)...(19): siRNA sense strand
cugaagaagcuuagaacau

SEQ ID NO: 1231473 - RNA, 19 nt, Homo sapiens
  misc_RNA (1)...(19): siRNA sense strand
uugcaaaugguauugaaga

SEQ ID NO: 1231474 - RNA, 19 nt, Homo sapiens
  misc_RNA (1)...(19): siRNA sense strand
gcagaaagaugagcaguuu

SEQ ID NO: 1231475 - RNA, 19 nt, Homo sapiens
  misc_RNA (1)...(19): siRNA sense strand
ugaagaagcuuagaacaua

SEQ ID NO: 1231476 - RNA, 19 nt, Homo sapiens
  misc_RNA (1)...(19): siRNA sense strand
gaacauaugcagcuauuga

SEQ ID NO: 1231477 - RNA, 19 nt, Homo sapiens
  misc_RNA (1)...(19): siRNA sense strand
gaagaagcuuagaacauau

SEQ ID NO: 1231478 - RNA, 19 nt, Homo sapiens
  misc_RNA (1)...(19): siRNA sense strand
ugacaucacacccaacuua

SEQ ID NO: 1231479 - RNA, 19 nt, Homo sapiens
  misc_RNA (1)...(19): siRNA sense strand
gaagguauuuaaggaaguu

SEQ ID NO: 1231480 - RNA, 19 nt, Homo sapiens
  misc_RNA (1)...(19): siRNA sense strand
caacuuacuuucccuucuu

SEQ ID NO: 1231481 - RNA, 19 nt, Homo sapiens
  misc_RNA (1)...(19): siRNA sense strand
gauugaagguauuuaagga

SEQ ID NO: 1231482 - RNA, 19 nt, Homo sapiens
  misc_RNA (1)...(19): siRNA sense strand
uaauggagcucacucagau

SEQ ID NO: 1231483 - RNA, 19 nt, Homo sapiens
  misc_RNA (1)...(19): siRNA sense strand
cugaagaggccaccaaaua

SEQ ID NO: 1231484 - RNA, 19 nt, Homo sapiens
  misc_RNA (1)...(19): siRNA sense strand
aagaaacgcuuuacugaag

SEQ ID NO: 1231485 - RNA, 19 nt, Homo sapiens
  misc_RNA (1)...(19): siRNA sense strand
ggacgagucuggcccuuac

SEQ ID NO: 1231486 - RNA, 19 nt, Homo sapiens
  misc_RNA (1)...(19): siRNA sense strand
uagaacauaugcagcuauu

SEQ ID NO: 1231487 - RNA, 19 nt, Homo sapiens
  misc_RNA (1)...(19): siRNA sense strand
gaugagcaguuuagggaau

SEQ ID NO: 1231488 - RNA, 19 nt, Homo sapiens
  misc_RNA (1)...(19): siRNA sense strand
caaccagcauugaccgauu

SEQ ID NO: 1231489 - RNA, 19 nt, Homo sapiens
  misc_RNA (1)...(19): siRNA sense strand
ggagcucacucagaucuau

SEQ ID NO: 1231490 - RNA, 19 nt, Homo sapiens
  misc_RNA (1)...(19): siRNA sense strand
cuacgaagcucugaagaag

SEQ ID NO: 1231491 - RNA, 19 nt, Homo sapiens
  misc_RNA (1)...(19): siRNA sense strand
gaaguuaugcgugacauca

SEQ ID NO: 1231492 - RNA, 19 nt, Homo sapiens
  misc_RNA (1)...(19): siRNA sense strand
ggcagaugcucucuacgaa

SEQ ID NO: 1231493 - RNA, 19 nt, Homo sapiens
  misc_RNA (1)...(19): siRNA sense strand
gaagauccaggaguccaua

SEQ ID NO: 1231494 - RNA, 19 nt, Homo sapiens
  misc_RNA (1)...(19): siRNA sense strand
acgaauaugugcagcagaa

SEQ ID NO: 1231495 - RNA, 19 nt, Homo sapiens
  misc_RNA (1)...(19): siRNA sense strand
agucaaagcacuugcauga

SEQ ID NO: 1231496 - RNA, 19 nt, Homo sapiens
  misc_RNA (1)...(19): siRNA sense strand
ugcaaauccugcugacuaa

SEQ ID NO: 1231497 - RNA, 19 nt, Homo sapiens
  misc_RNA (1)...(19): siRNA sense strand
caaugaagccuggaagaga

SEQ ID NO: 1231498 - RNA, 19 nt, Homo sapiens
  misc_RNA (1)...(19): siRNA sense strand
gcacucauacacaucauca

SEQ ID NO: 1231499 - RNA, 19 nt, Homo sapiens
  misc_RNA (1)...(19): siRNA sense strand
gaaacgcuuuacugaagag

SEQ ID NO: 1231500 - RNA, 19 nt, Homo sapiens
  misc_RNA (1)...(19): siRNA sense strand
gaagaggccaccaaauacu

SEQ ID NO: 1231501 - RNA, 19 nt, Homo sapiens
  misc_RNA (1)...(19): siRNA sense strand
cucaggagcuggaggagaa

SEQ ID NO: 1231502 - RNA, 19 nt, Homo sapiens
  misc_RNA (1)...(19): siRNA sense strand
cugcaaauccugcugacua

SEQ ID NO: 1231503 - RNA, 19 nt, Homo sapiens
  misc_RNA (1)...(19): siRNA sense strand
gauccaggaguccauagaa

SEQ ID NO: 1231504 - RNA, 19 nt, Homo sapiens
  misc_RNA (1)...(19): siRNA sense strand
agaaacgcuuuacugaaga

SEQ ID NO: 1231505 - RNA, 19 nt, Homo sapiens
  misc_RNA (1)...(19): siRNA sense strand
gaagccacacaaaccauug

SEQ ID NO: 1231506 - RNA, 19 nt, Homo sapiens
  misc_RNA (1)...(19): siRNA sense strand
cacagaggcugcaccaucu

SEQ ID NO: 1231507 - RNA, 19 nt, Homo sapiens
  misc_RNA (1)...(19): siRNA sense strand
gagcuggaggagaaucuaa

SEQ ID NO: 1231508 - RNA, 19 nt, Homo sapiens
  misc_RNA (1)...(19): siRNA sense strand
cacaaaccauugggaguga

SEQ ID NO: 1231509 - RNA, 19 nt, Homo sapiens
  misc_RNA (1)...(19): siRNA sense strand
caucacacccaacuuacuu

SEQ ID NO: 1231510 - RNA, 19 nt, Homo sapiens
  misc_RNA (1)...(19): siRNA sense strand
ugaggcagaugcucucuac

SEQ ID NO: 1231511 - RNA, 19 nt, Homo sapiens
  misc_RNA (1)...(19): siRNA sense strand
aaugaagccuggaagagau

SEQ ID NO: 1231512 - RNA, 19 nt, Homo sapiens
  misc_RNA (1)...(19): siRNA sense strand
guggagcacucauacacau

SEQ ID NO: 1231513 - RNA, 19 nt, Homo sapiens
  misc_RNA (1)...(19): siRNA sense strand
ugaagaggccaccaaauac

SEQ ID NO: 1231514 - RNA, 19 nt, Homo sapiens
  misc_RNA (1)...(19): siRNA sense strand
caaauccugcugacuaaca

SEQ ID NO: 1231515 - RNA, 19 nt, Homo sapiens
  misc_RNA (1)...(19): siRNA sense strand
uggcgaaucucagcuggaa

SEQ ID NO: 1231516 - RNA, 19 nt, Homo sapiens
  misc_RNA (1)...(19): siRNA sense strand
gcucugaagaagcuuagaa

SEQ ID NO: 1231517 - RNA, 19 nt, Homo sapiens
  misc_RNA (1)...(19): siRNA sense strand
ggagcacucauacacauca

SEQ ID NO: 1231518 - RNA, 19 nt, Homo sapiens
  misc_RNA (1)...(19): siRNA sense strand
gcugcaccaucuccaaugu

SEQ ID NO: 1231519 - RNA, 19 nt, Homo sapiens
  misc_RNA (1)...(19): siRNA sense strand
agaaagaugagcaguuuag

SEQ ID NO: 1231520 - RNA, 19 nt, Homo sapiens
  misc_RNA (1)...(19): siRNA sense strand
gcaguuuagggaaugguuu

SEQ ID NO: 1231521 - RNA, 19 nt, Homo sapiens
  misc_RNA (1)...(19): siRNA sense strand
ggauguggucaaccuugua

SEQ ID NO: 1231522 - RNA, 19 nt, Homo sapiens
  misc_RNA (1)...(19): siRNA sense strand
gaauaugugcagcagaaag

SEQ ID NO: 1231523 - RNA, 19 nt, Homo sapiens
  misc_RNA (1)...(19): siRNA sense strand
gauguggucaaccuuguau

SEQ ID NO: 1231524 - RNA, 19 nt, Homo sapiens
  misc_RNA (1)...(19): siRNA sense strand
cagaaagaugagcaguuua

SEQ ID NO: 1231525 - RNA, 19 nt, Homo sapiens
  misc_RNA (1)...(19): siRNA sense strand
cgucugaauccaugccaua

SEQ ID NO: 1231526 - RNA, 19 nt, Homo sapiens
  misc_RNA (1)...(19): siRNA sense strand
gcgaaucucagcuggaagu

SEQ ID NO: 1231527 - RNA, 19 nt, Homo sapiens
  misc_RNA (1)...(19): siRNA sense strand
gugaccaccuggcgaaucu

SEQ ID NO: 1231528 - RNA, 19 nt, Homo sapiens
  misc_RNA (1)...(19): siRNA sense strand
auacacaucaucagcagaa

SEQ ID NO: 1231529 - RNA, 19 nt, Homo sapiens
  misc_RNA (1)...(19): siRNA sense strand
gggacgagucuggcccuua

SEQ ID NO: 1231530 - RNA, 19 nt, Homo sapiens
  misc_RNA (1)...(19): siRNA sense strand
cgaagccacacaaaccauu

SEQ ID NO: 1231531 - RNA, 19 nt, Homo sapiens
  misc_RNA (1)...(19): siRNA sense strand
aacuuacuuucccuucuua

SEQ ID NO: 1231532 - RNA, 19 nt, Homo sapiens
  misc_RNA (1)...(19): siRNA sense strand
ccaacuuacuuucccuucu

SEQ ID NO: 1231533 - RNA, 19 nt, Homo sapiens
  misc_RNA (1)...(19): siRNA sense strand
aaccagcauugaccgauug

SEQ ID NO: 1231534 - RNA, 19 nt, Homo sapiens
  misc_RNA (1)...(19): siRNA sense strand
caaaccauugggagugaaa

SEQ ID NO: 1231535 - RNA, 19 nt, Homo sapiens
  misc_RNA (1)...(19): siRNA sense strand
gcauugaccgauugaaggu

SEQ ID NO: 1231536 - RNA, 19 nt, Homo sapiens
  misc_RNA (1)...(19): siRNA sense strand
cuaauggagcucacucaga

SEQ ID NO: 1231537 - RNA, 19 nt, Homo sapiens
  misc_RNA (1)...(19): siRNA sense strand
caucuuccuugcacuggau

SEQ ID NO: 1231538 - RNA, 19 nt, Homo sapiens
  misc_RNA (1)...(19): siRNA sense strand
aaauccugcugacuaacaa

SEQ ID NO: 1231539 - RNA, 19 nt, Homo sapiens
  misc_RNA (1)...(19): siRNA sense strand
gcccagggaugaggcagau

SEQ ID NO: 1231540 - RNA, 19 nt, Homo sapiens
  misc_RNA (1)...(19): siRNA sense strand
ugaagguauuuaaggaagu

SEQ ID NO: 1231541 - RNA, 19 nt, Homo sapiens
  misc_RNA (1)...(19): siRNA sense strand
aauaugugcagcagaaaga

SEQ ID NO: 1231542 - RNA, 19 nt, Homo sapiens
  misc_RNA (1)...(19): siRNA sense strand
gcaucguggagcacucaua

SEQ ID NO: 1231543 - RNA, 19 nt, Homo sapiens
  misc_RNA (1)...(19): siRNA sense strand
gucccuugcuggucuuguu

SEQ ID NO: 1231544 - RNA, 19 nt, Homo sapiens
  misc_RNA (1)...(19): siRNA sense strand
ccuugcaaaugguauugaa

SEQ ID NO: 1231545 - RNA, 19 nt, Homo sapiens
  misc_RNA (1)...(19): siRNA sense strand
uggaagugguggucaagca

SEQ ID NO: 1231546 - RNA, 19 nt, Homo sapiens
  misc_RNA (1)...(19): siRNA sense strand
caagcagagagaacgauug

SEQ ID NO: 1231547 - RNA, 19 nt, Homo sapiens
  misc_RNA (1)...(19): siRNA sense strand
ucaagcagagagaacgauu

SEQ ID NO: 1231548 - RNA, 19 nt, Homo sapiens
  misc_RNA (1)...(19): siRNA sense strand
ccugcugacuaacaaugaa

SEQ ID NO: 1231549 - RNA, 19 nt, Homo sapiens
  misc_RNA (1)...(19): siRNA sense strand
cuuagaacauaugcagcua

SEQ ID NO: 1231550 - RNA, 19 nt, Homo sapiens
  misc_RNA (1)...(19): siRNA sense strand
gcuggaggagaaucuaaug

SEQ ID NO: 1231551 - RNA, 19 nt, Homo sapiens
  misc_RNA (1)...(19): siRNA sense strand
ugacugcaaccagcauuga

SEQ ID NO: 1231552 - RNA, 19 nt, Homo sapiens
  misc_RNA (1)...(19): siRNA sense strand
caaauacuuccgggagaga

SEQ ID NO: 1231553 - RNA, 19 nt, Homo sapiens
  misc_RNA (1)...(19): siRNA sense strand
ggaagauccaggaguccau

SEQ ID NO: 1231554 - RNA, 19 nt, Homo sapiens
  misc_RNA (1)...(19): siRNA sense strand
gguauuuaaggaaguuaug

SEQ ID NO: 1231555 - RNA, 19 nt, Homo sapiens
  misc_RNA (1)...(19): siRNA sense strand
cagcauugaccgauugaag

SEQ ID NO: 1231556 - RNA, 19 nt, Homo sapiens
  misc_RNA (1)...(19): siRNA sense strand
ucuacgaagcucugaagaa

SEQ ID NO: 1231557 - RNA, 19 nt, Homo sapiens
  misc_RNA (1)...(19): siRNA sense strand
gagcacucauacacaucau

SEQ ID NO: 1231558 - RNA, 19 nt, Homo sapiens
  misc_RNA (1)...(19): siRNA sense strand
auccaggaguccauagaaa

SEQ ID NO: 1231559 - RNA, 19 nt, Homo sapiens
  misc_RNA (1)...(19): siRNA sense strand
gaaagaugagcaguuuagg

SEQ ID NO: 1231560 - RNA, 19 nt, Homo sapiens
  misc_RNA (1)...(19): siRNA sense strand
ggagcuggaggagaaucua

SEQ ID NO: 1231561 - RNA, 19 nt, Homo sapiens
  misc_RNA (1)...(19): siRNA sense strand
uggucaaccuuguauacga

SEQ ID NO: 1231562 - RNA, 19 nt, Homo sapiens
  misc_RNA (1)...(19): siRNA sense strand
cugaagaagcuuagaacau

SEQ ID NO: 1231563 - RNA, 19 nt, Homo sapiens
  misc_RNA (1)...(19): siRNA sense strand
uugcaaaugguauugaaga

SEQ ID NO: 1231564 - RNA, 19 nt, Homo sapiens
  misc_RNA (1)...(19): siRNA sense strand
gcagaaagaugagcaguuu

SEQ ID NO: 1231565 - RNA, 19 nt, Homo sapiens
  misc_RNA (1)...(19): siRNA sense strand
ugaagaagcuuagaacaua

SEQ ID NO: 1231566 - RNA, 19 nt, Homo sapiens
  misc_RNA (1)...(19): siRNA sense strand
gaacauaugcagcuauuga

SEQ ID NO: 1231567 - RNA, 19 nt, Homo sapiens
  misc_RNA (1)...(19): siRNA sense strand
gaagaagcuuagaacauau

SEQ ID NO: 1231568 - RNA, 19 nt, Homo sapiens
  misc_RNA (1)...(19): siRNA sense strand
ugacaucacacccaacuua

SEQ ID NO: 1231569 - RNA, 19 nt, Homo sapiens
  misc_RNA (1)...(19): siRNA sense strand
gaagguauuuaaggaaguu

SEQ ID NO: 1231570 - RNA, 19 nt, Homo sapiens
  misc_RNA (1)...(19): siRNA sense strand
caacuuacuuucccuucuu

SEQ ID NO: 1231571 - RNA, 19 nt, Homo sapiens
  misc_RNA (1)...(19): siRNA sense strand
gauugaagguauuuaagga

SEQ ID NO: 1231572 - RNA, 19 nt, Homo sapiens
  misc_RNA (1)...(19): siRNA sense strand
uaauggagcucacucagau

SEQ ID NO: 1231573 - RNA, 19 nt, Homo sapiens
  misc_RNA (1)...(19): siRNA sense strand
cugaagaggccaccaaaua

SEQ ID NO: 1231574 - RNA, 19 nt, Homo sapiens
  misc_RNA (1)...(19): siRNA sense strand
aagaaacgcuuuacugaag

SEQ ID NO: 1231575 - RNA, 19 nt, Homo sapiens
  misc_RNA (1)...(19): siRNA sense strand
ggacgagucuggcccuuac

SEQ ID NO: 1231576 - RNA, 19 nt, Homo sapiens
  misc_RNA (1)...(19): siRNA sense strand
uagaacauaugcagcuauu

SEQ ID NO: 1231577 - RNA, 19 nt, Homo sapiens
  misc_RNA (1)...(19): siRNA sense strand
gaugagcaguuuagggaau

SEQ ID NO: 1231578 - RNA, 19 nt, Homo sapiens
  misc_RNA (1)...(19): siRNA sense strand
caaccagcauugaccgauu

SEQ ID NO: 1231579 - RNA, 19 nt, Homo sapiens
  misc_RNA (1)...(19): siRNA sense strand
ggagcucacucagaucuau

SEQ ID NO: 1231580 - RNA, 19 nt, Homo sapiens
  misc_RNA (1)...(19): siRNA sense strand
cuacgaagcucugaagaag

SEQ ID NO: 1231581 - RNA, 19 nt, Homo sapiens
  misc_RNA (1)...(19): siRNA sense strand
gaaguuaugcgugacauca

SEQ ID NO: 1231582 - RNA, 19 nt, Homo sapiens
  misc_RNA (1)...(19): siRNA sense strand
ggcagaugcucucuacgaa

SEQ ID NO: 1231583 - RNA, 19 nt, Homo sapiens
  misc_RNA (1)...(19): siRNA sense strand
gaagauccaggaguccaua

SEQ ID NO: 1231584 - RNA, 19 nt, Homo sapiens
  misc_RNA (1)...(19): siRNA sense strand
acgaauaugugcagcagaa

SEQ ID NO: 1231585 - RNA, 19 nt, Homo sapiens
  misc_RNA (1)...(19): siRNA sense strand
agucaaagcacuugcauga

SEQ ID NO: 1231586 - RNA, 19 nt, Homo sapiens
  misc_RNA (1)...(19): siRNA sense strand
ugcaaauccugcugacuaa

SEQ ID NO: 1231587 - RNA, 19 nt, Homo sapiens
  misc_RNA (1)...(19): siRNA sense strand
caaugaagccuggaagaga

SEQ ID NO: 1231588 - RNA, 19 nt, Homo sapiens
  misc_RNA (1)...(19): siRNA sense strand
gcacucauacacaucauca

SEQ ID NO: 1231589 - RNA, 19 nt, Homo sapiens
  misc_RNA (1)...(19): siRNA sense strand
gaaacgcuuuacugaagag

SEQ ID NO: 1231590 - RNA, 19 nt, Homo sapiens
  misc_RNA (1)...(19): siRNA sense strand
gaagaggccaccaaauacu

SEQ ID NO: 1231591 - RNA, 19 nt, Homo sapiens
  misc_RNA (1)...(19): siRNA sense strand
cucaggagcuggaggagaa

SEQ ID NO: 1231592 - RNA, 19 nt, Homo sapiens
  misc_RNA (1)...(19): siRNA sense strand
cugcaaauccugcugacua

SEQ ID NO: 1231593 - RNA, 19 nt, Homo sapiens
  misc_RNA (1)...(19): siRNA sense strand
gauccaggaguccauagaa

SEQ ID NO: 1231594 - RNA, 19 nt, Homo sapiens
  misc_RNA (1)...(19): siRNA sense strand
agaaacgcuuuacugaaga

SEQ ID NO: 1231595 - RNA, 19 nt, Homo sapiens
  misc_RNA (1)...(19): siRNA sense strand
gaagccacacaaaccauug

SEQ ID NO: 1231596 - RNA, 19 nt, Homo sapiens
  misc_RNA (1)...(19): siRNA sense strand
cacagaggcugcaccaucu

SEQ ID NO: 1231597 - RNA, 19 nt, Homo sapiens
  misc_RNA (1)...(19): siRNA sense strand
gagcuggaggagaaucuaa

SEQ ID NO: 1231598 - RNA, 19 nt, Homo sapiens
  misc_RNA (1)...(19): siRNA sense strand
cacaaaccauugggaguga

SEQ ID NO: 1231599 - RNA, 19 nt, Homo sapiens
  misc_RNA (1)...(19): siRNA sense strand
caucacacccaacuuacuu

SEQ ID NO: 1231600 - RNA, 19 nt, Homo sapiens
  misc_RNA (1)...(19): siRNA sense strand
ugaggcagaugcucucuac

SEQ ID NO: 1231601 - RNA, 19 nt, Homo sapiens
  misc_RNA (1)...(19): siRNA sense strand
aaugaagccuggaagagau

SEQ ID NO: 1231602 - RNA, 19 nt, Homo sapiens
  misc_RNA (1)...(19): siRNA sense strand
guggagcacucauacacau

SEQ ID NO: 1231603 - RNA, 19 nt, Homo sapiens
  misc_RNA (1)...(19): siRNA sense strand
ugaagaggccaccaaauac

SEQ ID NO: 1231604 - RNA, 19 nt, Homo sapiens
  misc_RNA (1)...(19): siRNA sense strand
caaauccugcugacuaaca

SEQ ID NO: 1231605 - RNA, 19 nt, Homo sapiens
  misc_RNA (1)...(19): siRNA sense strand
uggcgaaucucagcuggaa

SEQ ID NO: 1231606 - RNA, 19 nt, Homo sapiens
  misc_RNA (1)...(19): siRNA sense strand
gcucugaagaagcuuagaa

SEQ ID NO: 1231607 - RNA, 19 nt, Homo sapiens
  misc_RNA (1)...(19): siRNA sense strand
ggagcacucauacacauca

SEQ ID NO: 1231608 - RNA, 19 nt, Homo sapiens
  misc_RNA (1)...(19): siRNA sense strand
gcugcaccaucuccaaugu

SEQ ID NO: 1231609 - RNA, 19 nt, Homo sapiens
  misc_RNA (1)...(19): siRNA sense strand
agaaagaugagcaguuuag

SEQ ID NO: 1231610 - RNA, 19 nt, Homo sapiens
  misc_RNA (1)...(19): siRNA sense strand
gcaguuuagggaaugguuu

SEQ ID NO: 1231611 - RNA, 19 nt, Homo sapiens
  misc_RNA (1)...(19): siRNA sense strand
ggauguggucaaccuugua

SEQ ID NO: 1231612 - RNA, 19 nt, Homo sapiens
  misc_RNA (1)...(19): siRNA sense strand
gaauaugugcagcagaaag

SEQ ID NO: 1231613 - RNA, 19 nt, Homo sapiens
  misc_RNA (1)...(19): siRNA sense strand
gauguggucaaccuuguau

SEQ ID NO: 1231614 - RNA, 19 nt, Homo sapiens
  misc_RNA (1)...(19): siRNA sense strand
cagaaagaugagcaguuua

SEQ ID NO: 1231615 - RNA, 19 nt, Homo sapiens
  misc_RNA (1)...(19): siRNA sense strand
cgucugaauccaugccaua

SEQ ID NO: 1231616 - RNA, 19 nt, Homo sapiens
  misc_RNA (1)...(19): siRNA sense strand
gcgaaucucagcuggaagu

SEQ ID NO: 1231617 - RNA, 19 nt, Homo sapiens
  misc_RNA (1)...(19): siRNA sense strand
gugaccaccuggcgaaucu

SEQ ID NO: 1231618 - RNA, 19 nt, Homo sapiens
  misc_RNA (1)...(19): siRNA sense strand
auacacaucaucagcagaa

SEQ ID NO: 1231619 - RNA, 19 nt, Homo sapiens
  misc_RNA (1)...(19): siRNA sense strand
gggacgagucuggcccuua

SEQ ID NO: 1231620 - RNA, 19 nt, Homo sapiens
  misc_RNA (1)...(19): siRNA sense strand
cgaagccacacaaaccauu

SEQ ID NO: 1231621 - RNA, 19 nt, Homo sapiens
  misc_RNA (1)...(19): siRNA sense strand
aacuuacuuucccuucuua

SEQ ID NO: 1231622 - RNA, 19 nt, Homo sapiens
  misc_RNA (1)...(19): siRNA sense strand
ccaacuuacuuucccuucu

SEQ ID NO: 1231623 - RNA, 19 nt, Homo sapiens
  misc_RNA (1)...(19): siRNA sense strand
aaccagcauugaccgauug

SEQ ID NO: 1231624 - RNA, 19 nt, Homo sapiens
  misc_RNA (1)...(19): siRNA sense strand
caaaccauugggagugaaa

SEQ ID NO: 1231625 - RNA, 19 nt, Homo sapiens
  misc_RNA (1)...(19): siRNA sense strand
gcauugaccgauugaaggu

SEQ ID NO: 1231626 - RNA, 19 nt, Homo sapiens
  misc_RNA (1)...(19): siRNA sense strand
cuaauggagcucacucaga

SEQ ID NO: 1231627 - RNA, 19 nt, Homo sapiens
  misc_RNA (1)...(19): siRNA sense strand
caucuuccuugcacuggau

SEQ ID NO: 1231628 - RNA, 19 nt, Homo sapiens
  misc_RNA (1)...(19): siRNA sense strand
aaauccugcugacuaacaa

SEQ ID NO: 1231629 - RNA, 19 nt, Homo sapiens
  misc_RNA (1)...(19): siRNA sense strand
gcccagggaugaggcagau

SEQ ID NO: 1231630 - RNA, 19 nt, Homo sapiens
  misc_RNA (1)...(19): siRNA sense strand
ugaagguauuuaaggaagu

SEQ ID NO: 1231631 - RNA, 19 nt, Homo sapiens
  misc_RNA (1)...(19): siRNA sense strand
aauaugugcagcagaaaga

SEQ ID NO: 1231632 - RNA, 19 nt, Homo sapiens
  misc_RNA (1)...(19): siRNA sense strand
gcaucguggagcacucaua

SEQ ID NO: 1231633 - RNA, 19 nt, Homo sapiens
  misc_RNA (1)...(19): siRNA sense strand
gucccuugcuggucuuguu

SEQ ID NO: 1231634 - RNA, 19 nt, Homo sapiens
  misc_RNA (1)...(19): siRNA sense strand
ccuugcaaaugguauugaa

SEQ ID NO: 1231635 - RNA, 19 nt, Homo sapiens
  misc_RNA (1)...(19): siRNA sense strand
uggaagugguggucaagca

SEQ ID NO: 1231636 - RNA, 19 nt, Homo sapiens
  misc_RNA (1)...(19): siRNA sense strand
caagcagagagaacgauug

SEQ ID NO: 1231637 - RNA, 19 nt, Homo sapiens
  misc_RNA (1)...(19): siRNA sense strand
ucaagcagagagaacgauu

SEQ ID NO: 1231638 - RNA, 19 nt, Homo sapiens
  misc_RNA (1)...(19): siRNA sense strand
ccugcugacuaacaaugaa

SEQ ID NO: 1231639 - RNA, 19 nt, Homo sapiens
  misc_RNA (1)...(19): siRNA sense strand
cuuagaacauaugcagcua

SEQ ID NO: 1231640 - RNA, 19 nt, Homo sapiens
  misc_RNA (1)...(19): siRNA sense strand
gcuggaggagaaucuaaug

SEQ ID NO: 1231641 - RNA, 19 nt, Homo sapiens
  misc_RNA (1)...(19): siRNA sense strand
ugacugcaaccagcauuga

SEQ ID NO: 1231642 - RNA, 19 nt, Homo sapiens
  misc_RNA (1)...(19): siRNA sense strand
caaauacuuccgggagaga

SEQ ID NO: 1231643 - RNA, 19 nt, Homo sapiens
  misc_RNA (1)...(19): siRNA sense strand
ggaagauccaggaguccau

SEQ ID NO: 1231644 - RNA, 19 nt, Homo sapiens
  misc_RNA (1)...(19): siRNA sense strand
gguauuuaaggaaguuaug

SEQ ID NO: 1231645 - RNA, 19 nt, Homo sapiens
  misc_RNA (1)...(19): siRNA sense strand
cagcauugaccgauugaag

SEQ ID NO: 1231646 - RNA, 19 nt, Homo sapiens
  misc_RNA (1)...(19): siRNA sense strand
ucuacgaagcucugaagaa

SEQ ID NO: 1231647 - RNA, 19 nt, Homo sapiens
  misc_RNA (1)...(19): siRNA sense strand
gagcacucauacacaucau

SEQ ID NO: 1231648 - RNA, 19 nt, Homo sapiens
  misc_RNA (1)...(19): siRNA sense strand
auccaggaguccauagaaa

SEQ ID NO: 1231649 - RNA, 19 nt, Homo sapiens
  misc_RNA (1)...(19): siRNA sense strand
gaaagaugagcaguuuagg

SEQ ID NO: 1231650 - RNA, 19 nt, Homo sapiens
  misc_RNA (1)...(19): siRNA sense strand
ggagcuggaggagaaucua

SEQ ID NO: 1231651 - RNA, 19 nt, Homo sapiens
  misc_RNA (1)...(19): siRNA sense strand
uggucaaccuuguauacga

SEQ ID NO: 1231652 - RNA, 19 nt, Homo sapiens
  misc_RNA (1)...(19): siRNA sense strand
cugaagaagcuuagaacau

SEQ ID NO: 1231653 - RNA, 19 nt, Homo sapiens
  misc_RNA (1)...(19): siRNA sense strand
uugcaaaugguauugaaga

SEQ ID NO: 1231654 - RNA, 19 nt, Homo sapiens
  misc_RNA (1)...(19): siRNA sense strand
gaacgugucugguuauuau

SEQ ID NO: 1231655 - RNA, 19 nt, Homo sapiens
  misc_RNA (1)...(19): siRNA sense strand
gcagaaagaugagcaguuu

SEQ ID NO: 1231656 - RNA, 19 nt, Homo sapiens
  misc_RNA (1)...(19): siRNA sense strand
ugaagaagcuuagaacaua

SEQ ID NO: 1231657 - RNA, 19 nt, Homo sapiens
  misc_RNA (1)...(19): siRNA sense strand
gaacauaugcagcuauuga

SEQ ID NO: 1231658 - RNA, 19 nt, Homo sapiens
  misc_RNA (1)...(19): siRNA sense strand
gaagaagcuuagaacauau

SEQ ID NO: 1231659 - RNA, 19 nt, Homo sapiens
  misc_RNA (1)...(19): siRNA sense strand
ugacaucacacccaacuua

SEQ ID NO: 1231660 - RNA, 19 nt, Homo sapiens
  misc_RNA (1)...(19): siRNA sense strand
gaagguauuuaaggaaguu

SEQ ID NO: 1231661 - RNA, 19 nt, Homo sapiens
  misc_RNA (1)...(19): siRNA sense strand
caacuuacuuucccuucuu

SEQ ID NO: 1231662 - RNA, 19 nt, Homo sapiens
  misc_RNA (1)...(19): siRNA sense strand
gauugaagguauuuaagga

SEQ ID NO: 1231663 - RNA, 19 nt, Homo sapiens
  misc_RNA (1)...(19): siRNA sense strand
uaauggagcucacucagau

SEQ ID NO: 1231664 - RNA, 19 nt, Homo sapiens
  misc_RNA (1)...(19): siRNA sense strand
uggagaacgugucugguua

SEQ ID NO: 1231665 - RNA, 19 nt, Homo sapiens
  misc_RNA (1)...(19): siRNA sense strand
cugaagaggccaccaaaua

SEQ ID NO: 1231666 - RNA, 19 nt, Homo sapiens
  misc_RNA (1)...(19): siRNA sense strand
aagaaacgcuuuacugaag

SEQ ID NO: 1231667 - RNA, 19 nt, Homo sapiens
  misc_RNA (1)...(19): siRNA sense strand
ggacgagucuggcccuuac

SEQ ID NO: 1231668 - RNA, 19 nt, Homo sapiens
  misc_RNA (1)...(19): siRNA sense strand
uagaacauaugcagcuauu

SEQ ID NO: 1231669 - RNA, 19 nt, Homo sapiens
  misc_RNA (1)...(19): siRNA sense strand
gaugagcaguuuagggaau

SEQ ID NO: 1231670 - RNA, 19 nt, Homo sapiens
  misc_RNA (1)...(19): siRNA sense strand
caaccagcauugaccgauu

SEQ ID NO: 1231671 - RNA, 19 nt, Homo sapiens
  misc_RNA (1)...(19): siRNA sense strand
gagaacgugucugguuauu

SEQ ID NO: 1231672 - RNA, 19 nt, Homo sapiens
  misc_RNA (1)...(19): siRNA sense strand
ggagcucacucagaucuau

SEQ ID NO: 1231673 - RNA, 19 nt, Homo sapiens
  misc_RNA (1)...(19): siRNA sense strand
cuacgaagcucugaagaag

SEQ ID NO: 1231674 - RNA, 19 nt, Homo sapiens
  misc_RNA (1)...(19): siRNA sense strand
gaaguuaugcgugacauca

SEQ ID NO: 1231675 - RNA, 19 nt, Homo sapiens
  misc_RNA (1)...(19): siRNA sense strand
ggcagaugcucucuacgaa

SEQ ID NO: 1231676 - RNA, 19 nt, Homo sapiens
  misc_RNA (1)...(19): siRNA sense strand
gaagauccaggaguccaua

SEQ ID NO: 1231677 - RNA, 19 nt, Homo sapiens
  misc_RNA (1)...(19): siRNA sense strand
acgaauaugugcagcagaa

SEQ ID NO: 1231678 - RNA, 19 nt, Homo sapiens
  misc_RNA (1)...(19): siRNA sense strand
agucaaagcacuugcauga

SEQ ID NO: 1231679 - RNA, 19 nt, Homo sapiens
  misc_RNA (1)...(19): siRNA sense strand
ugcaaauccugcugacuaa

SEQ ID NO: 1231680 - RNA, 19 nt, Homo sapiens
  misc_RNA (1)...(19): siRNA sense strand
caaugaagccuggaagaga

SEQ ID NO: 1231681 - RNA, 19 nt, Homo sapiens
  misc_RNA (1)...(19): siRNA sense strand
gcacucauacacaucauca

SEQ ID NO: 1231682 - RNA, 19 nt, Homo sapiens
  misc_RNA (1)...(19): siRNA sense strand
gaaacgcuuuacugaagag

SEQ ID NO: 1231683 - RNA, 19 nt, Homo sapiens
  misc_RNA (1)...(19): siRNA sense strand
gaagaggccaccaaauacu

SEQ ID NO: 1231684 - RNA, 19 nt, Homo sapiens
  misc_RNA (1)...(19): siRNA sense strand
cucaggagcuggaggagaa

SEQ ID NO: 1231685 - RNA, 19 nt, Homo sapiens
  misc_RNA (1)...(19): siRNA sense strand
cugcaaauccugcugacua

SEQ ID NO: 1231686 - RNA, 19 nt, Homo sapiens
  misc_RNA (1)...(19): siRNA sense strand
ggagaacgugucugguuau

SEQ ID NO: 1231687 - RNA, 19 nt, Homo sapiens
  misc_RNA (1)...(19): siRNA sense strand
gauccaggaguccauagaa

SEQ ID NO: 1231688 - RNA, 19 nt, Homo sapiens
  misc_RNA (1)...(19): siRNA sense strand
agaaacgcuuuacugaaga

SEQ ID NO: 1231689 - RNA, 19 nt, Homo sapiens
  misc_RNA (1)...(19): siRNA sense strand
gaagccacacaaaccauug

SEQ ID NO: 1231690 - RNA, 19 nt, Homo sapiens
  misc_RNA (1)...(19): siRNA sense strand
gcucagaacagcuggaucu

SEQ ID NO: 1231691 - RNA, 19 nt, Homo sapiens
  misc_RNA (1)...(19): siRNA sense strand
gaucuugcucacacucuuu

SEQ ID NO: 1231692 - RNA, 19 nt, Homo sapiens
  misc_RNA (1)...(19): siRNA sense strand
cacagaggcugcaccaucu

SEQ ID NO: 1231693 - RNA, 19 nt, Homo sapiens
  misc_RNA (1)...(19): siRNA sense strand
gagcuggaggagaaucuaa

SEQ ID NO: 1231694 - RNA, 19 nt, Homo sapiens
  misc_RNA (1)...(19): siRNA sense strand
cacaaaccauugggaguga

SEQ ID NO: 1231695 - RNA, 19 nt, Homo sapiens
  misc_RNA (1)...(19): siRNA sense strand
caucacacccaacuuacuu

SEQ ID NO: 1231696 - RNA, 19 nt, Homo sapiens
  misc_RNA (1)...(19): siRNA sense strand
aaugaagccuggaagagau

SEQ ID NO: 1231697 - RNA, 19 nt, Homo sapiens
  misc_RNA (1)...(19): siRNA sense strand
ggaucuugcucacacucuu

SEQ ID NO: 1231698 - RNA, 19 nt, Homo sapiens
  misc_RNA (1)...(19): siRNA sense strand
ugaggcagaugcucucuac

SEQ ID NO: 1231699 - RNA, 19 nt, Homo sapiens
  misc_RNA (1)...(19): siRNA sense strand
caaauccugcugacuaaca

SEQ ID NO: 1231700 - RNA, 19 nt, Homo sapiens
  misc_RNA (1)...(19): siRNA sense strand
uggcgaaucucagcuggaa

SEQ ID NO: 1231701 - RNA, 19 nt, Homo sapiens
  misc_RNA (1)...(19): siRNA sense strand
guggagcacucauacacau

SEQ ID NO: 1231702 - RNA, 19 nt, Homo sapiens
  misc_RNA (1)...(19): siRNA sense strand
ugaagaggccaccaaauac

SEQ ID NO: 1231703 - RNA, 19 nt, Homo sapiens
  misc_RNA (1)...(19): siRNA sense strand
gcucugaagaagcuuagaa

SEQ ID NO: 1231704 - RNA, 19 nt, Homo sapiens
  misc_RNA (1)...(19): siRNA sense strand
ggagcacucauacacauca

SEQ ID NO: 1231705 - RNA, 19 nt, Homo sapiens
  misc_RNA (1)...(19): siRNA sense strand
gcugcaccaucuccaaugu

SEQ ID NO: 1231706 - RNA, 19 nt, Homo sapiens
  misc_RNA (1)...(19): siRNA sense strand
agaaagaugagcaguuuag

SEQ ID NO: 1231707 - RNA, 19 nt, Homo sapiens
  misc_RNA (1)...(19): siRNA sense strand
gcaguuuagggaaugguuu

SEQ ID NO: 1231708 - RNA, 19 nt, Homo sapiens
  misc_RNA (1)...(19): siRNA sense strand
ggauguggucaaccuugua

SEQ ID NO: 1231709 - RNA, 19 nt, Homo sapiens
  misc_RNA (1)...(19): siRNA sense strand
gaauaugugcagcagaaag

SEQ ID NO: 1231710 - RNA, 19 nt, Homo sapiens
  misc_RNA (1)...(19): siRNA sense strand
gauguggucaaccuuguau

SEQ ID NO: 1231711 - RNA, 19 nt, Homo sapiens
  misc_RNA (1)...(19): siRNA sense strand
cagaaagaugagcaguuua

SEQ ID NO: 1231712 - RNA, 19 nt, Homo sapiens
  misc_RNA (1)...(19): siRNA sense strand
cgucugaauccaugccaua

SEQ ID NO: 1231713 - RNA, 19 nt, Homo sapiens
  misc_RNA (1)...(19): siRNA sense strand
gcgaaucucagcuggaagu

SEQ ID NO: 1231714 - RNA, 19 nt, Homo sapiens
  misc_RNA (1)...(19): siRNA sense strand
gugaccaccuggcgaaucu

SEQ ID NO: 1231715 - RNA, 19 nt, Homo sapiens
  misc_RNA (1)...(19): siRNA sense strand
auacacaucaucagcagaa

SEQ ID NO: 1231716 - RNA, 19 nt, Homo sapiens
  misc_RNA (1)...(19): siRNA sense strand
gggacgagucuggcccuua

SEQ ID NO: 1231717 - RNA, 19 nt, Homo sapiens
  misc_RNA (1)...(19): siRNA sense strand
cgaagccacacaaaccauu

SEQ ID NO: 1231718 - RNA, 19 nt, Homo sapiens
  misc_RNA (1)...(19): siRNA sense strand
aacuuacuuucccuucuua

SEQ ID NO: 1231719 - RNA, 19 nt, Homo sapiens
  misc_RNA (1)...(19): siRNA sense strand
ccaacuuacuuucccuucu

SEQ ID NO: 1231720 - RNA, 19 nt, Homo sapiens
  misc_RNA (1)...(19): siRNA sense strand
aaccagcauugaccgauug

SEQ ID NO: 1231721 - RNA, 19 nt, Homo sapiens
  misc_RNA (1)...(19): siRNA sense strand
caaaccauugggagugaaa

SEQ ID NO: 1231722 - RNA, 19 nt, Homo sapiens
  misc_RNA (1)...(19): siRNA sense strand
gcccagggaugaggcagau

SEQ ID NO: 1231723 - RNA, 19 nt, Homo sapiens
  misc_RNA (1)...(19): siRNA sense strand
cuaauggagcucacucaga

SEQ ID NO: 1231724 - RNA, 19 nt, Homo sapiens
  misc_RNA (1)...(19): siRNA sense strand
caucuuccuugcacuggau

SEQ ID NO: 1231725 - RNA, 19 nt, Homo sapiens
  misc_RNA (1)...(19): siRNA sense strand
ugaagguauuuaaggaagu

SEQ ID NO: 1231726 - RNA, 19 nt, Homo sapiens
  misc_RNA (1)...(19): siRNA sense strand
gcauugaccgauugaaggu

SEQ ID NO: 1231727 - RNA, 19 nt, Homo sapiens
  misc_RNA (1)...(19): siRNA sense strand
aaauccugcugacuaacaa

SEQ ID NO: 1231728 - RNA, 19 nt, Homo sapiens
  misc_RNA (1)...(19): siRNA sense strand
aauaugugcagcagaaaga

SEQ ID NO: 1231729 - RNA, 19 nt, Homo sapiens
  misc_RNA (1)...(19): siRNA sense strand
gcaucguggagcacucaua

SEQ ID NO: 1231730 - RNA, 19 nt, Homo sapiens
  misc_RNA (1)...(19): siRNA sense strand
gucccuugcuggucuuguu

SEQ ID NO: 1231731 - RNA, 19 nt, Homo sapiens
  misc_RNA (1)...(19): siRNA sense strand
ccuugcaaaugguauugaa

SEQ ID NO: 1231732 - RNA, 19 nt, Homo sapiens
  misc_RNA (1)...(19): siRNA sense strand
uggaagugguggucaagca

SEQ ID NO: 1231733 - RNA, 19 nt, Homo sapiens
  misc_RNA (1)...(19): siRNA sense strand
caagcagagagaacgauug

SEQ ID NO: 1231734 - RNA, 19 nt, Homo sapiens
  misc_RNA (1)...(19): siRNA sense strand
agaacgugucugguuauua

SEQ ID NO: 1231735 - RNA, 19 nt, Homo sapiens
  misc_RNA (1)...(19): siRNA sense strand
ucaagcagagagaacgauu

SEQ ID NO: 1231736 - RNA, 19 nt, Homo sapiens
  misc_RNA (1)...(19): siRNA sense strand
ccugcugacuaacaaugaa

SEQ ID NO: 1231737 - RNA, 19 nt, Homo sapiens
  misc_RNA (1)...(19): siRNA sense strand
cuuagaacauaugcagcua

SEQ ID NO: 1231738 - RNA, 19 nt, Homo sapiens
  misc_RNA (1)...(19): siRNA sense strand
gcuggaggagaaucuaaug

SEQ ID NO: 1231739 - RNA, 19 nt, Homo sapiens
  misc_RNA (1)...(19): siRNA sense strand
caaauacuuccgggagaga

SEQ ID NO: 1231740 - RNA, 19 nt, Homo sapiens
  misc_RNA (1)...(19): siRNA sense strand
ugacugcaaccagcauuga

SEQ ID NO: 1231741 - RNA, 19 nt, Homo sapiens
  misc_RNA (1)...(19): siRNA sense strand
ucagaacagcuggaucuug

SEQ ID NO: 1231742 - RNA, 19 nt, Homo sapiens
  misc_RNA (1)...(19): siRNA sense strand
ucuacgaagcucugaagaa

SEQ ID NO: 1231743 - RNA, 19 nt, Homo sapiens
  misc_RNA (1)...(19): siRNA sense strand
gguauuuaaggaaguuaug

SEQ ID NO: 1231744 - RNA, 19 nt, Homo sapiens
  misc_RNA (1)...(19): siRNA sense strand
cagcauugaccgauugaag

SEQ ID NO: 1231745 - RNA, 19 nt, Homo sapiens
  misc_RNA (1)...(19): siRNA sense strand
gagcacucauacacaucau

SEQ ID NO: 1231746 - RNA, 19 nt, Homo sapiens
  misc_RNA (1)...(19): siRNA sense strand
auccaggaguccauagaaa

SEQ ID NO: 1231747 - RNA, 19 nt, Homo sapiens
  misc_RNA (1)...(19): siRNA sense strand
ggaagauccaggaguccau

SEQ ID NO: 1231748 - RNA, 19 nt, Homo sapiens
  misc_RNA (1)...(19): siRNA sense strand
gaaagaugagcaguuuagg

SEQ ID NO: 1231749 - RNA, 19 nt, Homo sapiens
  misc_RNA (1)...(19): siRNA sense strand
ggagcuggaggagaaucua

SEQ ID NO: 1231750 - RNA, 19 nt, Homo sapiens
  misc_RNA (1)...(19): siRNA sense strand
uggucaaccuuguauacga

SEQ ID NO: 1231751 - RNA, 19 nt, Homo sapiens
  misc_RNA (1)...(19): siRNA sense strand
uugcaaaugguauugaaga

SEQ ID NO: 1231752 - RNA, 19 nt, Homo sapiens
  misc_RNA (1)...(19): siRNA sense strand
cugaagaagcuuagaacau

SEQ ID NO: 1231753 - RNA, 19 nt, Homo sapiens
  misc_RNA (1)...(19): siRNA sense strand
ugacaucacacccaacuua

SEQ ID NO: 1231754 - RNA, 19 nt, Homo sapiens
  misc_RNA (1)...(19): siRNA sense strand
gaagguauuuaaggaaguu

SEQ ID NO: 1231755 - RNA, 19 nt, Homo sapiens
  misc_RNA (1)...(19): siRNA sense strand
caacuuacuuucccuucuu

SEQ ID NO: 1231756 - RNA, 19 nt, Homo sapiens
  misc_RNA (1)...(19): siRNA sense strand
gauugaagguauuuaagga

SEQ ID NO: 1231757 - RNA, 19 nt, Homo sapiens
  misc_RNA (1)...(19): siRNA sense strand
uaauggagcucacucagau

SEQ ID NO: 1231758 - RNA, 19 nt, Homo sapiens
  misc_RNA (1)...(19): siRNA sense strand
ggacgagucuggcccuuac

SEQ ID NO: 1231759 - RNA, 19 nt, Homo sapiens
  misc_RNA (1)...(19): siRNA sense strand
caaccagcauugaccgauu

SEQ ID NO: 1231760 - RNA, 19 nt, Homo sapiens
  misc_RNA (1)...(19): siRNA sense strand
ggagcucacucagaucuau

SEQ ID NO: 1231761 - RNA, 19 nt, Homo sapiens
  misc_RNA (1)...(19): siRNA sense strand
gaaguuaugcgugacauca

SEQ ID NO: 1231762 - RNA, 19 nt, Homo sapiens
  misc_RNA (1)...(19): siRNA sense strand
agucaaagcacuugcauga

SEQ ID NO: 1231763 - RNA, 19 nt, Homo sapiens
  misc_RNA (1)...(19): siRNA sense strand
gcacucauacacaucauca

SEQ ID NO: 1231764 - RNA, 19 nt, Homo sapiens
  misc_RNA (1)...(19): siRNA sense strand
cucaggagcuggaggagaa

SEQ ID NO: 1231765 - RNA, 19 nt, Homo sapiens
  misc_RNA (1)...(19): siRNA sense strand
gaagccacacaaaccauug

SEQ ID NO: 1231766 - RNA, 19 nt, Homo sapiens
  misc_RNA (1)...(19): siRNA sense strand
caucacacccaacuuacuu

SEQ ID NO: 1231767 - RNA, 19 nt, Homo sapiens
  misc_RNA (1)...(19): siRNA sense strand
gagcuggaggagaaucuaa

SEQ ID NO: 1231768 - RNA, 19 nt, Homo sapiens
  misc_RNA (1)...(19): siRNA sense strand
cacaaaccauugggaguga

SEQ ID NO: 1231769 - RNA, 19 nt, Homo sapiens
  misc_RNA (1)...(19): siRNA sense strand
guggagcacucauacacau

SEQ ID NO: 1231770 - RNA, 19 nt, Homo sapiens
  misc_RNA (1)...(19): siRNA sense strand
uggcgaaucucagcuggaa

SEQ ID NO: 1231771 - RNA, 19 nt, Homo sapiens
  misc_RNA (1)...(19): siRNA sense strand
ggagcacucauacacauca

SEQ ID NO: 1231772 - RNA, 19 nt, Homo sapiens
  misc_RNA (1)...(19): siRNA sense strand
ggauguggucaaccuugua

SEQ ID NO: 1231773 - RNA, 19 nt, Homo sapiens
  misc_RNA (1)...(19): siRNA sense strand
gauguggucaaccuuguau

SEQ ID NO: 1231774 - RNA, 19 nt, Homo sapiens
  misc_RNA (1)...(19): siRNA sense strand
gugaccaccuggcgaaucu

SEQ ID NO: 1231775 - RNA, 19 nt, Homo sapiens
  misc_RNA (1)...(19): siRNA sense strand
cgucugaauccaugccaua

SEQ ID NO: 1231776 - RNA, 19 nt, Homo sapiens
  misc_RNA (1)...(19): siRNA sense strand
gcgaaucucagcuggaagu

SEQ ID NO: 1231777 - RNA, 19 nt, Homo sapiens
  misc_RNA (1)...(19): siRNA sense strand
auacacaucaucagcagaa

SEQ ID NO: 1231778 - RNA, 19 nt, Homo sapiens
  misc_RNA (1)...(19): siRNA sense strand
aaccagcauugaccgauug

SEQ ID NO: 1231779 - RNA, 19 nt, Homo sapiens
  misc_RNA (1)...(19): siRNA sense strand
gggacgagucuggcccuua

SEQ ID NO: 1231780 - RNA, 19 nt, Homo sapiens
  misc_RNA (1)...(19): siRNA sense strand
cgaagccacacaaaccauu

SEQ ID NO: 1231781 - RNA, 19 nt, Homo sapiens
  misc_RNA (1)...(19): siRNA sense strand
aacuuacuuucccuucuua

SEQ ID NO: 1231782 - RNA, 19 nt, Homo sapiens
  misc_RNA (1)...(19): siRNA sense strand
ccaacuuacuuucccuucu

SEQ ID NO: 1231783 - RNA, 19 nt, Homo sapiens
  misc_RNA (1)...(19): siRNA sense strand
caaaccauugggagugaaa

SEQ ID NO: 1231784 - RNA, 19 nt, Homo sapiens
  misc_RNA (1)...(19): siRNA sense strand
gcauugaccgauugaaggu

SEQ ID NO: 1231785 - RNA, 19 nt, Homo sapiens
  misc_RNA (1)...(19): siRNA sense strand
cuaauggagcucacucaga

SEQ ID NO: 1231786 - RNA, 19 nt, Homo sapiens
  misc_RNA (1)...(19): siRNA sense strand
caucuuccuugcacuggau

SEQ ID NO: 1231787 - RNA, 19 nt, Homo sapiens
  misc_RNA (1)...(19): siRNA sense strand
ugaagguauuuaaggaagu

SEQ ID NO: 1231788 - RNA, 19 nt, Homo sapiens
  misc_RNA (1)...(19): siRNA sense strand
gucccuugcuggucuuguu

SEQ ID NO: 1231789 - RNA, 19 nt, Homo sapiens
  misc_RNA (1)...(19): siRNA sense strand
gcaucguggagcacucaua

SEQ ID NO: 1231790 - RNA, 19 nt, Homo sapiens
  misc_RNA (1)...(19): siRNA sense strand
uggaagugguggucaagca

SEQ ID NO: 1231791 - RNA, 19 nt, Homo sapiens
  misc_RNA (1)...(19): siRNA sense strand
caagcagagagaacgauug

SEQ ID NO: 1231792 - RNA, 19 nt, Homo sapiens
  misc_RNA (1)...(19): siRNA sense strand
ucaagcagagagaacgauu

SEQ ID NO: 1231793 - RNA, 19 nt, Homo sapiens
  misc_RNA (1)...(19): siRNA sense strand
ugacugcaaccagcauuga

SEQ ID NO: 1231794 - RNA, 19 nt, Homo sapiens
  misc_RNA (1)...(19): siRNA sense strand
gcuggaggagaaucuaaug

SEQ ID NO: 1231795 - RNA, 19 nt, Homo sapiens
  misc_RNA (1)...(19): siRNA sense strand
cagcauugaccgauugaag

SEQ ID NO: 1231796 - RNA, 19 nt, Homo sapiens
  misc_RNA (1)...(19): siRNA sense strand
gagcacucauacacaucau

SEQ ID NO: 1231797 - RNA, 19 nt, Homo sapiens
  misc_RNA (1)...(19): siRNA sense strand
gguauuuaaggaaguuaug

SEQ ID NO: 1231798 - RNA, 19 nt, Homo sapiens
  misc_RNA (1)...(19): siRNA sense strand
uggucaaccuuguauacga

SEQ ID NO: 1231799 - RNA, 19 nt, Homo sapiens
  misc_RNA (1)...(19): siRNA sense strand
ggagcuggaggagaaucua

SEQ ID NO: 1231800 - RNA, 19 nt, Homo sapiens
  misc_RNA (1)...(19): siRNA sense strand
ugacaucacacccaacuua

SEQ ID NO: 1231801 - RNA, 19 nt, Homo sapiens
  misc_RNA (1)...(19): siRNA sense strand
gaagguauuuaaggaaguu

SEQ ID NO: 1231802 - RNA, 19 nt, Homo sapiens
  misc_RNA (1)...(19): siRNA sense strand
caacuuacuuucccuucuu

SEQ ID NO: 1231803 - RNA, 19 nt, Homo sapiens
  misc_RNA (1)...(19): siRNA sense strand
gauugaagguauuuaagga

SEQ ID NO: 1231804 - RNA, 19 nt, Homo sapiens
  misc_RNA (1)...(19): siRNA sense strand
uaauggagcucacucagau

SEQ ID NO: 1231805 - RNA, 19 nt, Homo sapiens
  misc_RNA (1)...(19): siRNA sense strand
ggacgagucuggcccuuac

SEQ ID NO: 1231806 - RNA, 19 nt, Homo sapiens
  misc_RNA (1)...(19): siRNA sense strand
caaccagcauugaccgauu

SEQ ID NO: 1231807 - RNA, 19 nt, Homo sapiens
  misc_RNA (1)...(19): siRNA sense strand
ggagcucacucagaucuau

SEQ ID NO: 1231808 - RNA, 19 nt, Homo sapiens
  misc_RNA (1)...(19): siRNA sense strand
gaaguuaugcgugacauca

SEQ ID NO: 1231809 - RNA, 19 nt, Homo sapiens
  misc_RNA (1)...(19): siRNA sense strand
agucaaagcacuugcauga

SEQ ID NO: 1231810 - RNA, 19 nt, Homo sapiens
  misc_RNA (1)...(19): siRNA sense strand
gcacucauacacaucauca

SEQ ID NO: 1231811 - RNA, 19 nt, Homo sapiens
  misc_RNA (1)...(19): siRNA sense strand
cucaggagcuggaggagaa

SEQ ID NO: 1231812 - RNA, 19 nt, Homo sapiens
  misc_RNA (1)...(19): siRNA sense strand
gaagccacacaaaccauug

SEQ ID NO: 1231813 - RNA, 19 nt, Homo sapiens
  misc_RNA (1)...(19): siRNA sense strand
caucacacccaacuuacuu

SEQ ID NO: 1231814 - RNA, 19 nt, Homo sapiens
  misc_RNA (1)...(19): siRNA sense strand
gagcuggaggagaaucuaa

SEQ ID NO: 1231815 - RNA, 19 nt, Homo sapiens
  misc_RNA (1)...(19): siRNA sense strand
cacaaaccauugggaguga

SEQ ID NO: 1231816 - RNA, 19 nt, Homo sapiens
  misc_RNA (1)...(19): siRNA sense strand
guggagcacucauacacau

SEQ ID NO: 1231817 - RNA, 19 nt, Homo sapiens
  misc_RNA (1)...(19): siRNA sense strand
uggcgaaucucagcuggaa

SEQ ID NO: 1231818 - RNA, 19 nt, Homo sapiens
  misc_RNA (1)...(19): siRNA sense strand
ggagcacucauacacauca

SEQ ID NO: 1231819 - RNA, 19 nt, Homo sapiens
  misc_RNA (1)...(19): siRNA sense strand
ggauguggucaaccuugua

SEQ ID NO: 1231820 - RNA, 19 nt, Homo sapiens
  misc_RNA (1)...(19): siRNA sense strand
gauguggucaaccuuguau

SEQ ID NO: 1231821 - RNA, 19 nt, Homo sapiens
  misc_RNA (1)...(19): siRNA sense strand
gugaccaccuggcgaaucu

SEQ ID NO: 1231822 - RNA, 19 nt, Homo sapiens
  misc_RNA (1)...(19): siRNA sense strand
cgucugaauccaugccaua

SEQ ID NO: 1231823 - RNA, 19 nt, Homo sapiens
  misc_RNA (1)...(19): siRNA sense strand
gcgaaucucagcuggaagu

SEQ ID NO: 1231824 - RNA, 19 nt, Homo sapiens
  misc_RNA (1)...(19): siRNA sense strand
auacacaucaucagcagaa

SEQ ID NO: 1231825 - RNA, 19 nt, Homo sapiens
  misc_RNA (1)...(19): siRNA sense strand
aaccagcauugaccgauug

SEQ ID NO: 1231826 - RNA, 19 nt, Homo sapiens
  misc_RNA (1)...(19): siRNA sense strand
gggacgagucuggcccuua

SEQ ID NO: 1231827 - RNA, 19 nt, Homo sapiens
  misc_RNA (1)...(19): siRNA sense strand
cgaagccacacaaaccauu

SEQ ID NO: 1231828 - RNA, 19 nt, Homo sapiens
  misc_RNA (1)...(19): siRNA sense strand
aacuuacuuucccuucuua

SEQ ID NO: 1231829 - RNA, 19 nt, Homo sapiens
  misc_RNA (1)...(19): siRNA sense strand
ccaacuuacuuucccuucu

SEQ ID NO: 1231830 - RNA, 19 nt, Homo sapiens
  misc_RNA (1)...(19): siRNA sense strand
caaaccauugggagugaaa

SEQ ID NO: 1231831 - RNA, 19 nt, Homo sapiens
  misc_RNA (1)...(19): siRNA sense strand
gcauugaccgauugaaggu

SEQ ID NO: 1231832 - RNA, 19 nt, Homo sapiens
  misc_RNA (1)...(19): siRNA sense strand
cuaauggagcucacucaga

SEQ ID NO: 1231833 - RNA, 19 nt, Homo sapiens
  misc_RNA (1)...(19): siRNA sense strand
caucuuccuugcacuggau

SEQ ID NO: 1231834 - RNA, 19 nt, Homo sapiens
  misc_RNA (1)...(19): siRNA sense strand
ugaagguauuuaaggaagu

SEQ ID NO: 1231835 - RNA, 19 nt, Homo sapiens
  misc_RNA (1)...(19): siRNA sense strand
gucccuugcuggucuuguu

SEQ ID NO: 1231836 - RNA, 19 nt, Homo sapiens
  misc_RNA (1)...(19): siRNA sense strand
gcaucguggagcacucaua

SEQ ID NO: 1231837 - RNA, 19 nt, Homo sapiens
  misc_RNA (1)...(19): siRNA sense strand
uggaagugguggucaagca

SEQ ID NO: 1231838 - RNA, 19 nt, Homo sapiens
  misc_RNA (1)...(19): siRNA sense strand
caagcagagagaacgauug

SEQ ID NO: 1231839 - RNA, 19 nt, Homo sapiens
  misc_RNA (1)...(19): siRNA sense strand
ucaagcagagagaacgauu

SEQ ID NO: 1231840 - RNA, 19 nt, Homo sapiens
  misc_RNA (1)...(19): siRNA sense strand
ugacugcaaccagcauuga

SEQ ID NO: 1231841 - RNA, 19 nt, Homo sapiens
  misc_RNA (1)...(19): siRNA sense strand
gcuggaggagaaucuaaug

SEQ ID NO: 1231842 - RNA, 19 nt, Homo sapiens
  misc_RNA (1)...(19): siRNA sense strand
cagcauugaccgauugaag

SEQ ID NO: 1231843 - RNA, 19 nt, Homo sapiens
  misc_RNA (1)...(19): siRNA sense strand
gagcacucauacacaucau

SEQ ID NO: 1231844 - RNA, 19 nt, Homo sapiens
  misc_RNA (1)...(19): siRNA sense strand
gguauuuaaggaaguuaug

SEQ ID NO: 1231845 - RNA, 19 nt, Homo sapiens
  misc_RNA (1)...(19): siRNA sense strand
uggucaaccuuguauacga

SEQ ID NO: 1231846 - RNA, 19 nt, Homo sapiens
  misc_RNA (1)...(19): siRNA sense strand
ggagcuggaggagaaucua

SEQ ID NO: 1231847 - RNA, 19 nt, Homo sapiens
  misc_RNA (1)...(19): siRNA sense strand
gagaaaggcuggcuauaag

SEQ ID NO: 1231848 - RNA, 19 nt, Homo sapiens
  misc_RNA (1)...(19): siRNA sense strand
ggagaaaggcuggcuauaa

SEQ ID NO: 1231849 - RNA, 19 nt, Homo sapiens
  misc_RNA (1)...(19): siRNA sense strand
gagagcagcuucaggaauc

SEQ ID NO: 1231850 - RNA, 19 nt, Homo sapiens
  misc_RNA (1)...(19): siRNA sense strand
gaaaggcuggcuauaagaa

SEQ ID NO: 1231851 - RNA, 19 nt, Homo sapiens
  misc_RNA (1)...(19): siRNA sense strand
cgugaaagcugucaucgau

SEQ ID NO: 1231852 - RNA, 19 nt, Homo sapiens
  misc_RNA (1)...(19): siRNA sense strand
ugaaagcugucaucgauag

SEQ ID NO: 1231853 - RNA, 19 nt, Homo sapiens
  misc_RNA (1)...(19): siRNA sense strand
gagagaaaccugacaugug

SEQ ID NO: 1231854 - RNA, 19 nt, Homo sapiens
  misc_RNA (1)...(19): siRNA sense strand
gcaaggaagaagcgauuga

SEQ ID NO: 1231855 - RNA, 19 nt, Homo sapiens
  misc_RNA (1)...(19): siRNA sense strand
caagagaaagaccgugaaa

SEQ ID NO: 1231856 - RNA, 19 nt, Homo sapiens
  misc_RNA (1)...(19): siRNA sense strand
aagaagcgauugagggaau

SEQ ID NO: 1231857 - RNA, 19 nt, Homo sapiens
  misc_RNA (1)...(19): siRNA sense strand
agacuuaccacaucugaga

SEQ ID NO: 1231858 - RNA, 19 nt, Homo sapiens
  misc_RNA (1)...(19): siRNA sense strand
cgacuucauuguggccuuu

SEQ ID NO: 1231859 - RNA, 19 nt, Homo sapiens
  misc_RNA (1)...(19): siRNA sense strand
gcgauugagggaauuugua

SEQ ID NO: 1231860 - RNA, 19 nt, Homo sapiens
  misc_RNA (1)...(19): siRNA sense strand
gaggagaaaggcuggcuau

SEQ ID NO: 1231861 - RNA, 19 nt, Homo sapiens
  misc_RNA (1)...(19): siRNA sense strand
gcaagagaaagaccgugaa

SEQ ID NO: 1231862 - RNA, 19 nt, Homo sapiens
  misc_RNA (1)...(19): siRNA sense strand
cuaacauacuucagugcaa

SEQ ID NO: 1231863 - RNA, 19 nt, Homo sapiens
  misc_RNA (1)...(19): siRNA sense strand
cgauagguuucuucgacuu

SEQ ID NO: 1231864 - RNA, 19 nt, Homo sapiens
  misc_RNA (1)...(19): siRNA sense strand
gaagcgauugagggaauuu

SEQ ID NO: 1231865 - RNA, 19 nt, Homo sapiens
  misc_RNA (1)...(19): siRNA sense strand
aaccugacaugugggcaua

SEQ ID NO: 1231866 - RNA, 19 nt, Homo sapiens
  misc_RNA (1)...(19): siRNA sense strand
caagaaaaggcaagagaaa

SEQ ID NO: 1231867 - RNA, 19 nt, Homo sapiens
  misc_RNA (1)...(19): siRNA sense strand
cgauugagggaauuuguau

SEQ ID NO: 1231868 - RNA, 19 nt, Homo sapiens
  misc_RNA (1)...(19): siRNA sense strand
cauauucagacaccaguug

SEQ ID NO: 1231869 - RNA, 19 nt, Homo sapiens
  misc_RNA (1)...(19): siRNA sense strand
gugaaagcugucaucgaua

SEQ ID NO: 1231870 - RNA, 19 nt, Homo sapiens
  misc_RNA (1)...(19): siRNA sense strand
gagaaagaccgugaaagcu

SEQ ID NO: 1231871 - RNA, 19 nt, Homo sapiens
  misc_RNA (1)...(19): siRNA sense strand
gcaagaaaaggcaagagaa

SEQ ID NO: 1231872 - RNA, 19 nt, Homo sapiens
  misc_RNA (1)...(19): siRNA sense strand
ugagagaaaccugacaugu

SEQ ID NO: 1231873 - RNA, 19 nt, Homo sapiens
  misc_RNA (1)...(19): siRNA sense strand
agagaaagaccgugaaagc

SEQ ID NO: 1231874 - RNA, 19 nt, Homo sapiens
  misc_RNA (1)...(19): siRNA sense strand
agaaaggcuggcuauaaga

SEQ ID NO: 1231875 - RNA, 19 nt, Homo sapiens
  misc_RNA (1)...(19): siRNA sense strand
aagcugucaucgauagguu

SEQ ID NO: 1231876 - RNA, 19 nt, Homo sapiens
  misc_RNA (1)...(19): siRNA sense strand
aaaggcuggcuauaagaaa

SEQ ID NO: 1231877 - RNA, 19 nt, Homo sapiens
  misc_RNA (1)...(19): siRNA sense strand
gccuuugggugaggagaaa

SEQ ID NO: 1231878 - RNA, 19 nt, Homo sapiens
  misc_RNA (1)...(19): siRNA sense strand
gauagguuucuucgacuuc

SEQ ID NO: 1231879 - RNA, 19 nt, Homo sapiens
  misc_RNA (1)...(19): siRNA sense strand
ucucuuauuucugcauugu

SEQ ID NO: 1231880 - RNA, 19 nt, Homo sapiens
  misc_RNA (1)...(19): siRNA sense strand
ccucucuuauuucugcauu

SEQ ID NO: 1231881 - RNA, 19 nt, Homo sapiens
  misc_RNA (1)...(19): siRNA sense strand
gauugagggaauuuguauu

SEQ ID NO: 1231882 - RNA, 19 nt, Homo sapiens
  misc_RNA (1)...(19): siRNA sense strand
ugucaucgauagguuucuu

SEQ ID NO: 1231883 - RNA, 19 nt, Homo sapiens
  misc_RNA (1)...(19): siRNA sense strand
uaccacaucugagagaaac

SEQ ID NO: 1231884 - RNA, 19 nt, Homo sapiens
  misc_RNA (1)...(19): siRNA sense strand
ugagagcagcuucaggaau

SEQ ID NO: 1231885 - RNA, 19 nt, Homo sapiens
  misc_RNA (1)...(19): siRNA sense strand
gagaaaggcuggcuauaag

SEQ ID NO: 1231886 - RNA, 19 nt, Homo sapiens
  misc_RNA (1)...(19): siRNA sense strand
ggagaaaggcuggcuauaa

SEQ ID NO: 1231887 - RNA, 19 nt, Homo sapiens
  misc_RNA (1)...(19): siRNA sense strand
gagagcagcuucaggaauc

SEQ ID NO: 1231888 - RNA, 19 nt, Homo sapiens
  misc_RNA (1)...(19): siRNA sense strand
gaaaggcuggcuauaagaa

SEQ ID NO: 1231889 - RNA, 19 nt, Homo sapiens
  misc_RNA (1)...(19): siRNA sense strand
cgugaaagcugucaucgau

SEQ ID NO: 1231890 - RNA, 19 nt, Homo sapiens
  misc_RNA (1)...(19): siRNA sense strand
ugaaagcugucaucgauag

SEQ ID NO: 1231891 - RNA, 19 nt, Homo sapiens
  misc_RNA (1)...(19): siRNA sense strand
gagagaaaccugacaugug

SEQ ID NO: 1231892 - RNA, 19 nt, Homo sapiens
  misc_RNA (1)...(19): siRNA sense strand
gcaaggaagaagcgauuga

SEQ ID NO: 1231893 - RNA, 19 nt, Homo sapiens
  misc_RNA (1)...(19): siRNA sense strand
caagagaaagaccgugaaa

SEQ ID NO: 1231894 - RNA, 19 nt, Homo sapiens
  misc_RNA (1)...(19): siRNA sense strand
aagaagcgauugagggaau

SEQ ID NO: 1231895 - RNA, 19 nt, Homo sapiens
  misc_RNA (1)...(19): siRNA sense strand
agacuuaccacaucugaga

SEQ ID NO: 1231896 - RNA, 19 nt, Homo sapiens
  misc_RNA (1)...(19): siRNA sense strand
cgacuucauuguggccuuu

SEQ ID NO: 1231897 - RNA, 19 nt, Homo sapiens
  misc_RNA (1)...(19): siRNA sense strand
gcgauugagggaauuugua

SEQ ID NO: 1231898 - RNA, 19 nt, Homo sapiens
  misc_RNA (1)...(19): siRNA sense strand
gaggagaaaggcuggcuau

SEQ ID NO: 1231899 - RNA, 19 nt, Homo sapiens
  misc_RNA (1)...(19): siRNA sense strand
gcaagagaaagaccgugaa

SEQ ID NO: 1231900 - RNA, 19 nt, Homo sapiens
  misc_RNA (1)...(19): siRNA sense strand
cuaacauacuucagugcaa

SEQ ID NO: 1231901 - RNA, 19 nt, Homo sapiens
  misc_RNA (1)...(19): siRNA sense strand
cgauagguuucuucgacuu

SEQ ID NO: 1231902 - RNA, 19 nt, Homo sapiens
  misc_RNA (1)...(19): siRNA sense strand
gaagcgauugagggaauuu

SEQ ID NO: 1231903 - RNA, 19 nt, Homo sapiens
  misc_RNA (1)...(19): siRNA sense strand
aaccugacaugugggcaua

SEQ ID NO: 1231904 - RNA, 19 nt, Homo sapiens
  misc_RNA (1)...(19): siRNA sense strand
caagaaaaggcaagagaaa

SEQ ID NO: 1231905 - RNA, 19 nt, Homo sapiens
  misc_RNA (1)...(19): siRNA sense strand
cgauugagggaauuuguau

SEQ ID NO: 1231906 - RNA, 19 nt, Homo sapiens
  misc_RNA (1)...(19): siRNA sense strand
cauauucagacaccaguug

SEQ ID NO: 1231907 - RNA, 19 nt, Homo sapiens
  misc_RNA (1)...(19): siRNA sense strand
gugaaagcugucaucgaua

SEQ ID NO: 1231908 - RNA, 19 nt, Homo sapiens
  misc_RNA (1)...(19): siRNA sense strand
gagaaagaccgugaaagcu

SEQ ID NO: 1231909 - RNA, 19 nt, Homo sapiens
  misc_RNA (1)...(19): siRNA sense strand
gcaagaaaaggcaagagaa

SEQ ID NO: 1231910 - RNA, 19 nt, Homo sapiens
  misc_RNA (1)...(19): siRNA sense strand
ugagagaaaccugacaugu

SEQ ID NO: 1231911 - RNA, 19 nt, Homo sapiens
  misc_RNA (1)...(19): siRNA sense strand
agagaaagaccgugaaagc

SEQ ID NO: 1231912 - RNA, 19 nt, Homo sapiens
  misc_RNA (1)...(19): siRNA sense strand
agaaaggcuggcuauaaga

SEQ ID NO: 1231913 - RNA, 19 nt, Homo sapiens
  misc_RNA (1)...(19): siRNA sense strand
aagcugucaucgauagguu

SEQ ID NO: 1231914 - RNA, 19 nt, Homo sapiens
  misc_RNA (1)...(19): siRNA sense strand
aaaggcuggcuauaagaaa

SEQ ID NO: 1231915 - RNA, 19 nt, Homo sapiens
  misc_RNA (1)...(19): siRNA sense strand
gccuuugggugaggagaaa

SEQ ID NO: 1231916 - RNA, 19 nt, Homo sapiens
  misc_RNA (1)...(19): siRNA sense strand
gauagguuucuucgacuuc

SEQ ID NO: 1231917 - RNA, 19 nt, Homo sapiens
  misc_RNA (1)...(19): siRNA sense strand
ucucuuauuucugcauugu

SEQ ID NO: 1231918 - RNA, 19 nt, Homo sapiens
  misc_RNA (1)...(19): siRNA sense strand
ccucucuuauuucugcauu

SEQ ID NO: 1231919 - RNA, 19 nt, Homo sapiens
  misc_RNA (1)...(19): siRNA sense strand
gauugagggaauuuguauu

SEQ ID NO: 1231920 - RNA, 19 nt, Homo sapiens
  misc_RNA (1)...(19): siRNA sense strand
ugucaucgauagguuucuu

SEQ ID NO: 1231921 - RNA, 19 nt, Homo sapiens
  misc_RNA (1)...(19): siRNA sense strand
uaccacaucugagagaaac

SEQ ID NO: 1231922 - RNA, 19 nt, Homo sapiens
  misc_RNA (1)...(19): siRNA sense strand
ugagagcagcuucaggaau

SEQ ID NO: 1231923 - RNA, 19 nt, Homo sapiens
  misc_RNA (1)...(19): siRNA sense strand
ggaagaagggagagaaauc

SEQ ID NO: 1231924 - RNA, 19 nt, Homo sapiens
  misc_RNA (1)...(19): siRNA sense strand
gaugggcccugccuccuau

SEQ ID NO: 1231925 - RNA, 19 nt, Homo sapiens
  misc_RNA (1)...(19): siRNA sense strand
gcaggaagaagggagagaa

SEQ ID NO: 1231926 - RNA, 19 nt, Homo sapiens
  misc_RNA (1)...(19): siRNA sense strand
gaagaagggagagaaaucg

SEQ ID NO: 1231927 - RNA, 19 nt, Homo sapiens
  misc_RNA (1)...(19): siRNA sense strand
ccaugaaccaccuguguca

SEQ ID NO: 1231928 - RNA, 19 nt, Homo sapiens
  misc_RNA (1)...(19): siRNA sense strand
caggaagaagggagagaaa

SEQ ID NO: 1231929 - RNA, 19 nt, Homo sapiens
  misc_RNA (1)...(19): siRNA sense strand
caggaagugcugcuacaga

SEQ ID NO: 1231930 - RNA, 19 nt, Homo sapiens
  misc_RNA (1)...(19): siRNA sense strand
caaacaagcugcccacaua

SEQ ID NO: 1231931 - RNA, 19 nt, Homo sapiens
  misc_RNA (1)...(19): siRNA sense strand
uaacuuaccuccaauaugu

SEQ ID NO: 1231932 - RNA, 19 nt, Homo sapiens
  misc_RNA (1)...(19): siRNA sense strand
gcaauaacaugugcauuug

SEQ ID NO: 1231933 - RNA, 19 nt, Homo sapiens
  misc_RNA (1)...(19): siRNA sense strand
gggcuuaggcuguuucuua

SEQ ID NO: 1231934 - RNA, 19 nt, Homo sapiens
  misc_RNA (1)...(19): siRNA sense strand
caagauuacugucaaacaa

SEQ ID NO: 1231935 - RNA, 19 nt, Homo sapiens
  misc_RNA (1)...(19): siRNA sense strand
gaaacaggagcuauuauug

SEQ ID NO: 1231936 - RNA, 19 nt, Homo sapiens
  misc_RNA (1)...(19): siRNA sense strand
ggaccugacuguuccuuga

SEQ ID NO: 1231937 - RNA, 19 nt, Homo sapiens
  misc_RNA (1)...(19): siRNA sense strand
gugcaaauguuuauguuga

SEQ ID NO: 1231938 - RNA, 19 nt, Homo sapiens
  misc_RNA (1)...(19): siRNA sense strand
gaugcaaucuuucuaaugg

SEQ ID NO: 1231939 - RNA, 19 nt, Homo sapiens
  misc_RNA (1)...(19): siRNA sense strand
guagaaacaggagcuauua

SEQ ID NO: 1231940 - RNA, 19 nt, Homo sapiens
  misc_RNA (1)...(19): siRNA sense strand
gaaggaauuccacaagauu

SEQ ID NO: 1231941 - RNA, 19 nt, Homo sapiens
  misc_RNA (1)...(19): siRNA sense strand
aagaagaggucaagaagga

SEQ ID NO: 1231942 - RNA, 19 nt, Homo sapiens
  misc_RNA (1)...(19): siRNA sense strand
ggcaauaacaugugcauuu

SEQ ID NO: 1231943 - RNA, 19 nt, Homo sapiens
  misc_RNA (1)...(19): siRNA sense strand
cuaguuggauucauuaaug

SEQ ID NO: 1231944 - RNA, 19 nt, Homo sapiens
  misc_RNA (1)...(19): siRNA sense strand
gauugcaacuguccaucua

SEQ ID NO: 1231945 - RNA, 19 nt, Homo sapiens
  misc_RNA (1)...(19): siRNA sense strand
uaugaaaucugaagagaag

SEQ ID NO: 1231946 - RNA, 19 nt, Homo sapiens
  misc_RNA (1)...(19): siRNA sense strand
ccaacacacuuccaaagga

SEQ ID NO: 1231947 - RNA, 19 nt, Homo sapiens
  misc_RNA (1)...(19): siRNA sense strand
guacaaaggaaguuaaauc

SEQ ID NO: 1231948 - RNA, 19 nt, Homo sapiens
  misc_RNA (1)...(19): siRNA sense strand
ggcauuggaugugugguua

SEQ ID NO: 1231949 - RNA, 19 nt, Homo sapiens
  misc_RNA (1)...(19): siRNA sense strand
ggaaauucaucugcaguuc

SEQ ID NO: 1231950 - RNA, 19 nt, Homo sapiens
  misc_RNA (1)...(19): siRNA sense strand
gaagaggucaagaaggaaa

SEQ ID NO: 1231951 - RNA, 19 nt, Homo sapiens
  misc_RNA (1)...(19): siRNA sense strand
gaaucuacaguuucaguuu

SEQ ID NO: 1231952 - RNA, 19 nt, Homo sapiens
  misc_RNA (1)...(19): siRNA sense strand
ggcuuaggcuguuucuuaa

SEQ ID NO: 1231953 - RNA, 19 nt, Homo sapiens
  misc_RNA (1)...(19): siRNA sense strand
ugagguguaugaaaucuga

SEQ ID NO: 1231954 - RNA, 19 nt, Homo sapiens
  misc_RNA (1)...(19): siRNA sense strand
gaacgggaauaaacauggu

SEQ ID NO: 1231955 - RNA, 19 nt, Homo sapiens
  misc_RNA (1)...(19): siRNA sense strand
aauggaagcuuugagauug

SEQ ID NO: 1231956 - RNA, 19 nt, Homo sapiens
  misc_RNA (1)...(19): siRNA sense strand
ugguuuggcuuucugauuu

SEQ ID NO: 1231957 - RNA, 19 nt, Homo sapiens
  misc_RNA (1)...(19): siRNA sense strand
ugaaggaauuccacaagau

SEQ ID NO: 1231958 - RNA, 19 nt, Homo sapiens
  misc_RNA (1)...(19): siRNA sense strand
aaauaccucuuaugaagga

SEQ ID NO: 1231959 - RNA, 19 nt, Homo sapiens
  misc_RNA (1)...(19): siRNA sense strand
aggaaggacuagagacuaa

SEQ ID NO: 1231960 - RNA, 19 nt, Homo sapiens
  misc_RNA (1)...(19): siRNA sense strand
ggauauaugguucucuuga

SEQ ID NO: 1231961 - RNA, 19 nt, Homo sapiens
  misc_RNA (1)...(19): siRNA sense strand
aauugcagcuguauucaaa

SEQ ID NO: 1231962 - RNA, 19 nt, Homo sapiens
  misc_RNA (1)...(19): siRNA sense strand
caacuuguccucaaacagu

SEQ ID NO: 1231963 - RNA, 19 nt, Homo sapiens
  misc_RNA (1)...(19): siRNA sense strand
cgacaaaggaccugacugu

SEQ ID NO: 1231964 - RNA, 19 nt, Homo sapiens
  misc_RNA (1)...(19): siRNA sense strand
gcagcuguauucaaacauc

SEQ ID NO: 1231965 - RNA, 19 nt, Homo sapiens
  misc_RNA (1)...(19): siRNA sense strand
acaaauagagagacaauuc

SEQ ID NO: 1231966 - RNA, 19 nt, Homo sapiens
  misc_RNA (1)...(19): siRNA sense strand
ugauacaguucaaugcauu

SEQ ID NO: 1231967 - RNA, 19 nt, Homo sapiens
  misc_RNA (1)...(19): siRNA sense strand
gagcuauuauugguccuuu

SEQ ID NO: 1231968 - RNA, 19 nt, Homo sapiens
  misc_RNA (1)...(19): siRNA sense strand
aaacucccauccugccuuu

SEQ ID NO: 1231969 - RNA, 19 nt, Homo sapiens
  misc_RNA (1)...(19): siRNA sense strand
gcaaauguuuauguugaca

SEQ ID NO: 1231970 - RNA, 19 nt, Homo sapiens
  misc_RNA (1)...(19): siRNA sense strand
gauauaugguucucuugag

SEQ ID NO: 1231971 - RNA, 19 nt, Homo sapiens
  misc_RNA (1)...(19): siRNA sense strand
ugucagcgaugagcaguuu

SEQ ID NO: 1231972 - RNA, 19 nt, Homo sapiens
  misc_RNA (1)...(19): siRNA sense strand
ucaaacaucaggaaauuca

SEQ ID NO: 1231973 - RNA, 19 nt, Homo sapiens
  misc_RNA (1)...(19): siRNA sense strand
guucaagauuacugucaaa

SEQ ID NO: 1231974 - RNA, 19 nt, Homo sapiens
  misc_RNA (1)...(19): siRNA sense strand
agaaacaggagcuauuauu

SEQ ID NO: 1231975 - RNA, 19 nt, Homo sapiens
  misc_RNA (1)...(19): siRNA sense strand
ggugugggauuacauacau

SEQ ID NO: 1231976 - RNA, 19 nt, Homo sapiens
  misc_RNA (1)...(19): siRNA sense strand
cuucaugccuaaauaccua

SEQ ID NO: 1231977 - RNA, 19 nt, Homo sapiens
  misc_RNA (1)...(19): siRNA sense strand
caacaucccaacaucucua

SEQ ID NO: 1231978 - RNA, 19 nt, Homo sapiens
  misc_RNA (1)...(19): siRNA sense strand
ucacacaaauagagagaca

SEQ ID NO: 1231979 - RNA, 19 nt, Homo sapiens
  misc_RNA (1)...(19): siRNA sense strand
aaauucaucugcaguucuu

SEQ ID NO: 1231980 - RNA, 19 nt, Homo sapiens
  misc_RNA (1)...(19): siRNA sense strand
aaugacaucuuugcugauu

SEQ ID NO: 1231981 - RNA, 19 nt, Homo sapiens
  misc_RNA (1)...(19): siRNA sense strand
uaauggaagcuuugagauu

SEQ ID NO: 1231982 - RNA, 19 nt, Homo sapiens
  misc_RNA (1)...(19): siRNA sense strand
gcaauccaauuuauaugcu

SEQ ID NO: 1231983 - RNA, 19 nt, Homo sapiens
  misc_RNA (1)...(19): siRNA sense strand
ugaauuccaugcucacaca

SEQ ID NO: 1231984 - RNA, 19 nt, Homo sapiens
  misc_RNA (1)...(19): siRNA sense strand
caacgcaggauccaucaga

SEQ ID NO: 1231985 - RNA, 19 nt, Homo sapiens
  misc_RNA (1)...(19): siRNA sense strand
caaauagagagacaauuca

SEQ ID NO: 1231986 - RNA, 19 nt, Homo sapiens
  misc_RNA (1)...(19): siRNA sense strand
acaaaggaccugacuguuc

SEQ ID NO: 1231987 - RNA, 19 nt, Homo sapiens
  misc_RNA (1)...(19): siRNA sense strand
gaaggacuagagacuaaug

SEQ ID NO: 1231988 - RNA, 19 nt, Homo sapiens
  misc_RNA (1)...(19): siRNA sense strand
aauaugggauccugugugu

SEQ ID NO: 1231989 - RNA, 19 nt, Homo sapiens
  misc_RNA (1)...(19): siRNA sense strand
guuaugggcuuaggcuguu

SEQ ID NO: 1231990 - RNA, 19 nt, Homo sapiens
  misc_RNA (1)...(19): siRNA sense strand
acaguucaaugcauucguu

SEQ ID NO: 1231991 - RNA, 19 nt, Homo sapiens
  misc_RNA (1)...(19): siRNA sense strand
gguauuuccuauauagaag

SEQ ID NO: 1231992 - RNA, 19 nt, Homo sapiens
  misc_RNA (1)...(19): siRNA sense strand
caucagaguguacaaagga

SEQ ID NO: 1231993 - RNA, 19 nt, Homo sapiens
  misc_RNA (1)...(19): siRNA sense strand
gcuauuauugguccuuuga

SEQ ID NO: 1231994 - RNA, 19 nt, Homo sapiens
  misc_RNA (1)...(19): siRNA sense strand
guuccuugaugcuccagua

SEQ ID NO: 1231995 - RNA, 19 nt, Homo sapiens
  misc_RNA (1)...(19): siRNA sense strand
gucuggaucuuauaugaau

SEQ ID NO: 1231996 - RNA, 19 nt, Homo sapiens
  misc_RNA (1)...(19): siRNA sense strand
ucaggcaacuuguccucaa

SEQ ID NO: 1231997 - RNA, 19 nt, Homo sapiens
  misc_RNA (1)...(19): siRNA sense strand
ggaauuccacaagauuuau

SEQ ID NO: 1231998 - RNA, 19 nt, Homo sapiens
  misc_RNA (1)...(19): siRNA sense strand
ggguauuuccuauauagaa

SEQ ID NO: 1231999 - RNA, 19 nt, Homo sapiens
  misc_RNA (1)...(19): siRNA sense strand
ccaaaggaaggacuagaga

SEQ ID NO: 1232000 - RNA, 19 nt, Homo sapiens
  misc_RNA (1)...(19): siRNA sense strand
gaaauucaucugcaguucu

SEQ ID NO: 1232001 - RNA, 19 nt, Homo sapiens
  misc_RNA (1)...(19): siRNA sense strand
gaaaauucuucaguuguug

SEQ ID NO: 1232002 - RNA, 19 nt, Homo sapiens
  misc_RNA (1)...(19): siRNA sense strand
ggauauauaauuggugguu

SEQ ID NO: 1232003 - RNA, 19 nt, Homo sapiens
  misc_RNA (1)...(19): siRNA sense strand
ucuccuucaugccuaaaua

SEQ ID NO: 1232004 - RNA, 19 nt, Homo sapiens
  misc_RNA (1)...(19): siRNA sense strand
ucaaugcauucguuaacau

SEQ ID NO: 1232005 - RNA, 19 nt, Homo sapiens
  misc_RNA (1)...(19): siRNA sense strand
uaagugugauacaguucaa

SEQ ID NO: 1232006 - RNA, 19 nt, Homo sapiens
  misc_RNA (1)...(19): siRNA sense strand
caacuguccaucuaaaaua

SEQ ID NO: 1232007 - RNA, 19 nt, Homo sapiens
  misc_RNA (1)...(19): siRNA sense strand
uguaugaaaucugaagaga

SEQ ID NO: 1232008 - RNA, 19 nt, Homo sapiens
  misc_RNA (1)...(19): siRNA sense strand
ugagcaguuucauuuauuc

SEQ ID NO: 1232009 - RNA, 19 nt, Homo sapiens
  misc_RNA (1)...(19): siRNA sense strand
caggcaacuuguccucaaa

SEQ ID NO: 1232010 - RNA, 19 nt, Homo sapiens
  misc_RNA (1)...(19): siRNA sense strand
aggaauuccacaagauuua

SEQ ID NO: 1232011 - RNA, 19 nt, Homo sapiens
  misc_RNA (1)...(19): siRNA sense strand
aaacaggagcuauuauugg

SEQ ID NO: 1232012 - RNA, 19 nt, Homo sapiens
  misc_RNA (1)...(19): siRNA sense strand
caggauccaucagagugua

SEQ ID NO: 1232013 - RNA, 19 nt, Homo sapiens
  misc_RNA (1)...(19): siRNA sense strand
aaucuacaguuucaguuuc

SEQ ID NO: 1232014 - RNA, 19 nt, Homo sapiens
  misc_RNA (1)...(19): siRNA sense strand
gauccuguguguggaaaca

SEQ ID NO: 1232015 - RNA, 19 nt, Homo sapiens
  misc_RNA (1)...(19): siRNA sense strand
gguuuggcuuucugauuug

SEQ ID NO: 1232016 - RNA, 19 nt, Homo sapiens
  misc_RNA (1)...(19): siRNA sense strand
guacguggaaugggugaaa

SEQ ID NO: 1232017 - RNA, 19 nt, Homo sapiens
  misc_RNA (1)...(19): siRNA sense strand
guaugaaaucugaagagaa

SEQ ID NO: 1232018 - RNA, 19 nt, Homo sapiens
  misc_RNA (1)...(19): siRNA sense strand
caaaauugcagcuguauuc

SEQ ID NO: 1232019 - RNA, 19 nt, Homo sapiens
  misc_RNA (1)...(19): siRNA sense strand
uugcaacuguccaucuaaa

SEQ ID NO: 1232020 - RNA, 19 nt, Homo sapiens
  misc_RNA (1)...(19): siRNA sense strand
ugacaucuuugcugauugc

SEQ ID NO: 1232021 - RNA, 19 nt, Homo sapiens
  misc_RNA (1)...(19): siRNA sense strand
aaacacugucuggaucuua

SEQ ID NO: 1232022 - RNA, 19 nt, Homo sapiens
  misc_RNA (1)...(19): siRNA sense strand
cauccugccuuuggguauu

SEQ ID NO: 1232023 - RNA, 19 nt, Homo sapiens
  misc_RNA (1)...(19): siRNA sense strand
aacaggagcuauuauuggu

SEQ ID NO: 1232024 - RNA, 19 nt, Homo sapiens
  misc_RNA (1)...(19): siRNA sense strand
gacacuggauuugugaaca

SEQ ID NO: 1232025 - RNA, 19 nt, Homo sapiens
  misc_RNA (1)...(19): siRNA sense strand
uaacaugugcauuuguauc

SEQ ID NO: 1232026 - RNA, 19 nt, Homo sapiens
  misc_RNA (1)...(19): siRNA sense strand
ucucaugacuugugaaaau

SEQ ID NO: 1232027 - RNA, 19 nt, Homo sapiens
  misc_RNA (1)...(19): siRNA sense strand
caaucuuucuaauggguau

SEQ ID NO: 1232028 - RNA, 19 nt, Homo sapiens
  misc_RNA (1)...(19): siRNA sense strand
agaacagcaauauggaaua

SEQ ID NO: 1232029 - RNA, 19 nt, Homo sapiens
  misc_RNA (1)...(19): siRNA sense strand
gugauacaguucaaugcau

SEQ ID NO: 1232030 - RNA, 19 nt, Homo sapiens
  misc_RNA (1)...(19): siRNA sense strand
caaacaagcugcccacaua

SEQ ID NO: 1232031 - RNA, 19 nt, Homo sapiens
  misc_RNA (1)...(19): siRNA sense strand
uaacuuaccuccaauaugu

SEQ ID NO: 1232032 - RNA, 19 nt, Homo sapiens
  misc_RNA (1)...(19): siRNA sense strand
gcaauaacaugugcauuug

SEQ ID NO: 1232033 - RNA, 19 nt, Homo sapiens
  misc_RNA (1)...(19): siRNA sense strand
gggcuuaggcuguuucuua

SEQ ID NO: 1232034 - RNA, 19 nt, Homo sapiens
  misc_RNA (1)...(19): siRNA sense strand
caagauuacugucaaacaa

SEQ ID NO: 1232035 - RNA, 19 nt, Homo sapiens
  misc_RNA (1)...(19): siRNA sense strand
gaaacaggagcuauuauug

SEQ ID NO: 1232036 - RNA, 19 nt, Homo sapiens
  misc_RNA (1)...(19): siRNA sense strand
ggaccugacuguuccuuga

SEQ ID NO: 1232037 - RNA, 19 nt, Homo sapiens
  misc_RNA (1)...(19): siRNA sense strand
gugcaaauguuuauguuga

SEQ ID NO: 1232038 - RNA, 19 nt, Homo sapiens
  misc_RNA (1)...(19): siRNA sense strand
gaugcaaucuuucuaaugg

SEQ ID NO: 1232039 - RNA, 19 nt, Homo sapiens
  misc_RNA (1)...(19): siRNA sense strand
guagaaacaggagcuauua

SEQ ID NO: 1232040 - RNA, 19 nt, Homo sapiens
  misc_RNA (1)...(19): siRNA sense strand
gaaggaauuccacaagauu

SEQ ID NO: 1232041 - RNA, 19 nt, Homo sapiens
  misc_RNA (1)...(19): siRNA sense strand
aagaagaggucaagaagga

SEQ ID NO: 1232042 - RNA, 19 nt, Homo sapiens
  misc_RNA (1)...(19): siRNA sense strand
ggcaauaacaugugcauuu

SEQ ID NO: 1232043 - RNA, 19 nt, Homo sapiens
  misc_RNA (1)...(19): siRNA sense strand
cuaguuggauucauuaaug

SEQ ID NO: 1232044 - RNA, 19 nt, Homo sapiens
  misc_RNA (1)...(19): siRNA sense strand
gauugcaacuguccaucua

SEQ ID NO: 1232045 - RNA, 19 nt, Homo sapiens
  misc_RNA (1)...(19): siRNA sense strand
uaugaaaucugaagagaag

SEQ ID NO: 1232046 - RNA, 19 nt, Homo sapiens
  misc_RNA (1)...(19): siRNA sense strand
ccaacacacuuccaaagga

SEQ ID NO: 1232047 - RNA, 19 nt, Homo sapiens
  misc_RNA (1)...(19): siRNA sense strand
guacaaaggaaguuaaauc

SEQ ID NO: 1232048 - RNA, 19 nt, Homo sapiens
  misc_RNA (1)...(19): siRNA sense strand
ggcauuggaugugugguua

SEQ ID NO: 1232049 - RNA, 19 nt, Homo sapiens
  misc_RNA (1)...(19): siRNA sense strand
ggaaauucaucugcaguuc

SEQ ID NO: 1232050 - RNA, 19 nt, Homo sapiens
  misc_RNA (1)...(19): siRNA sense strand
gaagaggucaagaaggaaa

SEQ ID NO: 1232051 - RNA, 19 nt, Homo sapiens
  misc_RNA (1)...(19): siRNA sense strand
gaaucuacaguuucaguuu

SEQ ID NO: 1232052 - RNA, 19 nt, Homo sapiens
  misc_RNA (1)...(19): siRNA sense strand
ggcuuaggcuguuucuuaa

SEQ ID NO: 1232053 - RNA, 19 nt, Homo sapiens
  misc_RNA (1)...(19): siRNA sense strand
ugagguguaugaaaucuga

SEQ ID NO: 1232054 - RNA, 19 nt, Homo sapiens
  misc_RNA (1)...(19): siRNA sense strand
gaacgggaauaaacauggu

SEQ ID NO: 1232055 - RNA, 19 nt, Homo sapiens
  misc_RNA (1)...(19): siRNA sense strand
aauggaagcuuugagauug

SEQ ID NO: 1232056 - RNA, 19 nt, Homo sapiens
  misc_RNA (1)...(19): siRNA sense strand
ugguuuggcuuucugauuu

SEQ ID NO: 1232057 - RNA, 19 nt, Homo sapiens
  misc_RNA (1)...(19): siRNA sense strand
ugaaggaauuccacaagau

SEQ ID NO: 1232058 - RNA, 19 nt, Homo sapiens
  misc_RNA (1)...(19): siRNA sense strand
aaauaccucuuaugaagga

SEQ ID NO: 1232059 - RNA, 19 nt, Homo sapiens
  misc_RNA (1)...(19): siRNA sense strand
aggaaggacuagagacuaa

SEQ ID NO: 1232060 - RNA, 19 nt, Homo sapiens
  misc_RNA (1)...(19): siRNA sense strand
ggauauaugguucucuuga

SEQ ID NO: 1232061 - RNA, 19 nt, Homo sapiens
  misc_RNA (1)...(19): siRNA sense strand
aauugcagcuguauucaaa

SEQ ID NO: 1232062 - RNA, 19 nt, Homo sapiens
  misc_RNA (1)...(19): siRNA sense strand
caacuuguccucaaacagu

SEQ ID NO: 1232063 - RNA, 19 nt, Homo sapiens
  misc_RNA (1)...(19): siRNA sense strand
cgacaaaggaccugacugu

SEQ ID NO: 1232064 - RNA, 19 nt, Homo sapiens
  misc_RNA (1)...(19): siRNA sense strand
gcagcuguauucaaacauc

SEQ ID NO: 1232065 - RNA, 19 nt, Homo sapiens
  misc_RNA (1)...(19): siRNA sense strand
acaaauagagagacaauuc

SEQ ID NO: 1232066 - RNA, 19 nt, Homo sapiens
  misc_RNA (1)...(19): siRNA sense strand
ugauacaguucaaugcauu

SEQ ID NO: 1232067 - RNA, 19 nt, Homo sapiens
  misc_RNA (1)...(19): siRNA sense strand
gagcuauuauugguccuuu

SEQ ID NO: 1232068 - RNA, 19 nt, Homo sapiens
  misc_RNA (1)...(19): siRNA sense strand
aaacucccauccugccuuu

SEQ ID NO: 1232069 - RNA, 19 nt, Homo sapiens
  misc_RNA (1)...(19): siRNA sense strand
gcaaauguuuauguugaca

SEQ ID NO: 1232070 - RNA, 19 nt, Homo sapiens
  misc_RNA (1)...(19): siRNA sense strand
gauauaugguucucuugag

SEQ ID NO: 1232071 - RNA, 19 nt, Homo sapiens
  misc_RNA (1)...(19): siRNA sense strand
ugucagcgaugagcaguuu

SEQ ID NO: 1232072 - RNA, 19 nt, Homo sapiens
  misc_RNA (1)...(19): siRNA sense strand
ucaaacaucaggaaauuca

SEQ ID NO: 1232073 - RNA, 19 nt, Homo sapiens
  misc_RNA (1)...(19): siRNA sense strand
guucaagauuacugucaaa

SEQ ID NO: 1232074 - RNA, 19 nt, Homo sapiens
  misc_RNA (1)...(19): siRNA sense strand
agaaacaggagcuauuauu

SEQ ID NO: 1232075 - RNA, 19 nt, Homo sapiens
  misc_RNA (1)...(19): siRNA sense strand
ggugugggauuacauacau

SEQ ID NO: 1232076 - RNA, 19 nt, Homo sapiens
  misc_RNA (1)...(19): siRNA sense strand
cuucaugccuaaauaccua

SEQ ID NO: 1232077 - RNA, 19 nt, Homo sapiens
  misc_RNA (1)...(19): siRNA sense strand
caacaucccaacaucucua

SEQ ID NO: 1232078 - RNA, 19 nt, Homo sapiens
  misc_RNA (1)...(19): siRNA sense strand
ucacacaaauagagagaca

SEQ ID NO: 1232079 - RNA, 19 nt, Homo sapiens
  misc_RNA (1)...(19): siRNA sense strand
aaauucaucugcaguucuu

SEQ ID NO: 1232080 - RNA, 19 nt, Homo sapiens
  misc_RNA (1)...(19): siRNA sense strand
aaugacaucuuugcugauu

SEQ ID NO: 1232081 - RNA, 19 nt, Homo sapiens
  misc_RNA (1)...(19): siRNA sense strand
uaauggaagcuuugagauu

SEQ ID NO: 1232082 - RNA, 19 nt, Homo sapiens
  misc_RNA (1)...(19): siRNA sense strand
gcaauccaauuuauaugcu

SEQ ID NO: 1232083 - RNA, 19 nt, Homo sapiens
  misc_RNA (1)...(19): siRNA sense strand
ugaauuccaugcucacaca

SEQ ID NO: 1232084 - RNA, 19 nt, Homo sapiens
  misc_RNA (1)...(19): siRNA sense strand
caacgcaggauccaucaga

SEQ ID NO: 1232085 - RNA, 19 nt, Homo sapiens
  misc_RNA (1)...(19): siRNA sense strand
caaauagagagacaauuca

SEQ ID NO: 1232086 - RNA, 19 nt, Homo sapiens
  misc_RNA (1)...(19): siRNA sense strand
acaaaggaccugacuguuc

SEQ ID NO: 1232087 - RNA, 19 nt, Homo sapiens
  misc_RNA (1)...(19): siRNA sense strand
gaaggacuagagacuaaug

SEQ ID NO: 1232088 - RNA, 19 nt, Homo sapiens
  misc_RNA (1)...(19): siRNA sense strand
aauaugggauccugugugu

SEQ ID NO: 1232089 - RNA, 19 nt, Homo sapiens
  misc_RNA (1)...(19): siRNA sense strand
guuaugggcuuaggcuguu

SEQ ID NO: 1232090 - RNA, 19 nt, Homo sapiens
  misc_RNA (1)...(19): siRNA sense strand
acaguucaaugcauucguu

SEQ ID NO: 1232091 - RNA, 19 nt, Homo sapiens
  misc_RNA (1)...(19): siRNA sense strand
gguauuuccuauauagaag

SEQ ID NO: 1232092 - RNA, 19 nt, Homo sapiens
  misc_RNA (1)...(19): siRNA sense strand
caucagaguguacaaagga

SEQ ID NO: 1232093 - RNA, 19 nt, Homo sapiens
  misc_RNA (1)...(19): siRNA sense strand
gcuauuauugguccuuuga

SEQ ID NO: 1232094 - RNA, 19 nt, Homo sapiens
  misc_RNA (1)...(19): siRNA sense strand
guuccuugaugcuccagua

SEQ ID NO: 1232095 - RNA, 19 nt, Homo sapiens
  misc_RNA (1)...(19): siRNA sense strand
gucuggaucuuauaugaau

SEQ ID NO: 1232096 - RNA, 19 nt, Homo sapiens
  misc_RNA (1)...(19): siRNA sense strand
ucaggcaacuuguccucaa

SEQ ID NO: 1232097 - RNA, 19 nt, Homo sapiens
  misc_RNA (1)...(19): siRNA sense strand
ggaauuccacaagauuuau

SEQ ID NO: 1232098 - RNA, 19 nt, Homo sapiens
  misc_RNA (1)...(19): siRNA sense strand
ggguauuuccuauauagaa

SEQ ID NO: 1232099 - RNA, 19 nt, Homo sapiens
  misc_RNA (1)...(19): siRNA sense strand
ccaaaggaaggacuagaga

SEQ ID NO: 1232100 - RNA, 19 nt, Homo sapiens
  misc_RNA (1)...(19): siRNA sense strand
gaaauucaucugcaguucu

SEQ ID NO: 1232101 - RNA, 19 nt, Homo sapiens
  misc_RNA (1)...(19): siRNA sense strand
gaaaauucuucaguuguug

SEQ ID NO: 1232102 - RNA, 19 nt, Homo sapiens
  misc_RNA (1)...(19): siRNA sense strand
ggauauauaauuggugguu

SEQ ID NO: 1232103 - RNA, 19 nt, Homo sapiens
  misc_RNA (1)...(19): siRNA sense strand
ucuccuucaugccuaaaua

SEQ ID NO: 1232104 - RNA, 19 nt, Homo sapiens
  misc_RNA (1)...(19): siRNA sense strand
ucaaugcauucguuaacau

SEQ ID NO: 1232105 - RNA, 19 nt, Homo sapiens
  misc_RNA (1)...(19): siRNA sense strand
uaagugugauacaguucaa

SEQ ID NO: 1232106 - RNA, 19 nt, Homo sapiens
  misc_RNA (1)...(19): siRNA sense strand
caacuguccaucuaaaaua

SEQ ID NO: 1232107 - RNA, 19 nt, Homo sapiens
  misc_RNA (1)...(19): siRNA sense strand
uguaugaaaucugaagaga

SEQ ID NO: 1232108 - RNA, 19 nt, Homo sapiens
  misc_RNA (1)...(19): siRNA sense strand
ugagcaguuucauuuauuc

SEQ ID NO: 1232109 - RNA, 19 nt, Homo sapiens
  misc_RNA (1)...(19): siRNA sense strand
caggcaacuuguccucaaa

SEQ ID NO: 1232110 - RNA, 19 nt, Homo sapiens
  misc_RNA (1)...(19): siRNA sense strand
aggaauuccacaagauuua

SEQ ID NO: 1232111 - RNA, 19 nt, Homo sapiens
  misc_RNA (1)...(19): siRNA sense strand
aaacaggagcuauuauugg

SEQ ID NO: 1232112 - RNA, 19 nt, Homo sapiens
  misc_RNA (1)...(19): siRNA sense strand
caggauccaucagagugua

SEQ ID NO: 1232113 - RNA, 19 nt, Homo sapiens
  misc_RNA (1)...(19): siRNA sense strand
aaucuacaguuucaguuuc

SEQ ID NO: 1232114 - RNA, 19 nt, Homo sapiens
  misc_RNA (1)...(19): siRNA sense strand
gauccuguguguggaaaca

SEQ ID NO: 1232115 - RNA, 19 nt, Homo sapiens
  misc_RNA (1)...(19): siRNA sense strand
gguuuggcuuucugauuug

SEQ ID NO: 1232116 - RNA, 19 nt, Homo sapiens
  misc_RNA (1)...(19): siRNA sense strand
guacguggaaugggugaaa

SEQ ID NO: 1232117 - RNA, 19 nt, Homo sapiens
  misc_RNA (1)...(19): siRNA sense strand
guaugaaaucugaagagaa

SEQ ID NO: 1232118 - RNA, 19 nt, Homo sapiens
  misc_RNA (1)...(19): siRNA sense strand
caaaauugcagcuguauuc

SEQ ID NO: 1232119 - RNA, 19 nt, Homo sapiens
  misc_RNA (1)...(19): siRNA sense strand
uugcaacuguccaucuaaa

SEQ ID NO: 1232120 - RNA, 19 nt, Homo sapiens
  misc_RNA (1)...(19): siRNA sense strand
ugacaucuuugcugauugc

SEQ ID NO: 1232121 - RNA, 19 nt, Homo sapiens
  misc_RNA (1)...(19): siRNA sense strand
aaacacugucuggaucuua

SEQ ID NO: 1232122 - RNA, 19 nt, Homo sapiens
  misc_RNA (1)...(19): siRNA sense strand
cauccugccuuuggguauu

SEQ ID NO: 1232123 - RNA, 19 nt, Homo sapiens
  misc_RNA (1)...(19): siRNA sense strand
aacaggagcuauuauuggu

SEQ ID NO: 1232124 - RNA, 19 nt, Homo sapiens
  misc_RNA (1)...(19): siRNA sense strand
gacacuggauuugugaaca

SEQ ID NO: 1232125 - RNA, 19 nt, Homo sapiens
  misc_RNA (1)...(19): siRNA sense strand
uaacaugugcauuuguauc

SEQ ID NO: 1232126 - RNA, 19 nt, Homo sapiens
  misc_RNA (1)...(19): siRNA sense strand
ucucaugacuugugaaaau

SEQ ID NO: 1232127 - RNA, 19 nt, Homo sapiens
  misc_RNA (1)...(19): siRNA sense strand
caaucuuucuaauggguau

SEQ ID NO: 1232128 - RNA, 19 nt, Homo sapiens
  misc_RNA (1)...(19): siRNA sense strand
agaacagcaauauggaaua

SEQ ID NO: 1232129 - RNA, 19 nt, Homo sapiens
  misc_RNA (1)...(19): siRNA sense strand
gugauacaguucaaugcau

SEQ ID NO: 1232130 - RNA, 19 nt, Homo sapiens
  misc_RNA (1)...(19): siRNA sense strand
caaacaagcugcccacaua

SEQ ID NO: 1232131 - RNA, 19 nt, Homo sapiens
  misc_RNA (1)...(19): siRNA sense strand
uaacuuaccuccaauaugu

SEQ ID NO: 1232132 - RNA, 19 nt, Homo sapiens
  misc_RNA (1)...(19): siRNA sense strand
gcaauaacaugugcauuug

SEQ ID NO: 1232133 - RNA, 19 nt, Homo sapiens
  misc_RNA (1)...(19): siRNA sense strand
gggcuuaggcuguuucuua

SEQ ID NO: 1232134 - RNA, 19 nt, Homo sapiens
  misc_RNA (1)...(19): siRNA sense strand
caagauuacugucaaacaa

SEQ ID NO: 1232135 - RNA, 19 nt, Homo sapiens
  misc_RNA (1)...(19): siRNA sense strand
gaaacaggagcuauuauug

SEQ ID NO: 1232136 - RNA, 19 nt, Homo sapiens
  misc_RNA (1)...(19): siRNA sense strand
ggaccugacuguuccuuga

SEQ ID NO: 1232137 - RNA, 19 nt, Homo sapiens
  misc_RNA (1)...(19): siRNA sense strand
gugcaaauguuuauguuga

SEQ ID NO: 1232138 - RNA, 19 nt, Homo sapiens
  misc_RNA (1)...(19): siRNA sense strand
gaugcaaucuuucuaaugg

SEQ ID NO: 1232139 - RNA, 19 nt, Homo sapiens
  misc_RNA (1)...(19): siRNA sense strand
guagaaacaggagcuauua

SEQ ID NO: 1232140 - RNA, 19 nt, Homo sapiens
  misc_RNA (1)...(19): siRNA sense strand
gaaggaauuccacaagauu

SEQ ID NO: 1232141 - RNA, 19 nt, Homo sapiens
  misc_RNA (1)...(19): siRNA sense strand
aagaagaggucaagaagga

SEQ ID NO: 1232142 - RNA, 19 nt, Homo sapiens
  misc_RNA (1)...(19): siRNA sense strand
ggcaauaacaugugcauuu

SEQ ID NO: 1232143 - RNA, 19 nt, Homo sapiens
  misc_RNA (1)...(19): siRNA sense strand
cuaguuggauucauuaaug

SEQ ID NO: 1232144 - RNA, 19 nt, Homo sapiens
  misc_RNA (1)...(19): siRNA sense strand
gauugcaacuguccaucua

SEQ ID NO: 1232145 - RNA, 19 nt, Homo sapiens
  misc_RNA (1)...(19): siRNA sense strand
uaugaaaucugaagagaag

SEQ ID NO: 1232146 - RNA, 19 nt, Homo sapiens
  misc_RNA (1)...(19): siRNA sense strand
ccaacacacuuccaaagga

SEQ ID NO: 1232147 - RNA, 19 nt, Homo sapiens
  misc_RNA (1)...(19): siRNA sense strand
guacaaaggaaguuaaauc

SEQ ID NO: 1232148 - RNA, 19 nt, Homo sapiens
  misc_RNA (1)...(19): siRNA sense strand
ggcauuggaugugugguua

SEQ ID NO: 1232149 - RNA, 19 nt, Homo sapiens
  misc_RNA (1)...(19): siRNA sense strand
ggaaauucaucugcaguuc

SEQ ID NO: 1232150 - RNA, 19 nt, Homo sapiens
  misc_RNA (1)...(19): siRNA sense strand
gaagaggucaagaaggaaa

SEQ ID NO: 1232151 - RNA, 19 nt, Homo sapiens
  misc_RNA (1)...(19): siRNA sense strand
gaaucuacaguuucaguuu

SEQ ID NO: 1232152 - RNA, 19 nt, Homo sapiens
  misc_RNA (1)...(19): siRNA sense strand
ggcuuaggcuguuucuuaa

SEQ ID NO: 1232153 - RNA, 19 nt, Homo sapiens
  misc_RNA (1)...(19): siRNA sense strand
ugagguguaugaaaucuga

SEQ ID NO: 1232154 - RNA, 19 nt, Homo sapiens
  misc_RNA (1)...(19): siRNA sense strand
gaacgggaauaaacauggu

SEQ ID NO: 1232155 - RNA, 19 nt, Homo sapiens
  misc_RNA (1)...(19): siRNA sense strand
aauggaagcuuugagauug

SEQ ID NO: 1232156 - RNA, 19 nt, Homo sapiens
  misc_RNA (1)...(19): siRNA sense strand
ugguuuggcuuucugauuu

SEQ ID NO: 1232157 - RNA, 19 nt, Homo sapiens
  misc_RNA (1)...(19): siRNA sense strand
ugaaggaauuccacaagau

SEQ ID NO: 1232158 - RNA, 19 nt, Homo sapiens
  misc_RNA (1)...(19): siRNA sense strand
aaauaccucuuaugaagga

SEQ ID NO: 1232159 - RNA, 19 nt, Homo sapiens
  misc_RNA (1)...(19): siRNA sense strand
aggaaggacuagagacuaa

SEQ ID NO: 1232160 - RNA, 19 nt, Homo sapiens
  misc_RNA (1)...(19): siRNA sense strand
ggauauaugguucucuuga

SEQ ID NO: 1232161 - RNA, 19 nt, Homo sapiens
  misc_RNA (1)...(19): siRNA sense strand
aauugcagcuguauucaaa

SEQ ID NO: 1232162 - RNA, 19 nt, Homo sapiens
  misc_RNA (1)...(19): siRNA sense strand
caacuuguccucaaacagu

SEQ ID NO: 1232163 - RNA, 19 nt, Homo sapiens
  misc_RNA (1)...(19): siRNA sense strand
cgacaaaggaccugacugu

SEQ ID NO: 1232164 - RNA, 19 nt, Homo sapiens
  misc_RNA (1)...(19): siRNA sense strand
gcagcuguauucaaacauc

SEQ ID NO: 1232165 - RNA, 19 nt, Homo sapiens
  misc_RNA (1)...(19): siRNA sense strand
acaaauagagagacaauuc

SEQ ID NO: 1232166 - RNA, 19 nt, Homo sapiens
  misc_RNA (1)...(19): siRNA sense strand
ugauacaguucaaugcauu

SEQ ID NO: 1232167 - RNA, 19 nt, Homo sapiens
  misc_RNA (1)...(19): siRNA sense strand
gagcuauuauugguccuuu

SEQ ID NO: 1232168 - RNA, 19 nt, Homo sapiens
  misc_RNA (1)...(19): siRNA sense strand
aaacucccauccugccuuu

SEQ ID NO: 1232169 - RNA, 19 nt, Homo sapiens
  misc_RNA (1)...(19): siRNA sense strand
gcaaauguuuauguugaca

SEQ ID NO: 1232170 - RNA, 19 nt, Homo sapiens
  misc_RNA (1)...(19): siRNA sense strand
gauauaugguucucuugag

SEQ ID NO: 1232171 - RNA, 19 nt, Homo sapiens
  misc_RNA (1)...(19): siRNA sense strand
ugucagcgaugagcaguuu

SEQ ID NO: 1232172 - RNA, 19 nt, Homo sapiens
  misc_RNA (1)...(19): siRNA sense strand
ucaaacaucaggaaauuca

SEQ ID NO: 1232173 - RNA, 19 nt, Homo sapiens
  misc_RNA (1)...(19): siRNA sense strand
guucaagauuacugucaaa

SEQ ID NO: 1232174 - RNA, 19 nt, Homo sapiens
  misc_RNA (1)...(19): siRNA sense strand
agaaacaggagcuauuauu

SEQ ID NO: 1232175 - RNA, 19 nt, Homo sapiens
  misc_RNA (1)...(19): siRNA sense strand
ggugugggauuacauacau

SEQ ID NO: 1232176 - RNA, 19 nt, Homo sapiens
  misc_RNA (1)...(19): siRNA sense strand
cuucaugccuaaauaccua

SEQ ID NO: 1232177 - RNA, 19 nt, Homo sapiens
  misc_RNA (1)...(19): siRNA sense strand
caacaucccaacaucucua

SEQ ID NO: 1232178 - RNA, 19 nt, Homo sapiens
  misc_RNA (1)...(19): siRNA sense strand
ucacacaaauagagagaca

SEQ ID NO: 1232179 - RNA, 19 nt, Homo sapiens
  misc_RNA (1)...(19): siRNA sense strand
aaauucaucugcaguucuu

SEQ ID NO: 1232180 - RNA, 19 nt, Homo sapiens
  misc_RNA (1)...(19): siRNA sense strand
aaugacaucuuugcugauu

SEQ ID NO: 1232181 - RNA, 19 nt, Homo sapiens
  misc_RNA (1)...(19): siRNA sense strand
uaauggaagcuuugagauu

SEQ ID NO: 1232182 - RNA, 19 nt, Homo sapiens
  misc_RNA (1)...(19): siRNA sense strand
gcaauccaauuuauaugcu

SEQ ID NO: 1232183 - RNA, 19 nt, Homo sapiens
  misc_RNA (1)...(19): siRNA sense strand
ugaauuccaugcucacaca

SEQ ID NO: 1232184 - RNA, 19 nt, Homo sapiens
  misc_RNA (1)...(19): siRNA sense strand
caacgcaggauccaucaga

SEQ ID NO: 1232185 - RNA, 19 nt, Homo sapiens
  misc_RNA (1)...(19): siRNA sense strand
caaauagagagacaauuca

SEQ ID NO: 1232186 - RNA, 19 nt, Homo sapiens
  misc_RNA (1)...(19): siRNA sense strand
acaaaggaccugacuguuc

SEQ ID NO: 1232187 - RNA, 19 nt, Homo sapiens
  misc_RNA (1)...(19): siRNA sense strand
gaaggacuagagacuaaug

SEQ ID NO: 1232188 - RNA, 19 nt, Homo sapiens
  misc_RNA (1)...(19): siRNA sense strand
aauaugggauccugugugu

SEQ ID NO: 1232189 - RNA, 19 nt, Homo sapiens
  misc_RNA (1)...(19): siRNA sense strand
guuaugggcuuaggcuguu

SEQ ID NO: 1232190 - RNA, 19 nt, Homo sapiens
  misc_RNA (1)...(19): siRNA sense strand
acaguucaaugcauucguu

SEQ ID NO: 1232191 - RNA, 19 nt, Homo sapiens
  misc_RNA (1)...(19): siRNA sense strand
gguauuuccuauauagaag

SEQ ID NO: 1232192 - RNA, 19 nt, Homo sapiens
  misc_RNA (1)...(19): siRNA sense strand
caucagaguguacaaagga

SEQ ID NO: 1232193 - RNA, 19 nt, Homo sapiens
  misc_RNA (1)...(19): siRNA sense strand
gcuauuauugguccuuuga

SEQ ID NO: 1232194 - RNA, 19 nt, Homo sapiens
  misc_RNA (1)...(19): siRNA sense strand
guuccuugaugcuccagua

SEQ ID NO: 1232195 - RNA, 19 nt, Homo sapiens
  misc_RNA (1)...(19): siRNA sense strand
gucuggaucuuauaugaau

SEQ ID NO: 1232196 - RNA, 19 nt, Homo sapiens
  misc_RNA (1)...(19): siRNA sense strand
ucaggcaacuuguccucaa

SEQ ID NO: 1232197 - RNA, 19 nt, Homo sapiens
  misc_RNA (1)...(19): siRNA sense strand
ggaauuccacaagauuuau

SEQ ID NO: 1232198 - RNA, 19 nt, Homo sapiens
  misc_RNA (1)...(19): siRNA sense strand
ggguauuuccuauauagaa

SEQ ID NO: 1232199 - RNA, 19 nt, Homo sapiens
  misc_RNA (1)...(19): siRNA sense strand
ccaaaggaaggacuagaga

SEQ ID NO: 1232200 - RNA, 19 nt, Homo sapiens
  misc_RNA (1)...(19): siRNA sense strand
gaaauucaucugcaguucu

SEQ ID NO: 1232201 - RNA, 19 nt, Homo sapiens
  misc_RNA (1)...(19): siRNA sense strand
gaaaauucuucaguuguug

SEQ ID NO: 1232202 - RNA, 19 nt, Homo sapiens
  misc_RNA (1)...(19): siRNA sense strand
ggauauauaauuggugguu

SEQ ID NO: 1232203 - RNA, 19 nt, Homo sapiens
  misc_RNA (1)...(19): siRNA sense strand
ucuccuucaugccuaaaua

SEQ ID NO: 1232204 - RNA, 19 nt, Homo sapiens
  misc_RNA (1)...(19): siRNA sense strand
ucaaugcauucguuaacau

SEQ ID NO: 1232205 - RNA, 19 nt, Homo sapiens
  misc_RNA (1)...(19): siRNA sense strand
uaagugugauacaguucaa

SEQ ID NO: 1232206 - RNA, 19 nt, Homo sapiens
  misc_RNA (1)...(19): siRNA sense strand
caacuguccaucuaaaaua

SEQ ID NO: 1232207 - RNA, 19 nt, Homo sapiens
  misc_RNA (1)...(19): siRNA sense strand
uguaugaaaucugaagaga

SEQ ID NO: 1232208 - RNA, 19 nt, Homo sapiens
  misc_RNA (1)...(19): siRNA sense strand
ugagcaguuucauuuauuc

SEQ ID NO: 1232209 - RNA, 19 nt, Homo sapiens
  misc_RNA (1)...(19): siRNA sense strand
caggcaacuuguccucaaa

SEQ ID NO: 1232210 - RNA, 19 nt, Homo sapiens
  misc_RNA (1)...(19): siRNA sense strand
aggaauuccacaagauuua

SEQ ID NO: 1232211 - RNA, 19 nt, Homo sapiens
  misc_RNA (1)...(19): siRNA sense strand
aaacaggagcuauuauugg

SEQ ID NO: 1232212 - RNA, 19 nt, Homo sapiens
  misc_RNA (1)...(19): siRNA sense strand
caggauccaucagagugua

SEQ ID NO: 1232213 - RNA, 19 nt, Homo sapiens
  misc_RNA (1)...(19): siRNA sense strand
aaucuacaguuucaguuuc

SEQ ID NO: 1232214 - RNA, 19 nt, Homo sapiens
  misc_RNA (1)...(19): siRNA sense strand
gauccuguguguggaaaca

SEQ ID NO: 1232215 - RNA, 19 nt, Homo sapiens
  misc_RNA (1)...(19): siRNA sense strand
gguuuggcuuucugauuug

SEQ ID NO: 1232216 - RNA, 19 nt, Homo sapiens
  misc_RNA (1)...(19): siRNA sense strand
guacguggaaugggugaaa

SEQ ID NO: 1232217 - RNA, 19 nt, Homo sapiens
  misc_RNA (1)...(19): siRNA sense strand
guaugaaaucugaagagaa

SEQ ID NO: 1232218 - RNA, 19 nt, Homo sapiens
  misc_RNA (1)...(19): siRNA sense strand
caaaauugcagcuguauuc

SEQ ID NO: 1232219 - RNA, 19 nt, Homo sapiens
  misc_RNA (1)...(19): siRNA sense strand
uugcaacuguccaucuaaa

SEQ ID NO: 1232220 - RNA, 19 nt, Homo sapiens
  misc_RNA (1)...(19): siRNA sense strand
ugacaucuuugcugauugc

SEQ ID NO: 1232221 - RNA, 19 nt, Homo sapiens
  misc_RNA (1)...(19): siRNA sense strand
aaacacugucuggaucuua

SEQ ID NO: 1232222 - RNA, 19 nt, Homo sapiens
  misc_RNA (1)...(19): siRNA sense strand
cauccugccuuuggguauu

SEQ ID NO: 1232223 - RNA, 19 nt, Homo sapiens
  misc_RNA (1)...(19): siRNA sense strand
aacaggagcuauuauuggu

SEQ ID NO: 1232224 - RNA, 19 nt, Homo sapiens
  misc_RNA (1)...(19): siRNA sense strand
gacacuggauuugugaaca

SEQ ID NO: 1232225 - RNA, 19 nt, Homo sapiens
  misc_RNA (1)...(19): siRNA sense strand
uaacaugugcauuuguauc

SEQ ID NO: 1232226 - RNA, 19 nt, Homo sapiens
  misc_RNA (1)...(19): siRNA sense strand
ucucaugacuugugaaaau

SEQ ID NO: 1232227 - RNA, 19 nt, Homo sapiens
  misc_RNA (1)...(19): siRNA sense strand
caaucuuucuaauggguau

SEQ ID NO: 1232228 - RNA, 19 nt, Homo sapiens
  misc_RNA (1)...(19): siRNA sense strand
agaacagcaauauggaaua

SEQ ID NO: 1232229 - RNA, 19 nt, Homo sapiens
  misc_RNA (1)...(19): siRNA sense strand
gugauacaguucaaugcau

SEQ ID NO: 1232230 - RNA, 19 nt, Homo sapiens
  misc_RNA (1)...(19): siRNA sense strand
gaaguucucuuuacaacca

SEQ ID NO: 1232231 - RNA, 19 nt, Homo sapiens
  misc_RNA (1)...(19): siRNA sense strand
gcaacucgaaguaccauua

SEQ ID NO: 1232232 - RNA, 19 nt, Homo sapiens
  misc_RNA (1)...(19): siRNA sense strand
gaaggcugguugacaaaug

SEQ ID NO: 1232233 - RNA, 19 nt, Homo sapiens
  misc_RNA (1)...(19): siRNA sense strand
cagcacggcuucuuacuuc

SEQ ID NO: 1232234 - RNA, 19 nt, Homo sapiens
  misc_RNA (1)...(19): siRNA sense strand
ugacaaaugccaugaguga

SEQ ID NO: 1232235 - RNA, 19 nt, Homo sapiens
  misc_RNA (1)...(19): siRNA sense strand
gcuguuggauaauuaugaa

SEQ ID NO: 1232236 - RNA, 19 nt, Homo sapiens
  misc_RNA (1)...(19): siRNA sense strand
aaacugauccguucugugu

SEQ ID NO: 1232237 - RNA, 19 nt, Homo sapiens
  misc_RNA (1)...(19): siRNA sense strand
ugacacaggccauccguaa

SEQ ID NO: 1232238 - RNA, 19 nt, Homo sapiens
  misc_RNA (1)...(19): siRNA sense strand
gcacugcgaggcaacugua

SEQ ID NO: 1232239 - RNA, 19 nt, Homo sapiens
  misc_RNA (1)...(19): siRNA sense strand
ugacgcugcucgacaaaga

SEQ ID NO: 1232240 - RNA, 19 nt, Homo sapiens
  misc_RNA (1)...(19): siRNA sense strand
gaacagccuacaccuacaa

SEQ ID NO: 1232241 - RNA, 19 nt, Homo sapiens
  misc_RNA (1)...(19): siRNA sense strand
cagaacacgucccagauca

SEQ ID NO: 1232242 - RNA, 19 nt, Homo sapiens
  misc_RNA (1)...(19): siRNA sense strand
gcacagcacuccggaacag

SEQ ID NO: 1232243 - RNA, 19 nt, Homo sapiens
  misc_RNA (1)...(19): siRNA sense strand
ggaaacugauccguucugu

SEQ ID NO: 1232244 - RNA, 19 nt, Homo sapiens
  misc_RNA (1)...(19): siRNA sense strand
cgaggcaacuguagaugug

SEQ ID NO: 1232245 - RNA, 19 nt, Homo sapiens
  misc_RNA (1)...(19): siRNA sense strand
caaaugccaugagugacuu

SEQ ID NO: 1232246 - RNA, 19 nt, Homo sapiens
  misc_RNA (1)...(19): siRNA sense strand
ucaacgaucucgccucucu

SEQ ID NO: 1232247 - RNA, 19 nt, Homo sapiens
  misc_RNA (1)...(19): siRNA sense strand
gcagaacacgucccagauc

SEQ ID NO: 1232248 - RNA, 19 nt, Homo sapiens
  misc_RNA (1)...(19): siRNA sense strand
acugauccguucuguguuu

SEQ ID NO: 1232249 - RNA, 19 nt, Homo sapiens
  misc_RNA (1)...(19): siRNA sense strand
cggcaguucuugcugaaau

SEQ ID NO: 1232250 - RNA, 19 nt, Homo sapiens
  misc_RNA (1)...(19): siRNA sense strand
gcagcacggcuucuuacuu

SEQ ID NO: 1232251 - RNA, 19 nt, Homo sapiens
  misc_RNA (1)...(19): siRNA sense strand
gauccguucuguguuuaug

SEQ ID NO: 1232252 - RNA, 19 nt, Homo sapiens
  misc_RNA (1)...(19): siRNA sense strand
ccagcagcacggcuucuua

SEQ ID NO: 1232253 - RNA, 19 nt, Homo sapiens
  misc_RNA (1)...(19): siRNA sense strand
aagaugacaugggcgauga

SEQ ID NO: 1232254 - RNA, 19 nt, Homo sapiens
  misc_RNA (1)...(19): siRNA sense strand
aagccggacucaccacuga

SEQ ID NO: 1232255 - RNA, 19 nt, Homo sapiens
  misc_RNA (1)...(19): siRNA sense strand
guugacaaaugccaugagu

SEQ ID NO: 1232256 - RNA, 19 nt, Homo sapiens
  misc_RNA (1)...(19): siRNA sense strand
gaugggagaguucaacgau

SEQ ID NO: 1232257 - RNA, 19 nt, Homo sapiens
  misc_RNA (1)...(19): siRNA sense strand
gaacacgucccagaucaac

SEQ ID NO: 1232258 - RNA, 19 nt, Homo sapiens
  misc_RNA (1)...(19): siRNA sense strand
gcaccaccagcaguacaua

SEQ ID NO: 1232259 - RNA, 19 nt, Homo sapiens
  misc_RNA (1)...(19): siRNA sense strand
ugagugacuucccacaaca

SEQ ID NO: 1232260 - RNA, 19 nt, Homo sapiens
  misc_RNA (1)...(19): siRNA sense strand
uuggaaggcugguugacaa

SEQ ID NO: 1232261 - RNA, 19 nt, Homo sapiens
  misc_RNA (1)...(19): siRNA sense strand
caccagcaguacauagaug

SEQ ID NO: 1232262 - RNA, 19 nt, Homo sapiens
  misc_RNA (1)...(19): siRNA sense strand
gccaggagcacaagcuaga

SEQ ID NO: 1232263 - RNA, 19 nt, Homo sapiens
  misc_RNA (1)...(19): siRNA sense strand
aguggcuguuggauaauua

SEQ ID NO: 1232264 - RNA, 19 nt, Homo sapiens
  misc_RNA (1)...(19): siRNA sense strand
cuguagauguggugaugaa

SEQ ID NO: 1232265 - RNA, 19 nt, Homo sapiens
  misc_RNA (1)...(19): siRNA sense strand
caguggcuguuggauaauu

SEQ ID NO: 1232266 - RNA, 19 nt, Homo sapiens
  misc_RNA (1)...(19): siRNA sense strand
ugggagaguucaacgaucu

SEQ ID NO: 1232267 - RNA, 19 nt, Homo sapiens
  misc_RNA (1)...(19): siRNA sense strand
cgaacagccuacaccuaca

SEQ ID NO: 1232268 - RNA, 19 nt, Homo sapiens
  misc_RNA (1)...(19): siRNA sense strand
gccagcaccaccagcagua

SEQ ID NO: 1232269 - RNA, 19 nt, Homo sapiens
  misc_RNA (1)...(19): siRNA sense strand
ggcaguucuugcugaaaug

SEQ ID NO: 1232270 - RNA, 19 nt, Homo sapiens
  misc_RNA (1)...(19): siRNA sense strand
gcgaggcaacuguagaugu

SEQ ID NO: 1232271 - RNA, 19 nt, Homo sapiens
  misc_RNA (1)...(19): siRNA sense strand
ggaggacacgcaguacaug

SEQ ID NO: 1232272 - RNA, 19 nt, Homo sapiens
  misc_RNA (1)...(19): siRNA sense strand
cuacgacgaguacauguuc

SEQ ID NO: 1232273 - RNA, 19 nt, Homo sapiens
  misc_RNA (1)...(19): siRNA sense strand
caaggugggcgucgucagu

SEQ ID NO: 1232274 - RNA, 19 nt, Homo sapiens
  misc_RNA (1)...(19): siRNA sense strand
gcacggcuucuuacuucga

SEQ ID NO: 1232275 - RNA, 19 nt, Homo sapiens
  misc_RNA (1)...(19): siRNA sense strand
caagcuagacccagugaac

SEQ ID NO: 1232276 - RNA, 19 nt, Homo sapiens
  misc_RNA (1)...(19): siRNA sense strand
gcucuacgacgaguacaug

SEQ ID NO: 1232277 - RNA, 19 nt, Homo sapiens
  misc_RNA (1)...(19): siRNA sense strand
ggaaggcugguugacaaau

SEQ ID NO: 1232278 - RNA, 19 nt, Homo sapiens
  misc_RNA (1)...(19): siRNA sense strand
gaggagcugcgaccacauc

SEQ ID NO: 1232279 - RNA, 19 nt, Homo sapiens
  misc_RNA (1)...(19): siRNA sense strand
gcucgacaaagaugacaug

SEQ ID NO: 1232280 - RNA, 19 nt, Homo sapiens
  misc_RNA (1)...(19): siRNA sense strand
cgucccagaucaaccagau

SEQ ID NO: 1232281 - RNA, 19 nt, Homo sapiens
  misc_RNA (1)...(19): siRNA sense strand
cugauccguucuguguuua

SEQ ID NO: 1232282 - RNA, 19 nt, Homo sapiens
  misc_RNA (1)...(19): siRNA sense strand
gaaacagcggaagguguga

SEQ ID NO: 1232283 - RNA, 19 nt, Homo sapiens
  misc_RNA (1)...(19): siRNA sense strand
ggauggacagcaccagaca

SEQ ID NO: 1232284 - RNA, 19 nt, Homo sapiens
  misc_RNA (1)...(19): siRNA sense strand
gcgaccacauccucuacca

SEQ ID NO: 1232285 - RNA, 19 nt, Homo sapiens
  misc_RNA (1)...(19): siRNA sense strand
ccaggcagccagcuccaau

SEQ ID NO: 1232286 - RNA, 19 nt, Homo sapiens
  misc_RNA (1)...(19): siRNA sense strand
ccucaaccgcguggacuuu

SEQ ID NO: 1232287 - RNA, 19 nt, Homo sapiens
  misc_RNA (1)...(19): siRNA sense strand
gaaguucucuuuacaacca

SEQ ID NO: 1232288 - RNA, 19 nt, Homo sapiens
  misc_RNA (1)...(19): siRNA sense strand
gcaacucgaaguaccauua

SEQ ID NO: 1232289 - RNA, 19 nt, Homo sapiens
  misc_RNA (1)...(19): siRNA sense strand
gaaggcugguugacaaaug

SEQ ID NO: 1232290 - RNA, 19 nt, Homo sapiens
  misc_RNA (1)...(19): siRNA sense strand
cagcacggcuucuuacuuc

SEQ ID NO: 1232291 - RNA, 19 nt, Homo sapiens
  misc_RNA (1)...(19): siRNA sense strand
ugacaaaugccaugaguga

SEQ ID NO: 1232292 - RNA, 19 nt, Homo sapiens
  misc_RNA (1)...(19): siRNA sense strand
gcuguuggauaauuaugaa

SEQ ID NO: 1232293 - RNA, 19 nt, Homo sapiens
  misc_RNA (1)...(19): siRNA sense strand
aaacugauccguucugugu

SEQ ID NO: 1232294 - RNA, 19 nt, Homo sapiens
  misc_RNA (1)...(19): siRNA sense strand
ugacacaggccauccguaa

SEQ ID NO: 1232295 - RNA, 19 nt, Homo sapiens
  misc_RNA (1)...(19): siRNA sense strand
gcacugcgaggcaacugua

SEQ ID NO: 1232296 - RNA, 19 nt, Homo sapiens
  misc_RNA (1)...(19): siRNA sense strand
ugacgcugcucgacaaaga

SEQ ID NO: 1232297 - RNA, 19 nt, Homo sapiens
  misc_RNA (1)...(19): siRNA sense strand
gaacagccuacaccuacaa

SEQ ID NO: 1232298 - RNA, 19 nt, Homo sapiens
  misc_RNA (1)...(19): siRNA sense strand
cagaacacgucccagauca

SEQ ID NO: 1232299 - RNA, 19 nt, Homo sapiens
  misc_RNA (1)...(19): siRNA sense strand
gcacagcacuccggaacag

SEQ ID NO: 1232300 - RNA, 19 nt, Homo sapiens
  misc_RNA (1)...(19): siRNA sense strand
ggaaacugauccguucugu

SEQ ID NO: 1232301 - RNA, 19 nt, Homo sapiens
  misc_RNA (1)...(19): siRNA sense strand
cgaggcaacuguagaugug

SEQ ID NO: 1232302 - RNA, 19 nt, Homo sapiens
  misc_RNA (1)...(19): siRNA sense strand
caaaugccaugagugacuu

SEQ ID NO: 1232303 - RNA, 19 nt, Homo sapiens
  misc_RNA (1)...(19): siRNA sense strand
ucaacgaucucgccucucu

SEQ ID NO: 1232304 - RNA, 19 nt, Homo sapiens
  misc_RNA (1)...(19): siRNA sense strand
gcagaacacgucccagauc

SEQ ID NO: 1232305 - RNA, 19 nt, Homo sapiens
  misc_RNA (1)...(19): siRNA sense strand
acugauccguucuguguuu

SEQ ID NO: 1232306 - RNA, 19 nt, Homo sapiens
  misc_RNA (1)...(19): siRNA sense strand
cggcaguucuugcugaaau

SEQ ID NO: 1232307 - RNA, 19 nt, Homo sapiens
  misc_RNA (1)...(19): siRNA sense strand
gcagcacggcuucuuacuu

SEQ ID NO: 1232308 - RNA, 19 nt, Homo sapiens
  misc_RNA (1)...(19): siRNA sense strand
gauccguucuguguuuaug

SEQ ID NO: 1232309 - RNA, 19 nt, Homo sapiens
  misc_RNA (1)...(19): siRNA sense strand
ccagcagcacggcuucuua

SEQ ID NO: 1232310 - RNA, 19 nt, Homo sapiens
  misc_RNA (1)...(19): siRNA sense strand
aagaugacaugggcgauga

SEQ ID NO: 1232311 - RNA, 19 nt, Homo sapiens
  misc_RNA (1)...(19): siRNA sense strand
aagccggacucaccacuga

SEQ ID NO: 1232312 - RNA, 19 nt, Homo sapiens
  misc_RNA (1)...(19): siRNA sense strand
guugacaaaugccaugagu

SEQ ID NO: 1232313 - RNA, 19 nt, Homo sapiens
  misc_RNA (1)...(19): siRNA sense strand
gaugggagaguucaacgau

SEQ ID NO: 1232314 - RNA, 19 nt, Homo sapiens
  misc_RNA (1)...(19): siRNA sense strand
gaacacgucccagaucaac

SEQ ID NO: 1232315 - RNA, 19 nt, Homo sapiens
  misc_RNA (1)...(19): siRNA sense strand
gcaccaccagcaguacaua

SEQ ID NO: 1232316 - RNA, 19 nt, Homo sapiens
  misc_RNA (1)...(19): siRNA sense strand
ugagugacuucccacaaca

SEQ ID NO: 1232317 - RNA, 19 nt, Homo sapiens
  misc_RNA (1)...(19): siRNA sense strand
uuggaaggcugguugacaa

SEQ ID NO: 1232318 - RNA, 19 nt, Homo sapiens
  misc_RNA (1)...(19): siRNA sense strand
caccagcaguacauagaug

SEQ ID NO: 1232319 - RNA, 19 nt, Homo sapiens
  misc_RNA (1)...(19): siRNA sense strand
gccaggagcacaagcuaga

SEQ ID NO: 1232320 - RNA, 19 nt, Homo sapiens
  misc_RNA (1)...(19): siRNA sense strand
aguggcuguuggauaauua

SEQ ID NO: 1232321 - RNA, 19 nt, Homo sapiens
  misc_RNA (1)...(19): siRNA sense strand
cuguagauguggugaugaa

SEQ ID NO: 1232322 - RNA, 19 nt, Homo sapiens
  misc_RNA (1)...(19): siRNA sense strand
caguggcuguuggauaauu

SEQ ID NO: 1232323 - RNA, 19 nt, Homo sapiens
  misc_RNA (1)...(19): siRNA sense strand
ugggagaguucaacgaucu

SEQ ID NO: 1232324 - RNA, 19 nt, Homo sapiens
  misc_RNA (1)...(19): siRNA sense strand
cgaacagccuacaccuaca

SEQ ID NO: 1232325 - RNA, 19 nt, Homo sapiens
  misc_RNA (1)...(19): siRNA sense strand
gccagcaccaccagcagua

SEQ ID NO: 1232326 - RNA, 19 nt, Homo sapiens
  misc_RNA (1)...(19): siRNA sense strand
ggcaguucuugcugaaaug

SEQ ID NO: 1232327 - RNA, 19 nt, Homo sapiens
  misc_RNA (1)...(19): siRNA sense strand
gcgaggcaacuguagaugu

SEQ ID NO: 1232328 - RNA, 19 nt, Homo sapiens
  misc_RNA (1)...(19): siRNA sense strand
ggaggacacgcaguacaug

SEQ ID NO: 1232329 - RNA, 19 nt, Homo sapiens
  misc_RNA (1)...(19): siRNA sense strand
cuacgacgaguacauguuc

SEQ ID NO: 1232330 - RNA, 19 nt, Homo sapiens
  misc_RNA (1)...(19): siRNA sense strand
caaggugggcgucgucagu

SEQ ID NO: 1232331 - RNA, 19 nt, Homo sapiens
  misc_RNA (1)...(19): siRNA sense strand
gcacggcuucuuacuucga

SEQ ID NO: 1232332 - RNA, 19 nt, Homo sapiens
  misc_RNA (1)...(19): siRNA sense strand
caagcuagacccagugaac

SEQ ID NO: 1232333 - RNA, 19 nt, Homo sapiens
  misc_RNA (1)...(19): siRNA sense strand
gcucuacgacgaguacaug

SEQ ID NO: 1232334 - RNA, 19 nt, Homo sapiens
  misc_RNA (1)...(19): siRNA sense strand
ggaaggcugguugacaaau

SEQ ID NO: 1232335 - RNA, 19 nt, Homo sapiens
  misc_RNA (1)...(19): siRNA sense strand
gaggagcugcgaccacauc

SEQ ID NO: 1232336 - RNA, 19 nt, Homo sapiens
  misc_RNA (1)...(19): siRNA sense strand
gcucgacaaagaugacaug

SEQ ID NO: 1232337 - RNA, 19 nt, Homo sapiens
  misc_RNA (1)...(19): siRNA sense strand
cgucccagaucaaccagau

SEQ ID NO: 1232338 - RNA, 19 nt, Homo sapiens
  misc_RNA (1)...(19): siRNA sense strand
cugauccguucuguguuua

SEQ ID NO: 1232339 - RNA, 19 nt, Homo sapiens
  misc_RNA (1)...(19): siRNA sense strand
gaaacagcggaagguguga

SEQ ID NO: 1232340 - RNA, 19 nt, Homo sapiens
  misc_RNA (1)...(19): siRNA sense strand
ggauggacagcaccagaca

SEQ ID NO: 1232341 - RNA, 19 nt, Homo sapiens
  misc_RNA (1)...(19): siRNA sense strand
gcgaccacauccucuacca

SEQ ID NO: 1232342 - RNA, 19 nt, Homo sapiens
  misc_RNA (1)...(19): siRNA sense strand
ccaggcagccagcuccaau

SEQ ID NO: 1232343 - RNA, 19 nt, Homo sapiens
  misc_RNA (1)...(19): siRNA sense strand
ccucaaccgcguggacuuu

SEQ ID NO: 1232344 - RNA, 19 nt, Homo sapiens
  misc_RNA (1)...(19): siRNA sense strand
gaaacagacuucaagauga

SEQ ID NO: 1232345 - RNA, 19 nt, Homo sapiens
  misc_RNA (1)...(19): siRNA sense strand
gaacaacaacguauccuua

SEQ ID NO: 1232346 - RNA, 19 nt, Homo sapiens
  misc_RNA (1)...(19): siRNA sense strand
ggaauuacuuugauacuca

SEQ ID NO: 1232347 - RNA, 19 nt, Homo sapiens
  misc_RNA (1)...(19): siRNA sense strand
gaagauacacgucgcuuaa

SEQ ID NO: 1232348 - RNA, 19 nt, Homo sapiens
  misc_RNA (1)...(19): siRNA sense strand
ggagggaauuacuuugaua

SEQ ID NO: 1232349 - RNA, 19 nt, Homo sapiens
  misc_RNA (1)...(19): siRNA sense strand
caauuuagccugauagaaa

SEQ ID NO: 1232350 - RNA, 19 nt, Homo sapiens
  misc_RNA (1)...(19): siRNA sense strand
gaacaauauuccacagaga

SEQ ID NO: 1232351 - RNA, 19 nt, Homo sapiens
  misc_RNA (1)...(19): siRNA sense strand
gcagaugguuucacaggaa

SEQ ID NO: 1232352 - RNA, 19 nt, Homo sapiens
  misc_RNA (1)...(19): siRNA sense strand
ccaaugccaugaacaauau

SEQ ID NO: 1232353 - RNA, 19 nt, Homo sapiens
  misc_RNA (1)...(19): siRNA sense strand
caacguauccuuacacaga

SEQ ID NO: 1232354 - RNA, 19 nt, Homo sapiens
  misc_RNA (1)...(19): siRNA sense strand
caaaucaaccagaugcuua

SEQ ID NO: 1232355 - RNA, 19 nt, Homo sapiens
  misc_RNA (1)...(19): siRNA sense strand
gcaacucaauggagaauuc

SEQ ID NO: 1232356 - RNA, 19 nt, Homo sapiens
  misc_RNA (1)...(19): siRNA sense strand
ggagaauucuggucacuca

SEQ ID NO: 1232357 - RNA, 19 nt, Homo sapiens
  misc_RNA (1)...(19): siRNA sense strand
aagaagacaugcaguauau

SEQ ID NO: 1232358 - RNA, 19 nt, Homo sapiens
  misc_RNA (1)...(19): siRNA sense strand
ggagugagccuucccagaa

SEQ ID NO: 1232359 - RNA, 19 nt, Homo sapiens
  misc_RNA (1)...(19): siRNA sense strand
ccacagagaaugauacaaa

SEQ ID NO: 1232360 - RNA, 19 nt, Homo sapiens
  misc_RNA (1)...(19): siRNA sense strand
guacaagccuaugcagaaa

SEQ ID NO: 1232361 - RNA, 19 nt, Homo sapiens
  misc_RNA (1)...(19): siRNA sense strand
caacaugguucagagacua

SEQ ID NO: 1232362 - RNA, 19 nt, Homo sapiens
  misc_RNA (1)...(19): siRNA sense strand
aagcaaagcugauaacucu

SEQ ID NO: 1232363 - RNA, 19 nt, Homo sapiens
  misc_RNA (1)...(19): siRNA sense strand
gcacuaccauuaccgaauc

SEQ ID NO: 1232364 - RNA, 19 nt, Homo sapiens
  misc_RNA (1)...(19): siRNA sense strand
gcugauaacucugugcaaa

SEQ ID NO: 1232365 - RNA, 19 nt, Homo sapiens
  misc_RNA (1)...(19): siRNA sense strand
caagaagacaugcaguaua

SEQ ID NO: 1232366 - RNA, 19 nt, Homo sapiens
  misc_RNA (1)...(19): siRNA sense strand
gaaacccuaugaaggaaga

SEQ ID NO: 1232367 - RNA, 19 nt, Homo sapiens
  misc_RNA (1)...(19): siRNA sense strand
gacacaggcucgacaguga

SEQ ID NO: 1232368 - RNA, 19 nt, Homo sapiens
  misc_RNA (1)...(19): siRNA sense strand
gcacaucuguugagcaaac

SEQ ID NO: 1232369 - RNA, 19 nt, Homo sapiens
  misc_RNA (1)...(19): siRNA sense strand
ucagaacacuucccaaauc

SEQ ID NO: 1232370 - RNA, 19 nt, Homo sapiens
  misc_RNA (1)...(19): siRNA sense strand
aaacaucuguggcuaguca

SEQ ID NO: 1232371 - RNA, 19 nt, Homo sapiens
  misc_RNA (1)...(19): siRNA sense strand
guacuaccuuugaggauau

SEQ ID NO: 1232372 - RNA, 19 nt, Homo sapiens
  misc_RNA (1)...(19): siRNA sense strand
ucaaccagaugcuuaguga

SEQ ID NO: 1232373 - RNA, 19 nt, Homo sapiens
  misc_RNA (1)...(19): siRNA sense strand
gauacugucuauaccaaug

SEQ ID NO: 1232374 - RNA, 19 nt, Homo sapiens
  misc_RNA (1)...(19): siRNA sense strand
gaagcacucuguacaacca

SEQ ID NO: 1232375 - RNA, 19 nt, Homo sapiens
  misc_RNA (1)...(19): siRNA sense strand
ccaaauaccacuacuaugg

SEQ ID NO: 1232376 - RNA, 19 nt, Homo sapiens
  misc_RNA (1)...(19): siRNA sense strand
caacaacccaugcaacaga

SEQ ID NO: 1232377 - RNA, 19 nt, Homo sapiens
  misc_RNA (1)...(19): siRNA sense strand
ccucaaccgugucgacuuu

SEQ ID NO: 1232378 - RNA, 19 nt, Homo sapiens
  misc_RNA (1)...(19): siRNA sense strand
ggagcaauccgaacaacaa

SEQ ID NO: 1232379 - RNA, 19 nt, Homo sapiens
  misc_RNA (1)...(19): siRNA sense strand
caaacauucuggcgcuauu

SEQ ID NO: 1232380 - RNA, 19 nt, Homo sapiens
  misc_RNA (1)...(19): siRNA sense strand
gguacaagccuaugcagaa

SEQ ID NO: 1232381 - RNA, 19 nt, Homo sapiens
  misc_RNA (1)...(19): siRNA sense strand
acacagauguacagccaaa

SEQ ID NO: 1232382 - RNA, 19 nt, Homo sapiens
  misc_RNA (1)...(19): siRNA sense strand
acacagagacacagaugua

SEQ ID NO: 1232383 - RNA, 19 nt, Homo sapiens
  misc_RNA (1)...(19): siRNA sense strand
gcacugugaggcaauauug

SEQ ID NO: 1232384 - RNA, 19 nt, Homo sapiens
  misc_RNA (1)...(19): siRNA sense strand
gcaagaagacaugcaguau

SEQ ID NO: 1232385 - RNA, 19 nt, Homo sapiens
  misc_RNA (1)...(19): siRNA sense strand
cagaacacuucccaaauca

SEQ ID NO: 1232386 - RNA, 19 nt, Homo sapiens
  misc_RNA (1)...(19): siRNA sense strand
ccaacaucaucaacaguuu

SEQ ID NO: 1232387 - RNA, 19 nt, Homo sapiens
  misc_RNA (1)...(19): siRNA sense strand
gaaggaagcgauacugucu

SEQ ID NO: 1232388 - RNA, 19 nt, Homo sapiens
  misc_RNA (1)...(19): siRNA sense strand
gcacugaaacccuaugaag

SEQ ID NO: 1232389 - RNA, 19 nt, Homo sapiens
  misc_RNA (1)...(19): siRNA sense strand
caaucugagugaaauagaa

SEQ ID NO: 1232390 - RNA, 19 nt, Homo sapiens
  misc_RNA (1)...(19): siRNA sense strand
gaagcgauacugucuauac

SEQ ID NO: 1232391 - RNA, 19 nt, Homo sapiens
  misc_RNA (1)...(19): siRNA sense strand
gcagguacaacaugucuau

SEQ ID NO: 1232392 - RNA, 19 nt, Homo sapiens
  misc_RNA (1)...(19): siRNA sense strand
ugaaauggauguguaacug

SEQ ID NO: 1232393 - RNA, 19 nt, Homo sapiens
  misc_RNA (1)...(19): siRNA sense strand
gcaaagcugauaacucugu

SEQ ID NO: 1232394 - RNA, 19 nt, Homo sapiens
  misc_RNA (1)...(19): siRNA sense strand
acagugaccuuacaaacau

SEQ ID NO: 1232395 - RNA, 19 nt, Homo sapiens
  misc_RNA (1)...(19): siRNA sense strand
gcgauacugucuauaccaa

SEQ ID NO: 1232396 - RNA, 19 nt, Homo sapiens
  misc_RNA (1)...(19): siRNA sense strand
gaagacaugcaguauaugg

SEQ ID NO: 1232397 - RNA, 19 nt, Homo sapiens
  misc_RNA (1)...(19): siRNA sense strand
ucaagucacugcagagucu

SEQ ID NO: 1232398 - RNA, 19 nt, Homo sapiens
  misc_RNA (1)...(19): siRNA sense strand
cuacgacgaauauauguuu

SEQ ID NO: 1232399 - RNA, 19 nt, Homo sapiens
  misc_RNA (1)...(19): siRNA sense strand
ggugggcacuggugggauu

SEQ ID NO: 1232400 - RNA, 19 nt, Homo sapiens
  misc_RNA (1)...(19): siRNA sense strand
cugcguggcuugacaaugu

SEQ ID NO: 1232401 - RNA, 19 nt, Homo sapiens
  misc_RNA (1)...(19): siRNA sense strand
agaaacagacuucaagaug

SEQ ID NO: 1232402 - RNA, 19 nt, Homo sapiens
  misc_RNA (1)...(19): siRNA sense strand
cuagaggaaacuccaaaua

SEQ ID NO: 1232403 - RNA, 19 nt, Homo sapiens
  misc_RNA (1)...(19): siRNA sense strand
gaaauggauguguaacugu

SEQ ID NO: 1232404 - RNA, 19 nt, Homo sapiens
  misc_RNA (1)...(19): siRNA sense strand
guauauggcuaugagacaa

SEQ ID NO: 1232405 - RNA, 19 nt, Homo sapiens
  misc_RNA (1)...(19): siRNA sense strand
uuaaucgucugcaagaaga

SEQ ID NO: 1232406 - RNA, 19 nt, Homo sapiens
  misc_RNA (1)...(19): siRNA sense strand
cgaagauacacgucgcuua

SEQ ID NO: 1232407 - RNA, 19 nt, Homo sapiens
  misc_RNA (1)...(19): siRNA sense strand
ccagugugaugacaacaug

SEQ ID NO: 1232408 - RNA, 19 nt, Homo sapiens
  misc_RNA (1)...(19): siRNA sense strand
gacagugaccuuacaaaca

SEQ ID NO: 1232409 - RNA, 19 nt, Homo sapiens
  misc_RNA (1)...(19): siRNA sense strand
uucuacagcucaaugguua

SEQ ID NO: 1232410 - RNA, 19 nt, Homo sapiens
  misc_RNA (1)...(19): siRNA sense strand
ccgcucaggugcaguaugu

SEQ ID NO: 1232411 - RNA, 19 nt, Homo sapiens
  misc_RNA (1)...(19): siRNA sense strand
cccaagccauucgaaauuu

SEQ ID NO: 1232412 - RNA, 19 nt, Homo sapiens
  misc_RNA (1)...(19): siRNA sense strand
cgagcaaucugagugaaau

SEQ ID NO: 1232413 - RNA, 19 nt, Homo sapiens
  misc_RNA (1)...(19): siRNA sense strand
caacagaaacaaagguaca

SEQ ID NO: 1232414 - RNA, 19 nt, Homo sapiens
  misc_RNA (1)...(19): siRNA sense strand
gacaacaacccaugcaaca

SEQ ID NO: 1232415 - RNA, 19 nt, Homo sapiens
  misc_RNA (1)...(19): siRNA sense strand
gaugaugcaagcacugaaa

SEQ ID NO: 1232416 - RNA, 19 nt, Homo sapiens
  misc_RNA (1)...(19): siRNA sense strand
gaacacuucccaaaucaac

SEQ ID NO: 1232417 - RNA, 19 nt, Homo sapiens
  misc_RNA (1)...(19): siRNA sense strand
ucacugcagagucuuuaua

SEQ ID NO: 1232418 - RNA, 19 nt, Homo sapiens
  misc_RNA (1)...(19): siRNA sense strand
gcccaaagccaacaucauc

SEQ ID NO: 1232419 - RNA, 19 nt, Homo sapiens
  misc_RNA (1)...(19): siRNA sense strand
aaacagacuucaagaugac

SEQ ID NO: 1232420 - RNA, 19 nt, Homo sapiens
  misc_RNA (1)...(19): siRNA sense strand
ccacuaccuucgacacugu

SEQ ID NO: 1232421 - RNA, 19 nt, Homo sapiens
  misc_RNA (1)...(19): siRNA sense strand
gcucgacagugaccuuaca

SEQ ID NO: 1232422 - RNA, 19 nt, Homo sapiens
  misc_RNA (1)...(19): siRNA sense strand
gaaacuccaaauaccacua

SEQ ID NO: 1232423 - RNA, 19 nt, Homo sapiens
  misc_RNA (1)...(19): siRNA sense strand
ggacguuguugugaaucuu

SEQ ID NO: 1232424 - RNA, 19 nt, Homo sapiens
  misc_RNA (1)...(19): siRNA sense strand
gaaggaagacccaguuuuc

SEQ ID NO: 1232425 - RNA, 19 nt, Homo sapiens
  misc_RNA (1)...(19): siRNA sense strand
gauacacgucgcuuaauca

SEQ ID NO: 1232426 - RNA, 19 nt, Homo sapiens
  misc_RNA (1)...(19): siRNA sense strand
ugauaacucugugcaaaca

SEQ ID NO: 1232427 - RNA, 19 nt, Homo sapiens
  misc_RNA (1)...(19): siRNA sense strand
gagcaaucugagugaaaua

SEQ ID NO: 1232428 - RNA, 19 nt, Homo sapiens
  misc_RNA (1)...(19): siRNA sense strand
ugacuaccguggucucauc

SEQ ID NO: 1232429 - RNA, 19 nt, Homo sapiens
  misc_RNA (1)...(19): siRNA sense strand
guccuuagaccuauuccua

SEQ ID NO: 1232430 - RNA, 19 nt, Homo sapiens
  misc_RNA (1)...(19): siRNA sense strand
acaugagucuauccugaaa

SEQ ID NO: 1232431 - RNA, 19 nt, Homo sapiens
  misc_RNA (1)...(19): siRNA sense strand
ugcagagucuuuauagaga

SEQ ID NO: 1232432 - RNA, 19 nt, Homo sapiens
  misc_RNA (1)...(19): siRNA sense strand
gggaauuacuuugauacuc

SEQ ID NO: 1232433 - RNA, 19 nt, Homo sapiens
  misc_RNA (1)...(19): siRNA sense strand
caagguugccgcuguaagu

SEQ ID NO: 1232434 - RNA, 19 nt, Homo sapiens
  misc_RNA (1)...(19): siRNA sense strand
gacccaagccauucgaaau

SEQ ID NO: 1232435 - RNA, 19 nt, Homo sapiens
  misc_RNA (1)...(19): siRNA sense strand
aggaagcgauacugucuau

SEQ ID NO: 1232436 - RNA, 19 nt, Homo sapiens
  misc_RNA (1)...(19): siRNA sense strand
aggcacaucuguugagcaa

SEQ ID NO: 1232437 - RNA, 19 nt, Homo sapiens
  misc_RNA (1)...(19): siRNA sense strand
gccaacaucaucaacaguu

SEQ ID NO: 1232438 - RNA, 19 nt, Homo sapiens
  misc_RNA (1)...(19): siRNA sense strand
gcaaucugagugaaauaga

SEQ ID NO: 1232439 - RNA, 19 nt, Homo sapiens
  misc_RNA (1)...(19): siRNA sense strand
guacaaccacuaccuucga

SEQ ID NO: 1232440 - RNA, 19 nt, Homo sapiens
  misc_RNA (1)...(19): siRNA sense strand
cgacguccuuagaccuauu

SEQ ID NO: 1232441 - RNA, 19 nt, Homo sapiens
  misc_RNA (1)...(19): siRNA sense strand
gguugcagaugguuucaca

SEQ ID NO: 1232442 - RNA, 19 nt, Homo sapiens
  misc_RNA (1)...(19): siRNA sense strand
agauacacgucgcuuaauc

SEQ ID NO: 1232443 - RNA, 19 nt, Homo sapiens
  misc_RNA (1)...(19): siRNA sense strand
gagacuagaaacagacuuc

SEQ ID NO: 1232444 - RNA, 19 nt, Homo sapiens
  misc_RNA (1)...(19): siRNA sense strand
gaaacagacuucaagauga

SEQ ID NO: 1232445 - RNA, 19 nt, Homo sapiens
  misc_RNA (1)...(19): siRNA sense strand
gaacaacaacguauccuua

SEQ ID NO: 1232446 - RNA, 19 nt, Homo sapiens
  misc_RNA (1)...(19): siRNA sense strand
ggaauuacuuugauacuca

SEQ ID NO: 1232447 - RNA, 19 nt, Homo sapiens
  misc_RNA (1)...(19): siRNA sense strand
gaagauacacgucgcuuaa

SEQ ID NO: 1232448 - RNA, 19 nt, Homo sapiens
  misc_RNA (1)...(19): siRNA sense strand
ggagggaauuacuuugaua

SEQ ID NO: 1232449 - RNA, 19 nt, Homo sapiens
  misc_RNA (1)...(19): siRNA sense strand
caauuuagccugauagaaa

SEQ ID NO: 1232450 - RNA, 19 nt, Homo sapiens
  misc_RNA (1)...(19): siRNA sense strand
gaacaauauuccacagaga

SEQ ID NO: 1232451 - RNA, 19 nt, Homo sapiens
  misc_RNA (1)...(19): siRNA sense strand
gcagaugguuucacaggaa

SEQ ID NO: 1232452 - RNA, 19 nt, Homo sapiens
  misc_RNA (1)...(19): siRNA sense strand
ccaaugccaugaacaauau

SEQ ID NO: 1232453 - RNA, 19 nt, Homo sapiens
  misc_RNA (1)...(19): siRNA sense strand
caacguauccuuacacaga

SEQ ID NO: 1232454 - RNA, 19 nt, Homo sapiens
  misc_RNA (1)...(19): siRNA sense strand
caaaucaaccagaugcuua

SEQ ID NO: 1232455 - RNA, 19 nt, Homo sapiens
  misc_RNA (1)...(19): siRNA sense strand
gcaacucaauggagaauuc

SEQ ID NO: 1232456 - RNA, 19 nt, Homo sapiens
  misc_RNA (1)...(19): siRNA sense strand
ggagaauucuggucacuca

SEQ ID NO: 1232457 - RNA, 19 nt, Homo sapiens
  misc_RNA (1)...(19): siRNA sense strand
aagaagacaugcaguauau

SEQ ID NO: 1232458 - RNA, 19 nt, Homo sapiens
  misc_RNA (1)...(19): siRNA sense strand
ggagugagccuucccagaa

SEQ ID NO: 1232459 - RNA, 19 nt, Homo sapiens
  misc_RNA (1)...(19): siRNA sense strand
ccacagagaaugauacaaa

SEQ ID NO: 1232460 - RNA, 19 nt, Homo sapiens
  misc_RNA (1)...(19): siRNA sense strand
guacaagccuaugcagaaa

SEQ ID NO: 1232461 - RNA, 19 nt, Homo sapiens
  misc_RNA (1)...(19): siRNA sense strand
caacaugguucagagacua

SEQ ID NO: 1232462 - RNA, 19 nt, Homo sapiens
  misc_RNA (1)...(19): siRNA sense strand
aagcaaagcugauaacucu

SEQ ID NO: 1232463 - RNA, 19 nt, Homo sapiens
  misc_RNA (1)...(19): siRNA sense strand
gcacuaccauuaccgaauc

SEQ ID NO: 1232464 - RNA, 19 nt, Homo sapiens
  misc_RNA (1)...(19): siRNA sense strand
gcugauaacucugugcaaa

SEQ ID NO: 1232465 - RNA, 19 nt, Homo sapiens
  misc_RNA (1)...(19): siRNA sense strand
caagaagacaugcaguaua

SEQ ID NO: 1232466 - RNA, 19 nt, Homo sapiens
  misc_RNA (1)...(19): siRNA sense strand
gaaacccuaugaaggaaga

SEQ ID NO: 1232467 - RNA, 19 nt, Homo sapiens
  misc_RNA (1)...(19): siRNA sense strand
gacacaggcucgacaguga

SEQ ID NO: 1232468 - RNA, 19 nt, Homo sapiens
  misc_RNA (1)...(19): siRNA sense strand
gcacaucuguugagcaaac

SEQ ID NO: 1232469 - RNA, 19 nt, Homo sapiens
  misc_RNA (1)...(19): siRNA sense strand
ucagaacacuucccaaauc

SEQ ID NO: 1232470 - RNA, 19 nt, Homo sapiens
  misc_RNA (1)...(19): siRNA sense strand
aaacaucuguggcuaguca

SEQ ID NO: 1232471 - RNA, 19 nt, Homo sapiens
  misc_RNA (1)...(19): siRNA sense strand
guacuaccuuugaggauau

SEQ ID NO: 1232472 - RNA, 19 nt, Homo sapiens
  misc_RNA (1)...(19): siRNA sense strand
ucaaccagaugcuuaguga

SEQ ID NO: 1232473 - RNA, 19 nt, Homo sapiens
  misc_RNA (1)...(19): siRNA sense strand
gauacugucuauaccaaug

SEQ ID NO: 1232474 - RNA, 19 nt, Homo sapiens
  misc_RNA (1)...(19): siRNA sense strand
gaagcacucuguacaacca

SEQ ID NO: 1232475 - RNA, 19 nt, Homo sapiens
  misc_RNA (1)...(19): siRNA sense strand
ccaaauaccacuacuaugg

SEQ ID NO: 1232476 - RNA, 19 nt, Homo sapiens
  misc_RNA (1)...(19): siRNA sense strand
caacaacccaugcaacaga

SEQ ID NO: 1232477 - RNA, 19 nt, Homo sapiens
  misc_RNA (1)...(19): siRNA sense strand
ccucaaccgugucgacuuu

SEQ ID NO: 1232478 - RNA, 19 nt, Homo sapiens
  misc_RNA (1)...(19): siRNA sense strand
ggagcaauccgaacaacaa

SEQ ID NO: 1232479 - RNA, 19 nt, Homo sapiens
  misc_RNA (1)...(19): siRNA sense strand
caaacauucuggcgcuauu

SEQ ID NO: 1232480 - RNA, 19 nt, Homo sapiens
  misc_RNA (1)...(19): siRNA sense strand
gguacaagccuaugcagaa

SEQ ID NO: 1232481 - RNA, 19 nt, Homo sapiens
  misc_RNA (1)...(19): siRNA sense strand
acacagauguacagccaaa

SEQ ID NO: 1232482 - RNA, 19 nt, Homo sapiens
  misc_RNA (1)...(19): siRNA sense strand
acacagagacacagaugua

SEQ ID NO: 1232483 - RNA, 19 nt, Homo sapiens
  misc_RNA (1)...(19): siRNA sense strand
gcacugugaggcaauauug

SEQ ID NO: 1232484 - RNA, 19 nt, Homo sapiens
  misc_RNA (1)...(19): siRNA sense strand
gcaagaagacaugcaguau

SEQ ID NO: 1232485 - RNA, 19 nt, Homo sapiens
  misc_RNA (1)...(19): siRNA sense strand
cagaacacuucccaaauca

SEQ ID NO: 1232486 - RNA, 19 nt, Homo sapiens
  misc_RNA (1)...(19): siRNA sense strand
ccaacaucaucaacaguuu

SEQ ID NO: 1232487 - RNA, 19 nt, Homo sapiens
  misc_RNA (1)...(19): siRNA sense strand
gaaggaagcgauacugucu

SEQ ID NO: 1232488 - RNA, 19 nt, Homo sapiens
  misc_RNA (1)...(19): siRNA sense strand
gcacugaaacccuaugaag

SEQ ID NO: 1232489 - RNA, 19 nt, Homo sapiens
  misc_RNA (1)...(19): siRNA sense strand
caaucugagugaaauagaa

SEQ ID NO: 1232490 - RNA, 19 nt, Homo sapiens
  misc_RNA (1)...(19): siRNA sense strand
gaagcgauacugucuauac

SEQ ID NO: 1232491 - RNA, 19 nt, Homo sapiens
  misc_RNA (1)...(19): siRNA sense strand
gcagguacaacaugucuau

SEQ ID NO: 1232492 - RNA, 19 nt, Homo sapiens
  misc_RNA (1)...(19): siRNA sense strand
ugaaauggauguguaacug

SEQ ID NO: 1232493 - RNA, 19 nt, Homo sapiens
  misc_RNA (1)...(19): siRNA sense strand
gcaaagcugauaacucugu

SEQ ID NO: 1232494 - RNA, 19 nt, Homo sapiens
  misc_RNA (1)...(19): siRNA sense strand
acagugaccuuacaaacau

SEQ ID NO: 1232495 - RNA, 19 nt, Homo sapiens
  misc_RNA (1)...(19): siRNA sense strand
gcgauacugucuauaccaa

SEQ ID NO: 1232496 - RNA, 19 nt, Homo sapiens
  misc_RNA (1)...(19): siRNA sense strand
gaagacaugcaguauaugg

SEQ ID NO: 1232497 - RNA, 19 nt, Homo sapiens
  misc_RNA (1)...(19): siRNA sense strand
ucaagucacugcagagucu

SEQ ID NO: 1232498 - RNA, 19 nt, Homo sapiens
  misc_RNA (1)...(19): siRNA sense strand
cuacgacgaauauauguuu

SEQ ID NO: 1232499 - RNA, 19 nt, Homo sapiens
  misc_RNA (1)...(19): siRNA sense strand
ggugggcacuggugggauu

SEQ ID NO: 1232500 - RNA, 19 nt, Homo sapiens
  misc_RNA (1)...(19): siRNA sense strand
cugcguggcuugacaaugu

SEQ ID NO: 1232501 - RNA, 19 nt, Homo sapiens
  misc_RNA (1)...(19): siRNA sense strand
agaaacagacuucaagaug

SEQ ID NO: 1232502 - RNA, 19 nt, Homo sapiens
  misc_RNA (1)...(19): siRNA sense strand
cuagaggaaacuccaaaua

SEQ ID NO: 1232503 - RNA, 19 nt, Homo sapiens
  misc_RNA (1)...(19): siRNA sense strand
gaaauggauguguaacugu

SEQ ID NO: 1232504 - RNA, 19 nt, Homo sapiens
  misc_RNA (1)...(19): siRNA sense strand
guauauggcuaugagacaa

SEQ ID NO: 1232505 - RNA, 19 nt, Homo sapiens
  misc_RNA (1)...(19): siRNA sense strand
uuaaucgucugcaagaaga

SEQ ID NO: 1232506 - RNA, 19 nt, Homo sapiens
  misc_RNA (1)...(19): siRNA sense strand
cgaagauacacgucgcuua

SEQ ID NO: 1232507 - RNA, 19 nt, Homo sapiens
  misc_RNA (1)...(19): siRNA sense strand
ccagugugaugacaacaug

SEQ ID NO: 1232508 - RNA, 19 nt, Homo sapiens
  misc_RNA (1)...(19): siRNA sense strand
gacagugaccuuacaaaca

SEQ ID NO: 1232509 - RNA, 19 nt, Homo sapiens
  misc_RNA (1)...(19): siRNA sense strand
uucuacagcucaaugguua

SEQ ID NO: 1232510 - RNA, 19 nt, Homo sapiens
  misc_RNA (1)...(19): siRNA sense strand
ccgcucaggugcaguaugu

SEQ ID NO: 1232511 - RNA, 19 nt, Homo sapiens
  misc_RNA (1)...(19): siRNA sense strand
cccaagccauucgaaauuu

SEQ ID NO: 1232512 - RNA, 19 nt, Homo sapiens
  misc_RNA (1)...(19): siRNA sense strand
cgagcaaucugagugaaau

SEQ ID NO: 1232513 - RNA, 19 nt, Homo sapiens
  misc_RNA (1)...(19): siRNA sense strand
caacagaaacaaagguaca

SEQ ID NO: 1232514 - RNA, 19 nt, Homo sapiens
  misc_RNA (1)...(19): siRNA sense strand
gacaacaacccaugcaaca

SEQ ID NO: 1232515 - RNA, 19 nt, Homo sapiens
  misc_RNA (1)...(19): siRNA sense strand
gaugaugcaagcacugaaa

SEQ ID NO: 1232516 - RNA, 19 nt, Homo sapiens
  misc_RNA (1)...(19): siRNA sense strand
gaacacuucccaaaucaac

SEQ ID NO: 1232517 - RNA, 19 nt, Homo sapiens
  misc_RNA (1)...(19): siRNA sense strand
ucacugcagagucuuuaua

SEQ ID NO: 1232518 - RNA, 19 nt, Homo sapiens
  misc_RNA (1)...(19): siRNA sense strand
gcccaaagccaacaucauc

SEQ ID NO: 1232519 - RNA, 19 nt, Homo sapiens
  misc_RNA (1)...(19): siRNA sense strand
aaacagacuucaagaugac

SEQ ID NO: 1232520 - RNA, 19 nt, Homo sapiens
  misc_RNA (1)...(19): siRNA sense strand
ccacuaccuucgacacugu

SEQ ID NO: 1232521 - RNA, 19 nt, Homo sapiens
  misc_RNA (1)...(19): siRNA sense strand
gcucgacagugaccuuaca

SEQ ID NO: 1232522 - RNA, 19 nt, Homo sapiens
  misc_RNA (1)...(19): siRNA sense strand
gaaacuccaaauaccacua

SEQ ID NO: 1232523 - RNA, 19 nt, Homo sapiens
  misc_RNA (1)...(19): siRNA sense strand
ggacguuguugugaaucuu

SEQ ID NO: 1232524 - RNA, 19 nt, Homo sapiens
  misc_RNA (1)...(19): siRNA sense strand
gaaggaagacccaguuuuc

SEQ ID NO: 1232525 - RNA, 19 nt, Homo sapiens
  misc_RNA (1)...(19): siRNA sense strand
gauacacgucgcuuaauca

SEQ ID NO: 1232526 - RNA, 19 nt, Homo sapiens
  misc_RNA (1)...(19): siRNA sense strand
ugauaacucugugcaaaca

SEQ ID NO: 1232527 - RNA, 19 nt, Homo sapiens
  misc_RNA (1)...(19): siRNA sense strand
gagcaaucugagugaaaua

SEQ ID NO: 1232528 - RNA, 19 nt, Homo sapiens
  misc_RNA (1)...(19): siRNA sense strand
ugacuaccguggucucauc

SEQ ID NO: 1232529 - RNA, 19 nt, Homo sapiens
  misc_RNA (1)...(19): siRNA sense strand
guccuuagaccuauuccua

SEQ ID NO: 1232530 - RNA, 19 nt, Homo sapiens
  misc_RNA (1)...(19): siRNA sense strand
acaugagucuauccugaaa

SEQ ID NO: 1232531 - RNA, 19 nt, Homo sapiens
  misc_RNA (1)...(19): siRNA sense strand
ugcagagucuuuauagaga

SEQ ID NO: 1232532 - RNA, 19 nt, Homo sapiens
  misc_RNA (1)...(19): siRNA sense strand
gggaauuacuuugauacuc

SEQ ID NO: 1232533 - RNA, 19 nt, Homo sapiens
  misc_RNA (1)...(19): siRNA sense strand
caagguugccgcuguaagu

SEQ ID NO: 1232534 - RNA, 19 nt, Homo sapiens
  misc_RNA (1)...(19): siRNA sense strand
gacccaagccauucgaaau

SEQ ID NO: 1232535 - RNA, 19 nt, Homo sapiens
  misc_RNA (1)...(19): siRNA sense strand
aggaagcgauacugucuau

SEQ ID NO: 1232536 - RNA, 19 nt, Homo sapiens
  misc_RNA (1)...(19): siRNA sense strand
aggcacaucuguugagcaa

SEQ ID NO: 1232537 - RNA, 19 nt, Homo sapiens
  misc_RNA (1)...(19): siRNA sense strand
gccaacaucaucaacaguu

SEQ ID NO: 1232538 - RNA, 19 nt, Homo sapiens
  misc_RNA (1)...(19): siRNA sense strand
gcaaucugagugaaauaga

SEQ ID NO: 1232539 - RNA, 19 nt, Homo sapiens
  misc_RNA (1)...(19): siRNA sense strand
guacaaccacuaccuucga

SEQ ID NO: 1232540 - RNA, 19 nt, Homo sapiens
  misc_RNA (1)...(19): siRNA sense strand
cgacguccuuagaccuauu

SEQ ID NO: 1232541 - RNA, 19 nt, Homo sapiens
  misc_RNA (1)...(19): siRNA sense strand
gguugcagaugguuucaca

SEQ ID NO: 1232542 - RNA, 19 nt, Homo sapiens
  misc_RNA (1)...(19): siRNA sense strand
agauacacgucgcuuaauc

SEQ ID NO: 1232543 - RNA, 19 nt, Homo sapiens
  misc_RNA (1)...(19): siRNA sense strand
gagacuagaaacagacuuc

SEQ ID NO: 1232544 - RNA, 19 nt, Homo sapiens
  misc_RNA (1)...(19): siRNA sense strand
caaacaagcugcccacaua

SEQ ID NO: 1232545 - RNA, 19 nt, Homo sapiens
  misc_RNA (1)...(19): siRNA sense strand
uaacuuaccuccaauaugu

SEQ ID NO: 1232546 - RNA, 19 nt, Homo sapiens
  misc_RNA (1)...(19): siRNA sense strand
gcaauaacaugugcauuug

SEQ ID NO: 1232547 - RNA, 19 nt, Homo sapiens
  misc_RNA (1)...(19): siRNA sense strand
gggcuuaggcuguuucuua

SEQ ID NO: 1232548 - RNA, 19 nt, Homo sapiens
  misc_RNA (1)...(19): siRNA sense strand
caagauuacugucaaacaa

SEQ ID NO: 1232549 - RNA, 19 nt, Homo sapiens
  misc_RNA (1)...(19): siRNA sense strand
gaaacaggagcuauuauug

SEQ ID NO: 1232550 - RNA, 19 nt, Homo sapiens
  misc_RNA (1)...(19): siRNA sense strand
ggaccugacuguuccuuga

SEQ ID NO: 1232551 - RNA, 19 nt, Homo sapiens
  misc_RNA (1)...(19): siRNA sense strand
gugcaaauguuuauguuga

SEQ ID NO: 1232552 - RNA, 19 nt, Homo sapiens
  misc_RNA (1)...(19): siRNA sense strand
gaugcaaucuuucuaaugg

SEQ ID NO: 1232553 - RNA, 19 nt, Homo sapiens
  misc_RNA (1)...(19): siRNA sense strand
guagaaacaggagcuauua

SEQ ID NO: 1232554 - RNA, 19 nt, Homo sapiens
  misc_RNA (1)...(19): siRNA sense strand
gaaggaauuccacaagauu

SEQ ID NO: 1232555 - RNA, 19 nt, Homo sapiens
  misc_RNA (1)...(19): siRNA sense strand
aagaagaggucaagaagga

SEQ ID NO: 1232556 - RNA, 19 nt, Homo sapiens
  misc_RNA (1)...(19): siRNA sense strand
ggcaauaacaugugcauuu

SEQ ID NO: 1232557 - RNA, 19 nt, Homo sapiens
  misc_RNA (1)...(19): siRNA sense strand
cuaguuggauucauuaaug

SEQ ID NO: 1232558 - RNA, 19 nt, Homo sapiens
  misc_RNA (1)...(19): siRNA sense strand
gauugcaacuguccaucua

SEQ ID NO: 1232559 - RNA, 19 nt, Homo sapiens
  misc_RNA (1)...(19): siRNA sense strand
uaugaaaucugaagagaag

SEQ ID NO: 1232560 - RNA, 19 nt, Homo sapiens
  misc_RNA (1)...(19): siRNA sense strand
ccaacacacuuccaaagga

SEQ ID NO: 1232561 - RNA, 19 nt, Homo sapiens
  misc_RNA (1)...(19): siRNA sense strand
guacaaaggaaguuaaauc

SEQ ID NO: 1232562 - RNA, 19 nt, Homo sapiens
  misc_RNA (1)...(19): siRNA sense strand
ggcauuggaugugugguua

SEQ ID NO: 1232563 - RNA, 19 nt, Homo sapiens
  misc_RNA (1)...(19): siRNA sense strand
ggaaauucaucugcaguuc

SEQ ID NO: 1232564 - RNA, 19 nt, Homo sapiens
  misc_RNA (1)...(19): siRNA sense strand
gaagaggucaagaaggaaa

SEQ ID NO: 1232565 - RNA, 19 nt, Homo sapiens
  misc_RNA (1)...(19): siRNA sense strand
gaaucuacaguuucaguuu

SEQ ID NO: 1232566 - RNA, 19 nt, Homo sapiens
  misc_RNA (1)...(19): siRNA sense strand
ggcuuaggcuguuucuuaa

SEQ ID NO: 1232567 - RNA, 19 nt, Homo sapiens
  misc_RNA (1)...(19): siRNA sense strand
ugagguguaugaaaucuga

SEQ ID NO: 1232568 - RNA, 19 nt, Homo sapiens
  misc_RNA (1)...(19): siRNA sense strand
gaacgggaauaaacauggu

SEQ ID NO: 1232569 - RNA, 19 nt, Homo sapiens
  misc_RNA (1)...(19): siRNA sense strand
aauggaagcuuugagauug

SEQ ID NO: 1232570 - RNA, 19 nt, Homo sapiens
  misc_RNA (1)...(19): siRNA sense strand
ugguuuggcuuucugauuu

SEQ ID NO: 1232571 - RNA, 19 nt, Homo sapiens
  misc_RNA (1)...(19): siRNA sense strand
ugaaggaauuccacaagau

SEQ ID NO: 1232572 - RNA, 19 nt, Homo sapiens
  misc_RNA (1)...(19): siRNA sense strand
aaauaccucuuaugaagga

SEQ ID NO: 1232573 - RNA, 19 nt, Homo sapiens
  misc_RNA (1)...(19): siRNA sense strand
aggaaggacuagagacuaa

SEQ ID NO: 1232574 - RNA, 19 nt, Homo sapiens
  misc_RNA (1)...(19): siRNA sense strand
ggauauaugguucucuuga

SEQ ID NO: 1232575 - RNA, 19 nt, Homo sapiens
  misc_RNA (1)...(19): siRNA sense strand
aauugcagcuguauucaaa

SEQ ID NO: 1232576 - RNA, 19 nt, Homo sapiens
  misc_RNA (1)...(19): siRNA sense strand
caacuuguccucaaacagu

SEQ ID NO: 1232577 - RNA, 19 nt, Homo sapiens
  misc_RNA (1)...(19): siRNA sense strand
cgacaaaggaccugacugu

SEQ ID NO: 1232578 - RNA, 19 nt, Homo sapiens
  misc_RNA (1)...(19): siRNA sense strand
gcagcuguauucaaacauc

SEQ ID NO: 1232579 - RNA, 19 nt, Homo sapiens
  misc_RNA (1)...(19): siRNA sense strand
acaaauagagagacaauuc

SEQ ID NO: 1232580 - RNA, 19 nt, Homo sapiens
  misc_RNA (1)...(19): siRNA sense strand
ugauacaguucaaugcauu

SEQ ID NO: 1232581 - RNA, 19 nt, Homo sapiens
  misc_RNA (1)...(19): siRNA sense strand
gagcuauuauugguccuuu

SEQ ID NO: 1232582 - RNA, 19 nt, Homo sapiens
  misc_RNA (1)...(19): siRNA sense strand
aaacucccauccugccuuu

SEQ ID NO: 1232583 - RNA, 19 nt, Homo sapiens
  misc_RNA (1)...(19): siRNA sense strand
gcaaauguuuauguugaca

SEQ ID NO: 1232584 - RNA, 19 nt, Homo sapiens
  misc_RNA (1)...(19): siRNA sense strand
gauauaugguucucuugag

SEQ ID NO: 1232585 - RNA, 19 nt, Homo sapiens
  misc_RNA (1)...(19): siRNA sense strand
ugucagcgaugagcaguuu

SEQ ID NO: 1232586 - RNA, 19 nt, Homo sapiens
  misc_RNA (1)...(19): siRNA sense strand
ucaaacaucaggaaauuca

SEQ ID NO: 1232587 - RNA, 19 nt, Homo sapiens
  misc_RNA (1)...(19): siRNA sense strand
guucaagauuacugucaaa

SEQ ID NO: 1232588 - RNA, 19 nt, Homo sapiens
  misc_RNA (1)...(19): siRNA sense strand
agaaacaggagcuauuauu

SEQ ID NO: 1232589 - RNA, 19 nt, Homo sapiens
  misc_RNA (1)...(19): siRNA sense strand
ggugugggauuacauacau

SEQ ID NO: 1232590 - RNA, 19 nt, Homo sapiens
  misc_RNA (1)...(19): siRNA sense strand
cuucaugccuaaauaccua

SEQ ID NO: 1232591 - RNA, 19 nt, Homo sapiens
  misc_RNA (1)...(19): siRNA sense strand
caacaucccaacaucucua

SEQ ID NO: 1232592 - RNA, 19 nt, Homo sapiens
  misc_RNA (1)...(19): siRNA sense strand
ucacacaaauagagagaca

SEQ ID NO: 1232593 - RNA, 19 nt, Homo sapiens
  misc_RNA (1)...(19): siRNA sense strand
aaauucaucugcaguucuu

SEQ ID NO: 1232594 - RNA, 19 nt, Homo sapiens
  misc_RNA (1)...(19): siRNA sense strand
aaugacaucuuugcugauu

SEQ ID NO: 1232595 - RNA, 19 nt, Homo sapiens
  misc_RNA (1)...(19): siRNA sense strand
uaauggaagcuuugagauu

SEQ ID NO: 1232596 - RNA, 19 nt, Homo sapiens
  misc_RNA (1)...(19): siRNA sense strand
gcaauccaauuuauaugcu

SEQ ID NO: 1232597 - RNA, 19 nt, Homo sapiens
  misc_RNA (1)...(19): siRNA sense strand
ugaauuccaugcucacaca

SEQ ID NO: 1232598 - RNA, 19 nt, Homo sapiens
  misc_RNA (1)...(19): siRNA sense strand
caacgcaggauccaucaga

SEQ ID NO: 1232599 - RNA, 19 nt, Homo sapiens
  misc_RNA (1)...(19): siRNA sense strand
caaauagagagacaauuca

SEQ ID NO: 1232600 - RNA, 19 nt, Homo sapiens
  misc_RNA (1)...(19): siRNA sense strand
acaaaggaccugacuguuc

SEQ ID NO: 1232601 - RNA, 19 nt, Homo sapiens
  misc_RNA (1)...(19): siRNA sense strand
gaaggacuagagacuaaug

SEQ ID NO: 1232602 - RNA, 19 nt, Homo sapiens
  misc_RNA (1)...(19): siRNA sense strand
aauaugggauccugugugu

SEQ ID NO: 1232603 - RNA, 19 nt, Homo sapiens
  misc_RNA (1)...(19): siRNA sense strand
guuaugggcuuaggcuguu

SEQ ID NO: 1232604 - RNA, 19 nt, Homo sapiens
  misc_RNA (1)...(19): siRNA sense strand
acaguucaaugcauucguu

SEQ ID NO: 1232605 - RNA, 19 nt, Homo sapiens
  misc_RNA (1)...(19): siRNA sense strand
gguauuuccuauauagaag

SEQ ID NO: 1232606 - RNA, 19 nt, Homo sapiens
  misc_RNA (1)...(19): siRNA sense strand
caucagaguguacaaagga

SEQ ID NO: 1232607 - RNA, 19 nt, Homo sapiens
  misc_RNA (1)...(19): siRNA sense strand
gcuauuauugguccuuuga

SEQ ID NO: 1232608 - RNA, 19 nt, Homo sapiens
  misc_RNA (1)...(19): siRNA sense strand
guuccuugaugcuccagua

SEQ ID NO: 1232609 - RNA, 19 nt, Homo sapiens
  misc_RNA (1)...(19): siRNA sense strand
gucuggaucuuauaugaau

SEQ ID NO: 1232610 - RNA, 19 nt, Homo sapiens
  misc_RNA (1)...(19): siRNA sense strand
ucaggcaacuuguccucaa

SEQ ID NO: 1232611 - RNA, 19 nt, Homo sapiens
  misc_RNA (1)...(19): siRNA sense strand
ggaauuccacaagauuuau

SEQ ID NO: 1232612 - RNA, 19 nt, Homo sapiens
  misc_RNA (1)...(19): siRNA sense strand
ggguauuuccuauauagaa

SEQ ID NO: 1232613 - RNA, 19 nt, Homo sapiens
  misc_RNA (1)...(19): siRNA sense strand
ccaaaggaaggacuagaga

SEQ ID NO: 1232614 - RNA, 19 nt, Homo sapiens
  misc_RNA (1)...(19): siRNA sense strand
gaaauucaucugcaguucu

SEQ ID NO: 1232615 - RNA, 19 nt, Homo sapiens
  misc_RNA (1)...(19): siRNA sense strand
gaaaauucuucaguuguug

SEQ ID NO: 1232616 - RNA, 19 nt, Homo sapiens
  misc_RNA (1)...(19): siRNA sense strand
ggauauauaauuggugguu

SEQ ID NO: 1232617 - RNA, 19 nt, Homo sapiens
  misc_RNA (1)...(19): siRNA sense strand
ucuccuucaugccuaaaua

SEQ ID NO: 1232618 - RNA, 19 nt, Homo sapiens
  misc_RNA (1)...(19): siRNA sense strand
ucaaugcauucguuaacau

SEQ ID NO: 1232619 - RNA, 19 nt, Homo sapiens
  misc_RNA (1)...(19): siRNA sense strand
uaagugugauacaguucaa

SEQ ID NO: 1232620 - RNA, 19 nt, Homo sapiens
  misc_RNA (1)...(19): siRNA sense strand
caacuguccaucuaaaaua

SEQ ID NO: 1232621 - RNA, 19 nt, Homo sapiens
  misc_RNA (1)...(19): siRNA sense strand
uguaugaaaucugaagaga

SEQ ID NO: 1232622 - RNA, 19 nt, Homo sapiens
  misc_RNA (1)...(19): siRNA sense strand
ugagcaguuucauuuauuc

SEQ ID NO: 1232623 - RNA, 19 nt, Homo sapiens
  misc_RNA (1)...(19): siRNA sense strand
caggcaacuuguccucaaa

SEQ ID NO: 1232624 - RNA, 19 nt, Homo sapiens
  misc_RNA (1)...(19): siRNA sense strand
aggaauuccacaagauuua

SEQ ID NO: 1232625 - RNA, 19 nt, Homo sapiens
  misc_RNA (1)...(19): siRNA sense strand
aaacaggagcuauuauugg

SEQ ID NO: 1232626 - RNA, 19 nt, Homo sapiens
  misc_RNA (1)...(19): siRNA sense strand
caggauccaucagagugua

SEQ ID NO: 1232627 - RNA, 19 nt, Homo sapiens
  misc_RNA (1)...(19): siRNA sense strand
aaucuacaguuucaguuuc

SEQ ID NO: 1232628 - RNA, 19 nt, Homo sapiens
  misc_RNA (1)...(19): siRNA sense strand
gauccuguguguggaaaca

SEQ ID NO: 1232629 - RNA, 19 nt, Homo sapiens
  misc_RNA (1)...(19): siRNA sense strand
gguuuggcuuucugauuug

SEQ ID NO: 1232630 - RNA, 19 nt, Homo sapiens
  misc_RNA (1)...(19): siRNA sense strand
guacguggaaugggugaaa

SEQ ID NO: 1232631 - RNA, 19 nt, Homo sapiens
  misc_RNA (1)...(19): siRNA sense strand
guaugaaaucugaagagaa

SEQ ID NO: 1232632 - RNA, 19 nt, Homo sapiens
  misc_RNA (1)...(19): siRNA sense strand
caaaauugcagcuguauuc

SEQ ID NO: 1232633 - RNA, 19 nt, Homo sapiens
  misc_RNA (1)...(19): siRNA sense strand
uugcaacuguccaucuaaa

SEQ ID NO: 1232634 - RNA, 19 nt, Homo sapiens
  misc_RNA (1)...(19): siRNA sense strand
ugacaucuuugcugauugc

SEQ ID NO: 1232635 - RNA, 19 nt, Homo sapiens
  misc_RNA (1)...(19): siRNA sense strand
aaacacugucuggaucuua

SEQ ID NO: 1232636 - RNA, 19 nt, Homo sapiens
  misc_RNA (1)...(19): siRNA sense strand
cauccugccuuuggguauu

SEQ ID NO: 1232637 - RNA, 19 nt, Homo sapiens
  misc_RNA (1)...(19): siRNA sense strand
aacaggagcuauuauuggu

SEQ ID NO: 1232638 - RNA, 19 nt, Homo sapiens
  misc_RNA (1)...(19): siRNA sense strand
gacacuggauuugugaaca

SEQ ID NO: 1232639 - RNA, 19 nt, Homo sapiens
  misc_RNA (1)...(19): siRNA sense strand
uaacaugugcauuuguauc

SEQ ID NO: 1232640 - RNA, 19 nt, Homo sapiens
  misc_RNA (1)...(19): siRNA sense strand
ucucaugacuugugaaaau

SEQ ID NO: 1232641 - RNA, 19 nt, Homo sapiens
  misc_RNA (1)...(19): siRNA sense strand
caaucuuucuaauggguau

SEQ ID NO: 1232642 - RNA, 19 nt, Homo sapiens
  misc_RNA (1)...(19): siRNA sense strand
agaacagcaauauggaaua

SEQ ID NO: 1232643 - RNA, 19 nt, Homo sapiens
  misc_RNA (1)...(19): siRNA sense strand
gugauacaguucaaugcau

SEQ ID NO: 1232644 - RNA, 19 nt, Homo sapiens
  misc_RNA (1)...(19): siRNA sense strand
caaacaagcugcccacaua

SEQ ID NO: 1232645 - RNA, 19 nt, Homo sapiens
  misc_RNA (1)...(19): siRNA sense strand
uaacuuaccuccaauaugu

SEQ ID NO: 1232646 - RNA, 19 nt, Homo sapiens
  misc_RNA (1)...(19): siRNA sense strand
gcaauaacaugugcauuug

SEQ ID NO: 1232647 - RNA, 19 nt, Homo sapiens
  misc_RNA (1)...(19): siRNA sense strand
gggcuuaggcuguuucuua

SEQ ID NO: 1232648 - RNA, 19 nt, Homo sapiens
  misc_RNA (1)...(19): siRNA sense strand
caagauuacugucaaacaa

SEQ ID NO: 1232649 - RNA, 19 nt, Homo sapiens
  misc_RNA (1)...(19): siRNA sense strand
gaaacaggagcuauuauug

SEQ ID NO: 1232650 - RNA, 19 nt, Homo sapiens
  misc_RNA (1)...(19): siRNA sense strand
ggaccugacuguuccuuga

SEQ ID NO: 1232651 - RNA, 19 nt, Homo sapiens
  misc_RNA (1)...(19): siRNA sense strand
gugcaaauguuuauguuga

SEQ ID NO: 1232652 - RNA, 19 nt, Homo sapiens
  misc_RNA (1)...(19): siRNA sense strand
gaugcaaucuuucuaaugg

SEQ ID NO: 1232653 - RNA, 19 nt, Homo sapiens
  misc_RNA (1)...(19): siRNA sense strand
guagaaacaggagcuauua

SEQ ID NO: 1232654 - RNA, 19 nt, Homo sapiens
  misc_RNA (1)...(19): siRNA sense strand
gaaggaauuccacaagauu

SEQ ID NO: 1232655 - RNA, 19 nt, Homo sapiens
  misc_RNA (1)...(19): siRNA sense strand
aagaagaggucaagaagga

SEQ ID NO: 1232656 - RNA, 19 nt, Homo sapiens
  misc_RNA (1)...(19): siRNA sense strand
ggcaauaacaugugcauuu

SEQ ID NO: 1232657 - RNA, 19 nt, Homo sapiens
  misc_RNA (1)...(19): siRNA sense strand
cuaguuggauucauuaaug

SEQ ID NO: 1232658 - RNA, 19 nt, Homo sapiens
  misc_RNA (1)...(19): siRNA sense strand
gauugcaacuguccaucua

SEQ ID NO: 1232659 - RNA, 19 nt, Homo sapiens
  misc_RNA (1)...(19): siRNA sense strand
uaugaaaucugaagagaag

SEQ ID NO: 1232660 - RNA, 19 nt, Homo sapiens
  misc_RNA (1)...(19): siRNA sense strand
ccaacacacuuccaaagga

SEQ ID NO: 1232661 - RNA, 19 nt, Homo sapiens
  misc_RNA (1)...(19): siRNA sense strand
guacaaaggaaguuaaauc

SEQ ID NO: 1232662 - RNA, 19 nt, Homo sapiens
  misc_RNA (1)...(19): siRNA sense strand
ggcauuggaugugugguua

SEQ ID NO: 1232663 - RNA, 19 nt, Homo sapiens
  misc_RNA (1)...(19): siRNA sense strand
ggaaauucaucugcaguuc

SEQ ID NO: 1232664 - RNA, 19 nt, Homo sapiens
  misc_RNA (1)...(19): siRNA sense strand
gaagaggucaagaaggaaa

SEQ ID NO: 1232665 - RNA, 19 nt, Homo sapiens
  misc_RNA (1)...(19): siRNA sense strand
gaaucuacaguuucaguuu

SEQ ID NO: 1232666 - RNA, 19 nt, Homo sapiens
  misc_RNA (1)...(19): siRNA sense strand
ggcuuaggcuguuucuuaa

SEQ ID NO: 1232667 - RNA, 19 nt, Homo sapiens
  misc_RNA (1)...(19): siRNA sense strand
ugagguguaugaaaucuga

SEQ ID NO: 1232668 - RNA, 19 nt, Homo sapiens
  misc_RNA (1)...(19): siRNA sense strand
gaacgggaauaaacauggu

SEQ ID NO: 1232669 - RNA, 19 nt, Homo sapiens
  misc_RNA (1)...(19): siRNA sense strand
aauggaagcuuugagauug

SEQ ID NO: 1232670 - RNA, 19 nt, Homo sapiens
  misc_RNA (1)...(19): siRNA sense strand
ugguuuggcuuucugauuu

SEQ ID NO: 1232671 - RNA, 19 nt, Homo sapiens
  misc_RNA (1)...(19): siRNA sense strand
ugaaggaauuccacaagau

SEQ ID NO: 1232672 - RNA, 19 nt, Homo sapiens
  misc_RNA (1)...(19): siRNA sense strand
aaauaccucuuaugaagga

SEQ ID NO: 1232673 - RNA, 19 nt, Homo sapiens
  misc_RNA (1)...(19): siRNA sense strand
aggaaggacuagagacuaa

SEQ ID NO: 1232674 - RNA, 19 nt, Homo sapiens
  misc_RNA (1)...(19): siRNA sense strand
ggauauaugguucucuuga

SEQ ID NO: 1232675 - RNA, 19 nt, Homo sapiens
  misc_RNA (1)...(19): siRNA sense strand
aauugcagcuguauucaaa

SEQ ID NO: 1232676 - RNA, 19 nt, Homo sapiens
  misc_RNA (1)...(19): siRNA sense strand
caacuuguccucaaacagu

SEQ ID NO: 1232677 - RNA, 19 nt, Homo sapiens
  misc_RNA (1)...(19): siRNA sense strand
cgacaaaggaccugacugu

SEQ ID NO: 1232678 - RNA, 19 nt, Homo sapiens
  misc_RNA (1)...(19): siRNA sense strand
gcagcuguauucaaacauc

SEQ ID NO: 1232679 - RNA, 19 nt, Homo sapiens
  misc_RNA (1)...(19): siRNA sense strand
acaaauagagagacaauuc

SEQ ID NO: 1232680 - RNA, 19 nt, Homo sapiens
  misc_RNA (1)...(19): siRNA sense strand
ugauacaguucaaugcauu

SEQ ID NO: 1232681 - RNA, 19 nt, Homo sapiens
  misc_RNA (1)...(19): siRNA sense strand
gagcuauuauugguccuuu

SEQ ID NO: 1232682 - RNA, 19 nt, Homo sapiens
  misc_RNA (1)...(19): siRNA sense strand
aaacucccauccugccuuu

SEQ ID NO: 1232683 - RNA, 19 nt, Homo sapiens
  misc_RNA (1)...(19): siRNA sense strand
gcaaauguuuauguugaca

SEQ ID NO: 1232684 - RNA, 19 nt, Homo sapiens
  misc_RNA (1)...(19): siRNA sense strand
gauauaugguucucuugag

SEQ ID NO: 1232685 - RNA, 19 nt, Homo sapiens
  misc_RNA (1)...(19): siRNA sense strand
ugucagcgaugagcaguuu

SEQ ID NO: 1232686 - RNA, 19 nt, Homo sapiens
  misc_RNA (1)...(19): siRNA sense strand
ucaaacaucaggaaauuca

SEQ ID NO: 1232687 - RNA, 19 nt, Homo sapiens
  misc_RNA (1)...(19): siRNA sense strand
guucaagauuacugucaaa

SEQ ID NO: 1232688 - RNA, 19 nt, Homo sapiens
  misc_RNA (1)...(19): siRNA sense strand
agaaacaggagcuauuauu

SEQ ID NO: 1232689 - RNA, 19 nt, Homo sapiens
  misc_RNA (1)...(19): siRNA sense strand
ggugugggauuacauacau

SEQ ID NO: 1232690 - RNA, 19 nt, Homo sapiens
  misc_RNA (1)...(19): siRNA sense strand
cuucaugccuaaauaccua

SEQ ID NO: 1232691 - RNA, 19 nt, Homo sapiens
  misc_RNA (1)...(19): siRNA sense strand
caacaucccaacaucucua

SEQ ID NO: 1232692 - RNA, 19 nt, Homo sapiens
  misc_RNA (1)...(19): siRNA sense strand
ucacacaaauagagagaca

SEQ ID NO: 1232693 - RNA, 19 nt, Homo sapiens
  misc_RNA (1)...(19): siRNA sense strand
aaauucaucugcaguucuu

SEQ ID NO: 1232694 - RNA, 19 nt, Homo sapiens
  misc_RNA (1)...(19): siRNA sense strand
aaugacaucuuugcugauu

SEQ ID NO: 1232695 - RNA, 19 nt, Homo sapiens
  misc_RNA (1)...(19): siRNA sense strand
uaauggaagcuuugagauu

SEQ ID NO: 1232696 - RNA, 19 nt, Homo sapiens
  misc_RNA (1)...(19): siRNA sense strand
gcaauccaauuuauaugcu

SEQ ID NO: 1232697 - RNA, 19 nt, Homo sapiens
  misc_RNA (1)...(19): siRNA sense strand
ugaauuccaugcucacaca

SEQ ID NO: 1232698 - RNA, 19 nt, Homo sapiens
  misc_RNA (1)...(19): siRNA sense strand
caacgcaggauccaucaga

SEQ ID NO: 1232699 - RNA, 19 nt, Homo sapiens
  misc_RNA (1)...(19): siRNA sense strand
caaauagagagacaauuca

SEQ ID NO: 1232700 - RNA, 19 nt, Homo sapiens
  misc_RNA (1)...(19): siRNA sense strand
acaaaggaccugacuguuc

SEQ ID NO: 1232701 - RNA, 19 nt, Homo sapiens
  misc_RNA (1)...(19): siRNA sense strand
gaaggacuagagacuaaug

SEQ ID NO: 1232702 - RNA, 19 nt, Homo sapiens
  misc_RNA (1)...(19): siRNA sense strand
aauaugggauccugugugu

SEQ ID NO: 1232703 - RNA, 19 nt, Homo sapiens
  misc_RNA (1)...(19): siRNA sense strand
guuaugggcuuaggcuguu

SEQ ID NO: 1232704 - RNA, 19 nt, Homo sapiens
  misc_RNA (1)...(19): siRNA sense strand
acaguucaaugcauucguu

SEQ ID NO: 1232705 - RNA, 19 nt, Homo sapiens
  misc_RNA (1)...(19): siRNA sense strand
gguauuuccuauauagaag

SEQ ID NO: 1232706 - RNA, 19 nt, Homo sapiens
  misc_RNA (1)...(19): siRNA sense strand
caucagaguguacaaagga

SEQ ID NO: 1232707 - RNA, 19 nt, Homo sapiens
  misc_RNA (1)...(19): siRNA sense strand
gcuauuauugguccuuuga

SEQ ID NO: 1232708 - RNA, 19 nt, Homo sapiens
  misc_RNA (1)...(19): siRNA sense strand
guuccuugaugcuccagua

SEQ ID NO: 1232709 - RNA, 19 nt, Homo sapiens
  misc_RNA (1)...(19): siRNA sense strand
gucuggaucuuauaugaau

SEQ ID NO: 1232710 - RNA, 19 nt, Homo sapiens
  misc_RNA (1)...(19): siRNA sense strand
ucaggcaacuuguccucaa

SEQ ID NO: 1232711 - RNA, 19 nt, Homo sapiens
  misc_RNA (1)...(19): siRNA sense strand
ggaauuccacaagauuuau

SEQ ID NO: 1232712 - RNA, 19 nt, Homo sapiens
  misc_RNA (1)...(19): siRNA sense strand
ggguauuuccuauauagaa

SEQ ID NO: 1232713 - RNA, 19 nt, Homo sapiens
  misc_RNA (1)...(19): siRNA sense strand
ccaaaggaaggacuagaga

SEQ ID NO: 1232714 - RNA, 19 nt, Homo sapiens
  misc_RNA (1)...(19): siRNA sense strand
gaaauucaucugcaguucu

SEQ ID NO: 1232715 - RNA, 19 nt, Homo sapiens
  misc_RNA (1)...(19): siRNA sense strand
gaaaauucuucaguuguug

SEQ ID NO: 1232716 - RNA, 19 nt, Homo sapiens
  misc_RNA (1)...(19): siRNA sense strand
ggauauauaauuggugguu

SEQ ID NO: 1232717 - RNA, 19 nt, Homo sapiens
  misc_RNA (1)...(19): siRNA sense strand
ucuccuucaugccuaaaua

SEQ ID NO: 1232718 - RNA, 19 nt, Homo sapiens
  misc_RNA (1)...(19): siRNA sense strand
ucaaugcauucguuaacau

SEQ ID NO: 1232719 - RNA, 19 nt, Homo sapiens
  misc_RNA (1)...(19): siRNA sense strand
uaagugugauacaguucaa

SEQ ID NO: 1232720 - RNA, 19 nt, Homo sapiens
  misc_RNA (1)...(19): siRNA sense strand
caacuguccaucuaaaaua

SEQ ID NO: 1232721 - RNA, 19 nt, Homo sapiens
  misc_RNA (1)...(19): siRNA sense strand
uguaugaaaucugaagaga

SEQ ID NO: 1232722 - RNA, 19 nt, Homo sapiens
  misc_RNA (1)...(19): siRNA sense strand
ugagcaguuucauuuauuc

SEQ ID NO: 1232723 - RNA, 19 nt, Homo sapiens
  misc_RNA (1)...(19): siRNA sense strand
caggcaacuuguccucaaa

SEQ ID NO: 1232724 - RNA, 19 nt, Homo sapiens
  misc_RNA (1)...(19): siRNA sense strand
aggaauuccacaagauuua

SEQ ID NO: 1232725 - RNA, 19 nt, Homo sapiens
  misc_RNA (1)...(19): siRNA sense strand
aaacaggagcuauuauugg

SEQ ID NO: 1232726 - RNA, 19 nt, Homo sapiens
  misc_RNA (1)...(19): siRNA sense strand
caggauccaucagagugua

SEQ ID NO: 1232727 - RNA, 19 nt, Homo sapiens
  misc_RNA (1)...(19): siRNA sense strand
aaucuacaguuucaguuuc

SEQ ID NO: 1232728 - RNA, 19 nt, Homo sapiens
  misc_RNA (1)...(19): siRNA sense strand
gauccuguguguggaaaca

SEQ ID NO: 1232729 - RNA, 19 nt, Homo sapiens
  misc_RNA (1)...(19): siRNA sense strand
gguuuggcuuucugauuug

SEQ ID NO: 1232730 - RNA, 19 nt, Homo sapiens
  misc_RNA (1)...(19): siRNA sense strand
guacguggaaugggugaaa

SEQ ID NO: 1232731 - RNA, 19 nt, Homo sapiens
  misc_RNA (1)...(19): siRNA sense strand
guaugaaaucugaagagaa

SEQ ID NO: 1232732 - RNA, 19 nt, Homo sapiens
  misc_RNA (1)...(19): siRNA sense strand
caaaauugcagcuguauuc

SEQ ID NO: 1232733 - RNA, 19 nt, Homo sapiens
  misc_RNA (1)...(19): siRNA sense strand
uugcaacuguccaucuaaa

SEQ ID NO: 1232734 - RNA, 19 nt, Homo sapiens
  misc_RNA (1)...(19): siRNA sense strand
ugacaucuuugcugauugc

SEQ ID NO: 1232735 - RNA, 19 nt, Homo sapiens
  misc_RNA (1)...(19): siRNA sense strand
aaacacugucuggaucuua

SEQ ID NO: 1232736 - RNA, 19 nt, Homo sapiens
  misc_RNA (1)...(19): siRNA sense strand
cauccugccuuuggguauu

SEQ ID NO: 1232737 - RNA, 19 nt, Homo sapiens
  misc_RNA (1)...(19): siRNA sense strand
aacaggagcuauuauuggu

SEQ ID NO: 1232738 - RNA, 19 nt, Homo sapiens
  misc_RNA (1)...(19): siRNA sense strand
gacacuggauuugugaaca

SEQ ID NO: 1232739 - RNA, 19 nt, Homo sapiens
  misc_RNA (1)...(19): siRNA sense strand
uaacaugugcauuuguauc

SEQ ID NO: 1232740 - RNA, 19 nt, Homo sapiens
  misc_RNA (1)...(19): siRNA sense strand
ucucaugacuugugaaaau

SEQ ID NO: 1232741 - RNA, 19 nt, Homo sapiens
  misc_RNA (1)...(19): siRNA sense strand
caaucuuucuaauggguau

SEQ ID NO: 1232742 - RNA, 19 nt, Homo sapiens
  misc_RNA (1)...(19): siRNA sense strand
agaacagcaauauggaaua

SEQ ID NO: 1232743 - RNA, 19 nt, Homo sapiens
  misc_RNA (1)...(19): siRNA sense strand
gugauacaguucaaugcau

SEQ ID NO: 1232744 - RNA, 19 nt, Homo sapiens
  misc_RNA (1)...(19): siRNA sense strand
caaacaagcugcccacaua

SEQ ID NO: 1232745 - RNA, 19 nt, Homo sapiens
  misc_RNA (1)...(19): siRNA sense strand
uaacuuaccuccaauaugu

SEQ ID NO: 1232746 - RNA, 19 nt, Homo sapiens
  misc_RNA (1)...(19): siRNA sense strand
gcaauaacaugugcauuug

SEQ ID NO: 1232747 - RNA, 19 nt, Homo sapiens
  misc_RNA (1)...(19): siRNA sense strand
gggcuuaggcuguuucuua

SEQ ID NO: 1232748 - RNA, 19 nt, Homo sapiens
  misc_RNA (1)...(19): siRNA sense strand
caagauuacugucaaacaa

SEQ ID NO: 1232749 - RNA, 19 nt, Homo sapiens
  misc_RNA (1)...(19): siRNA sense strand
gaaacaggagcuauuauug

SEQ ID NO: 1232750 - RNA, 19 nt, Homo sapiens
  misc_RNA (1)...(19): siRNA sense strand
ggaccugacuguuccuuga

SEQ ID NO: 1232751 - RNA, 19 nt, Homo sapiens
  misc_RNA (1)...(19): siRNA sense strand
gugcaaauguuuauguuga

SEQ ID NO: 1232752 - RNA, 19 nt, Homo sapiens
  misc_RNA (1)...(19): siRNA sense strand
gaugcaaucuuucuaaugg

SEQ ID NO: 1232753 - RNA, 19 nt, Homo sapiens
  misc_RNA (1)...(19): siRNA sense strand
guagaaacaggagcuauua

SEQ ID NO: 1232754 - RNA, 19 nt, Homo sapiens
  misc_RNA (1)...(19): siRNA sense strand
gaaggaauuccacaagauu

SEQ ID NO: 1232755 - RNA, 19 nt, Homo sapiens
  misc_RNA (1)...(19): siRNA sense strand
aagaagaggucaagaagga

SEQ ID NO: 1232756 - RNA, 19 nt, Homo sapiens
  misc_RNA (1)...(19): siRNA sense strand
ggcaauaacaugugcauuu

SEQ ID NO: 1232757 - RNA, 19 nt, Homo sapiens
  misc_RNA (1)...(19): siRNA sense strand
cuaguuggauucauuaaug

SEQ ID NO: 1232758 - RNA, 19 nt, Homo sapiens
  misc_RNA (1)...(19): siRNA sense strand
gauugcaacuguccaucua

SEQ ID NO: 1232759 - RNA, 19 nt, Homo sapiens
  misc_RNA (1)...(19): siRNA sense strand
uaugaaaucugaagagaag

SEQ ID NO: 1232760 - RNA, 19 nt, Homo sapiens
  misc_RNA (1)...(19): siRNA sense strand
ccaacacacuuccaaagga

SEQ ID NO: 1232761 - RNA, 19 nt, Homo sapiens
  misc_RNA (1)...(19): siRNA sense strand
guacaaaggaaguuaaauc

SEQ ID NO: 1232762 - RNA, 19 nt, Homo sapiens
  misc_RNA (1)...(19): siRNA sense strand
ggcauuggaugugugguua

SEQ ID NO: 1232763 - RNA, 19 nt, Homo sapiens
  misc_RNA (1)...(19): siRNA sense strand
ggaaauucaucugcaguuc

SEQ ID NO: 1232764 - RNA, 19 nt, Homo sapiens
  misc_RNA (1)...(19): siRNA sense strand
gaagaggucaagaaggaaa

SEQ ID NO: 1232765 - RNA, 19 nt, Homo sapiens
  misc_RNA (1)...(19): siRNA sense strand
gaaucuacaguuucaguuu

SEQ ID NO: 1232766 - RNA, 19 nt, Homo sapiens
  misc_RNA (1)...(19): siRNA sense strand
ggcuuaggcuguuucuuaa

SEQ ID NO: 1232767 - RNA, 19 nt, Homo sapiens
  misc_RNA (1)...(19): siRNA sense strand
ugagguguaugaaaucuga

SEQ ID NO: 1232768 - RNA, 19 nt, Homo sapiens
  misc_RNA (1)...(19): siRNA sense strand
gaacgggaauaaacauggu

SEQ ID NO: 1232769 - RNA, 19 nt, Homo sapiens
  misc_RNA (1)...(19): siRNA sense strand
aauggaagcuuugagauug

SEQ ID NO: 1232770 - RNA, 19 nt, Homo sapiens
  misc_RNA (1)...(19): siRNA sense strand
ugguuuggcuuucugauuu

SEQ ID NO: 1232771 - RNA, 19 nt, Homo sapiens
  misc_RNA (1)...(19): siRNA sense strand
ugaaggaauuccacaagau

SEQ ID NO: 1232772 - RNA, 19 nt, Homo sapiens
  misc_RNA (1)...(19): siRNA sense strand
aaauaccucuuaugaagga

SEQ ID NO: 1232773 - RNA, 19 nt, Homo sapiens
  misc_RNA (1)...(19): siRNA sense strand
aggaaggacuagagacuaa

SEQ ID NO: 1232774 - RNA, 19 nt, Homo sapiens
  misc_RNA (1)...(19): siRNA sense strand
ggauauaugguucucuuga

SEQ ID NO: 1232775 - RNA, 19 nt, Homo sapiens
  misc_RNA (1)...(19): siRNA sense strand
aauugcagcuguauucaaa

SEQ ID NO: 1232776 - RNA, 19 nt, Homo sapiens
  misc_RNA (1)...(19): siRNA sense strand
caacuuguccucaaacagu

SEQ ID NO: 1232777 - RNA, 19 nt, Homo sapiens
  misc_RNA (1)...(19): siRNA sense strand
cgacaaaggaccugacugu

SEQ ID NO: 1232778 - RNA, 19 nt, Homo sapiens
  misc_RNA (1)...(19): siRNA sense strand
gcagcuguauucaaacauc

SEQ ID NO: 1232779 - RNA, 19 nt, Homo sapiens
  misc_RNA (1)...(19): siRNA sense strand
acaaauagagagacaauuc

SEQ ID NO: 1232780 - RNA, 19 nt, Homo sapiens
  misc_RNA (1)...(19): siRNA sense strand
ugauacaguucaaugcauu

SEQ ID NO: 1232781 - RNA, 19 nt, Homo sapiens
  misc_RNA (1)...(19): siRNA sense strand
gagcuauuauugguccuuu

SEQ ID NO: 1232782 - RNA, 19 nt, Homo sapiens
  misc_RNA (1)...(19): siRNA sense strand
aaacucccauccugccuuu

SEQ ID NO: 1232783 - RNA, 19 nt, Homo sapiens
  misc_RNA (1)...(19): siRNA sense strand
gcaaauguuuauguugaca

SEQ ID NO: 1232784 - RNA, 19 nt, Homo sapiens
  misc_RNA (1)...(19): siRNA sense strand
gauauaugguucucuugag

SEQ ID NO: 1232785 - RNA, 19 nt, Homo sapiens
  misc_RNA (1)...(19): siRNA sense strand
ugucagcgaugagcaguuu

SEQ ID NO: 1232786 - RNA, 19 nt, Homo sapiens
  misc_RNA (1)...(19): siRNA sense strand
ucaaacaucaggaaauuca

SEQ ID NO: 1232787 - RNA, 19 nt, Homo sapiens
  misc_RNA (1)...(19): siRNA sense strand
guucaagauuacugucaaa

SEQ ID NO: 1232788 - RNA, 19 nt, Homo sapiens
  misc_RNA (1)...(19): siRNA sense strand
agaaacaggagcuauuauu

SEQ ID NO: 1232789 - RNA, 19 nt, Homo sapiens
  misc_RNA (1)...(19): siRNA sense strand
ggugugggauuacauacau

SEQ ID NO: 1232790 - RNA, 19 nt, Homo sapiens
  misc_RNA (1)...(19): siRNA sense strand
cuucaugccuaaauaccua

SEQ ID NO: 1232791 - RNA, 19 nt, Homo sapiens
  misc_RNA (1)...(19): siRNA sense strand
caacaucccaacaucucua

SEQ ID NO: 1232792 - RNA, 19 nt, Homo sapiens
  misc_RNA (1)...(19): siRNA sense strand
ucacacaaauagagagaca

SEQ ID NO: 1232793 - RNA, 19 nt, Homo sapiens
  misc_RNA (1)...(19): siRNA sense strand
aaauucaucugcaguucuu

SEQ ID NO: 1232794 - RNA, 19 nt, Homo sapiens
  misc_RNA (1)...(19): siRNA sense strand
aaugacaucuuugcugauu

SEQ ID NO: 1232795 - RNA, 19 nt, Homo sapiens
  misc_RNA (1)...(19): siRNA sense strand
uaauggaagcuuugagauu

SEQ ID NO: 1232796 - RNA, 19 nt, Homo sapiens
  misc_RNA (1)...(19): siRNA sense strand
gcaauccaauuuauaugcu

SEQ ID NO: 1232797 - RNA, 19 nt, Homo sapiens
  misc_RNA (1)...(19): siRNA sense strand
ugaauuccaugcucacaca

SEQ ID NO: 1232798 - RNA, 19 nt, Homo sapiens
  misc_RNA (1)...(19): siRNA sense strand
caacgcaggauccaucaga

SEQ ID NO: 1232799 - RNA, 19 nt, Homo sapiens
  misc_RNA (1)...(19): siRNA sense strand
caaauagagagacaauuca

SEQ ID NO: 1232800 - RNA, 19 nt, Homo sapiens
  misc_RNA (1)...(19): siRNA sense strand
acaaaggaccugacuguuc

SEQ ID NO: 1232801 - RNA, 19 nt, Homo sapiens
  misc_RNA (1)...(19): siRNA sense strand
gaaggacuagagacuaaug

SEQ ID NO: 1232802 - RNA, 19 nt, Homo sapiens
  misc_RNA (1)...(19): siRNA sense strand
aauaugggauccugugugu

SEQ ID NO: 1232803 - RNA, 19 nt, Homo sapiens
  misc_RNA (1)...(19): siRNA sense strand
guuaugggcuuaggcuguu

SEQ ID NO: 1232804 - RNA, 19 nt, Homo sapiens
  misc_RNA (1)...(19): siRNA sense strand
acaguucaaugcauucguu

SEQ ID NO: 1232805 - RNA, 19 nt, Homo sapiens
  misc_RNA (1)...(19): siRNA sense strand
gguauuuccuauauagaag

SEQ ID NO: 1232806 - RNA, 19 nt, Homo sapiens
  misc_RNA (1)...(19): siRNA sense strand
caucagaguguacaaagga

SEQ ID NO: 1232807 - RNA, 19 nt, Homo sapiens
  misc_RNA (1)...(19): siRNA sense strand
gcuauuauugguccuuuga

SEQ ID NO: 1232808 - RNA, 19 nt, Homo sapiens
  misc_RNA (1)...(19): siRNA sense strand
guuccuugaugcuccagua

SEQ ID NO: 1232809 - RNA, 19 nt, Homo sapiens
  misc_RNA (1)...(19): siRNA sense strand
gucuggaucuuauaugaau

SEQ ID NO: 1232810 - RNA, 19 nt, Homo sapiens
  misc_RNA (1)...(19): siRNA sense strand
ucaggcaacuuguccucaa

SEQ ID NO: 1232811 - RNA, 19 nt, Homo sapiens
  misc_RNA (1)...(19): siRNA sense strand
ggaauuccacaagauuuau

SEQ ID NO: 1232812 - RNA, 19 nt, Homo sapiens
  misc_RNA (1)...(19): siRNA sense strand
ggguauuuccuauauagaa

SEQ ID NO: 1232813 - RNA, 19 nt, Homo sapiens
  misc_RNA (1)...(19): siRNA sense strand
ccaaaggaaggacuagaga

SEQ ID NO: 1232814 - RNA, 19 nt, Homo sapiens
  misc_RNA (1)...(19): siRNA sense strand
gaaauucaucugcaguucu

SEQ ID NO: 1232815 - RNA, 19 nt, Homo sapiens
  misc_RNA (1)...(19): siRNA sense strand
gaaaauucuucaguuguug

SEQ ID NO: 1232816 - RNA, 19 nt, Homo sapiens
  misc_RNA (1)...(19): siRNA sense strand
ggauauauaauuggugguu

SEQ ID NO: 1232817 - RNA, 19 nt, Homo sapiens
  misc_RNA (1)...(19): siRNA sense strand
ucuccuucaugccuaaaua

SEQ ID NO: 1232818 - RNA, 19 nt, Homo sapiens
  misc_RNA (1)...(19): siRNA sense strand
ucaaugcauucguuaacau

SEQ ID NO: 1232819 - RNA, 19 nt, Homo sapiens
  misc_RNA (1)...(19): siRNA sense strand
uaagugugauacaguucaa

SEQ ID NO: 1232820 - RNA, 19 nt, Homo sapiens
  misc_RNA (1)...(19): siRNA sense strand
caacuguccaucuaaaaua

SEQ ID NO: 1232821 - RNA, 19 nt, Homo sapiens
  misc_RNA (1)...(19): siRNA sense strand
uguaugaaaucugaagaga

SEQ ID NO: 1232822 - RNA, 19 nt, Homo sapiens
  misc_RNA (1)...(19): siRNA sense strand
ugagcaguuucauuuauuc

SEQ ID NO: 1232823 - RNA, 19 nt, Homo sapiens
  misc_RNA (1)...(19): siRNA sense strand
caggcaacuuguccucaaa

SEQ ID NO: 1232824 - RNA, 19 nt, Homo sapiens
  misc_RNA (1)...(19): siRNA sense strand
aggaauuccacaagauuua

SEQ ID NO: 1232825 - RNA, 19 nt, Homo sapiens
  misc_RNA (1)...(19): siRNA sense strand
aaacaggagcuauuauugg

SEQ ID NO: 1232826 - RNA, 19 nt, Homo sapiens
  misc_RNA (1)...(19): siRNA sense strand
caggauccaucagagugua

SEQ ID NO: 1232827 - RNA, 19 nt, Homo sapiens
  misc_RNA (1)...(19): siRNA sense strand
aaucuacaguuucaguuuc

SEQ ID NO: 1232828 - RNA, 19 nt, Homo sapiens
  misc_RNA (1)...(19): siRNA sense strand
gauccuguguguggaaaca

SEQ ID NO: 1232829 - RNA, 19 nt, Homo sapiens
  misc_RNA (1)...(19): siRNA sense strand
gguuuggcuuucugauuug

SEQ ID NO: 1232830 - RNA, 19 nt, Homo sapiens
  misc_RNA (1)...(19): siRNA sense strand
guacguggaaugggugaaa

SEQ ID NO: 1232831 - RNA, 19 nt, Homo sapiens
  misc_RNA (1)...(19): siRNA sense strand
guaugaaaucugaagagaa

SEQ ID NO: 1232832 - RNA, 19 nt, Homo sapiens
  misc_RNA (1)...(19): siRNA sense strand
caaaauugcagcuguauuc

SEQ ID NO: 1232833 - RNA, 19 nt, Homo sapiens
  misc_RNA (1)...(19): siRNA sense strand
uugcaacuguccaucuaaa

SEQ ID NO: 1232834 - RNA, 19 nt, Homo sapiens
  misc_RNA (1)...(19): siRNA sense strand
ugacaucuuugcugauugc

SEQ ID NO: 1232835 - RNA, 19 nt, Homo sapiens
  misc_RNA (1)...(19): siRNA sense strand
aaacacugucuggaucuua

SEQ ID NO: 1232836 - RNA, 19 nt, Homo sapiens
  misc_RNA (1)...(19): siRNA sense strand
cauccugccuuuggguauu

SEQ ID NO: 1232837 - RNA, 19 nt, Homo sapiens
  misc_RNA (1)...(19): siRNA sense strand
aacaggagcuauuauuggu

SEQ ID NO: 1232838 - RNA, 19 nt, Homo sapiens
  misc_RNA (1)...(19): siRNA sense strand
gacacuggauuugugaaca

SEQ ID NO: 1232839 - RNA, 19 nt, Homo sapiens
  misc_RNA (1)...(19): siRNA sense strand
uaacaugugcauuuguauc

SEQ ID NO: 1232840 - RNA, 19 nt, Homo sapiens
  misc_RNA (1)...(19): siRNA sense strand
ucucaugacuugugaaaau

SEQ ID NO: 1232841 - RNA, 19 nt, Homo sapiens
  misc_RNA (1)...(19): siRNA sense strand
caaucuuucuaauggguau

SEQ ID NO: 1232842 - RNA, 19 nt, Homo sapiens
  misc_RNA (1)...(19): siRNA sense strand
agaacagcaauauggaaua

SEQ ID NO: 1232843 - RNA, 19 nt, Homo sapiens
  misc_RNA (1)...(19): siRNA sense strand
gugauacaguucaaugcau

SEQ ID NO: 1232844 - RNA, 19 nt, Homo sapiens
  misc_RNA (1)...(19): siRNA sense strand
gcacaccgccuugcacaua

SEQ ID NO: 1232845 - RNA, 19 nt, Homo sapiens
  misc_RNA (1)...(19): siRNA sense strand
gaaagaagagacagcaaag

SEQ ID NO: 1232846 - RNA, 19 nt, Homo sapiens
  misc_RNA (1)...(19): siRNA sense strand
caaagcaucagcaccagaa

SEQ ID NO: 1232847 - RNA, 19 nt, Homo sapiens
  misc_RNA (1)...(19): siRNA sense strand
cuucuucguugcuguaauu

SEQ ID NO: 1232848 - RNA, 19 nt, Homo sapiens
  misc_RNA (1)...(19): siRNA sense strand
cuucguugcuguaauugaa

SEQ ID NO: 1232849 - RNA, 19 nt, Homo sapiens
  misc_RNA (1)...(19): siRNA sense strand
agaaagaagagacagcaaa

SEQ ID NO: 1232850 - RNA, 19 nt, Homo sapiens
  misc_RNA (1)...(19): siRNA sense strand
caaagagaaagaagagaca

SEQ ID NO: 1232851 - RNA, 19 nt, Homo sapiens
  misc_RNA (1)...(19): siRNA sense strand
gccaggaggagaaugaaga

SEQ ID NO: 1232852 - RNA, 19 nt, Homo sapiens
  misc_RNA (1)...(19): siRNA sense strand
gagaaagaagagacagcaa

SEQ ID NO: 1232853 - RNA, 19 nt, Homo sapiens
  misc_RNA (1)...(19): siRNA sense strand
uaauugaacgggucgagau

SEQ ID NO: 1232854 - RNA, 19 nt, Homo sapiens
  misc_RNA (1)...(19): siRNA sense strand
aagaagagacagcaaagag

SEQ ID NO: 1232855 - RNA, 19 nt, Homo sapiens
  misc_RNA (1)...(19): siRNA sense strand
aaagaagagacagcaaaga

SEQ ID NO: 1232856 - RNA, 19 nt, Homo sapiens
  misc_RNA (1)...(19): siRNA sense strand
gaacuacacgguuuaauuc

SEQ ID NO: 1232857 - RNA, 19 nt, Homo sapiens
  misc_RNA (1)...(19): siRNA sense strand
ggaccauuaucauuccuua

SEQ ID NO: 1232858 - RNA, 19 nt, Homo sapiens
  misc_RNA (1)...(19): siRNA sense strand
ggaaggaccauuaucauuc

SEQ ID NO: 1232859 - RNA, 19 nt, Homo sapiens
  misc_RNA (1)...(19): siRNA sense strand
cagaaacuguugauuguug

SEQ ID NO: 1232860 - RNA, 19 nt, Homo sapiens
  misc_RNA (1)...(19): siRNA sense strand
aagaagaacuacacgguuu

SEQ ID NO: 1232861 - RNA, 19 nt, Homo sapiens
  misc_RNA (1)...(19): siRNA sense strand
ucagaaaucuccagucaag

SEQ ID NO: 1232862 - RNA, 19 nt, Homo sapiens
  misc_RNA (1)...(19): siRNA sense strand
aaggguaucucucggauuu

SEQ ID NO: 1232863 - RNA, 19 nt, Homo sapiens
  misc_RNA (1)...(19): siRNA sense strand
ggaggaaggaccauuauca

SEQ ID NO: 1232864 - RNA, 19 nt, Homo sapiens
  misc_RNA (1)...(19): siRNA sense strand
gcgaauuacuacuuugguu

SEQ ID NO: 1232865 - RNA, 19 nt, Homo sapiens
  misc_RNA (1)...(19): siRNA sense strand
cccagaagcuugcuauuca

SEQ ID NO: 1232866 - RNA, 19 nt, Homo sapiens
  misc_RNA (1)...(19): siRNA sense strand
gaagacagcccagaagcuu

SEQ ID NO: 1232867 - RNA, 19 nt, Homo sapiens
  misc_RNA (1)...(19): siRNA sense strand
uggaggagccuauggauaa

SEQ ID NO: 1232868 - RNA, 19 nt, Homo sapiens
  misc_RNA (1)...(19): siRNA sense strand
gaagaacuacacgguuuaa

SEQ ID NO: 1232869 - RNA, 19 nt, Homo sapiens
  misc_RNA (1)...(19): siRNA sense strand
ggagcuuucugaccuugaa

SEQ ID NO: 1232870 - RNA, 19 nt, Homo sapiens
  misc_RNA (1)...(19): siRNA sense strand
gaagcuugcuauucagaag

SEQ ID NO: 1232871 - RNA, 19 nt, Homo sapiens
  misc_RNA (1)...(19): siRNA sense strand
gacaaaaccuugcuagugu

SEQ ID NO: 1232872 - RNA, 19 nt, Homo sapiens
  misc_RNA (1)...(19): siRNA sense strand
uaaggcaguucaacaucaa

SEQ ID NO: 1232873 - RNA, 19 nt, Homo sapiens
  misc_RNA (1)...(19): siRNA sense strand
gaagcaguauggccaagag

SEQ ID NO: 1232874 - RNA, 19 nt, Homo sapiens
  misc_RNA (1)...(19): siRNA sense strand
ucagaaggcuuugucagau

SEQ ID NO: 1232875 - RNA, 19 nt, Homo sapiens
  misc_RNA (1)...(19): siRNA sense strand
gaaggaccauuaucauucc

SEQ ID NO: 1232876 - RNA, 19 nt, Homo sapiens
  misc_RNA (1)...(19): siRNA sense strand
gguggaggaaggaccauua

SEQ ID NO: 1232877 - RNA, 19 nt, Homo sapiens
  misc_RNA (1)...(19): siRNA sense strand
uaaaauagcuguggaguac

SEQ ID NO: 1232878 - RNA, 19 nt, Homo sapiens
  misc_RNA (1)...(19): siRNA sense strand
guugauuguuguucuagaa

SEQ ID NO: 1232879 - RNA, 19 nt, Homo sapiens
  misc_RNA (1)...(19): siRNA sense strand
cgaauuacuacuuugguuu

SEQ ID NO: 1232880 - RNA, 19 nt, Homo sapiens
  misc_RNA (1)...(19): siRNA sense strand
agaacuacacgguuuaauu

SEQ ID NO: 1232881 - RNA, 19 nt, Homo sapiens
  misc_RNA (1)...(19): siRNA sense strand
cagaaggcuuugucagaug

SEQ ID NO: 1232882 - RNA, 19 nt, Homo sapiens
  misc_RNA (1)...(19): siRNA sense strand
gaauuacuacuuugguuuc

SEQ ID NO: 1232883 - RNA, 19 nt, Homo sapiens
  misc_RNA (1)...(19): siRNA sense strand
uccagaaacuguugauugu

SEQ ID NO: 1232884 - RNA, 19 nt, Homo sapiens
  misc_RNA (1)...(19): siRNA sense strand
guccgggucuucccaaaug

SEQ ID NO: 1232885 - RNA, 19 nt, Homo sapiens
  misc_RNA (1)...(19): siRNA sense strand
gaaaucuccagucaagguu

SEQ ID NO: 1232886 - RNA, 19 nt, Homo sapiens
  misc_RNA (1)...(19): siRNA sense strand
ucuaugccgucauuaaguu

SEQ ID NO: 1232887 - RNA, 19 nt, Homo sapiens
  misc_RNA (1)...(19): siRNA sense strand
guacagacccagugaagac

SEQ ID NO: 1232888 - RNA, 19 nt, Homo sapiens
  misc_RNA (1)...(19): siRNA sense strand
cagaugcgaagaagaacua

SEQ ID NO: 1232889 - RNA, 19 nt, Homo sapiens
  misc_RNA (1)...(19): siRNA sense strand
ugucagaugcgaagaagaa

SEQ ID NO: 1232890 - RNA, 19 nt, Homo sapiens
  misc_RNA (1)...(19): siRNA sense strand
agaagaacuacacgguuua

SEQ ID NO: 1232891 - RNA, 19 nt, Homo sapiens
  misc_RNA (1)...(19): siRNA sense strand
cuacacgguuuaauucaag

SEQ ID NO: 1232892 - RNA, 19 nt, Homo sapiens
  misc_RNA (1)...(19): siRNA sense strand
gaagcaaagccugaaguuc

SEQ ID NO: 1232893 - RNA, 19 nt, Homo sapiens
  misc_RNA (1)...(19): siRNA sense strand
ggguaucucucggauuuca

SEQ ID NO: 1232894 - RNA, 19 nt, Homo sapiens
  misc_RNA (1)...(19): siRNA sense strand
auaaggcaguucaacauca

SEQ ID NO: 1232895 - RNA, 19 nt, Homo sapiens
  misc_RNA (1)...(19): siRNA sense strand
gccgaggcuuugcaucauu

SEQ ID NO: 1232896 - RNA, 19 nt, Homo sapiens
  misc_RNA (1)...(19): siRNA sense strand
gcaguggcccauccugguu

SEQ ID NO: 1232897 - RNA, 19 nt, Homo sapiens
  misc_RNA (1)...(19): siRNA sense strand
gauuguuguucuagaaagu

SEQ ID NO: 1232898 - RNA, 19 nt, Homo sapiens
  misc_RNA (1)...(19): siRNA sense strand
gaggaaggaccauuaucau

SEQ ID NO: 1232899 - RNA, 19 nt, Homo sapiens
  misc_RNA (1)...(19): siRNA sense strand
ggaggagccuauggauaag

SEQ ID NO: 1232900 - RNA, 19 nt, Homo sapiens
  misc_RNA (1)...(19): siRNA sense strand
aagcaaagccugaaguucu

SEQ ID NO: 1232901 - RNA, 19 nt, Homo sapiens
  misc_RNA (1)...(19): siRNA sense strand
gacauaaggcaguucaaca

SEQ ID NO: 1232902 - RNA, 19 nt, Homo sapiens
  misc_RNA (1)...(19): siRNA sense strand
cgaagcaaagccugaaguu

SEQ ID NO: 1232903 - RNA, 19 nt, Homo sapiens
  misc_RNA (1)...(19): siRNA sense strand
ucagaugcauuccagaaac

SEQ ID NO: 1232904 - RNA, 19 nt, Homo sapiens
  misc_RNA (1)...(19): siRNA sense strand
gaagugguguugccauccu

SEQ ID NO: 1232905 - RNA, 19 nt, Homo sapiens
  misc_RNA (1)...(19): siRNA sense strand
aaaggaagacagcccagaa

SEQ ID NO: 1232906 - RNA, 19 nt, Homo sapiens
  misc_RNA (1)...(19): siRNA sense strand
ggcccauccugguuucuau

SEQ ID NO: 1232907 - RNA, 19 nt, Homo sapiens
  misc_RNA (1)...(19): siRNA sense strand
ccaagaggaggaaggguau

SEQ ID NO: 1232908 - RNA, 19 nt, Homo sapiens
  misc_RNA (1)...(19): siRNA sense strand
caguuuggccuucuguauu

SEQ ID NO: 1232909 - RNA, 19 nt, Homo sapiens
  misc_RNA (1)...(19): siRNA sense strand
gaaggguaucucucggauu

SEQ ID NO: 1232910 - RNA, 19 nt, Homo sapiens
  misc_RNA (1)...(19): siRNA sense strand
gaaacuguugauuguuguu

SEQ ID NO: 1232911 - RNA, 19 nt, Homo sapiens
  misc_RNA (1)...(19): siRNA sense strand
gcccagaagcuugcuauuc

SEQ ID NO: 1232912 - RNA, 19 nt, Homo sapiens
  misc_RNA (1)...(19): siRNA sense strand
guggaggagccuauggaua

SEQ ID NO: 1232913 - RNA, 19 nt, Homo sapiens
  misc_RNA (1)...(19): siRNA sense strand
gauagcauggugccacuuc

SEQ ID NO: 1232914 - RNA, 19 nt, Homo sapiens
  misc_RNA (1)...(19): siRNA sense strand
caccagacauaaggcaguu

SEQ ID NO: 1232915 - RNA, 19 nt, Homo sapiens
  misc_RNA (1)...(19): siRNA sense strand
guguugccauccugugauu

SEQ ID NO: 1232916 - RNA, 19 nt, Homo sapiens
  misc_RNA (1)...(19): siRNA sense strand
gcccuugcccugaacaguu

SEQ ID NO: 1232917 - RNA, 19 nt, Homo sapiens
  misc_RNA (1)...(19): siRNA sense strand
agcaaagccugaaguucuu

SEQ ID NO: 1232918 - RNA, 19 nt, Homo sapiens
  misc_RNA (1)...(19): siRNA sense strand
aaaggaucaucaagcuuca

SEQ ID NO: 1232919 - RNA, 19 nt, Homo sapiens
  misc_RNA (1)...(19): siRNA sense strand
agaaacuguugauuguugu

SEQ ID NO: 1232920 - RNA, 19 nt, Homo sapiens
  misc_RNA (1)...(19): siRNA sense strand
gaguacagacccagugaag

SEQ ID NO: 1232921 - RNA, 19 nt, Homo sapiens
  misc_RNA (1)...(19): siRNA sense strand
aguuuggccuucuguauuc

SEQ ID NO: 1232922 - RNA, 19 nt, Homo sapiens
  misc_RNA (1)...(19): siRNA sense strand
ggaagcaguauggccaaga

SEQ ID NO: 1232923 - RNA, 19 nt, Homo sapiens
  misc_RNA (1)...(19): siRNA sense strand
ggugucagaugcgaagaag

SEQ ID NO: 1232924 - RNA, 19 nt, Homo sapiens
  misc_RNA (1)...(19): siRNA sense strand
cagaugcauuccagaaacu

SEQ ID NO: 1232925 - RNA, 19 nt, Homo sapiens
  misc_RNA (1)...(19): siRNA sense strand
ggaagacagcccagaagcu

SEQ ID NO: 1232926 - RNA, 19 nt, Homo sapiens
  misc_RNA (1)...(19): siRNA sense strand
aggaaggaccauuaucauu

SEQ ID NO: 1232927 - RNA, 19 nt, Homo sapiens
  misc_RNA (1)...(19): siRNA sense strand
gaagaaagggaaaaugaag

SEQ ID NO: 1232928 - RNA, 19 nt, Homo sapiens
  misc_RNA (1)...(19): siRNA sense strand
ccaaaaggaucaucaagcu

SEQ ID NO: 1232929 - RNA, 19 nt, Homo sapiens
  misc_RNA (1)...(19): siRNA sense strand
agaaaucuccagucaaggu

SEQ ID NO: 1232930 - RNA, 19 nt, Homo sapiens
  misc_RNA (1)...(19): siRNA sense strand
acuacacgguuuaauucaa

SEQ ID NO: 1232931 - RNA, 19 nt, Homo sapiens
  misc_RNA (1)...(19): siRNA sense strand
ccgaggcuuugcaucauuc

SEQ ID NO: 1232932 - RNA, 19 nt, Homo sapiens
  misc_RNA (1)...(19): siRNA sense strand
ggaguacagacccagugaa

SEQ ID NO: 1232933 - RNA, 19 nt, Homo sapiens
  misc_RNA (1)...(19): siRNA sense strand
acuggcgaauuacuacuuu

SEQ ID NO: 1232934 - RNA, 19 nt, Homo sapiens
  misc_RNA (1)...(19): siRNA sense strand
aagaacuggcgaauuacua

SEQ ID NO: 1232935 - RNA, 19 nt, Homo sapiens
  misc_RNA (1)...(19): siRNA sense strand
ggccgaggcuuugcaucau

SEQ ID NO: 1232936 - RNA, 19 nt, Homo sapiens
  misc_RNA (1)...(19): siRNA sense strand
ucaguuuggccuucuguau

SEQ ID NO: 1232937 - RNA, 19 nt, Homo sapiens
  misc_RNA (1)...(19): siRNA sense strand
guuucuaugccgucauuaa

SEQ ID NO: 1232938 - RNA, 19 nt, Homo sapiens
  misc_RNA (1)...(19): siRNA sense strand
ucacagcauuuucucaguu

SEQ ID NO: 1232939 - RNA, 19 nt, Homo sapiens
  misc_RNA (1)...(19): siRNA sense strand
guaaaauagcuguggagua

SEQ ID NO: 1232940 - RNA, 19 nt, Homo sapiens
  misc_RNA (1)...(19): siRNA sense strand
ugucagaugcauuccagaa

SEQ ID NO: 1232941 - RNA, 19 nt, Homo sapiens
  misc_RNA (1)...(19): siRNA sense strand
cauaaggcaguucaacauc

SEQ ID NO: 1232942 - RNA, 19 nt, Homo sapiens
  misc_RNA (1)...(19): siRNA sense strand
gcuuggaggaggaagaguu

SEQ ID NO: 1232943 - RNA, 19 nt, Homo sapiens
  misc_RNA (1)...(19): siRNA sense strand
gcaucauucucuguucaca

SEQ ID NO: 1232944 - RNA, 19 nt, Homo sapiens
  misc_RNA (1)...(19): siRNA sense strand
ccagaagcuugcuauucag

SEQ ID NO: 1232945 - RNA, 19 nt, Homo sapiens
  misc_RNA (1)...(19): siRNA sense strand
gaaagggaaaaugaagaua

SEQ ID NO: 1232946 - RNA, 19 nt, Homo sapiens
  misc_RNA (1)...(19): siRNA sense strand
cagaagcuugcuauucaga

SEQ ID NO: 1232947 - RNA, 19 nt, Homo sapiens
  misc_RNA (1)...(19): siRNA sense strand
ugguuucuaugccgucauu

SEQ ID NO: 1232948 - RNA, 19 nt, Homo sapiens
  misc_RNA (1)...(19): siRNA sense strand
uuccagaaacuguugauug

SEQ ID NO: 1232949 - RNA, 19 nt, Homo sapiens
  misc_RNA (1)...(19): siRNA sense strand
gucagaugcauuccagaaa

SEQ ID NO: 1232950 - RNA, 19 nt, Homo sapiens
  misc_RNA (1)...(19): siRNA sense strand
ccagaaacuguugauuguu

SEQ ID NO: 1232951 - RNA, 19 nt, Homo sapiens
  misc_RNA (1)...(19): siRNA sense strand
acauaaggcaguucaacau

SEQ ID NO: 1232952 - RNA, 19 nt, Homo sapiens
  misc_RNA (1)...(19): siRNA sense strand
acuguugauuguuguucua

SEQ ID NO: 1232953 - RNA, 19 nt, Homo sapiens
  misc_RNA (1)...(19): siRNA sense strand
ccagacauaaggcaguuca

SEQ ID NO: 1232954 - RNA, 19 nt, Homo sapiens
  misc_RNA (1)...(19): siRNA sense strand
caagaacuggcgaauuacu

SEQ ID NO: 1232955 - RNA, 19 nt, Homo sapiens
  misc_RNA (1)...(19): siRNA sense strand
ccaaggacaugaagaacaa

SEQ ID NO: 1232956 - RNA, 19 nt, Homo sapiens
  misc_RNA (1)...(19): siRNA sense strand
ucaagaaggucaagucaca

SEQ ID NO: 1232957 - RNA, 19 nt, Homo sapiens
  misc_RNA (1)...(19): siRNA sense strand
uggagaagcugcugguuca

SEQ ID NO: 1232958 - RNA, 19 nt, Homo sapiens
  misc_RNA (1)...(19): siRNA sense strand
ggacucguacccucgcuuu

SEQ ID NO: 1232959 - RNA, 19 nt, Homo sapiens
  misc_RNA (1)...(19): siRNA sense strand
gcuucgaccuggcacagaa

SEQ ID NO: 1232960 - RNA, 19 nt, Homo sapiens
  misc_RNA (1)...(19): siRNA sense strand
agaagcugcugguucacaa

SEQ ID NO: 1232961 - RNA, 19 nt, Homo sapiens
  misc_RNA (1)...(19): siRNA sense strand
gugaggagaaucuggaguu

SEQ ID NO: 1232962 - RNA, 19 nt, Homo sapiens
  misc_RNA (1)...(19): siRNA sense strand
gaagcugcugguucacaaa

SEQ ID NO: 1232963 - RNA, 19 nt, Homo sapiens
  misc_RNA (1)...(19): siRNA sense strand
cauccaaggccaagaagau

SEQ ID NO: 1232964 - RNA, 19 nt, Homo sapiens
  misc_RNA (1)...(19): siRNA sense strand
gcugcugguucacaaauac

SEQ ID NO: 1232965 - RNA, 19 nt, Homo sapiens
  misc_RNA (1)...(19): siRNA sense strand
ucacaaauacggguuagca

SEQ ID NO: 1232966 - RNA, 19 nt, Homo sapiens
  misc_RNA (1)...(19): siRNA sense strand
cuuauuaaccagaagaaga

SEQ ID NO: 1232967 - RNA, 19 nt, Homo sapiens
  misc_RNA (1)...(19): siRNA sense strand
cauucaagcccaccucaga

SEQ ID NO: 1232968 - RNA, 19 nt, Homo sapiens
  misc_RNA (1)...(19): siRNA sense strand
ugaggagaaucuggaguuc

SEQ ID NO: 1232969 - RNA, 19 nt, Homo sapiens
  misc_RNA (1)...(19): siRNA sense strand
gggcaaggcagacaaaaug

SEQ ID NO: 1232970 - RNA, 19 nt, Homo sapiens
  misc_RNA (1)...(19): siRNA sense strand
caucuucgggcucauggaa

SEQ ID NO: 1232971 - RNA, 19 nt, Homo sapiens
  misc_RNA (1)...(19): siRNA sense strand
gccaaggacaugaagaaca

SEQ ID NO: 1232972 - RNA, 19 nt, Homo sapiens
  misc_RNA (1)...(19): siRNA sense strand
ugaguucagugaggagaau

SEQ ID NO: 1232973 - RNA, 19 nt, Homo sapiens
  misc_RNA (1)...(19): siRNA sense strand
gagaagcugcugguucaca

SEQ ID NO: 1232974 - RNA, 19 nt, Homo sapiens
  misc_RNA (1)...(19): siRNA sense strand
ggaccuuauuaaccagaag

SEQ ID NO: 1232975 - RNA, 19 nt, Homo sapiens
  misc_RNA (1)...(19): siRNA sense strand
gggagcacaccaaggacaa

SEQ ID NO: 1232976 - RNA, 19 nt, Homo sapiens
  misc_RNA (1)...(19): siRNA sense strand
gaccucuaccuggaccuua

SEQ ID NO: 1232977 - RNA, 19 nt, Homo sapiens
  misc_RNA (1)...(19): siRNA sense strand
gaccuuauuaaccagaaga

SEQ ID NO: 1232978 - RNA, 19 nt, Homo sapiens
  misc_RNA (1)...(19): siRNA sense strand
ccaaggacaugaagaacaa

SEQ ID NO: 1232979 - RNA, 19 nt, Homo sapiens
  misc_RNA (1)...(19): siRNA sense strand
ucaagaaggucaagucaca

SEQ ID NO: 1232980 - RNA, 19 nt, Homo sapiens
  misc_RNA (1)...(19): siRNA sense strand
uggagaagcugcugguuca

SEQ ID NO: 1232981 - RNA, 19 nt, Homo sapiens
  misc_RNA (1)...(19): siRNA sense strand
ggacucguacccucgcuuu

SEQ ID NO: 1232982 - RNA, 19 nt, Homo sapiens
  misc_RNA (1)...(19): siRNA sense strand
gcuucgaccuggcacagaa

SEQ ID NO: 1232983 - RNA, 19 nt, Homo sapiens
  misc_RNA (1)...(19): siRNA sense strand
agaagcugcugguucacaa

SEQ ID NO: 1232984 - RNA, 19 nt, Homo sapiens
  misc_RNA (1)...(19): siRNA sense strand
gugaggagaaucuggaguu

SEQ ID NO: 1232985 - RNA, 19 nt, Homo sapiens
  misc_RNA (1)...(19): siRNA sense strand
gaagcugcugguucacaaa

SEQ ID NO: 1232986 - RNA, 19 nt, Homo sapiens
  misc_RNA (1)...(19): siRNA sense strand
cauccaaggccaagaagau

SEQ ID NO: 1232987 - RNA, 19 nt, Homo sapiens
  misc_RNA (1)...(19): siRNA sense strand
gcugcugguucacaaauac

SEQ ID NO: 1232988 - RNA, 19 nt, Homo sapiens
  misc_RNA (1)...(19): siRNA sense strand
ucacaaauacggguuagca

SEQ ID NO: 1232989 - RNA, 19 nt, Homo sapiens
  misc_RNA (1)...(19): siRNA sense strand
cuuauuaaccagaagaaga

SEQ ID NO: 1232990 - RNA, 19 nt, Homo sapiens
  misc_RNA (1)...(19): siRNA sense strand
cauucaagcccaccucaga

SEQ ID NO: 1232991 - RNA, 19 nt, Homo sapiens
  misc_RNA (1)...(19): siRNA sense strand
ugaggagaaucuggaguuc

SEQ ID NO: 1232992 - RNA, 19 nt, Homo sapiens
  misc_RNA (1)...(19): siRNA sense strand
gggcaaggcagacaaaaug

SEQ ID NO: 1232993 - RNA, 19 nt, Homo sapiens
  misc_RNA (1)...(19): siRNA sense strand
caucuucgggcucauggaa

SEQ ID NO: 1232994 - RNA, 19 nt, Homo sapiens
  misc_RNA (1)...(19): siRNA sense strand
gccaaggacaugaagaaca

SEQ ID NO: 1232995 - RNA, 19 nt, Homo sapiens
  misc_RNA (1)...(19): siRNA sense strand
ugaguucagugaggagaau

SEQ ID NO: 1232996 - RNA, 19 nt, Homo sapiens
  misc_RNA (1)...(19): siRNA sense strand
gagaagcugcugguucaca

SEQ ID NO: 1232997 - RNA, 19 nt, Homo sapiens
  misc_RNA (1)...(19): siRNA sense strand
ggaccuuauuaaccagaag

SEQ ID NO: 1232998 - RNA, 19 nt, Homo sapiens
  misc_RNA (1)...(19): siRNA sense strand
gggagcacaccaaggacaa

SEQ ID NO: 1232999 - RNA, 19 nt, Homo sapiens
  misc_RNA (1)...(19): siRNA sense strand
gaccucuaccuggaccuua

SEQ ID NO: 1233000 - RNA, 19 nt, Homo sapiens
  misc_RNA (1)...(19): siRNA sense strand
gaccuuauuaaccagaaga

SEQ ID NO: 1233001 - RNA, 19 nt, Homo sapiens
  misc_RNA (1)...(19): siRNA sense strand
ccaaggacaugaagaacaa

SEQ ID NO: 1233002 - RNA, 19 nt, Homo sapiens
  misc_RNA (1)...(19): siRNA sense strand
ucaagaaggucaagucaca

SEQ ID NO: 1233003 - RNA, 19 nt, Homo sapiens
  misc_RNA (1)...(19): siRNA sense strand
uggagaagcugcugguuca

SEQ ID NO: 1233004 - RNA, 19 nt, Homo sapiens
  misc_RNA (1)...(19): siRNA sense strand
ggacucguacccucgcuuu

SEQ ID NO: 1233005 - RNA, 19 nt, Homo sapiens
  misc_RNA (1)...(19): siRNA sense strand
gcuucgaccuggcacagaa

SEQ ID NO: 1233006 - RNA, 19 nt, Homo sapiens
  misc_RNA (1)...(19): siRNA sense strand
agaagcugcugguucacaa

SEQ ID NO: 1233007 - RNA, 19 nt, Homo sapiens
  misc_RNA (1)...(19): siRNA sense strand
gugaggagaaucuggaguu

SEQ ID NO: 1233008 - RNA, 19 nt, Homo sapiens
  misc_RNA (1)...(19): siRNA sense strand
gaagcugcugguucacaaa

SEQ ID NO: 1233009 - RNA, 19 nt, Homo sapiens
  misc_RNA (1)...(19): siRNA sense strand
cauccaaggccaagaagau

SEQ ID NO: 1233010 - RNA, 19 nt, Homo sapiens
  misc_RNA (1)...(19): siRNA sense strand
gcugcugguucacaaauac

SEQ ID NO: 1233011 - RNA, 19 nt, Homo sapiens
  misc_RNA (1)...(19): siRNA sense strand
ucacaaauacggguuagca

SEQ ID NO: 1233012 - RNA, 19 nt, Homo sapiens
  misc_RNA (1)...(19): siRNA sense strand
cuuauuaaccagaagaaga

SEQ ID NO: 1233013 - RNA, 19 nt, Homo sapiens
  misc_RNA (1)...(19): siRNA sense strand
cauucaagcccaccucaga

SEQ ID NO: 1233014 - RNA, 19 nt, Homo sapiens
  misc_RNA (1)...(19): siRNA sense strand
ugaggagaaucuggaguuc

SEQ ID NO: 1233015 - RNA, 19 nt, Homo sapiens
  misc_RNA (1)...(19): siRNA sense strand
gggcaaggcagacaaaaug

SEQ ID NO: 1233016 - RNA, 19 nt, Homo sapiens
  misc_RNA (1)...(19): siRNA sense strand
caucuucgggcucauggaa

SEQ ID NO: 1233017 - RNA, 19 nt, Homo sapiens
  misc_RNA (1)...(19): siRNA sense strand
gccaaggacaugaagaaca

SEQ ID NO: 1233018 - RNA, 19 nt, Homo sapiens
  misc_RNA (1)...(19): siRNA sense strand
ugaguucagugaggagaau

SEQ ID NO: 1233019 - RNA, 19 nt, Homo sapiens
  misc_RNA (1)...(19): siRNA sense strand
gagaagcugcugguucaca

SEQ ID NO: 1233020 - RNA, 19 nt, Homo sapiens
  misc_RNA (1)...(19): siRNA sense strand
ggaccuuauuaaccagaag

SEQ ID NO: 1233021 - RNA, 19 nt, Homo sapiens
  misc_RNA (1)...(19): siRNA sense strand
gggagcacaccaaggacaa

SEQ ID NO: 1233022 - RNA, 19 nt, Homo sapiens
  misc_RNA (1)...(19): siRNA sense strand
gaccucuaccuggaccuua

SEQ ID NO: 1233023 - RNA, 19 nt, Homo sapiens
  misc_RNA (1)...(19): siRNA sense strand
gaccuuauuaaccagaaga

SEQ ID NO: 1233024 - RNA, 19 nt, Homo sapiens
  misc_RNA (1)...(19): siRNA sense strand
ucaagaaggucaagucaca

SEQ ID NO: 1233025 - RNA, 19 nt, Homo sapiens
  misc_RNA (1)...(19): siRNA sense strand
uggagaagcugcugguuca

SEQ ID NO: 1233026 - RNA, 19 nt, Homo sapiens
  misc_RNA (1)...(19): siRNA sense strand
ggacucguacccucgcuuu

SEQ ID NO: 1233027 - RNA, 19 nt, Homo sapiens
  misc_RNA (1)...(19): siRNA sense strand
gcuucgaccuggcacagaa

SEQ ID NO: 1233028 - RNA, 19 nt, Homo sapiens
  misc_RNA (1)...(19): siRNA sense strand
agaagcugcugguucacaa

SEQ ID NO: 1233029 - RNA, 19 nt, Homo sapiens
  misc_RNA (1)...(19): siRNA sense strand
gugaggagaaucuggaguu

SEQ ID NO: 1233030 - RNA, 19 nt, Homo sapiens
  misc_RNA (1)...(19): siRNA sense strand
gaagcugcugguucacaaa

SEQ ID NO: 1233031 - RNA, 19 nt, Homo sapiens
  misc_RNA (1)...(19): siRNA sense strand
cauccaaggccaagaagau

SEQ ID NO: 1233032 - RNA, 19 nt, Homo sapiens
  misc_RNA (1)...(19): siRNA sense strand
gcugcugguucacaaauac

SEQ ID NO: 1233033 - RNA, 19 nt, Homo sapiens
  misc_RNA (1)...(19): siRNA sense strand
ucacaaauacggguuagca

SEQ ID NO: 1233034 - RNA, 19 nt, Homo sapiens
  misc_RNA (1)...(19): siRNA sense strand
cuuauuaaccagaagaaga

SEQ ID NO: 1233035 - RNA, 19 nt, Homo sapiens
  misc_RNA (1)...(19): siRNA sense strand
cauucaagcccaccucaga

SEQ ID NO: 1233036 - RNA, 19 nt, Homo sapiens
  misc_RNA (1)...(19): siRNA sense strand
ugaggagaaucuggaguuc

SEQ ID NO: 1233037 - RNA, 19 nt, Homo sapiens
  misc_RNA (1)...(19): siRNA sense strand
ugaguucagugaggagaau

SEQ ID NO: 1233038 - RNA, 19 nt, Homo sapiens
  misc_RNA (1)...(19): siRNA sense strand
caucuucgggcucauggaa

SEQ ID NO: 1233039 - RNA, 19 nt, Homo sapiens
  misc_RNA (1)...(19): siRNA sense strand
gggcaaggcagacaaaaug

SEQ ID NO: 1233040 - RNA, 19 nt, Homo sapiens
  misc_RNA (1)...(19): siRNA sense strand
gagaagcugcugguucaca

SEQ ID NO: 1233041 - RNA, 19 nt, Homo sapiens
  misc_RNA (1)...(19): siRNA sense strand
ggaccuuauuaaccagaag

SEQ ID NO: 1233042 - RNA, 19 nt, Homo sapiens
  misc_RNA (1)...(19): siRNA sense strand
gggagcacaccaaggacaa

SEQ ID NO: 1233043 - RNA, 19 nt, Homo sapiens
  misc_RNA (1)...(19): siRNA sense strand
gaccucuaccuggaccuua

SEQ ID NO: 1233044 - RNA, 19 nt, Homo sapiens
  misc_RNA (1)...(19): siRNA sense strand
gaccuuauuaaccagaaga

SEQ ID NO: 1233045 - RNA, 19 nt, Homo sapiens
  misc_RNA (1)...(19): siRNA sense strand
ccaaggacaugaagaacaa

SEQ ID NO: 1233046 - RNA, 19 nt, Homo sapiens
  misc_RNA (1)...(19): siRNA sense strand
ucaagaaggucaagucaca

SEQ ID NO: 1233047 - RNA, 19 nt, Homo sapiens
  misc_RNA (1)...(19): siRNA sense strand
uggagaagcugcugguuca

SEQ ID NO: 1233048 - RNA, 19 nt, Homo sapiens
  misc_RNA (1)...(19): siRNA sense strand
ggacucguacccucgcuuu

SEQ ID NO: 1233049 - RNA, 19 nt, Homo sapiens
  misc_RNA (1)...(19): siRNA sense strand
gcuucgaccuggcacagaa

SEQ ID NO: 1233050 - RNA, 19 nt, Homo sapiens
  misc_RNA (1)...(19): siRNA sense strand
agaagcugcugguucacaa

SEQ ID NO: 1233051 - RNA, 19 nt, Homo sapiens
  misc_RNA (1)...(19): siRNA sense strand
gugaggagaaucuggaguu

SEQ ID NO: 1233052 - RNA, 19 nt, Homo sapiens
  misc_RNA (1)...(19): siRNA sense strand
gaagcugcugguucacaaa

SEQ ID NO: 1233053 - RNA, 19 nt, Homo sapiens
  misc_RNA (1)...(19): siRNA sense strand
cauccaaggccaagaagau

SEQ ID NO: 1233054 - RNA, 19 nt, Homo sapiens
  misc_RNA (1)...(19): siRNA sense strand
gcugcugguucacaaauac

SEQ ID NO: 1233055 - RNA, 19 nt, Homo sapiens
  misc_RNA (1)...(19): siRNA sense strand
ucacaaauacggguuagca

SEQ ID NO: 1233056 - RNA, 19 nt, Homo sapiens
  misc_RNA (1)...(19): siRNA sense strand
cuuauuaaccagaagaaga

SEQ ID NO: 1233057 - RNA, 19 nt, Homo sapiens
  misc_RNA (1)...(19): siRNA sense strand
cauucaagcccaccucaga

SEQ ID NO: 1233058 - RNA, 19 nt, Homo sapiens
  misc_RNA (1)...(19): siRNA sense strand
ugaggagaaucuggaguuc

SEQ ID NO: 1233059 - RNA, 19 nt, Homo sapiens
  misc_RNA (1)...(19): siRNA sense strand
gggcaaggcagacaaaaug

SEQ ID NO: 1233060 - RNA, 19 nt, Homo sapiens
  misc_RNA (1)...(19): siRNA sense strand
caucuucgggcucauggaa

SEQ ID NO: 1233061 - RNA, 19 nt, Homo sapiens
  misc_RNA (1)...(19): siRNA sense strand
gccaaggacaugaagaaca

SEQ ID NO: 1233062 - RNA, 19 nt, Homo sapiens
  misc_RNA (1)...(19): siRNA sense strand
ugaguucagugaggagaau

SEQ ID NO: 1233063 - RNA, 19 nt, Homo sapiens
  misc_RNA (1)...(19): siRNA sense strand
gagaagcugcugguucaca

SEQ ID NO: 1233064 - RNA, 19 nt, Homo sapiens
  misc_RNA (1)...(19): siRNA sense strand
ggaccuuauuaaccagaag

SEQ ID NO: 1233065 - RNA, 19 nt, Homo sapiens
  misc_RNA (1)...(19): siRNA sense strand
gggagcacaccaaggacaa

SEQ ID NO: 1233066 - RNA, 19 nt, Homo sapiens
  misc_RNA (1)...(19): siRNA sense strand
gaccucuaccuggaccuua

SEQ ID NO: 1233067 - RNA, 19 nt, Homo sapiens
  misc_RNA (1)...(19): siRNA sense strand
gaccuuauuaaccagaaga

SEQ ID NO: 1233068 - RNA, 19 nt, Homo sapiens
  misc_RNA (1)...(19): siRNA sense strand
ccaaggacaugaagaacaa

SEQ ID NO: 1233069 - RNA, 19 nt, Homo sapiens
  misc_RNA (1)...(19): siRNA sense strand
ucaagaaggucaagucaca

SEQ ID NO: 1233070 - RNA, 19 nt, Homo sapiens
  misc_RNA (1)...(19): siRNA sense strand
uggagaagcugcugguuca

SEQ ID NO: 1233071 - RNA, 19 nt, Homo sapiens
  misc_RNA (1)...(19): siRNA sense strand
ggacucguacccucgcuuu

SEQ ID NO: 1233072 - RNA, 19 nt, Homo sapiens
  misc_RNA (1)...(19): siRNA sense strand
gcuucgaccuggcacagaa

SEQ ID NO: 1233073 - RNA, 19 nt, Homo sapiens
  misc_RNA (1)...(19): siRNA sense strand
agaagcugcugguucacaa

SEQ ID NO: 1233074 - RNA, 19 nt, Homo sapiens
  misc_RNA (1)...(19): siRNA sense strand
gugaggagaaucuggaguu

SEQ ID NO: 1233075 - RNA, 19 nt, Homo sapiens
  misc_RNA (1)...(19): siRNA sense strand
gaagcugcugguucacaaa

SEQ ID NO: 1233076 - RNA, 19 nt, Homo sapiens
  misc_RNA (1)...(19): siRNA sense strand
cauccaaggccaagaagau

SEQ ID NO: 1233077 - RNA, 19 nt, Homo sapiens
  misc_RNA (1)...(19): siRNA sense strand
gcugcugguucacaaauac

SEQ ID NO: 1233078 - RNA, 19 nt, Homo sapiens
  misc_RNA (1)...(19): siRNA sense strand
ucacaaauacggguuagca

SEQ ID NO: 1233079 - RNA, 19 nt, Homo sapiens
  misc_RNA (1)...(19): siRNA sense strand
cuuauuaaccagaagaaga

SEQ ID NO: 1233080 - RNA, 19 nt, Homo sapiens
  misc_RNA (1)...(19): siRNA sense strand
cauucaagcccaccucaga

SEQ ID NO: 1233081 - RNA, 19 nt, Homo sapiens
  misc_RNA (1)...(19): siRNA sense strand
ugaggagaaucuggaguuc

SEQ ID NO: 1233082 - RNA, 19 nt, Homo sapiens
  misc_RNA (1)...(19): siRNA sense strand
gggcaaggcagacaaaaug

SEQ ID NO: 1233083 - RNA, 19 nt, Homo sapiens
  misc_RNA (1)...(19): siRNA sense strand
caucuucgggcucauggaa

SEQ ID NO: 1233084 - RNA, 19 nt, Homo sapiens
  misc_RNA (1)...(19): siRNA sense strand
gccaaggacaugaagaaca

SEQ ID NO: 1233085 - RNA, 19 nt, Homo sapiens
  misc_RNA (1)...(19): siRNA sense strand
ugaguucagugaggagaau

SEQ ID NO: 1233086 - RNA, 19 nt, Homo sapiens
  misc_RNA (1)...(19): siRNA sense strand
gagaagcugcugguucaca

SEQ ID NO: 1233087 - RNA, 19 nt, Homo sapiens
  misc_RNA (1)...(19): siRNA sense strand
ggaccuuauuaaccagaag

SEQ ID NO: 1233088 - RNA, 19 nt, Homo sapiens
  misc_RNA (1)...(19): siRNA sense strand
gggagcacaccaaggacaa

SEQ ID NO: 1233089 - RNA, 19 nt, Homo sapiens
  misc_RNA (1)...(19): siRNA sense strand
gaccucuaccuggaccuua

SEQ ID NO: 1233090 - RNA, 19 nt, Homo sapiens
  misc_RNA (1)...(19): siRNA sense strand
gaccuuauuaaccagaaga

SEQ ID NO: 1233091 - RNA, 19 nt, Homo sapiens
  misc_RNA (1)...(19): siRNA sense strand
ccaaggacaugaagaacaa

SEQ ID NO: 1233092 - RNA, 19 nt, Homo sapiens
  misc_RNA (1)...(19): siRNA sense strand
ucaagaaggucaagucaca

SEQ ID NO: 1233093 - RNA, 19 nt, Homo sapiens
  misc_RNA (1)...(19): siRNA sense strand
uggagaagcugcugguuca

SEQ ID NO: 1233094 - RNA, 19 nt, Homo sapiens
  misc_RNA (1)...(19): siRNA sense strand
ggacucguacccucgcuuu

SEQ ID NO: 1233095 - RNA, 19 nt, Homo sapiens
  misc_RNA (1)...(19): siRNA sense strand
gcuucgaccuggcacagaa

SEQ ID NO: 1233096 - RNA, 19 nt, Homo sapiens
  misc_RNA (1)...(19): siRNA sense strand
agaagcugcugguucacaa

SEQ ID NO: 1233097 - RNA, 19 nt, Homo sapiens
  misc_RNA (1)...(19): siRNA sense strand
gugaggagaaucuggaguu

SEQ ID NO: 1233098 - RNA, 19 nt, Homo sapiens
  misc_RNA (1)...(19): siRNA sense strand
gaagcugcugguucacaaa

SEQ ID NO: 1233099 - RNA, 19 nt, Homo sapiens
  misc_RNA (1)...(19): siRNA sense strand
cauccaaggccaagaagau

SEQ ID NO: 1233100 - RNA, 19 nt, Homo sapiens
  misc_RNA (1)...(19): siRNA sense strand
gcugcugguucacaaauac

SEQ ID NO: 1233101 - RNA, 19 nt, Homo sapiens
  misc_RNA (1)...(19): siRNA sense strand
ucacaaauacggguuagca

SEQ ID NO: 1233102 - RNA, 19 nt, Homo sapiens
  misc_RNA (1)...(19): siRNA sense strand
cuuauuaaccagaagaaga

SEQ ID NO: 1233103 - RNA, 19 nt, Homo sapiens
  misc_RNA (1)...(19): siRNA sense strand
cauucaagcccaccucaga

SEQ ID NO: 1233104 - RNA, 19 nt, Homo sapiens
  misc_RNA (1)...(19): siRNA sense strand
ugaggagaaucuggaguuc

SEQ ID NO: 1233105 - RNA, 19 nt, Homo sapiens
  misc_RNA (1)...(19): siRNA sense strand
gggcaaggcagacaaaaug

SEQ ID NO: 1233106 - RNA, 19 nt, Homo sapiens
  misc_RNA (1)...(19): siRNA sense strand
caucuucgggcucauggaa

SEQ ID NO: 1233107 - RNA, 19 nt, Homo sapiens
  misc_RNA (1)...(19): siRNA sense strand
gccaaggacaugaagaaca

SEQ ID NO: 1233108 - RNA, 19 nt, Homo sapiens
  misc_RNA (1)...(19): siRNA sense strand
ugaguucagugaggagaau

SEQ ID NO: 1233109 - RNA, 19 nt, Homo sapiens
  misc_RNA (1)...(19): siRNA sense strand
gagaagcugcugguucaca

SEQ ID NO: 1233110 - RNA, 19 nt, Homo sapiens
  misc_RNA (1)...(19): siRNA sense strand
ggaccuuauuaaccagaag

SEQ ID NO: 1233111 - RNA, 19 nt, Homo sapiens
  misc_RNA (1)...(19): siRNA sense strand
gggagcacaccaaggacaa

SEQ ID NO: 1233112 - RNA, 19 nt, Homo sapiens
  misc_RNA (1)...(19): siRNA sense strand
gaccucuaccuggaccuua

SEQ ID NO: 1233113 - RNA, 19 nt, Homo sapiens
  misc_RNA (1)...(19): siRNA sense strand
gaccuuauuaaccagaaga

SEQ ID NO: 1233114 - RNA, 19 nt, Homo sapiens
  misc_RNA (1)...(19): siRNA sense strand
ccaaggacaugaagaacaa

SEQ ID NO: 1233115 - RNA, 19 nt, Homo sapiens
  misc_RNA (1)...(19): siRNA sense strand
ucaagaaggucaagucaca

SEQ ID NO: 1233116 - RNA, 19 nt, Homo sapiens
  misc_RNA (1)...(19): siRNA sense strand
uggagaagcugcugguuca

SEQ ID NO: 1233117 - RNA, 19 nt, Homo sapiens
  misc_RNA (1)...(19): siRNA sense strand
ggacucguacccucgcuuu

SEQ ID NO: 1233118 - RNA, 19 nt, Homo sapiens
  misc_RNA (1)...(19): siRNA sense strand
gcuucgaccuggcacagaa

SEQ ID NO: 1233119 - RNA, 19 nt, Homo sapiens
  misc_RNA (1)...(19): siRNA sense strand
agaagcugcugguucacaa

SEQ ID NO: 1233120 - RNA, 19 nt, Homo sapiens
  misc_RNA (1)...(19): siRNA sense strand
gugaggagaaucuggaguu

SEQ ID NO: 1233121 - RNA, 19 nt, Homo sapiens
  misc_RNA (1)...(19): siRNA sense strand
gaagcugcugguucacaaa

SEQ ID NO: 1233122 - RNA, 19 nt, Homo sapiens
  misc_RNA (1)...(19): siRNA sense strand
cauccaaggccaagaagau

SEQ ID NO: 1233123 - RNA, 19 nt, Homo sapiens
  misc_RNA (1)...(19): siRNA sense strand
gcugcugguucacaaauac

SEQ ID NO: 1233124 - RNA, 19 nt, Homo sapiens
  misc_RNA (1)...(19): siRNA sense strand
ucacaaauacggguuagca

SEQ ID NO: 1233125 - RNA, 19 nt, Homo sapiens
  misc_RNA (1)...(19): siRNA sense strand
cuuauuaaccagaagaaga

SEQ ID NO: 1233126 - RNA, 19 nt, Homo sapiens
  misc_RNA (1)...(19): siRNA sense strand
cauucaagcccaccucaga

SEQ ID NO: 1233127 - RNA, 19 nt, Homo sapiens
  misc_RNA (1)...(19): siRNA sense strand
ugaggagaaucuggaguuc

SEQ ID NO: 1233128 - RNA, 19 nt, Homo sapiens
  misc_RNA (1)...(19): siRNA sense strand
gggcaaggcagacaaaaug

SEQ ID NO: 1233129 - RNA, 19 nt, Homo sapiens
  misc_RNA (1)...(19): siRNA sense strand
caucuucgggcucauggaa

SEQ ID NO: 1233130 - RNA, 19 nt, Homo sapiens
  misc_RNA (1)...(19): siRNA sense strand
gccaaggacaugaagaaca

SEQ ID NO: 1233131 - RNA, 19 nt, Homo sapiens
  misc_RNA (1)...(19): siRNA sense strand
ugaguucagugaggagaau

SEQ ID NO: 1233132 - RNA, 19 nt, Homo sapiens
  misc_RNA (1)...(19): siRNA sense strand
gagaagcugcugguucaca

SEQ ID NO: 1233133 - RNA, 19 nt, Homo sapiens
  misc_RNA (1)...(19): siRNA sense strand
ggaccuuauuaaccagaag

SEQ ID NO: 1233134 - RNA, 19 nt, Homo sapiens
  misc_RNA (1)...(19): siRNA sense strand
gggagcacaccaaggacaa

SEQ ID NO: 1233135 - RNA, 19 nt, Homo sapiens
  misc_RNA (1)...(19): siRNA sense strand
gaccucuaccuggaccuua

SEQ ID NO: 1233136 - RNA, 19 nt, Homo sapiens
  misc_RNA (1)...(19): siRNA sense strand
gaccuuauuaaccagaaga

SEQ ID NO: 1233137 - RNA, 19 nt, Homo sapiens
  misc_RNA (1)...(19): siRNA sense strand
ccaaggacaugaagaacaa

SEQ ID NO: 1233138 - RNA, 19 nt, Homo sapiens
  misc_RNA (1)...(19): siRNA sense strand
ucaagaaggucaagucaca

SEQ ID NO: 1233139 - RNA, 19 nt, Homo sapiens
  misc_RNA (1)...(19): siRNA sense strand
uggagaagcugcugguuca

SEQ ID NO: 1233140 - RNA, 19 nt, Homo sapiens
  misc_RNA (1)...(19): siRNA sense strand
ggacucguacccucgcuuu

SEQ ID NO: 1233141 - RNA, 19 nt, Homo sapiens
  misc_RNA (1)...(19): siRNA sense strand
gcuucgaccuggcacagaa

SEQ ID NO: 1233142 - RNA, 19 nt, Homo sapiens
  misc_RNA (1)...(19): siRNA sense strand
agaagcugcugguucacaa

SEQ ID NO: 1233143 - RNA, 19 nt, Homo sapiens
  misc_RNA (1)...(19): siRNA sense strand
gugaggagaaucuggaguu

SEQ ID NO: 1233144 - RNA, 19 nt, Homo sapiens
  misc_RNA (1)...(19): siRNA sense strand
gaagcugcugguucacaaa

SEQ ID NO: 1233145 - RNA, 19 nt, Homo sapiens
  misc_RNA (1)...(19): siRNA sense strand
cauccaaggccaagaagau

SEQ ID NO: 1233146 - RNA, 19 nt, Homo sapiens
  misc_RNA (1)...(19): siRNA sense strand
gcugcugguucacaaauac

SEQ ID NO: 1233147 - RNA, 19 nt, Homo sapiens
  misc_RNA (1)...(19): siRNA sense strand
ucacaaauacggguuagca

SEQ ID NO: 1233148 - RNA, 19 nt, Homo sapiens
  misc_RNA (1)...(19): siRNA sense strand
cuuauuaaccagaagaaga

SEQ ID NO: 1233149 - RNA, 19 nt, Homo sapiens
  misc_RNA (1)...(19): siRNA sense strand
cauucaagcccaccucaga

SEQ ID NO: 1233150 - RNA, 19 nt, Homo sapiens
  misc_RNA (1)...(19): siRNA sense strand
ugaggagaaucuggaguuc

SEQ ID NO: 1233151 - RNA, 19 nt, Homo sapiens
  misc_RNA (1)...(19): siRNA sense strand
gggcaaggcagacaaaaug

SEQ ID NO: 1233152 - RNA, 19 nt, Homo sapiens
  misc_RNA (1)...(19): siRNA sense strand
caucuucgggcucauggaa

SEQ ID NO: 1233153 - RNA, 19 nt, Homo sapiens
  misc_RNA (1)...(19): siRNA sense strand
gccaaggacaugaagaaca

SEQ ID NO: 1233154 - RNA, 19 nt, Homo sapiens
  misc_RNA (1)...(19): siRNA sense strand
ugaguucagugaggagaau

SEQ ID NO: 1233155 - RNA, 19 nt, Homo sapiens
  misc_RNA (1)...(19): siRNA sense strand
gagaagcugcugguucaca

SEQ ID NO: 1233156 - RNA, 19 nt, Homo sapiens
  misc_RNA (1)...(19): siRNA sense strand
ggaccuuauuaaccagaag

SEQ ID NO: 1233157 - RNA, 19 nt, Homo sapiens
  misc_RNA (1)...(19): siRNA sense strand
gggagcacaccaaggacaa

SEQ ID NO: 1233158 - RNA, 19 nt, Homo sapiens
  misc_RNA (1)...(19): siRNA sense strand
gaccucuaccuggaccuua

SEQ ID NO: 1233159 - RNA, 19 nt, Homo sapiens
  misc_RNA (1)...(19): siRNA sense strand
gaccuuauuaaccagaaga

SEQ ID NO: 1233160 - RNA, 19 nt, Homo sapiens
  misc_RNA (1)...(19): siRNA sense strand
ucaagaaggucaagucaca

SEQ ID NO: 1233161 - RNA, 19 nt, Homo sapiens
  misc_RNA (1)...(19): siRNA sense strand
uggagaagcugcugguuca

SEQ ID NO: 1233162 - RNA, 19 nt, Homo sapiens
  misc_RNA (1)...(19): siRNA sense strand
ggacucguacccucgcuuu

SEQ ID NO: 1233163 - RNA, 19 nt, Homo sapiens
  misc_RNA (1)...(19): siRNA sense strand
gcuucgaccuggcacagaa

SEQ ID NO: 1233164 - RNA, 19 nt, Homo sapiens
  misc_RNA (1)...(19): siRNA sense strand
agaagcugcugguucacaa

SEQ ID NO: 1233165 - RNA, 19 nt, Homo sapiens
  misc_RNA (1)...(19): siRNA sense strand
gugaggagaaucuggaguu

SEQ ID NO: 1233166 - RNA, 19 nt, Homo sapiens
  misc_RNA (1)...(19): siRNA sense strand
gaagcugcugguucacaaa

SEQ ID NO: 1233167 - RNA, 19 nt, Homo sapiens
  misc_RNA (1)...(19): siRNA sense strand
cauccaaggccaagaagau

SEQ ID NO: 1233168 - RNA, 19 nt, Homo sapiens
  misc_RNA (1)...(19): siRNA sense strand
gcugcugguucacaaauac

SEQ ID NO: 1233169 - RNA, 19 nt, Homo sapiens
  misc_RNA (1)...(19): siRNA sense strand
ucacaaauacggguuagca

SEQ ID NO: 1233170 - RNA, 19 nt, Homo sapiens
  misc_RNA (1)...(19): siRNA sense strand
cuuauuaaccagaagaaga

SEQ ID NO: 1233171 - RNA, 19 nt, Homo sapiens
  misc_RNA (1)...(19): siRNA sense strand
cauucaagcccaccucaga

SEQ ID NO: 1233172 - RNA, 19 nt, Homo sapiens
  misc_RNA (1)...(19): siRNA sense strand
ugaggagaaucuggaguuc

SEQ ID NO: 1233173 - RNA, 19 nt, Homo sapiens
  misc_RNA (1)...(19): siRNA sense strand
ugaguucagugaggagaau

SEQ ID NO: 1233174 - RNA, 19 nt, Homo sapiens
  misc_RNA (1)...(19): siRNA sense strand
caucuucgggcucauggaa

SEQ ID NO: 1233175 - RNA, 19 nt, Homo sapiens
  misc_RNA (1)...(19): siRNA sense strand
gggcaaggcagacaaaaug

SEQ ID NO: 1233176 - RNA, 19 nt, Homo sapiens
  misc_RNA (1)...(19): siRNA sense strand
gagaagcugcugguucaca

SEQ ID NO: 1233177 - RNA, 19 nt, Homo sapiens
  misc_RNA (1)...(19): siRNA sense strand
ggaccuuauuaaccagaag

SEQ ID NO: 1233178 - RNA, 19 nt, Homo sapiens
  misc_RNA (1)...(19): siRNA sense strand
gggagcacaccaaggacaa

SEQ ID NO: 1233179 - RNA, 19 nt, Homo sapiens
  misc_RNA (1)...(19): siRNA sense strand
gaccucuaccuggaccuua

SEQ ID NO: 1233180 - RNA, 19 nt, Homo sapiens
  misc_RNA (1)...(19): siRNA sense strand
gaccuuauuaaccagaaga

SEQ ID NO: 1233181 - RNA, 19 nt, Homo sapiens
  misc_RNA (1)...(19): siRNA sense strand
ccaaggacaugaagaacaa

SEQ ID NO: 1233182 - RNA, 19 nt, Homo sapiens
  misc_RNA (1)...(19): siRNA sense strand
ucaagaaggucaagucaca

SEQ ID NO: 1233183 - RNA, 19 nt, Homo sapiens
  misc_RNA (1)...(19): siRNA sense strand
uggagaagcugcugguuca

SEQ ID NO: 1233184 - RNA, 19 nt, Homo sapiens
  misc_RNA (1)...(19): siRNA sense strand
ggacucguacccucgcuuu

SEQ ID NO: 1233185 - RNA, 19 nt, Homo sapiens
  misc_RNA (1)...(19): siRNA sense strand
gcuucgaccuggcacagaa

SEQ ID NO: 1233186 - RNA, 19 nt, Homo sapiens
  misc_RNA (1)...(19): siRNA sense strand
agaagcugcugguucacaa

SEQ ID NO: 1233187 - RNA, 19 nt, Homo sapiens
  misc_RNA (1)...(19): siRNA sense strand
gugaggagaaucuggaguu

SEQ ID NO: 1233188 - RNA, 19 nt, Homo sapiens
  misc_RNA (1)...(19): siRNA sense strand
gaagcugcugguucacaaa

SEQ ID NO: 1233189 - RNA, 19 nt, Homo sapiens
  misc_RNA (1)...(19): siRNA sense strand
cauccaaggccaagaagau

SEQ ID NO: 1233190 - RNA, 19 nt, Homo sapiens
  misc_RNA (1)...(19): siRNA sense strand
gcugcugguucacaaauac

SEQ ID NO: 1233191 - RNA, 19 nt, Homo sapiens
  misc_RNA (1)...(19): siRNA sense strand
ucacaaauacggguuagca

SEQ ID NO: 1233192 - RNA, 19 nt, Homo sapiens
  misc_RNA (1)...(19): siRNA sense strand
cuuauuaaccagaagaaga

SEQ ID NO: 1233193 - RNA, 19 nt, Homo sapiens
  misc_RNA (1)...(19): siRNA sense strand
cauucaagcccaccucaga

SEQ ID NO: 1233194 - RNA, 19 nt, Homo sapiens
  misc_RNA (1)...(19): siRNA sense strand
ugaggagaaucuggaguuc

SEQ ID NO: 1233195 - RNA, 19 nt, Homo sapiens
  misc_RNA (1)...(19): siRNA sense strand
gggcaaggcagacaaaaug

SEQ ID NO: 1233196 - RNA, 19 nt, Homo sapiens
  misc_RNA (1)...(19): siRNA sense strand
caucuucgggcucauggaa

SEQ ID NO: 1233197 - RNA, 19 nt, Homo sapiens
  misc_RNA (1)...(19): siRNA sense strand
gccaaggacaugaagaaca

SEQ ID NO: 1233198 - RNA, 19 nt, Homo sapiens
  misc_RNA (1)...(19): siRNA sense strand
ugaguucagugaggagaau

SEQ ID NO: 1233199 - RNA, 19 nt, Homo sapiens
  misc_RNA (1)...(19): siRNA sense strand
gagaagcugcugguucaca

SEQ ID NO: 1233200 - RNA, 19 nt, Homo sapiens
  misc_RNA (1)...(19): siRNA sense strand
ggaccuuauuaaccagaag

SEQ ID NO: 1233201 - RNA, 19 nt, Homo sapiens
  misc_RNA (1)...(19): siRNA sense strand
gggagcacaccaaggacaa

SEQ ID NO: 1233202 - RNA, 19 nt, Homo sapiens
  misc_RNA (1)...(19): siRNA sense strand
gaccucuaccuggaccuua

SEQ ID NO: 1233203 - RNA, 19 nt, Homo sapiens
  misc_RNA (1)...(19): siRNA sense strand
gaccuuauuaaccagaaga

SEQ ID NO: 1233204 - RNA, 19 nt, Homo sapiens
  misc_RNA (1)...(19): siRNA sense strand
ccaaggacaugaagaacaa

SEQ ID NO: 1233205 - RNA, 19 nt, Homo sapiens
  misc_RNA (1)...(19): siRNA sense strand
ucaagaaggucaagucaca

SEQ ID NO: 1233206 - RNA, 19 nt, Homo sapiens
  misc_RNA (1)...(19): siRNA sense strand
uggagaagcugcugguuca

SEQ ID NO: 1233207 - RNA, 19 nt, Homo sapiens
  misc_RNA (1)...(19): siRNA sense strand
ggacucguacccucgcuuu

SEQ ID NO: 1233208 - RNA, 19 nt, Homo sapiens
  misc_RNA (1)...(19): siRNA sense strand
gcuucgaccuggcacagaa

SEQ ID NO: 1233209 - RNA, 19 nt, Homo sapiens
  misc_RNA (1)...(19): siRNA sense strand
agaagcugcugguucacaa

SEQ ID NO: 1233210 - RNA, 19 nt, Homo sapiens
  misc_RNA (1)...(19): siRNA sense strand
gugaggagaaucuggaguu

SEQ ID NO: 1233211 - RNA, 19 nt, Homo sapiens
  misc_RNA (1)...(19): siRNA sense strand
gaagcugcugguucacaaa

SEQ ID NO: 1233212 - RNA, 19 nt, Homo sapiens
  misc_RNA (1)...(19): siRNA sense strand
cauccaaggccaagaagau

SEQ ID NO: 1233213 - RNA, 19 nt, Homo sapiens
  misc_RNA (1)...(19): siRNA sense strand
gcugcugguucacaaauac

SEQ ID NO: 1233214 - RNA, 19 nt, Homo sapiens
  misc_RNA (1)...(19): siRNA sense strand
ucacaaauacggguuagca

SEQ ID NO: 1233215 - RNA, 19 nt, Homo sapiens
  misc_RNA (1)...(19): siRNA sense strand
cuuauuaaccagaagaaga

SEQ ID NO: 1233216 - RNA, 19 nt, Homo sapiens
  misc_RNA (1)...(19): siRNA sense strand
cauucaagcccaccucaga

SEQ ID NO: 1233217 - RNA, 19 nt, Homo sapiens
  misc_RNA (1)...(19): siRNA sense strand
ugaggagaaucuggaguuc

SEQ ID NO: 1233218 - RNA, 19 nt, Homo sapiens
  misc_RNA (1)...(19): siRNA sense strand
gggcaaggcagacaaaaug

SEQ ID NO: 1233219 - RNA, 19 nt, Homo sapiens
  misc_RNA (1)...(19): siRNA sense strand
caucuucgggcucauggaa

SEQ ID NO: 1233220 - RNA, 19 nt, Homo sapiens
  misc_RNA (1)...(19): siRNA sense strand
gccaaggacaugaagaaca

SEQ ID NO: 1233221 - RNA, 19 nt, Homo sapiens
  misc_RNA (1)...(19): siRNA sense strand
ugaguucagugaggagaau

SEQ ID NO: 1233222 - RNA, 19 nt, Homo sapiens
  misc_RNA (1)...(19): siRNA sense strand
gagaagcugcugguucaca

SEQ ID NO: 1233223 - RNA, 19 nt, Homo sapiens
  misc_RNA (1)...(19): siRNA sense strand
ggaccuuauuaaccagaag

SEQ ID NO: 1233224 - RNA, 19 nt, Homo sapiens
  misc_RNA (1)...(19): siRNA sense strand
gggagcacaccaaggacaa

SEQ ID NO: 1233225 - RNA, 19 nt, Homo sapiens
  misc_RNA (1)...(19): siRNA sense strand
gaccucuaccuggaccuua

SEQ ID NO: 1233226 - RNA, 19 nt, Homo sapiens
  misc_RNA (1)...(19): siRNA sense strand
gaccuuauuaaccagaaga

SEQ ID NO: 1233227 - RNA, 19 nt, Homo sapiens
  misc_RNA (1)...(19): siRNA sense strand
uaaaguggcugguuaauuc

SEQ ID NO: 1233228 - RNA, 19 nt, Homo sapiens
  misc_RNA (1)...(19): siRNA sense strand
gaaagaacccucaaucaga

SEQ ID NO: 1233229 - RNA, 19 nt, Homo sapiens
  misc_RNA (1)...(19): siRNA sense strand
gcuaacaaguuugagcuua

SEQ ID NO: 1233230 - RNA, 19 nt, Homo sapiens
  misc_RNA (1)...(19): siRNA sense strand
gaacugaggcaucgcgaaa

SEQ ID NO: 1233231 - RNA, 19 nt, Homo sapiens
  misc_RNA (1)...(19): siRNA sense strand
caccaagccuguuugcuaa

SEQ ID NO: 1233232 - RNA, 19 nt, Homo sapiens
  misc_RNA (1)...(19): siRNA sense strand
ggaaaccucagagcuauaa

SEQ ID NO: 1233233 - RNA, 19 nt, Homo sapiens
  misc_RNA (1)...(19): siRNA sense strand
cuaacaaguuugagcuuaa

SEQ ID NO: 1233234 - RNA, 19 nt, Homo sapiens
  misc_RNA (1)...(19): siRNA sense strand
gcuauaaaguggagugaca

SEQ ID NO: 1233235 - RNA, 19 nt, Homo sapiens
  misc_RNA (1)...(19): siRNA sense strand
ucaccaagccuguuugcua

SEQ ID NO: 1233236 - RNA, 19 nt, Homo sapiens
  misc_RNA (1)...(19): siRNA sense strand
gagugaaacugcgauacaa

SEQ ID NO: 1233237 - RNA, 19 nt, Homo sapiens
  misc_RNA (1)...(19): siRNA sense strand
aguuugagcuuaauaccua

SEQ ID NO: 1233238 - RNA, 19 nt, Homo sapiens
  misc_RNA (1)...(19): siRNA sense strand
aaaguggagugacauggaa

SEQ ID NO: 1233239 - RNA, 19 nt, Homo sapiens
  misc_RNA (1)...(19): siRNA sense strand
gcgaaagaacccucaauca

SEQ ID NO: 1233240 - RNA, 19 nt, Homo sapiens
  misc_RNA (1)...(19): siRNA sense strand
cuauggaaacggagacuua

SEQ ID NO: 1233241 - RNA, 19 nt, Homo sapiens
  misc_RNA (1)...(19): siRNA sense strand
cuauguacaugguauuugu

SEQ ID NO: 1233242 - RNA, 19 nt, Homo sapiens
  misc_RNA (1)...(19): siRNA sense strand
cgaaagaacccucaaucag

SEQ ID NO: 1233243 - RNA, 19 nt, Homo sapiens
  misc_RNA (1)...(19): siRNA sense strand
caugguauuuguaucuaug

SEQ ID NO: 1233244 - RNA, 19 nt, Homo sapiens
  misc_RNA (1)...(19): siRNA sense strand
uaaaguggagugacaugga

SEQ ID NO: 1233245 - RNA, 19 nt, Homo sapiens
  misc_RNA (1)...(19): siRNA sense strand
gccacuauguacaugguau

SEQ ID NO: 1233246 - RNA, 19 nt, Homo sapiens
  misc_RNA (1)...(19): siRNA sense strand
cgauacaacccagcuggua

SEQ ID NO: 1233247 - RNA, 19 nt, Homo sapiens
  misc_RNA (1)...(19): siRNA sense strand
uaauucaccaagccuguuu

SEQ ID NO: 1233248 - RNA, 19 nt, Homo sapiens
  misc_RNA (1)...(19): siRNA sense strand
cuggaaaccucagagcuau

SEQ ID NO: 1233249 - RNA, 19 nt, Homo sapiens
  misc_RNA (1)...(19): siRNA sense strand
acugaggcaucgcgaaaga

SEQ ID NO: 1233250 - RNA, 19 nt, Homo sapiens
  misc_RNA (1)...(19): siRNA sense strand
gaacccucaaucagaguga

SEQ ID NO: 1233251 - RNA, 19 nt, Homo sapiens
  misc_RNA (1)...(19): siRNA sense strand
guggaaugccuagaacuga

SEQ ID NO: 1233252 - RNA, 19 nt, Homo sapiens
  misc_RNA (1)...(19): siRNA sense strand
uauggaaacggagacuuaa

SEQ ID NO: 1233253 - RNA, 19 nt, Homo sapiens
  misc_RNA (1)...(19): siRNA sense strand
ccacggccacuauguacau

SEQ ID NO: 1233254 - RNA, 19 nt, Homo sapiens
  misc_RNA (1)...(19): siRNA sense strand
gguauuuguaucuauggaa

SEQ ID NO: 1233255 - RNA, 19 nt, Homo sapiens
  misc_RNA (1)...(19): siRNA sense strand
acuggaaaccucagagcua

SEQ ID NO: 1233256 - RNA, 19 nt, Homo sapiens
  misc_RNA (1)...(19): siRNA sense strand
gaaaccucagagcuauaaa

SEQ ID NO: 1233257 - RNA, 19 nt, Homo sapiens
  misc_RNA (1)...(19): siRNA sense strand
ucagagugaaacugcgaua

SEQ ID NO: 1233258 - RNA, 19 nt, Homo sapiens
  misc_RNA (1)...(19): siRNA sense strand
ccacuauguacaugguauu

SEQ ID NO: 1233259 - RNA, 19 nt, Homo sapiens
  misc_RNA (1)...(19): siRNA sense strand
agagugaaacugcgauaca

SEQ ID NO: 1233260 - RNA, 19 nt, Homo sapiens
  misc_RNA (1)...(19): siRNA sense strand
uaaaguggcugguuaauuc

SEQ ID NO: 1233261 - RNA, 19 nt, Homo sapiens
  misc_RNA (1)...(19): siRNA sense strand
gaaagaacccucaaucaga

SEQ ID NO: 1233262 - RNA, 19 nt, Homo sapiens
  misc_RNA (1)...(19): siRNA sense strand
gcuaacaaguuugagcuua

SEQ ID NO: 1233263 - RNA, 19 nt, Homo sapiens
  misc_RNA (1)...(19): siRNA sense strand
gaacugaggcaucgcgaaa

SEQ ID NO: 1233264 - RNA, 19 nt, Homo sapiens
  misc_RNA (1)...(19): siRNA sense strand
caccaagccuguuugcuaa

SEQ ID NO: 1233265 - RNA, 19 nt, Homo sapiens
  misc_RNA (1)...(19): siRNA sense strand
ggaaaccucagagcuauaa

SEQ ID NO: 1233266 - RNA, 19 nt, Homo sapiens
  misc_RNA (1)...(19): siRNA sense strand
cuaacaaguuugagcuuaa

SEQ ID NO: 1233267 - RNA, 19 nt, Homo sapiens
  misc_RNA (1)...(19): siRNA sense strand
gcuauaaaguggagugaca

SEQ ID NO: 1233268 - RNA, 19 nt, Homo sapiens
  misc_RNA (1)...(19): siRNA sense strand
ucaccaagccuguuugcua

SEQ ID NO: 1233269 - RNA, 19 nt, Homo sapiens
  misc_RNA (1)...(19): siRNA sense strand
gagugaaacugcgauacaa

SEQ ID NO: 1233270 - RNA, 19 nt, Homo sapiens
  misc_RNA (1)...(19): siRNA sense strand
aguuugagcuuaauaccua

SEQ ID NO: 1233271 - RNA, 19 nt, Homo sapiens
  misc_RNA (1)...(19): siRNA sense strand
aaaguggagugacauggaa

SEQ ID NO: 1233272 - RNA, 19 nt, Homo sapiens
  misc_RNA (1)...(19): siRNA sense strand
gcgaaagaacccucaauca

SEQ ID NO: 1233273 - RNA, 19 nt, Homo sapiens
  misc_RNA (1)...(19): siRNA sense strand
cuauggaaacggagacuua

SEQ ID NO: 1233274 - RNA, 19 nt, Homo sapiens
  misc_RNA (1)...(19): siRNA sense strand
cuauguacaugguauuugu

SEQ ID NO: 1233275 - RNA, 19 nt, Homo sapiens
  misc_RNA (1)...(19): siRNA sense strand
cgaaagaacccucaaucag

SEQ ID NO: 1233276 - RNA, 19 nt, Homo sapiens
  misc_RNA (1)...(19): siRNA sense strand
caugguauuuguaucuaug

SEQ ID NO: 1233277 - RNA, 19 nt, Homo sapiens
  misc_RNA (1)...(19): siRNA sense strand
uaaaguggagugacaugga

SEQ ID NO: 1233278 - RNA, 19 nt, Homo sapiens
  misc_RNA (1)...(19): siRNA sense strand
gccacuauguacaugguau

SEQ ID NO: 1233279 - RNA, 19 nt, Homo sapiens
  misc_RNA (1)...(19): siRNA sense strand
cgauacaacccagcuggua

SEQ ID NO: 1233280 - RNA, 19 nt, Homo sapiens
  misc_RNA (1)...(19): siRNA sense strand
uaauucaccaagccuguuu

SEQ ID NO: 1233281 - RNA, 19 nt, Homo sapiens
  misc_RNA (1)...(19): siRNA sense strand
cuggaaaccucagagcuau

SEQ ID NO: 1233282 - RNA, 19 nt, Homo sapiens
  misc_RNA (1)...(19): siRNA sense strand
acugaggcaucgcgaaaga

SEQ ID NO: 1233283 - RNA, 19 nt, Homo sapiens
  misc_RNA (1)...(19): siRNA sense strand
gaacccucaaucagaguga

SEQ ID NO: 1233284 - RNA, 19 nt, Homo sapiens
  misc_RNA (1)...(19): siRNA sense strand
guggaaugccuagaacuga

SEQ ID NO: 1233285 - RNA, 19 nt, Homo sapiens
  misc_RNA (1)...(19): siRNA sense strand
uauggaaacggagacuuaa

SEQ ID NO: 1233286 - RNA, 19 nt, Homo sapiens
  misc_RNA (1)...(19): siRNA sense strand
ccacggccacuauguacau

SEQ ID NO: 1233287 - RNA, 19 nt, Homo sapiens
  misc_RNA (1)...(19): siRNA sense strand
gguauuuguaucuauggaa

SEQ ID NO: 1233288 - RNA, 19 nt, Homo sapiens
  misc_RNA (1)...(19): siRNA sense strand
acuggaaaccucagagcua

SEQ ID NO: 1233289 - RNA, 19 nt, Homo sapiens
  misc_RNA (1)...(19): siRNA sense strand
gaaaccucagagcuauaaa

SEQ ID NO: 1233290 - RNA, 19 nt, Homo sapiens
  misc_RNA (1)...(19): siRNA sense strand
ucagagugaaacugcgaua

SEQ ID NO: 1233291 - RNA, 19 nt, Homo sapiens
  misc_RNA (1)...(19): siRNA sense strand
ccacuauguacaugguauu

SEQ ID NO: 1233292 - RNA, 19 nt, Homo sapiens
  misc_RNA (1)...(19): siRNA sense strand
agagugaaacugcgauaca

SEQ ID NO: 1233293 - RNA, 19 nt, Homo sapiens
  misc_RNA (1)...(19): siRNA sense strand
uaaaguggcugguuaauuc

SEQ ID NO: 1233294 - RNA, 19 nt, Homo sapiens
  misc_RNA (1)...(19): siRNA sense strand
gaaagaacccucaaucaga

SEQ ID NO: 1233295 - RNA, 19 nt, Homo sapiens
  misc_RNA (1)...(19): siRNA sense strand
gcuaacaaguuugagcuua

SEQ ID NO: 1233296 - RNA, 19 nt, Homo sapiens
  misc_RNA (1)...(19): siRNA sense strand
gaacugaggcaucgcgaaa

SEQ ID NO: 1233297 - RNA, 19 nt, Homo sapiens
  misc_RNA (1)...(19): siRNA sense strand
caccaagccuguuugcuaa

SEQ ID NO: 1233298 - RNA, 19 nt, Homo sapiens
  misc_RNA (1)...(19): siRNA sense strand
ggaaaccucagagcuauaa

SEQ ID NO: 1233299 - RNA, 19 nt, Homo sapiens
  misc_RNA (1)...(19): siRNA sense strand
cuaacaaguuugagcuuaa

SEQ ID NO: 1233300 - RNA, 19 nt, Homo sapiens
  misc_RNA (1)...(19): siRNA sense strand
gcuauaaaguggagugaca

SEQ ID NO: 1233301 - RNA, 19 nt, Homo sapiens
  misc_RNA (1)...(19): siRNA sense strand
ucaccaagccuguuugcua

SEQ ID NO: 1233302 - RNA, 19 nt, Homo sapiens
  misc_RNA (1)...(19): siRNA sense strand
gagugaaacugcgauacaa

SEQ ID NO: 1233303 - RNA, 19 nt, Homo sapiens
  misc_RNA (1)...(19): siRNA sense strand
aguuugagcuuaauaccua

SEQ ID NO: 1233304 - RNA, 19 nt, Homo sapiens
  misc_RNA (1)...(19): siRNA sense strand
aaaguggagugacauggaa

SEQ ID NO: 1233305 - RNA, 19 nt, Homo sapiens
  misc_RNA (1)...(19): siRNA sense strand
gcgaaagaacccucaauca

SEQ ID NO: 1233306 - RNA, 19 nt, Homo sapiens
  misc_RNA (1)...(19): siRNA sense strand
cuauggaaacggagacuua

SEQ ID NO: 1233307 - RNA, 19 nt, Homo sapiens
  misc_RNA (1)...(19): siRNA sense strand
cuauguacaugguauuugu

SEQ ID NO: 1233308 - RNA, 19 nt, Homo sapiens
  misc_RNA (1)...(19): siRNA sense strand
cgaaagaacccucaaucag

SEQ ID NO: 1233309 - RNA, 19 nt, Homo sapiens
  misc_RNA (1)...(19): siRNA sense strand
caugguauuuguaucuaug

SEQ ID NO: 1233310 - RNA, 19 nt, Homo sapiens
  misc_RNA (1)...(19): siRNA sense strand
uaaaguggagugacaugga

SEQ ID NO: 1233311 - RNA, 19 nt, Homo sapiens
  misc_RNA (1)...(19): siRNA sense strand
gccacuauguacaugguau

SEQ ID NO: 1233312 - RNA, 19 nt, Homo sapiens
  misc_RNA (1)...(19): siRNA sense strand
cgauacaacccagcuggua

SEQ ID NO: 1233313 - RNA, 19 nt, Homo sapiens
  misc_RNA (1)...(19): siRNA sense strand
uaauucaccaagccuguuu

SEQ ID NO: 1233314 - RNA, 19 nt, Homo sapiens
  misc_RNA (1)...(19): siRNA sense strand
cuggaaaccucagagcuau

SEQ ID NO: 1233315 - RNA, 19 nt, Homo sapiens
  misc_RNA (1)...(19): siRNA sense strand
acugaggcaucgcgaaaga

SEQ ID NO: 1233316 - RNA, 19 nt, Homo sapiens
  misc_RNA (1)...(19): siRNA sense strand
gaacccucaaucagaguga

SEQ ID NO: 1233317 - RNA, 19 nt, Homo sapiens
  misc_RNA (1)...(19): siRNA sense strand
guggaaugccuagaacuga

SEQ ID NO: 1233318 - RNA, 19 nt, Homo sapiens
  misc_RNA (1)...(19): siRNA sense strand
uauggaaacggagacuuaa

SEQ ID NO: 1233319 - RNA, 19 nt, Homo sapiens
  misc_RNA (1)...(19): siRNA sense strand
ccacggccacuauguacau

SEQ ID NO: 1233320 - RNA, 19 nt, Homo sapiens
  misc_RNA (1)...(19): siRNA sense strand
gguauuuguaucuauggaa

SEQ ID NO: 1233321 - RNA, 19 nt, Homo sapiens
  misc_RNA (1)...(19): siRNA sense strand
acuggaaaccucagagcua

SEQ ID NO: 1233322 - RNA, 19 nt, Homo sapiens
  misc_RNA (1)...(19): siRNA sense strand
gaaaccucagagcuauaaa

SEQ ID NO: 1233323 - RNA, 19 nt, Homo sapiens
  misc_RNA (1)...(19): siRNA sense strand
ucagagugaaacugcgaua

SEQ ID NO: 1233324 - RNA, 19 nt, Homo sapiens
  misc_RNA (1)...(19): siRNA sense strand
ccacuauguacaugguauu

SEQ ID NO: 1233325 - RNA, 19 nt, Homo sapiens
  misc_RNA (1)...(19): siRNA sense strand
agagugaaacugcgauaca

SEQ ID NO: 1233326 - RNA, 19 nt, Homo sapiens
  misc_RNA (1)...(19): siRNA sense strand
gaccuuggcuggcgucuca

SEQ ID NO: 1233327 - RNA, 19 nt, Homo sapiens
  misc_RNA (1)...(19): siRNA sense strand
ggaccaacauggagaggau

SEQ ID NO: 1233328 - RNA, 19 nt, Homo sapiens
  misc_RNA (1)...(19): siRNA sense strand
gagcgucucugcuucaucu

SEQ ID NO: 1233329 - RNA, 19 nt, Homo sapiens
  misc_RNA (1)...(19): siRNA sense strand
ggugcuggcugcaggauuc

SEQ ID NO: 1233330 - RNA, 19 nt, Homo sapiens
  misc_RNA (1)...(19): siRNA sense strand
ccuuggagcucgucuuauc

SEQ ID NO: 1233331 - RNA, 19 nt, Homo sapiens
  misc_RNA (1)...(19): siRNA sense strand
guccaaggcugggcacuca

SEQ ID NO: 1233332 - RNA, 19 nt, Homo sapiens
  misc_RNA (1)...(19): siRNA sense strand
gcagcucccugauguuucc

SEQ ID NO: 1233333 - RNA, 19 nt, Homo sapiens
  misc_RNA (1)...(19): siRNA sense strand
cggagggaguucacaguca

SEQ ID NO: 1233334 - RNA, 19 nt, Homo sapiens
  misc_RNA (1)...(19): siRNA sense strand
gaagcugcucuccgagguu

SEQ ID NO: 1233335 - RNA, 19 nt, Homo sapiens
  misc_RNA (1)...(19): siRNA sense strand
ggaggaggaggaggaggaa

SEQ ID NO: 1233336 - RNA, 19 nt, Homo sapiens
  misc_RNA (1)...(19): siRNA sense strand
caagauggcccagaaauua

SEQ ID NO: 1233337 - RNA, 19 nt, Homo sapiens
  misc_RNA (1)...(19): siRNA sense strand
gaccagaucauguccauua

SEQ ID NO: 1233338 - RNA, 19 nt, Homo sapiens
  misc_RNA (1)...(19): siRNA sense strand
ccacucagcugcucucaga

SEQ ID NO: 1233339 - RNA, 19 nt, Homo sapiens
  misc_RNA (1)...(19): siRNA sense strand
gaauaucggugaccagauc

SEQ ID NO: 1233340 - RNA, 19 nt, Homo sapiens
  misc_RNA (1)...(19): siRNA sense strand
guacaacgaugaccugauc

SEQ ID NO: 1233341 - RNA, 19 nt, Homo sapiens
  misc_RNA (1)...(19): siRNA sense strand
gagaagaucguccacauuc

SEQ ID NO: 1233342 - RNA, 19 nt, Homo sapiens
  misc_RNA (1)...(19): siRNA sense strand
guggaucucuucauuucua

SEQ ID NO: 1233343 - RNA, 19 nt, Homo sapiens
  misc_RNA (1)...(19): siRNA sense strand
ggaucaagauggcccagaa

SEQ ID NO: 1233344 - RNA, 19 nt, Homo sapiens
  misc_RNA (1)...(19): siRNA sense strand
cagaucauguccauuaaug

SEQ ID NO: 1233345 - RNA, 19 nt, Homo sapiens
  misc_RNA (1)...(19): siRNA sense strand
uauagugaccugcucaaua

SEQ ID NO: 1233346 - RNA, 19 nt, Homo sapiens
  misc_RNA (1)...(19): siRNA sense strand
ggagcagccuguuuacauc

SEQ ID NO: 1233347 - RNA, 19 nt, Homo sapiens
  misc_RNA (1)...(19): siRNA sense strand
gcacguguacgaggagaua

SEQ ID NO: 1233348 - RNA, 19 nt, Homo sapiens
  misc_RNA (1)...(19): siRNA sense strand
gccaaugacugaaguggau

SEQ ID NO: 1233349 - RNA, 19 nt, Homo sapiens
  misc_RNA (1)...(19): siRNA sense strand
ggaagcguccacuaauaaa

SEQ ID NO: 1233350 - RNA, 19 nt, Homo sapiens
  misc_RNA (1)...(19): siRNA sense strand
ggacaucgaccagauagug

SEQ ID NO: 1233351 - RNA, 19 nt, Homo sapiens
  misc_RNA (1)...(19): siRNA sense strand
ccgaagaucucagccagaa

SEQ ID NO: 1233352 - RNA, 19 nt, Homo sapiens
  misc_RNA (1)...(19): siRNA sense strand
ggaggacaucgaccagaua

SEQ ID NO: 1233353 - RNA, 19 nt, Homo sapiens
  misc_RNA (1)...(19): siRNA sense strand
agacaaaacuccuuccaaa

SEQ ID NO: 1233354 - RNA, 19 nt, Homo sapiens
  misc_RNA (1)...(19): siRNA sense strand
ugacugaaguggaucucuu

SEQ ID NO: 1233355 - RNA, 19 nt, Homo sapiens
  misc_RNA (1)...(19): siRNA sense strand
ggaaaacuguaaagauguu

SEQ ID NO: 1233356 - RNA, 19 nt, Homo sapiens
  misc_RNA (1)...(19): siRNA sense strand
gcacgaggaagccaugaau

SEQ ID NO: 1233357 - RNA, 19 nt, Homo sapiens
  misc_RNA (1)...(19): siRNA sense strand
gaccagaccuucgcuacca

SEQ ID NO: 1233358 - RNA, 19 nt, Homo sapiens
  misc_RNA (1)...(19): siRNA sense strand
ucaauacccaggacaugua

SEQ ID NO: 1233359 - RNA, 19 nt, Homo sapiens
  misc_RNA (1)...(19): siRNA sense strand
ggaccauccguucgccuua

SEQ ID NO: 1233360 - RNA, 19 nt, Homo sapiens
  misc_RNA (1)...(19): siRNA sense strand
auagugaccugcucaauac

SEQ ID NO: 1233361 - RNA, 19 nt, Homo sapiens
  misc_RNA (1)...(19): siRNA sense strand
gcagagucaucaagcacau

SEQ ID NO: 1233362 - RNA, 19 nt, Homo sapiens
  misc_RNA (1)...(19): siRNA sense strand
gagucaagcugaauaucgu

SEQ ID NO: 1233363 - RNA, 19 nt, Homo sapiens
  misc_RNA (1)...(19): siRNA sense strand
gccagaaggaguauaguga

SEQ ID NO: 1233364 - RNA, 19 nt, Homo sapiens
  misc_RNA (1)...(19): siRNA sense strand
ucaagauggcccagaaauu

SEQ ID NO: 1233365 - RNA, 19 nt, Homo sapiens
  misc_RNA (1)...(19): siRNA sense strand
aaguggaucucuucauuuc

SEQ ID NO: 1233366 - RNA, 19 nt, Homo sapiens
  misc_RNA (1)...(19): siRNA sense strand
gaucaagauggcccagaaa

SEQ ID NO: 1233367 - RNA, 19 nt, Homo sapiens
  misc_RNA (1)...(19): siRNA sense strand
caagcugaauaucgugaga

SEQ ID NO: 1233368 - RNA, 19 nt, Homo sapiens
  misc_RNA (1)...(19): siRNA sense strand
aagaaucagucccgaguca

SEQ ID NO: 1233369 - RNA, 19 nt, Homo sapiens
  misc_RNA (1)...(19): siRNA sense strand
ggaaaaggcaguacaagau

SEQ ID NO: 1233370 - RNA, 19 nt, Homo sapiens
  misc_RNA (1)...(19): siRNA sense strand
gaggugaagcagagcauga

SEQ ID NO: 1233371 - RNA, 19 nt, Homo sapiens
  misc_RNA (1)...(19): siRNA sense strand
gcagccuguuuacaucuga

SEQ ID NO: 1233372 - RNA, 19 nt, Homo sapiens
  misc_RNA (1)...(19): siRNA sense strand
gaagaucguccacauucuc

SEQ ID NO: 1233373 - RNA, 19 nt, Homo sapiens
  misc_RNA (1)...(19): siRNA sense strand
acgaugaccugauccacuu

SEQ ID NO: 1233374 - RNA, 19 nt, Homo sapiens
  misc_RNA (1)...(19): siRNA sense strand
gaugaucugccacgucuuc

SEQ ID NO: 1233375 - RNA, 19 nt, Homo sapiens
  misc_RNA (1)...(19): siRNA sense strand
ggacauugggaacaucguu

SEQ ID NO: 1233376 - RNA, 19 nt, Homo sapiens
  misc_RNA (1)...(19): siRNA sense strand
gcgccuaugcugugcagua

SEQ ID NO: 1233377 - RNA, 19 nt, Homo sapiens
  misc_RNA (1)...(19): siRNA sense strand
gggcaccggaucauugaaa

SEQ ID NO: 1233378 - RNA, 19 nt, Homo sapiens
  misc_RNA (1)...(19): siRNA sense strand
ccaucucgcuggccaucaa

SEQ ID NO: 1233379 - RNA, 19 nt, Homo sapiens
  misc_RNA (1)...(19): siRNA sense strand
gaagcagaaaggagaaauc

SEQ ID NO: 1233380 - RNA, 19 nt, Homo sapiens
  misc_RNA (1)...(19): siRNA sense strand
ggagagcggcuuccacaac

SEQ ID NO: 1233381 - RNA, 19 nt, Homo sapiens
  misc_RNA (1)...(19): siRNA sense strand
gccguaagcaggaucaaga

SEQ ID NO: 1233382 - RNA, 19 nt, Homo sapiens
  misc_RNA (1)...(19): siRNA sense strand
caaggcagccgaggacaug

SEQ ID NO: 1233383 - RNA, 19 nt, Homo sapiens
  misc_RNA (1)...(19): siRNA sense strand
cgagaagaucguccacauu

SEQ ID NO: 1233384 - RNA, 19 nt, Homo sapiens
  misc_RNA (1)...(19): siRNA sense strand
gaaaaggcaguacaagaug

SEQ ID NO: 1233385 - RNA, 19 nt, Homo sapiens
  misc_RNA (1)...(19): siRNA sense strand
gauaguggccgaggugaag

SEQ ID NO: 1233386 - RNA, 19 nt, Homo sapiens
  misc_RNA (1)...(19): siRNA sense strand
ggaacaucguugugcugau

SEQ ID NO: 1233387 - RNA, 19 nt, Homo sapiens
  misc_RNA (1)...(19): siRNA sense strand
gaagcguccacuaauaaag

SEQ ID NO: 1233388 - RNA, 19 nt, Homo sapiens
  misc_RNA (1)...(19): siRNA sense strand
ccucagggccaaugggauu

SEQ ID NO: 1233389 - RNA, 19 nt, Homo sapiens
  misc_RNA (1)...(19): siRNA sense strand
gucaugcgccaggacauua

SEQ ID NO: 1233390 - RNA, 19 nt, Homo sapiens
  misc_RNA (1)...(19): siRNA sense strand
gaaucagucccgagucaag

SEQ ID NO: 1233391 - RNA, 19 nt, Homo sapiens
  misc_RNA (1)...(19): siRNA sense strand
aggcgaaucucagccaaug

SEQ ID NO: 1233392 - RNA, 19 nt, Homo sapiens
  misc_RNA (1)...(19): siRNA sense strand
ccaaccaccugcacuucca

SEQ ID NO: 1233393 - RNA, 19 nt, Homo sapiens
  misc_RNA (1)...(19): siRNA sense strand
aaucugggaagcugaauau

SEQ ID NO: 1233394 - RNA, 19 nt, Homo sapiens
  misc_RNA (1)...(19): siRNA sense strand
cgugaucauugccaacaug

SEQ ID NO: 1233395 - RNA, 19 nt, Homo sapiens
  misc_RNA (1)...(19): siRNA sense strand
cccaggacauguacaacga

SEQ ID NO: 1233396 - RNA, 19 nt, Homo sapiens
  misc_RNA (1)...(19): siRNA sense strand
gaggacaucgaccagauag

SEQ ID NO: 1233397 - RNA, 19 nt, Homo sapiens
  misc_RNA (1)...(19): siRNA sense strand
cgagaaggaggccgaguuc

SEQ ID NO: 1233398 - RNA, 19 nt, Homo sapiens
  misc_RNA (1)...(19): siRNA sense strand
uagcguggcauaccaggaa

SEQ ID NO: 1233399 - RNA, 19 nt, Homo sapiens
  misc_RNA (1)...(19): siRNA sense strand
ggucaugcgccaggacauu

SEQ ID NO: 1233400 - RNA, 19 nt, Homo sapiens
  misc_RNA (1)...(19): siRNA sense strand
ggcaccggaucauugaaau

SEQ ID NO: 1233401 - RNA, 19 nt, Homo sapiens
  misc_RNA (1)...(19): siRNA sense strand
ucggaaaacuguaaagaug

SEQ ID NO: 1233402 - RNA, 19 nt, Homo sapiens
  misc_RNA (1)...(19): siRNA sense strand
cuucauuucuacccagaga

SEQ ID NO: 1233403 - RNA, 19 nt, Homo sapiens
  misc_RNA (1)...(19): siRNA sense strand
aagcguccacuaauaaaga

SEQ ID NO: 1233404 - RNA, 19 nt, Homo sapiens
  misc_RNA (1)...(19): siRNA sense strand
gagaagcagaaaggagaaa

SEQ ID NO: 1233405 - RNA, 19 nt, Homo sapiens
  misc_RNA (1)...(19): siRNA sense strand
gaggaugcucagcugauug

SEQ ID NO: 1233406 - RNA, 19 nt, Homo sapiens
  misc_RNA (1)...(19): siRNA sense strand
gcccagaaauuagccaaaa

SEQ ID NO: 1233407 - RNA, 19 nt, Homo sapiens
  misc_RNA (1)...(19): siRNA sense strand
ucaucaagcacaucucuuc

SEQ ID NO: 1233408 - RNA, 19 nt, Homo sapiens
  misc_RNA (1)...(19): siRNA sense strand
ggacauguacaacgaugac

SEQ ID NO: 1233409 - RNA, 19 nt, Homo sapiens
  misc_RNA (1)...(19): siRNA sense strand
uggcuucauucccaaccua

SEQ ID NO: 1233410 - RNA, 19 nt, Homo sapiens
  misc_RNA (1)...(19): siRNA sense strand
aaaaggcaguacaagauga

SEQ ID NO: 1233411 - RNA, 19 nt, Homo sapiens
  misc_RNA (1)...(19): siRNA sense strand
gguuucagcguccagaaug

SEQ ID NO: 1233412 - RNA, 19 nt, Homo sapiens
  misc_RNA (1)...(19): siRNA sense strand
ggugcagagucaucaagca

SEQ ID NO: 1233413 - RNA, 19 nt, Homo sapiens
  misc_RNA (1)...(19): siRNA sense strand
ugccagagcauuauuaagg

SEQ ID NO: 1233414 - RNA, 19 nt, Homo sapiens
  misc_RNA (1)...(19): siRNA sense strand
gugaccagaucauguccau

SEQ ID NO: 1233415 - RNA, 19 nt, Homo sapiens
  misc_RNA (1)...(19): siRNA sense strand
gcucaauacccaggacaug

SEQ ID NO: 1233416 - RNA, 19 nt, Homo sapiens
  misc_RNA (1)...(19): siRNA sense strand
acacacaggagacaaugau

SEQ ID NO: 1233417 - RNA, 19 nt, Homo sapiens
  misc_RNA (1)...(19): siRNA sense strand
gacaaaacuccuuccaaaa

SEQ ID NO: 1233418 - RNA, 19 nt, Homo sapiens
  misc_RNA (1)...(19): siRNA sense strand
ccacuaauaaagagucaag

SEQ ID NO: 1233419 - RNA, 19 nt, Homo sapiens
  misc_RNA (1)...(19): siRNA sense strand
caugaaugcggccuacuca

SEQ ID NO: 1233420 - RNA, 19 nt, Homo sapiens
  misc_RNA (1)...(19): siRNA sense strand
caccggaucauugaaauca

SEQ ID NO: 1233421 - RNA, 19 nt, Homo sapiens
  misc_RNA (1)...(19): siRNA sense strand
gaccaccguguuaaucaga

SEQ ID NO: 1233422 - RNA, 19 nt, Homo sapiens
  misc_RNA (1)...(19): siRNA sense strand
ucauagagaagcagaaagg

SEQ ID NO: 1233423 - RNA, 19 nt, Homo sapiens
  misc_RNA (1)...(19): siRNA sense strand
gaccauccguucgccuuac

SEQ ID NO: 1233424 - RNA, 19 nt, Homo sapiens
  misc_RNA (1)...(19): siRNA sense strand
gcaccggaucauugaaauc

SEQ ID NO: 1233425 - RNA, 19 nt, Homo sapiens
  misc_RNA (1)...(19): siRNA sense strand
cuacucaggcuacgucuac

SEQ ID NO: 1233426 - RNA, 19 nt, Homo sapiens
  misc_RNA (1)...(19): siRNA sense strand
accagaucauguccauuaa

SEQ ID NO: 1233427 - RNA, 19 nt, Homo sapiens
  misc_RNA (1)...(19): siRNA sense strand
aggaggacaucgaccagau

SEQ ID NO: 1233428 - RNA, 19 nt, Homo sapiens
  misc_RNA (1)...(19): siRNA sense strand
gggaaaaggcaguacaaga

SEQ ID NO: 1233429 - RNA, 19 nt, Homo sapiens
  misc_RNA (1)...(19): siRNA sense strand
agaaaucugggaagcugaa

SEQ ID NO: 1233430 - RNA, 19 nt, Homo sapiens
  misc_RNA (1)...(19): siRNA sense strand
gagcagccuguuuacaucu

SEQ ID NO: 1233431 - RNA, 19 nt, Homo sapiens
  misc_RNA (1)...(19): siRNA sense strand
caaugccagccgcgaugua

SEQ ID NO: 1233432 - RNA, 19 nt, Homo sapiens
  misc_RNA (1)...(19): siRNA sense strand
gugaccaccguguuaauca

SEQ ID NO: 1233433 - RNA, 19 nt, Homo sapiens
  misc_RNA (1)...(19): siRNA sense strand
ccagaucauguccauuaau

SEQ ID NO: 1233434 - RNA, 19 nt, Homo sapiens
  misc_RNA (1)...(19): siRNA sense strand
cacaggagacaaugaugga

SEQ ID NO: 1233435 - RNA, 19 nt, Homo sapiens
  misc_RNA (1)...(19): siRNA sense strand
ggccaucgaggaggugaaa

SEQ ID NO: 1233436 - RNA, 19 nt, Homo sapiens
  misc_RNA (1)...(19): siRNA sense strand
caaagaagguggcaucauu

SEQ ID NO: 1233437 - RNA, 19 nt, Homo sapiens
  misc_RNA (1)...(19): siRNA sense strand
ggaagaagauggucacuac

SEQ ID NO: 1233438 - RNA, 19 nt, Homo sapiens
  misc_RNA (1)...(19): siRNA sense strand
gcaagaagcaguauaagau

SEQ ID NO: 1233439 - RNA, 19 nt, Homo sapiens
  misc_RNA (1)...(19): siRNA sense strand
caauggaccuguugacaau

SEQ ID NO: 1233440 - RNA, 19 nt, Homo sapiens
  misc_RNA (1)...(19): siRNA sense strand
ggagagauccacaugaaga

SEQ ID NO: 1233441 - RNA, 19 nt, Homo sapiens
  misc_RNA (1)...(19): siRNA sense strand
gcaaaaggcugcuaagauc

SEQ ID NO: 1233442 - RNA, 19 nt, Homo sapiens
  misc_RNA (1)...(19): siRNA sense strand
ccacccagcugcuaucaga

SEQ ID NO: 1233443 - RNA, 19 nt, Homo sapiens
  misc_RNA (1)...(19): siRNA sense strand
gcagcgcucugaucucaau

SEQ ID NO: 1233444 - RNA, 19 nt, Homo sapiens
  misc_RNA (1)...(19): siRNA sense strand
uaacaacauuccagagaca

SEQ ID NO: 1233445 - RNA, 19 nt, Homo sapiens
  misc_RNA (1)...(19): siRNA sense strand
gaauacagcgacaucauca

SEQ ID NO: 1233446 - RNA, 19 nt, Homo sapiens
  misc_RNA (1)...(19): siRNA sense strand
cagcagcgcucugaucuca

SEQ ID NO: 1233447 - RNA, 19 nt, Homo sapiens
  misc_RNA (1)...(19): siRNA sense strand
gaucaucuuugcugccaau

SEQ ID NO: 1233448 - RNA, 19 nt, Homo sapiens
  misc_RNA (1)...(19): siRNA sense strand
gaccagaucauguccauca

SEQ ID NO: 1233449 - RNA, 19 nt, Homo sapiens
  misc_RNA (1)...(19): siRNA sense strand
ggccagaccucaaguacca

SEQ ID NO: 1233450 - RNA, 19 nt, Homo sapiens
  misc_RNA (1)...(19): siRNA sense strand
ucacuacugugccagcaaa

SEQ ID NO: 1233451 - RNA, 19 nt, Homo sapiens
  misc_RNA (1)...(19): siRNA sense strand
ucggagagauccacaugaa

SEQ ID NO: 1233452 - RNA, 19 nt, Homo sapiens
  misc_RNA (1)...(19): siRNA sense strand
uggcaucauuuccaaguuu

SEQ ID NO: 1233453 - RNA, 19 nt, Homo sapiens
  misc_RNA (1)...(19): siRNA sense strand
cagaucauguccaucaaug

SEQ ID NO: 1233454 - RNA, 19 nt, Homo sapiens
  misc_RNA (1)...(19): siRNA sense strand
ggaagcagcagcgcucuga

SEQ ID NO: 1233455 - RNA, 19 nt, Homo sapiens
  misc_RNA (1)...(19): siRNA sense strand
guacaacgacgaccucauc

SEQ ID NO: 1233456 - RNA, 19 nt, Homo sapiens
  misc_RNA (1)...(19): siRNA sense strand
aagaagcaguauaagauga

SEQ ID NO: 1233457 - RNA, 19 nt, Homo sapiens
  misc_RNA (1)...(19): siRNA sense strand
agacacaggugaagcucaa

SEQ ID NO: 1233458 - RNA, 19 nt, Homo sapiens
  misc_RNA (1)...(19): siRNA sense strand
caucuuugcugccaauuac

SEQ ID NO: 1233459 - RNA, 19 nt, Homo sapiens
  misc_RNA (1)...(19): siRNA sense strand
gaaggcaagaagcaguaua

SEQ ID NO: 1233460 - RNA, 19 nt, Homo sapiens
  misc_RNA (1)...(19): siRNA sense strand
gaaggaauacagcgacauc

SEQ ID NO: 1233461 - RNA, 19 nt, Homo sapiens
  misc_RNA (1)...(19): siRNA sense strand
ggaauacagcgacaucauc

SEQ ID NO: 1233462 - RNA, 19 nt, Homo sapiens
  misc_RNA (1)...(19): siRNA sense strand
ggaggacauugaccagauc

SEQ ID NO: 1233463 - RNA, 19 nt, Homo sapiens
  misc_RNA (1)...(19): siRNA sense strand
gagaucaagaugagucuga

SEQ ID NO: 1233464 - RNA, 19 nt, Homo sapiens
  misc_RNA (1)...(19): siRNA sense strand
gggcaucaccuacuacauc

SEQ ID NO: 1233465 - RNA, 19 nt, Homo sapiens
  misc_RNA (1)...(19): siRNA sense strand
caagaagcaguauaagaug

SEQ ID NO: 1233466 - RNA, 19 nt, Homo sapiens
  misc_RNA (1)...(19): siRNA sense strand
aaagaagguggcaucauuu

SEQ ID NO: 1233467 - RNA, 19 nt, Homo sapiens
  misc_RNA (1)...(19): siRNA sense strand
acauggagcugcccuugga

SEQ ID NO: 1233468 - RNA, 19 nt, Homo sapiens
  misc_RNA (1)...(19): siRNA sense strand
cagaagagaggcugaagug

SEQ ID NO: 1233469 - RNA, 19 nt, Homo sapiens
  misc_RNA (1)...(19): siRNA sense strand
ugacggaaguggaccucuu

SEQ ID NO: 1233470 - RNA, 19 nt, Homo sapiens
  misc_RNA (1)...(19): siRNA sense strand
ucaagggccugaagaacca

SEQ ID NO: 1233471 - RNA, 19 nt, Homo sapiens
  misc_RNA (1)...(19): siRNA sense strand
gaugaucugccauguguuc

SEQ ID NO: 1233472 - RNA, 19 nt, Homo sapiens
  misc_RNA (1)...(19): siRNA sense strand
ggcaagaagcaguauaaga

SEQ ID NO: 1233473 - RNA, 19 nt, Homo sapiens
  misc_RNA (1)...(19): siRNA sense strand
uggcagagaucaagaugag

SEQ ID NO: 1233474 - RNA, 19 nt, Homo sapiens
  misc_RNA (1)...(19): siRNA sense strand
ucaccacgguccuuaucaa

SEQ ID NO: 1233475 - RNA, 19 nt, Homo sapiens
  misc_RNA (1)...(19): siRNA sense strand
gaagguggcaucauuucca

SEQ ID NO: 1233476 - RNA, 19 nt, Homo sapiens
  misc_RNA (1)...(19): siRNA sense strand
agaagauggucacuacugu

SEQ ID NO: 1233477 - RNA, 19 nt, Homo sapiens
  misc_RNA (1)...(19): siRNA sense strand
gauccuggccaacaugaug

SEQ ID NO: 1233478 - RNA, 19 nt, Homo sapiens
  misc_RNA (1)...(19): siRNA sense strand
aaguggaccucuucauuuc

SEQ ID NO: 1233479 - RNA, 19 nt, Homo sapiens
  misc_RNA (1)...(19): siRNA sense strand
cccaggagauguacaacga

SEQ ID NO: 1233480 - RNA, 19 nt, Homo sapiens
  misc_RNA (1)...(19): siRNA sense strand
cgacauugggaacauugua

SEQ ID NO: 1233481 - RNA, 19 nt, Homo sapiens
  misc_RNA (1)...(19): siRNA sense strand
ccacagcccacgagaagau

SEQ ID NO: 1233482 - RNA, 19 nt, Homo sapiens
  misc_RNA (1)...(19): siRNA sense strand
ggacgacagcuaccuagag

SEQ ID NO: 1233483 - RNA, 19 nt, Homo sapiens
  misc_RNA (1)...(19): siRNA sense strand
aggugaagcucaacauugu

SEQ ID NO: 1233484 - RNA, 19 nt, Homo sapiens
  misc_RNA (1)...(19): siRNA sense strand
caggugaagcucaacauug

SEQ ID NO: 1233485 - RNA, 19 nt, Homo sapiens
  misc_RNA (1)...(19): siRNA sense strand
gaagcaguauaagaugauc

SEQ ID NO: 1233486 - RNA, 19 nt, Homo sapiens
  misc_RNA (1)...(19): siRNA sense strand
gaacauuguagugcugaug

SEQ ID NO: 1233487 - RNA, 19 nt, Homo sapiens
  misc_RNA (1)...(19): siRNA sense strand
aagaugagucugagcauga

SEQ ID NO: 1233488 - RNA, 19 nt, Homo sapiens
  misc_RNA (1)...(19): siRNA sense strand
gaccagaucguggcagaga

SEQ ID NO: 1233489 - RNA, 19 nt, Homo sapiens
  misc_RNA (1)...(19): siRNA sense strand
aauaacaacauuccagaga

SEQ ID NO: 1233490 - RNA, 19 nt, Homo sapiens
  misc_RNA (1)...(19): siRNA sense strand
gaucaagguuuuaaaugca

SEQ ID NO: 1233491 - RNA, 19 nt, Homo sapiens
  misc_RNA (1)...(19): siRNA sense strand
gaucucaauggaccuguug

SEQ ID NO: 1233492 - RNA, 19 nt, Homo sapiens
  misc_RNA (1)...(19): siRNA sense strand
ucaacacccaggagaugua

SEQ ID NO: 1233493 - RNA, 19 nt, Homo sapiens
  misc_RNA (1)...(19): siRNA sense strand
aggagggcaucaccuacua

SEQ ID NO: 1233494 - RNA, 19 nt, Homo sapiens
  misc_RNA (1)...(19): siRNA sense strand
aaggcaagaagcaguauaa

SEQ ID NO: 1233495 - RNA, 19 nt, Homo sapiens
  misc_RNA (1)...(19): siRNA sense strand
gcgcucugaucucaaugga

SEQ ID NO: 1233496 - RNA, 19 nt, Homo sapiens
  misc_RNA (1)...(19): siRNA sense strand
ccgaagacuugagccagaa

SEQ ID NO: 1233497 - RNA, 19 nt, Homo sapiens
  misc_RNA (1)...(19): siRNA sense strand
caucgacgggaucaucuuu

SEQ ID NO: 1233498 - RNA, 19 nt, Homo sapiens
  misc_RNA (1)...(19): siRNA sense strand
auggaccuguugacaauaa

SEQ ID NO: 1233499 - RNA, 19 nt, Homo sapiens
  misc_RNA (1)...(19): siRNA sense strand
uagagggcauggacugcaa

SEQ ID NO: 1233500 - RNA, 19 nt, Homo sapiens
  misc_RNA (1)...(19): siRNA sense strand
ggaccaggaggaggacauu

SEQ ID NO: 1233501 - RNA, 19 nt, Homo sapiens
  misc_RNA (1)...(19): siRNA sense strand
ggucggagagauccacaug

SEQ ID NO: 1233502 - RNA, 19 nt, Homo sapiens
  misc_RNA (1)...(19): siRNA sense strand
gcccugaggacgacagcua

SEQ ID NO: 1233503 - RNA, 19 nt, Homo sapiens
  misc_RNA (1)...(19): siRNA sense strand
caaacucggagaacugcaa

SEQ ID NO: 1233504 - RNA, 19 nt, Homo sapiens
  misc_RNA (1)...(19): siRNA sense strand
cugaggaggaggacuauga

SEQ ID NO: 1233505 - RNA, 19 nt, Homo sapiens
  misc_RNA (1)...(19): siRNA sense strand
ggaugagcccuccguccuu

SEQ ID NO: 1233506 - RNA, 19 nt, Homo sapiens
  misc_RNA (1)...(19): siRNA sense strand
cccagacgcugacggaagu

SEQ ID NO: 1233507 - RNA, 19 nt, Homo sapiens
  misc_RNA (1)...(19): siRNA sense strand
ggaucaagguuuuaaaugc

SEQ ID NO: 1233508 - RNA, 19 nt, Homo sapiens
  misc_RNA (1)...(19): siRNA sense strand
uggccaacaugaugaaugg

SEQ ID NO: 1233509 - RNA, 19 nt, Homo sapiens
  misc_RNA (1)...(19): siRNA sense strand
gcucaucgcccagucuauc

SEQ ID NO: 1233510 - RNA, 19 nt, Homo sapiens
  misc_RNA (1)...(19): siRNA sense strand
ucaucuuugcugccaauua

SEQ ID NO: 1233511 - RNA, 19 nt, Homo sapiens
  misc_RNA (1)...(19): siRNA sense strand
gcucugacuacgugaacaa

SEQ ID NO: 1233512 - RNA, 19 nt, Homo sapiens
  misc_RNA (1)...(19): siRNA sense strand
ggacuccagcucugacuac

SEQ ID NO: 1233513 - RNA, 19 nt, Homo sapiens
  misc_RNA (1)...(19): siRNA sense strand
acgacgaccucauccacuu

SEQ ID NO: 1233514 - RNA, 19 nt, Homo sapiens
  misc_RNA (1)...(19): siRNA sense strand
ugaggcccaugaccaggaa

SEQ ID NO: 1233515 - RNA, 19 nt, Homo sapiens
  misc_RNA (1)...(19): siRNA sense strand
aggaggacauugaccagau

SEQ ID NO: 1233516 - RNA, 19 nt, Homo sapiens
  misc_RNA (1)...(19): siRNA sense strand
ccaacucggucggagagau

SEQ ID NO: 1233517 - RNA, 19 nt, Homo sapiens
  misc_RNA (1)...(19): siRNA sense strand
gugaagcucaacauuguca

SEQ ID NO: 1233518 - RNA, 19 nt, Homo sapiens
  misc_RNA (1)...(19): siRNA sense strand
gaaccagacacaggugaag

SEQ ID NO: 1233519 - RNA, 19 nt, Homo sapiens
  misc_RNA (1)...(19): siRNA sense strand
ggaacauuguagugcugau

SEQ ID NO: 1233520 - RNA, 19 nt, Homo sapiens
  misc_RNA (1)...(19): siRNA sense strand
gacuugagccagaaggaau

SEQ ID NO: 1233521 - RNA, 19 nt, Homo sapiens
  misc_RNA (1)...(19): siRNA sense strand
gugcagaauggaauuaucu

SEQ ID NO: 1233522 - RNA, 19 nt, Homo sapiens
  misc_RNA (1)...(19): siRNA sense strand
ggaaggcaagaagcaguau

SEQ ID NO: 1233523 - RNA, 19 nt, Homo sapiens
  misc_RNA (1)...(19): siRNA sense strand
uccaagcucuguccaacuc

SEQ ID NO: 1233524 - RNA, 19 nt, Homo sapiens
  misc_RNA (1)...(19): siRNA sense strand
ggccugaggacucuguaga

SEQ ID NO: 1233525 - RNA, 19 nt, Homo sapiens
  misc_RNA (1)...(19): siRNA sense strand
caacucggucggagagauc

SEQ ID NO: 1233526 - RNA, 19 nt, Homo sapiens
  misc_RNA (1)...(19): siRNA sense strand
gacauugggaacauuguag

SEQ ID NO: 1233527 - RNA, 19 nt, Homo sapiens
  misc_RNA (1)...(19): siRNA sense strand
ugaggacgacagcuaccua

SEQ ID NO: 1233528 - RNA, 19 nt, Homo sapiens
  misc_RNA (1)...(19): siRNA sense strand
aagguggcaucauuuccaa

SEQ ID NO: 1233529 - RNA, 19 nt, Homo sapiens
  misc_RNA (1)...(19): siRNA sense strand
caacauuccagagacaaag

SEQ ID NO: 1233530 - RNA, 19 nt, Homo sapiens
  misc_RNA (1)...(19): siRNA sense strand
acccagaggaucaagguuu

SEQ ID NO: 1233531 - RNA, 19 nt, Homo sapiens
  misc_RNA (1)...(19): siRNA sense strand
uaucugcagccucaugaga

SEQ ID NO: 1233532 - RNA, 19 nt, Homo sapiens
  misc_RNA (1)...(19): siRNA sense strand
ggucaccacgguccuuauc

SEQ ID NO: 1233533 - RNA, 19 nt, Homo sapiens
  misc_RNA (1)...(19): siRNA sense strand
gaggagggcaucaccuacu

SEQ ID NO: 1233534 - RNA, 19 nt, Homo sapiens
  misc_RNA (1)...(19): siRNA sense strand
gaagcacaagggcgagauc

SEQ ID NO: 1233535 - RNA, 19 nt, Homo sapiens
  misc_RNA (1)...(19): siRNA sense strand
cagcucaucgcccagucua

SEQ ID NO: 1233536 - RNA, 19 nt, Homo sapiens
  misc_RNA (1)...(19): siRNA sense strand
gacaguggcuggacaguuc

SEQ ID NO: 1233537 - RNA, 19 nt, Homo sapiens
  misc_RNA (1)...(19): siRNA sense strand
ggacaguggcuggacaguu

SEQ ID NO: 1233538 - RNA, 19 nt, Homo sapiens
  misc_RNA (1)...(19): siRNA sense strand
gacaguggcuggacaguuc

SEQ ID NO: 1233539 - RNA, 19 nt, Homo sapiens
  misc_RNA (1)...(19): siRNA sense strand
gggagcugcuuugcugaaa

SEQ ID NO: 1233540 - RNA, 19 nt, Homo sapiens
  misc_RNA (1)...(19): siRNA sense strand
ggacaguggcuggacaguu

SEQ ID NO: 1233541 - RNA, 19 nt, Homo sapiens
  misc_RNA (1)...(19): siRNA sense strand
gagcugcuuugcugaaaau

SEQ ID NO: 1233542 - RNA, 19 nt, Homo sapiens
  misc_RNA (1)...(19): siRNA sense strand
ggagcugcuuugcugaaaa

SEQ ID NO: 1233543 - RNA, 19 nt, Homo sapiens
  misc_RNA (1)...(19): siRNA sense strand
gacaguggcuggacaguuc

SEQ ID NO: 1233544 - RNA, 19 nt, Homo sapiens
  misc_RNA (1)...(19): siRNA sense strand
ggacaguggcuggacaguu

SEQ ID NO: 1233545 - RNA, 19 nt, Homo sapiens
  misc_RNA (1)...(19): siRNA sense strand
gacaguggcuggacaguuc

SEQ ID NO: 1233546 - RNA, 19 nt, Homo sapiens
  misc_RNA (1)...(19): siRNA sense strand
ggacaguggcuggacaguu

SEQ ID NO: 1233547 - RNA, 19 nt, Homo sapiens
  misc_RNA (1)...(19): siRNA sense strand
gacaguggcuggacaguuc

SEQ ID NO: 1233548 - RNA, 19 nt, Homo sapiens
  misc_RNA (1)...(19): siRNA sense strand
gggagcugcuuugcugaaa

SEQ ID NO: 1233549 - RNA, 19 nt, Homo sapiens
  misc_RNA (1)...(19): siRNA sense strand
ggacaguggcuggacaguu

SEQ ID NO: 1233550 - RNA, 19 nt, Homo sapiens
  misc_RNA (1)...(19): siRNA sense strand
gagcugcuuugcugaaaau

SEQ ID NO: 1233551 - RNA, 19 nt, Homo sapiens
  misc_RNA (1)...(19): siRNA sense strand
ggagcugcuuugcugaaaa

SEQ ID NO: 1233552 - RNA, 19 nt, Homo sapiens
  misc_RNA (1)...(19): siRNA sense strand
gacaguggcuggacaguuc

SEQ ID NO: 1233553 - RNA, 19 nt, Homo sapiens
  misc_RNA (1)...(19): siRNA sense strand
ggacaguggcuggacaguu

SEQ ID NO: 1233554 - RNA, 19 nt, Homo sapiens
  misc_RNA (1)...(19): siRNA sense strand
cagaggaacugcugaauga

SEQ ID NO: 1233555 - RNA, 19 nt, Homo sapiens
  misc_RNA (1)...(19): siRNA sense strand
ugaaauaccugcaaaguag

SEQ ID NO: 1233556 - RNA, 19 nt, Homo sapiens
  misc_RNA (1)...(19): siRNA sense strand
aagaacaucuccagaggaa

SEQ ID NO: 1233557 - RNA, 19 nt, Homo sapiens
  misc_RNA (1)...(19): siRNA sense strand
gaacaucuccagaggaacu

SEQ ID NO: 1233558 - RNA, 19 nt, Homo sapiens
  misc_RNA (1)...(19): siRNA sense strand
ccagaggaacugcugaaug

SEQ ID NO: 1233559 - RNA, 19 nt, Homo sapiens
  misc_RNA (1)...(19): siRNA sense strand
uugaaauaccugcaaagua

SEQ ID NO: 1233560 - RNA, 19 nt, Homo sapiens
  misc_RNA (1)...(19): siRNA sense strand
aaauggaggaggaggaauu

SEQ ID NO: 1233561 - RNA, 19 nt, Homo sapiens
  misc_RNA (1)...(19): siRNA sense strand
ccaaauggaggaggaggaa

SEQ ID NO: 1233562 - RNA, 19 nt, Homo sapiens
  misc_RNA (1)...(19): siRNA sense strand
cccgcaaccugcuccuaaa

SEQ ID NO: 1233563 - RNA, 19 nt, Homo sapiens
  misc_RNA (1)...(19): siRNA sense strand
guugaaauaccugcaaagu

SEQ ID NO: 1233564 - RNA, 19 nt, Homo sapiens
  misc_RNA (1)...(19): siRNA sense strand
ugguugaaauaccugcaaa

SEQ ID NO: 1233565 - RNA, 19 nt, Homo sapiens
  misc_RNA (1)...(19): siRNA sense strand
gcagaaggcuaucagaaac

SEQ ID NO: 1233566 - RNA, 19 nt, Homo sapiens
  misc_RNA (1)...(19): siRNA sense strand
ggaaacaucggccaugguu

SEQ ID NO: 1233567 - RNA, 19 nt, Homo sapiens
  misc_RNA (1)...(19): siRNA sense strand
uggcaagaaucuccaguuu

SEQ ID NO: 1233568 - RNA, 19 nt, Homo sapiens
  misc_RNA (1)...(19): siRNA sense strand
aaacaucggccaugguuga

SEQ ID NO: 1233569 - RNA, 19 nt, Homo sapiens
  misc_RNA (1)...(19): siRNA sense strand
gccucgagcuggagaguuc

SEQ ID NO: 1233570 - RNA, 19 nt, Homo sapiens
  misc_RNA (1)...(19): siRNA sense strand
ugagcaaagaaguaaguua

SEQ ID NO: 1233571 - RNA, 19 nt, Homo sapiens
  misc_RNA (1)...(19): siRNA sense strand
gcaacugggugggguaauu

SEQ ID NO: 1233572 - RNA, 19 nt, Homo sapiens
  misc_RNA (1)...(19): siRNA sense strand
gcagagagcagugggaaaa

SEQ ID NO: 1233573 - RNA, 19 nt, Homo sapiens
  misc_RNA (1)...(19): siRNA sense strand
ugcagaaggcuaucagaaa

SEQ ID NO: 1233574 - RNA, 19 nt, Homo sapiens
  misc_RNA (1)...(19): siRNA sense strand
gaaaaugccagaagaacuc

SEQ ID NO: 1233575 - RNA, 19 nt, Homo sapiens
  misc_RNA (1)...(19): siRNA sense strand
ggaguuuccaggugucuag

SEQ ID NO: 1233576 - RNA, 19 nt, Homo sapiens
  misc_RNA (1)...(19): siRNA sense strand
ggccaugguugauccaaaa

SEQ ID NO: 1233577 - RNA, 19 nt, Homo sapiens
  misc_RNA (1)...(19): siRNA sense strand
cggccaugguugauccaaa

SEQ ID NO: 1233578 - RNA, 19 nt, Homo sapiens
  misc_RNA (1)...(19): siRNA sense strand
guccagccgcagagaagua

SEQ ID NO: 1233579 - RNA, 19 nt, Homo sapiens
  misc_RNA (1)...(19): siRNA sense strand
cuaggaaaaugccagaaga

SEQ ID NO: 1233580 - RNA, 19 nt, Homo sapiens
  misc_RNA (1)...(19): siRNA sense strand
cgggaaagggagacgauug

SEQ ID NO: 1233581 - RNA, 19 nt, Homo sapiens
  misc_RNA (1)...(19): siRNA sense strand
gcagaaggcuaucagaaac

SEQ ID NO: 1233582 - RNA, 19 nt, Homo sapiens
  misc_RNA (1)...(19): siRNA sense strand
ggaaacaucggccaugguu

SEQ ID NO: 1233583 - RNA, 19 nt, Homo sapiens
  misc_RNA (1)...(19): siRNA sense strand
uggcaagaaucuccaguuu

SEQ ID NO: 1233584 - RNA, 19 nt, Homo sapiens
  misc_RNA (1)...(19): siRNA sense strand
aaacaucggccaugguuga

SEQ ID NO: 1233585 - RNA, 19 nt, Homo sapiens
  misc_RNA (1)...(19): siRNA sense strand
gcagcagccuccugaccaa

SEQ ID NO: 1233586 - RNA, 19 nt, Homo sapiens
  misc_RNA (1)...(19): siRNA sense strand
gccucgagcuggagaguuc

SEQ ID NO: 1233587 - RNA, 19 nt, Homo sapiens
  misc_RNA (1)...(19): siRNA sense strand
ugagcaaagaaguaaguua

SEQ ID NO: 1233588 - RNA, 19 nt, Homo sapiens
  misc_RNA (1)...(19): siRNA sense strand
gcaacugggugggguaauu

SEQ ID NO: 1233589 - RNA, 19 nt, Homo sapiens
  misc_RNA (1)...(19): siRNA sense strand
gcagagagcagugggaaaa

SEQ ID NO: 1233590 - RNA, 19 nt, Homo sapiens
  misc_RNA (1)...(19): siRNA sense strand
ugcagaaggcuaucagaaa

SEQ ID NO: 1233591 - RNA, 19 nt, Homo sapiens
  misc_RNA (1)...(19): siRNA sense strand
gaaaaugccagaagaacuc

SEQ ID NO: 1233592 - RNA, 19 nt, Homo sapiens
  misc_RNA (1)...(19): siRNA sense strand
ggaguuuccaggugucuag

SEQ ID NO: 1233593 - RNA, 19 nt, Homo sapiens
  misc_RNA (1)...(19): siRNA sense strand
ggccaugguugauccaaaa

SEQ ID NO: 1233594 - RNA, 19 nt, Homo sapiens
  misc_RNA (1)...(19): siRNA sense strand
cggccaugguugauccaaa

SEQ ID NO: 1233595 - RNA, 19 nt, Homo sapiens
  misc_RNA (1)...(19): siRNA sense strand
gcagccuccugaccaaugc

SEQ ID NO: 1233596 - RNA, 19 nt, Homo sapiens
  misc_RNA (1)...(19): siRNA sense strand
guccagccgcagagaagua

SEQ ID NO: 1233597 - RNA, 19 nt, Homo sapiens
  misc_RNA (1)...(19): siRNA sense strand
cuaggaaaaugccagaaga

SEQ ID NO: 1233598 - RNA, 19 nt, Homo sapiens
  misc_RNA (1)...(19): siRNA sense strand
cgggaaagggagacgauug

SEQ ID NO: 1233599 - RNA, 19 nt, Homo sapiens
  misc_RNA (1)...(19): siRNA sense strand
gaaagcagcuggugauuua

SEQ ID NO: 1233600 - RNA, 19 nt, Homo sapiens
  misc_RNA (1)...(19): siRNA sense strand
gaacggagacgacgccuuu

SEQ ID NO: 1233601 - RNA, 19 nt, Homo sapiens
  misc_RNA (1)...(19): siRNA sense strand
ugaagaagacgacgaguaa

SEQ ID NO: 1233602 - RNA, 19 nt, Homo sapiens
  misc_RNA (1)...(19): siRNA sense strand
ccaaguaccucugagaaga

SEQ ID NO: 1233603 - RNA, 19 nt, Homo sapiens
  misc_RNA (1)...(19): siRNA sense strand
gccaaauacuucucuaaga

SEQ ID NO: 1233604 - RNA, 19 nt, Homo sapiens
  misc_RNA (1)...(19): siRNA sense strand
gaugaaauccuuggagaaa

SEQ ID NO: 1233605 - RNA, 19 nt, Homo sapiens
  misc_RNA (1)...(19): siRNA sense strand
caagacauccggacccaaa

SEQ ID NO: 1233606 - RNA, 19 nt, Homo sapiens
  misc_RNA (1)...(19): siRNA sense strand
gcagaggaaggaaaugauu

SEQ ID NO: 1233607 - RNA, 19 nt, Homo sapiens
  misc_RNA (1)...(19): siRNA sense strand
cgaagaucaugcccaagaa

SEQ ID NO: 1233608 - RNA, 19 nt, Homo sapiens
  misc_RNA (1)...(19): siRNA sense strand
caaaaguccuucgaugaua

SEQ ID NO: 1233609 - RNA, 19 nt, Homo sapiens
  misc_RNA (1)...(19): siRNA sense strand
ucagcuauguguauaugaa

SEQ ID NO: 1233610 - RNA, 19 nt, Homo sapiens
  misc_RNA (1)...(19): siRNA sense strand
gaaaaucagcuauguguau

SEQ ID NO: 1233611 - RNA, 19 nt, Homo sapiens
  misc_RNA (1)...(19): siRNA sense strand
gggaaaagaugaaauccuu

SEQ ID NO: 1233612 - RNA, 19 nt, Homo sapiens
  misc_RNA (1)...(19): siRNA sense strand
ccaccuuucaugcauaaua

SEQ ID NO: 1233613 - RNA, 19 nt, Homo sapiens
  misc_RNA (1)...(19): siRNA sense strand
ugacuaaacuaggcuucaa

SEQ ID NO: 1233614 - RNA, 19 nt, Homo sapiens
  misc_RNA (1)...(19): siRNA sense strand
caagaagccagcagaggaa

SEQ ID NO: 1233615 - RNA, 19 nt, Homo sapiens
  misc_RNA (1)...(19): siRNA sense strand
aguaugaggccaugacuaa

SEQ ID NO: 1233616 - RNA, 19 nt, Homo sapiens
  misc_RNA (1)...(19): siRNA sense strand
gcucaaauaccagagaaga

SEQ ID NO: 1233617 - RNA, 19 nt, Homo sapiens
  misc_RNA (1)...(19): siRNA sense strand
gguugaacguccucagaug

SEQ ID NO: 1233618 - RNA, 19 nt, Homo sapiens
  misc_RNA (1)...(19): siRNA sense strand
ccaagggaaucagguugaa

SEQ ID NO: 1233619 - RNA, 19 nt, Homo sapiens
  misc_RNA (1)...(19): siRNA sense strand
uagggcuggugcucaaaua

SEQ ID NO: 1233620 - RNA, 19 nt, Homo sapiens
  misc_RNA (1)...(19): siRNA sense strand
guaccucugagaagauuaa

SEQ ID NO: 1233621 - RNA, 19 nt, Homo sapiens
  misc_RNA (1)...(19): siRNA sense strand
gaagggagugccagaagca

SEQ ID NO: 1233622 - RNA, 19 nt, Homo sapiens
  misc_RNA (1)...(19): siRNA sense strand
ggugauuuaugaagagauc

SEQ ID NO: 1233623 - RNA, 19 nt, Homo sapiens
  misc_RNA (1)...(19): siRNA sense strand
gaaaguaugaggccaugac

SEQ ID NO: 1233624 - RNA, 19 nt, Homo sapiens
  misc_RNA (1)...(19): siRNA sense strand
ccgaagaucaugcccaaga

SEQ ID NO: 1233625 - RNA, 19 nt, Homo sapiens
  misc_RNA (1)...(19): siRNA sense strand
gugcucaaauaccagagaa

SEQ ID NO: 1233626 - RNA, 19 nt, Homo sapiens
  misc_RNA (1)...(19): siRNA sense strand
gagaaaaucagcuaugugu

SEQ ID NO: 1233627 - RNA, 19 nt, Homo sapiens
  misc_RNA (1)...(19): siRNA sense strand
cugagaagauuaacaagac

SEQ ID NO: 1233628 - RNA, 19 nt, Homo sapiens
  misc_RNA (1)...(19): siRNA sense strand
ccucugagaagauuaacaa

SEQ ID NO: 1233629 - RNA, 19 nt, Homo sapiens
  misc_RNA (1)...(19): siRNA sense strand
cagcagaggaaggaaauga

SEQ ID NO: 1233630 - RNA, 19 nt, Homo sapiens
  misc_RNA (1)...(19): siRNA sense strand
ucaaauaccagagaagauc

SEQ ID NO: 1233631 - RNA, 19 nt, Homo sapiens
  misc_RNA (1)...(19): siRNA sense strand
aaucagcuauguguauaug

SEQ ID NO: 1233632 - RNA, 19 nt, Homo sapiens
  misc_RNA (1)...(19): siRNA sense strand
gaacguccucagaugacuu

SEQ ID NO: 1233633 - RNA, 19 nt, Homo sapiens
  misc_RNA (1)...(19): siRNA sense strand
cagcgacccugaagaagac

SEQ ID NO: 1233634 - RNA, 19 nt, Homo sapiens
  misc_RNA (1)...(19): siRNA sense strand
agaaagcagcuggugauuu

SEQ ID NO: 1233635 - RNA, 19 nt, Homo sapiens
  misc_RNA (1)...(19): siRNA sense strand
gagaaagcagcuggugauu

SEQ ID NO: 1233636 - RNA, 19 nt, Homo sapiens
  misc_RNA (1)...(19): siRNA sense strand
gaagccagcagaggaagga

SEQ ID NO: 1233637 - RNA, 19 nt, Homo sapiens
  misc_RNA (1)...(19): siRNA sense strand
ggagacgacgccuuugcaa

SEQ ID NO: 1233638 - RNA, 19 nt, Homo sapiens
  misc_RNA (1)...(19): siRNA sense strand
ccacagacugcgugagaga

SEQ ID NO: 1233639 - RNA, 19 nt, Homo sapiens
  misc_RNA (1)...(19): siRNA sense strand
gaagaucaugcccaagaag

SEQ ID NO: 1233640 - RNA, 19 nt, Homo sapiens
  misc_RNA (1)...(19): siRNA sense strand
guugaacguccucagauga

SEQ ID NO: 1233641 - RNA, 19 nt, Homo sapiens
  misc_RNA (1)...(19): siRNA sense strand
ugagaagauuaacaagaca

SEQ ID NO: 1233642 - RNA, 19 nt, Homo sapiens
  misc_RNA (1)...(19): siRNA sense strand
gaaaaccaaguaccucuga

SEQ ID NO: 1233643 - RNA, 19 nt, Homo sapiens
  misc_RNA (1)...(19): siRNA sense strand
cagagaagauccaaaaguc

SEQ ID NO: 1233644 - RNA, 19 nt, Homo sapiens
  misc_RNA (1)...(19): siRNA sense strand
ugaaauccuuggagaaaau

SEQ ID NO: 1233645 - RNA, 19 nt, Homo sapiens
  misc_RNA (1)...(19): siRNA sense strand
gcuggugauuuaugaagag

SEQ ID NO: 1233646 - RNA, 19 nt, Homo sapiens
  misc_RNA (1)...(19): siRNA sense strand
agagaaagcagcuggugau

SEQ ID NO: 1233647 - RNA, 19 nt, Homo sapiens
  misc_RNA (1)...(19): siRNA sense strand
cugaagaagacgacgagua

SEQ ID NO: 1233648 - RNA, 19 nt, Homo sapiens
  misc_RNA (1)...(19): siRNA sense strand
ucccaccuuucaugcauaa

SEQ ID NO: 1233649 - RNA, 19 nt, Homo sapiens
  misc_RNA (1)...(19): siRNA sense strand
caaguaccucugagaagau

SEQ ID NO: 1233650 - RNA, 19 nt, Homo sapiens
  misc_RNA (1)...(19): siRNA sense strand
aaaccaaguaccucugaga

SEQ ID NO: 1233651 - RNA, 19 nt, Homo sapiens
  misc_RNA (1)...(19): siRNA sense strand
caccuuucaugcauaauac

SEQ ID NO: 1233652 - RNA, 19 nt, Homo sapiens
  misc_RNA (1)...(19): siRNA sense strand
gaaagagugggaaaagaug

SEQ ID NO: 1233653 - RNA, 19 nt, Homo sapiens
  misc_RNA (1)...(19): siRNA sense strand
aggccacccucccaccuuu

SEQ ID NO: 1233654 - RNA, 19 nt, Homo sapiens
  misc_RNA (1)...(19): siRNA sense strand
gagaagauuaacaagacau

SEQ ID NO: 1233655 - RNA, 19 nt, Homo sapiens
  misc_RNA (1)...(19): siRNA sense strand
aaaaguccuucgaugauau

SEQ ID NO: 1233656 - RNA, 19 nt, Homo sapiens
  misc_RNA (1)...(19): siRNA sense strand
ggggaaugauuuugauaau

SEQ ID NO: 1233657 - RNA, 19 nt, Homo sapiens
  misc_RNA (1)...(19): siRNA sense strand
gggaaugauuuugauaaug

SEQ ID NO: 1233658 - RNA, 19 nt, Homo sapiens
  misc_RNA (1)...(19): siRNA sense strand
ucugagaagauuaacaaga

SEQ ID NO: 1233659 - RNA, 19 nt, Homo sapiens
  misc_RNA (1)...(19): siRNA sense strand
guaugaggccaugacuaaa

SEQ ID NO: 1233660 - RNA, 19 nt, Homo sapiens
  misc_RNA (1)...(19): siRNA sense strand
aaguaccucugagaagauu

SEQ ID NO: 1233661 - RNA, 19 nt, Homo sapiens
  misc_RNA (1)...(19): siRNA sense strand
cagaggaaggaaaugauuc

SEQ ID NO: 1233662 - RNA, 19 nt, Homo sapiens
  misc_RNA (1)...(19): siRNA sense strand
acagacugcgugagagaaa

SEQ ID NO: 1233663 - RNA, 19 nt, Homo sapiens
  misc_RNA (1)...(19): siRNA sense strand
cuucgaugauauugccaaa

SEQ ID NO: 1233664 - RNA, 19 nt, Homo sapiens
  misc_RNA (1)...(19): siRNA sense strand
ggcagaaaguccaaaggaa

SEQ ID NO: 1233665 - RNA, 19 nt, Homo sapiens
  misc_RNA (1)...(19): siRNA sense strand
gaagaugccggugcaaguu

SEQ ID NO: 1233666 - RNA, 19 nt, Homo sapiens
  misc_RNA (1)...(19): siRNA sense strand
gaucggaggccucgucauc

SEQ ID NO: 1233667 - RNA, 19 nt, Homo sapiens
  misc_RNA (1)...(19): siRNA sense strand
aacacgacccguucacuua

SEQ ID NO: 1233668 - RNA, 19 nt, Homo sapiens
  misc_RNA (1)...(19): siRNA sense strand
cagaaaguccaaaggaaca

SEQ ID NO: 1233669 - RNA, 19 nt, Homo sapiens
  misc_RNA (1)...(19): siRNA sense strand
ugaagaggagggaacuuuc

SEQ ID NO: 1233670 - RNA, 19 nt, Homo sapiens
  misc_RNA (1)...(19): siRNA sense strand
ggcagaaaguccaaaggaa

SEQ ID NO: 1233671 - RNA, 19 nt, Homo sapiens
  misc_RNA (1)...(19): siRNA sense strand
gaagaugccggugcaaguu

SEQ ID NO: 1233672 - RNA, 19 nt, Homo sapiens
  misc_RNA (1)...(19): siRNA sense strand
gaucggaggccucgucauc

SEQ ID NO: 1233673 - RNA, 19 nt, Homo sapiens
  misc_RNA (1)...(19): siRNA sense strand
aacacgacccguucacuua

SEQ ID NO: 1233674 - RNA, 19 nt, Homo sapiens
  misc_RNA (1)...(19): siRNA sense strand
cagaaaguccaaaggaaca

SEQ ID NO: 1233675 - RNA, 19 nt, Homo sapiens
  misc_RNA (1)...(19): siRNA sense strand
ugaagaggagggaacuuuc

SEQ ID NO: 1233676 - RNA, 19 nt, Homo sapiens
  misc_RNA (1)...(19): siRNA sense strand
gcgcugugcuuccgaauga

SEQ ID NO: 1233677 - RNA, 19 nt, Homo sapiens
  misc_RNA (1)...(19): siRNA sense strand
ggagccgacucuaacacua

SEQ ID NO: 1233678 - RNA, 19 nt, Homo sapiens
  misc_RNA (1)...(19): siRNA sense strand
cauuaaaggugaagagauc

SEQ ID NO: 1233679 - RNA, 19 nt, Homo sapiens
  misc_RNA (1)...(19): siRNA sense strand
ucacccagcuucccgagaa

SEQ ID NO: 1233680 - RNA, 19 nt, Homo sapiens
  misc_RNA (1)...(19): siRNA sense strand
gaaggucauuaaaggugaa

SEQ ID NO: 1233681 - RNA, 19 nt, Homo sapiens
  misc_RNA (1)...(19): siRNA sense strand
ccaagagcuucaccuucua

SEQ ID NO: 1233682 - RNA, 19 nt, Homo sapiens
  misc_RNA (1)...(19): siRNA sense strand
cauaauaaccagcuucuag

SEQ ID NO: 1233683 - RNA, 19 nt, Homo sapiens
  misc_RNA (1)...(19): siRNA sense strand
gaaggugcuuuaucugcau

SEQ ID NO: 1233684 - RNA, 19 nt, Homo sapiens
  misc_RNA (1)...(19): siRNA sense strand
cauugaaggugcuuuaucu

SEQ ID NO: 1233685 - RNA, 19 nt, Homo sapiens
  misc_RNA (1)...(19): siRNA sense strand
caucacagacuucuacuuc

SEQ ID NO: 1233686 - RNA, 19 nt, Homo sapiens
  misc_RNA (1)...(19): siRNA sense strand
gggcaggagccgacucuaa

SEQ ID NO: 1233687 - RNA, 19 nt, Homo sapiens
  misc_RNA (1)...(19): siRNA sense strand
cagggaaggucauuaaagg

SEQ ID NO: 1233688 - RNA, 19 nt, Homo sapiens
  misc_RNA (1)...(19): siRNA sense strand
gaacaucauggagcucuau

SEQ ID NO: 1233689 - RNA, 19 nt, Homo sapiens
  misc_RNA (1)...(19): siRNA sense strand
gaaggacucggcauugaag

SEQ ID NO: 1233690 - RNA, 19 nt, Homo sapiens
  misc_RNA (1)...(19): siRNA sense strand
gcagggaaggucauuaaag

SEQ ID NO: 1233691 - RNA, 19 nt, Homo sapiens
  misc_RNA (1)...(19): siRNA sense strand
uccaagagcuucaccuucu

SEQ ID NO: 1233692 - RNA, 19 nt, Homo sapiens
  misc_RNA (1)...(19): siRNA sense strand
cgagaaugguggcuggaau

SEQ ID NO: 1233693 - RNA, 19 nt, Homo sapiens
  misc_RNA (1)...(19): siRNA sense strand
gagaaugguggcuggaaug

SEQ ID NO: 1233694 - RNA, 19 nt, Homo sapiens
  misc_RNA (1)...(19): siRNA sense strand
ucacagacuucuacuucca

SEQ ID NO: 1233695 - RNA, 19 nt, Homo sapiens
  misc_RNA (1)...(19): siRNA sense strand
cggcauugaaggugcuuua

SEQ ID NO: 1233696 - RNA, 19 nt, Homo sapiens
  misc_RNA (1)...(19): siRNA sense strand
ggaagccagugccugucau

SEQ ID NO: 1233697 - RNA, 19 nt, Homo sapiens
  misc_RNA (1)...(19): siRNA sense strand
ugaaggacucggcauugaa

SEQ ID NO: 1233698 - RNA, 19 nt, Homo sapiens
  misc_RNA (1)...(19): siRNA sense strand
ccaaggaauccaagagcuu

SEQ ID NO: 1233699 - RNA, 19 nt, Homo sapiens
  misc_RNA (1)...(19): siRNA sense strand
caucauggagcucuaucuu

SEQ ID NO: 1233700 - RNA, 19 nt, Homo sapiens
  misc_RNA (1)...(19): siRNA sense strand
gcauugaaggugcuuuauc

SEQ ID NO: 1233701 - RNA, 19 nt, Homo sapiens
  misc_RNA (1)...(19): siRNA sense strand
gcaggagccgacucuaaca

SEQ ID NO: 1233702 - RNA, 19 nt, Homo sapiens
  misc_RNA (1)...(19): siRNA sense strand
gaucagccugucagacuca

SEQ ID NO: 1233703 - RNA, 19 nt, Homo sapiens
  misc_RNA (1)...(19): siRNA sense strand
gaagccagugccugucaug

SEQ ID NO: 1233704 - RNA, 19 nt, Homo sapiens
  misc_RNA (1)...(19): siRNA sense strand
gagccgacucuaacacuag

SEQ ID NO: 1233705 - RNA, 19 nt, Homo sapiens
  misc_RNA (1)...(19): siRNA sense strand
ugaacaucauggagcucua

SEQ ID NO: 1233706 - RNA, 19 nt, Homo sapiens
  misc_RNA (1)...(19): siRNA sense strand
augaaggacucggcauuga

SEQ ID NO: 1233707 - RNA, 19 nt, Homo sapiens
  misc_RNA (1)...(19): siRNA sense strand
gcauaauaaccagcuucua

SEQ ID NO: 1233708 - RNA, 19 nt, Homo sapiens
  misc_RNA (1)...(19): siRNA sense strand
aaggugcuuuaucugcaua

SEQ ID NO: 1233709 - RNA, 19 nt, Homo sapiens
  misc_RNA (1)...(19): siRNA sense strand
ggcaggagccgacucuaac

SEQ ID NO: 1233710 - RNA, 19 nt, Homo sapiens
  misc_RNA (1)...(19): siRNA sense strand
gcgcugugcuuccgaauga

SEQ ID NO: 1233711 - RNA, 19 nt, Homo sapiens
  misc_RNA (1)...(19): siRNA sense strand
ggagccgacucuaacacua

SEQ ID NO: 1233712 - RNA, 19 nt, Homo sapiens
  misc_RNA (1)...(19): siRNA sense strand
cauuaaaggugaagagauc

SEQ ID NO: 1233713 - RNA, 19 nt, Homo sapiens
  misc_RNA (1)...(19): siRNA sense strand
ucacccagcuucccgagaa

SEQ ID NO: 1233714 - RNA, 19 nt, Homo sapiens
  misc_RNA (1)...(19): siRNA sense strand
gaaggucauuaaaggugaa

SEQ ID NO: 1233715 - RNA, 19 nt, Homo sapiens
  misc_RNA (1)...(19): siRNA sense strand
ccaagagcuucaccuucua

SEQ ID NO: 1233716 - RNA, 19 nt, Homo sapiens
  misc_RNA (1)...(19): siRNA sense strand
cauaauaaccagcuucuag

SEQ ID NO: 1233717 - RNA, 19 nt, Homo sapiens
  misc_RNA (1)...(19): siRNA sense strand
gaaggugcuuuaucugcau

SEQ ID NO: 1233718 - RNA, 19 nt, Homo sapiens
  misc_RNA (1)...(19): siRNA sense strand
cauugaaggugcuuuaucu

SEQ ID NO: 1233719 - RNA, 19 nt, Homo sapiens
  misc_RNA (1)...(19): siRNA sense strand
caucacagacuucuacuuc

SEQ ID NO: 1233720 - RNA, 19 nt, Homo sapiens
  misc_RNA (1)...(19): siRNA sense strand
gggcaggagccgacucuaa

SEQ ID NO: 1233721 - RNA, 19 nt, Homo sapiens
  misc_RNA (1)...(19): siRNA sense strand
cagggaaggucauuaaagg

SEQ ID NO: 1233722 - RNA, 19 nt, Homo sapiens
  misc_RNA (1)...(19): siRNA sense strand
gaacaucauggagcucuau

SEQ ID NO: 1233723 - RNA, 19 nt, Homo sapiens
  misc_RNA (1)...(19): siRNA sense strand
gaaggacucggcauugaag

SEQ ID NO: 1233724 - RNA, 19 nt, Homo sapiens
  misc_RNA (1)...(19): siRNA sense strand
gcagggaaggucauuaaag

SEQ ID NO: 1233725 - RNA, 19 nt, Homo sapiens
  misc_RNA (1)...(19): siRNA sense strand
uccaagagcuucaccuucu

SEQ ID NO: 1233726 - RNA, 19 nt, Homo sapiens
  misc_RNA (1)...(19): siRNA sense strand
cgagaaugguggcuggaau

SEQ ID NO: 1233727 - RNA, 19 nt, Homo sapiens
  misc_RNA (1)...(19): siRNA sense strand
gagaaugguggcuggaaug

SEQ ID NO: 1233728 - RNA, 19 nt, Homo sapiens
  misc_RNA (1)...(19): siRNA sense strand
ucacagacuucuacuucca

SEQ ID NO: 1233729 - RNA, 19 nt, Homo sapiens
  misc_RNA (1)...(19): siRNA sense strand
cggcauugaaggugcuuua

SEQ ID NO: 1233730 - RNA, 19 nt, Homo sapiens
  misc_RNA (1)...(19): siRNA sense strand
ggaagccagugccugucau

SEQ ID NO: 1233731 - RNA, 19 nt, Homo sapiens
  misc_RNA (1)...(19): siRNA sense strand
ugaaggacucggcauugaa

SEQ ID NO: 1233732 - RNA, 19 nt, Homo sapiens
  misc_RNA (1)...(19): siRNA sense strand
ccaaggaauccaagagcuu

SEQ ID NO: 1233733 - RNA, 19 nt, Homo sapiens
  misc_RNA (1)...(19): siRNA sense strand
caucauggagcucuaucuu

SEQ ID NO: 1233734 - RNA, 19 nt, Homo sapiens
  misc_RNA (1)...(19): siRNA sense strand
gcauugaaggugcuuuauc

SEQ ID NO: 1233735 - RNA, 19 nt, Homo sapiens
  misc_RNA (1)...(19): siRNA sense strand
gcaggagccgacucuaaca

SEQ ID NO: 1233736 - RNA, 19 nt, Homo sapiens
  misc_RNA (1)...(19): siRNA sense strand
gaucagccugucagacuca

SEQ ID NO: 1233737 - RNA, 19 nt, Homo sapiens
  misc_RNA (1)...(19): siRNA sense strand
gaagccagugccugucaug

SEQ ID NO: 1233738 - RNA, 19 nt, Homo sapiens
  misc_RNA (1)...(19): siRNA sense strand
gagccgacucuaacacuag

SEQ ID NO: 1233739 - RNA, 19 nt, Homo sapiens
  misc_RNA (1)...(19): siRNA sense strand
ugaacaucauggagcucua

SEQ ID NO: 1233740 - RNA, 19 nt, Homo sapiens
  misc_RNA (1)...(19): siRNA sense strand
augaaggacucggcauuga

SEQ ID NO: 1233741 - RNA, 19 nt, Homo sapiens
  misc_RNA (1)...(19): siRNA sense strand
gcauaauaaccagcuucua

SEQ ID NO: 1233742 - RNA, 19 nt, Homo sapiens
  misc_RNA (1)...(19): siRNA sense strand
aaggugcuuuaucugcaua

SEQ ID NO: 1233743 - RNA, 19 nt, Homo sapiens
  misc_RNA (1)...(19): siRNA sense strand
ggcaggagccgacucuaac

SEQ ID NO: 1233744 - RNA, 19 nt, Homo sapiens
  misc_RNA (1)...(19): siRNA sense strand
ccacgugacuuucaacaau

SEQ ID NO: 1233745 - RNA, 19 nt, Homo sapiens
  misc_RNA (1)...(19): siRNA sense strand
ggagaugacacccagcaua

SEQ ID NO: 1233746 - RNA, 19 nt, Homo sapiens
  misc_RNA (1)...(19): siRNA sense strand
ggacaagcgucgccggaau

SEQ ID NO: 1233747 - RNA, 19 nt, Homo sapiens
  misc_RNA (1)...(19): siRNA sense strand
ccaccuugcuuguaccaaa

SEQ ID NO: 1233748 - RNA, 19 nt, Homo sapiens
  misc_RNA (1)...(19): siRNA sense strand
gaauaugaacaucgacauu

SEQ ID NO: 1233749 - RNA, 19 nt, Homo sapiens
  misc_RNA (1)...(19): siRNA sense strand
gagaugacacccagcauau

SEQ ID NO: 1233750 - RNA, 19 nt, Homo sapiens
  misc_RNA (1)...(19): siRNA sense strand
guaccuuuauggacaacua

SEQ ID NO: 1233751 - RNA, 19 nt, Homo sapiens
  misc_RNA (1)...(19): siRNA sense strand
acauucagaugcacaacua

SEQ ID NO: 1233752 - RNA, 19 nt, Homo sapiens
  misc_RNA (1)...(19): siRNA sense strand
uagaagacauucagaugca

SEQ ID NO: 1233753 - RNA, 19 nt, Homo sapiens
  misc_RNA (1)...(19): siRNA sense strand
gcaguccuccauuaaggua

SEQ ID NO: 1233754 - RNA, 19 nt, Homo sapiens
  misc_RNA (1)...(19): siRNA sense strand
gaacccugacuaucaaaug

SEQ ID NO: 1233755 - RNA, 19 nt, Homo sapiens
  misc_RNA (1)...(19): siRNA sense strand
gguagaagacauucagaug

SEQ ID NO: 1233756 - RNA, 19 nt, Homo sapiens
  misc_RNA (1)...(19): siRNA sense strand
gacagcaguccuccauuaa

SEQ ID NO: 1233757 - RNA, 19 nt, Homo sapiens
  misc_RNA (1)...(19): siRNA sense strand
cgggaucucuccacaacuu

SEQ ID NO: 1233758 - RNA, 19 nt, Homo sapiens
  misc_RNA (1)...(19): siRNA sense strand
ggcgaacccugacuaucaa

SEQ ID NO: 1233759 - RNA, 19 nt, Homo sapiens
  misc_RNA (1)...(19): siRNA sense strand
gcauauccagcaauucuau

SEQ ID NO: 1233760 - RNA, 19 nt, Homo sapiens
  misc_RNA (1)...(19): siRNA sense strand
ucaaggaacccaagagagu

SEQ ID NO: 1233761 - RNA, 19 nt, Homo sapiens
  misc_RNA (1)...(19): siRNA sense strand
cagcaguccuccauuaagg

SEQ ID NO: 1233762 - RNA, 19 nt, Homo sapiens
  misc_RNA (1)...(19): siRNA sense strand
ggacacuuuaccuuucuaa

SEQ ID NO: 1233763 - RNA, 19 nt, Homo sapiens
  misc_RNA (1)...(19): siRNA sense strand
caagagaguggaagaacug

SEQ ID NO: 1233764 - RNA, 19 nt, Homo sapiens
  misc_RNA (1)...(19): siRNA sense strand
gcucaaggaacccaagaga

SEQ ID NO: 1233765 - RNA, 19 nt, Homo sapiens
  misc_RNA (1)...(19): siRNA sense strand
auacguguguuuagcaaau

SEQ ID NO: 1233766 - RNA, 19 nt, Homo sapiens
  misc_RNA (1)...(19): siRNA sense strand
ccaagagaguggaagaacu

SEQ ID NO: 1233767 - RNA, 19 nt, Homo sapiens
  misc_RNA (1)...(19): siRNA sense strand
ugucaguacugccgauuuc

SEQ ID NO: 1233768 - RNA, 19 nt, Homo sapiens
  misc_RNA (1)...(19): siRNA sense strand
cggaaucgcugucaguacu

SEQ ID NO: 1233769 - RNA, 19 nt, Homo sapiens
  misc_RNA (1)...(19): siRNA sense strand
ccgggucgguuuacuacaa

SEQ ID NO: 1233770 - RNA, 19 nt, Homo sapiens
  misc_RNA (1)...(19): siRNA sense strand
gaacuucguacccuuugca

SEQ ID NO: 1233771 - RNA, 19 nt, Homo sapiens
  misc_RNA (1)...(19): siRNA sense strand
uggaagaacugcaaaacaa

SEQ ID NO: 1233772 - RNA, 19 nt, Homo sapiens
  misc_RNA (1)...(19): siRNA sense strand
gagaguggaagaacugcaa

SEQ ID NO: 1233773 - RNA, 19 nt, Homo sapiens
  misc_RNA (1)...(19): siRNA sense strand
gcccaaagccgaccaagac

SEQ ID NO: 1233774 - RNA, 19 nt, Homo sapiens
  misc_RNA (1)...(19): siRNA sense strand
cagcauauccagcaauucu

SEQ ID NO: 1233775 - RNA, 19 nt, Homo sapiens
  misc_RNA (1)...(19): siRNA sense strand
ucaaaugaguggagaugac

SEQ ID NO: 1233776 - RNA, 19 nt, Homo sapiens
  misc_RNA (1)...(19): siRNA sense strand
ccauuaagguagaagacau

SEQ ID NO: 1233777 - RNA, 19 nt, Homo sapiens
  misc_RNA (1)...(19): siRNA sense strand
ccagaacuucguacccuuu

SEQ ID NO: 1233778 - RNA, 19 nt, Homo sapiens
  misc_RNA (1)...(19): siRNA sense strand
aaauacguguguuuagcaa

SEQ ID NO: 1233779 - RNA, 19 nt, Homo sapiens
  misc_RNA (1)...(19): siRNA sense strand
ccuggacacuuuaccuuuc

SEQ ID NO: 1233780 - RNA, 19 nt, Homo sapiens
  misc_RNA (1)...(19): siRNA sense strand
cccagcauauccagcaauu

SEQ ID NO: 1233781 - RNA, 19 nt, Homo sapiens
  misc_RNA (1)...(19): siRNA sense strand
aacccugacuaucaaauga

SEQ ID NO: 1233782 - RNA, 19 nt, Homo sapiens
  misc_RNA (1)...(19): siRNA sense strand
ccacuacgcacaugaucga

SEQ ID NO: 1233783 - RNA, 19 nt, Homo sapiens
  misc_RNA (1)...(19): siRNA sense strand
cacgugacuuucaacaaug

SEQ ID NO: 1233784 - RNA, 19 nt, Homo sapiens
  misc_RNA (1)...(19): siRNA sense strand
auaugaacaucgacauuuc

SEQ ID NO: 1233785 - RNA, 19 nt, Homo sapiens
  misc_RNA (1)...(19): siRNA sense strand
gaagugguucgcacagaca

SEQ ID NO: 1233786 - RNA, 19 nt, Homo sapiens
  misc_RNA (1)...(19): siRNA sense strand
ucaguaccuuuauggacaa

SEQ ID NO: 1233787 - RNA, 19 nt, Homo sapiens
  misc_RNA (1)...(19): siRNA sense strand
agaacuacguggccacuac

SEQ ID NO: 1233788 - RNA, 19 nt, Homo sapiens
  misc_RNA (1)...(19): siRNA sense strand
cagaagugccuggcuguug

SEQ ID NO: 1233789 - RNA, 19 nt, Homo sapiens
  misc_RNA (1)...(19): siRNA sense strand
aggcgaacccugacuauca

SEQ ID NO: 1233790 - RNA, 19 nt, Homo sapiens
  misc_RNA (1)...(19): siRNA sense strand
gauggucaaagaagugguu

SEQ ID NO: 1233791 - RNA, 19 nt, Homo sapiens
  misc_RNA (1)...(19): siRNA sense strand
gagacacgggcucaaggaa

SEQ ID NO: 1233792 - RNA, 19 nt, Homo sapiens
  misc_RNA (1)...(19): siRNA sense strand
caaaugaguggagaugaca

SEQ ID NO: 1233793 - RNA, 19 nt, Homo sapiens
  misc_RNA (1)...(19): siRNA sense strand
gggcccaugucgacuccaa

SEQ ID NO: 1233794 - RNA, 19 nt, Homo sapiens
  misc_RNA (1)...(19): siRNA sense strand
ccucuucuccuuuaagcaa

SEQ ID NO: 1233795 - RNA, 19 nt, Homo sapiens
  misc_RNA (1)...(19): siRNA sense strand
gaagaacugcaaaacaaga

SEQ ID NO: 1233796 - RNA, 19 nt, Homo sapiens
  misc_RNA (1)...(19): siRNA sense strand
uacguguguuuagcaaaua

SEQ ID NO: 1233797 - RNA, 19 nt, Homo sapiens
  misc_RNA (1)...(19): siRNA sense strand
caccuugcuuguaccaaau

SEQ ID NO: 1233798 - RNA, 19 nt, Homo sapiens
  misc_RNA (1)...(19): siRNA sense strand
cuguugggauggucaaaga

SEQ ID NO: 1233799 - RNA, 19 nt, Homo sapiens
  misc_RNA (1)...(19): siRNA sense strand
gcauugcugcccuggcuau

SEQ ID NO: 1233800 - RNA, 19 nt, Homo sapiens
  misc_RNA (1)...(19): siRNA sense strand
gcacagacaguuuaaaagg

SEQ ID NO: 1233801 - RNA, 19 nt, Homo sapiens
  misc_RNA (1)...(19): siRNA sense strand
gguucgcacagacaguuua

SEQ ID NO: 1233802 - RNA, 19 nt, Homo sapiens
  misc_RNA (1)...(19): siRNA sense strand
aagaagugguucgcacaga

SEQ ID NO: 1233803 - RNA, 19 nt, Homo sapiens
  misc_RNA (1)...(19): siRNA sense strand
gacaagcgucgccggaauc

SEQ ID NO: 1233804 - RNA, 19 nt, Homo sapiens
  misc_RNA (1)...(19): siRNA sense strand
gaacugcaaaacaagauug

SEQ ID NO: 1233805 - RNA, 19 nt, Homo sapiens
  misc_RNA (1)...(19): siRNA sense strand
gaacuguuuguccuucgau

SEQ ID NO: 1233806 - RNA, 19 nt, Homo sapiens
  misc_RNA (1)...(19): siRNA sense strand
gcaaaauacguguguuuag

SEQ ID NO: 1233807 - RNA, 19 nt, Homo sapiens
  misc_RNA (1)...(19): siRNA sense strand
cauuaagguagaagacauu

SEQ ID NO: 1233808 - RNA, 19 nt, Homo sapiens
  misc_RNA (1)...(19): siRNA sense strand
gcacaggcuacgacgucaa

SEQ ID NO: 1233809 - RNA, 19 nt, Homo sapiens
  misc_RNA (1)...(19): siRNA sense strand
guacugccgauuucagaag

SEQ ID NO: 1233810 - RNA, 19 nt, Homo sapiens
  misc_RNA (1)...(19): siRNA sense strand
uaagguagaagacauucag

SEQ ID NO: 1233811 - RNA, 19 nt, Homo sapiens
  misc_RNA (1)...(19): siRNA sense strand
ccugaaauuggaagacuug

SEQ ID NO: 1233812 - RNA, 19 nt, Homo sapiens
  misc_RNA (1)...(19): siRNA sense strand
guucgcacagacaguuuaa

SEQ ID NO: 1233813 - RNA, 19 nt, Homo sapiens
  misc_RNA (1)...(19): siRNA sense strand
guccuucgauuagcauaca

SEQ ID NO: 1233814 - RNA, 19 nt, Homo sapiens
  misc_RNA (1)...(19): siRNA sense strand
gaugacacccagcauaucc

SEQ ID NO: 1233815 - RNA, 19 nt, Homo sapiens
  misc_RNA (1)...(19): siRNA sense strand
uaucaaaugaguggagaug

SEQ ID NO: 1233816 - RNA, 19 nt, Homo sapiens
  misc_RNA (1)...(19): siRNA sense strand
caacuuccaccagaacuac

SEQ ID NO: 1233817 - RNA, 19 nt, Homo sapiens
  misc_RNA (1)...(19): siRNA sense strand
ggugucuaguugccagaug

SEQ ID NO: 1233818 - RNA, 19 nt, Homo sapiens
  misc_RNA (1)...(19): siRNA sense strand
ucucaaagaccacgugacu

SEQ ID NO: 1233819 - RNA, 19 nt, Homo sapiens
  misc_RNA (1)...(19): siRNA sense strand
gccggaaucgcugucagua

SEQ ID NO: 1233820 - RNA, 19 nt, Homo sapiens
  misc_RNA (1)...(19): siRNA sense strand
caaaauacguguguuuagc

SEQ ID NO: 1233821 - RNA, 19 nt, Homo sapiens
  misc_RNA (1)...(19): siRNA sense strand
ccacgugacuuucaacaau

SEQ ID NO: 1233822 - RNA, 19 nt, Homo sapiens
  misc_RNA (1)...(19): siRNA sense strand
ggagaugacacccagcaua

SEQ ID NO: 1233823 - RNA, 19 nt, Homo sapiens
  misc_RNA (1)...(19): siRNA sense strand
ggacaagcgucgccggaau

SEQ ID NO: 1233824 - RNA, 19 nt, Homo sapiens
  misc_RNA (1)...(19): siRNA sense strand
ccaccuugcuuguaccaaa

SEQ ID NO: 1233825 - RNA, 19 nt, Homo sapiens
  misc_RNA (1)...(19): siRNA sense strand
gaauaugaacaucgacauu

SEQ ID NO: 1233826 - RNA, 19 nt, Homo sapiens
  misc_RNA (1)...(19): siRNA sense strand
gagaugacacccagcauau

SEQ ID NO: 1233827 - RNA, 19 nt, Homo sapiens
  misc_RNA (1)...(19): siRNA sense strand
guaccuuuauggacaacua

SEQ ID NO: 1233828 - RNA, 19 nt, Homo sapiens
  misc_RNA (1)...(19): siRNA sense strand
acauucagaugcacaacua

SEQ ID NO: 1233829 - RNA, 19 nt, Homo sapiens
  misc_RNA (1)...(19): siRNA sense strand
uagaagacauucagaugca

SEQ ID NO: 1233830 - RNA, 19 nt, Homo sapiens
  misc_RNA (1)...(19): siRNA sense strand
gcaguccuccauuaaggua

SEQ ID NO: 1233831 - RNA, 19 nt, Homo sapiens
  misc_RNA (1)...(19): siRNA sense strand
gaacccugacuaucaaaug

SEQ ID NO: 1233832 - RNA, 19 nt, Homo sapiens
  misc_RNA (1)...(19): siRNA sense strand
gguagaagacauucagaug

SEQ ID NO: 1233833 - RNA, 19 nt, Homo sapiens
  misc_RNA (1)...(19): siRNA sense strand
gacagcaguccuccauuaa

SEQ ID NO: 1233834 - RNA, 19 nt, Homo sapiens
  misc_RNA (1)...(19): siRNA sense strand
cgggaucucuccacaacuu

SEQ ID NO: 1233835 - RNA, 19 nt, Homo sapiens
  misc_RNA (1)...(19): siRNA sense strand
ggcgaacccugacuaucaa

SEQ ID NO: 1233836 - RNA, 19 nt, Homo sapiens
  misc_RNA (1)...(19): siRNA sense strand
gcauauccagcaauucuau

SEQ ID NO: 1233837 - RNA, 19 nt, Homo sapiens
  misc_RNA (1)...(19): siRNA sense strand
ucaaggaacccaagagagu

SEQ ID NO: 1233838 - RNA, 19 nt, Homo sapiens
  misc_RNA (1)...(19): siRNA sense strand
cagcaguccuccauuaagg

SEQ ID NO: 1233839 - RNA, 19 nt, Homo sapiens
  misc_RNA (1)...(19): siRNA sense strand
ggacacuuuaccuuucuaa

SEQ ID NO: 1233840 - RNA, 19 nt, Homo sapiens
  misc_RNA (1)...(19): siRNA sense strand
caagagaguggaagaacug

SEQ ID NO: 1233841 - RNA, 19 nt, Homo sapiens
  misc_RNA (1)...(19): siRNA sense strand
gcucaaggaacccaagaga

SEQ ID NO: 1233842 - RNA, 19 nt, Homo sapiens
  misc_RNA (1)...(19): siRNA sense strand
auacguguguuuagcaaau

SEQ ID NO: 1233843 - RNA, 19 nt, Homo sapiens
  misc_RNA (1)...(19): siRNA sense strand
ccaagagaguggaagaacu

SEQ ID NO: 1233844 - RNA, 19 nt, Homo sapiens
  misc_RNA (1)...(19): siRNA sense strand
ugucaguacugccgauuuc

SEQ ID NO: 1233845 - RNA, 19 nt, Homo sapiens
  misc_RNA (1)...(19): siRNA sense strand
cggaaucgcugucaguacu

SEQ ID NO: 1233846 - RNA, 19 nt, Homo sapiens
  misc_RNA (1)...(19): siRNA sense strand
ccgggucgguuuacuacaa

SEQ ID NO: 1233847 - RNA, 19 nt, Homo sapiens
  misc_RNA (1)...(19): siRNA sense strand
gaacuucguacccuuugca

SEQ ID NO: 1233848 - RNA, 19 nt, Homo sapiens
  misc_RNA (1)...(19): siRNA sense strand
uggaagaacugcaaaacaa

SEQ ID NO: 1233849 - RNA, 19 nt, Homo sapiens
  misc_RNA (1)...(19): siRNA sense strand
gagaguggaagaacugcaa

SEQ ID NO: 1233850 - RNA, 19 nt, Homo sapiens
  misc_RNA (1)...(19): siRNA sense strand
gcccaaagccgaccaagac

SEQ ID NO: 1233851 - RNA, 19 nt, Homo sapiens
  misc_RNA (1)...(19): siRNA sense strand
cagcauauccagcaauucu

SEQ ID NO: 1233852 - RNA, 19 nt, Homo sapiens
  misc_RNA (1)...(19): siRNA sense strand
ucaaaugaguggagaugac

SEQ ID NO: 1233853 - RNA, 19 nt, Homo sapiens
  misc_RNA (1)...(19): siRNA sense strand
ccauuaagguagaagacau

SEQ ID NO: 1233854 - RNA, 19 nt, Homo sapiens
  misc_RNA (1)...(19): siRNA sense strand
ccagaacuucguacccuuu

SEQ ID NO: 1233855 - RNA, 19 nt, Homo sapiens
  misc_RNA (1)...(19): siRNA sense strand
aaauacguguguuuagcaa

SEQ ID NO: 1233856 - RNA, 19 nt, Homo sapiens
  misc_RNA (1)...(19): siRNA sense strand
ccuggacacuuuaccuuuc

SEQ ID NO: 1233857 - RNA, 19 nt, Homo sapiens
  misc_RNA (1)...(19): siRNA sense strand
cccagcauauccagcaauu

SEQ ID NO: 1233858 - RNA, 19 nt, Homo sapiens
  misc_RNA (1)...(19): siRNA sense strand
aacccugacuaucaaauga

SEQ ID NO: 1233859 - RNA, 19 nt, Homo sapiens
  misc_RNA (1)...(19): siRNA sense strand
ccacuacgcacaugaucga

SEQ ID NO: 1233860 - RNA, 19 nt, Homo sapiens
  misc_RNA (1)...(19): siRNA sense strand
cacgugacuuucaacaaug

SEQ ID NO: 1233861 - RNA, 19 nt, Homo sapiens
  misc_RNA (1)...(19): siRNA sense strand
auaugaacaucgacauuuc

SEQ ID NO: 1233862 - RNA, 19 nt, Homo sapiens
  misc_RNA (1)...(19): siRNA sense strand
gaagugguucgcacagaca

SEQ ID NO: 1233863 - RNA, 19 nt, Homo sapiens
  misc_RNA (1)...(19): siRNA sense strand
ucaguaccuuuauggacaa

SEQ ID NO: 1233864 - RNA, 19 nt, Homo sapiens
  misc_RNA (1)...(19): siRNA sense strand
agaacuacguggccacuac

SEQ ID NO: 1233865 - RNA, 19 nt, Homo sapiens
  misc_RNA (1)...(19): siRNA sense strand
cagaagugccuggcuguug

SEQ ID NO: 1233866 - RNA, 19 nt, Homo sapiens
  misc_RNA (1)...(19): siRNA sense strand
aggcgaacccugacuauca

SEQ ID NO: 1233867 - RNA, 19 nt, Homo sapiens
  misc_RNA (1)...(19): siRNA sense strand
gauggucaaagaagugguu

SEQ ID NO: 1233868 - RNA, 19 nt, Homo sapiens
  misc_RNA (1)...(19): siRNA sense strand
gagacacgggcucaaggaa

SEQ ID NO: 1233869 - RNA, 19 nt, Homo sapiens
  misc_RNA (1)...(19): siRNA sense strand
caaaugaguggagaugaca

SEQ ID NO: 1233870 - RNA, 19 nt, Homo sapiens
  misc_RNA (1)...(19): siRNA sense strand
gggcccaugucgacuccaa

SEQ ID NO: 1233871 - RNA, 19 nt, Homo sapiens
  misc_RNA (1)...(19): siRNA sense strand
ccucuucuccuuuaagcaa

SEQ ID NO: 1233872 - RNA, 19 nt, Homo sapiens
  misc_RNA (1)...(19): siRNA sense strand
gaagaacugcaaaacaaga

SEQ ID NO: 1233873 - RNA, 19 nt, Homo sapiens
  misc_RNA (1)...(19): siRNA sense strand
uacguguguuuagcaaaua

SEQ ID NO: 1233874 - RNA, 19 nt, Homo sapiens
  misc_RNA (1)...(19): siRNA sense strand
caccuugcuuguaccaaau

SEQ ID NO: 1233875 - RNA, 19 nt, Homo sapiens
  misc_RNA (1)...(19): siRNA sense strand
cuguugggauggucaaaga

SEQ ID NO: 1233876 - RNA, 19 nt, Homo sapiens
  misc_RNA (1)...(19): siRNA sense strand
gcauugcugcccuggcuau

SEQ ID NO: 1233877 - RNA, 19 nt, Homo sapiens
  misc_RNA (1)...(19): siRNA sense strand
gcacagacaguuuaaaagg

SEQ ID NO: 1233878 - RNA, 19 nt, Homo sapiens
  misc_RNA (1)...(19): siRNA sense strand
gguucgcacagacaguuua

SEQ ID NO: 1233879 - RNA, 19 nt, Homo sapiens
  misc_RNA (1)...(19): siRNA sense strand
aagaagugguucgcacaga

SEQ ID NO: 1233880 - RNA, 19 nt, Homo sapiens
  misc_RNA (1)...(19): siRNA sense strand
gacaagcgucgccggaauc

SEQ ID NO: 1233881 - RNA, 19 nt, Homo sapiens
  misc_RNA (1)...(19): siRNA sense strand
gaacugcaaaacaagauug

SEQ ID NO: 1233882 - RNA, 19 nt, Homo sapiens
  misc_RNA (1)...(19): siRNA sense strand
gaacuguuuguccuucgau

SEQ ID NO: 1233883 - RNA, 19 nt, Homo sapiens
  misc_RNA (1)...(19): siRNA sense strand
gcaaaauacguguguuuag

SEQ ID NO: 1233884 - RNA, 19 nt, Homo sapiens
  misc_RNA (1)...(19): siRNA sense strand
cauuaagguagaagacauu

SEQ ID NO: 1233885 - RNA, 19 nt, Homo sapiens
  misc_RNA (1)...(19): siRNA sense strand
gcacaggcuacgacgucaa

SEQ ID NO: 1233886 - RNA, 19 nt, Homo sapiens
  misc_RNA (1)...(19): siRNA sense strand
guacugccgauuucagaag

SEQ ID NO: 1233887 - RNA, 19 nt, Homo sapiens
  misc_RNA (1)...(19): siRNA sense strand
uaagguagaagacauucag

SEQ ID NO: 1233888 - RNA, 19 nt, Homo sapiens
  misc_RNA (1)...(19): siRNA sense strand
ccugaaauuggaagacuug

SEQ ID NO: 1233889 - RNA, 19 nt, Homo sapiens
  misc_RNA (1)...(19): siRNA sense strand
guucgcacagacaguuuaa

SEQ ID NO: 1233890 - RNA, 19 nt, Homo sapiens
  misc_RNA (1)...(19): siRNA sense strand
guccuucgauuagcauaca

SEQ ID NO: 1233891 - RNA, 19 nt, Homo sapiens
  misc_RNA (1)...(19): siRNA sense strand
gaugacacccagcauaucc

SEQ ID NO: 1233892 - RNA, 19 nt, Homo sapiens
  misc_RNA (1)...(19): siRNA sense strand
uaucaaaugaguggagaug

SEQ ID NO: 1233893 - RNA, 19 nt, Homo sapiens
  misc_RNA (1)...(19): siRNA sense strand
caacuuccaccagaacuac

SEQ ID NO: 1233894 - RNA, 19 nt, Homo sapiens
  misc_RNA (1)...(19): siRNA sense strand
ggugucuaguugccagaug

SEQ ID NO: 1233895 - RNA, 19 nt, Homo sapiens
  misc_RNA (1)...(19): siRNA sense strand
ucucaaagaccacgugacu

SEQ ID NO: 1233896 - RNA, 19 nt, Homo sapiens
  misc_RNA (1)...(19): siRNA sense strand
gccggaaucgcugucagua

SEQ ID NO: 1233897 - RNA, 19 nt, Homo sapiens
  misc_RNA (1)...(19): siRNA sense strand
caaaauacguguguuuagc

SEQ ID NO: 1233898 - RNA, 19 nt, Homo sapiens
  misc_RNA (1)...(19): siRNA sense strand
ggagaugacacccagcaua

SEQ ID NO: 1233899 - RNA, 19 nt, Homo sapiens
  misc_RNA (1)...(19): siRNA sense strand
ggacaagcgucgccggaau

SEQ ID NO: 1233900 - RNA, 19 nt, Homo sapiens
  misc_RNA (1)...(19): siRNA sense strand
ccaccuugcuuguaccaaa

SEQ ID NO: 1233901 - RNA, 19 nt, Homo sapiens
  misc_RNA (1)...(19): siRNA sense strand
gagaugacacccagcauau

SEQ ID NO: 1233902 - RNA, 19 nt, Homo sapiens
  misc_RNA (1)...(19): siRNA sense strand
guaccuuuauggacaacua

SEQ ID NO: 1233903 - RNA, 19 nt, Homo sapiens
  misc_RNA (1)...(19): siRNA sense strand
acauucagaugcacaacua

SEQ ID NO: 1233904 - RNA, 19 nt, Homo sapiens
  misc_RNA (1)...(19): siRNA sense strand
uagaagacauucagaugca

SEQ ID NO: 1233905 - RNA, 19 nt, Homo sapiens
  misc_RNA (1)...(19): siRNA sense strand
gcaguccuccauuaaggua

SEQ ID NO: 1233906 - RNA, 19 nt, Homo sapiens
  misc_RNA (1)...(19): siRNA sense strand
gaacccugacuaucaaaug

SEQ ID NO: 1233907 - RNA, 19 nt, Homo sapiens
  misc_RNA (1)...(19): siRNA sense strand
gguagaagacauucagaug

SEQ ID NO: 1233908 - RNA, 19 nt, Homo sapiens
  misc_RNA (1)...(19): siRNA sense strand
gacagcaguccuccauuaa

SEQ ID NO: 1233909 - RNA, 19 nt, Homo sapiens
  misc_RNA (1)...(19): siRNA sense strand
cgggaucucuccacaacuu

SEQ ID NO: 1233910 - RNA, 19 nt, Homo sapiens
  misc_RNA (1)...(19): siRNA sense strand
ggcgaacccugacuaucaa

SEQ ID NO: 1233911 - RNA, 19 nt, Homo sapiens
  misc_RNA (1)...(19): siRNA sense strand
gcauauccagcaauucuau

SEQ ID NO: 1233912 - RNA, 19 nt, Homo sapiens
  misc_RNA (1)...(19): siRNA sense strand
cagcaguccuccauuaagg

SEQ ID NO: 1233913 - RNA, 19 nt, Homo sapiens
  misc_RNA (1)...(19): siRNA sense strand
auacguguguuuagcaaau

SEQ ID NO: 1233914 - RNA, 19 nt, Homo sapiens
  misc_RNA (1)...(19): siRNA sense strand
ugucaguacugccgauuuc

SEQ ID NO: 1233915 - RNA, 19 nt, Homo sapiens
  misc_RNA (1)...(19): siRNA sense strand
cggaaucgcugucaguacu

SEQ ID NO: 1233916 - RNA, 19 nt, Homo sapiens
  misc_RNA (1)...(19): siRNA sense strand
ccauuaagguagaagacau

SEQ ID NO: 1233917 - RNA, 19 nt, Homo sapiens
  misc_RNA (1)...(19): siRNA sense strand
gcccaaagccgaccaagac

SEQ ID NO: 1233918 - RNA, 19 nt, Homo sapiens
  misc_RNA (1)...(19): siRNA sense strand
cagcauauccagcaauucu

SEQ ID NO: 1233919 - RNA, 19 nt, Homo sapiens
  misc_RNA (1)...(19): siRNA sense strand
ucaaaugaguggagaugac

SEQ ID NO: 1233920 - RNA, 19 nt, Homo sapiens
  misc_RNA (1)...(19): siRNA sense strand
ccgggucgguuuacuacaa

SEQ ID NO: 1233921 - RNA, 19 nt, Homo sapiens
  misc_RNA (1)...(19): siRNA sense strand
aaauacguguguuuagcaa

SEQ ID NO: 1233922 - RNA, 19 nt, Homo sapiens
  misc_RNA (1)...(19): siRNA sense strand
cccagcauauccagcaauu

SEQ ID NO: 1233923 - RNA, 19 nt, Homo sapiens
  misc_RNA (1)...(19): siRNA sense strand
aacccugacuaucaaauga

SEQ ID NO: 1233924 - RNA, 19 nt, Homo sapiens
  misc_RNA (1)...(19): siRNA sense strand
ccacuacgcacaugaucga

SEQ ID NO: 1233925 - RNA, 19 nt, Homo sapiens
  misc_RNA (1)...(19): siRNA sense strand
ucaguaccuuuauggacaa

SEQ ID NO: 1233926 - RNA, 19 nt, Homo sapiens
  misc_RNA (1)...(19): siRNA sense strand
gaagugguucgcacagaca

SEQ ID NO: 1233927 - RNA, 19 nt, Homo sapiens
  misc_RNA (1)...(19): siRNA sense strand
agaacuacguggccacuac

SEQ ID NO: 1233928 - RNA, 19 nt, Homo sapiens
  misc_RNA (1)...(19): siRNA sense strand
cagaagugccuggcuguug

SEQ ID NO: 1233929 - RNA, 19 nt, Homo sapiens
  misc_RNA (1)...(19): siRNA sense strand
aggcgaacccugacuauca

SEQ ID NO: 1233930 - RNA, 19 nt, Homo sapiens
  misc_RNA (1)...(19): siRNA sense strand
gauggucaaagaagugguu

SEQ ID NO: 1233931 - RNA, 19 nt, Homo sapiens
  misc_RNA (1)...(19): siRNA sense strand
caaaugaguggagaugaca

SEQ ID NO: 1233932 - RNA, 19 nt, Homo sapiens
  misc_RNA (1)...(19): siRNA sense strand
gggcccaugucgacuccaa

SEQ ID NO: 1233933 - RNA, 19 nt, Homo sapiens
  misc_RNA (1)...(19): siRNA sense strand
ccucuucuccuuuaagcaa

SEQ ID NO: 1233934 - RNA, 19 nt, Homo sapiens
  misc_RNA (1)...(19): siRNA sense strand
uacguguguuuagcaaaua

SEQ ID NO: 1233935 - RNA, 19 nt, Homo sapiens
  misc_RNA (1)...(19): siRNA sense strand
caccuugcuuguaccaaau

SEQ ID NO: 1233936 - RNA, 19 nt, Homo sapiens
  misc_RNA (1)...(19): siRNA sense strand
cuguugggauggucaaaga

SEQ ID NO: 1233937 - RNA, 19 nt, Homo sapiens
  misc_RNA (1)...(19): siRNA sense strand
gcacagacaguuuaaaagg

SEQ ID NO: 1233938 - RNA, 19 nt, Homo sapiens
  misc_RNA (1)...(19): siRNA sense strand
gguucgcacagacaguuua

SEQ ID NO: 1233939 - RNA, 19 nt, Homo sapiens
  misc_RNA (1)...(19): siRNA sense strand
aagaagugguucgcacaga

SEQ ID NO: 1233940 - RNA, 19 nt, Homo sapiens
  misc_RNA (1)...(19): siRNA sense strand
gacaagcgucgccggaauc

SEQ ID NO: 1233941 - RNA, 19 nt, Homo sapiens
  misc_RNA (1)...(19): siRNA sense strand
gaacuguuuguccuucgau

SEQ ID NO: 1233942 - RNA, 19 nt, Homo sapiens
  misc_RNA (1)...(19): siRNA sense strand
gcacaggcuacgacgucaa

SEQ ID NO: 1233943 - RNA, 19 nt, Homo sapiens
  misc_RNA (1)...(19): siRNA sense strand
cauuaagguagaagacauu

SEQ ID NO: 1233944 - RNA, 19 nt, Homo sapiens
  misc_RNA (1)...(19): siRNA sense strand
gcaaaauacguguguuuag

SEQ ID NO: 1233945 - RNA, 19 nt, Homo sapiens
  misc_RNA (1)...(19): siRNA sense strand
guacugccgauuucagaag

SEQ ID NO: 1233946 - RNA, 19 nt, Homo sapiens
  misc_RNA (1)...(19): siRNA sense strand
uaagguagaagacauucag

SEQ ID NO: 1233947 - RNA, 19 nt, Homo sapiens
  misc_RNA (1)...(19): siRNA sense strand
caacuuccaccagaacuac

SEQ ID NO: 1233948 - RNA, 19 nt, Homo sapiens
  misc_RNA (1)...(19): siRNA sense strand
guccuucgauuagcauaca

SEQ ID NO: 1233949 - RNA, 19 nt, Homo sapiens
  misc_RNA (1)...(19): siRNA sense strand
gaugacacccagcauaucc

SEQ ID NO: 1233950 - RNA, 19 nt, Homo sapiens
  misc_RNA (1)...(19): siRNA sense strand
uaucaaaugaguggagaug

SEQ ID NO: 1233951 - RNA, 19 nt, Homo sapiens
  misc_RNA (1)...(19): siRNA sense strand
guucgcacagacaguuuaa

SEQ ID NO: 1233952 - RNA, 19 nt, Homo sapiens
  misc_RNA (1)...(19): siRNA sense strand
ggugucuaguugccagaug

SEQ ID NO: 1233953 - RNA, 19 nt, Homo sapiens
  misc_RNA (1)...(19): siRNA sense strand
gccggaaucgcugucagua

SEQ ID NO: 1233954 - RNA, 19 nt, Homo sapiens
  misc_RNA (1)...(19): siRNA sense strand
caaaauacguguguuuagc

SEQ ID NO: 1233955 - RNA, 19 nt, Homo sapiens
  misc_RNA (1)...(19): siRNA sense strand
ccacgugacuuucaacaau

SEQ ID NO: 1233956 - RNA, 19 nt, Homo sapiens
  misc_RNA (1)...(19): siRNA sense strand
ggagaugacacccagcaua

SEQ ID NO: 1233957 - RNA, 19 nt, Homo sapiens
  misc_RNA (1)...(19): siRNA sense strand
ggacaagcgucgccggaau

SEQ ID NO: 1233958 - RNA, 19 nt, Homo sapiens
  misc_RNA (1)...(19): siRNA sense strand
ccaccuugcuuguaccaaa

SEQ ID NO: 1233959 - RNA, 19 nt, Homo sapiens
  misc_RNA (1)...(19): siRNA sense strand
gaauaugaacaucgacauu

SEQ ID NO: 1233960 - RNA, 19 nt, Homo sapiens
  misc_RNA (1)...(19): siRNA sense strand
gagaugacacccagcauau

SEQ ID NO: 1233961 - RNA, 19 nt, Homo sapiens
  misc_RNA (1)...(19): siRNA sense strand
acauucagaugcacaacua

SEQ ID NO: 1233962 - RNA, 19 nt, Homo sapiens
  misc_RNA (1)...(19): siRNA sense strand
uagaagacauucagaugca

SEQ ID NO: 1233963 - RNA, 19 nt, Homo sapiens
  misc_RNA (1)...(19): siRNA sense strand
gcaguccuccauuaaggua

SEQ ID NO: 1233964 - RNA, 19 nt, Homo sapiens
  misc_RNA (1)...(19): siRNA sense strand
gaacccugacuaucaaaug

SEQ ID NO: 1233965 - RNA, 19 nt, Homo sapiens
  misc_RNA (1)...(19): siRNA sense strand
gguagaagacauucagaug

SEQ ID NO: 1233966 - RNA, 19 nt, Homo sapiens
  misc_RNA (1)...(19): siRNA sense strand
gacagcaguccuccauuaa

SEQ ID NO: 1233967 - RNA, 19 nt, Homo sapiens
  misc_RNA (1)...(19): siRNA sense strand
cgggaucucuccacaacuu

SEQ ID NO: 1233968 - RNA, 19 nt, Homo sapiens
  misc_RNA (1)...(19): siRNA sense strand
ggcgaacccugacuaucaa

SEQ ID NO: 1233969 - RNA, 19 nt, Homo sapiens
  misc_RNA (1)...(19): siRNA sense strand
gcauauccagcaauucuau

SEQ ID NO: 1233970 - RNA, 19 nt, Homo sapiens
  misc_RNA (1)...(19): siRNA sense strand
ucaaggaacccaagagagu

SEQ ID NO: 1233971 - RNA, 19 nt, Homo sapiens
  misc_RNA (1)...(19): siRNA sense strand
cagcaguccuccauuaagg

SEQ ID NO: 1233972 - RNA, 19 nt, Homo sapiens
  misc_RNA (1)...(19): siRNA sense strand
ggacacuuuaccuuucuaa

SEQ ID NO: 1233973 - RNA, 19 nt, Homo sapiens
  misc_RNA (1)...(19): siRNA sense strand
caagagaguggaagaacug

SEQ ID NO: 1233974 - RNA, 19 nt, Homo sapiens
  misc_RNA (1)...(19): siRNA sense strand
gcucaaggaacccaagaga

SEQ ID NO: 1233975 - RNA, 19 nt, Homo sapiens
  misc_RNA (1)...(19): siRNA sense strand
auacguguguuuagcaaau

SEQ ID NO: 1233976 - RNA, 19 nt, Homo sapiens
  misc_RNA (1)...(19): siRNA sense strand
ccaagagaguggaagaacu

SEQ ID NO: 1233977 - RNA, 19 nt, Homo sapiens
  misc_RNA (1)...(19): siRNA sense strand
ugucaguacugccgauuuc

SEQ ID NO: 1233978 - RNA, 19 nt, Homo sapiens
  misc_RNA (1)...(19): siRNA sense strand
cggaaucgcugucaguacu

SEQ ID NO: 1233979 - RNA, 19 nt, Homo sapiens
  misc_RNA (1)...(19): siRNA sense strand
ccgggucgguuuacuacaa

SEQ ID NO: 1233980 - RNA, 19 nt, Homo sapiens
  misc_RNA (1)...(19): siRNA sense strand
gaacuucguacccuuugca

SEQ ID NO: 1233981 - RNA, 19 nt, Homo sapiens
  misc_RNA (1)...(19): siRNA sense strand
uggaagaacugcaaaacaa

SEQ ID NO: 1233982 - RNA, 19 nt, Homo sapiens
  misc_RNA (1)...(19): siRNA sense strand
gagaguggaagaacugcaa

SEQ ID NO: 1233983 - RNA, 19 nt, Homo sapiens
  misc_RNA (1)...(19): siRNA sense strand
gcccaaagccgaccaagac

SEQ ID NO: 1233984 - RNA, 19 nt, Homo sapiens
  misc_RNA (1)...(19): siRNA sense strand
cagcauauccagcaauucu

SEQ ID NO: 1233985 - RNA, 19 nt, Homo sapiens
  misc_RNA (1)...(19): siRNA sense strand
ucaaaugaguggagaugac

SEQ ID NO: 1233986 - RNA, 19 nt, Homo sapiens
  misc_RNA (1)...(19): siRNA sense strand
ccauuaagguagaagacau

SEQ ID NO: 1233987 - RNA, 19 nt, Homo sapiens
  misc_RNA (1)...(19): siRNA sense strand
ccagaacuucguacccuuu

SEQ ID NO: 1233988 - RNA, 19 nt, Homo sapiens
  misc_RNA (1)...(19): siRNA sense strand
aaauacguguguuuagcaa

SEQ ID NO: 1233989 - RNA, 19 nt, Homo sapiens
  misc_RNA (1)...(19): siRNA sense strand
ccuggacacuuuaccuuuc

SEQ ID NO: 1233990 - RNA, 19 nt, Homo sapiens
  misc_RNA (1)...(19): siRNA sense strand
cccagcauauccagcaauu

SEQ ID NO: 1233991 - RNA, 19 nt, Homo sapiens
  misc_RNA (1)...(19): siRNA sense strand
aacccugacuaucaaauga

SEQ ID NO: 1233992 - RNA, 19 nt, Homo sapiens
  misc_RNA (1)...(19): siRNA sense strand
ccacuacgcacaugaucga

SEQ ID NO: 1233993 - RNA, 19 nt, Homo sapiens
  misc_RNA (1)...(19): siRNA sense strand
cacgugacuuucaacaaug

SEQ ID NO: 1233994 - RNA, 19 nt, Homo sapiens
  misc_RNA (1)...(19): siRNA sense strand
auaugaacaucgacauuuc

SEQ ID NO: 1233995 - RNA, 19 nt, Homo sapiens
  misc_RNA (1)...(19): siRNA sense strand
gaagugguucgcacagaca

SEQ ID NO: 1233996 - RNA, 19 nt, Homo sapiens
  misc_RNA (1)...(19): siRNA sense strand
agaacuacguggccacuac

SEQ ID NO: 1233997 - RNA, 19 nt, Homo sapiens
  misc_RNA (1)...(19): siRNA sense strand
cagaagugccuggcuguug

SEQ ID NO: 1233998 - RNA, 19 nt, Homo sapiens
  misc_RNA (1)...(19): siRNA sense strand
aggcgaacccugacuauca

SEQ ID NO: 1233999 - RNA, 19 nt, Homo sapiens
  misc_RNA (1)...(19): siRNA sense strand
gauggucaaagaagugguu

SEQ ID NO: 1234000 - RNA, 19 nt, Homo sapiens
  misc_RNA (1)...(19): siRNA sense strand
gagacacgggcucaaggaa

SEQ ID NO: 1234001 - RNA, 19 nt, Homo sapiens
  misc_RNA (1)...(19): siRNA sense strand
caaaugaguggagaugaca

SEQ ID NO: 1234002 - RNA, 19 nt, Homo sapiens
  misc_RNA (1)...(19): siRNA sense strand
gggcccaugucgacuccaa

SEQ ID NO: 1234003 - RNA, 19 nt, Homo sapiens
  misc_RNA (1)...(19): siRNA sense strand
ccucuucuccuuuaagcaa

SEQ ID NO: 1234004 - RNA, 19 nt, Homo sapiens
  misc_RNA (1)...(19): siRNA sense strand
gaagaacugcaaaacaaga

SEQ ID NO: 1234005 - RNA, 19 nt, Homo sapiens
  misc_RNA (1)...(19): siRNA sense strand
uacguguguuuagcaaaua

SEQ ID NO: 1234006 - RNA, 19 nt, Homo sapiens
  misc_RNA (1)...(19): siRNA sense strand
caccuugcuuguaccaaau

SEQ ID NO: 1234007 - RNA, 19 nt, Homo sapiens
  misc_RNA (1)...(19): siRNA sense strand
cuguugggauggucaaaga

SEQ ID NO: 1234008 - RNA, 19 nt, Homo sapiens
  misc_RNA (1)...(19): siRNA sense strand
gcauugcugcccuggcuau

SEQ ID NO: 1234009 - RNA, 19 nt, Homo sapiens
  misc_RNA (1)...(19): siRNA sense strand
gcacagacaguuuaaaagg

SEQ ID NO: 1234010 - RNA, 19 nt, Homo sapiens
  misc_RNA (1)...(19): siRNA sense strand
gguucgcacagacaguuua

SEQ ID NO: 1234011 - RNA, 19 nt, Homo sapiens
  misc_RNA (1)...(19): siRNA sense strand
aagaagugguucgcacaga

SEQ ID NO: 1234012 - RNA, 19 nt, Homo sapiens
  misc_RNA (1)...(19): siRNA sense strand
gacaagcgucgccggaauc

SEQ ID NO: 1234013 - RNA, 19 nt, Homo sapiens
  misc_RNA (1)...(19): siRNA sense strand
gaacugcaaaacaagauug

SEQ ID NO: 1234014 - RNA, 19 nt, Homo sapiens
  misc_RNA (1)...(19): siRNA sense strand
gaacuguuuguccuucgau

SEQ ID NO: 1234015 - RNA, 19 nt, Homo sapiens
  misc_RNA (1)...(19): siRNA sense strand
gcaaaauacguguguuuag

SEQ ID NO: 1234016 - RNA, 19 nt, Homo sapiens
  misc_RNA (1)...(19): siRNA sense strand
gcacaggcuacgacgucaa

SEQ ID NO: 1234017 - RNA, 19 nt, Homo sapiens
  misc_RNA (1)...(19): siRNA sense strand
cauuaagguagaagacauu

SEQ ID NO: 1234018 - RNA, 19 nt, Homo sapiens
  misc_RNA (1)...(19): siRNA sense strand
guacugccgauuucagaag

SEQ ID NO: 1234019 - RNA, 19 nt, Homo sapiens
  misc_RNA (1)...(19): siRNA sense strand
ccugaaauuggaagacuug

SEQ ID NO: 1234020 - RNA, 19 nt, Homo sapiens
  misc_RNA (1)...(19): siRNA sense strand
uaagguagaagacauucag

SEQ ID NO: 1234021 - RNA, 19 nt, Homo sapiens
  misc_RNA (1)...(19): siRNA sense strand
caacuuccaccagaacuac

SEQ ID NO: 1234022 - RNA, 19 nt, Homo sapiens
  misc_RNA (1)...(19): siRNA sense strand
guccuucgauuagcauaca

SEQ ID NO: 1234023 - RNA, 19 nt, Homo sapiens
  misc_RNA (1)...(19): siRNA sense strand
gaugacacccagcauaucc

SEQ ID NO: 1234024 - RNA, 19 nt, Homo sapiens
  misc_RNA (1)...(19): siRNA sense strand
uaucaaaugaguggagaug

SEQ ID NO: 1234025 - RNA, 19 nt, Homo sapiens
  misc_RNA (1)...(19): siRNA sense strand
guucgcacagacaguuuaa

SEQ ID NO: 1234026 - RNA, 19 nt, Homo sapiens
  misc_RNA (1)...(19): siRNA sense strand
ggugucuaguugccagaug

SEQ ID NO: 1234027 - RNA, 19 nt, Homo sapiens
  misc_RNA (1)...(19): siRNA sense strand
ucucaaagaccacgugacu

SEQ ID NO: 1234028 - RNA, 19 nt, Homo sapiens
  misc_RNA (1)...(19): siRNA sense strand
gccggaaucgcugucagua

SEQ ID NO: 1234029 - RNA, 19 nt, Homo sapiens
  misc_RNA (1)...(19): siRNA sense strand
caaaauacguguguuuagc

SEQ ID NO: 1234030 - RNA, 19 nt, Homo sapiens
  misc_RNA (1)...(19): siRNA sense strand
ccacgugacuuucaacaau

SEQ ID NO: 1234031 - RNA, 19 nt, Homo sapiens
  misc_RNA (1)...(19): siRNA sense strand
ggagaugacacccagcaua

SEQ ID NO: 1234032 - RNA, 19 nt, Homo sapiens
  misc_RNA (1)...(19): siRNA sense strand
ggacaagcgucgccggaau

SEQ ID NO: 1234033 - RNA, 19 nt, Homo sapiens
  misc_RNA (1)...(19): siRNA sense strand
ccaccuugcuuguaccaaa

SEQ ID NO: 1234034 - RNA, 19 nt, Homo sapiens
  misc_RNA (1)...(19): siRNA sense strand
gaauaugaacaucgacauu

SEQ ID NO: 1234035 - RNA, 19 nt, Homo sapiens
  misc_RNA (1)...(19): siRNA sense strand
gagaugacacccagcauau

SEQ ID NO: 1234036 - RNA, 19 nt, Homo sapiens
  misc_RNA (1)...(19): siRNA sense strand
guaccuuuauggacaacua

SEQ ID NO: 1234037 - RNA, 19 nt, Homo sapiens
  misc_RNA (1)...(19): siRNA sense strand
acauucagaugcacaacua

SEQ ID NO: 1234038 - RNA, 19 nt, Homo sapiens
  misc_RNA (1)...(19): siRNA sense strand
uagaagacauucagaugca

SEQ ID NO: 1234039 - RNA, 19 nt, Homo sapiens
  misc_RNA (1)...(19): siRNA sense strand
gcaguccuccauuaaggua

SEQ ID NO: 1234040 - RNA, 19 nt, Homo sapiens
  misc_RNA (1)...(19): siRNA sense strand
gaacccugacuaucaaaug

SEQ ID NO: 1234041 - RNA, 19 nt, Homo sapiens
  misc_RNA (1)...(19): siRNA sense strand
gguagaagacauucagaug

SEQ ID NO: 1234042 - RNA, 19 nt, Homo sapiens
  misc_RNA (1)...(19): siRNA sense strand
gacagcaguccuccauuaa

SEQ ID NO: 1234043 - RNA, 19 nt, Homo sapiens
  misc_RNA (1)...(19): siRNA sense strand
cgggaucucuccacaacuu

SEQ ID NO: 1234044 - RNA, 19 nt, Homo sapiens
  misc_RNA (1)...(19): siRNA sense strand
ggcgaacccugacuaucaa

SEQ ID NO: 1234045 - RNA, 19 nt, Homo sapiens
  misc_RNA (1)...(19): siRNA sense strand
gcauauccagcaauucuau

SEQ ID NO: 1234046 - RNA, 19 nt, Homo sapiens
  misc_RNA (1)...(19): siRNA sense strand
ucaaggaacccaagagagu

SEQ ID NO: 1234047 - RNA, 19 nt, Homo sapiens
  misc_RNA (1)...(19): siRNA sense strand
cagcaguccuccauuaagg

SEQ ID NO: 1234048 - RNA, 19 nt, Homo sapiens
  misc_RNA (1)...(19): siRNA sense strand
ggacacuuuaccuuucuaa

SEQ ID NO: 1234049 - RNA, 19 nt, Homo sapiens
  misc_RNA (1)...(19): siRNA sense strand
caagagaguggaagaacug

SEQ ID NO: 1234050 - RNA, 19 nt, Homo sapiens
  misc_RNA (1)...(19): siRNA sense strand
gcucaaggaacccaagaga

SEQ ID NO: 1234051 - RNA, 19 nt, Homo sapiens
  misc_RNA (1)...(19): siRNA sense strand
auacguguguuuagcaaau

SEQ ID NO: 1234052 - RNA, 19 nt, Homo sapiens
  misc_RNA (1)...(19): siRNA sense strand
ccaagagaguggaagaacu

SEQ ID NO: 1234053 - RNA, 19 nt, Homo sapiens
  misc_RNA (1)...(19): siRNA sense strand
ugucaguacugccgauuuc

SEQ ID NO: 1234054 - RNA, 19 nt, Homo sapiens
  misc_RNA (1)...(19): siRNA sense strand
cggaaucgcugucaguacu

SEQ ID NO: 1234055 - RNA, 19 nt, Homo sapiens
  misc_RNA (1)...(19): siRNA sense strand
ccgggucgguuuacuacaa

SEQ ID NO: 1234056 - RNA, 19 nt, Homo sapiens
  misc_RNA (1)...(19): siRNA sense strand
gaacuucguacccuuugca

SEQ ID NO: 1234057 - RNA, 19 nt, Homo sapiens
  misc_RNA (1)...(19): siRNA sense strand
uggaagaacugcaaaacaa

SEQ ID NO: 1234058 - RNA, 19 nt, Homo sapiens
  misc_RNA (1)...(19): siRNA sense strand
gagaguggaagaacugcaa

SEQ ID NO: 1234059 - RNA, 19 nt, Homo sapiens
  misc_RNA (1)...(19): siRNA sense strand
gcccaaagccgaccaagac

SEQ ID NO: 1234060 - RNA, 19 nt, Homo sapiens
  misc_RNA (1)...(19): siRNA sense strand
cagcauauccagcaauucu

SEQ ID NO: 1234061 - RNA, 19 nt, Homo sapiens
  misc_RNA (1)...(19): siRNA sense strand
ucaaaugaguggagaugac

SEQ ID NO: 1234062 - RNA, 19 nt, Homo sapiens
  misc_RNA (1)...(19): siRNA sense strand
ccauuaagguagaagacau

SEQ ID NO: 1234063 - RNA, 19 nt, Homo sapiens
  misc_RNA (1)...(19): siRNA sense strand
ccagaacuucguacccuuu

SEQ ID NO: 1234064 - RNA, 19 nt, Homo sapiens
  misc_RNA (1)...(19): siRNA sense strand
aaauacguguguuuagcaa

SEQ ID NO: 1234065 - RNA, 19 nt, Homo sapiens
  misc_RNA (1)...(19): siRNA sense strand
ccuggacacuuuaccuuuc

SEQ ID NO: 1234066 - RNA, 19 nt, Homo sapiens
  misc_RNA (1)...(19): siRNA sense strand
cccagcauauccagcaauu

SEQ ID NO: 1234067 - RNA, 19 nt, Homo sapiens
  misc_RNA (1)...(19): siRNA sense strand
aacccugacuaucaaauga

SEQ ID NO: 1234068 - RNA, 19 nt, Homo sapiens
  misc_RNA (1)...(19): siRNA sense strand
ccacuacgcacaugaucga

SEQ ID NO: 1234069 - RNA, 19 nt, Homo sapiens
  misc_RNA (1)...(19): siRNA sense strand
cacgugacuuucaacaaug

SEQ ID NO: 1234070 - RNA, 19 nt, Homo sapiens
  misc_RNA (1)...(19): siRNA sense strand
auaugaacaucgacauuuc

SEQ ID NO: 1234071 - RNA, 19 nt, Homo sapiens
  misc_RNA (1)...(19): siRNA sense strand
gaagugguucgcacagaca

SEQ ID NO: 1234072 - RNA, 19 nt, Homo sapiens
  misc_RNA (1)...(19): siRNA sense strand
ucaguaccuuuauggacaa

SEQ ID NO: 1234073 - RNA, 19 nt, Homo sapiens
  misc_RNA (1)...(19): siRNA sense strand
agaacuacguggccacuac

SEQ ID NO: 1234074 - RNA, 19 nt, Homo sapiens
  misc_RNA (1)...(19): siRNA sense strand
cagaagugccuggcuguug

SEQ ID NO: 1234075 - RNA, 19 nt, Homo sapiens
  misc_RNA (1)...(19): siRNA sense strand
aggcgaacccugacuauca

SEQ ID NO: 1234076 - RNA, 19 nt, Homo sapiens
  misc_RNA (1)...(19): siRNA sense strand
gauggucaaagaagugguu

SEQ ID NO: 1234077 - RNA, 19 nt, Homo sapiens
  misc_RNA (1)...(19): siRNA sense strand
gagacacgggcucaaggaa

SEQ ID NO: 1234078 - RNA, 19 nt, Homo sapiens
  misc_RNA (1)...(19): siRNA sense strand
caaaugaguggagaugaca

SEQ ID NO: 1234079 - RNA, 19 nt, Homo sapiens
  misc_RNA (1)...(19): siRNA sense strand
gggcccaugucgacuccaa

SEQ ID NO: 1234080 - RNA, 19 nt, Homo sapiens
  misc_RNA (1)...(19): siRNA sense strand
ccucuucuccuuuaagcaa

SEQ ID NO: 1234081 - RNA, 19 nt, Homo sapiens
  misc_RNA (1)...(19): siRNA sense strand
gaagaacugcaaaacaaga

SEQ ID NO: 1234082 - RNA, 19 nt, Homo sapiens
  misc_RNA (1)...(19): siRNA sense strand
uacguguguuuagcaaaua

SEQ ID NO: 1234083 - RNA, 19 nt, Homo sapiens
  misc_RNA (1)...(19): siRNA sense strand
caccuugcuuguaccaaau

SEQ ID NO: 1234084 - RNA, 19 nt, Homo sapiens
  misc_RNA (1)...(19): siRNA sense strand
cuguugggauggucaaaga

SEQ ID NO: 1234085 - RNA, 19 nt, Homo sapiens
  misc_RNA (1)...(19): siRNA sense strand
gcauugcugcccuggcuau

SEQ ID NO: 1234086 - RNA, 19 nt, Homo sapiens
  misc_RNA (1)...(19): siRNA sense strand
gcacagacaguuuaaaagg

SEQ ID NO: 1234087 - RNA, 19 nt, Homo sapiens
  misc_RNA (1)...(19): siRNA sense strand
gguucgcacagacaguuua

SEQ ID NO: 1234088 - RNA, 19 nt, Homo sapiens
  misc_RNA (1)...(19): siRNA sense strand
aagaagugguucgcacaga

SEQ ID NO: 1234089 - RNA, 19 nt, Homo sapiens
  misc_RNA (1)...(19): siRNA sense strand
gacaagcgucgccggaauc

SEQ ID NO: 1234090 - RNA, 19 nt, Homo sapiens
  misc_RNA (1)...(19): siRNA sense strand
gaacugcaaaacaagauug

SEQ ID NO: 1234091 - RNA, 19 nt, Homo sapiens
  misc_RNA (1)...(19): siRNA sense strand
gaacuguuuguccuucgau

SEQ ID NO: 1234092 - RNA, 19 nt, Homo sapiens
  misc_RNA (1)...(19): siRNA sense strand
gcaaaauacguguguuuag

SEQ ID NO: 1234093 - RNA, 19 nt, Homo sapiens
  misc_RNA (1)...(19): siRNA sense strand
cauuaagguagaagacauu

SEQ ID NO: 1234094 - RNA, 19 nt, Homo sapiens
  misc_RNA (1)...(19): siRNA sense strand
gcacaggcuacgacgucaa

SEQ ID NO: 1234095 - RNA, 19 nt, Homo sapiens
  misc_RNA (1)...(19): siRNA sense strand
guacugccgauuucagaag

SEQ ID NO: 1234096 - RNA, 19 nt, Homo sapiens
  misc_RNA (1)...(19): siRNA sense strand
uaagguagaagacauucag

SEQ ID NO: 1234097 - RNA, 19 nt, Homo sapiens
  misc_RNA (1)...(19): siRNA sense strand
ccugaaauuggaagacuug

SEQ ID NO: 1234098 - RNA, 19 nt, Homo sapiens
  misc_RNA (1)...(19): siRNA sense strand
guucgcacagacaguuuaa

SEQ ID NO: 1234099 - RNA, 19 nt, Homo sapiens
  misc_RNA (1)...(19): siRNA sense strand
guccuucgauuagcauaca

SEQ ID NO: 1234100 - RNA, 19 nt, Homo sapiens
  misc_RNA (1)...(19): siRNA sense strand
gaugacacccagcauaucc

SEQ ID NO: 1234101 - RNA, 19 nt, Homo sapiens
  misc_RNA (1)...(19): siRNA sense strand
uaucaaaugaguggagaug

SEQ ID NO: 1234102 - RNA, 19 nt, Homo sapiens
  misc_RNA (1)...(19): siRNA sense strand
caacuuccaccagaacuac

SEQ ID NO: 1234103 - RNA, 19 nt, Homo sapiens
  misc_RNA (1)...(19): siRNA sense strand
ggugucuaguugccagaug

SEQ ID NO: 1234104 - RNA, 19 nt, Homo sapiens
  misc_RNA (1)...(19): siRNA sense strand
ucucaaagaccacgugacu

SEQ ID NO: 1234105 - RNA, 19 nt, Homo sapiens
  misc_RNA (1)...(19): siRNA sense strand
gccggaaucgcugucagua

SEQ ID NO: 1234106 - RNA, 19 nt, Homo sapiens
  misc_RNA (1)...(19): siRNA sense strand
caaaauacguguguuuagc

SEQ ID NO: 1234107 - RNA, 19 nt, Homo sapiens
  misc_RNA (1)...(19): siRNA sense strand
ccacgugacuuucaacaau

SEQ ID NO: 1234108 - RNA, 19 nt, Homo sapiens
  misc_RNA (1)...(19): siRNA sense strand
ggagaugacacccagcaua

SEQ ID NO: 1234109 - RNA, 19 nt, Homo sapiens
  misc_RNA (1)...(19): siRNA sense strand
ggacaagcgucgccggaau

SEQ ID NO: 1234110 - RNA, 19 nt, Homo sapiens
  misc_RNA (1)...(19): siRNA sense strand
ccaccuugcuuguaccaaa

SEQ ID NO: 1234111 - RNA, 19 nt, Homo sapiens
  misc_RNA (1)...(19): siRNA sense strand
gaauaugaacaucgacauu

SEQ ID NO: 1234112 - RNA, 19 nt, Homo sapiens
  misc_RNA (1)...(19): siRNA sense strand
gagaugacacccagcauau

SEQ ID NO: 1234113 - RNA, 19 nt, Homo sapiens
  misc_RNA (1)...(19): siRNA sense strand
guaccuuuauggacaacua

SEQ ID NO: 1234114 - RNA, 19 nt, Homo sapiens
  misc_RNA (1)...(19): siRNA sense strand
acauucagaugcacaacua

SEQ ID NO: 1234115 - RNA, 19 nt, Homo sapiens
  misc_RNA (1)...(19): siRNA sense strand
uagaagacauucagaugca

SEQ ID NO: 1234116 - RNA, 19 nt, Homo sapiens
  misc_RNA (1)...(19): siRNA sense strand
gcaguccuccauuaaggua

SEQ ID NO: 1234117 - RNA, 19 nt, Homo sapiens
  misc_RNA (1)...(19): siRNA sense strand
gaacccugacuaucaaaug

SEQ ID NO: 1234118 - RNA, 19 nt, Homo sapiens
  misc_RNA (1)...(19): siRNA sense strand
gguagaagacauucagaug

SEQ ID NO: 1234119 - RNA, 19 nt, Homo sapiens
  misc_RNA (1)...(19): siRNA sense strand
gacagcaguccuccauuaa

SEQ ID NO: 1234120 - RNA, 19 nt, Homo sapiens
  misc_RNA (1)...(19): siRNA sense strand
cgggaucucuccacaacuu

SEQ ID NO: 1234121 - RNA, 19 nt, Homo sapiens
  misc_RNA (1)...(19): siRNA sense strand
ggcgaacccugacuaucaa

SEQ ID NO: 1234122 - RNA, 19 nt, Homo sapiens
  misc_RNA (1)...(19): siRNA sense strand
gcauauccagcaauucuau

SEQ ID NO: 1234123 - RNA, 19 nt, Homo sapiens
  misc_RNA (1)...(19): siRNA sense strand
ucaaggaacccaagagagu

SEQ ID NO: 1234124 - RNA, 19 nt, Homo sapiens
  misc_RNA (1)...(19): siRNA sense strand
cagcaguccuccauuaagg

SEQ ID NO: 1234125 - RNA, 19 nt, Homo sapiens
  misc_RNA (1)...(19): siRNA sense strand
ggacacuuuaccuuucuaa

SEQ ID NO: 1234126 - RNA, 19 nt, Homo sapiens
  misc_RNA (1)...(19): siRNA sense strand
caagagaguggaagaacug

SEQ ID NO: 1234127 - RNA, 19 nt, Homo sapiens
  misc_RNA (1)...(19): siRNA sense strand
gcucaaggaacccaagaga

SEQ ID NO: 1234128 - RNA, 19 nt, Homo sapiens
  misc_RNA (1)...(19): siRNA sense strand
auacguguguuuagcaaau

SEQ ID NO: 1234129 - RNA, 19 nt, Homo sapiens
  misc_RNA (1)...(19): siRNA sense strand
ccaagagaguggaagaacu

SEQ ID NO: 1234130 - RNA, 19 nt, Homo sapiens
  misc_RNA (1)...(19): siRNA sense strand
ugucaguacugccgauuuc

SEQ ID NO: 1234131 - RNA, 19 nt, Homo sapiens
  misc_RNA (1)...(19): siRNA sense strand
cggaaucgcugucaguacu

SEQ ID NO: 1234132 - RNA, 19 nt, Homo sapiens
  misc_RNA (1)...(19): siRNA sense strand
ccgggucgguuuacuacaa

SEQ ID NO: 1234133 - RNA, 19 nt, Homo sapiens
  misc_RNA (1)...(19): siRNA sense strand
gaacuucguacccuuugca

SEQ ID NO: 1234134 - RNA, 19 nt, Homo sapiens
  misc_RNA (1)...(19): siRNA sense strand
uggaagaacugcaaaacaa

SEQ ID NO: 1234135 - RNA, 19 nt, Homo sapiens
  misc_RNA (1)...(19): siRNA sense strand
gagaguggaagaacugcaa

SEQ ID NO: 1234136 - RNA, 19 nt, Homo sapiens
  misc_RNA (1)...(19): siRNA sense strand
gcccaaagccgaccaagac

SEQ ID NO: 1234137 - RNA, 19 nt, Homo sapiens
  misc_RNA (1)...(19): siRNA sense strand
cagcauauccagcaauucu

SEQ ID NO: 1234138 - RNA, 19 nt, Homo sapiens
  misc_RNA (1)...(19): siRNA sense strand
ucaaaugaguggagaugac

SEQ ID NO: 1234139 - RNA, 19 nt, Homo sapiens
  misc_RNA (1)...(19): siRNA sense strand
ccauuaagguagaagacau

SEQ ID NO: 1234140 - RNA, 19 nt, Homo sapiens
  misc_RNA (1)...(19): siRNA sense strand
ccagaacuucguacccuuu

SEQ ID NO: 1234141 - RNA, 19 nt, Homo sapiens
  misc_RNA (1)...(19): siRNA sense strand
aaauacguguguuuagcaa

SEQ ID NO: 1234142 - RNA, 19 nt, Homo sapiens
  misc_RNA (1)...(19): siRNA sense strand
ccuggacacuuuaccuuuc

SEQ ID NO: 1234143 - RNA, 19 nt, Homo sapiens
  misc_RNA (1)...(19): siRNA sense strand
cccagcauauccagcaauu

SEQ ID NO: 1234144 - RNA, 19 nt, Homo sapiens
  misc_RNA (1)...(19): siRNA sense strand
aacccugacuaucaaauga

SEQ ID NO: 1234145 - RNA, 19 nt, Homo sapiens
  misc_RNA (1)...(19): siRNA sense strand
ccacuacgcacaugaucga

SEQ ID NO: 1234146 - RNA, 19 nt, Homo sapiens
  misc_RNA (1)...(19): siRNA sense strand
cacgugacuuucaacaaug

SEQ ID NO: 1234147 - RNA, 19 nt, Homo sapiens
  misc_RNA (1)...(19): siRNA sense strand
auaugaacaucgacauuuc

SEQ ID NO: 1234148 - RNA, 19 nt, Homo sapiens
  misc_RNA (1)...(19): siRNA sense strand
gaagugguucgcacagaca

SEQ ID NO: 1234149 - RNA, 19 nt, Homo sapiens
  misc_RNA (1)...(19): siRNA sense strand
ucaguaccuuuauggacaa

SEQ ID NO: 1234150 - RNA, 19 nt, Homo sapiens
  misc_RNA (1)...(19): siRNA sense strand
agaacuacguggccacuac

SEQ ID NO: 1234151 - RNA, 19 nt, Homo sapiens
  misc_RNA (1)...(19): siRNA sense strand
cagaagugccuggcuguug

SEQ ID NO: 1234152 - RNA, 19 nt, Homo sapiens
  misc_RNA (1)...(19): siRNA sense strand
aggcgaacccugacuauca

SEQ ID NO: 1234153 - RNA, 19 nt, Homo sapiens
  misc_RNA (1)...(19): siRNA sense strand
gauggucaaagaagugguu

SEQ ID NO: 1234154 - RNA, 19 nt, Homo sapiens
  misc_RNA (1)...(19): siRNA sense strand
gagacacgggcucaaggaa

SEQ ID NO: 1234155 - RNA, 19 nt, Homo sapiens
  misc_RNA (1)...(19): siRNA sense strand
caaaugaguggagaugaca

SEQ ID NO: 1234156 - RNA, 19 nt, Homo sapiens
  misc_RNA (1)...(19): siRNA sense strand
gggcccaugucgacuccaa

SEQ ID NO: 1234157 - RNA, 19 nt, Homo sapiens
  misc_RNA (1)...(19): siRNA sense strand
ccucuucuccuuuaagcaa

SEQ ID NO: 1234158 - RNA, 19 nt, Homo sapiens
  misc_RNA (1)...(19): siRNA sense strand
gaagaacugcaaaacaaga

SEQ ID NO: 1234159 - RNA, 19 nt, Homo sapiens
  misc_RNA (1)...(19): siRNA sense strand
uacguguguuuagcaaaua

SEQ ID NO: 1234160 - RNA, 19 nt, Homo sapiens
  misc_RNA (1)...(19): siRNA sense strand
caccuugcuuguaccaaau

SEQ ID NO: 1234161 - RNA, 19 nt, Homo sapiens
  misc_RNA (1)...(19): siRNA sense strand
cuguugggauggucaaaga

SEQ ID NO: 1234162 - RNA, 19 nt, Homo sapiens
  misc_RNA (1)...(19): siRNA sense strand
gcauugcugcccuggcuau

SEQ ID NO: 1234163 - RNA, 19 nt, Homo sapiens
  misc_RNA (1)...(19): siRNA sense strand
gcacagacaguuuaaaagg

SEQ ID NO: 1234164 - RNA, 19 nt, Homo sapiens
  misc_RNA (1)...(19): siRNA sense strand
gguucgcacagacaguuua

SEQ ID NO: 1234165 - RNA, 19 nt, Homo sapiens
  misc_RNA (1)...(19): siRNA sense strand
aagaagugguucgcacaga

SEQ ID NO: 1234166 - RNA, 19 nt, Homo sapiens
  misc_RNA (1)...(19): siRNA sense strand
gacaagcgucgccggaauc

SEQ ID NO: 1234167 - RNA, 19 nt, Homo sapiens
  misc_RNA (1)...(19): siRNA sense strand
gaacugcaaaacaagauug

SEQ ID NO: 1234168 - RNA, 19 nt, Homo sapiens
  misc_RNA (1)...(19): siRNA sense strand
gaacuguuuguccuucgau

SEQ ID NO: 1234169 - RNA, 19 nt, Homo sapiens
  misc_RNA (1)...(19): siRNA sense strand
gcaaaauacguguguuuag

SEQ ID NO: 1234170 - RNA, 19 nt, Homo sapiens
  misc_RNA (1)...(19): siRNA sense strand
cauuaagguagaagacauu

SEQ ID NO: 1234171 - RNA, 19 nt, Homo sapiens
  misc_RNA (1)...(19): siRNA sense strand
gcacaggcuacgacgucaa

SEQ ID NO: 1234172 - RNA, 19 nt, Homo sapiens
  misc_RNA (1)...(19): siRNA sense strand
guacugccgauuucagaag

SEQ ID NO: 1234173 - RNA, 19 nt, Homo sapiens
  misc_RNA (1)...(19): siRNA sense strand
uaagguagaagacauucag

SEQ ID NO: 1234174 - RNA, 19 nt, Homo sapiens
  misc_RNA (1)...(19): siRNA sense strand
ccugaaauuggaagacuug

SEQ ID NO: 1234175 - RNA, 19 nt, Homo sapiens
  misc_RNA (1)...(19): siRNA sense strand
guucgcacagacaguuuaa

SEQ ID NO: 1234176 - RNA, 19 nt, Homo sapiens
  misc_RNA (1)...(19): siRNA sense strand
guccuucgauuagcauaca

SEQ ID NO: 1234177 - RNA, 19 nt, Homo sapiens
  misc_RNA (1)...(19): siRNA sense strand
gaugacacccagcauaucc

SEQ ID NO: 1234178 - RNA, 19 nt, Homo sapiens
  misc_RNA (1)...(19): siRNA sense strand
uaucaaaugaguggagaug

SEQ ID NO: 1234179 - RNA, 19 nt, Homo sapiens
  misc_RNA (1)...(19): siRNA sense strand
caacuuccaccagaacuac

SEQ ID NO: 1234180 - RNA, 19 nt, Homo sapiens
  misc_RNA (1)...(19): siRNA sense strand
ggugucuaguugccagaug

SEQ ID NO: 1234181 - RNA, 19 nt, Homo sapiens
  misc_RNA (1)...(19): siRNA sense strand
ucucaaagaccacgugacu

SEQ ID NO: 1234182 - RNA, 19 nt, Homo sapiens
  misc_RNA (1)...(19): siRNA sense strand
gccggaaucgcugucagua

SEQ ID NO: 1234183 - RNA, 19 nt, Homo sapiens
  misc_RNA (1)...(19): siRNA sense strand
caaaauacguguguuuagc

SEQ ID NO: 1234184 - RNA, 19 nt, Homo sapiens
  misc_RNA (1)...(19): siRNA sense strand
ggagaugacacccagcaua

SEQ ID NO: 1234185 - RNA, 19 nt, Homo sapiens
  misc_RNA (1)...(19): siRNA sense strand
ggacaagcgucgccggaau

SEQ ID NO: 1234186 - RNA, 19 nt, Homo sapiens
  misc_RNA (1)...(19): siRNA sense strand
ccaccuugcuuguaccaaa

SEQ ID NO: 1234187 - RNA, 19 nt, Homo sapiens
  misc_RNA (1)...(19): siRNA sense strand
gagaugacacccagcauau

SEQ ID NO: 1234188 - RNA, 19 nt, Homo sapiens
  misc_RNA (1)...(19): siRNA sense strand
guaccuuuauggacaacua

SEQ ID NO: 1234189 - RNA, 19 nt, Homo sapiens
  misc_RNA (1)...(19): siRNA sense strand
acauucagaugcacaacua

SEQ ID NO: 1234190 - RNA, 19 nt, Homo sapiens
  misc_RNA (1)...(19): siRNA sense strand
uagaagacauucagaugca

SEQ ID NO: 1234191 - RNA, 19 nt, Homo sapiens
  misc_RNA (1)...(19): siRNA sense strand
gcaguccuccauuaaggua

SEQ ID NO: 1234192 - RNA, 19 nt, Homo sapiens
  misc_RNA (1)...(19): siRNA sense strand
gaacccugacuaucaaaug

SEQ ID NO: 1234193 - RNA, 19 nt, Homo sapiens
  misc_RNA (1)...(19): siRNA sense strand
gguagaagacauucagaug

SEQ ID NO: 1234194 - RNA, 19 nt, Homo sapiens
  misc_RNA (1)...(19): siRNA sense strand
gacagcaguccuccauuaa

SEQ ID NO: 1234195 - RNA, 19 nt, Homo sapiens
  misc_RNA (1)...(19): siRNA sense strand
cgggaucucuccacaacuu

SEQ ID NO: 1234196 - RNA, 19 nt, Homo sapiens
  misc_RNA (1)...(19): siRNA sense strand
ggcgaacccugacuaucaa

SEQ ID NO: 1234197 - RNA, 19 nt, Homo sapiens
  misc_RNA (1)...(19): siRNA sense strand
gcauauccagcaauucuau

SEQ ID NO: 1234198 - RNA, 19 nt, Homo sapiens
  misc_RNA (1)...(19): siRNA sense strand
cagcaguccuccauuaagg

SEQ ID NO: 1234199 - RNA, 19 nt, Homo sapiens
  misc_RNA (1)...(19): siRNA sense strand
auacguguguuuagcaaau

SEQ ID NO: 1234200 - RNA, 19 nt, Homo sapiens
  misc_RNA (1)...(19): siRNA sense strand
ugucaguacugccgauuuc

SEQ ID NO: 1234201 - RNA, 19 nt, Homo sapiens
  misc_RNA (1)...(19): siRNA sense strand
cggaaucgcugucaguacu

SEQ ID NO: 1234202 - RNA, 19 nt, Homo sapiens
  misc_RNA (1)...(19): siRNA sense strand
ccauuaagguagaagacau

SEQ ID NO: 1234203 - RNA, 19 nt, Homo sapiens
  misc_RNA (1)...(19): siRNA sense strand
gcccaaagccgaccaagac

SEQ ID NO: 1234204 - RNA, 19 nt, Homo sapiens
  misc_RNA (1)...(19): siRNA sense strand
cagcauauccagcaauucu

SEQ ID NO: 1234205 - RNA, 19 nt, Homo sapiens
  misc_RNA (1)...(19): siRNA sense strand
ucaaaugaguggagaugac

SEQ ID NO: 1234206 - RNA, 19 nt, Homo sapiens
  misc_RNA (1)...(19): siRNA sense strand
ccgggucgguuuacuacaa

SEQ ID NO: 1234207 - RNA, 19 nt, Homo sapiens
  misc_RNA (1)...(19): siRNA sense strand
aaauacguguguuuagcaa

SEQ ID NO: 1234208 - RNA, 19 nt, Homo sapiens
  misc_RNA (1)...(19): siRNA sense strand
cccagcauauccagcaauu

SEQ ID NO: 1234209 - RNA, 19 nt, Homo sapiens
  misc_RNA (1)...(19): siRNA sense strand
aacccugacuaucaaauga

SEQ ID NO: 1234210 - RNA, 19 nt, Homo sapiens
  misc_RNA (1)...(19): siRNA sense strand
ccacuacgcacaugaucga

SEQ ID NO: 1234211 - RNA, 19 nt, Homo sapiens
  misc_RNA (1)...(19): siRNA sense strand
ucaguaccuuuauggacaa

SEQ ID NO: 1234212 - RNA, 19 nt, Homo sapiens
  misc_RNA (1)...(19): siRNA sense strand
gaagugguucgcacagaca

SEQ ID NO: 1234213 - RNA, 19 nt, Homo sapiens
  misc_RNA (1)...(19): siRNA sense strand
agaacuacguggccacuac

SEQ ID NO: 1234214 - RNA, 19 nt, Homo sapiens
  misc_RNA (1)...(19): siRNA sense strand
cagaagugccuggcuguug

SEQ ID NO: 1234215 - RNA, 19 nt, Homo sapiens
  misc_RNA (1)...(19): siRNA sense strand
aggcgaacccugacuauca

SEQ ID NO: 1234216 - RNA, 19 nt, Homo sapiens
  misc_RNA (1)...(19): siRNA sense strand
gauggucaaagaagugguu

SEQ ID NO: 1234217 - RNA, 19 nt, Homo sapiens
  misc_RNA (1)...(19): siRNA sense strand
caaaugaguggagaugaca

SEQ ID NO: 1234218 - RNA, 19 nt, Homo sapiens
  misc_RNA (1)...(19): siRNA sense strand
gggcccaugucgacuccaa

SEQ ID NO: 1234219 - RNA, 19 nt, Homo sapiens
  misc_RNA (1)...(19): siRNA sense strand
ccucuucuccuuuaagcaa

SEQ ID NO: 1234220 - RNA, 19 nt, Homo sapiens
  misc_RNA (1)...(19): siRNA sense strand
uacguguguuuagcaaaua

SEQ ID NO: 1234221 - RNA, 19 nt, Homo sapiens
  misc_RNA (1)...(19): siRNA sense strand
caccuugcuuguaccaaau

SEQ ID NO: 1234222 - RNA, 19 nt, Homo sapiens
  misc_RNA (1)...(19): siRNA sense strand
cuguugggauggucaaaga

SEQ ID NO: 1234223 - RNA, 19 nt, Homo sapiens
  misc_RNA (1)...(19): siRNA sense strand
gcacagacaguuuaaaagg

SEQ ID NO: 1234224 - RNA, 19 nt, Homo sapiens
  misc_RNA (1)...(19): siRNA sense strand
gguucgcacagacaguuua

SEQ ID NO: 1234225 - RNA, 19 nt, Homo sapiens
  misc_RNA (1)...(19): siRNA sense strand
aagaagugguucgcacaga

SEQ ID NO: 1234226 - RNA, 19 nt, Homo sapiens
  misc_RNA (1)...(19): siRNA sense strand
gacaagcgucgccggaauc

SEQ ID NO: 1234227 - RNA, 19 nt, Homo sapiens
  misc_RNA (1)...(19): siRNA sense strand
gaacuguuuguccuucgau

SEQ ID NO: 1234228 - RNA, 19 nt, Homo sapiens
  misc_RNA (1)...(19): siRNA sense strand
gcacaggcuacgacgucaa

SEQ ID NO: 1234229 - RNA, 19 nt, Homo sapiens
  misc_RNA (1)...(19): siRNA sense strand
cauuaagguagaagacauu

SEQ ID NO: 1234230 - RNA, 19 nt, Homo sapiens
  misc_RNA (1)...(19): siRNA sense strand
gcaaaauacguguguuuag

SEQ ID NO: 1234231 - RNA, 19 nt, Homo sapiens
  misc_RNA (1)...(19): siRNA sense strand
guacugccgauuucagaag

SEQ ID NO: 1234232 - RNA, 19 nt, Homo sapiens
  misc_RNA (1)...(19): siRNA sense strand
uaagguagaagacauucag

SEQ ID NO: 1234233 - RNA, 19 nt, Homo sapiens
  misc_RNA (1)...(19): siRNA sense strand
caacuuccaccagaacuac

SEQ ID NO: 1234234 - RNA, 19 nt, Homo sapiens
  misc_RNA (1)...(19): siRNA sense strand
guccuucgauuagcauaca

SEQ ID NO: 1234235 - RNA, 19 nt, Homo sapiens
  misc_RNA (1)...(19): siRNA sense strand
gaugacacccagcauaucc

SEQ ID NO: 1234236 - RNA, 19 nt, Homo sapiens
  misc_RNA (1)...(19): siRNA sense strand
uaucaaaugaguggagaug

SEQ ID NO: 1234237 - RNA, 19 nt, Homo sapiens
  misc_RNA (1)...(19): siRNA sense strand
guucgcacagacaguuuaa

SEQ ID NO: 1234238 - RNA, 19 nt, Homo sapiens
  misc_RNA (1)...(19): siRNA sense strand
ggugucuaguugccagaug

SEQ ID NO: 1234239 - RNA, 19 nt, Homo sapiens
  misc_RNA (1)...(19): siRNA sense strand
gccggaaucgcugucagua

SEQ ID NO: 1234240 - RNA, 19 nt, Homo sapiens
  misc_RNA (1)...(19): siRNA sense strand
caaaauacguguguuuagc

SEQ ID NO: 1234241 - RNA, 19 nt, Homo sapiens
  misc_RNA (1)...(19): siRNA sense strand
ccacgugacuuucaacaau

SEQ ID NO: 1234242 - RNA, 19 nt, Homo sapiens
  misc_RNA (1)...(19): siRNA sense strand
ggagaugacacccagcaua

SEQ ID NO: 1234243 - RNA, 19 nt, Homo sapiens
  misc_RNA (1)...(19): siRNA sense strand
ggacaagcgucgccggaau

SEQ ID NO: 1234244 - RNA, 19 nt, Homo sapiens
  misc_RNA (1)...(19): siRNA sense strand
ccaccuugcuuguaccaaa

SEQ ID NO: 1234245 - RNA, 19 nt, Homo sapiens
  misc_RNA (1)...(19): siRNA sense strand
gaauaugaacaucgacauu

SEQ ID NO: 1234246 - RNA, 19 nt, Homo sapiens
  misc_RNA (1)...(19): siRNA sense strand
gagaugacacccagcauau

SEQ ID NO: 1234247 - RNA, 19 nt, Homo sapiens
  misc_RNA (1)...(19): siRNA sense strand
acauucagaugcacaacua

SEQ ID NO: 1234248 - RNA, 19 nt, Homo sapiens
  misc_RNA (1)...(19): siRNA sense strand
uagaagacauucagaugca

SEQ ID NO: 1234249 - RNA, 19 nt, Homo sapiens
  misc_RNA (1)...(19): siRNA sense strand
gcaguccuccauuaaggua

SEQ ID NO: 1234250 - RNA, 19 nt, Homo sapiens
  misc_RNA (1)...(19): siRNA sense strand
gaacccugacuaucaaaug

SEQ ID NO: 1234251 - RNA, 19 nt, Homo sapiens
  misc_RNA (1)...(19): siRNA sense strand
gguagaagacauucagaug

SEQ ID NO: 1234252 - RNA, 19 nt, Homo sapiens
  misc_RNA (1)...(19): siRNA sense strand
gacagcaguccuccauuaa

SEQ ID NO: 1234253 - RNA, 19 nt, Homo sapiens
  misc_RNA (1)...(19): siRNA sense strand
cgggaucucuccacaacuu

SEQ ID NO: 1234254 - RNA, 19 nt, Homo sapiens
  misc_RNA (1)...(19): siRNA sense strand
ggcgaacccugacuaucaa

SEQ ID NO: 1234255 - RNA, 19 nt, Homo sapiens
  misc_RNA (1)...(19): siRNA sense strand
gcauauccagcaauucuau

SEQ ID NO: 1234256 - RNA, 19 nt, Homo sapiens
  misc_RNA (1)...(19): siRNA sense strand
ucaaggaacccaagagagu

SEQ ID NO: 1234257 - RNA, 19 nt, Homo sapiens
  misc_RNA (1)...(19): siRNA sense strand
cagcaguccuccauuaagg

SEQ ID NO: 1234258 - RNA, 19 nt, Homo sapiens
  misc_RNA (1)...(19): siRNA sense strand
ggacacuuuaccuuucuaa

SEQ ID NO: 1234259 - RNA, 19 nt, Homo sapiens
  misc_RNA (1)...(19): siRNA sense strand
caagagaguggaagaacug

SEQ ID NO: 1234260 - RNA, 19 nt, Homo sapiens
  misc_RNA (1)...(19): siRNA sense strand
gcucaaggaacccaagaga

SEQ ID NO: 1234261 - RNA, 19 nt, Homo sapiens
  misc_RNA (1)...(19): siRNA sense strand
auacguguguuuagcaaau

SEQ ID NO: 1234262 - RNA, 19 nt, Homo sapiens
  misc_RNA (1)...(19): siRNA sense strand
ccaagagaguggaagaacu

SEQ ID NO: 1234263 - RNA, 19 nt, Homo sapiens
  misc_RNA (1)...(19): siRNA sense strand
ugucaguacugccgauuuc

SEQ ID NO: 1234264 - RNA, 19 nt, Homo sapiens
  misc_RNA (1)...(19): siRNA sense strand
cggaaucgcugucaguacu

SEQ ID NO: 1234265 - RNA, 19 nt, Homo sapiens
  misc_RNA (1)...(19): siRNA sense strand
ccgggucgguuuacuacaa

SEQ ID NO: 1234266 - RNA, 19 nt, Homo sapiens
  misc_RNA (1)...(19): siRNA sense strand
gaacuucguacccuuugca

SEQ ID NO: 1234267 - RNA, 19 nt, Homo sapiens
  misc_RNA (1)...(19): siRNA sense strand
uggaagaacugcaaaacaa

SEQ ID NO: 1234268 - RNA, 19 nt, Homo sapiens
  misc_RNA (1)...(19): siRNA sense strand
gagaguggaagaacugcaa

SEQ ID NO: 1234269 - RNA, 19 nt, Homo sapiens
  misc_RNA (1)...(19): siRNA sense strand
gcccaaagccgaccaagac

SEQ ID NO: 1234270 - RNA, 19 nt, Homo sapiens
  misc_RNA (1)...(19): siRNA sense strand
cagcauauccagcaauucu

SEQ ID NO: 1234271 - RNA, 19 nt, Homo sapiens
  misc_RNA (1)...(19): siRNA sense strand
ucaaaugaguggagaugac

SEQ ID NO: 1234272 - RNA, 19 nt, Homo sapiens
  misc_RNA (1)...(19): siRNA sense strand
ccauuaagguagaagacau

SEQ ID NO: 1234273 - RNA, 19 nt, Homo sapiens
  misc_RNA (1)...(19): siRNA sense strand
ccagaacuucguacccuuu

SEQ ID NO: 1234274 - RNA, 19 nt, Homo sapiens
  misc_RNA (1)...(19): siRNA sense strand
aaauacguguguuuagcaa

SEQ ID NO: 1234275 - RNA, 19 nt, Homo sapiens
  misc_RNA (1)...(19): siRNA sense strand
ccuggacacuuuaccuuuc

SEQ ID NO: 1234276 - RNA, 19 nt, Homo sapiens
  misc_RNA (1)...(19): siRNA sense strand
cccagcauauccagcaauu

SEQ ID NO: 1234277 - RNA, 19 nt, Homo sapiens
  misc_RNA (1)...(19): siRNA sense strand
aacccugacuaucaaauga

SEQ ID NO: 1234278 - RNA, 19 nt, Homo sapiens
  misc_RNA (1)...(19): siRNA sense strand
ccacuacgcacaugaucga

SEQ ID NO: 1234279 - RNA, 19 nt, Homo sapiens
  misc_RNA (1)...(19): siRNA sense strand
cacgugacuuucaacaaug

SEQ ID NO: 1234280 - RNA, 19 nt, Homo sapiens
  misc_RNA (1)...(19): siRNA sense strand
auaugaacaucgacauuuc

SEQ ID NO: 1234281 - RNA, 19 nt, Homo sapiens
  misc_RNA (1)...(19): siRNA sense strand
gaagugguucgcacagaca

SEQ ID NO: 1234282 - RNA, 19 nt, Homo sapiens
  misc_RNA (1)...(19): siRNA sense strand
agaacuacguggccacuac

SEQ ID NO: 1234283 - RNA, 19 nt, Homo sapiens
  misc_RNA (1)...(19): siRNA sense strand
cagaagugccuggcuguug

SEQ ID NO: 1234284 - RNA, 19 nt, Homo sapiens
  misc_RNA (1)...(19): siRNA sense strand
aggcgaacccugacuauca

SEQ ID NO: 1234285 - RNA, 19 nt, Homo sapiens
  misc_RNA (1)...(19): siRNA sense strand
gauggucaaagaagugguu

SEQ ID NO: 1234286 - RNA, 19 nt, Homo sapiens
  misc_RNA (1)...(19): siRNA sense strand
gagacacgggcucaaggaa

SEQ ID NO: 1234287 - RNA, 19 nt, Homo sapiens
  misc_RNA (1)...(19): siRNA sense strand
caaaugaguggagaugaca

SEQ ID NO: 1234288 - RNA, 19 nt, Homo sapiens
  misc_RNA (1)...(19): siRNA sense strand
gggcccaugucgacuccaa

SEQ ID NO: 1234289 - RNA, 19 nt, Homo sapiens
  misc_RNA (1)...(19): siRNA sense strand
ccucuucuccuuuaagcaa

SEQ ID NO: 1234290 - RNA, 19 nt, Homo sapiens
  misc_RNA (1)...(19): siRNA sense strand
gaagaacugcaaaacaaga

SEQ ID NO: 1234291 - RNA, 19 nt, Homo sapiens
  misc_RNA (1)...(19): siRNA sense strand
uacguguguuuagcaaaua

SEQ ID NO: 1234292 - RNA, 19 nt, Homo sapiens
  misc_RNA (1)...(19): siRNA sense strand
caccuugcuuguaccaaau

SEQ ID NO: 1234293 - RNA, 19 nt, Homo sapiens
  misc_RNA (1)...(19): siRNA sense strand
cuguugggauggucaaaga

SEQ ID NO: 1234294 - RNA, 19 nt, Homo sapiens
  misc_RNA (1)...(19): siRNA sense strand
gcauugcugcccuggcuau

SEQ ID NO: 1234295 - RNA, 19 nt, Homo sapiens
  misc_RNA (1)...(19): siRNA sense strand
gcacagacaguuuaaaagg

SEQ ID NO: 1234296 - RNA, 19 nt, Homo sapiens
  misc_RNA (1)...(19): siRNA sense strand
gguucgcacagacaguuua

SEQ ID NO: 1234297 - RNA, 19 nt, Homo sapiens
  misc_RNA (1)...(19): siRNA sense strand
aagaagugguucgcacaga

SEQ ID NO: 1234298 - RNA, 19 nt, Homo sapiens
  misc_RNA (1)...(19): siRNA sense strand
gacaagcgucgccggaauc

SEQ ID NO: 1234299 - RNA, 19 nt, Homo sapiens
  misc_RNA (1)...(19): siRNA sense strand
gaacugcaaaacaagauug

SEQ ID NO: 1234300 - RNA, 19 nt, Homo sapiens
  misc_RNA (1)...(19): siRNA sense strand
gaacuguuuguccuucgau

SEQ ID NO: 1234301 - RNA, 19 nt, Homo sapiens
  misc_RNA (1)...(19): siRNA sense strand
gcaaaauacguguguuuag

SEQ ID NO: 1234302 - RNA, 19 nt, Homo sapiens
  misc_RNA (1)...(19): siRNA sense strand
gcacaggcuacgacgucaa

SEQ ID NO: 1234303 - RNA, 19 nt, Homo sapiens
  misc_RNA (1)...(19): siRNA sense strand
cauuaagguagaagacauu

SEQ ID NO: 1234304 - RNA, 19 nt, Homo sapiens
  misc_RNA (1)...(19): siRNA sense strand
guacugccgauuucagaag

SEQ ID NO: 1234305 - RNA, 19 nt, Homo sapiens
  misc_RNA (1)...(19): siRNA sense strand
ccugaaauuggaagacuug

SEQ ID NO: 1234306 - RNA, 19 nt, Homo sapiens
  misc_RNA (1)...(19): siRNA sense strand
uaagguagaagacauucag

SEQ ID NO: 1234307 - RNA, 19 nt, Homo sapiens
  misc_RNA (1)...(19): siRNA sense strand
caacuuccaccagaacuac

SEQ ID NO: 1234308 - RNA, 19 nt, Homo sapiens
  misc_RNA (1)...(19): siRNA sense strand
guccuucgauuagcauaca

SEQ ID NO: 1234309 - RNA, 19 nt, Homo sapiens
  misc_RNA (1)...(19): siRNA sense strand
gaugacacccagcauaucc

SEQ ID NO: 1234310 - RNA, 19 nt, Homo sapiens
  misc_RNA (1)...(19): siRNA sense strand
uaucaaaugaguggagaug

SEQ ID NO: 1234311 - RNA, 19 nt, Homo sapiens
  misc_RNA (1)...(19): siRNA sense strand
guucgcacagacaguuuaa

SEQ ID NO: 1234312 - RNA, 19 nt, Homo sapiens
  misc_RNA (1)...(19): siRNA sense strand
ggugucuaguugccagaug

SEQ ID NO: 1234313 - RNA, 19 nt, Homo sapiens
  misc_RNA (1)...(19): siRNA sense strand
ucucaaagaccacgugacu

SEQ ID NO: 1234314 - RNA, 19 nt, Homo sapiens
  misc_RNA (1)...(19): siRNA sense strand
gccggaaucgcugucagua

SEQ ID NO: 1234315 - RNA, 19 nt, Homo sapiens
  misc_RNA (1)...(19): siRNA sense strand
caaaauacguguguuuagc

SEQ ID NO: 1234316 - RNA, 19 nt, Homo sapiens
  misc_RNA (1)...(19): siRNA sense strand
ggccaucgccuacucauug

SEQ ID NO: 1234317 - RNA, 19 nt, Homo sapiens
  misc_RNA (1)...(19): siRNA sense strand
ucgccaaccucaucuacuu

SEQ ID NO: 1234318 - RNA, 19 nt, Homo sapiens
  misc_RNA (1)...(19): siRNA sense strand
ccucaucuacuuccucaug

SEQ ID NO: 1234319 - RNA, 19 nt, Homo sapiens
  misc_RNA (1)...(19): siRNA sense strand
gcccaucuacagccucuau

SEQ ID NO: 1234320 - RNA, 19 nt, Homo sapiens
  misc_RNA (1)...(19): siRNA sense strand
cagccugcuuugccucaug

SEQ ID NO: 1234321 - RNA, 19 nt, Homo sapiens
  misc_RNA (1)...(19): siRNA sense strand
caacagcagcacccucaac

SEQ ID NO: 1234322 - RNA, 19 nt, Homo sapiens
  misc_RNA (1)...(19): siRNA sense strand
ggccaucgccuacucauug

SEQ ID NO: 1234323 - RNA, 19 nt, Homo sapiens
  misc_RNA (1)...(19): siRNA sense strand
ucgccaaccucaucuacuu

SEQ ID NO: 1234324 - RNA, 19 nt, Homo sapiens
  misc_RNA (1)...(19): siRNA sense strand
ccucaucuacuuccucaug

SEQ ID NO: 1234325 - RNA, 19 nt, Homo sapiens
  misc_RNA (1)...(19): siRNA sense strand
gcccaucuacagccucuau

SEQ ID NO: 1234326 - RNA, 19 nt, Homo sapiens
  misc_RNA (1)...(19): siRNA sense strand
cagccugcuuugccucaug

SEQ ID NO: 1234327 - RNA, 19 nt, Homo sapiens
  misc_RNA (1)...(19): siRNA sense strand
caacagcagcacccucaac

SEQ ID NO: 1234328 - RNA, 19 nt, Homo sapiens
  misc_RNA (1)...(19): siRNA sense strand
agaagaaacugcucaagaa

SEQ ID NO: 1234329 - RNA, 19 nt, Homo sapiens
  misc_RNA (1)...(19): siRNA sense strand
ucaagagccugaagaauau

SEQ ID NO: 1234330 - RNA, 19 nt, Homo sapiens
  misc_RNA (1)...(19): siRNA sense strand
gcuccugggugaccuguua

SEQ ID NO: 1234331 - RNA, 19 nt, Homo sapiens
  misc_RNA (1)...(19): siRNA sense strand
ugaagcaacugcagaaaga

SEQ ID NO: 1234332 - RNA, 19 nt, Homo sapiens
  misc_RNA (1)...(19): siRNA sense strand
ggagccaucucuucccuuu

SEQ ID NO: 1234333 - RNA, 19 nt, Homo sapiens
  misc_RNA (1)...(19): siRNA sense strand
ccagauggguccacacuga

SEQ ID NO: 1234334 - RNA, 19 nt, Homo sapiens
  misc_RNA (1)...(19): siRNA sense strand
ucucacagcucaaguaugu

SEQ ID NO: 1234335 - RNA, 19 nt, Homo sapiens
  misc_RNA (1)...(19): siRNA sense strand
gcacagauuugagguagau

SEQ ID NO: 1234336 - RNA, 19 nt, Homo sapiens
  misc_RNA (1)...(19): siRNA sense strand
acagagauguggcagagua

SEQ ID NO: 1234337 - RNA, 19 nt, Homo sapiens
  misc_RNA (1)...(19): siRNA sense strand
uggugaagcuguugaauga

SEQ ID NO: 1234338 - RNA, 19 nt, Homo sapiens
  misc_RNA (1)...(19): siRNA sense strand
acacggauauuuacagaga

SEQ ID NO: 1234339 - RNA, 19 nt, Homo sapiens
  misc_RNA (1)...(19): siRNA sense strand
acacccagcuguucucaaa

SEQ ID NO: 1234340 - RNA, 19 nt, Homo sapiens
  misc_RNA (1)...(19): siRNA sense strand
ggacacagaugccccacua

SEQ ID NO: 1234341 - RNA, 19 nt, Homo sapiens
  misc_RNA (1)...(19): siRNA sense strand
cucaagagccugaagaaua

SEQ ID NO: 1234342 - RNA, 19 nt, Homo sapiens
  misc_RNA (1)...(19): siRNA sense strand
ccacaggcaucuccuaugg

SEQ ID NO: 1234343 - RNA, 19 nt, Homo sapiens
  misc_RNA (1)...(19): siRNA sense strand
gcagaggugugguguggau

SEQ ID NO: 1234344 - RNA, 19 nt, Homo sapiens
  misc_RNA (1)...(19): siRNA sense strand
gggcggaucugcuuaucug

SEQ ID NO: 1234345 - RNA, 19 nt, Homo sapiens
  misc_RNA (1)...(19): siRNA sense strand
ccaugaugcugucaccuuu

SEQ ID NO: 1234346 - RNA, 19 nt, Homo sapiens
  misc_RNA (1)...(19): siRNA sense strand
agauugagguggaggugua

SEQ ID NO: 1234347 - RNA, 19 nt, Homo sapiens
  misc_RNA (1)...(19): siRNA sense strand
gaccuuugcugucaugucu

SEQ ID NO: 1234348 - RNA, 19 nt, Homo sapiens
  misc_RNA (1)...(19): siRNA sense strand
agacacggauauuuacaga

SEQ ID NO: 1234349 - RNA, 19 nt, Homo sapiens
  misc_RNA (1)...(19): siRNA sense strand
gaacgacuccaugaucaau

SEQ ID NO: 1234350 - RNA, 19 nt, Homo sapiens
  misc_RNA (1)...(19): siRNA sense strand
gaagaaacugcucaagaag

SEQ ID NO: 1234351 - RNA, 19 nt, Homo sapiens
  misc_RNA (1)...(19): siRNA sense strand
ugccagacacggauauuua

SEQ ID NO: 1234352 - RNA, 19 nt, Homo sapiens
  misc_RNA (1)...(19): siRNA sense strand
ccacugucccucaucuaua

SEQ ID NO: 1234353 - RNA, 19 nt, Homo sapiens
  misc_RNA (1)...(19): siRNA sense strand
gugaagcuguugaaugaca

SEQ ID NO: 1234354 - RNA, 19 nt, Homo sapiens
  misc_RNA (1)...(19): siRNA sense strand
gcagccaucaucauuguga

SEQ ID NO: 1234355 - RNA, 19 nt, Homo sapiens
  misc_RNA (1)...(19): siRNA sense strand
ggucuaaagcacagauuug

SEQ ID NO: 1234356 - RNA, 19 nt, Homo sapiens
  misc_RNA (1)...(19): siRNA sense strand
ccucaucauugucaaacuu

SEQ ID NO: 1234357 - RNA, 19 nt, Homo sapiens
  misc_RNA (1)...(19): siRNA sense strand
ggagauaagauggaagaug

SEQ ID NO: 1234358 - RNA, 19 nt, Homo sapiens
  misc_RNA (1)...(19): siRNA sense strand
gagcucaggagauaagaug

SEQ ID NO: 1234359 - RNA, 19 nt, Homo sapiens
  misc_RNA (1)...(19): siRNA sense strand
gcagaaagaggagaagcuu

SEQ ID NO: 1234360 - RNA, 19 nt, Homo sapiens
  misc_RNA (1)...(19): siRNA sense strand
gcugaguucuacagugaug

SEQ ID NO: 1234361 - RNA, 19 nt, Homo sapiens
  misc_RNA (1)...(19): siRNA sense strand
ucaaugagacagccagaga

SEQ ID NO: 1234362 - RNA, 19 nt, Homo sapiens
  misc_RNA (1)...(19): siRNA sense strand
guacucagaggccaaggaa

SEQ ID NO: 1234363 - RNA, 19 nt, Homo sapiens
  misc_RNA (1)...(19): siRNA sense strand
aagaagaaacugcucaaga

SEQ ID NO: 1234364 - RNA, 19 nt, Homo sapiens
  misc_RNA (1)...(19): siRNA sense strand
aggagaagcuucggaaaca

SEQ ID NO: 1234365 - RNA, 19 nt, Homo sapiens
  misc_RNA (1)...(19): siRNA sense strand
gaggcgagacuaccacaug

SEQ ID NO: 1234366 - RNA, 19 nt, Homo sapiens
  misc_RNA (1)...(19): siRNA sense strand
gaagaugcaacagccaaug

SEQ ID NO: 1234367 - RNA, 19 nt, Homo sapiens
  misc_RNA (1)...(19): siRNA sense strand
uaagauggaagaugcaaca

SEQ ID NO: 1234368 - RNA, 19 nt, Homo sapiens
  misc_RNA (1)...(19): siRNA sense strand
cuucaucuacuuccuguuu

SEQ ID NO: 1234369 - RNA, 19 nt, Homo sapiens
  misc_RNA (1)...(19): siRNA sense strand
augcugaguucuacaguga

SEQ ID NO: 1234370 - RNA, 19 nt, Homo sapiens
  misc_RNA (1)...(19): siRNA sense strand
gugguuggguuugccauug

SEQ ID NO: 1234371 - RNA, 19 nt, Homo sapiens
  misc_RNA (1)...(19): siRNA sense strand
acgacuccaugaucaauga

SEQ ID NO: 1234372 - RNA, 19 nt, Homo sapiens
  misc_RNA (1)...(19): siRNA sense strand
augcauccaucaccaagaa

SEQ ID NO: 1234373 - RNA, 19 nt, Homo sapiens
  misc_RNA (1)...(19): siRNA sense strand
gcuugaggcugggcacuuc

SEQ ID NO: 1234374 - RNA, 19 nt, Homo sapiens
  misc_RNA (1)...(19): siRNA sense strand
gcgagacuaccacauggaa

SEQ ID NO: 1234375 - RNA, 19 nt, Homo sapiens
  misc_RNA (1)...(19): siRNA sense strand
caggagauaagauggaaga

SEQ ID NO: 1234376 - RNA, 19 nt, Homo sapiens
  misc_RNA (1)...(19): siRNA sense strand
gaggagaagcuucggaaac

SEQ ID NO: 1234377 - RNA, 19 nt, Homo sapiens
  misc_RNA (1)...(19): siRNA sense strand
uugaacgacuccaugauca

SEQ ID NO: 1234378 - RNA, 19 nt, Homo sapiens
  misc_RNA (1)...(19): siRNA sense strand
caacagccaauggucaaga

SEQ ID NO: 1234379 - RNA, 19 nt, Homo sapiens
  misc_RNA (1)...(19): siRNA sense strand
ggaagaugcaacagccaau

SEQ ID NO: 1234380 - RNA, 19 nt, Homo sapiens
  misc_RNA (1)...(19): siRNA sense strand
cuucuacccugucuucauc

SEQ ID NO: 1234381 - RNA, 19 nt, Homo sapiens
  misc_RNA (1)...(19): siRNA sense strand
guguuuggccuccaucuga

SEQ ID NO: 1234382 - RNA, 19 nt, Homo sapiens
  misc_RNA (1)...(19): siRNA sense strand
gaagaagaaacugcucaag

SEQ ID NO: 1234383 - RNA, 19 nt, Homo sapiens
  misc_RNA (1)...(19): siRNA sense strand
cccgugaguugcucuaugu

SEQ ID NO: 1234384 - RNA, 19 nt, Homo sapiens
  misc_RNA (1)...(19): siRNA sense strand
ggagaagcuucggaaacag

SEQ ID NO: 1234385 - RNA, 19 nt, Homo sapiens
  misc_RNA (1)...(19): siRNA sense strand
gauaagauggaagaugcaa

SEQ ID NO: 1234386 - RNA, 19 nt, Homo sapiens
  misc_RNA (1)...(19): siRNA sense strand
ugaagcuguugaaugacaa

SEQ ID NO: 1234387 - RNA, 19 nt, Homo sapiens
  misc_RNA (1)...(19): siRNA sense strand
gcucaggagauaagaugga

SEQ ID NO: 1234388 - RNA, 19 nt, Homo sapiens
  misc_RNA (1)...(19): siRNA sense strand
gcuaccggguggacagcaa

SEQ ID NO: 1234389 - RNA, 19 nt, Homo sapiens
  misc_RNA (1)...(19): siRNA sense strand
ggugggcagugugacagaa

SEQ ID NO: 1234390 - RNA, 19 nt, Homo sapiens
  misc_RNA (1)...(19): siRNA sense strand
cagcucaaguauguguuug

SEQ ID NO: 1234391 - RNA, 19 nt, Homo sapiens
  misc_RNA (1)...(19): siRNA sense strand
guggugaagcuguugaaug

SEQ ID NO: 1234392 - RNA, 19 nt, Homo sapiens
  misc_RNA (1)...(19): siRNA sense strand
cacugucccucaucuauac

SEQ ID NO: 1234393 - RNA, 19 nt, Homo sapiens
  misc_RNA (1)...(19): siRNA sense strand
gccacugucccucaucuau

SEQ ID NO: 1234394 - RNA, 19 nt, Homo sapiens
  misc_RNA (1)...(19): siRNA sense strand
gcacuucccggcacaucuc

SEQ ID NO: 1234395 - RNA, 19 nt, Homo sapiens
  misc_RNA (1)...(19): siRNA sense strand
ccuauggcaugggucuaaa

SEQ ID NO: 1234396 - RNA, 19 nt, Homo sapiens
  misc_RNA (1)...(19): siRNA sense strand
ugggugcccucuccuuugu

SEQ ID NO: 1234397 - RNA, 19 nt, Homo sapiens
  misc_RNA (1)...(19): siRNA sense strand
gggucuaaagcacagauuu

SEQ ID NO: 1234398 - RNA, 19 nt, Homo sapiens
  misc_RNA (1)...(19): siRNA sense strand
gcagcugcccaugccgaua

SEQ ID NO: 1234399 - RNA, 19 nt, Homo sapiens
  misc_RNA (1)...(19): siRNA sense strand
aacagccaauggucaagaa

SEQ ID NO: 1234400 - RNA, 19 nt, Homo sapiens
  misc_RNA (1)...(19): siRNA sense strand
cuacagugaugcgcugaag

SEQ ID NO: 1234401 - RNA, 19 nt, Homo sapiens
  misc_RNA (1)...(19): siRNA sense strand
uuaucuggcuggugaccuu

SEQ ID NO: 1234402 - RNA, 19 nt, Homo sapiens
  misc_RNA (1)...(19): siRNA sense strand
gucuaaagcacagauuuga

SEQ ID NO: 1234403 - RNA, 19 nt, Homo sapiens
  misc_RNA (1)...(19): siRNA sense strand
gggccacugucccucaucu

SEQ ID NO: 1234404 - RNA, 19 nt, Homo sapiens
  misc_RNA (1)...(19): siRNA sense strand
ggugagcucaggagauaag

SEQ ID NO: 1234405 - RNA, 19 nt, Homo sapiens
  misc_RNA (1)...(19): siRNA sense strand
uuccucaucucccagaaga

SEQ ID NO: 1234406 - RNA, 19 nt, Homo sapiens
  misc_RNA (1)...(19): siRNA sense strand
acggauauuuacagagaug

SEQ ID NO: 1234407 - RNA, 19 nt, Homo sapiens
  misc_RNA (1)...(19): siRNA sense strand
gggccucaguaaccuuauc

SEQ ID NO: 1234408 - RNA, 19 nt, Homo sapiens
  misc_RNA (1)...(19): siRNA sense strand
aaagcacagauuugaggua

SEQ ID NO: 1234409 - RNA, 19 nt, Homo sapiens
  misc_RNA (1)...(19): siRNA sense strand
ggccacaggcaucuccuau

SEQ ID NO: 1234410 - RNA, 19 nt, Homo sapiens
  misc_RNA (1)...(19): siRNA sense strand
cagccaucaucauugugaa

SEQ ID NO: 1234411 - RNA, 19 nt, Homo sapiens
  misc_RNA (1)...(19): siRNA sense strand
ggcugggccugauccacuu

SEQ ID NO: 1234412 - RNA, 19 nt, Homo sapiens
  misc_RNA (1)...(19): siRNA sense strand
cagccaauggucaagaaga

SEQ ID NO: 1234413 - RNA, 19 nt, Homo sapiens
  misc_RNA (1)...(19): siRNA sense strand
acucagaggccaaggaagu

SEQ ID NO: 1234414 - RNA, 19 nt, Homo sapiens
  misc_RNA (1)...(19): siRNA sense strand
gugccagacacggauauuu

SEQ ID NO: 1234415 - RNA, 19 nt, Homo sapiens
  misc_RNA (1)...(19): siRNA sense strand
ggugguugcggucaucuuc

SEQ ID NO: 1234416 - RNA, 19 nt, Homo sapiens
  misc_RNA (1)...(19): siRNA sense strand
agaagaaacugcucaagaa

SEQ ID NO: 1234417 - RNA, 19 nt, Homo sapiens
  misc_RNA (1)...(19): siRNA sense strand
ucaagagccugaagaauau

SEQ ID NO: 1234418 - RNA, 19 nt, Homo sapiens
  misc_RNA (1)...(19): siRNA sense strand
gcuccugggugaccuguua

SEQ ID NO: 1234419 - RNA, 19 nt, Homo sapiens
  misc_RNA (1)...(19): siRNA sense strand
ugaagcaacugcagaaaga

SEQ ID NO: 1234420 - RNA, 19 nt, Homo sapiens
  misc_RNA (1)...(19): siRNA sense strand
ggagccaucucuucccuuu

SEQ ID NO: 1234421 - RNA, 19 nt, Homo sapiens
  misc_RNA (1)...(19): siRNA sense strand
ccagauggguccacacuga

SEQ ID NO: 1234422 - RNA, 19 nt, Homo sapiens
  misc_RNA (1)...(19): siRNA sense strand
ucucacagcucaaguaugu

SEQ ID NO: 1234423 - RNA, 19 nt, Homo sapiens
  misc_RNA (1)...(19): siRNA sense strand
gcacagauuugagguagau

SEQ ID NO: 1234424 - RNA, 19 nt, Homo sapiens
  misc_RNA (1)...(19): siRNA sense strand
acagagauguggcagagua

SEQ ID NO: 1234425 - RNA, 19 nt, Homo sapiens
  misc_RNA (1)...(19): siRNA sense strand
uggugaagcuguugaauga

SEQ ID NO: 1234426 - RNA, 19 nt, Homo sapiens
  misc_RNA (1)...(19): siRNA sense strand
acacggauauuuacagaga

SEQ ID NO: 1234427 - RNA, 19 nt, Homo sapiens
  misc_RNA (1)...(19): siRNA sense strand
acacccagcuguucucaaa

SEQ ID NO: 1234428 - RNA, 19 nt, Homo sapiens
  misc_RNA (1)...(19): siRNA sense strand
ggacacagaugccccacua

SEQ ID NO: 1234429 - RNA, 19 nt, Homo sapiens
  misc_RNA (1)...(19): siRNA sense strand
cucaagagccugaagaaua

SEQ ID NO: 1234430 - RNA, 19 nt, Homo sapiens
  misc_RNA (1)...(19): siRNA sense strand
ccacaggcaucuccuaugg

SEQ ID NO: 1234431 - RNA, 19 nt, Homo sapiens
  misc_RNA (1)...(19): siRNA sense strand
gcagaggugugguguggau

SEQ ID NO: 1234432 - RNA, 19 nt, Homo sapiens
  misc_RNA (1)...(19): siRNA sense strand
gggcggaucugcuuaucug

SEQ ID NO: 1234433 - RNA, 19 nt, Homo sapiens
  misc_RNA (1)...(19): siRNA sense strand
ccaugaugcugucaccuuu

SEQ ID NO: 1234434 - RNA, 19 nt, Homo sapiens
  misc_RNA (1)...(19): siRNA sense strand
agauugagguggaggugua

SEQ ID NO: 1234435 - RNA, 19 nt, Homo sapiens
  misc_RNA (1)...(19): siRNA sense strand
gaccuuugcugucaugucu

SEQ ID NO: 1234436 - RNA, 19 nt, Homo sapiens
  misc_RNA (1)...(19): siRNA sense strand
agacacggauauuuacaga

SEQ ID NO: 1234437 - RNA, 19 nt, Homo sapiens
  misc_RNA (1)...(19): siRNA sense strand
gaacgacuccaugaucaau

SEQ ID NO: 1234438 - RNA, 19 nt, Homo sapiens
  misc_RNA (1)...(19): siRNA sense strand
gaagaaacugcucaagaag

SEQ ID NO: 1234439 - RNA, 19 nt, Homo sapiens
  misc_RNA (1)...(19): siRNA sense strand
ugccagacacggauauuua

SEQ ID NO: 1234440 - RNA, 19 nt, Homo sapiens
  misc_RNA (1)...(19): siRNA sense strand
ccacugucccucaucuaua

SEQ ID NO: 1234441 - RNA, 19 nt, Homo sapiens
  misc_RNA (1)...(19): siRNA sense strand
gugaagcuguugaaugaca

SEQ ID NO: 1234442 - RNA, 19 nt, Homo sapiens
  misc_RNA (1)...(19): siRNA sense strand
gcagccaucaucauuguga

SEQ ID NO: 1234443 - RNA, 19 nt, Homo sapiens
  misc_RNA (1)...(19): siRNA sense strand
ggucuaaagcacagauuug

SEQ ID NO: 1234444 - RNA, 19 nt, Homo sapiens
  misc_RNA (1)...(19): siRNA sense strand
ccucaucauugucaaacuu

SEQ ID NO: 1234445 - RNA, 19 nt, Homo sapiens
  misc_RNA (1)...(19): siRNA sense strand
ggagauaagauggaagaug

SEQ ID NO: 1234446 - RNA, 19 nt, Homo sapiens
  misc_RNA (1)...(19): siRNA sense strand
gagcucaggagauaagaug

SEQ ID NO: 1234447 - RNA, 19 nt, Homo sapiens
  misc_RNA (1)...(19): siRNA sense strand
gcagaaagaggagaagcuu

SEQ ID NO: 1234448 - RNA, 19 nt, Homo sapiens
  misc_RNA (1)...(19): siRNA sense strand
gcugaguucuacagugaug

SEQ ID NO: 1234449 - RNA, 19 nt, Homo sapiens
  misc_RNA (1)...(19): siRNA sense strand
ucaaugagacagccagaga

SEQ ID NO: 1234450 - RNA, 19 nt, Homo sapiens
  misc_RNA (1)...(19): siRNA sense strand
guacucagaggccaaggaa

SEQ ID NO: 1234451 - RNA, 19 nt, Homo sapiens
  misc_RNA (1)...(19): siRNA sense strand
aagaagaaacugcucaaga

SEQ ID NO: 1234452 - RNA, 19 nt, Homo sapiens
  misc_RNA (1)...(19): siRNA sense strand
aggagaagcuucggaaaca

SEQ ID NO: 1234453 - RNA, 19 nt, Homo sapiens
  misc_RNA (1)...(19): siRNA sense strand
gaggcgagacuaccacaug

SEQ ID NO: 1234454 - RNA, 19 nt, Homo sapiens
  misc_RNA (1)...(19): siRNA sense strand
gaagaugcaacagccaaug

SEQ ID NO: 1234455 - RNA, 19 nt, Homo sapiens
  misc_RNA (1)...(19): siRNA sense strand
uaagauggaagaugcaaca

SEQ ID NO: 1234456 - RNA, 19 nt, Homo sapiens
  misc_RNA (1)...(19): siRNA sense strand
cuucaucuacuuccuguuu

SEQ ID NO: 1234457 - RNA, 19 nt, Homo sapiens
  misc_RNA (1)...(19): siRNA sense strand
augcugaguucuacaguga

SEQ ID NO: 1234458 - RNA, 19 nt, Homo sapiens
  misc_RNA (1)...(19): siRNA sense strand
gugguuggguuugccauug

SEQ ID NO: 1234459 - RNA, 19 nt, Homo sapiens
  misc_RNA (1)...(19): siRNA sense strand
acgacuccaugaucaauga

SEQ ID NO: 1234460 - RNA, 19 nt, Homo sapiens
  misc_RNA (1)...(19): siRNA sense strand
augcauccaucaccaagaa

SEQ ID NO: 1234461 - RNA, 19 nt, Homo sapiens
  misc_RNA (1)...(19): siRNA sense strand
gcuugaggcugggcacuuc

SEQ ID NO: 1234462 - RNA, 19 nt, Homo sapiens
  misc_RNA (1)...(19): siRNA sense strand
gcgagacuaccacauggaa

SEQ ID NO: 1234463 - RNA, 19 nt, Homo sapiens
  misc_RNA (1)...(19): siRNA sense strand
caggagauaagauggaaga

SEQ ID NO: 1234464 - RNA, 19 nt, Homo sapiens
  misc_RNA (1)...(19): siRNA sense strand
gaggagaagcuucggaaac

SEQ ID NO: 1234465 - RNA, 19 nt, Homo sapiens
  misc_RNA (1)...(19): siRNA sense strand
uugaacgacuccaugauca

SEQ ID NO: 1234466 - RNA, 19 nt, Homo sapiens
  misc_RNA (1)...(19): siRNA sense strand
caacagccaauggucaaga

SEQ ID NO: 1234467 - RNA, 19 nt, Homo sapiens
  misc_RNA (1)...(19): siRNA sense strand
ggaagaugcaacagccaau

SEQ ID NO: 1234468 - RNA, 19 nt, Homo sapiens
  misc_RNA (1)...(19): siRNA sense strand
cuucuacccugucuucauc

SEQ ID NO: 1234469 - RNA, 19 nt, Homo sapiens
  misc_RNA (1)...(19): siRNA sense strand
guguuuggccuccaucuga

SEQ ID NO: 1234470 - RNA, 19 nt, Homo sapiens
  misc_RNA (1)...(19): siRNA sense strand
gaagaagaaacugcucaag

SEQ ID NO: 1234471 - RNA, 19 nt, Homo sapiens
  misc_RNA (1)...(19): siRNA sense strand
cccgugaguugcucuaugu

SEQ ID NO: 1234472 - RNA, 19 nt, Homo sapiens
  misc_RNA (1)...(19): siRNA sense strand
ggagaagcuucggaaacag

SEQ ID NO: 1234473 - RNA, 19 nt, Homo sapiens
  misc_RNA (1)...(19): siRNA sense strand
gauaagauggaagaugcaa

SEQ ID NO: 1234474 - RNA, 19 nt, Homo sapiens
  misc_RNA (1)...(19): siRNA sense strand
ugaagcuguugaaugacaa

SEQ ID NO: 1234475 - RNA, 19 nt, Homo sapiens
  misc_RNA (1)...(19): siRNA sense strand
gcucaggagauaagaugga

SEQ ID NO: 1234476 - RNA, 19 nt, Homo sapiens
  misc_RNA (1)...(19): siRNA sense strand
gcuaccggguggacagcaa

SEQ ID NO: 1234477 - RNA, 19 nt, Homo sapiens
  misc_RNA (1)...(19): siRNA sense strand
ggugggcagugugacagaa

SEQ ID NO: 1234478 - RNA, 19 nt, Homo sapiens
  misc_RNA (1)...(19): siRNA sense strand
cagcucaaguauguguuug

SEQ ID NO: 1234479 - RNA, 19 nt, Homo sapiens
  misc_RNA (1)...(19): siRNA sense strand
guggugaagcuguugaaug

SEQ ID NO: 1234480 - RNA, 19 nt, Homo sapiens
  misc_RNA (1)...(19): siRNA sense strand
cacugucccucaucuauac

SEQ ID NO: 1234481 - RNA, 19 nt, Homo sapiens
  misc_RNA (1)...(19): siRNA sense strand
gccacugucccucaucuau

SEQ ID NO: 1234482 - RNA, 19 nt, Homo sapiens
  misc_RNA (1)...(19): siRNA sense strand
gcacuucccggcacaucuc

SEQ ID NO: 1234483 - RNA, 19 nt, Homo sapiens
  misc_RNA (1)...(19): siRNA sense strand
ccuauggcaugggucuaaa

SEQ ID NO: 1234484 - RNA, 19 nt, Homo sapiens
  misc_RNA (1)...(19): siRNA sense strand
ugggugcccucuccuuugu

SEQ ID NO: 1234485 - RNA, 19 nt, Homo sapiens
  misc_RNA (1)...(19): siRNA sense strand
gggucuaaagcacagauuu

SEQ ID NO: 1234486 - RNA, 19 nt, Homo sapiens
  misc_RNA (1)...(19): siRNA sense strand
gcagcugcccaugccgaua

SEQ ID NO: 1234487 - RNA, 19 nt, Homo sapiens
  misc_RNA (1)...(19): siRNA sense strand
aacagccaauggucaagaa

SEQ ID NO: 1234488 - RNA, 19 nt, Homo sapiens
  misc_RNA (1)...(19): siRNA sense strand
cuacagugaugcgcugaag

SEQ ID NO: 1234489 - RNA, 19 nt, Homo sapiens
  misc_RNA (1)...(19): siRNA sense strand
uuaucuggcuggugaccuu

SEQ ID NO: 1234490 - RNA, 19 nt, Homo sapiens
  misc_RNA (1)...(19): siRNA sense strand
gucuaaagcacagauuuga

SEQ ID NO: 1234491 - RNA, 19 nt, Homo sapiens
  misc_RNA (1)...(19): siRNA sense strand
gggccacugucccucaucu

SEQ ID NO: 1234492 - RNA, 19 nt, Homo sapiens
  misc_RNA (1)...(19): siRNA sense strand
ggugagcucaggagauaag

SEQ ID NO: 1234493 - RNA, 19 nt, Homo sapiens
  misc_RNA (1)...(19): siRNA sense strand
uuccucaucucccagaaga

SEQ ID NO: 1234494 - RNA, 19 nt, Homo sapiens
  misc_RNA (1)...(19): siRNA sense strand
acggauauuuacagagaug

SEQ ID NO: 1234495 - RNA, 19 nt, Homo sapiens
  misc_RNA (1)...(19): siRNA sense strand
gggccucaguaaccuuauc

SEQ ID NO: 1234496 - RNA, 19 nt, Homo sapiens
  misc_RNA (1)...(19): siRNA sense strand
aaagcacagauuugaggua

SEQ ID NO: 1234497 - RNA, 19 nt, Homo sapiens
  misc_RNA (1)...(19): siRNA sense strand
ggccacaggcaucuccuau

SEQ ID NO: 1234498 - RNA, 19 nt, Homo sapiens
  misc_RNA (1)...(19): siRNA sense strand
cagccaucaucauugugaa

SEQ ID NO: 1234499 - RNA, 19 nt, Homo sapiens
  misc_RNA (1)...(19): siRNA sense strand
ggcugggccugauccacuu

SEQ ID NO: 1234500 - RNA, 19 nt, Homo sapiens
  misc_RNA (1)...(19): siRNA sense strand
cagccaauggucaagaaga

SEQ ID NO: 1234501 - RNA, 19 nt, Homo sapiens
  misc_RNA (1)...(19): siRNA sense strand
acucagaggccaaggaagu

SEQ ID NO: 1234502 - RNA, 19 nt, Homo sapiens
  misc_RNA (1)...(19): siRNA sense strand
gugccagacacggauauuu

SEQ ID NO: 1234503 - RNA, 19 nt, Homo sapiens
  misc_RNA (1)...(19): siRNA sense strand
ggugguugcggucaucuuc

SEQ ID NO: 1234504 - RNA, 19 nt, Homo sapiens
  misc_RNA (1)...(19): siRNA sense strand
agaagaaacugcucaagaa

SEQ ID NO: 1234505 - RNA, 19 nt, Homo sapiens
  misc_RNA (1)...(19): siRNA sense strand
ucaagagccugaagaauau

SEQ ID NO: 1234506 - RNA, 19 nt, Homo sapiens
  misc_RNA (1)...(19): siRNA sense strand
gcuccugggugaccuguua

SEQ ID NO: 1234507 - RNA, 19 nt, Homo sapiens
  misc_RNA (1)...(19): siRNA sense strand
ugaagcaacugcagaaaga

SEQ ID NO: 1234508 - RNA, 19 nt, Homo sapiens
  misc_RNA (1)...(19): siRNA sense strand
ggagccaucucuucccuuu

SEQ ID NO: 1234509 - RNA, 19 nt, Homo sapiens
  misc_RNA (1)...(19): siRNA sense strand
ccagauggguccacacuga

SEQ ID NO: 1234510 - RNA, 19 nt, Homo sapiens
  misc_RNA (1)...(19): siRNA sense strand
ucucacagcucaaguaugu

SEQ ID NO: 1234511 - RNA, 19 nt, Homo sapiens
  misc_RNA (1)...(19): siRNA sense strand
gcacagauuugagguagau

SEQ ID NO: 1234512 - RNA, 19 nt, Homo sapiens
  misc_RNA (1)...(19): siRNA sense strand
acagagauguggcagagua

SEQ ID NO: 1234513 - RNA, 19 nt, Homo sapiens
  misc_RNA (1)...(19): siRNA sense strand
uggugaagcuguugaauga

SEQ ID NO: 1234514 - RNA, 19 nt, Homo sapiens
  misc_RNA (1)...(19): siRNA sense strand
acacggauauuuacagaga

SEQ ID NO: 1234515 - RNA, 19 nt, Homo sapiens
  misc_RNA (1)...(19): siRNA sense strand
acacccagcuguucucaaa

SEQ ID NO: 1234516 - RNA, 19 nt, Homo sapiens
  misc_RNA (1)...(19): siRNA sense strand
ggacacagaugccccacua

SEQ ID NO: 1234517 - RNA, 19 nt, Homo sapiens
  misc_RNA (1)...(19): siRNA sense strand
cucaagagccugaagaaua

SEQ ID NO: 1234518 - RNA, 19 nt, Homo sapiens
  misc_RNA (1)...(19): siRNA sense strand
ccacaggcaucuccuaugg

SEQ ID NO: 1234519 - RNA, 19 nt, Homo sapiens
  misc_RNA (1)...(19): siRNA sense strand
gcagaggugugguguggau

SEQ ID NO: 1234520 - RNA, 19 nt, Homo sapiens
  misc_RNA (1)...(19): siRNA sense strand
gggcggaucugcuuaucug

SEQ ID NO: 1234521 - RNA, 19 nt, Homo sapiens
  misc_RNA (1)...(19): siRNA sense strand
ccaugaugcugucaccuuu

SEQ ID NO: 1234522 - RNA, 19 nt, Homo sapiens
  misc_RNA (1)...(19): siRNA sense strand
agauugagguggaggugua

SEQ ID NO: 1234523 - RNA, 19 nt, Homo sapiens
  misc_RNA (1)...(19): siRNA sense strand
gaccuuugcugucaugucu

SEQ ID NO: 1234524 - RNA, 19 nt, Homo sapiens
  misc_RNA (1)...(19): siRNA sense strand
agacacggauauuuacaga

SEQ ID NO: 1234525 - RNA, 19 nt, Homo sapiens
  misc_RNA (1)...(19): siRNA sense strand
gaacgacuccaugaucaau

SEQ ID NO: 1234526 - RNA, 19 nt, Homo sapiens
  misc_RNA (1)...(19): siRNA sense strand
gaagaaacugcucaagaag

SEQ ID NO: 1234527 - RNA, 19 nt, Homo sapiens
  misc_RNA (1)...(19): siRNA sense strand
ugccagacacggauauuua

SEQ ID NO: 1234528 - RNA, 19 nt, Homo sapiens
  misc_RNA (1)...(19): siRNA sense strand
ccacugucccucaucuaua

SEQ ID NO: 1234529 - RNA, 19 nt, Homo sapiens
  misc_RNA (1)...(19): siRNA sense strand
gugaagcuguugaaugaca

SEQ ID NO: 1234530 - RNA, 19 nt, Homo sapiens
  misc_RNA (1)...(19): siRNA sense strand
gcagccaucaucauuguga

SEQ ID NO: 1234531 - RNA, 19 nt, Homo sapiens
  misc_RNA (1)...(19): siRNA sense strand
ggucuaaagcacagauuug

SEQ ID NO: 1234532 - RNA, 19 nt, Homo sapiens
  misc_RNA (1)...(19): siRNA sense strand
ccucaucauugucaaacuu

SEQ ID NO: 1234533 - RNA, 19 nt, Homo sapiens
  misc_RNA (1)...(19): siRNA sense strand
ggagauaagauggaagaug

SEQ ID NO: 1234534 - RNA, 19 nt, Homo sapiens
  misc_RNA (1)...(19): siRNA sense strand
gagcucaggagauaagaug

SEQ ID NO: 1234535 - RNA, 19 nt, Homo sapiens
  misc_RNA (1)...(19): siRNA sense strand
gcagaaagaggagaagcuu

SEQ ID NO: 1234536 - RNA, 19 nt, Homo sapiens
  misc_RNA (1)...(19): siRNA sense strand
gcugaguucuacagugaug

SEQ ID NO: 1234537 - RNA, 19 nt, Homo sapiens
  misc_RNA (1)...(19): siRNA sense strand
ucaaugagacagccagaga

SEQ ID NO: 1234538 - RNA, 19 nt, Homo sapiens
  misc_RNA (1)...(19): siRNA sense strand
guacucagaggccaaggaa

SEQ ID NO: 1234539 - RNA, 19 nt, Homo sapiens
  misc_RNA (1)...(19): siRNA sense strand
aagaagaaacugcucaaga

SEQ ID NO: 1234540 - RNA, 19 nt, Homo sapiens
  misc_RNA (1)...(19): siRNA sense strand
aggagaagcuucggaaaca

SEQ ID NO: 1234541 - RNA, 19 nt, Homo sapiens
  misc_RNA (1)...(19): siRNA sense strand
gaggcgagacuaccacaug

SEQ ID NO: 1234542 - RNA, 19 nt, Homo sapiens
  misc_RNA (1)...(19): siRNA sense strand
gaagaugcaacagccaaug

SEQ ID NO: 1234543 - RNA, 19 nt, Homo sapiens
  misc_RNA (1)...(19): siRNA sense strand
uaagauggaagaugcaaca

SEQ ID NO: 1234544 - RNA, 19 nt, Homo sapiens
  misc_RNA (1)...(19): siRNA sense strand
cuucaucuacuuccuguuu

SEQ ID NO: 1234545 - RNA, 19 nt, Homo sapiens
  misc_RNA (1)...(19): siRNA sense strand
augcugaguucuacaguga

SEQ ID NO: 1234546 - RNA, 19 nt, Homo sapiens
  misc_RNA (1)...(19): siRNA sense strand
gugguuggguuugccauug

SEQ ID NO: 1234547 - RNA, 19 nt, Homo sapiens
  misc_RNA (1)...(19): siRNA sense strand
acgacuccaugaucaauga

SEQ ID NO: 1234548 - RNA, 19 nt, Homo sapiens
  misc_RNA (1)...(19): siRNA sense strand
augcauccaucaccaagaa

SEQ ID NO: 1234549 - RNA, 19 nt, Homo sapiens
  misc_RNA (1)...(19): siRNA sense strand
gcuugaggcugggcacuuc

SEQ ID NO: 1234550 - RNA, 19 nt, Homo sapiens
  misc_RNA (1)...(19): siRNA sense strand
gcgagacuaccacauggaa

SEQ ID NO: 1234551 - RNA, 19 nt, Homo sapiens
  misc_RNA (1)...(19): siRNA sense strand
caggagauaagauggaaga

SEQ ID NO: 1234552 - RNA, 19 nt, Homo sapiens
  misc_RNA (1)...(19): siRNA sense strand
gaggagaagcuucggaaac

SEQ ID NO: 1234553 - RNA, 19 nt, Homo sapiens
  misc_RNA (1)...(19): siRNA sense strand
uugaacgacuccaugauca

SEQ ID NO: 1234554 - RNA, 19 nt, Homo sapiens
  misc_RNA (1)...(19): siRNA sense strand
caacagccaauggucaaga

SEQ ID NO: 1234555 - RNA, 19 nt, Homo sapiens
  misc_RNA (1)...(19): siRNA sense strand
ggaagaugcaacagccaau

SEQ ID NO: 1234556 - RNA, 19 nt, Homo sapiens
  misc_RNA (1)...(19): siRNA sense strand
cuucuacccugucuucauc

SEQ ID NO: 1234557 - RNA, 19 nt, Homo sapiens
  misc_RNA (1)...(19): siRNA sense strand
guguuuggccuccaucuga

SEQ ID NO: 1234558 - RNA, 19 nt, Homo sapiens
  misc_RNA (1)...(19): siRNA sense strand
gaagaagaaacugcucaag

SEQ ID NO: 1234559 - RNA, 19 nt, Homo sapiens
  misc_RNA (1)...(19): siRNA sense strand
cccgugaguugcucuaugu

SEQ ID NO: 1234560 - RNA, 19 nt, Homo sapiens
  misc_RNA (1)...(19): siRNA sense strand
ggagaagcuucggaaacag

SEQ ID NO: 1234561 - RNA, 19 nt, Homo sapiens
  misc_RNA (1)...(19): siRNA sense strand
gauaagauggaagaugcaa

SEQ ID NO: 1234562 - RNA, 19 nt, Homo sapiens
  misc_RNA (1)...(19): siRNA sense strand
ugaagcuguugaaugacaa

SEQ ID NO: 1234563 - RNA, 19 nt, Homo sapiens
  misc_RNA (1)...(19): siRNA sense strand
gcucaggagauaagaugga

SEQ ID NO: 1234564 - RNA, 19 nt, Homo sapiens
  misc_RNA (1)...(19): siRNA sense strand
gcuaccggguggacagcaa

SEQ ID NO: 1234565 - RNA, 19 nt, Homo sapiens
  misc_RNA (1)...(19): siRNA sense strand
ggugggcagugugacagaa

SEQ ID NO: 1234566 - RNA, 19 nt, Homo sapiens
  misc_RNA (1)...(19): siRNA sense strand
cagcucaaguauguguuug

SEQ ID NO: 1234567 - RNA, 19 nt, Homo sapiens
  misc_RNA (1)...(19): siRNA sense strand
guggugaagcuguugaaug

SEQ ID NO: 1234568 - RNA, 19 nt, Homo sapiens
  misc_RNA (1)...(19): siRNA sense strand
cacugucccucaucuauac

SEQ ID NO: 1234569 - RNA, 19 nt, Homo sapiens
  misc_RNA (1)...(19): siRNA sense strand
gccacugucccucaucuau

SEQ ID NO: 1234570 - RNA, 19 nt, Homo sapiens
  misc_RNA (1)...(19): siRNA sense strand
gcacuucccggcacaucuc

SEQ ID NO: 1234571 - RNA, 19 nt, Homo sapiens
  misc_RNA (1)...(19): siRNA sense strand
ccuauggcaugggucuaaa

SEQ ID NO: 1234572 - RNA, 19 nt, Homo sapiens
  misc_RNA (1)...(19): siRNA sense strand
ugggugcccucuccuuugu

SEQ ID NO: 1234573 - RNA, 19 nt, Homo sapiens
  misc_RNA (1)...(19): siRNA sense strand
gggucuaaagcacagauuu

SEQ ID NO: 1234574 - RNA, 19 nt, Homo sapiens
  misc_RNA (1)...(19): siRNA sense strand
gcagcugcccaugccgaua

SEQ ID NO: 1234575 - RNA, 19 nt, Homo sapiens
  misc_RNA (1)...(19): siRNA sense strand
aacagccaauggucaagaa

SEQ ID NO: 1234576 - RNA, 19 nt, Homo sapiens
  misc_RNA (1)...(19): siRNA sense strand
cuacagugaugcgcugaag

SEQ ID NO: 1234577 - RNA, 19 nt, Homo sapiens
  misc_RNA (1)...(19): siRNA sense strand
uuaucuggcuggugaccuu

SEQ ID NO: 1234578 - RNA, 19 nt, Homo sapiens
  misc_RNA (1)...(19): siRNA sense strand
gucuaaagcacagauuuga

SEQ ID NO: 1234579 - RNA, 19 nt, Homo sapiens
  misc_RNA (1)...(19): siRNA sense strand
gggccacugucccucaucu

SEQ ID NO: 1234580 - RNA, 19 nt, Homo sapiens
  misc_RNA (1)...(19): siRNA sense strand
ggugagcucaggagauaag

SEQ ID NO: 1234581 - RNA, 19 nt, Homo sapiens
  misc_RNA (1)...(19): siRNA sense strand
uuccucaucucccagaaga

SEQ ID NO: 1234582 - RNA, 19 nt, Homo sapiens
  misc_RNA (1)...(19): siRNA sense strand
acggauauuuacagagaug

SEQ ID NO: 1234583 - RNA, 19 nt, Homo sapiens
  misc_RNA (1)...(19): siRNA sense strand
gggccucaguaaccuuauc

SEQ ID NO: 1234584 - RNA, 19 nt, Homo sapiens
  misc_RNA (1)...(19): siRNA sense strand
aaagcacagauuugaggua

SEQ ID NO: 1234585 - RNA, 19 nt, Homo sapiens
  misc_RNA (1)...(19): siRNA sense strand
ggccacaggcaucuccuau

SEQ ID NO: 1234586 - RNA, 19 nt, Homo sapiens
  misc_RNA (1)...(19): siRNA sense strand
cagccaucaucauugugaa

SEQ ID NO: 1234587 - RNA, 19 nt, Homo sapiens
  misc_RNA (1)...(19): siRNA sense strand
ggcugggccugauccacuu

SEQ ID NO: 1234588 - RNA, 19 nt, Homo sapiens
  misc_RNA (1)...(19): siRNA sense strand
cagccaauggucaagaaga

SEQ ID NO: 1234589 - RNA, 19 nt, Homo sapiens
  misc_RNA (1)...(19): siRNA sense strand
acucagaggccaaggaagu

SEQ ID NO: 1234590 - RNA, 19 nt, Homo sapiens
  misc_RNA (1)...(19): siRNA sense strand
gugccagacacggauauuu

SEQ ID NO: 1234591 - RNA, 19 nt, Homo sapiens
  misc_RNA (1)...(19): siRNA sense strand
ggugguugcggucaucuuc

SEQ ID NO: 1234592 - RNA, 19 nt, Homo sapiens
  misc_RNA (1)...(19): siRNA sense strand
ggaaauaugauccaucuua

SEQ ID NO: 1234593 - RNA, 19 nt, Homo sapiens
  misc_RNA (1)...(19): siRNA sense strand
uaauuaaucuggccaauga

SEQ ID NO: 1234594 - RNA, 19 nt, Homo sapiens
  misc_RNA (1)...(19): siRNA sense strand
ggacaaagacuaccugaga

SEQ ID NO: 1234595 - RNA, 19 nt, Homo sapiens
  misc_RNA (1)...(19): siRNA sense strand
uaccugagaucacuaaaua

SEQ ID NO: 1234596 - RNA, 19 nt, Homo sapiens
  misc_RNA (1)...(19): siRNA sense strand
gaaacuguauucuggacaa

SEQ ID NO: 1234597 - RNA, 19 nt, Homo sapiens
  misc_RNA (1)...(19): siRNA sense strand
guccaaggcuuuaucuuug

SEQ ID NO: 1234598 - RNA, 19 nt, Homo sapiens
  misc_RNA (1)...(19): siRNA sense strand
ggaaggaggcggugacaga

SEQ ID NO: 1234599 - RNA, 19 nt, Homo sapiens
  misc_RNA (1)...(19): siRNA sense strand
cagaaggugugcuacauug

SEQ ID NO: 1234600 - RNA, 19 nt, Homo sapiens
  misc_RNA (1)...(19): siRNA sense strand
ggaaugcacuuggaaacug

SEQ ID NO: 1234601 - RNA, 19 nt, Homo sapiens
  misc_RNA (1)...(19): siRNA sense strand
gauguugguuaugguguua

SEQ ID NO: 1234602 - RNA, 19 nt, Homo sapiens
  misc_RNA (1)...(19): siRNA sense strand
gaaggaugguucauaucau

SEQ ID NO: 1234603 - RNA, 19 nt, Homo sapiens
  misc_RNA (1)...(19): siRNA sense strand
ggagaaagacuuccuugca

SEQ ID NO: 1234604 - RNA, 19 nt, Homo sapiens
  misc_RNA (1)...(19): siRNA sense strand
ccaguugccucuugaagug

SEQ ID NO: 1234605 - RNA, 19 nt, Homo sapiens
  misc_RNA (1)...(19): siRNA sense strand
ucaugaagauguugguuau

SEQ ID NO: 1234606 - RNA, 19 nt, Homo sapiens
  misc_RNA (1)...(19): siRNA sense strand
gacaaagacuaccugagau

SEQ ID NO: 1234607 - RNA, 19 nt, Homo sapiens
  misc_RNA (1)...(19): siRNA sense strand
gaaugcacuuggaaacugu

SEQ ID NO: 1234608 - RNA, 19 nt, Homo sapiens
  misc_RNA (1)...(19): siRNA sense strand
gcacuuggaaacuguauuc

SEQ ID NO: 1234609 - RNA, 19 nt, Homo sapiens
  misc_RNA (1)...(19): siRNA sense strand
ggaagagccaggacaugaa

SEQ ID NO: 1234610 - RNA, 19 nt, Homo sapiens
  misc_RNA (1)...(19): siRNA sense strand
gaccaacgcacaacaggaa

SEQ ID NO: 1234611 - RNA, 19 nt, Homo sapiens
  misc_RNA (1)...(19): siRNA sense strand
ggaaacugggaaucucaua

SEQ ID NO: 1234612 - RNA, 19 nt, Homo sapiens
  misc_RNA (1)...(19): siRNA sense strand
gaagacaacucugaaaagu

SEQ ID NO: 1234613 - RNA, 19 nt, Homo sapiens
  misc_RNA (1)...(19): siRNA sense strand
uaacuaaagcgaagagaca

SEQ ID NO: 1234614 - RNA, 19 nt, Homo sapiens
  misc_RNA (1)...(19): siRNA sense strand
ggucaucggguaauuaauc

SEQ ID NO: 1234615 - RNA, 19 nt, Homo sapiens
  misc_RNA (1)...(19): siRNA sense strand
ugagauguuugguuacaau

SEQ ID NO: 1234616 - RNA, 19 nt, Homo sapiens
  misc_RNA (1)...(19): siRNA sense strand
ccacgccaguugccucuug

SEQ ID NO: 1234617 - RNA, 19 nt, Homo sapiens
  misc_RNA (1)...(19): siRNA sense strand
ggcccagaauacauaagua

SEQ ID NO: 1234618 - RNA, 19 nt, Homo sapiens
  misc_RNA (1)...(19): siRNA sense strand
gggagucugugcauuugug

SEQ ID NO: 1234619 - RNA, 19 nt, Homo sapiens
  misc_RNA (1)...(19): siRNA sense strand
gagggucaucggguaauua

SEQ ID NO: 1234620 - RNA, 19 nt, Homo sapiens
  misc_RNA (1)...(19): siRNA sense strand
ugagaucacuaaauaagcu

SEQ ID NO: 1234621 - RNA, 19 nt, Homo sapiens
  misc_RNA (1)...(19): siRNA sense strand
aaggaaauaugauccaucu

SEQ ID NO: 1234622 - RNA, 19 nt, Homo sapiens
  misc_RNA (1)...(19): siRNA sense strand
gaaacugggaaucucauag

SEQ ID NO: 1234623 - RNA, 19 nt, Homo sapiens
  misc_RNA (1)...(19): siRNA sense strand
aaggaugguucauaucaug

SEQ ID NO: 1234624 - RNA, 19 nt, Homo sapiens
  misc_RNA (1)...(19): siRNA sense strand
gaagagccaggacaugaag

SEQ ID NO: 1234625 - RNA, 19 nt, Homo sapiens
  misc_RNA (1)...(19): siRNA sense strand
ggacugaggaagcaauucu

SEQ ID NO: 1234626 - RNA, 19 nt, Homo sapiens
  misc_RNA (1)...(19): siRNA sense strand
ccagaaggugugcuacauu

SEQ ID NO: 1234627 - RNA, 19 nt, Homo sapiens
  misc_RNA (1)...(19): siRNA sense strand
gucaagcccucgucuagag

SEQ ID NO: 1234628 - RNA, 19 nt, Homo sapiens
  misc_RNA (1)...(19): siRNA sense strand
gggagcggauggagaagca

SEQ ID NO: 1234629 - RNA, 19 nt, Homo sapiens
  misc_RNA (1)...(19): siRNA sense strand
gaaggugugcuacauugag

SEQ ID NO: 1234630 - RNA, 19 nt, Homo sapiens
  misc_RNA (1)...(19): siRNA sense strand
guaauuaaucuggccaaug

SEQ ID NO: 1234631 - RNA, 19 nt, Homo sapiens
  misc_RNA (1)...(19): siRNA sense strand
aguccaaggcuuuaucuuu

SEQ ID NO: 1234632 - RNA, 19 nt, Homo sapiens
  misc_RNA (1)...(19): siRNA sense strand
gccagaaggugugcuacau

SEQ ID NO: 1234633 - RNA, 19 nt, Homo sapiens
  misc_RNA (1)...(19): siRNA sense strand
gugggagucugugcauuug

SEQ ID NO: 1234634 - RNA, 19 nt, Homo sapiens
  misc_RNA (1)...(19): siRNA sense strand
caaagacuaccugagauca

SEQ ID NO: 1234635 - RNA, 19 nt, Homo sapiens
  misc_RNA (1)...(19): siRNA sense strand
aaacuguauucuggacaaa

SEQ ID NO: 1234636 - RNA, 19 nt, Homo sapiens
  misc_RNA (1)...(19): siRNA sense strand
gguaauuaaucuggccaau

SEQ ID NO: 1234637 - RNA, 19 nt, Homo sapiens
  misc_RNA (1)...(19): siRNA sense strand
ccucaaguccaaggcuuua

SEQ ID NO: 1234638 - RNA, 19 nt, Homo sapiens
  misc_RNA (1)...(19): siRNA sense strand
cgugggagucugugcauuu

SEQ ID NO: 1234639 - RNA, 19 nt, Homo sapiens
  misc_RNA (1)...(19): siRNA sense strand
ugaggaagcaauucuugga

SEQ ID NO: 1234640 - RNA, 19 nt, Homo sapiens
  misc_RNA (1)...(19): siRNA sense strand
aaugagauguuugguuaca

SEQ ID NO: 1234641 - RNA, 19 nt, Homo sapiens
  misc_RNA (1)...(19): siRNA sense strand
ccagaaaccacaagcaaaa

SEQ ID NO: 1234642 - RNA, 19 nt, Homo sapiens
  misc_RNA (1)...(19): siRNA sense strand
caccagaaaccacaagcaa

SEQ ID NO: 1234643 - RNA, 19 nt, Homo sapiens
  misc_RNA (1)...(19): siRNA sense strand
acuguauucuggacaaaga

SEQ ID NO: 1234644 - RNA, 19 nt, Homo sapiens
  misc_RNA (1)...(19): siRNA sense strand
uccuguaacugucucagaa

SEQ ID NO: 1234645 - RNA, 19 nt, Homo sapiens
  misc_RNA (1)...(19): siRNA sense strand
ugagggucaucggguaauu

SEQ ID NO: 1234646 - RNA, 19 nt, Homo sapiens
  misc_RNA (1)...(19): siRNA sense strand
ggucaagcccucgucuaga

SEQ ID NO: 1234647 - RNA, 19 nt, Homo sapiens
  misc_RNA (1)...(19): siRNA sense strand
ugaagauguugguuauggu

SEQ ID NO: 1234648 - RNA, 19 nt, Homo sapiens
  misc_RNA (1)...(19): siRNA sense strand
acacauuagccuugaacaa

SEQ ID NO: 1234649 - RNA, 19 nt, Homo sapiens
  misc_RNA (1)...(19): siRNA sense strand
ccugagaucacuaaauaag

SEQ ID NO: 1234650 - RNA, 19 nt, Homo sapiens
  misc_RNA (1)...(19): siRNA sense strand
ggcuuuaucuuuggagaag

SEQ ID NO: 1234651 - RNA, 19 nt, Homo sapiens
  misc_RNA (1)...(19): siRNA sense strand
guaccaggccauccagaag

SEQ ID NO: 1234652 - RNA, 19 nt, Homo sapiens
  misc_RNA (1)...(19): siRNA sense strand
aggaagagccaggacauga

SEQ ID NO: 1234653 - RNA, 19 nt, Homo sapiens
  misc_RNA (1)...(19): siRNA sense strand
gccgucagcugagaagagu

SEQ ID NO: 1234654 - RNA, 19 nt, Homo sapiens
  misc_RNA (1)...(19): siRNA sense strand
gaggaggcaagauacaaca

SEQ ID NO: 1234655 - RNA, 19 nt, Homo sapiens
  misc_RNA (1)...(19): siRNA sense strand
ggaggaggcaagauacaac

SEQ ID NO: 1234656 - RNA, 19 nt, Homo sapiens
  misc_RNA (1)...(19): siRNA sense strand
gcggcucaguguuaugcuu

SEQ ID NO: 1234657 - RNA, 19 nt, Homo sapiens
  misc_RNA (1)...(19): siRNA sense strand
cuaaagcgaagagacaaga

SEQ ID NO: 1234658 - RNA, 19 nt, Homo sapiens
  misc_RNA (1)...(19): siRNA sense strand
gagccaggacaugaagaaa

SEQ ID NO: 1234659 - RNA, 19 nt, Homo sapiens
  misc_RNA (1)...(19): siRNA sense strand
ggacuccacacagcguuug

SEQ ID NO: 1234660 - RNA, 19 nt, Homo sapiens
  misc_RNA (1)...(19): siRNA sense strand
cagaacaggacuccacaca

SEQ ID NO: 1234661 - RNA, 19 nt, Homo sapiens
  misc_RNA (1)...(19): siRNA sense strand
gcccagaauacauaaguag

SEQ ID NO: 1234662 - RNA, 19 nt, Homo sapiens
  misc_RNA (1)...(19): siRNA sense strand
cgucagcugagaagaguga

SEQ ID NO: 1234663 - RNA, 19 nt, Homo sapiens
  misc_RNA (1)...(19): siRNA sense strand
caacaggaaacugggaauc

SEQ ID NO: 1234664 - RNA, 19 nt, Homo sapiens
  misc_RNA (1)...(19): siRNA sense strand
ggagucugugcauuuguga

SEQ ID NO: 1234665 - RNA, 19 nt, Homo sapiens
  misc_RNA (1)...(19): siRNA sense strand
ugggaccuccaaacuuaua

SEQ ID NO: 1234666 - RNA, 19 nt, Homo sapiens
  misc_RNA (1)...(19): siRNA sense strand
gccaguacacagcagaaga

SEQ ID NO: 1234667 - RNA, 19 nt, Homo sapiens
  misc_RNA (1)...(19): siRNA sense strand
gaggccagaaggugugcua

SEQ ID NO: 1234668 - RNA, 19 nt, Homo sapiens
  misc_RNA (1)...(19): siRNA sense strand
augaagauguugguuaugg

SEQ ID NO: 1234669 - RNA, 19 nt, Homo sapiens
  misc_RNA (1)...(19): siRNA sense strand
acaggaaacugggaaucuc

SEQ ID NO: 1234670 - RNA, 19 nt, Homo sapiens
  misc_RNA (1)...(19): siRNA sense strand
uacaauggcugggcacacu

SEQ ID NO: 1234671 - RNA, 19 nt, Homo sapiens
  misc_RNA (1)...(19): siRNA sense strand
ucugacacauuagccuuga

SEQ ID NO: 1234672 - RNA, 19 nt, Homo sapiens
  misc_RNA (1)...(19): siRNA sense strand
gucaucggguaauuaaucu

SEQ ID NO: 1234673 - RNA, 19 nt, Homo sapiens
  misc_RNA (1)...(19): siRNA sense strand
agauguugguuaugguguu

SEQ ID NO: 1234674 - RNA, 19 nt, Homo sapiens
  misc_RNA (1)...(19): siRNA sense strand
gggcccagaauacauaagu

SEQ ID NO: 1234675 - RNA, 19 nt, Homo sapiens
  misc_RNA (1)...(19): siRNA sense strand
gggaaucucauaggaagag

SEQ ID NO: 1234676 - RNA, 19 nt, Homo sapiens
  misc_RNA (1)...(19): siRNA sense strand
ccaucacgcagcagaaugu

SEQ ID NO: 1234677 - RNA, 19 nt, Homo sapiens
  misc_RNA (1)...(19): siRNA sense strand
gacuaccugagaucacuaa

SEQ ID NO: 1234678 - RNA, 19 nt, Homo sapiens
  misc_RNA (1)...(19): siRNA sense strand
acaaagacuaccugagauc

SEQ ID NO: 1234679 - RNA, 19 nt, Homo sapiens
  misc_RNA (1)...(19): siRNA sense strand
uaauuaaucuggccaauga

SEQ ID NO: 1234680 - RNA, 19 nt, Homo sapiens
  misc_RNA (1)...(19): siRNA sense strand
cagaaggugugcuacauug

SEQ ID NO: 1234681 - RNA, 19 nt, Homo sapiens
  misc_RNA (1)...(19): siRNA sense strand
ggucaucggguaauuaauc

SEQ ID NO: 1234682 - RNA, 19 nt, Homo sapiens
  misc_RNA (1)...(19): siRNA sense strand
ugagauguuugguuacaau

SEQ ID NO: 1234683 - RNA, 19 nt, Homo sapiens
  misc_RNA (1)...(19): siRNA sense strand
ggcccagaauacauaagua

SEQ ID NO: 1234684 - RNA, 19 nt, Homo sapiens
  misc_RNA (1)...(19): siRNA sense strand
gagggucaucggguaauua

SEQ ID NO: 1234685 - RNA, 19 nt, Homo sapiens
  misc_RNA (1)...(19): siRNA sense strand
ggacugaggaagcaauucu

SEQ ID NO: 1234686 - RNA, 19 nt, Homo sapiens
  misc_RNA (1)...(19): siRNA sense strand
ccagaaggugugcuacauu

SEQ ID NO: 1234687 - RNA, 19 nt, Homo sapiens
  misc_RNA (1)...(19): siRNA sense strand
gaaggugugcuacauugag

SEQ ID NO: 1234688 - RNA, 19 nt, Homo sapiens
  misc_RNA (1)...(19): siRNA sense strand
gccagaaggugugcuacau

SEQ ID NO: 1234689 - RNA, 19 nt, Homo sapiens
  misc_RNA (1)...(19): siRNA sense strand
guaauuaaucuggccaaug

SEQ ID NO: 1234690 - RNA, 19 nt, Homo sapiens
  misc_RNA (1)...(19): siRNA sense strand
gguaauuaaucuggccaau

SEQ ID NO: 1234691 - RNA, 19 nt, Homo sapiens
  misc_RNA (1)...(19): siRNA sense strand
ugaggaagcaauucuugga

SEQ ID NO: 1234692 - RNA, 19 nt, Homo sapiens
  misc_RNA (1)...(19): siRNA sense strand
aaugagauguuugguuaca

SEQ ID NO: 1234693 - RNA, 19 nt, Homo sapiens
  misc_RNA (1)...(19): siRNA sense strand
ugagggucaucggguaauu

SEQ ID NO: 1234694 - RNA, 19 nt, Homo sapiens
  misc_RNA (1)...(19): siRNA sense strand
guaccaggccauccagaag

SEQ ID NO: 1234695 - RNA, 19 nt, Homo sapiens
  misc_RNA (1)...(19): siRNA sense strand
gcggcucaguguuaugcuu

SEQ ID NO: 1234696 - RNA, 19 nt, Homo sapiens
  misc_RNA (1)...(19): siRNA sense strand
gcccagaauacauaaguag

SEQ ID NO: 1234697 - RNA, 19 nt, Homo sapiens
  misc_RNA (1)...(19): siRNA sense strand
gccaguacacagcagaaga

SEQ ID NO: 1234698 - RNA, 19 nt, Homo sapiens
  misc_RNA (1)...(19): siRNA sense strand
gaggccagaaggugugcua

SEQ ID NO: 1234699 - RNA, 19 nt, Homo sapiens
  misc_RNA (1)...(19): siRNA sense strand
gucaucggguaauuaaucu

SEQ ID NO: 1234700 - RNA, 19 nt, Homo sapiens
  misc_RNA (1)...(19): siRNA sense strand
uacaauggcugggcacacu

SEQ ID NO: 1234701 - RNA, 19 nt, Homo sapiens
  misc_RNA (1)...(19): siRNA sense strand
gggcccagaauacauaagu

SEQ ID NO: 1234702 - RNA, 19 nt, Homo sapiens
  misc_RNA (1)...(19): siRNA sense strand
ccaucacgcagcagaaugu

SEQ ID NO: 1234703 - RNA, 19 nt, Homo sapiens
  misc_RNA (1)...(19): siRNA sense strand
uaauuaaucuggccaauga

SEQ ID NO: 1234704 - RNA, 19 nt, Homo sapiens
  misc_RNA (1)...(19): siRNA sense strand
cagaaggugugcuacauug

SEQ ID NO: 1234705 - RNA, 19 nt, Homo sapiens
  misc_RNA (1)...(19): siRNA sense strand
gaaggaugguucauaucau

SEQ ID NO: 1234706 - RNA, 19 nt, Homo sapiens
  misc_RNA (1)...(19): siRNA sense strand
ggucaucggguaauuaauc

SEQ ID NO: 1234707 - RNA, 19 nt, Homo sapiens
  misc_RNA (1)...(19): siRNA sense strand
ugagauguuugguuacaau

SEQ ID NO: 1234708 - RNA, 19 nt, Homo sapiens
  misc_RNA (1)...(19): siRNA sense strand
ggcccagaauacauaagua

SEQ ID NO: 1234709 - RNA, 19 nt, Homo sapiens
  misc_RNA (1)...(19): siRNA sense strand
gggagucugugcauuugug

SEQ ID NO: 1234710 - RNA, 19 nt, Homo sapiens
  misc_RNA (1)...(19): siRNA sense strand
gagggucaucggguaauua

SEQ ID NO: 1234711 - RNA, 19 nt, Homo sapiens
  misc_RNA (1)...(19): siRNA sense strand
ggacugaggaagcaauucu

SEQ ID NO: 1234712 - RNA, 19 nt, Homo sapiens
  misc_RNA (1)...(19): siRNA sense strand
aaggaugguucauaucaug

SEQ ID NO: 1234713 - RNA, 19 nt, Homo sapiens
  misc_RNA (1)...(19): siRNA sense strand
ccagaaggugugcuacauu

SEQ ID NO: 1234714 - RNA, 19 nt, Homo sapiens
  misc_RNA (1)...(19): siRNA sense strand
gaaggugugcuacauugag

SEQ ID NO: 1234715 - RNA, 19 nt, Homo sapiens
  misc_RNA (1)...(19): siRNA sense strand
gccagaaggugugcuacau

SEQ ID NO: 1234716 - RNA, 19 nt, Homo sapiens
  misc_RNA (1)...(19): siRNA sense strand
gugggagucugugcauuug

SEQ ID NO: 1234717 - RNA, 19 nt, Homo sapiens
  misc_RNA (1)...(19): siRNA sense strand
guaauuaaucuggccaaug

SEQ ID NO: 1234718 - RNA, 19 nt, Homo sapiens
  misc_RNA (1)...(19): siRNA sense strand
gguaauuaaucuggccaau

SEQ ID NO: 1234719 - RNA, 19 nt, Homo sapiens
  misc_RNA (1)...(19): siRNA sense strand
cgugggagucugugcauuu

SEQ ID NO: 1234720 - RNA, 19 nt, Homo sapiens
  misc_RNA (1)...(19): siRNA sense strand
ugaggaagcaauucuugga

SEQ ID NO: 1234721 - RNA, 19 nt, Homo sapiens
  misc_RNA (1)...(19): siRNA sense strand
aaugagauguuugguuaca

SEQ ID NO: 1234722 - RNA, 19 nt, Homo sapiens
  misc_RNA (1)...(19): siRNA sense strand
ugagggucaucggguaauu

SEQ ID NO: 1234723 - RNA, 19 nt, Homo sapiens
  misc_RNA (1)...(19): siRNA sense strand
guaccaggccauccagaag

SEQ ID NO: 1234724 - RNA, 19 nt, Homo sapiens
  misc_RNA (1)...(19): siRNA sense strand
gcggcucaguguuaugcuu

SEQ ID NO: 1234725 - RNA, 19 nt, Homo sapiens
  misc_RNA (1)...(19): siRNA sense strand
gcccagaauacauaaguag

SEQ ID NO: 1234726 - RNA, 19 nt, Homo sapiens
  misc_RNA (1)...(19): siRNA sense strand
gccaguacacagcagaaga

SEQ ID NO: 1234727 - RNA, 19 nt, Homo sapiens
  misc_RNA (1)...(19): siRNA sense strand
ggagucugugcauuuguga

SEQ ID NO: 1234728 - RNA, 19 nt, Homo sapiens
  misc_RNA (1)...(19): siRNA sense strand
gaggccagaaggugugcua

SEQ ID NO: 1234729 - RNA, 19 nt, Homo sapiens
  misc_RNA (1)...(19): siRNA sense strand
gucaucggguaauuaaucu

SEQ ID NO: 1234730 - RNA, 19 nt, Homo sapiens
  misc_RNA (1)...(19): siRNA sense strand
uacaauggcugggcacacu

SEQ ID NO: 1234731 - RNA, 19 nt, Homo sapiens
  misc_RNA (1)...(19): siRNA sense strand
gggcccagaauacauaagu

SEQ ID NO: 1234732 - RNA, 19 nt, Homo sapiens
  misc_RNA (1)...(19): siRNA sense strand
ccaucacgcagcagaaugu

SEQ ID NO: 1234733 - RNA, 19 nt, Homo sapiens
  misc_RNA (1)...(19): siRNA sense strand
uaauuaaucuggccaauga

SEQ ID NO: 1234734 - RNA, 19 nt, Homo sapiens
  misc_RNA (1)...(19): siRNA sense strand
ggacaaagacuaccugaga

SEQ ID NO: 1234735 - RNA, 19 nt, Homo sapiens
  misc_RNA (1)...(19): siRNA sense strand
uaccugagaucacuaaaua

SEQ ID NO: 1234736 - RNA, 19 nt, Homo sapiens
  misc_RNA (1)...(19): siRNA sense strand
gaaacuguauucuggacaa

SEQ ID NO: 1234737 - RNA, 19 nt, Homo sapiens
  misc_RNA (1)...(19): siRNA sense strand
guccaaggcuuuaucuuug

SEQ ID NO: 1234738 - RNA, 19 nt, Homo sapiens
  misc_RNA (1)...(19): siRNA sense strand
ggaaggaggcggugacaga

SEQ ID NO: 1234739 - RNA, 19 nt, Homo sapiens
  misc_RNA (1)...(19): siRNA sense strand
cagaaggugugcuacauug

SEQ ID NO: 1234740 - RNA, 19 nt, Homo sapiens
  misc_RNA (1)...(19): siRNA sense strand
ggaaugcacuuggaaacug

SEQ ID NO: 1234741 - RNA, 19 nt, Homo sapiens
  misc_RNA (1)...(19): siRNA sense strand
gauguugguuaugguguua

SEQ ID NO: 1234742 - RNA, 19 nt, Homo sapiens
  misc_RNA (1)...(19): siRNA sense strand
gaaggaugguucauaucau

SEQ ID NO: 1234743 - RNA, 19 nt, Homo sapiens
  misc_RNA (1)...(19): siRNA sense strand
ucaugaagauguugguuau

SEQ ID NO: 1234744 - RNA, 19 nt, Homo sapiens
  misc_RNA (1)...(19): siRNA sense strand
gacaaagacuaccugagau

SEQ ID NO: 1234745 - RNA, 19 nt, Homo sapiens
  misc_RNA (1)...(19): siRNA sense strand
gaaugcacuuggaaacugu

SEQ ID NO: 1234746 - RNA, 19 nt, Homo sapiens
  misc_RNA (1)...(19): siRNA sense strand
gcacuuggaaacuguauuc

SEQ ID NO: 1234747 - RNA, 19 nt, Homo sapiens
  misc_RNA (1)...(19): siRNA sense strand
ggucaucggguaauuaauc

SEQ ID NO: 1234748 - RNA, 19 nt, Homo sapiens
  misc_RNA (1)...(19): siRNA sense strand
ugagauguuugguuacaau

SEQ ID NO: 1234749 - RNA, 19 nt, Homo sapiens
  misc_RNA (1)...(19): siRNA sense strand
ggcccagaauacauaagua

SEQ ID NO: 1234750 - RNA, 19 nt, Homo sapiens
  misc_RNA (1)...(19): siRNA sense strand
gggagucugugcauuugug

SEQ ID NO: 1234751 - RNA, 19 nt, Homo sapiens
  misc_RNA (1)...(19): siRNA sense strand
gagggucaucggguaauua

SEQ ID NO: 1234752 - RNA, 19 nt, Homo sapiens
  misc_RNA (1)...(19): siRNA sense strand
aaggaugguucauaucaug

SEQ ID NO: 1234753 - RNA, 19 nt, Homo sapiens
  misc_RNA (1)...(19): siRNA sense strand
ggacugaggaagcaauucu

SEQ ID NO: 1234754 - RNA, 19 nt, Homo sapiens
  misc_RNA (1)...(19): siRNA sense strand
ccagaaggugugcuacauu

SEQ ID NO: 1234755 - RNA, 19 nt, Homo sapiens
  misc_RNA (1)...(19): siRNA sense strand
gaaggugugcuacauugag

SEQ ID NO: 1234756 - RNA, 19 nt, Homo sapiens
  misc_RNA (1)...(19): siRNA sense strand
gccagaaggugugcuacau

SEQ ID NO: 1234757 - RNA, 19 nt, Homo sapiens
  misc_RNA (1)...(19): siRNA sense strand
aguccaaggcuuuaucuuu

SEQ ID NO: 1234758 - RNA, 19 nt, Homo sapiens
  misc_RNA (1)...(19): siRNA sense strand
gugggagucugugcauuug

SEQ ID NO: 1234759 - RNA, 19 nt, Homo sapiens
  misc_RNA (1)...(19): siRNA sense strand
guaauuaaucuggccaaug

SEQ ID NO: 1234760 - RNA, 19 nt, Homo sapiens
  misc_RNA (1)...(19): siRNA sense strand
caaagacuaccugagauca

SEQ ID NO: 1234761 - RNA, 19 nt, Homo sapiens
  misc_RNA (1)...(19): siRNA sense strand
aaacuguauucuggacaaa

SEQ ID NO: 1234762 - RNA, 19 nt, Homo sapiens
  misc_RNA (1)...(19): siRNA sense strand
gguaauuaaucuggccaau

SEQ ID NO: 1234763 - RNA, 19 nt, Homo sapiens
  misc_RNA (1)...(19): siRNA sense strand
ccucaaguccaaggcuuua

SEQ ID NO: 1234764 - RNA, 19 nt, Homo sapiens
  misc_RNA (1)...(19): siRNA sense strand
cgugggagucugugcauuu

SEQ ID NO: 1234765 - RNA, 19 nt, Homo sapiens
  misc_RNA (1)...(19): siRNA sense strand
ugaggaagcaauucuugga

SEQ ID NO: 1234766 - RNA, 19 nt, Homo sapiens
  misc_RNA (1)...(19): siRNA sense strand
aaugagauguuugguuaca

SEQ ID NO: 1234767 - RNA, 19 nt, Homo sapiens
  misc_RNA (1)...(19): siRNA sense strand
acuguauucuggacaaaga

SEQ ID NO: 1234768 - RNA, 19 nt, Homo sapiens
  misc_RNA (1)...(19): siRNA sense strand
ugagggucaucggguaauu

SEQ ID NO: 1234769 - RNA, 19 nt, Homo sapiens
  misc_RNA (1)...(19): siRNA sense strand
ugaagauguugguuauggu

SEQ ID NO: 1234770 - RNA, 19 nt, Homo sapiens
  misc_RNA (1)...(19): siRNA sense strand
guaccaggccauccagaag

SEQ ID NO: 1234771 - RNA, 19 nt, Homo sapiens
  misc_RNA (1)...(19): siRNA sense strand
gcggcucaguguuaugcuu

SEQ ID NO: 1234772 - RNA, 19 nt, Homo sapiens
  misc_RNA (1)...(19): siRNA sense strand
ggcuuuaucuuuggagaag

SEQ ID NO: 1234773 - RNA, 19 nt, Homo sapiens
  misc_RNA (1)...(19): siRNA sense strand
gcccagaauacauaaguag

SEQ ID NO: 1234774 - RNA, 19 nt, Homo sapiens
  misc_RNA (1)...(19): siRNA sense strand
gccaguacacagcagaaga

SEQ ID NO: 1234775 - RNA, 19 nt, Homo sapiens
  misc_RNA (1)...(19): siRNA sense strand
gaggccagaaggugugcua

SEQ ID NO: 1234776 - RNA, 19 nt, Homo sapiens
  misc_RNA (1)...(19): siRNA sense strand
ggagucugugcauuuguga

SEQ ID NO: 1234777 - RNA, 19 nt, Homo sapiens
  misc_RNA (1)...(19): siRNA sense strand
gucaucggguaauuaaucu

SEQ ID NO: 1234778 - RNA, 19 nt, Homo sapiens
  misc_RNA (1)...(19): siRNA sense strand
agauguugguuaugguguu

SEQ ID NO: 1234779 - RNA, 19 nt, Homo sapiens
  misc_RNA (1)...(19): siRNA sense strand
augaagauguugguuaugg

SEQ ID NO: 1234780 - RNA, 19 nt, Homo sapiens
  misc_RNA (1)...(19): siRNA sense strand
uacaauggcugggcacacu

SEQ ID NO: 1234781 - RNA, 19 nt, Homo sapiens
  misc_RNA (1)...(19): siRNA sense strand
ccaucacgcagcagaaugu

SEQ ID NO: 1234782 - RNA, 19 nt, Homo sapiens
  misc_RNA (1)...(19): siRNA sense strand
gacuaccugagaucacuaa

SEQ ID NO: 1234783 - RNA, 19 nt, Homo sapiens
  misc_RNA (1)...(19): siRNA sense strand
acaaagacuaccugagauc

SEQ ID NO: 1234784 - RNA, 19 nt, Homo sapiens
  misc_RNA (1)...(19): siRNA sense strand
gggcccagaauacauaagu

SEQ ID NO: 1234785 - RNA, 19 nt, Homo sapiens
  misc_RNA (1)...(19): siRNA sense strand
gauaaggacgaccagauua

SEQ ID NO: 1234786 - RNA, 19 nt, Homo sapiens
  misc_RNA (1)...(19): siRNA sense strand
caacugggccuuugagaug

SEQ ID NO: 1234787 - RNA, 19 nt, Homo sapiens
  misc_RNA (1)...(19): siRNA sense strand
ggauaaggacgaccagauu

SEQ ID NO: 1234788 - RNA, 19 nt, Homo sapiens
  misc_RNA (1)...(19): siRNA sense strand
uggaggaccuuguucagaa

SEQ ID NO: 1234789 - RNA, 19 nt, Homo sapiens
  misc_RNA (1)...(19): siRNA sense strand
agugugacaugcagaagua

SEQ ID NO: 1234790 - RNA, 19 nt, Homo sapiens
  misc_RNA (1)...(19): siRNA sense strand
cagcagcucuacaucaagu

SEQ ID NO: 1234791 - RNA, 19 nt, Homo sapiens
  misc_RNA (1)...(19): siRNA sense strand
gaagauggaccaggauaag

SEQ ID NO: 1234792 - RNA, 19 nt, Homo sapiens
  misc_RNA (1)...(19): siRNA sense strand
caagagugacccauccauu

SEQ ID NO: 1234793 - RNA, 19 nt, Homo sapiens
  misc_RNA (1)...(19): siRNA sense strand
gaucaucgaggcaaucuac

SEQ ID NO: 1234794 - RNA, 19 nt, Homo sapiens
  misc_RNA (1)...(19): siRNA sense strand
ggacgaccagauuacauug

SEQ ID NO: 1234795 - RNA, 19 nt, Homo sapiens
  misc_RNA (1)...(19): siRNA sense strand
gaagcucaacugggccuuu

SEQ ID NO: 1234796 - RNA, 19 nt, Homo sapiens
  misc_RNA (1)...(19): siRNA sense strand
aagagugacccauccauug

SEQ ID NO: 1234797 - RNA, 19 nt, Homo sapiens
  misc_RNA (1)...(19): siRNA sense strand
caaggaggcagccaagagu

SEQ ID NO: 1234798 - RNA, 19 nt, Homo sapiens
  misc_RNA (1)...(19): siRNA sense strand
cgacggcaccaucgacuuc

SEQ ID NO: 1234799 - RNA, 19 nt, Homo sapiens
  misc_RNA (1)...(19): siRNA sense strand
agaagauggaccaggauaa

SEQ ID NO: 1234800 - RNA, 19 nt, Homo sapiens
  misc_RNA (1)...(19): siRNA sense strand
gccuggagaugcuggagau

SEQ ID NO: 1234801 - RNA, 19 nt, Homo sapiens
  misc_RNA (1)...(19): siRNA sense strand
ugacccauccauuguguug

SEQ ID NO: 1234802 - RNA, 19 nt, Homo sapiens
  misc_RNA (1)...(19): siRNA sense strand
aagaagauggaccaggaua

SEQ ID NO: 1234803 - RNA, 19 nt, Homo sapiens
  misc_RNA (1)...(19): siRNA sense strand
aagcucaacugggccuuug

SEQ ID NO: 1234804 - RNA, 19 nt, Homo sapiens
  misc_RNA (1)...(19): siRNA sense strand
uucagcagcucuacaucaa

SEQ ID NO: 1234805 - RNA, 19 nt, Homo sapiens
  misc_RNA (1)...(19): siRNA sense strand
gguacaagggcuuccugaa

SEQ ID NO: 1234806 - RNA, 19 nt, Homo sapiens
  misc_RNA (1)...(19): siRNA sense strand
gcagcucuacaucaaguuc

SEQ ID NO: 1234807 - RNA, 19 nt, Homo sapiens
  misc_RNA (1)...(19): siRNA sense strand
gagcugaagcagugguaca

SEQ ID NO: 1234808 - RNA, 19 nt, Homo sapiens
  misc_RNA (1)...(19): siRNA sense strand
ucaaggaggcagccaagag

SEQ ID NO: 1234809 - RNA, 19 nt, Homo sapiens
  misc_RNA (1)...(19): siRNA sense strand
agagugacccauccauugu

SEQ ID NO: 1234810 - RNA, 19 nt, Homo sapiens
  misc_RNA (1)...(19): siRNA sense strand
agauuacauuggaggaguu

SEQ ID NO: 1234811 - RNA, 19 nt, Homo sapiens
  misc_RNA (1)...(19): siRNA sense strand
uggagaugcuggagaucau

SEQ ID NO: 1234812 - RNA, 19 nt, Homo sapiens
  misc_RNA (1)...(19): siRNA sense strand
acgaccagauuacauugga

SEQ ID NO: 1234813 - RNA, 19 nt, Homo sapiens
  misc_RNA (1)...(19): siRNA sense strand
gugggcaccgugaucauga

SEQ ID NO: 1234814 - RNA, 19 nt, Homo sapiens
  misc_RNA (1)...(19): siRNA sense strand
cauuggaggaguucaagga

SEQ ID NO: 1234815 - RNA, 19 nt, Homo sapiens
  misc_RNA (1)...(19): siRNA sense strand
cagaggaacuggugaauga

SEQ ID NO: 1234816 - RNA, 19 nt, Homo sapiens
  misc_RNA (1)...(19): siRNA sense strand
gaggaggaauucauagaaa

SEQ ID NO: 1234817 - RNA, 19 nt, Homo sapiens
  misc_RNA (1)...(19): siRNA sense strand
ggaggaauucauagaaaua

SEQ ID NO: 1234818 - RNA, 19 nt, Homo sapiens
  misc_RNA (1)...(19): siRNA sense strand
ggaggaggaggaauucaua

SEQ ID NO: 1234819 - RNA, 19 nt, Homo sapiens
  misc_RNA (1)...(19): siRNA sense strand
aagaacaucuccagaggaa

SEQ ID NO: 1234820 - RNA, 19 nt, Homo sapiens
  misc_RNA (1)...(19): siRNA sense strand
ucauagaaauaacgacuga

SEQ ID NO: 1234821 - RNA, 19 nt, Homo sapiens
  misc_RNA (1)...(19): siRNA sense strand
ggaggaggaauucauagaa

SEQ ID NO: 1234822 - RNA, 19 nt, Homo sapiens
  misc_RNA (1)...(19): siRNA sense strand
agaaauaacgacugaaaga

SEQ ID NO: 1234823 - RNA, 19 nt, Homo sapiens
  misc_RNA (1)...(19): siRNA sense strand
gaacaucuccagaggaacu

SEQ ID NO: 1234824 - RNA, 19 nt, Homo sapiens
  misc_RNA (1)...(19): siRNA sense strand
ccaaugaggccaacaagac

SEQ ID NO: 1234825 - RNA, 19 nt, Homo sapiens
  misc_RNA (1)...(19): siRNA sense strand
gaaauaacgacugaaagac

SEQ ID NO: 1234826 - RNA, 19 nt, Homo sapiens
  misc_RNA (1)...(19): siRNA sense strand
aaauggaggaggaggaauu

SEQ ID NO: 1234827 - RNA, 19 nt, Homo sapiens
  misc_RNA (1)...(19): siRNA sense strand
aggaggaauucauagaaau

SEQ ID NO: 1234828 - RNA, 19 nt, Homo sapiens
  misc_RNA (1)...(19): siRNA sense strand
ccaaauggaggaggaggaa

SEQ ID NO: 1234829 - RNA, 19 nt, Homo sapiens
  misc_RNA (1)...(19): siRNA sense strand
cccgcaaccugcuccuaaa

SEQ ID NO: 1234830 - RNA, 19 nt, Homo sapiens
  misc_RNA (1)...(19): siRNA sense strand
ggaauucauagaaauaacg

SEQ ID NO: 1234831 - RNA, 19 nt, Homo sapiens
  misc_RNA (1)...(19): siRNA sense strand
gccaaugaggccaacaaga

SEQ ID NO: 1234832 - RNA, 19 nt, Homo sapiens
  misc_RNA (1)...(19): siRNA sense strand
gaggaggaggaauucauag

SEQ ID NO: 1234833 - RNA, 19 nt, Homo sapiens
  misc_RNA (1)...(19): siRNA sense strand
cagaggaacuggugaauga

SEQ ID NO: 1234834 - RNA, 19 nt, Homo sapiens
  misc_RNA (1)...(19): siRNA sense strand
ugaaauaccugcaaaguag

SEQ ID NO: 1234835 - RNA, 19 nt, Homo sapiens
  misc_RNA (1)...(19): siRNA sense strand
aagaacaucuccagaggaa

SEQ ID NO: 1234836 - RNA, 19 nt, Homo sapiens
  misc_RNA (1)...(19): siRNA sense strand
gaacaucuccagaggaacu

SEQ ID NO: 1234837 - RNA, 19 nt, Homo sapiens
  misc_RNA (1)...(19): siRNA sense strand
ugaaugaccacgcccgaaa

SEQ ID NO: 1234838 - RNA, 19 nt, Homo sapiens
  misc_RNA (1)...(19): siRNA sense strand
uugaaauaccugcaaagua

SEQ ID NO: 1234839 - RNA, 19 nt, Homo sapiens
  misc_RNA (1)...(19): siRNA sense strand
aaauggaggaggaggaauu

SEQ ID NO: 1234840 - RNA, 19 nt, Homo sapiens
  misc_RNA (1)...(19): siRNA sense strand
ccaaauggaggaggaggaa

SEQ ID NO: 1234841 - RNA, 19 nt, Homo sapiens
  misc_RNA (1)...(19): siRNA sense strand
gaccacgcccgaaagaaca

SEQ ID NO: 1234842 - RNA, 19 nt, Homo sapiens
  misc_RNA (1)...(19): siRNA sense strand
gaaugaccacgcccgaaag

SEQ ID NO: 1234843 - RNA, 19 nt, Homo sapiens
  misc_RNA (1)...(19): siRNA sense strand
cccgcaaccugcuccgaaa

SEQ ID NO: 1234844 - RNA, 19 nt, Homo sapiens
  misc_RNA (1)...(19): siRNA sense strand
guugaaauaccugcaaagu

SEQ ID NO: 1234845 - RNA, 19 nt, Homo sapiens
  misc_RNA (1)...(19): siRNA sense strand
gcccgaaagaacagaauca

SEQ ID NO: 1234846 - RNA, 19 nt, Homo sapiens
  misc_RNA (1)...(19): siRNA sense strand
ugguugaaauaccugcaaa

SEQ ID NO: 1234847 - RNA, 19 nt, Homo sapiens
  misc_RNA (1)...(19): siRNA sense strand
gaaggccgcugugcugugu

SEQ ID NO: 1234848 - RNA, 19 nt, Homo sapiens
  misc_RNA (1)...(19): siRNA sense strand
caggagaguuugacaccuu

SEQ ID NO: 1234849 - RNA, 19 nt, Homo sapiens
  misc_RNA (1)...(19): siRNA sense strand
caguggcucugacuacuau

SEQ ID NO: 1234850 - RNA, 19 nt, Homo sapiens
  misc_RNA (1)...(19): siRNA sense strand
cagagcagcugcccaaagc

SEQ ID NO: 1234851 - RNA, 19 nt, Homo sapiens
  misc_RNA (1)...(19): siRNA sense strand
cuacggccuucccagguuu

SEQ ID NO: 1234852 - RNA, 19 nt, Homo sapiens
  misc_RNA (1)...(19): siRNA sense strand
ccacuucuccacaccuuga

SEQ ID NO: 1234853 - RNA, 19 nt, Homo sapiens
  misc_RNA (1)...(19): siRNA sense strand
ucgaggacuuccaggugua

SEQ ID NO: 1234854 - RNA, 19 nt, Homo sapiens
  misc_RNA (1)...(19): siRNA sense strand
cggcuacacaggagaguuu

SEQ ID NO: 1234855 - RNA, 19 nt, Homo sapiens
  misc_RNA (1)...(19): siRNA sense strand
ccuacggccuucccagguu

SEQ ID NO: 1234856 - RNA, 19 nt, Homo sapiens
  misc_RNA (1)...(19): siRNA sense strand
ccaguggcucugacuacua

SEQ ID NO: 1234857 - RNA, 19 nt, Homo sapiens
  misc_RNA (1)...(19): siRNA sense strand
gcacaugugagggcugcaa

SEQ ID NO: 1234858 - RNA, 19 nt, Homo sapiens
  misc_RNA (1)...(19): siRNA sense strand
ucaucaagcccaccaugga

SEQ ID NO: 1234859 - RNA, 19 nt, Homo sapiens
  misc_RNA (1)...(19): siRNA sense strand
gaaggccgcugugcugugu

SEQ ID NO: 1234860 - RNA, 19 nt, Homo sapiens
  misc_RNA (1)...(19): siRNA sense strand
caggagaguuugacaccuu

SEQ ID NO: 1234861 - RNA, 19 nt, Homo sapiens
  misc_RNA (1)...(19): siRNA sense strand
caguggcucugacuacuau

SEQ ID NO: 1234862 - RNA, 19 nt, Homo sapiens
  misc_RNA (1)...(19): siRNA sense strand
cagagcagcugcccaaagc

SEQ ID NO: 1234863 - RNA, 19 nt, Homo sapiens
  misc_RNA (1)...(19): siRNA sense strand
cuacggccuucccagguuu

SEQ ID NO: 1234864 - RNA, 19 nt, Homo sapiens
  misc_RNA (1)...(19): siRNA sense strand
ccacuucuccacaccuuga

SEQ ID NO: 1234865 - RNA, 19 nt, Homo sapiens
  misc_RNA (1)...(19): siRNA sense strand
ucgaggacuuccaggugua

SEQ ID NO: 1234866 - RNA, 19 nt, Homo sapiens
  misc_RNA (1)...(19): siRNA sense strand
cggcuacacaggagaguuu

SEQ ID NO: 1234867 - RNA, 19 nt, Homo sapiens
  misc_RNA (1)...(19): siRNA sense strand
ccuacggccuucccagguu

SEQ ID NO: 1234868 - RNA, 19 nt, Homo sapiens
  misc_RNA (1)...(19): siRNA sense strand
ccaguggcucugacuacua

SEQ ID NO: 1234869 - RNA, 19 nt, Homo sapiens
  misc_RNA (1)...(19): siRNA sense strand
gcacaugugagggcugcaa

SEQ ID NO: 1234870 - RNA, 19 nt, Homo sapiens
  misc_RNA (1)...(19): siRNA sense strand
ucaucaagcccaccaugga

SEQ ID NO: 1234871 - RNA, 19 nt, Homo sapiens
  misc_RNA (1)...(19): siRNA sense strand
gaaggccgcugugcugugu

SEQ ID NO: 1234872 - RNA, 19 nt, Homo sapiens
  misc_RNA (1)...(19): siRNA sense strand
caggagaguuugacaccuu

SEQ ID NO: 1234873 - RNA, 19 nt, Homo sapiens
  misc_RNA (1)...(19): siRNA sense strand
caguggcucugacuacuau

SEQ ID NO: 1234874 - RNA, 19 nt, Homo sapiens
  misc_RNA (1)...(19): siRNA sense strand
cagagcagcugcccaaagc

SEQ ID NO: 1234875 - RNA, 19 nt, Homo sapiens
  misc_RNA (1)...(19): siRNA sense strand
cuacggccuucccagguuu

SEQ ID NO: 1234876 - RNA, 19 nt, Homo sapiens
  misc_RNA (1)...(19): siRNA sense strand
ccacuucuccacaccuuga

SEQ ID NO: 1234877 - RNA, 19 nt, Homo sapiens
  misc_RNA (1)...(19): siRNA sense strand
ucgaggacuuccaggugua

SEQ ID NO: 1234878 - RNA, 19 nt, Homo sapiens
  misc_RNA (1)...(19): siRNA sense strand
cggcuacacaggagaguuu

SEQ ID NO: 1234879 - RNA, 19 nt, Homo sapiens
  misc_RNA (1)...(19): siRNA sense strand
ccuacggccuucccagguu

SEQ ID NO: 1234880 - RNA, 19 nt, Homo sapiens
  misc_RNA (1)...(19): siRNA sense strand
ccaguggcucugacuacua

SEQ ID NO: 1234881 - RNA, 19 nt, Homo sapiens
  misc_RNA (1)...(19): siRNA sense strand
gcacaugugagggcugcaa

SEQ ID NO: 1234882 - RNA, 19 nt, Homo sapiens
  misc_RNA (1)...(19): siRNA sense strand
ucaucaagcccaccaugga

SEQ ID NO: 1234883 - RNA, 19 nt, Homo sapiens
  misc_RNA (1)...(19): siRNA sense strand
gaaggccgcugugcugugu

SEQ ID NO: 1234884 - RNA, 19 nt, Homo sapiens
  misc_RNA (1)...(19): siRNA sense strand
caggagaguuugacaccuu

SEQ ID NO: 1234885 - RNA, 19 nt, Homo sapiens
  misc_RNA (1)...(19): siRNA sense strand
caguggcucugacuacuau

SEQ ID NO: 1234886 - RNA, 19 nt, Homo sapiens
  misc_RNA (1)...(19): siRNA sense strand
cagagcagcugcccaaagc

SEQ ID NO: 1234887 - RNA, 19 nt, Homo sapiens
  misc_RNA (1)...(19): siRNA sense strand
cuacggccuucccagguuu

SEQ ID NO: 1234888 - RNA, 19 nt, Homo sapiens
  misc_RNA (1)...(19): siRNA sense strand
ccacuucuccacaccuuga

SEQ ID NO: 1234889 - RNA, 19 nt, Homo sapiens
  misc_RNA (1)...(19): siRNA sense strand
ucgaggacuuccaggugua

SEQ ID NO: 1234890 - RNA, 19 nt, Homo sapiens
  misc_RNA (1)...(19): siRNA sense strand
cggcuacacaggagaguuu

SEQ ID NO: 1234891 - RNA, 19 nt, Homo sapiens
  misc_RNA (1)...(19): siRNA sense strand
ccuacggccuucccagguu

SEQ ID NO: 1234892 - RNA, 19 nt, Homo sapiens
  misc_RNA (1)...(19): siRNA sense strand
ccaguggcucugacuacua

SEQ ID NO: 1234893 - RNA, 19 nt, Homo sapiens
  misc_RNA (1)...(19): siRNA sense strand
gcacaugugagggcugcaa

SEQ ID NO: 1234894 - RNA, 19 nt, Homo sapiens
  misc_RNA (1)...(19): siRNA sense strand
ucaucaagcccaccaugga

SEQ ID NO: 1234895 - RNA, 19 nt, Homo sapiens
  misc_RNA (1)...(19): siRNA sense strand
gaaggccgcugugcugugu

SEQ ID NO: 1234896 - RNA, 19 nt, Homo sapiens
  misc_RNA (1)...(19): siRNA sense strand
caggagaguuugacaccuu

SEQ ID NO: 1234897 - RNA, 19 nt, Homo sapiens
  misc_RNA (1)...(19): siRNA sense strand
caguggcucugacuacuau

SEQ ID NO: 1234898 - RNA, 19 nt, Homo sapiens
  misc_RNA (1)...(19): siRNA sense strand
cagagcagcugcccaaagc

SEQ ID NO: 1234899 - RNA, 19 nt, Homo sapiens
  misc_RNA (1)...(19): siRNA sense strand
cuacggccuucccagguuu

SEQ ID NO: 1234900 - RNA, 19 nt, Homo sapiens
  misc_RNA (1)...(19): siRNA sense strand
ccacuucuccacaccuuga

SEQ ID NO: 1234901 - RNA, 19 nt, Homo sapiens
  misc_RNA (1)...(19): siRNA sense strand
ucgaggacuuccaggugua

SEQ ID NO: 1234902 - RNA, 19 nt, Homo sapiens
  misc_RNA (1)...(19): siRNA sense strand
cggcuacacaggagaguuu

SEQ ID NO: 1234903 - RNA, 19 nt, Homo sapiens
  misc_RNA (1)...(19): siRNA sense strand
ccuacggccuucccagguu

SEQ ID NO: 1234904 - RNA, 19 nt, Homo sapiens
  misc_RNA (1)...(19): siRNA sense strand
ccaguggcucugacuacua

SEQ ID NO: 1234905 - RNA, 19 nt, Homo sapiens
  misc_RNA (1)...(19): siRNA sense strand
gcacaugugagggcugcaa

SEQ ID NO: 1234906 - RNA, 19 nt, Homo sapiens
  misc_RNA (1)...(19): siRNA sense strand
ucaucaagcccaccaugga

SEQ ID NO: 1234907 - RNA, 19 nt, Homo sapiens
  misc_RNA (1)...(19): siRNA sense strand
gaaggccgcugugcugugu

SEQ ID NO: 1234908 - RNA, 19 nt, Homo sapiens
  misc_RNA (1)...(19): siRNA sense strand
caggagaguuugacaccuu

SEQ ID NO: 1234909 - RNA, 19 nt, Homo sapiens
  misc_RNA (1)...(19): siRNA sense strand
caguggcucugacuacuau

SEQ ID NO: 1234910 - RNA, 19 nt, Homo sapiens
  misc_RNA (1)...(19): siRNA sense strand
cagagcagcugcccaaagc

SEQ ID NO: 1234911 - RNA, 19 nt, Homo sapiens
  misc_RNA (1)...(19): siRNA sense strand
cuacggccuucccagguuu

SEQ ID NO: 1234912 - RNA, 19 nt, Homo sapiens
  misc_RNA (1)...(19): siRNA sense strand
ccacuucuccacaccuuga

SEQ ID NO: 1234913 - RNA, 19 nt, Homo sapiens
  misc_RNA (1)...(19): siRNA sense strand
ucgaggacuuccaggugua

SEQ ID NO: 1234914 - RNA, 19 nt, Homo sapiens
  misc_RNA (1)...(19): siRNA sense strand
cggcuacacaggagaguuu

SEQ ID NO: 1234915 - RNA, 19 nt, Homo sapiens
  misc_RNA (1)...(19): siRNA sense strand
ccuacggccuucccagguu

SEQ ID NO: 1234916 - RNA, 19 nt, Homo sapiens
  misc_RNA (1)...(19): siRNA sense strand
ccaguggcucugacuacua

SEQ ID NO: 1234917 - RNA, 19 nt, Homo sapiens
  misc_RNA (1)...(19): siRNA sense strand
gcacaugugagggcugcaa

SEQ ID NO: 1234918 - RNA, 19 nt, Homo sapiens
  misc_RNA (1)...(19): siRNA sense strand
ucaucaagcccaccaugga

SEQ ID NO: 1234919 - RNA, 19 nt, Homo sapiens
  misc_RNA (1)...(19): siRNA sense strand
uaaagacgaucccuucuac

SEQ ID NO: 1234920 - RNA, 19 nt, Homo sapiens
  misc_RNA (1)...(19): siRNA sense strand
gacgaucccuucuacuaug

SEQ ID NO: 1234921 - RNA, 19 nt, Homo sapiens
  misc_RNA (1)...(19): siRNA sense strand
gagaaggccaucccacuca

SEQ ID NO: 1234922 - RNA, 19 nt, Homo sapiens
  misc_RNA (1)...(19): siRNA sense strand
ugacccauuugccaauaaa

SEQ ID NO: 1234923 - RNA, 19 nt, Homo sapiens
  misc_RNA (1)...(19): siRNA sense strand
aagacgaucccuucuacua

SEQ ID NO: 1234924 - RNA, 19 nt, Homo sapiens
  misc_RNA (1)...(19): siRNA sense strand
gacccuggcccuucuccua

SEQ ID NO: 1234925 - RNA, 19 nt, Homo sapiens
  misc_RNA (1)...(19): siRNA sense strand
cuucuacuaugacuggaaa

SEQ ID NO: 1234926 - RNA, 19 nt, Homo sapiens
  misc_RNA (1)...(19): siRNA sense strand
auaaagacgaucccuucua

SEQ ID NO: 1234927 - RNA, 19 nt, Homo sapiens
  misc_RNA (1)...(19): siRNA sense strand
cagcugagcggacugaucu

SEQ ID NO: 1234928 - RNA, 19 nt, Homo sapiens
  misc_RNA (1)...(19): siRNA sense strand
gcaagagcagccagaagca

SEQ ID NO: 1234929 - RNA, 19 nt, Homo sapiens
  misc_RNA (1)...(19): siRNA sense strand
agacgaucccuucuacuau

SEQ ID NO: 1234930 - RNA, 19 nt, Homo sapiens
  misc_RNA (1)...(19): siRNA sense strand
gaucgcggcaguucugagu

SEQ ID NO: 1234931 - RNA, 19 nt, Homo sapiens
  misc_RNA (1)...(19): siRNA sense strand
gagugacccuggcccuucu

SEQ ID NO: 1234932 - RNA, 19 nt, Homo sapiens
  misc_RNA (1)...(19): siRNA sense strand
acgaucccuucuacuauga

SEQ ID NO: 1234933 - RNA, 19 nt, Homo sapiens
  misc_RNA (1)...(19): siRNA sense strand
gaaggccaucccacucauc

SEQ ID NO: 1234934 - RNA, 19 nt, Homo sapiens
  misc_RNA (1)...(19): siRNA sense strand
gaagagcgauuauauguua

SEQ ID NO: 1234935 - RNA, 19 nt, Homo sapiens
  misc_RNA (1)...(19): siRNA sense strand
gaauauggcugaccuaaua

SEQ ID NO: 1234936 - RNA, 19 nt, Homo sapiens
  misc_RNA (1)...(19): siRNA sense strand
gaaguuggguugucuagaa

SEQ ID NO: 1234937 - RNA, 19 nt, Homo sapiens
  misc_RNA (1)...(19): siRNA sense strand
cuacaaagcuuccaaagga

SEQ ID NO: 1234938 - RNA, 19 nt, Homo sapiens
  misc_RNA (1)...(19): siRNA sense strand
gaagaacaaugauguaauc

SEQ ID NO: 1234939 - RNA, 19 nt, Homo sapiens
  misc_RNA (1)...(19): siRNA sense strand
ggaaauugcuuugaaguug

SEQ ID NO: 1234940 - RNA, 19 nt, Homo sapiens
  misc_RNA (1)...(19): siRNA sense strand
gaacuuggacgauguauug

SEQ ID NO: 1234941 - RNA, 19 nt, Homo sapiens
  misc_RNA (1)...(19): siRNA sense strand
gaagauaagccaacuuuga

SEQ ID NO: 1234942 - RNA, 19 nt, Homo sapiens
  misc_RNA (1)...(19): siRNA sense strand
gguucaagcuggauuauuu

SEQ ID NO: 1234943 - RNA, 19 nt, Homo sapiens
  misc_RNA (1)...(19): siRNA sense strand
gaaggaaucaguuaccuaa

SEQ ID NO: 1234944 - RNA, 19 nt, Homo sapiens
  misc_RNA (1)...(19): siRNA sense strand
gaaauacaguuuggaucua

SEQ ID NO: 1234945 - RNA, 19 nt, Homo sapiens
  misc_RNA (1)...(19): siRNA sense strand
ggaggacucuacaguauug

SEQ ID NO: 1234946 - RNA, 19 nt, Homo sapiens
  misc_RNA (1)...(19): siRNA sense strand
agagauagcugaucaagug

SEQ ID NO: 1234947 - RNA, 19 nt, Homo sapiens
  misc_RNA (1)...(19): siRNA sense strand
guacagcucuugcauaucu

SEQ ID NO: 1234948 - RNA, 19 nt, Homo sapiens
  misc_RNA (1)...(19): siRNA sense strand
ggacauugcugcucggaau

SEQ ID NO: 1234949 - RNA, 19 nt, Homo sapiens
  misc_RNA (1)...(19): siRNA sense strand
caucagaccucagaaagaa

SEQ ID NO: 1234950 - RNA, 19 nt, Homo sapiens
  misc_RNA (1)...(19): siRNA sense strand
gaaaagaagucuaacuaug

SEQ ID NO: 1234951 - RNA, 19 nt, Homo sapiens
  misc_RNA (1)...(19): siRNA sense strand
caucaaggcauuuauauga

SEQ ID NO: 1234952 - RNA, 19 nt, Homo sapiens
  misc_RNA (1)...(19): siRNA sense strand
ccacacaucuugcugacuu

SEQ ID NO: 1234953 - RNA, 19 nt, Homo sapiens
  misc_RNA (1)...(19): siRNA sense strand
caagaagccuuaacaaugc

SEQ ID NO: 1234954 - RNA, 19 nt, Homo sapiens
  misc_RNA (1)...(19): siRNA sense strand
gaaccucgcagucauuuau

SEQ ID NO: 1234955 - RNA, 19 nt, Homo sapiens
  misc_RNA (1)...(19): siRNA sense strand
ucaagaagccuuaacaaug

SEQ ID NO: 1234956 - RNA, 19 nt, Homo sapiens
  misc_RNA (1)...(19): siRNA sense strand
guacaucaaggcauuuaua

SEQ ID NO: 1234957 - RNA, 19 nt, Homo sapiens
  misc_RNA (1)...(19): siRNA sense strand
gauaaggaaugcuucaagu

SEQ ID NO: 1234958 - RNA, 19 nt, Homo sapiens
  misc_RNA (1)...(19): siRNA sense strand
cuacagauuugauaaggaa

SEQ ID NO: 1234959 - RNA, 19 nt, Homo sapiens
  misc_RNA (1)...(19): siRNA sense strand
gauguaaucggucgaauug

SEQ ID NO: 1234960 - RNA, 19 nt, Homo sapiens
  misc_RNA (1)...(19): siRNA sense strand
caacgagggugucaagcuu

SEQ ID NO: 1234961 - RNA, 19 nt, Homo sapiens
  misc_RNA (1)...(19): siRNA sense strand
guggaaauaugaauugaga

SEQ ID NO: 1234962 - RNA, 19 nt, Homo sapiens
  misc_RNA (1)...(19): siRNA sense strand
ccuaagaguuuacuggauu

SEQ ID NO: 1234963 - RNA, 19 nt, Homo sapiens
  misc_RNA (1)...(19): siRNA sense strand
gcgauuauauguuagagau

SEQ ID NO: 1234964 - RNA, 19 nt, Homo sapiens
  misc_RNA (1)...(19): siRNA sense strand
gaacgggcuuugccaucaa

SEQ ID NO: 1234965 - RNA, 19 nt, Homo sapiens
  misc_RNA (1)...(19): siRNA sense strand
uaacaaugcgucaguuuga

SEQ ID NO: 1234966 - RNA, 19 nt, Homo sapiens
  misc_RNA (1)...(19): siRNA sense strand
gggcaucauucagaagaua

SEQ ID NO: 1234967 - RNA, 19 nt, Homo sapiens
  misc_RNA (1)...(19): siRNA sense strand
uaguacagcucuugcauau

SEQ ID NO: 1234968 - RNA, 19 nt, Homo sapiens
  misc_RNA (1)...(19): siRNA sense strand
cagaagaaggaaucaguua

SEQ ID NO: 1234969 - RNA, 19 nt, Homo sapiens
  misc_RNA (1)...(19): siRNA sense strand
aaaggaaugcuacaacuaa

SEQ ID NO: 1234970 - RNA, 19 nt, Homo sapiens
  misc_RNA (1)...(19): siRNA sense strand
gauaagccaacuuugaauu

SEQ ID NO: 1234971 - RNA, 19 nt, Homo sapiens
  misc_RNA (1)...(19): siRNA sense strand
ucugaaaccugaugugaga

SEQ ID NO: 1234972 - RNA, 19 nt, Homo sapiens
  misc_RNA (1)...(19): siRNA sense strand
guggaggacucuacaguau

SEQ ID NO: 1234973 - RNA, 19 nt, Homo sapiens
  misc_RNA (1)...(19): siRNA sense strand
agagaaggcucagcaagaa

SEQ ID NO: 1234974 - RNA, 19 nt, Homo sapiens
  misc_RNA (1)...(19): siRNA sense strand
ggaaauacaguuuggaucu

SEQ ID NO: 1234975 - RNA, 19 nt, Homo sapiens
  misc_RNA (1)...(19): siRNA sense strand
guaaggaaauacaguuugg

SEQ ID NO: 1234976 - RNA, 19 nt, Homo sapiens
  misc_RNA (1)...(19): siRNA sense strand
gaagucuaacuaugaagua

SEQ ID NO: 1234977 - RNA, 19 nt, Homo sapiens
  misc_RNA (1)...(19): siRNA sense strand
ccagaggaguggaaauaug

SEQ ID NO: 1234978 - RNA, 19 nt, Homo sapiens
  misc_RNA (1)...(19): siRNA sense strand
ggacauuauuggccacugu

SEQ ID NO: 1234979 - RNA, 19 nt, Homo sapiens
  misc_RNA (1)...(19): siRNA sense strand
gcaaugcacuagaaaagaa

SEQ ID NO: 1234980 - RNA, 19 nt, Homo sapiens
  misc_RNA (1)...(19): siRNA sense strand
gcaauggagcgaguauuaa

SEQ ID NO: 1234981 - RNA, 19 nt, Homo sapiens
  misc_RNA (1)...(19): siRNA sense strand
gcacagaagcuauugaacu

SEQ ID NO: 1234982 - RNA, 19 nt, Homo sapiens
  misc_RNA (1)...(19): siRNA sense strand
uguaaucggucgaauugaa

SEQ ID NO: 1234983 - RNA, 19 nt, Homo sapiens
  misc_RNA (1)...(19): siRNA sense strand
guuuggaucuagcaucuuu

SEQ ID NO: 1234984 - RNA, 19 nt, Homo sapiens
  misc_RNA (1)...(19): siRNA sense strand
ggaguggaaauaugaauug

SEQ ID NO: 1234985 - RNA, 19 nt, Homo sapiens
  misc_RNA (1)...(19): siRNA sense strand
ugucagaaacagaugauua

SEQ ID NO: 1234986 - RNA, 19 nt, Homo sapiens
  misc_RNA (1)...(19): siRNA sense strand
ugggugagcucaucaacaa

SEQ ID NO: 1234987 - RNA, 19 nt, Homo sapiens
  misc_RNA (1)...(19): siRNA sense strand
gugaagagcgauuauaugu

SEQ ID NO: 1234988 - RNA, 19 nt, Homo sapiens
  misc_RNA (1)...(19): siRNA sense strand
gcuccagagucaaucaauu

SEQ ID NO: 1234989 - RNA, 19 nt, Homo sapiens
  misc_RNA (1)...(19): siRNA sense strand
aaccagggauuaugagauu

SEQ ID NO: 1234990 - RNA, 19 nt, Homo sapiens
  misc_RNA (1)...(19): siRNA sense strand
gaaauacggcgaucauacu

SEQ ID NO: 1234991 - RNA, 19 nt, Homo sapiens
  misc_RNA (1)...(19): siRNA sense strand
gauaguggacagucacaaa

SEQ ID NO: 1234992 - RNA, 19 nt, Homo sapiens
  misc_RNA (1)...(19): siRNA sense strand
uauaucagccuguggguaa

SEQ ID NO: 1234993 - RNA, 19 nt, Homo sapiens
  misc_RNA (1)...(19): siRNA sense strand
gcagucauuuaucaucaga

SEQ ID NO: 1234994 - RNA, 19 nt, Homo sapiens
  misc_RNA (1)...(19): siRNA sense strand
caagcuggauuauuucagu

SEQ ID NO: 1234995 - RNA, 19 nt, Homo sapiens
  misc_RNA (1)...(19): siRNA sense strand
caauuugccaaccuuaaua

SEQ ID NO: 1234996 - RNA, 19 nt, Homo sapiens
  misc_RNA (1)...(19): siRNA sense strand
caauggagcgaguauuaaa

SEQ ID NO: 1234997 - RNA, 19 nt, Homo sapiens
  misc_RNA (1)...(19): siRNA sense strand
guuggguugucuagaaaua

SEQ ID NO: 1234998 - RNA, 19 nt, Homo sapiens
  misc_RNA (1)...(19): siRNA sense strand
gcaaaccauucaguauuca

SEQ ID NO: 1234999 - RNA, 19 nt, Homo sapiens
  misc_RNA (1)...(19): siRNA sense strand
ugaaagcugucaucgagau

SEQ ID NO: 1235000 - RNA, 19 nt, Homo sapiens
  misc_RNA (1)...(19): siRNA sense strand
uaccucagcuagugacgua

SEQ ID NO: 1235001 - RNA, 19 nt, Homo sapiens
  misc_RNA (1)...(19): siRNA sense strand
acaccaaauucgaguacua

SEQ ID NO: 1235002 - RNA, 19 nt, Homo sapiens
  misc_RNA (1)...(19): siRNA sense strand
augcugagauuauagauga

SEQ ID NO: 1235003 - RNA, 19 nt, Homo sapiens
  misc_RNA (1)...(19): siRNA sense strand
uaagaaaacugauccaaca

SEQ ID NO: 1235004 - RNA, 19 nt, Homo sapiens
  misc_RNA (1)...(19): siRNA sense strand
gagaauauggcugaccuaa

SEQ ID NO: 1235005 - RNA, 19 nt, Homo sapiens
  misc_RNA (1)...(19): siRNA sense strand
gauccugucuccagucuac

SEQ ID NO: 1235006 - RNA, 19 nt, Homo sapiens
  misc_RNA (1)...(19): siRNA sense strand
caaccuuaauagagaagaa

SEQ ID NO: 1235007 - RNA, 19 nt, Homo sapiens
  misc_RNA (1)...(19): siRNA sense strand
aaacuuacucgaugucauu

SEQ ID NO: 1235008 - RNA, 19 nt, Homo sapiens
  misc_RNA (1)...(19): siRNA sense strand
agauugagauggcacagaa

SEQ ID NO: 1235009 - RNA, 19 nt, Homo sapiens
  misc_RNA (1)...(19): siRNA sense strand
gauaagguguacgagaaug

SEQ ID NO: 1235010 - RNA, 19 nt, Homo sapiens
  misc_RNA (1)...(19): siRNA sense strand
guucugguguccucaaaug

SEQ ID NO: 1235011 - RNA, 19 nt, Homo sapiens
  misc_RNA (1)...(19): siRNA sense strand
uagcaucuuugauccugua

SEQ ID NO: 1235012 - RNA, 19 nt, Homo sapiens
  misc_RNA (1)...(19): siRNA sense strand
ggacacacgccgucucugu

SEQ ID NO: 1235013 - RNA, 19 nt, Homo sapiens
  misc_RNA (1)...(19): siRNA sense strand
gugcaaaccauucaguauu

SEQ ID NO: 1235014 - RNA, 19 nt, Homo sapiens
  misc_RNA (1)...(19): siRNA sense strand
auuaggagacuuuggauua

SEQ ID NO: 1235015 - RNA, 19 nt, Homo sapiens
  misc_RNA (1)...(19): siRNA sense strand
cagaggaguggaaauauga

SEQ ID NO: 1235016 - RNA, 19 nt, Homo sapiens
  misc_RNA (1)...(19): siRNA sense strand
caaguaaggaaauacaguu

SEQ ID NO: 1235017 - RNA, 19 nt, Homo sapiens
  misc_RNA (1)...(19): siRNA sense strand
ggacagcgugagagagaaa

SEQ ID NO: 1235018 - RNA, 19 nt, Homo sapiens
  misc_RNA (1)...(19): siRNA sense strand
gaguggaaauaugaauuga

SEQ ID NO: 1235019 - RNA, 19 nt, Homo sapiens
  misc_RNA (1)...(19): siRNA sense strand
ugaccagccuccagcaaga

SEQ ID NO: 1235020 - RNA, 19 nt, Homo sapiens
  misc_RNA (1)...(19): siRNA sense strand
cacagaagcuauugaacuc

SEQ ID NO: 1235021 - RNA, 19 nt, Homo sapiens
  misc_RNA (1)...(19): siRNA sense strand
gauuaccaaugccuccaaa

SEQ ID NO: 1235022 - RNA, 19 nt, Homo sapiens
  misc_RNA (1)...(19): siRNA sense strand
gaagcugauuggagucauc

SEQ ID NO: 1235023 - RNA, 19 nt, Homo sapiens
  misc_RNA (1)...(19): siRNA sense strand
gaauggaaccucgcaguca

SEQ ID NO: 1235024 - RNA, 19 nt, Homo sapiens
  misc_RNA (1)...(19): siRNA sense strand
gcaccaucccuaaccauug

SEQ ID NO: 1235025 - RNA, 19 nt, Homo sapiens
  misc_RNA (1)...(19): siRNA sense strand
caccagaggaguggaaaua

SEQ ID NO: 1235026 - RNA, 19 nt, Homo sapiens
  misc_RNA (1)...(19): siRNA sense strand
gauggaagagcgucuaauc

SEQ ID NO: 1235027 - RNA, 19 nt, Homo sapiens
  misc_RNA (1)...(19): siRNA sense strand
guaaucggucgaauugaaa

SEQ ID NO: 1235028 - RNA, 19 nt, Homo sapiens
  misc_RNA (1)...(19): siRNA sense strand
ugcaauggagcgaguauua

SEQ ID NO: 1235029 - RNA, 19 nt, Homo sapiens
  misc_RNA (1)...(19): siRNA sense strand
gaaaaggaaugcuacaacu

SEQ ID NO: 1235030 - RNA, 19 nt, Homo sapiens
  misc_RNA (1)...(19): siRNA sense strand
uaagccaacuuugaauuuc

SEQ ID NO: 1235031 - RNA, 19 nt, Homo sapiens
  misc_RNA (1)...(19): siRNA sense strand
aagauaagccaacuuugaa

SEQ ID NO: 1235032 - RNA, 19 nt, Homo sapiens
  misc_RNA (1)...(19): siRNA sense strand
agaaacagaugauuaugcu

SEQ ID NO: 1235033 - RNA, 19 nt, Homo sapiens
  misc_RNA (1)...(19): siRNA sense strand
uaaggaaugcuucaagugu

SEQ ID NO: 1235034 - RNA, 19 nt, Homo sapiens
  misc_RNA (1)...(19): siRNA sense strand
gaagagcgauuauauguua

SEQ ID NO: 1235035 - RNA, 19 nt, Homo sapiens
  misc_RNA (1)...(19): siRNA sense strand
gaauauggcugaccuaaua

SEQ ID NO: 1235036 - RNA, 19 nt, Homo sapiens
  misc_RNA (1)...(19): siRNA sense strand
gaaguuggguugucuagaa

SEQ ID NO: 1235037 - RNA, 19 nt, Homo sapiens
  misc_RNA (1)...(19): siRNA sense strand
cuacaaagcuuccaaagga

SEQ ID NO: 1235038 - RNA, 19 nt, Homo sapiens
  misc_RNA (1)...(19): siRNA sense strand
gaagaacaaugauguaauc

SEQ ID NO: 1235039 - RNA, 19 nt, Homo sapiens
  misc_RNA (1)...(19): siRNA sense strand
ggaaauugcuuugaaguug

SEQ ID NO: 1235040 - RNA, 19 nt, Homo sapiens
  misc_RNA (1)...(19): siRNA sense strand
gaacuuggacgauguauug

SEQ ID NO: 1235041 - RNA, 19 nt, Homo sapiens
  misc_RNA (1)...(19): siRNA sense strand
gaagauaagccaacuuuga

SEQ ID NO: 1235042 - RNA, 19 nt, Homo sapiens
  misc_RNA (1)...(19): siRNA sense strand
gguucaagcuggauuauuu

SEQ ID NO: 1235043 - RNA, 19 nt, Homo sapiens
  misc_RNA (1)...(19): siRNA sense strand
gaaggaaucaguuaccuaa

SEQ ID NO: 1235044 - RNA, 19 nt, Homo sapiens
  misc_RNA (1)...(19): siRNA sense strand
gaaauacaguuuggaucua

SEQ ID NO: 1235045 - RNA, 19 nt, Homo sapiens
  misc_RNA (1)...(19): siRNA sense strand
ggaggacucuacaguauug

SEQ ID NO: 1235046 - RNA, 19 nt, Homo sapiens
  misc_RNA (1)...(19): siRNA sense strand
agagauagcugaucaagug

SEQ ID NO: 1235047 - RNA, 19 nt, Homo sapiens
  misc_RNA (1)...(19): siRNA sense strand
guacagcucuugcauaucu

SEQ ID NO: 1235048 - RNA, 19 nt, Homo sapiens
  misc_RNA (1)...(19): siRNA sense strand
ggacauugcugcucggaau

SEQ ID NO: 1235049 - RNA, 19 nt, Homo sapiens
  misc_RNA (1)...(19): siRNA sense strand
caucagaccucagaaagaa

SEQ ID NO: 1235050 - RNA, 19 nt, Homo sapiens
  misc_RNA (1)...(19): siRNA sense strand
gaaaagaagucuaacuaug

SEQ ID NO: 1235051 - RNA, 19 nt, Homo sapiens
  misc_RNA (1)...(19): siRNA sense strand
caucaaggcauuuauauga

SEQ ID NO: 1235052 - RNA, 19 nt, Homo sapiens
  misc_RNA (1)...(19): siRNA sense strand
ccacacaucuugcugacuu

SEQ ID NO: 1235053 - RNA, 19 nt, Homo sapiens
  misc_RNA (1)...(19): siRNA sense strand
caagaagccuuaacaaugc

SEQ ID NO: 1235054 - RNA, 19 nt, Homo sapiens
  misc_RNA (1)...(19): siRNA sense strand
gaaccucgcagucauuuau

SEQ ID NO: 1235055 - RNA, 19 nt, Homo sapiens
  misc_RNA (1)...(19): siRNA sense strand
ucaagaagccuuaacaaug

SEQ ID NO: 1235056 - RNA, 19 nt, Homo sapiens
  misc_RNA (1)...(19): siRNA sense strand
guacaucaaggcauuuaua

SEQ ID NO: 1235057 - RNA, 19 nt, Homo sapiens
  misc_RNA (1)...(19): siRNA sense strand
gauaaggaaugcuucaagu

SEQ ID NO: 1235058 - RNA, 19 nt, Homo sapiens
  misc_RNA (1)...(19): siRNA sense strand
cuacagauuugauaaggaa

SEQ ID NO: 1235059 - RNA, 19 nt, Homo sapiens
  misc_RNA (1)...(19): siRNA sense strand
gauguaaucggucgaauug

SEQ ID NO: 1235060 - RNA, 19 nt, Homo sapiens
  misc_RNA (1)...(19): siRNA sense strand
caacgagggugucaagcuu

SEQ ID NO: 1235061 - RNA, 19 nt, Homo sapiens
  misc_RNA (1)...(19): siRNA sense strand
guggaaauaugaauugaga

SEQ ID NO: 1235062 - RNA, 19 nt, Homo sapiens
  misc_RNA (1)...(19): siRNA sense strand
ccuaagaguuuacuggauu

SEQ ID NO: 1235063 - RNA, 19 nt, Homo sapiens
  misc_RNA (1)...(19): siRNA sense strand
gcgauuauauguuagagau

SEQ ID NO: 1235064 - RNA, 19 nt, Homo sapiens
  misc_RNA (1)...(19): siRNA sense strand
gaacgggcuuugccaucaa

SEQ ID NO: 1235065 - RNA, 19 nt, Homo sapiens
  misc_RNA (1)...(19): siRNA sense strand
uaacaaugcgucaguuuga

SEQ ID NO: 1235066 - RNA, 19 nt, Homo sapiens
  misc_RNA (1)...(19): siRNA sense strand
gggcaucauucagaagaua

SEQ ID NO: 1235067 - RNA, 19 nt, Homo sapiens
  misc_RNA (1)...(19): siRNA sense strand
uaguacagcucuugcauau

SEQ ID NO: 1235068 - RNA, 19 nt, Homo sapiens
  misc_RNA (1)...(19): siRNA sense strand
cagaagaaggaaucaguua

SEQ ID NO: 1235069 - RNA, 19 nt, Homo sapiens
  misc_RNA (1)...(19): siRNA sense strand
aaaggaaugcuacaacuaa

SEQ ID NO: 1235070 - RNA, 19 nt, Homo sapiens
  misc_RNA (1)...(19): siRNA sense strand
gauaagccaacuuugaauu

SEQ ID NO: 1235071 - RNA, 19 nt, Homo sapiens
  misc_RNA (1)...(19): siRNA sense strand
ucugaaaccugaugugaga

SEQ ID NO: 1235072 - RNA, 19 nt, Homo sapiens
  misc_RNA (1)...(19): siRNA sense strand
guggaggacucuacaguau

SEQ ID NO: 1235073 - RNA, 19 nt, Homo sapiens
  misc_RNA (1)...(19): siRNA sense strand
agagaaggcucagcaagaa

SEQ ID NO: 1235074 - RNA, 19 nt, Homo sapiens
  misc_RNA (1)...(19): siRNA sense strand
ggaaauacaguuuggaucu

SEQ ID NO: 1235075 - RNA, 19 nt, Homo sapiens
  misc_RNA (1)...(19): siRNA sense strand
guaaggaaauacaguuugg

SEQ ID NO: 1235076 - RNA, 19 nt, Homo sapiens
  misc_RNA (1)...(19): siRNA sense strand
gaagucuaacuaugaagua

SEQ ID NO: 1235077 - RNA, 19 nt, Homo sapiens
  misc_RNA (1)...(19): siRNA sense strand
ccagaggaguggaaauaug

SEQ ID NO: 1235078 - RNA, 19 nt, Homo sapiens
  misc_RNA (1)...(19): siRNA sense strand
ggacauuauuggccacugu

SEQ ID NO: 1235079 - RNA, 19 nt, Homo sapiens
  misc_RNA (1)...(19): siRNA sense strand
gcaaugcacuagaaaagaa

SEQ ID NO: 1235080 - RNA, 19 nt, Homo sapiens
  misc_RNA (1)...(19): siRNA sense strand
ggaguggaaauaugaauug

SEQ ID NO: 1235081 - RNA, 19 nt, Homo sapiens
  misc_RNA (1)...(19): siRNA sense strand
gcacagaagcuauugaacu

SEQ ID NO: 1235082 - RNA, 19 nt, Homo sapiens
  misc_RNA (1)...(19): siRNA sense strand
uguaaucggucgaauugaa

SEQ ID NO: 1235083 - RNA, 19 nt, Homo sapiens
  misc_RNA (1)...(19): siRNA sense strand
gcaauggagcgaguauuaa

SEQ ID NO: 1235084 - RNA, 19 nt, Homo sapiens
  misc_RNA (1)...(19): siRNA sense strand
guuuggaucuagcaucuuu

SEQ ID NO: 1235085 - RNA, 19 nt, Homo sapiens
  misc_RNA (1)...(19): siRNA sense strand
ugucagaaacagaugauua

SEQ ID NO: 1235086 - RNA, 19 nt, Homo sapiens
  misc_RNA (1)...(19): siRNA sense strand
ugggugagcucaucaacaa

SEQ ID NO: 1235087 - RNA, 19 nt, Homo sapiens
  misc_RNA (1)...(19): siRNA sense strand
gugaagagcgauuauaugu

SEQ ID NO: 1235088 - RNA, 19 nt, Homo sapiens
  misc_RNA (1)...(19): siRNA sense strand
gcuccagagucaaucaauu

SEQ ID NO: 1235089 - RNA, 19 nt, Homo sapiens
  misc_RNA (1)...(19): siRNA sense strand
aaccagggauuaugagauu

SEQ ID NO: 1235090 - RNA, 19 nt, Homo sapiens
  misc_RNA (1)...(19): siRNA sense strand
gaaauacggcgaucauacu

SEQ ID NO: 1235091 - RNA, 19 nt, Homo sapiens
  misc_RNA (1)...(19): siRNA sense strand
gauaguggacagucacaaa

SEQ ID NO: 1235092 - RNA, 19 nt, Homo sapiens
  misc_RNA (1)...(19): siRNA sense strand
uauaucagccuguggguaa

SEQ ID NO: 1235093 - RNA, 19 nt, Homo sapiens
  misc_RNA (1)...(19): siRNA sense strand
caauggagcgaguauuaaa

SEQ ID NO: 1235094 - RNA, 19 nt, Homo sapiens
  misc_RNA (1)...(19): siRNA sense strand
gcagucauuuaucaucaga

SEQ ID NO: 1235095 - RNA, 19 nt, Homo sapiens
  misc_RNA (1)...(19): siRNA sense strand
caagcuggauuauuucagu

SEQ ID NO: 1235096 - RNA, 19 nt, Homo sapiens
  misc_RNA (1)...(19): siRNA sense strand
caauuugccaaccuuaaua

SEQ ID NO: 1235097 - RNA, 19 nt, Homo sapiens
  misc_RNA (1)...(19): siRNA sense strand
guuggguugucuagaaaua

SEQ ID NO: 1235098 - RNA, 19 nt, Homo sapiens
  misc_RNA (1)...(19): siRNA sense strand
gcaaaccauucaguauuca

SEQ ID NO: 1235099 - RNA, 19 nt, Homo sapiens
  misc_RNA (1)...(19): siRNA sense strand
ugaaagcugucaucgagau

SEQ ID NO: 1235100 - RNA, 19 nt, Homo sapiens
  misc_RNA (1)...(19): siRNA sense strand
uaccucagcuagugacgua

SEQ ID NO: 1235101 - RNA, 19 nt, Homo sapiens
  misc_RNA (1)...(19): siRNA sense strand
acaccaaauucgaguacua

SEQ ID NO: 1235102 - RNA, 19 nt, Homo sapiens
  misc_RNA (1)...(19): siRNA sense strand
augcugagauuauagauga

SEQ ID NO: 1235103 - RNA, 19 nt, Homo sapiens
  misc_RNA (1)...(19): siRNA sense strand
uaagaaaacugauccaaca

SEQ ID NO: 1235104 - RNA, 19 nt, Homo sapiens
  misc_RNA (1)...(19): siRNA sense strand
gagaauauggcugaccuaa

SEQ ID NO: 1235105 - RNA, 19 nt, Homo sapiens
  misc_RNA (1)...(19): siRNA sense strand
gauccugucuccagucuac

SEQ ID NO: 1235106 - RNA, 19 nt, Homo sapiens
  misc_RNA (1)...(19): siRNA sense strand
caaccuuaauagagaagaa

SEQ ID NO: 1235107 - RNA, 19 nt, Homo sapiens
  misc_RNA (1)...(19): siRNA sense strand
aaacuuacucgaugucauu

SEQ ID NO: 1235108 - RNA, 19 nt, Homo sapiens
  misc_RNA (1)...(19): siRNA sense strand
agauugagauggcacagaa

SEQ ID NO: 1235109 - RNA, 19 nt, Homo sapiens
  misc_RNA (1)...(19): siRNA sense strand
gauaagguguacgagaaug

SEQ ID NO: 1235110 - RNA, 19 nt, Homo sapiens
  misc_RNA (1)...(19): siRNA sense strand
guucugguguccucaaaug

SEQ ID NO: 1235111 - RNA, 19 nt, Homo sapiens
  misc_RNA (1)...(19): siRNA sense strand
uagcaucuuugauccugua

SEQ ID NO: 1235112 - RNA, 19 nt, Homo sapiens
  misc_RNA (1)...(19): siRNA sense strand
ggacacacgccgucucugu

SEQ ID NO: 1235113 - RNA, 19 nt, Homo sapiens
  misc_RNA (1)...(19): siRNA sense strand
gugcaaaccauucaguauu

SEQ ID NO: 1235114 - RNA, 19 nt, Homo sapiens
  misc_RNA (1)...(19): siRNA sense strand
auuaggagacuuuggauua

SEQ ID NO: 1235115 - RNA, 19 nt, Homo sapiens
  misc_RNA (1)...(19): siRNA sense strand
cagaggaguggaaauauga

SEQ ID NO: 1235116 - RNA, 19 nt, Homo sapiens
  misc_RNA (1)...(19): siRNA sense strand
caaguaaggaaauacaguu

SEQ ID NO: 1235117 - RNA, 19 nt, Homo sapiens
  misc_RNA (1)...(19): siRNA sense strand
ggacagcgugagagagaaa

SEQ ID NO: 1235118 - RNA, 19 nt, Homo sapiens
  misc_RNA (1)...(19): siRNA sense strand
gaguggaaauaugaauuga

SEQ ID NO: 1235119 - RNA, 19 nt, Homo sapiens
  misc_RNA (1)...(19): siRNA sense strand
ugaccagccuccagcaaga

SEQ ID NO: 1235120 - RNA, 19 nt, Homo sapiens
  misc_RNA (1)...(19): siRNA sense strand
cacagaagcuauugaacuc

SEQ ID NO: 1235121 - RNA, 19 nt, Homo sapiens
  misc_RNA (1)...(19): siRNA sense strand
gauuaccaaugccuccaaa

SEQ ID NO: 1235122 - RNA, 19 nt, Homo sapiens
  misc_RNA (1)...(19): siRNA sense strand
gaagcugauuggagucauc

SEQ ID NO: 1235123 - RNA, 19 nt, Homo sapiens
  misc_RNA (1)...(19): siRNA sense strand
gaauggaaccucgcaguca

SEQ ID NO: 1235124 - RNA, 19 nt, Homo sapiens
  misc_RNA (1)...(19): siRNA sense strand
gcaccaucccuaaccauug

SEQ ID NO: 1235125 - RNA, 19 nt, Homo sapiens
  misc_RNA (1)...(19): siRNA sense strand
caccagaggaguggaaaua

SEQ ID NO: 1235126 - RNA, 19 nt, Homo sapiens
  misc_RNA (1)...(19): siRNA sense strand
ugcaauggagcgaguauua

SEQ ID NO: 1235127 - RNA, 19 nt, Homo sapiens
  misc_RNA (1)...(19): siRNA sense strand
gauggaagagcgucuaauc

SEQ ID NO: 1235128 - RNA, 19 nt, Homo sapiens
  misc_RNA (1)...(19): siRNA sense strand
guaaucggucgaauugaaa

SEQ ID NO: 1235129 - RNA, 19 nt, Homo sapiens
  misc_RNA (1)...(19): siRNA sense strand
gaaaaggaaugcuacaacu

SEQ ID NO: 1235130 - RNA, 19 nt, Homo sapiens
  misc_RNA (1)...(19): siRNA sense strand
uaagccaacuuugaauuuc

SEQ ID NO: 1235131 - RNA, 19 nt, Homo sapiens
  misc_RNA (1)...(19): siRNA sense strand
aagauaagccaacuuugaa

SEQ ID NO: 1235132 - RNA, 19 nt, Homo sapiens
  misc_RNA (1)...(19): siRNA sense strand
agaaacagaugauuaugcu

SEQ ID NO: 1235133 - RNA, 19 nt, Homo sapiens
  misc_RNA (1)...(19): siRNA sense strand
uaaggaaugcuucaagugu

SEQ ID NO: 1235134 - RNA, 19 nt, Homo sapiens
  misc_RNA (1)...(19): siRNA sense strand
guacaaagguggugaagag

SEQ ID NO: 1235135 - RNA, 19 nt, Homo sapiens
  misc_RNA (1)...(19): siRNA sense strand
ccagaaggcucuauacaca

SEQ ID NO: 1235136 - RNA, 19 nt, Homo sapiens
  misc_RNA (1)...(19): siRNA sense strand
ggcaagauacuacauaauu

SEQ ID NO: 1235137 - RNA, 19 nt, Homo sapiens
  misc_RNA (1)...(19): siRNA sense strand
gcaccaagguccccauuuu

SEQ ID NO: 1235138 - RNA, 19 nt, Homo sapiens
  misc_RNA (1)...(19): siRNA sense strand
caguacagcucaccaagga

SEQ ID NO: 1235139 - RNA, 19 nt, Homo sapiens
  misc_RNA (1)...(19): siRNA sense strand
gaacauugaggaacuguac

SEQ ID NO: 1235140 - RNA, 19 nt, Homo sapiens
  misc_RNA (1)...(19): siRNA sense strand
gagauccuguugcagacaa

SEQ ID NO: 1235141 - RNA, 19 nt, Homo sapiens
  misc_RNA (1)...(19): siRNA sense strand
ggugggagauccuguugca

SEQ ID NO: 1235142 - RNA, 19 nt, Homo sapiens
  misc_RNA (1)...(19): siRNA sense strand
cugcauacuuccuaacaga

SEQ ID NO: 1235143 - RNA, 19 nt, Homo sapiens
  misc_RNA (1)...(19): siRNA sense strand
uuaaauaugcagaccagaa

SEQ ID NO: 1235144 - RNA, 19 nt, Homo sapiens
  misc_RNA (1)...(19): siRNA sense strand
uggcauguguggagacaga

SEQ ID NO: 1235145 - RNA, 19 nt, Homo sapiens
  misc_RNA (1)...(19): siRNA sense strand
agaaggcucuauacacaag

SEQ ID NO: 1235146 - RNA, 19 nt, Homo sapiens
  misc_RNA (1)...(19): siRNA sense strand
uugaggaacuguacaaagg

SEQ ID NO: 1235147 - RNA, 19 nt, Homo sapiens
  misc_RNA (1)...(19): siRNA sense strand
ccacacgcuucaccuucuu

SEQ ID NO: 1235148 - RNA, 19 nt, Homo sapiens
  misc_RNA (1)...(19): siRNA sense strand
gaccagaaggcucuauaca

SEQ ID NO: 1235149 - RNA, 19 nt, Homo sapiens
  misc_RNA (1)...(19): siRNA sense strand
cauggcaagauacuacaua

SEQ ID NO: 1235150 - RNA, 19 nt, Homo sapiens
  misc_RNA (1)...(19): siRNA sense strand
uaaauaugcagaccagaag

SEQ ID NO: 1235151 - RNA, 19 nt, Homo sapiens
  misc_RNA (1)...(19): siRNA sense strand
ccucagcccguaccaaguu

SEQ ID NO: 1235152 - RNA, 19 nt, Homo sapiens
  misc_RNA (1)...(19): siRNA sense strand
cccuacagcuggaggaugu

SEQ ID NO: 1235153 - RNA, 19 nt, Homo sapiens
  misc_RNA (1)...(19): siRNA sense strand
auggcaagauacuacauaa

SEQ ID NO: 1235154 - RNA, 19 nt, Homo sapiens
  misc_RNA (1)...(19): siRNA sense strand
gccacacgcuucaccuucu

SEQ ID NO: 1235155 - RNA, 19 nt, Homo sapiens
  misc_RNA (1)...(19): siRNA sense strand
cagaccagaaggcucuaua

SEQ ID NO: 1235156 - RNA, 19 nt, Homo sapiens
  misc_RNA (1)...(19): siRNA sense strand
cagaaggcucuauacacaa

SEQ ID NO: 1235157 - RNA, 19 nt, Homo sapiens
  misc_RNA (1)...(19): siRNA sense strand
agagaagaucugcauacuu

SEQ ID NO: 1235158 - RNA, 19 nt, Homo sapiens
  misc_RNA (1)...(19): siRNA sense strand
guacaaagguggugaagag

SEQ ID NO: 1235159 - RNA, 19 nt, Homo sapiens
  misc_RNA (1)...(19): siRNA sense strand
ccagaaggcucuauacaca

SEQ ID NO: 1235160 - RNA, 19 nt, Homo sapiens
  misc_RNA (1)...(19): siRNA sense strand
ggcaagauacuacauaauu

SEQ ID NO: 1235161 - RNA, 19 nt, Homo sapiens
  misc_RNA (1)...(19): siRNA sense strand
gcaccaagguccccauuuu

SEQ ID NO: 1235162 - RNA, 19 nt, Homo sapiens
  misc_RNA (1)...(19): siRNA sense strand
caguacagcucaccaagga

SEQ ID NO: 1235163 - RNA, 19 nt, Homo sapiens
  misc_RNA (1)...(19): siRNA sense strand
gaacauugaggaacuguac

SEQ ID NO: 1235164 - RNA, 19 nt, Homo sapiens
  misc_RNA (1)...(19): siRNA sense strand
gagauccuguugcagacaa

SEQ ID NO: 1235165 - RNA, 19 nt, Homo sapiens
  misc_RNA (1)...(19): siRNA sense strand
ggugggagauccuguugca

SEQ ID NO: 1235166 - RNA, 19 nt, Homo sapiens
  misc_RNA (1)...(19): siRNA sense strand
cugcauacuuccuaacaga

SEQ ID NO: 1235167 - RNA, 19 nt, Homo sapiens
  misc_RNA (1)...(19): siRNA sense strand
uuaaauaugcagaccagaa

SEQ ID NO: 1235168 - RNA, 19 nt, Homo sapiens
  misc_RNA (1)...(19): siRNA sense strand
uggcauguguggagacaga

SEQ ID NO: 1235169 - RNA, 19 nt, Homo sapiens
  misc_RNA (1)...(19): siRNA sense strand
agaaggcucuauacacaag

SEQ ID NO: 1235170 - RNA, 19 nt, Homo sapiens
  misc_RNA (1)...(19): siRNA sense strand
uugaggaacuguacaaagg

SEQ ID NO: 1235171 - RNA, 19 nt, Homo sapiens
  misc_RNA (1)...(19): siRNA sense strand
ccacacgcuucaccuucuu

SEQ ID NO: 1235172 - RNA, 19 nt, Homo sapiens
  misc_RNA (1)...(19): siRNA sense strand
gaccagaaggcucuauaca

SEQ ID NO: 1235173 - RNA, 19 nt, Homo sapiens
  misc_RNA (1)...(19): siRNA sense strand
cauggcaagauacuacaua

SEQ ID NO: 1235174 - RNA, 19 nt, Homo sapiens
  misc_RNA (1)...(19): siRNA sense strand
uaaauaugcagaccagaag

SEQ ID NO: 1235175 - RNA, 19 nt, Homo sapiens
  misc_RNA (1)...(19): siRNA sense strand
ccucagcccguaccaaguu

SEQ ID NO: 1235176 - RNA, 19 nt, Homo sapiens
  misc_RNA (1)...(19): siRNA sense strand
cccuacagcuggaggaugu

SEQ ID NO: 1235177 - RNA, 19 nt, Homo sapiens
  misc_RNA (1)...(19): siRNA sense strand
auggcaagauacuacauaa

SEQ ID NO: 1235178 - RNA, 19 nt, Homo sapiens
  misc_RNA (1)...(19): siRNA sense strand
gccacacgcuucaccuucu

SEQ ID NO: 1235179 - RNA, 19 nt, Homo sapiens
  misc_RNA (1)...(19): siRNA sense strand
cagaccagaaggcucuaua

SEQ ID NO: 1235180 - RNA, 19 nt, Homo sapiens
  misc_RNA (1)...(19): siRNA sense strand
cagaaggcucuauacacaa

SEQ ID NO: 1235181 - RNA, 19 nt, Homo sapiens
  misc_RNA (1)...(19): siRNA sense strand
agagaagaucugcauacuu

SEQ ID NO: 1235182 - RNA, 19 nt, Homo sapiens
  misc_RNA (1)...(19): siRNA sense strand
caacuugucuuccuauuaa

SEQ ID NO: 1235183 - RNA, 19 nt, Homo sapiens
  misc_RNA (1)...(19): siRNA sense strand
gaagaugaccuacagauaa

SEQ ID NO: 1235184 - RNA, 19 nt, Homo sapiens
  misc_RNA (1)...(19): siRNA sense strand
gaagauacguggcucaaug

SEQ ID NO: 1235185 - RNA, 19 nt, Homo sapiens
  misc_RNA (1)...(19): siRNA sense strand
ggacagagaaguuugauuu

SEQ ID NO: 1235186 - RNA, 19 nt, Homo sapiens
  misc_RNA (1)...(19): siRNA sense strand
ggacaucucuuagcccaua

SEQ ID NO: 1235187 - RNA, 19 nt, Homo sapiens
  misc_RNA (1)...(19): siRNA sense strand
ugaaggaacuugugagauu

SEQ ID NO: 1235188 - RNA, 19 nt, Homo sapiens
  misc_RNA (1)...(19): siRNA sense strand
ggaaaggccuucuagagau

SEQ ID NO: 1235189 - RNA, 19 nt, Homo sapiens
  misc_RNA (1)...(19): siRNA sense strand
gagaagagauugauuuguc

SEQ ID NO: 1235190 - RNA, 19 nt, Homo sapiens
  misc_RNA (1)...(19): siRNA sense strand
ggacagcacucaacucaag

SEQ ID NO: 1235191 - RNA, 19 nt, Homo sapiens
  misc_RNA (1)...(19): siRNA sense strand
gccaauaaaucuacaaaug

SEQ ID NO: 1235192 - RNA, 19 nt, Homo sapiens
  misc_RNA (1)...(19): siRNA sense strand
gcacucaacucaagcacaa

SEQ ID NO: 1235193 - RNA, 19 nt, Homo sapiens
  misc_RNA (1)...(19): siRNA sense strand
gagaugagaguguuaguaa

SEQ ID NO: 1235194 - RNA, 19 nt, Homo sapiens
  misc_RNA (1)...(19): siRNA sense strand
agaauuagaugcacaugaa

SEQ ID NO: 1235195 - RNA, 19 nt, Homo sapiens
  misc_RNA (1)...(19): siRNA sense strand
gaaucgcuuucacauauuu

SEQ ID NO: 1235196 - RNA, 19 nt, Homo sapiens
  misc_RNA (1)...(19): siRNA sense strand
aaauagaagugcaaccuaa

SEQ ID NO: 1235197 - RNA, 19 nt, Homo sapiens
  misc_RNA (1)...(19): siRNA sense strand
gaagaaacuuggcaucaac

SEQ ID NO: 1235198 - RNA, 19 nt, Homo sapiens
  misc_RNA (1)...(19): siRNA sense strand
ggaccaacuugucuuccua

SEQ ID NO: 1235199 - RNA, 19 nt, Homo sapiens
  misc_RNA (1)...(19): siRNA sense strand
gaaguuccuccauaucaua

SEQ ID NO: 1235200 - RNA, 19 nt, Homo sapiens
  misc_RNA (1)...(19): siRNA sense strand
gacagcagaugaucgauau

SEQ ID NO: 1235201 - RNA, 19 nt, Homo sapiens
  misc_RNA (1)...(19): siRNA sense strand
gauaauaauugccaguaca

SEQ ID NO: 1235202 - RNA, 19 nt, Homo sapiens
  misc_RNA (1)...(19): siRNA sense strand
cauuaaaccugaaccagaa

SEQ ID NO: 1235203 - RNA, 19 nt, Homo sapiens
  misc_RNA (1)...(19): siRNA sense strand
gcaccuucauccuuaauau

SEQ ID NO: 1235204 - RNA, 19 nt, Homo sapiens
  misc_RNA (1)...(19): siRNA sense strand
aaauggaggucaugaaaug

SEQ ID NO: 1235205 - RNA, 19 nt, Homo sapiens
  misc_RNA (1)...(19): siRNA sense strand
ucaagaacuuccucauauu

SEQ ID NO: 1235206 - RNA, 19 nt, Homo sapiens
  misc_RNA (1)...(19): siRNA sense strand
uuacaucuaucucuccuaa

SEQ ID NO: 1235207 - RNA, 19 nt, Homo sapiens
  misc_RNA (1)...(19): siRNA sense strand
guaaauggaggucaugaaa

SEQ ID NO: 1235208 - RNA, 19 nt, Homo sapiens
  misc_RNA (1)...(19): siRNA sense strand
aaacugauauuggcagaaa

SEQ ID NO: 1235209 - RNA, 19 nt, Homo sapiens
  misc_RNA (1)...(19): siRNA sense strand
gaaaggccuucuagagauc

SEQ ID NO: 1235210 - RNA, 19 nt, Homo sapiens
  misc_RNA (1)...(19): siRNA sense strand
ccaccuccaucuacuuuaa

SEQ ID NO: 1235211 - RNA, 19 nt, Homo sapiens
  misc_RNA (1)...(19): siRNA sense strand
gcucaagaacuuccucaua

SEQ ID NO: 1235212 - RNA, 19 nt, Homo sapiens
  misc_RNA (1)...(19): siRNA sense strand
ggacagcagaugaucgaua

SEQ ID NO: 1235213 - RNA, 19 nt, Homo sapiens
  misc_RNA (1)...(19): siRNA sense strand
gaaggaacuugugagauuc

SEQ ID NO: 1235214 - RNA, 19 nt, Homo sapiens
  misc_RNA (1)...(19): siRNA sense strand
aaacuuggcaucaacagua

SEQ ID NO: 1235215 - RNA, 19 nt, Homo sapiens
  misc_RNA (1)...(19): siRNA sense strand
gggcaacugugagcauuaa

SEQ ID NO: 1235216 - RNA, 19 nt, Homo sapiens
  misc_RNA (1)...(19): siRNA sense strand
aagaugaccuacagauaaa

SEQ ID NO: 1235217 - RNA, 19 nt, Homo sapiens
  misc_RNA (1)...(19): siRNA sense strand
guaaagaacagcauaugau

SEQ ID NO: 1235218 - RNA, 19 nt, Homo sapiens
  misc_RNA (1)...(19): siRNA sense strand
agaucaagcugccauacua

SEQ ID NO: 1235219 - RNA, 19 nt, Homo sapiens
  misc_RNA (1)...(19): siRNA sense strand
gcagaaagaauacuagagu

SEQ ID NO: 1235220 - RNA, 19 nt, Homo sapiens
  misc_RNA (1)...(19): siRNA sense strand
ccacuuugcuuaccacauc

SEQ ID NO: 1235221 - RNA, 19 nt, Homo sapiens
  misc_RNA (1)...(19): siRNA sense strand
ggagguagaagggaagaua

SEQ ID NO: 1235222 - RNA, 19 nt, Homo sapiens
  misc_RNA (1)...(19): siRNA sense strand
gaaguacaguaucaacagu

SEQ ID NO: 1235223 - RNA, 19 nt, Homo sapiens
  misc_RNA (1)...(19): siRNA sense strand
aauaauaugucagccagua

SEQ ID NO: 1235224 - RNA, 19 nt, Homo sapiens
  misc_RNA (1)...(19): siRNA sense strand
ggacuuggacacucauuau

SEQ ID NO: 1235225 - RNA, 19 nt, Homo sapiens
  misc_RNA (1)...(19): siRNA sense strand
gaagcaagaacacagagaa

SEQ ID NO: 1235226 - RNA, 19 nt, Homo sapiens
  misc_RNA (1)...(19): siRNA sense strand
cucaagaacuuccucauau

SEQ ID NO: 1235227 - RNA, 19 nt, Homo sapiens
  misc_RNA (1)...(19): siRNA sense strand
gaacacagagaagagauug

SEQ ID NO: 1235228 - RNA, 19 nt, Homo sapiens
  misc_RNA (1)...(19): siRNA sense strand
caagaacuuccucauauug

SEQ ID NO: 1235229 - RNA, 19 nt, Homo sapiens
  misc_RNA (1)...(19): siRNA sense strand
gaagcugcagcccgauuua

SEQ ID NO: 1235230 - RNA, 19 nt, Homo sapiens
  misc_RNA (1)...(19): siRNA sense strand
cuuaauaugucacaguuug

SEQ ID NO: 1235231 - RNA, 19 nt, Homo sapiens
  misc_RNA (1)...(19): siRNA sense strand
uaccgggagucuucucuua

SEQ ID NO: 1235232 - RNA, 19 nt, Homo sapiens
  misc_RNA (1)...(19): siRNA sense strand
gcaaacuaauguuguguac

SEQ ID NO: 1235233 - RNA, 19 nt, Homo sapiens
  misc_RNA (1)...(19): siRNA sense strand
uaugauuccuucuccaauu

SEQ ID NO: 1235234 - RNA, 19 nt, Homo sapiens
  misc_RNA (1)...(19): siRNA sense strand
guacaaaaguucuggaaau

SEQ ID NO: 1235235 - RNA, 19 nt, Homo sapiens
  misc_RNA (1)...(19): siRNA sense strand
ccacuagacuggccuuuac

SEQ ID NO: 1235236 - RNA, 19 nt, Homo sapiens
  misc_RNA (1)...(19): siRNA sense strand
ucacucaccuguuccuuca

SEQ ID NO: 1235237 - RNA, 19 nt, Homo sapiens
  misc_RNA (1)...(19): siRNA sense strand
ucaguuccuucacccuuua

SEQ ID NO: 1235238 - RNA, 19 nt, Homo sapiens
  misc_RNA (1)...(19): siRNA sense strand
gcucaaugcuucuguccau

SEQ ID NO: 1235239 - RNA, 19 nt, Homo sapiens
  misc_RNA (1)...(19): siRNA sense strand
gggcucacauuguccuuga

SEQ ID NO: 1235240 - RNA, 19 nt, Homo sapiens
  misc_RNA (1)...(19): siRNA sense strand
ccaacuugucuuccuauua

SEQ ID NO: 1235241 - RNA, 19 nt, Homo sapiens
  misc_RNA (1)...(19): siRNA sense strand
ugaagaugaccuacagaua

SEQ ID NO: 1235242 - RNA, 19 nt, Homo sapiens
  misc_RNA (1)...(19): siRNA sense strand
ugucuucaguuccaucuuu

SEQ ID NO: 1235243 - RNA, 19 nt, Homo sapiens
  misc_RNA (1)...(19): siRNA sense strand
gcauccauuuacaucuuua

SEQ ID NO: 1235244 - RNA, 19 nt, Homo sapiens
  misc_RNA (1)...(19): siRNA sense strand
ccagcggucugcucaagaa

SEQ ID NO: 1235245 - RNA, 19 nt, Homo sapiens
  misc_RNA (1)...(19): siRNA sense strand
gcaagccaagagauaauaa

SEQ ID NO: 1235246 - RNA, 19 nt, Homo sapiens
  misc_RNA (1)...(19): siRNA sense strand
uuuacgaccucaugcauuu

SEQ ID NO: 1235247 - RNA, 19 nt, Homo sapiens
  misc_RNA (1)...(19): siRNA sense strand
agaagaaacuuggcaucaa

SEQ ID NO: 1235248 - RNA, 19 nt, Homo sapiens
  misc_RNA (1)...(19): siRNA sense strand
gaacagcauaugauuccuu

SEQ ID NO: 1235249 - RNA, 19 nt, Homo sapiens
  misc_RNA (1)...(19): siRNA sense strand
gagauaauaauugccagua

SEQ ID NO: 1235250 - RNA, 19 nt, Homo sapiens
  misc_RNA (1)...(19): siRNA sense strand
gccaagagauaauaauugc

SEQ ID NO: 1235251 - RNA, 19 nt, Homo sapiens
  misc_RNA (1)...(19): siRNA sense strand
ggaagugugacagaagaua

SEQ ID NO: 1235252 - RNA, 19 nt, Homo sapiens
  misc_RNA (1)...(19): siRNA sense strand
gagaagaaacuuggcauca

SEQ ID NO: 1235253 - RNA, 19 nt, Homo sapiens
  misc_RNA (1)...(19): siRNA sense strand
gugcauccauuuacaucuu

SEQ ID NO: 1235254 - RNA, 19 nt, Homo sapiens
  misc_RNA (1)...(19): siRNA sense strand
cagcagaugaucgauauuu

SEQ ID NO: 1235255 - RNA, 19 nt, Homo sapiens
  misc_RNA (1)...(19): siRNA sense strand
cuuaccacaucauggauua

SEQ ID NO: 1235256 - RNA, 19 nt, Homo sapiens
  misc_RNA (1)...(19): siRNA sense strand
acagagaagagauugauuu

SEQ ID NO: 1235257 - RNA, 19 nt, Homo sapiens
  misc_RNA (1)...(19): siRNA sense strand
gggaagauaaucagggaaa

SEQ ID NO: 1235258 - RNA, 19 nt, Homo sapiens
  misc_RNA (1)...(19): siRNA sense strand
gcccaaguauucaaauuac

SEQ ID NO: 1235259 - RNA, 19 nt, Homo sapiens
  misc_RNA (1)...(19): siRNA sense strand
cagaagaucgagagccuaa

SEQ ID NO: 1235260 - RNA, 19 nt, Homo sapiens
  misc_RNA (1)...(19): siRNA sense strand
gggauaucauuguucaaau

SEQ ID NO: 1235261 - RNA, 19 nt, Homo sapiens
  misc_RNA (1)...(19): siRNA sense strand
augcaacucuuucugguuu

SEQ ID NO: 1235262 - RNA, 19 nt, Homo sapiens
  misc_RNA (1)...(19): siRNA sense strand
gaugagaguguuaguaaag

SEQ ID NO: 1235263 - RNA, 19 nt, Homo sapiens
  misc_RNA (1)...(19): siRNA sense strand
cgacuuguguuucguguac

SEQ ID NO: 1235264 - RNA, 19 nt, Homo sapiens
  misc_RNA (1)...(19): siRNA sense strand
aaacuccgcaauucagaua

SEQ ID NO: 1235265 - RNA, 19 nt, Homo sapiens
  misc_RNA (1)...(19): siRNA sense strand
aauuagagcuguguucaga

SEQ ID NO: 1235266 - RNA, 19 nt, Homo sapiens
  misc_RNA (1)...(19): siRNA sense strand
ucaaauacaggacaaagau

SEQ ID NO: 1235267 - RNA, 19 nt, Homo sapiens
  misc_RNA (1)...(19): siRNA sense strand
uggacaaugugaacugaaa

SEQ ID NO: 1235268 - RNA, 19 nt, Homo sapiens
  misc_RNA (1)...(19): siRNA sense strand
cgacuucaaacucgucuuu

SEQ ID NO: 1235269 - RNA, 19 nt, Homo sapiens
  misc_RNA (1)...(19): siRNA sense strand
uccaguggcugaccagauu

SEQ ID NO: 1235270 - RNA, 19 nt, Homo sapiens
  misc_RNA (1)...(19): siRNA sense strand
caaccacugucauccauac

SEQ ID NO: 1235271 - RNA, 19 nt, Homo sapiens
  misc_RNA (1)...(19): siRNA sense strand
caucccaucugccacaguu

SEQ ID NO: 1235272 - RNA, 19 nt, Homo sapiens
  misc_RNA (1)...(19): siRNA sense strand
agcagaugaucgauauuua

SEQ ID NO: 1235273 - RNA, 19 nt, Homo sapiens
  misc_RNA (1)...(19): siRNA sense strand
ugaagcuccugggcuauaa

SEQ ID NO: 1235274 - RNA, 19 nt, Homo sapiens
  misc_RNA (1)...(19): siRNA sense strand
gagguagaagggaagauaa

SEQ ID NO: 1235275 - RNA, 19 nt, Homo sapiens
  misc_RNA (1)...(19): siRNA sense strand
gagccuaacuuugcaacca

SEQ ID NO: 1235276 - RNA, 19 nt, Homo sapiens
  misc_RNA (1)...(19): siRNA sense strand
ugagaguguuaguaaagaa

SEQ ID NO: 1235277 - RNA, 19 nt, Homo sapiens
  misc_RNA (1)...(19): siRNA sense strand
gaaguuugauuugcuccau

SEQ ID NO: 1235278 - RNA, 19 nt, Homo sapiens
  misc_RNA (1)...(19): siRNA sense strand
gcaagaacacagagaagag

SEQ ID NO: 1235279 - RNA, 19 nt, Homo sapiens
  misc_RNA (1)...(19): siRNA sense strand
gaucgagagccuaacuuug

SEQ ID NO: 1235280 - RNA, 19 nt, Homo sapiens
  misc_RNA (1)...(19): siRNA sense strand
ucucaucccuuggcuaguu

SEQ ID NO: 1235281 - RNA, 19 nt, Homo sapiens
  misc_RNA (1)...(19): siRNA sense strand
gauucaggguguucacaug

SEQ ID NO: 1235282 - RNA, 19 nt, Homo sapiens
  misc_RNA (1)...(19): siRNA sense strand
caacuugucuuccuauuaa

SEQ ID NO: 1235283 - RNA, 19 nt, Homo sapiens
  misc_RNA (1)...(19): siRNA sense strand
gaagaugaccuacagauaa

SEQ ID NO: 1235284 - RNA, 19 nt, Homo sapiens
  misc_RNA (1)...(19): siRNA sense strand
gaagauacguggcucaaug

SEQ ID NO: 1235285 - RNA, 19 nt, Homo sapiens
  misc_RNA (1)...(19): siRNA sense strand
ggacagagaaguuugauuu

SEQ ID NO: 1235286 - RNA, 19 nt, Homo sapiens
  misc_RNA (1)...(19): siRNA sense strand
ggacaucucuuagcccaua

SEQ ID NO: 1235287 - RNA, 19 nt, Homo sapiens
  misc_RNA (1)...(19): siRNA sense strand
ugaaggaacuugugagauu

SEQ ID NO: 1235288 - RNA, 19 nt, Homo sapiens
  misc_RNA (1)...(19): siRNA sense strand
ggaaaggccuucuagagau

SEQ ID NO: 1235289 - RNA, 19 nt, Homo sapiens
  misc_RNA (1)...(19): siRNA sense strand
gagaagagauugauuuguc

SEQ ID NO: 1235290 - RNA, 19 nt, Homo sapiens
  misc_RNA (1)...(19): siRNA sense strand
ggacagcacucaacucaag

SEQ ID NO: 1235291 - RNA, 19 nt, Homo sapiens
  misc_RNA (1)...(19): siRNA sense strand
gccaauaaaucuacaaaug

SEQ ID NO: 1235292 - RNA, 19 nt, Homo sapiens
  misc_RNA (1)...(19): siRNA sense strand
gcacucaacucaagcacaa

SEQ ID NO: 1235293 - RNA, 19 nt, Homo sapiens
  misc_RNA (1)...(19): siRNA sense strand
gagaugagaguguuaguaa

SEQ ID NO: 1235294 - RNA, 19 nt, Homo sapiens
  misc_RNA (1)...(19): siRNA sense strand
agaauuagaugcacaugaa

SEQ ID NO: 1235295 - RNA, 19 nt, Homo sapiens
  misc_RNA (1)...(19): siRNA sense strand
gaaucgcuuucacauauuu

SEQ ID NO: 1235296 - RNA, 19 nt, Homo sapiens
  misc_RNA (1)...(19): siRNA sense strand
aaauagaagugcaaccuaa

SEQ ID NO: 1235297 - RNA, 19 nt, Homo sapiens
  misc_RNA (1)...(19): siRNA sense strand
gaagaaacuuggcaucaac

SEQ ID NO: 1235298 - RNA, 19 nt, Homo sapiens
  misc_RNA (1)...(19): siRNA sense strand
ggaccaacuugucuuccua

SEQ ID NO: 1235299 - RNA, 19 nt, Homo sapiens
  misc_RNA (1)...(19): siRNA sense strand
gaaguuccuccauaucaua

SEQ ID NO: 1235300 - RNA, 19 nt, Homo sapiens
  misc_RNA (1)...(19): siRNA sense strand
gacagcagaugaucgauau

SEQ ID NO: 1235301 - RNA, 19 nt, Homo sapiens
  misc_RNA (1)...(19): siRNA sense strand
gauaauaauugccaguaca

SEQ ID NO: 1235302 - RNA, 19 nt, Homo sapiens
  misc_RNA (1)...(19): siRNA sense strand
cauuaaaccugaaccagaa

SEQ ID NO: 1235303 - RNA, 19 nt, Homo sapiens
  misc_RNA (1)...(19): siRNA sense strand
gcaccuucauccuuaauau

SEQ ID NO: 1235304 - RNA, 19 nt, Homo sapiens
  misc_RNA (1)...(19): siRNA sense strand
aaauggaggucaugaaaug

SEQ ID NO: 1235305 - RNA, 19 nt, Homo sapiens
  misc_RNA (1)...(19): siRNA sense strand
ucaagaacuuccucauauu

SEQ ID NO: 1235306 - RNA, 19 nt, Homo sapiens
  misc_RNA (1)...(19): siRNA sense strand
uuacaucuaucucuccuaa

SEQ ID NO: 1235307 - RNA, 19 nt, Homo sapiens
  misc_RNA (1)...(19): siRNA sense strand
guaaauggaggucaugaaa

SEQ ID NO: 1235308 - RNA, 19 nt, Homo sapiens
  misc_RNA (1)...(19): siRNA sense strand
aaacugauauuggcagaaa

SEQ ID NO: 1235309 - RNA, 19 nt, Homo sapiens
  misc_RNA (1)...(19): siRNA sense strand
gaaaggccuucuagagauc

SEQ ID NO: 1235310 - RNA, 19 nt, Homo sapiens
  misc_RNA (1)...(19): siRNA sense strand
ccaccuccaucuacuuuaa

SEQ ID NO: 1235311 - RNA, 19 nt, Homo sapiens
  misc_RNA (1)...(19): siRNA sense strand
gcucaagaacuuccucaua

SEQ ID NO: 1235312 - RNA, 19 nt, Homo sapiens
  misc_RNA (1)...(19): siRNA sense strand
ggacagcagaugaucgaua

SEQ ID NO: 1235313 - RNA, 19 nt, Homo sapiens
  misc_RNA (1)...(19): siRNA sense strand
gaaggaacuugugagauuc

SEQ ID NO: 1235314 - RNA, 19 nt, Homo sapiens
  misc_RNA (1)...(19): siRNA sense strand
aaacuuggcaucaacagua

SEQ ID NO: 1235315 - RNA, 19 nt, Homo sapiens
  misc_RNA (1)...(19): siRNA sense strand
gggcaacugugagcauuaa

SEQ ID NO: 1235316 - RNA, 19 nt, Homo sapiens
  misc_RNA (1)...(19): siRNA sense strand
aagaugaccuacagauaaa

SEQ ID NO: 1235317 - RNA, 19 nt, Homo sapiens
  misc_RNA (1)...(19): siRNA sense strand
guaaagaacagcauaugau

SEQ ID NO: 1235318 - RNA, 19 nt, Homo sapiens
  misc_RNA (1)...(19): siRNA sense strand
agaucaagcugccauacua

SEQ ID NO: 1235319 - RNA, 19 nt, Homo sapiens
  misc_RNA (1)...(19): siRNA sense strand
gcagaaagaauacuagagu

SEQ ID NO: 1235320 - RNA, 19 nt, Homo sapiens
  misc_RNA (1)...(19): siRNA sense strand
ccacuuugcuuaccacauc

SEQ ID NO: 1235321 - RNA, 19 nt, Homo sapiens
  misc_RNA (1)...(19): siRNA sense strand
ggagguagaagggaagaua

SEQ ID NO: 1235322 - RNA, 19 nt, Homo sapiens
  misc_RNA (1)...(19): siRNA sense strand
gaaguacaguaucaacagu

SEQ ID NO: 1235323 - RNA, 19 nt, Homo sapiens
  misc_RNA (1)...(19): siRNA sense strand
aauaauaugucagccagua

SEQ ID NO: 1235324 - RNA, 19 nt, Homo sapiens
  misc_RNA (1)...(19): siRNA sense strand
ggacuuggacacucauuau

SEQ ID NO: 1235325 - RNA, 19 nt, Homo sapiens
  misc_RNA (1)...(19): siRNA sense strand
gaagcaagaacacagagaa

SEQ ID NO: 1235326 - RNA, 19 nt, Homo sapiens
  misc_RNA (1)...(19): siRNA sense strand
cucaagaacuuccucauau

SEQ ID NO: 1235327 - RNA, 19 nt, Homo sapiens
  misc_RNA (1)...(19): siRNA sense strand
gaacacagagaagagauug

SEQ ID NO: 1235328 - RNA, 19 nt, Homo sapiens
  misc_RNA (1)...(19): siRNA sense strand
caagaacuuccucauauug

SEQ ID NO: 1235329 - RNA, 19 nt, Homo sapiens
  misc_RNA (1)...(19): siRNA sense strand
gaagcugcagcccgauuua

SEQ ID NO: 1235330 - RNA, 19 nt, Homo sapiens
  misc_RNA (1)...(19): siRNA sense strand
cuuaauaugucacaguuug

SEQ ID NO: 1235331 - RNA, 19 nt, Homo sapiens
  misc_RNA (1)...(19): siRNA sense strand
uaccgggagucuucucuua

SEQ ID NO: 1235332 - RNA, 19 nt, Homo sapiens
  misc_RNA (1)...(19): siRNA sense strand
gcaaacuaauguuguguac

SEQ ID NO: 1235333 - RNA, 19 nt, Homo sapiens
  misc_RNA (1)...(19): siRNA sense strand
uaugauuccuucuccaauu

SEQ ID NO: 1235334 - RNA, 19 nt, Homo sapiens
  misc_RNA (1)...(19): siRNA sense strand
guacaaaaguucuggaaau

SEQ ID NO: 1235335 - RNA, 19 nt, Homo sapiens
  misc_RNA (1)...(19): siRNA sense strand
ccacuagacuggccuuuac

SEQ ID NO: 1235336 - RNA, 19 nt, Homo sapiens
  misc_RNA (1)...(19): siRNA sense strand
ucacucaccuguuccuuca

SEQ ID NO: 1235337 - RNA, 19 nt, Homo sapiens
  misc_RNA (1)...(19): siRNA sense strand
ucaguuccuucacccuuua

SEQ ID NO: 1235338 - RNA, 19 nt, Homo sapiens
  misc_RNA (1)...(19): siRNA sense strand
gcucaaugcuucuguccau

SEQ ID NO: 1235339 - RNA, 19 nt, Homo sapiens
  misc_RNA (1)...(19): siRNA sense strand
gggcucacauuguccuuga

SEQ ID NO: 1235340 - RNA, 19 nt, Homo sapiens
  misc_RNA (1)...(19): siRNA sense strand
ccaacuugucuuccuauua

SEQ ID NO: 1235341 - RNA, 19 nt, Homo sapiens
  misc_RNA (1)...(19): siRNA sense strand
ugaagaugaccuacagaua

SEQ ID NO: 1235342 - RNA, 19 nt, Homo sapiens
  misc_RNA (1)...(19): siRNA sense strand
ugucuucaguuccaucuuu

SEQ ID NO: 1235343 - RNA, 19 nt, Homo sapiens
  misc_RNA (1)...(19): siRNA sense strand
gcauccauuuacaucuuua

SEQ ID NO: 1235344 - RNA, 19 nt, Homo sapiens
  misc_RNA (1)...(19): siRNA sense strand
ccagcggucugcucaagaa

SEQ ID NO: 1235345 - RNA, 19 nt, Homo sapiens
  misc_RNA (1)...(19): siRNA sense strand
gcaagccaagagauaauaa

SEQ ID NO: 1235346 - RNA, 19 nt, Homo sapiens
  misc_RNA (1)...(19): siRNA sense strand
uuuacgaccucaugcauuu

SEQ ID NO: 1235347 - RNA, 19 nt, Homo sapiens
  misc_RNA (1)...(19): siRNA sense strand
agaagaaacuuggcaucaa

SEQ ID NO: 1235348 - RNA, 19 nt, Homo sapiens
  misc_RNA (1)...(19): siRNA sense strand
gaacagcauaugauuccuu

SEQ ID NO: 1235349 - RNA, 19 nt, Homo sapiens
  misc_RNA (1)...(19): siRNA sense strand
gagauaauaauugccagua

SEQ ID NO: 1235350 - RNA, 19 nt, Homo sapiens
  misc_RNA (1)...(19): siRNA sense strand
gccaagagauaauaauugc

SEQ ID NO: 1235351 - RNA, 19 nt, Homo sapiens
  misc_RNA (1)...(19): siRNA sense strand
ggaagugugacagaagaua

SEQ ID NO: 1235352 - RNA, 19 nt, Homo sapiens
  misc_RNA (1)...(19): siRNA sense strand
gagaagaaacuuggcauca

SEQ ID NO: 1235353 - RNA, 19 nt, Homo sapiens
  misc_RNA (1)...(19): siRNA sense strand
gugcauccauuuacaucuu

SEQ ID NO: 1235354 - RNA, 19 nt, Homo sapiens
  misc_RNA (1)...(19): siRNA sense strand
cagcagaugaucgauauuu

SEQ ID NO: 1235355 - RNA, 19 nt, Homo sapiens
  misc_RNA (1)...(19): siRNA sense strand
cuuaccacaucauggauua

SEQ ID NO: 1235356 - RNA, 19 nt, Homo sapiens
  misc_RNA (1)...(19): siRNA sense strand
acagagaagagauugauuu

SEQ ID NO: 1235357 - RNA, 19 nt, Homo sapiens
  misc_RNA (1)...(19): siRNA sense strand
gggaagauaaucagggaaa

SEQ ID NO: 1235358 - RNA, 19 nt, Homo sapiens
  misc_RNA (1)...(19): siRNA sense strand
gcccaaguauucaaauuac

SEQ ID NO: 1235359 - RNA, 19 nt, Homo sapiens
  misc_RNA (1)...(19): siRNA sense strand
cagaagaucgagagccuaa

SEQ ID NO: 1235360 - RNA, 19 nt, Homo sapiens
  misc_RNA (1)...(19): siRNA sense strand
gggauaucauuguucaaau

SEQ ID NO: 1235361 - RNA, 19 nt, Homo sapiens
  misc_RNA (1)...(19): siRNA sense strand
augcaacucuuucugguuu

SEQ ID NO: 1235362 - RNA, 19 nt, Homo sapiens
  misc_RNA (1)...(19): siRNA sense strand
gaugagaguguuaguaaag

SEQ ID NO: 1235363 - RNA, 19 nt, Homo sapiens
  misc_RNA (1)...(19): siRNA sense strand
cgacuuguguuucguguac

SEQ ID NO: 1235364 - RNA, 19 nt, Homo sapiens
  misc_RNA (1)...(19): siRNA sense strand
aaacuccgcaauucagaua

SEQ ID NO: 1235365 - RNA, 19 nt, Homo sapiens
  misc_RNA (1)...(19): siRNA sense strand
aauuagagcuguguucaga

SEQ ID NO: 1235366 - RNA, 19 nt, Homo sapiens
  misc_RNA (1)...(19): siRNA sense strand
ucaaauacaggacaaagau

SEQ ID NO: 1235367 - RNA, 19 nt, Homo sapiens
  misc_RNA (1)...(19): siRNA sense strand
uggacaaugugaacugaaa

SEQ ID NO: 1235368 - RNA, 19 nt, Homo sapiens
  misc_RNA (1)...(19): siRNA sense strand
cgacuucaaacucgucuuu

SEQ ID NO: 1235369 - RNA, 19 nt, Homo sapiens
  misc_RNA (1)...(19): siRNA sense strand
uccaguggcugaccagauu

SEQ ID NO: 1235370 - RNA, 19 nt, Homo sapiens
  misc_RNA (1)...(19): siRNA sense strand
caaccacugucauccauac

SEQ ID NO: 1235371 - RNA, 19 nt, Homo sapiens
  misc_RNA (1)...(19): siRNA sense strand
caucccaucugccacaguu

SEQ ID NO: 1235372 - RNA, 19 nt, Homo sapiens
  misc_RNA (1)...(19): siRNA sense strand
agcagaugaucgauauuua

SEQ ID NO: 1235373 - RNA, 19 nt, Homo sapiens
  misc_RNA (1)...(19): siRNA sense strand
ugaagcuccugggcuauaa

SEQ ID NO: 1235374 - RNA, 19 nt, Homo sapiens
  misc_RNA (1)...(19): siRNA sense strand
gagguagaagggaagauaa

SEQ ID NO: 1235375 - RNA, 19 nt, Homo sapiens
  misc_RNA (1)...(19): siRNA sense strand
gagccuaacuuugcaacca

SEQ ID NO: 1235376 - RNA, 19 nt, Homo sapiens
  misc_RNA (1)...(19): siRNA sense strand
ugagaguguuaguaaagaa

SEQ ID NO: 1235377 - RNA, 19 nt, Homo sapiens
  misc_RNA (1)...(19): siRNA sense strand
gaaguuugauuugcuccau

SEQ ID NO: 1235378 - RNA, 19 nt, Homo sapiens
  misc_RNA (1)...(19): siRNA sense strand
gcaagaacacagagaagag

SEQ ID NO: 1235379 - RNA, 19 nt, Homo sapiens
  misc_RNA (1)...(19): siRNA sense strand
gaucgagagccuaacuuug

SEQ ID NO: 1235380 - RNA, 19 nt, Homo sapiens
  misc_RNA (1)...(19): siRNA sense strand
ucucaucccuuggcuaguu

SEQ ID NO: 1235381 - RNA, 19 nt, Homo sapiens
  misc_RNA (1)...(19): siRNA sense strand
gauucaggguguucacaug

SEQ ID NO: 1235382 - RNA, 19 nt, Homo sapiens
  misc_RNA (1)...(19): siRNA sense strand
caacuugucuuccuauuaa

SEQ ID NO: 1235383 - RNA, 19 nt, Homo sapiens
  misc_RNA (1)...(19): siRNA sense strand
gaagaugaccuacagauaa

SEQ ID NO: 1235384 - RNA, 19 nt, Homo sapiens
  misc_RNA (1)...(19): siRNA sense strand
gaagauacguggcucaaug

SEQ ID NO: 1235385 - RNA, 19 nt, Homo sapiens
  misc_RNA (1)...(19): siRNA sense strand
ggacagagaaguuugauuu

SEQ ID NO: 1235386 - RNA, 19 nt, Homo sapiens
  misc_RNA (1)...(19): siRNA sense strand
ggacaucucuuagcccaua

SEQ ID NO: 1235387 - RNA, 19 nt, Homo sapiens
  misc_RNA (1)...(19): siRNA sense strand
ugaaggaacuugugagauu

SEQ ID NO: 1235388 - RNA, 19 nt, Homo sapiens
  misc_RNA (1)...(19): siRNA sense strand
ggaaaggccuucuagagau

SEQ ID NO: 1235389 - RNA, 19 nt, Homo sapiens
  misc_RNA (1)...(19): siRNA sense strand
gagaagagauugauuuguc

SEQ ID NO: 1235390 - RNA, 19 nt, Homo sapiens
  misc_RNA (1)...(19): siRNA sense strand
ggacagcacucaacucaag

SEQ ID NO: 1235391 - RNA, 19 nt, Homo sapiens
  misc_RNA (1)...(19): siRNA sense strand
gccaauaaaucuacaaaug

SEQ ID NO: 1235392 - RNA, 19 nt, Homo sapiens
  misc_RNA (1)...(19): siRNA sense strand
gcacucaacucaagcacaa

SEQ ID NO: 1235393 - RNA, 19 nt, Homo sapiens
  misc_RNA (1)...(19): siRNA sense strand
gagaugagaguguuaguaa

SEQ ID NO: 1235394 - RNA, 19 nt, Homo sapiens
  misc_RNA (1)...(19): siRNA sense strand
agaauuagaugcacaugaa

SEQ ID NO: 1235395 - RNA, 19 nt, Homo sapiens
  misc_RNA (1)...(19): siRNA sense strand
gaaucgcuuucacauauuu

SEQ ID NO: 1235396 - RNA, 19 nt, Homo sapiens
  misc_RNA (1)...(19): siRNA sense strand
aaauagaagugcaaccuaa

SEQ ID NO: 1235397 - RNA, 19 nt, Homo sapiens
  misc_RNA (1)...(19): siRNA sense strand
gaagaaacuuggcaucaac

SEQ ID NO: 1235398 - RNA, 19 nt, Homo sapiens
  misc_RNA (1)...(19): siRNA sense strand
ggaccaacuugucuuccua

SEQ ID NO: 1235399 - RNA, 19 nt, Homo sapiens
  misc_RNA (1)...(19): siRNA sense strand
gaaguuccuccauaucaua

SEQ ID NO: 1235400 - RNA, 19 nt, Homo sapiens
  misc_RNA (1)...(19): siRNA sense strand
gacagcagaugaucgauau

SEQ ID NO: 1235401 - RNA, 19 nt, Homo sapiens
  misc_RNA (1)...(19): siRNA sense strand
gauaauaauugccaguaca

SEQ ID NO: 1235402 - RNA, 19 nt, Homo sapiens
  misc_RNA (1)...(19): siRNA sense strand
cauuaaaccugaaccagaa

SEQ ID NO: 1235403 - RNA, 19 nt, Homo sapiens
  misc_RNA (1)...(19): siRNA sense strand
gcaccuucauccuuaauau

SEQ ID NO: 1235404 - RNA, 19 nt, Homo sapiens
  misc_RNA (1)...(19): siRNA sense strand
aaauggaggucaugaaaug

SEQ ID NO: 1235405 - RNA, 19 nt, Homo sapiens
  misc_RNA (1)...(19): siRNA sense strand
ucaagaacuuccucauauu

SEQ ID NO: 1235406 - RNA, 19 nt, Homo sapiens
  misc_RNA (1)...(19): siRNA sense strand
uuacaucuaucucuccuaa

SEQ ID NO: 1235407 - RNA, 19 nt, Homo sapiens
  misc_RNA (1)...(19): siRNA sense strand
guaaauggaggucaugaaa

SEQ ID NO: 1235408 - RNA, 19 nt, Homo sapiens
  misc_RNA (1)...(19): siRNA sense strand
aaacugauauuggcagaaa

SEQ ID NO: 1235409 - RNA, 19 nt, Homo sapiens
  misc_RNA (1)...(19): siRNA sense strand
gaaaggccuucuagagauc

SEQ ID NO: 1235410 - RNA, 19 nt, Homo sapiens
  misc_RNA (1)...(19): siRNA sense strand
ccaccuccaucuacuuuaa

SEQ ID NO: 1235411 - RNA, 19 nt, Homo sapiens
  misc_RNA (1)...(19): siRNA sense strand
gcucaagaacuuccucaua

SEQ ID NO: 1235412 - RNA, 19 nt, Homo sapiens
  misc_RNA (1)...(19): siRNA sense strand
ggacagcagaugaucgaua

SEQ ID NO: 1235413 - RNA, 19 nt, Homo sapiens
  misc_RNA (1)...(19): siRNA sense strand
gaaggaacuugugagauuc

SEQ ID NO: 1235414 - RNA, 19 nt, Homo sapiens
  misc_RNA (1)...(19): siRNA sense strand
aaacuuggcaucaacagua

SEQ ID NO: 1235415 - RNA, 19 nt, Homo sapiens
  misc_RNA (1)...(19): siRNA sense strand
gggcaacugugagcauuaa

SEQ ID NO: 1235416 - RNA, 19 nt, Homo sapiens
  misc_RNA (1)...(19): siRNA sense strand
aagaugaccuacagauaaa

SEQ ID NO: 1235417 - RNA, 19 nt, Homo sapiens
  misc_RNA (1)...(19): siRNA sense strand
guaaagaacagcauaugau

SEQ ID NO: 1235418 - RNA, 19 nt, Homo sapiens
  misc_RNA (1)...(19): siRNA sense strand
agaucaagcugccauacua

SEQ ID NO: 1235419 - RNA, 19 nt, Homo sapiens
  misc_RNA (1)...(19): siRNA sense strand
gcagaaagaauacuagagu

SEQ ID NO: 1235420 - RNA, 19 nt, Homo sapiens
  misc_RNA (1)...(19): siRNA sense strand
ccacuuugcuuaccacauc

SEQ ID NO: 1235421 - RNA, 19 nt, Homo sapiens
  misc_RNA (1)...(19): siRNA sense strand
ggagguagaagggaagaua

SEQ ID NO: 1235422 - RNA, 19 nt, Homo sapiens
  misc_RNA (1)...(19): siRNA sense strand
gaaguacaguaucaacagu

SEQ ID NO: 1235423 - RNA, 19 nt, Homo sapiens
  misc_RNA (1)...(19): siRNA sense strand
aauaauaugucagccagua

SEQ ID NO: 1235424 - RNA, 19 nt, Homo sapiens
  misc_RNA (1)...(19): siRNA sense strand
ggacuuggacacucauuau

SEQ ID NO: 1235425 - RNA, 19 nt, Homo sapiens
  misc_RNA (1)...(19): siRNA sense strand
gaagcaagaacacagagaa

SEQ ID NO: 1235426 - RNA, 19 nt, Homo sapiens
  misc_RNA (1)...(19): siRNA sense strand
cucaagaacuuccucauau

SEQ ID NO: 1235427 - RNA, 19 nt, Homo sapiens
  misc_RNA (1)...(19): siRNA sense strand
gaacacagagaagagauug

SEQ ID NO: 1235428 - RNA, 19 nt, Homo sapiens
  misc_RNA (1)...(19): siRNA sense strand
caagaacuuccucauauug

SEQ ID NO: 1235429 - RNA, 19 nt, Homo sapiens
  misc_RNA (1)...(19): siRNA sense strand
gaagcugcagcccgauuua

SEQ ID NO: 1235430 - RNA, 19 nt, Homo sapiens
  misc_RNA (1)...(19): siRNA sense strand
cuuaauaugucacaguuug

SEQ ID NO: 1235431 - RNA, 19 nt, Homo sapiens
  misc_RNA (1)...(19): siRNA sense strand
uaccgggagucuucucuua

SEQ ID NO: 1235432 - RNA, 19 nt, Homo sapiens
  misc_RNA (1)...(19): siRNA sense strand
gcaaacuaauguuguguac

SEQ ID NO: 1235433 - RNA, 19 nt, Homo sapiens
  misc_RNA (1)...(19): siRNA sense strand
uaugauuccuucuccaauu

SEQ ID NO: 1235434 - RNA, 19 nt, Homo sapiens
  misc_RNA (1)...(19): siRNA sense strand
guacaaaaguucuggaaau

SEQ ID NO: 1235435 - RNA, 19 nt, Homo sapiens
  misc_RNA (1)...(19): siRNA sense strand
ccacuagacuggccuuuac

SEQ ID NO: 1235436 - RNA, 19 nt, Homo sapiens
  misc_RNA (1)...(19): siRNA sense strand
ucacucaccuguuccuuca

SEQ ID NO: 1235437 - RNA, 19 nt, Homo sapiens
  misc_RNA (1)...(19): siRNA sense strand
ucaguuccuucacccuuua

SEQ ID NO: 1235438 - RNA, 19 nt, Homo sapiens
  misc_RNA (1)...(19): siRNA sense strand
gcucaaugcuucuguccau

SEQ ID NO: 1235439 - RNA, 19 nt, Homo sapiens
  misc_RNA (1)...(19): siRNA sense strand
gggcucacauuguccuuga

SEQ ID NO: 1235440 - RNA, 19 nt, Homo sapiens
  misc_RNA (1)...(19): siRNA sense strand
ccaacuugucuuccuauua

SEQ ID NO: 1235441 - RNA, 19 nt, Homo sapiens
  misc_RNA (1)...(19): siRNA sense strand
ugaagaugaccuacagaua

SEQ ID NO: 1235442 - RNA, 19 nt, Homo sapiens
  misc_RNA (1)...(19): siRNA sense strand
ugucuucaguuccaucuuu

SEQ ID NO: 1235443 - RNA, 19 nt, Homo sapiens
  misc_RNA (1)...(19): siRNA sense strand
gcauccauuuacaucuuua

SEQ ID NO: 1235444 - RNA, 19 nt, Homo sapiens
  misc_RNA (1)...(19): siRNA sense strand
ccagcggucugcucaagaa

SEQ ID NO: 1235445 - RNA, 19 nt, Homo sapiens
  misc_RNA (1)...(19): siRNA sense strand
gcaagccaagagauaauaa

SEQ ID NO: 1235446 - RNA, 19 nt, Homo sapiens
  misc_RNA (1)...(19): siRNA sense strand
uuuacgaccucaugcauuu

SEQ ID NO: 1235447 - RNA, 19 nt, Homo sapiens
  misc_RNA (1)...(19): siRNA sense strand
agaagaaacuuggcaucaa

SEQ ID NO: 1235448 - RNA, 19 nt, Homo sapiens
  misc_RNA (1)...(19): siRNA sense strand
gaacagcauaugauuccuu

SEQ ID NO: 1235449 - RNA, 19 nt, Homo sapiens
  misc_RNA (1)...(19): siRNA sense strand
gagauaauaauugccagua

SEQ ID NO: 1235450 - RNA, 19 nt, Homo sapiens
  misc_RNA (1)...(19): siRNA sense strand
gccaagagauaauaauugc

SEQ ID NO: 1235451 - RNA, 19 nt, Homo sapiens
  misc_RNA (1)...(19): siRNA sense strand
ggaagugugacagaagaua

SEQ ID NO: 1235452 - RNA, 19 nt, Homo sapiens
  misc_RNA (1)...(19): siRNA sense strand
gagaagaaacuuggcauca

SEQ ID NO: 1235453 - RNA, 19 nt, Homo sapiens
  misc_RNA (1)...(19): siRNA sense strand
gugcauccauuuacaucuu

SEQ ID NO: 1235454 - RNA, 19 nt, Homo sapiens
  misc_RNA (1)...(19): siRNA sense strand
cagcagaugaucgauauuu

SEQ ID NO: 1235455 - RNA, 19 nt, Homo sapiens
  misc_RNA (1)...(19): siRNA sense strand
cuuaccacaucauggauua

SEQ ID NO: 1235456 - RNA, 19 nt, Homo sapiens
  misc_RNA (1)...(19): siRNA sense strand
acagagaagagauugauuu

SEQ ID NO: 1235457 - RNA, 19 nt, Homo sapiens
  misc_RNA (1)...(19): siRNA sense strand
gggaagauaaucagggaaa

SEQ ID NO: 1235458 - RNA, 19 nt, Homo sapiens
  misc_RNA (1)...(19): siRNA sense strand
gcccaaguauucaaauuac

SEQ ID NO: 1235459 - RNA, 19 nt, Homo sapiens
  misc_RNA (1)...(19): siRNA sense strand
cagaagaucgagagccuaa

SEQ ID NO: 1235460 - RNA, 19 nt, Homo sapiens
  misc_RNA (1)...(19): siRNA sense strand
gggauaucauuguucaaau

SEQ ID NO: 1235461 - RNA, 19 nt, Homo sapiens
  misc_RNA (1)...(19): siRNA sense strand
augcaacucuuucugguuu

SEQ ID NO: 1235462 - RNA, 19 nt, Homo sapiens
  misc_RNA (1)...(19): siRNA sense strand
gaugagaguguuaguaaag

SEQ ID NO: 1235463 - RNA, 19 nt, Homo sapiens
  misc_RNA (1)...(19): siRNA sense strand
cgacuuguguuucguguac

SEQ ID NO: 1235464 - RNA, 19 nt, Homo sapiens
  misc_RNA (1)...(19): siRNA sense strand
aaacuccgcaauucagaua

SEQ ID NO: 1235465 - RNA, 19 nt, Homo sapiens
  misc_RNA (1)...(19): siRNA sense strand
aauuagagcuguguucaga

SEQ ID NO: 1235466 - RNA, 19 nt, Homo sapiens
  misc_RNA (1)...(19): siRNA sense strand
ucaaauacaggacaaagau

SEQ ID NO: 1235467 - RNA, 19 nt, Homo sapiens
  misc_RNA (1)...(19): siRNA sense strand
uggacaaugugaacugaaa

SEQ ID NO: 1235468 - RNA, 19 nt, Homo sapiens
  misc_RNA (1)...(19): siRNA sense strand
cgacuucaaacucgucuuu

SEQ ID NO: 1235469 - RNA, 19 nt, Homo sapiens
  misc_RNA (1)...(19): siRNA sense strand
uccaguggcugaccagauu

SEQ ID NO: 1235470 - RNA, 19 nt, Homo sapiens
  misc_RNA (1)...(19): siRNA sense strand
caaccacugucauccauac

SEQ ID NO: 1235471 - RNA, 19 nt, Homo sapiens
  misc_RNA (1)...(19): siRNA sense strand
caucccaucugccacaguu

SEQ ID NO: 1235472 - RNA, 19 nt, Homo sapiens
  misc_RNA (1)...(19): siRNA sense strand
agcagaugaucgauauuua

SEQ ID NO: 1235473 - RNA, 19 nt, Homo sapiens
  misc_RNA (1)...(19): siRNA sense strand
ugaagcuccugggcuauaa

SEQ ID NO: 1235474 - RNA, 19 nt, Homo sapiens
  misc_RNA (1)...(19): siRNA sense strand
gagguagaagggaagauaa

SEQ ID NO: 1235475 - RNA, 19 nt, Homo sapiens
  misc_RNA (1)...(19): siRNA sense strand
gagccuaacuuugcaacca

SEQ ID NO: 1235476 - RNA, 19 nt, Homo sapiens
  misc_RNA (1)...(19): siRNA sense strand
ugagaguguuaguaaagaa

SEQ ID NO: 1235477 - RNA, 19 nt, Homo sapiens
  misc_RNA (1)...(19): siRNA sense strand
gaaguuugauuugcuccau

SEQ ID NO: 1235478 - RNA, 19 nt, Homo sapiens
  misc_RNA (1)...(19): siRNA sense strand
gcaagaacacagagaagag

SEQ ID NO: 1235479 - RNA, 19 nt, Homo sapiens
  misc_RNA (1)...(19): siRNA sense strand
gaucgagagccuaacuuug

SEQ ID NO: 1235480 - RNA, 19 nt, Homo sapiens
  misc_RNA (1)...(19): siRNA sense strand
ucucaucccuuggcuaguu

SEQ ID NO: 1235481 - RNA, 19 nt, Homo sapiens
  misc_RNA (1)...(19): siRNA sense strand
gauucaggguguucacaug

SEQ ID NO: 1235482 - RNA, 19 nt, Homo sapiens
  misc_RNA (1)...(19): siRNA sense strand
caacuugucuuccuauuaa

SEQ ID NO: 1235483 - RNA, 19 nt, Homo sapiens
  misc_RNA (1)...(19): siRNA sense strand
gaagaugaccuacagauaa

SEQ ID NO: 1235484 - RNA, 19 nt, Homo sapiens
  misc_RNA (1)...(19): siRNA sense strand
gaagauacguggcucaaug

SEQ ID NO: 1235485 - RNA, 19 nt, Homo sapiens
  misc_RNA (1)...(19): siRNA sense strand
ggacagagaaguuugauuu

SEQ ID NO: 1235486 - RNA, 19 nt, Homo sapiens
  misc_RNA (1)...(19): siRNA sense strand
ggacaucucuuagcccaua

SEQ ID NO: 1235487 - RNA, 19 nt, Homo sapiens
  misc_RNA (1)...(19): siRNA sense strand
ugaaggaacuugugagauu

SEQ ID NO: 1235488 - RNA, 19 nt, Homo sapiens
  misc_RNA (1)...(19): siRNA sense strand
ggaaaggccuucuagagau

SEQ ID NO: 1235489 - RNA, 19 nt, Homo sapiens
  misc_RNA (1)...(19): siRNA sense strand
gagaagagauugauuuguc

SEQ ID NO: 1235490 - RNA, 19 nt, Homo sapiens
  misc_RNA (1)...(19): siRNA sense strand
ggacagcacucaacucaag

SEQ ID NO: 1235491 - RNA, 19 nt, Homo sapiens
  misc_RNA (1)...(19): siRNA sense strand
gccaauaaaucuacaaaug

SEQ ID NO: 1235492 - RNA, 19 nt, Homo sapiens
  misc_RNA (1)...(19): siRNA sense strand
gcacucaacucaagcacaa

SEQ ID NO: 1235493 - RNA, 19 nt, Homo sapiens
  misc_RNA (1)...(19): siRNA sense strand
gagaugagaguguuaguaa

SEQ ID NO: 1235494 - RNA, 19 nt, Homo sapiens
  misc_RNA (1)...(19): siRNA sense strand
agaauuagaugcacaugaa

SEQ ID NO: 1235495 - RNA, 19 nt, Homo sapiens
  misc_RNA (1)...(19): siRNA sense strand
gaaucgcuuucacauauuu

SEQ ID NO: 1235496 - RNA, 19 nt, Homo sapiens
  misc_RNA (1)...(19): siRNA sense strand
aaauagaagugcaaccuaa

SEQ ID NO: 1235497 - RNA, 19 nt, Homo sapiens
  misc_RNA (1)...(19): siRNA sense strand
gaagaaacuuggcaucaac

SEQ ID NO: 1235498 - RNA, 19 nt, Homo sapiens
  misc_RNA (1)...(19): siRNA sense strand
ggaccaacuugucuuccua

SEQ ID NO: 1235499 - RNA, 19 nt, Homo sapiens
  misc_RNA (1)...(19): siRNA sense strand
gaaguuccuccauaucaua

SEQ ID NO: 1235500 - RNA, 19 nt, Homo sapiens
  misc_RNA (1)...(19): siRNA sense strand
gacagcagaugaucgauau

SEQ ID NO: 1235501 - RNA, 19 nt, Homo sapiens
  misc_RNA (1)...(19): siRNA sense strand
gauaauaauugccaguaca

SEQ ID NO: 1235502 - RNA, 19 nt, Homo sapiens
  misc_RNA (1)...(19): siRNA sense strand
cauuaaaccugaaccagaa

SEQ ID NO: 1235503 - RNA, 19 nt, Homo sapiens
  misc_RNA (1)...(19): siRNA sense strand
gcaccuucauccuuaauau

SEQ ID NO: 1235504 - RNA, 19 nt, Homo sapiens
  misc_RNA (1)...(19): siRNA sense strand
aaauggaggucaugaaaug

SEQ ID NO: 1235505 - RNA, 19 nt, Homo sapiens
  misc_RNA (1)...(19): siRNA sense strand
ucaagaacuuccucauauu

SEQ ID NO: 1235506 - RNA, 19 nt, Homo sapiens
  misc_RNA (1)...(19): siRNA sense strand
uuacaucuaucucuccuaa

SEQ ID NO: 1235507 - RNA, 19 nt, Homo sapiens
  misc_RNA (1)...(19): siRNA sense strand
guaaauggaggucaugaaa

SEQ ID NO: 1235508 - RNA, 19 nt, Homo sapiens
  misc_RNA (1)...(19): siRNA sense strand
aaacugauauuggcagaaa

SEQ ID NO: 1235509 - RNA, 19 nt, Homo sapiens
  misc_RNA (1)...(19): siRNA sense strand
gaaaggccuucuagagauc

SEQ ID NO: 1235510 - RNA, 19 nt, Homo sapiens
  misc_RNA (1)...(19): siRNA sense strand
ccaccuccaucuacuuuaa

SEQ ID NO: 1235511 - RNA, 19 nt, Homo sapiens
  misc_RNA (1)...(19): siRNA sense strand
gcucaagaacuuccucaua

SEQ ID NO: 1235512 - RNA, 19 nt, Homo sapiens
  misc_RNA (1)...(19): siRNA sense strand
ggacagcagaugaucgaua

SEQ ID NO: 1235513 - RNA, 19 nt, Homo sapiens
  misc_RNA (1)...(19): siRNA sense strand
gaaggaacuugugagauuc

SEQ ID NO: 1235514 - RNA, 19 nt, Homo sapiens
  misc_RNA (1)...(19): siRNA sense strand
aaacuuggcaucaacagua

SEQ ID NO: 1235515 - RNA, 19 nt, Homo sapiens
  misc_RNA (1)...(19): siRNA sense strand
gggcaacugugagcauuaa

SEQ ID NO: 1235516 - RNA, 19 nt, Homo sapiens
  misc_RNA (1)...(19): siRNA sense strand
aagaugaccuacagauaaa

SEQ ID NO: 1235517 - RNA, 19 nt, Homo sapiens
  misc_RNA (1)...(19): siRNA sense strand
guaaagaacagcauaugau

SEQ ID NO: 1235518 - RNA, 19 nt, Homo sapiens
  misc_RNA (1)...(19): siRNA sense strand
agaucaagcugccauacua

SEQ ID NO: 1235519 - RNA, 19 nt, Homo sapiens
  misc_RNA (1)...(19): siRNA sense strand
gcagaaagaauacuagagu

SEQ ID NO: 1235520 - RNA, 19 nt, Homo sapiens
  misc_RNA (1)...(19): siRNA sense strand
ccacuuugcuuaccacauc

SEQ ID NO: 1235521 - RNA, 19 nt, Homo sapiens
  misc_RNA (1)...(19): siRNA sense strand
ggagguagaagggaagaua

SEQ ID NO: 1235522 - RNA, 19 nt, Homo sapiens
  misc_RNA (1)...(19): siRNA sense strand
gaaguacaguaucaacagu

SEQ ID NO: 1235523 - RNA, 19 nt, Homo sapiens
  misc_RNA (1)...(19): siRNA sense strand
aauaauaugucagccagua

SEQ ID NO: 1235524 - RNA, 19 nt, Homo sapiens
  misc_RNA (1)...(19): siRNA sense strand
ggacuuggacacucauuau

SEQ ID NO: 1235525 - RNA, 19 nt, Homo sapiens
  misc_RNA (1)...(19): siRNA sense strand
gaagcaagaacacagagaa

SEQ ID NO: 1235526 - RNA, 19 nt, Homo sapiens
  misc_RNA (1)...(19): siRNA sense strand
cucaagaacuuccucauau

SEQ ID NO: 1235527 - RNA, 19 nt, Homo sapiens
  misc_RNA (1)...(19): siRNA sense strand
gaacacagagaagagauug

SEQ ID NO: 1235528 - RNA, 19 nt, Homo sapiens
  misc_RNA (1)...(19): siRNA sense strand
caagaacuuccucauauug

SEQ ID NO: 1235529 - RNA, 19 nt, Homo sapiens
  misc_RNA (1)...(19): siRNA sense strand
gaagcugcagcccgauuua

SEQ ID NO: 1235530 - RNA, 19 nt, Homo sapiens
  misc_RNA (1)...(19): siRNA sense strand
cuuaauaugucacaguuug

SEQ ID NO: 1235531 - RNA, 19 nt, Homo sapiens
  misc_RNA (1)...(19): siRNA sense strand
uaccgggagucuucucuua

SEQ ID NO: 1235532 - RNA, 19 nt, Homo sapiens
  misc_RNA (1)...(19): siRNA sense strand
gcaaacuaauguuguguac

SEQ ID NO: 1235533 - RNA, 19 nt, Homo sapiens
  misc_RNA (1)...(19): siRNA sense strand
uaugauuccuucuccaauu

SEQ ID NO: 1235534 - RNA, 19 nt, Homo sapiens
  misc_RNA (1)...(19): siRNA sense strand
guacaaaaguucuggaaau

SEQ ID NO: 1235535 - RNA, 19 nt, Homo sapiens
  misc_RNA (1)...(19): siRNA sense strand
ccacuagacuggccuuuac

SEQ ID NO: 1235536 - RNA, 19 nt, Homo sapiens
  misc_RNA (1)...(19): siRNA sense strand
ucacucaccuguuccuuca

SEQ ID NO: 1235537 - RNA, 19 nt, Homo sapiens
  misc_RNA (1)...(19): siRNA sense strand
ucaguuccuucacccuuua

SEQ ID NO: 1235538 - RNA, 19 nt, Homo sapiens
  misc_RNA (1)...(19): siRNA sense strand
gcucaaugcuucuguccau

SEQ ID NO: 1235539 - RNA, 19 nt, Homo sapiens
  misc_RNA (1)...(19): siRNA sense strand
gggcucacauuguccuuga

SEQ ID NO: 1235540 - RNA, 19 nt, Homo sapiens
  misc_RNA (1)...(19): siRNA sense strand
ccaacuugucuuccuauua

SEQ ID NO: 1235541 - RNA, 19 nt, Homo sapiens
  misc_RNA (1)...(19): siRNA sense strand
ugaagaugaccuacagaua

SEQ ID NO: 1235542 - RNA, 19 nt, Homo sapiens
  misc_RNA (1)...(19): siRNA sense strand
ugucuucaguuccaucuuu

SEQ ID NO: 1235543 - RNA, 19 nt, Homo sapiens
  misc_RNA (1)...(19): siRNA sense strand
gcauccauuuacaucuuua

SEQ ID NO: 1235544 - RNA, 19 nt, Homo sapiens
  misc_RNA (1)...(19): siRNA sense strand
ccagcggucugcucaagaa

SEQ ID NO: 1235545 - RNA, 19 nt, Homo sapiens
  misc_RNA (1)...(19): siRNA sense strand
gcaagccaagagauaauaa

SEQ ID NO: 1235546 - RNA, 19 nt, Homo sapiens
  misc_RNA (1)...(19): siRNA sense strand
uuuacgaccucaugcauuu

SEQ ID NO: 1235547 - RNA, 19 nt, Homo sapiens
  misc_RNA (1)...(19): siRNA sense strand
agaagaaacuuggcaucaa

SEQ ID NO: 1235548 - RNA, 19 nt, Homo sapiens
  misc_RNA (1)...(19): siRNA sense strand
gaacagcauaugauuccuu

SEQ ID NO: 1235549 - RNA, 19 nt, Homo sapiens
  misc_RNA (1)...(19): siRNA sense strand
gagauaauaauugccagua

SEQ ID NO: 1235550 - RNA, 19 nt, Homo sapiens
  misc_RNA (1)...(19): siRNA sense strand
gccaagagauaauaauugc

SEQ ID NO: 1235551 - RNA, 19 nt, Homo sapiens
  misc_RNA (1)...(19): siRNA sense strand
ggaagugugacagaagaua

SEQ ID NO: 1235552 - RNA, 19 nt, Homo sapiens
  misc_RNA (1)...(19): siRNA sense strand
gagaagaaacuuggcauca

SEQ ID NO: 1235553 - RNA, 19 nt, Homo sapiens
  misc_RNA (1)...(19): siRNA sense strand
gugcauccauuuacaucuu

SEQ ID NO: 1235554 - RNA, 19 nt, Homo sapiens
  misc_RNA (1)...(19): siRNA sense strand
cagcagaugaucgauauuu

SEQ ID NO: 1235555 - RNA, 19 nt, Homo sapiens
  misc_RNA (1)...(19): siRNA sense strand
cuuaccacaucauggauua

SEQ ID NO: 1235556 - RNA, 19 nt, Homo sapiens
  misc_RNA (1)...(19): siRNA sense strand
acagagaagagauugauuu

SEQ ID NO: 1235557 - RNA, 19 nt, Homo sapiens
  misc_RNA (1)...(19): siRNA sense strand
gggaagauaaucagggaaa

SEQ ID NO: 1235558 - RNA, 19 nt, Homo sapiens
  misc_RNA (1)...(19): siRNA sense strand
gcccaaguauucaaauuac

SEQ ID NO: 1235559 - RNA, 19 nt, Homo sapiens
  misc_RNA (1)...(19): siRNA sense strand
cagaagaucgagagccuaa

SEQ ID NO: 1235560 - RNA, 19 nt, Homo sapiens
  misc_RNA (1)...(19): siRNA sense strand
gggauaucauuguucaaau

SEQ ID NO: 1235561 - RNA, 19 nt, Homo sapiens
  misc_RNA (1)...(19): siRNA sense strand
augcaacucuuucugguuu

SEQ ID NO: 1235562 - RNA, 19 nt, Homo sapiens
  misc_RNA (1)...(19): siRNA sense strand
gaugagaguguuaguaaag

SEQ ID NO: 1235563 - RNA, 19 nt, Homo sapiens
  misc_RNA (1)...(19): siRNA sense strand
cgacuuguguuucguguac

SEQ ID NO: 1235564 - RNA, 19 nt, Homo sapiens
  misc_RNA (1)...(19): siRNA sense strand
aaacuccgcaauucagaua

SEQ ID NO: 1235565 - RNA, 19 nt, Homo sapiens
  misc_RNA (1)...(19): siRNA sense strand
aauuagagcuguguucaga

SEQ ID NO: 1235566 - RNA, 19 nt, Homo sapiens
  misc_RNA (1)...(19): siRNA sense strand
ucaaauacaggacaaagau

SEQ ID NO: 1235567 - RNA, 19 nt, Homo sapiens
  misc_RNA (1)...(19): siRNA sense strand
uggacaaugugaacugaaa

SEQ ID NO: 1235568 - RNA, 19 nt, Homo sapiens
  misc_RNA (1)...(19): siRNA sense strand
cgacuucaaacucgucuuu

SEQ ID NO: 1235569 - RNA, 19 nt, Homo sapiens
  misc_RNA (1)...(19): siRNA sense strand
uccaguggcugaccagauu

SEQ ID NO: 1235570 - RNA, 19 nt, Homo sapiens
  misc_RNA (1)...(19): siRNA sense strand
caaccacugucauccauac

SEQ ID NO: 1235571 - RNA, 19 nt, Homo sapiens
  misc_RNA (1)...(19): siRNA sense strand
caucccaucugccacaguu

SEQ ID NO: 1235572 - RNA, 19 nt, Homo sapiens
  misc_RNA (1)...(19): siRNA sense strand
agcagaugaucgauauuua

SEQ ID NO: 1235573 - RNA, 19 nt, Homo sapiens
  misc_RNA (1)...(19): siRNA sense strand
ugaagcuccugggcuauaa

SEQ ID NO: 1235574 - RNA, 19 nt, Homo sapiens
  misc_RNA (1)...(19): siRNA sense strand
gagguagaagggaagauaa

SEQ ID NO: 1235575 - RNA, 19 nt, Homo sapiens
  misc_RNA (1)...(19): siRNA sense strand
gagccuaacuuugcaacca

SEQ ID NO: 1235576 - RNA, 19 nt, Homo sapiens
  misc_RNA (1)...(19): siRNA sense strand
ugagaguguuaguaaagaa

SEQ ID NO: 1235577 - RNA, 19 nt, Homo sapiens
  misc_RNA (1)...(19): siRNA sense strand
gaaguuugauuugcuccau

SEQ ID NO: 1235578 - RNA, 19 nt, Homo sapiens
  misc_RNA (1)...(19): siRNA sense strand
gcaagaacacagagaagag

SEQ ID NO: 1235579 - RNA, 19 nt, Homo sapiens
  misc_RNA (1)...(19): siRNA sense strand
gaucgagagccuaacuuug

SEQ ID NO: 1235580 - RNA, 19 nt, Homo sapiens
  misc_RNA (1)...(19): siRNA sense strand
ucucaucccuuggcuaguu

SEQ ID NO: 1235581 - RNA, 19 nt, Homo sapiens
  misc_RNA (1)...(19): siRNA sense strand
gauucaggguguucacaug

SEQ ID NO: 1235582 - RNA, 19 nt, Homo sapiens
  misc_RNA (1)...(19): siRNA sense strand
caacuugucuuccuauuaa

SEQ ID NO: 1235583 - RNA, 19 nt, Homo sapiens
  misc_RNA (1)...(19): siRNA sense strand
gaagaugaccuacagauaa

SEQ ID NO: 1235584 - RNA, 19 nt, Homo sapiens
  misc_RNA (1)...(19): siRNA sense strand
gaagauacguggcucaaug

SEQ ID NO: 1235585 - RNA, 19 nt, Homo sapiens
  misc_RNA (1)...(19): siRNA sense strand
ggacagagaaguuugauuu

SEQ ID NO: 1235586 - RNA, 19 nt, Homo sapiens
  misc_RNA (1)...(19): siRNA sense strand
ggacaucucuuagcccaua

SEQ ID NO: 1235587 - RNA, 19 nt, Homo sapiens
  misc_RNA (1)...(19): siRNA sense strand
ugaaggaacuugugagauu

SEQ ID NO: 1235588 - RNA, 19 nt, Homo sapiens
  misc_RNA (1)...(19): siRNA sense strand
ggaaaggccuucuagagau

SEQ ID NO: 1235589 - RNA, 19 nt, Homo sapiens
  misc_RNA (1)...(19): siRNA sense strand
gagaagagauugauuuguc

SEQ ID NO: 1235590 - RNA, 19 nt, Homo sapiens
  misc_RNA (1)...(19): siRNA sense strand
ggacagcacucaacucaag

SEQ ID NO: 1235591 - RNA, 19 nt, Homo sapiens
  misc_RNA (1)...(19): siRNA sense strand
gccaauaaaucuacaaaug

SEQ ID NO: 1235592 - RNA, 19 nt, Homo sapiens
  misc_RNA (1)...(19): siRNA sense strand
gcacucaacucaagcacaa

SEQ ID NO: 1235593 - RNA, 19 nt, Homo sapiens
  misc_RNA (1)...(19): siRNA sense strand
gagaugagaguguuaguaa

SEQ ID NO: 1235594 - RNA, 19 nt, Homo sapiens
  misc_RNA (1)...(19): siRNA sense strand
agaauuagaugcacaugaa

SEQ ID NO: 1235595 - RNA, 19 nt, Homo sapiens
  misc_RNA (1)...(19): siRNA sense strand
gaaucgcuuucacauauuu

SEQ ID NO: 1235596 - RNA, 19 nt, Homo sapiens
  misc_RNA (1)...(19): siRNA sense strand
aaauagaagugcaaccuaa

SEQ ID NO: 1235597 - RNA, 19 nt, Homo sapiens
  misc_RNA (1)...(19): siRNA sense strand
gaagaaacuuggcaucaac

SEQ ID NO: 1235598 - RNA, 19 nt, Homo sapiens
  misc_RNA (1)...(19): siRNA sense strand
ggaccaacuugucuuccua

SEQ ID NO: 1235599 - RNA, 19 nt, Homo sapiens
  misc_RNA (1)...(19): siRNA sense strand
gaaguuccuccauaucaua

SEQ ID NO: 1235600 - RNA, 19 nt, Homo sapiens
  misc_RNA (1)...(19): siRNA sense strand
gacagcagaugaucgauau

SEQ ID NO: 1235601 - RNA, 19 nt, Homo sapiens
  misc_RNA (1)...(19): siRNA sense strand
gauaauaauugccaguaca

SEQ ID NO: 1235602 - RNA, 19 nt, Homo sapiens
  misc_RNA (1)...(19): siRNA sense strand
cauuaaaccugaaccagaa

SEQ ID NO: 1235603 - RNA, 19 nt, Homo sapiens
  misc_RNA (1)...(19): siRNA sense strand
gcaccuucauccuuaauau

SEQ ID NO: 1235604 - RNA, 19 nt, Homo sapiens
  misc_RNA (1)...(19): siRNA sense strand
aaauggaggucaugaaaug

SEQ ID NO: 1235605 - RNA, 19 nt, Homo sapiens
  misc_RNA (1)...(19): siRNA sense strand
ucaagaacuuccucauauu

SEQ ID NO: 1235606 - RNA, 19 nt, Homo sapiens
  misc_RNA (1)...(19): siRNA sense strand
uuacaucuaucucuccuaa

SEQ ID NO: 1235607 - RNA, 19 nt, Homo sapiens
  misc_RNA (1)...(19): siRNA sense strand
guaaauggaggucaugaaa

SEQ ID NO: 1235608 - RNA, 19 nt, Homo sapiens
  misc_RNA (1)...(19): siRNA sense strand
aaacugauauuggcagaaa

SEQ ID NO: 1235609 - RNA, 19 nt, Homo sapiens
  misc_RNA (1)...(19): siRNA sense strand
gaaaggccuucuagagauc

SEQ ID NO: 1235610 - RNA, 19 nt, Homo sapiens
  misc_RNA (1)...(19): siRNA sense strand
ccaccuccaucuacuuuaa

SEQ ID NO: 1235611 - RNA, 19 nt, Homo sapiens
  misc_RNA (1)...(19): siRNA sense strand
gcucaagaacuuccucaua

SEQ ID NO: 1235612 - RNA, 19 nt, Homo sapiens
  misc_RNA (1)...(19): siRNA sense strand
ggacagcagaugaucgaua

SEQ ID NO: 1235613 - RNA, 19 nt, Homo sapiens
  misc_RNA (1)...(19): siRNA sense strand
gaaggaacuugugagauuc

SEQ ID NO: 1235614 - RNA, 19 nt, Homo sapiens
  misc_RNA (1)...(19): siRNA sense strand
aaacuuggcaucaacagua

SEQ ID NO: 1235615 - RNA, 19 nt, Homo sapiens
  misc_RNA (1)...(19): siRNA sense strand
gggcaacugugagcauuaa

SEQ ID NO: 1235616 - RNA, 19 nt, Homo sapiens
  misc_RNA (1)...(19): siRNA sense strand
aagaugaccuacagauaaa

SEQ ID NO: 1235617 - RNA, 19 nt, Homo sapiens
  misc_RNA (1)...(19): siRNA sense strand
guaaagaacagcauaugau

SEQ ID NO: 1235618 - RNA, 19 nt, Homo sapiens
  misc_RNA (1)...(19): siRNA sense strand
agaucaagcugccauacua

SEQ ID NO: 1235619 - RNA, 19 nt, Homo sapiens
  misc_RNA (1)...(19): siRNA sense strand
gcagaaagaauacuagagu

SEQ ID NO: 1235620 - RNA, 19 nt, Homo sapiens
  misc_RNA (1)...(19): siRNA sense strand
ccacuuugcuuaccacauc

SEQ ID NO: 1235621 - RNA, 19 nt, Homo sapiens
  misc_RNA (1)...(19): siRNA sense strand
ggagguagaagggaagaua

SEQ ID NO: 1235622 - RNA, 19 nt, Homo sapiens
  misc_RNA (1)...(19): siRNA sense strand
gaaguacaguaucaacagu

SEQ ID NO: 1235623 - RNA, 19 nt, Homo sapiens
  misc_RNA (1)...(19): siRNA sense strand
aauaauaugucagccagua

SEQ ID NO: 1235624 - RNA, 19 nt, Homo sapiens
  misc_RNA (1)...(19): siRNA sense strand
ggacuuggacacucauuau

SEQ ID NO: 1235625 - RNA, 19 nt, Homo sapiens
  misc_RNA (1)...(19): siRNA sense strand
gaagcaagaacacagagaa

SEQ ID NO: 1235626 - RNA, 19 nt, Homo sapiens
  misc_RNA (1)...(19): siRNA sense strand
cucaagaacuuccucauau

SEQ ID NO: 1235627 - RNA, 19 nt, Homo sapiens
  misc_RNA (1)...(19): siRNA sense strand
gaacacagagaagagauug

SEQ ID NO: 1235628 - RNA, 19 nt, Homo sapiens
  misc_RNA (1)...(19): siRNA sense strand
caagaacuuccucauauug

SEQ ID NO: 1235629 - RNA, 19 nt, Homo sapiens
  misc_RNA (1)...(19): siRNA sense strand
gaagcugcagcccgauuua

SEQ ID NO: 1235630 - RNA, 19 nt, Homo sapiens
  misc_RNA (1)...(19): siRNA sense strand
cuuaauaugucacaguuug

SEQ ID NO: 1235631 - RNA, 19 nt, Homo sapiens
  misc_RNA (1)...(19): siRNA sense strand
uaccgggagucuucucuua

SEQ ID NO: 1235632 - RNA, 19 nt, Homo sapiens
  misc_RNA (1)...(19): siRNA sense strand
gcaaacuaauguuguguac

SEQ ID NO: 1235633 - RNA, 19 nt, Homo sapiens
  misc_RNA (1)...(19): siRNA sense strand
uaugauuccuucuccaauu

SEQ ID NO: 1235634 - RNA, 19 nt, Homo sapiens
  misc_RNA (1)...(19): siRNA sense strand
guacaaaaguucuggaaau

SEQ ID NO: 1235635 - RNA, 19 nt, Homo sapiens
  misc_RNA (1)...(19): siRNA sense strand
ccacuagacuggccuuuac

SEQ ID NO: 1235636 - RNA, 19 nt, Homo sapiens
  misc_RNA (1)...(19): siRNA sense strand
ucacucaccuguuccuuca

SEQ ID NO: 1235637 - RNA, 19 nt, Homo sapiens
  misc_RNA (1)...(19): siRNA sense strand
ucaguuccuucacccuuua

SEQ ID NO: 1235638 - RNA, 19 nt, Homo sapiens
  misc_RNA (1)...(19): siRNA sense strand
gcucaaugcuucuguccau

SEQ ID NO: 1235639 - RNA, 19 nt, Homo sapiens
  misc_RNA (1)...(19): siRNA sense strand
gggcucacauuguccuuga

SEQ ID NO: 1235640 - RNA, 19 nt, Homo sapiens
  misc_RNA (1)...(19): siRNA sense strand
ccaacuugucuuccuauua

SEQ ID NO: 1235641 - RNA, 19 nt, Homo sapiens
  misc_RNA (1)...(19): siRNA sense strand
ugaagaugaccuacagaua

SEQ ID NO: 1235642 - RNA, 19 nt, Homo sapiens
  misc_RNA (1)...(19): siRNA sense strand
ugucuucaguuccaucuuu

SEQ ID NO: 1235643 - RNA, 19 nt, Homo sapiens
  misc_RNA (1)...(19): siRNA sense strand
gcauccauuuacaucuuua

SEQ ID NO: 1235644 - RNA, 19 nt, Homo sapiens
  misc_RNA (1)...(19): siRNA sense strand
ccagcggucugcucaagaa

SEQ ID NO: 1235645 - RNA, 19 nt, Homo sapiens
  misc_RNA (1)...(19): siRNA sense strand
gcaagccaagagauaauaa

SEQ ID NO: 1235646 - RNA, 19 nt, Homo sapiens
  misc_RNA (1)...(19): siRNA sense strand
uuuacgaccucaugcauuu

SEQ ID NO: 1235647 - RNA, 19 nt, Homo sapiens
  misc_RNA (1)...(19): siRNA sense strand
agaagaaacuuggcaucaa

SEQ ID NO: 1235648 - RNA, 19 nt, Homo sapiens
  misc_RNA (1)...(19): siRNA sense strand
gaacagcauaugauuccuu

SEQ ID NO: 1235649 - RNA, 19 nt, Homo sapiens
  misc_RNA (1)...(19): siRNA sense strand
gagauaauaauugccagua

SEQ ID NO: 1235650 - RNA, 19 nt, Homo sapiens
  misc_RNA (1)...(19): siRNA sense strand
gccaagagauaauaauugc

SEQ ID NO: 1235651 - RNA, 19 nt, Homo sapiens
  misc_RNA (1)...(19): siRNA sense strand
ggaagugugacagaagaua

SEQ ID NO: 1235652 - RNA, 19 nt, Homo sapiens
  misc_RNA (1)...(19): siRNA sense strand
gagaagaaacuuggcauca

SEQ ID NO: 1235653 - RNA, 19 nt, Homo sapiens
  misc_RNA (1)...(19): siRNA sense strand
gugcauccauuuacaucuu

SEQ ID NO: 1235654 - RNA, 19 nt, Homo sapiens
  misc_RNA (1)...(19): siRNA sense strand
cagcagaugaucgauauuu

SEQ ID NO: 1235655 - RNA, 19 nt, Homo sapiens
  misc_RNA (1)...(19): siRNA sense strand
cuuaccacaucauggauua

SEQ ID NO: 1235656 - RNA, 19 nt, Homo sapiens
  misc_RNA (1)...(19): siRNA sense strand
acagagaagagauugauuu

SEQ ID NO: 1235657 - RNA, 19 nt, Homo sapiens
  misc_RNA (1)...(19): siRNA sense strand
gggaagauaaucagggaaa

SEQ ID NO: 1235658 - RNA, 19 nt, Homo sapiens
  misc_RNA (1)...(19): siRNA sense strand
gcccaaguauucaaauuac

SEQ ID NO: 1235659 - RNA, 19 nt, Homo sapiens
  misc_RNA (1)...(19): siRNA sense strand
cagaagaucgagagccuaa

SEQ ID NO: 1235660 - RNA, 19 nt, Homo sapiens
  misc_RNA (1)...(19): siRNA sense strand
gggauaucauuguucaaau

SEQ ID NO: 1235661 - RNA, 19 nt, Homo sapiens
  misc_RNA (1)...(19): siRNA sense strand
augcaacucuuucugguuu

SEQ ID NO: 1235662 - RNA, 19 nt, Homo sapiens
  misc_RNA (1)...(19): siRNA sense strand
gaugagaguguuaguaaag

SEQ ID NO: 1235663 - RNA, 19 nt, Homo sapiens
  misc_RNA (1)...(19): siRNA sense strand
cgacuuguguuucguguac

SEQ ID NO: 1235664 - RNA, 19 nt, Homo sapiens
  misc_RNA (1)...(19): siRNA sense strand
aaacuccgcaauucagaua

SEQ ID NO: 1235665 - RNA, 19 nt, Homo sapiens
  misc_RNA (1)...(19): siRNA sense strand
aauuagagcuguguucaga

SEQ ID NO: 1235666 - RNA, 19 nt, Homo sapiens
  misc_RNA (1)...(19): siRNA sense strand
ucaaauacaggacaaagau

SEQ ID NO: 1235667 - RNA, 19 nt, Homo sapiens
  misc_RNA (1)...(19): siRNA sense strand
uggacaaugugaacugaaa

SEQ ID NO: 1235668 - RNA, 19 nt, Homo sapiens
  misc_RNA (1)...(19): siRNA sense strand
cgacuucaaacucgucuuu

SEQ ID NO: 1235669 - RNA, 19 nt, Homo sapiens
  misc_RNA (1)...(19): siRNA sense strand
uccaguggcugaccagauu

SEQ ID NO: 1235670 - RNA, 19 nt, Homo sapiens
  misc_RNA (1)...(19): siRNA sense strand
caaccacugucauccauac

SEQ ID NO: 1235671 - RNA, 19 nt, Homo sapiens
  misc_RNA (1)...(19): siRNA sense strand
caucccaucugccacaguu

SEQ ID NO: 1235672 - RNA, 19 nt, Homo sapiens
  misc_RNA (1)...(19): siRNA sense strand
agcagaugaucgauauuua

SEQ ID NO: 1235673 - RNA, 19 nt, Homo sapiens
  misc_RNA (1)...(19): siRNA sense strand
ugaagcuccugggcuauaa

SEQ ID NO: 1235674 - RNA, 19 nt, Homo sapiens
  misc_RNA (1)...(19): siRNA sense strand
gagguagaagggaagauaa

SEQ ID NO: 1235675 - RNA, 19 nt, Homo sapiens
  misc_RNA (1)...(19): siRNA sense strand
gagccuaacuuugcaacca

SEQ ID NO: 1235676 - RNA, 19 nt, Homo sapiens
  misc_RNA (1)...(19): siRNA sense strand
ugagaguguuaguaaagaa

SEQ ID NO: 1235677 - RNA, 19 nt, Homo sapiens
  misc_RNA (1)...(19): siRNA sense strand
gaaguuugauuugcuccau

SEQ ID NO: 1235678 - RNA, 19 nt, Homo sapiens
  misc_RNA (1)...(19): siRNA sense strand
gcaagaacacagagaagag

SEQ ID NO: 1235679 - RNA, 19 nt, Homo sapiens
  misc_RNA (1)...(19): siRNA sense strand
gaucgagagccuaacuuug

SEQ ID NO: 1235680 - RNA, 19 nt, Homo sapiens
  misc_RNA (1)...(19): siRNA sense strand
ucucaucccuuggcuaguu

SEQ ID NO: 1235681 - RNA, 19 nt, Homo sapiens
  misc_RNA (1)...(19): siRNA sense strand
gauucaggguguucacaug

SEQ ID NO: 1235682 - RNA, 19 nt, Homo sapiens
  misc_RNA (1)...(19): siRNA sense strand
caacuugucuuccuauuaa

SEQ ID NO: 1235683 - RNA, 19 nt, Homo sapiens
  misc_RNA (1)...(19): siRNA sense strand
gaagaugaccuacagauaa

SEQ ID NO: 1235684 - RNA, 19 nt, Homo sapiens
  misc_RNA (1)...(19): siRNA sense strand
gaagauacguggcucaaug

SEQ ID NO: 1235685 - RNA, 19 nt, Homo sapiens
  misc_RNA (1)...(19): siRNA sense strand
ggacagagaaguuugauuu

SEQ ID NO: 1235686 - RNA, 19 nt, Homo sapiens
  misc_RNA (1)...(19): siRNA sense strand
ggacaucucuuagcccaua

SEQ ID NO: 1235687 - RNA, 19 nt, Homo sapiens
  misc_RNA (1)...(19): siRNA sense strand
ugaaggaacuugugagauu

SEQ ID NO: 1235688 - RNA, 19 nt, Homo sapiens
  misc_RNA (1)...(19): siRNA sense strand
ggaaaggccuucuagagau

SEQ ID NO: 1235689 - RNA, 19 nt, Homo sapiens
  misc_RNA (1)...(19): siRNA sense strand
gagaagagauugauuuguc

SEQ ID NO: 1235690 - RNA, 19 nt, Homo sapiens
  misc_RNA (1)...(19): siRNA sense strand
ggacagcacucaacucaag

SEQ ID NO: 1235691 - RNA, 19 nt, Homo sapiens
  misc_RNA (1)...(19): siRNA sense strand
gccaauaaaucuacaaaug

SEQ ID NO: 1235692 - RNA, 19 nt, Homo sapiens
  misc_RNA (1)...(19): siRNA sense strand
gcacucaacucaagcacaa

SEQ ID NO: 1235693 - RNA, 19 nt, Homo sapiens
  misc_RNA (1)...(19): siRNA sense strand
gagaugagaguguuaguaa

SEQ ID NO: 1235694 - RNA, 19 nt, Homo sapiens
  misc_RNA (1)...(19): siRNA sense strand
agaauuagaugcacaugaa

SEQ ID NO: 1235695 - RNA, 19 nt, Homo sapiens
  misc_RNA (1)...(19): siRNA sense strand
gaaucgcuuucacauauuu

SEQ ID NO: 1235696 - RNA, 19 nt, Homo sapiens
  misc_RNA (1)...(19): siRNA sense strand
aaauagaagugcaaccuaa

SEQ ID NO: 1235697 - RNA, 19 nt, Homo sapiens
  misc_RNA (1)...(19): siRNA sense strand
gaagaaacuuggcaucaac

SEQ ID NO: 1235698 - RNA, 19 nt, Homo sapiens
  misc_RNA (1)...(19): siRNA sense strand
ggaccaacuugucuuccua

SEQ ID NO: 1235699 - RNA, 19 nt, Homo sapiens
  misc_RNA (1)...(19): siRNA sense strand
gaaguuccuccauaucaua

SEQ ID NO: 1235700 - RNA, 19 nt, Homo sapiens
  misc_RNA (1)...(19): siRNA sense strand
gacagcagaugaucgauau

SEQ ID NO: 1235701 - RNA, 19 nt, Homo sapiens
  misc_RNA (1)...(19): siRNA sense strand
gauaauaauugccaguaca

SEQ ID NO: 1235702 - RNA, 19 nt, Homo sapiens
  misc_RNA (1)...(19): siRNA sense strand
cauuaaaccugaaccagaa

SEQ ID NO: 1235703 - RNA, 19 nt, Homo sapiens
  misc_RNA (1)...(19): siRNA sense strand
gcaccuucauccuuaauau

SEQ ID NO: 1235704 - RNA, 19 nt, Homo sapiens
  misc_RNA (1)...(19): siRNA sense strand
aaauggaggucaugaaaug

SEQ ID NO: 1235705 - RNA, 19 nt, Homo sapiens
  misc_RNA (1)...(19): siRNA sense strand
ucaagaacuuccucauauu

SEQ ID NO: 1235706 - RNA, 19 nt, Homo sapiens
  misc_RNA (1)...(19): siRNA sense strand
uuacaucuaucucuccuaa

SEQ ID NO: 1235707 - RNA, 19 nt, Homo sapiens
  misc_RNA (1)...(19): siRNA sense strand
guaaauggaggucaugaaa

SEQ ID NO: 1235708 - RNA, 19 nt, Homo sapiens
  misc_RNA (1)...(19): siRNA sense strand
aaacugauauuggcagaaa

SEQ ID NO: 1235709 - RNA, 19 nt, Homo sapiens
  misc_RNA (1)...(19): siRNA sense strand
gaaaggccuucuagagauc

SEQ ID NO: 1235710 - RNA, 19 nt, Homo sapiens
  misc_RNA (1)...(19): siRNA sense strand
ccaccuccaucuacuuuaa

SEQ ID NO: 1235711 - RNA, 19 nt, Homo sapiens
  misc_RNA (1)...(19): siRNA sense strand
gcucaagaacuuccucaua

SEQ ID NO: 1235712 - RNA, 19 nt, Homo sapiens
  misc_RNA (1)...(19): siRNA sense strand
ggacagcagaugaucgaua

SEQ ID NO: 1235713 - RNA, 19 nt, Homo sapiens
  misc_RNA (1)...(19): siRNA sense strand
gaaggaacuugugagauuc

SEQ ID NO: 1235714 - RNA, 19 nt, Homo sapiens
  misc_RNA (1)...(19): siRNA sense strand
aaacuuggcaucaacagua

SEQ ID NO: 1235715 - RNA, 19 nt, Homo sapiens
  misc_RNA (1)...(19): siRNA sense strand
gggcaacugugagcauuaa

SEQ ID NO: 1235716 - RNA, 19 nt, Homo sapiens
  misc_RNA (1)...(19): siRNA sense strand
aagaugaccuacagauaaa

SEQ ID NO: 1235717 - RNA, 19 nt, Homo sapiens
  misc_RNA (1)...(19): siRNA sense strand
guaaagaacagcauaugau

SEQ ID NO: 1235718 - RNA, 19 nt, Homo sapiens
  misc_RNA (1)...(19): siRNA sense strand
agaucaagcugccauacua

SEQ ID NO: 1235719 - RNA, 19 nt, Homo sapiens
  misc_RNA (1)...(19): siRNA sense strand
gcagaaagaauacuagagu

SEQ ID NO: 1235720 - RNA, 19 nt, Homo sapiens
  misc_RNA (1)...(19): siRNA sense strand
ccacuuugcuuaccacauc

SEQ ID NO: 1235721 - RNA, 19 nt, Homo sapiens
  misc_RNA (1)...(19): siRNA sense strand
ggagguagaagggaagaua

SEQ ID NO: 1235722 - RNA, 19 nt, Homo sapiens
  misc_RNA (1)...(19): siRNA sense strand
gaaguacaguaucaacagu

SEQ ID NO: 1235723 - RNA, 19 nt, Homo sapiens
  misc_RNA (1)...(19): siRNA sense strand
aauaauaugucagccagua

SEQ ID NO: 1235724 - RNA, 19 nt, Homo sapiens
  misc_RNA (1)...(19): siRNA sense strand
ggacuuggacacucauuau

SEQ ID NO: 1235725 - RNA, 19 nt, Homo sapiens
  misc_RNA (1)...(19): siRNA sense strand
gaagcaagaacacagagaa

SEQ ID NO: 1235726 - RNA, 19 nt, Homo sapiens
  misc_RNA (1)...(19): siRNA sense strand
cucaagaacuuccucauau

SEQ ID NO: 1235727 - RNA, 19 nt, Homo sapiens
  misc_RNA (1)...(19): siRNA sense strand
gaacacagagaagagauug

SEQ ID NO: 1235728 - RNA, 19 nt, Homo sapiens
  misc_RNA (1)...(19): siRNA sense strand
caagaacuuccucauauug

SEQ ID NO: 1235729 - RNA, 19 nt, Homo sapiens
  misc_RNA (1)...(19): siRNA sense strand
gaagcugcagcccgauuua

SEQ ID NO: 1235730 - RNA, 19 nt, Homo sapiens
  misc_RNA (1)...(19): siRNA sense strand
cuuaauaugucacaguuug

SEQ ID NO: 1235731 - RNA, 19 nt, Homo sapiens
  misc_RNA (1)...(19): siRNA sense strand
uaccgggagucuucucuua

SEQ ID NO: 1235732 - RNA, 19 nt, Homo sapiens
  misc_RNA (1)...(19): siRNA sense strand
gcaaacuaauguuguguac

SEQ ID NO: 1235733 - RNA, 19 nt, Homo sapiens
  misc_RNA (1)...(19): siRNA sense strand
uaugauuccuucuccaauu

SEQ ID NO: 1235734 - RNA, 19 nt, Homo sapiens
  misc_RNA (1)...(19): siRNA sense strand
guacaaaaguucuggaaau

SEQ ID NO: 1235735 - RNA, 19 nt, Homo sapiens
  misc_RNA (1)...(19): siRNA sense strand
ccacuagacuggccuuuac

SEQ ID NO: 1235736 - RNA, 19 nt, Homo sapiens
  misc_RNA (1)...(19): siRNA sense strand
ucacucaccuguuccuuca

SEQ ID NO: 1235737 - RNA, 19 nt, Homo sapiens
  misc_RNA (1)...(19): siRNA sense strand
ucaguuccuucacccuuua

SEQ ID NO: 1235738 - RNA, 19 nt, Homo sapiens
  misc_RNA (1)...(19): siRNA sense strand
gcucaaugcuucuguccau

SEQ ID NO: 1235739 - RNA, 19 nt, Homo sapiens
  misc_RNA (1)...(19): siRNA sense strand
gggcucacauuguccuuga

SEQ ID NO: 1235740 - RNA, 19 nt, Homo sapiens
  misc_RNA (1)...(19): siRNA sense strand
ccaacuugucuuccuauua

SEQ ID NO: 1235741 - RNA, 19 nt, Homo sapiens
  misc_RNA (1)...(19): siRNA sense strand
ugaagaugaccuacagaua

SEQ ID NO: 1235742 - RNA, 19 nt, Homo sapiens
  misc_RNA (1)...(19): siRNA sense strand
ugucuucaguuccaucuuu

SEQ ID NO: 1235743 - RNA, 19 nt, Homo sapiens
  misc_RNA (1)...(19): siRNA sense strand
gcauccauuuacaucuuua

SEQ ID NO: 1235744 - RNA, 19 nt, Homo sapiens
  misc_RNA (1)...(19): siRNA sense strand
ccagcggucugcucaagaa

SEQ ID NO: 1235745 - RNA, 19 nt, Homo sapiens
  misc_RNA (1)...(19): siRNA sense strand
gcaagccaagagauaauaa

SEQ ID NO: 1235746 - RNA, 19 nt, Homo sapiens
  misc_RNA (1)...(19): siRNA sense strand
uuuacgaccucaugcauuu

SEQ ID NO: 1235747 - RNA, 19 nt, Homo sapiens
  misc_RNA (1)...(19): siRNA sense strand
agaagaaacuuggcaucaa

SEQ ID NO: 1235748 - RNA, 19 nt, Homo sapiens
  misc_RNA (1)...(19): siRNA sense strand
gaacagcauaugauuccuu

SEQ ID NO: 1235749 - RNA, 19 nt, Homo sapiens
  misc_RNA (1)...(19): siRNA sense strand
gagauaauaauugccagua

SEQ ID NO: 1235750 - RNA, 19 nt, Homo sapiens
  misc_RNA (1)...(19): siRNA sense strand
gccaagagauaauaauugc

SEQ ID NO: 1235751 - RNA, 19 nt, Homo sapiens
  misc_RNA (1)...(19): siRNA sense strand
ggaagugugacagaagaua

SEQ ID NO: 1235752 - RNA, 19 nt, Homo sapiens
  misc_RNA (1)...(19): siRNA sense strand
gagaagaaacuuggcauca

SEQ ID NO: 1235753 - RNA, 19 nt, Homo sapiens
  misc_RNA (1)...(19): siRNA sense strand
gugcauccauuuacaucuu

SEQ ID NO: 1235754 - RNA, 19 nt, Homo sapiens
  misc_RNA (1)...(19): siRNA sense strand
cagcagaugaucgauauuu

SEQ ID NO: 1235755 - RNA, 19 nt, Homo sapiens
  misc_RNA (1)...(19): siRNA sense strand
cuuaccacaucauggauua

SEQ ID NO: 1235756 - RNA, 19 nt, Homo sapiens
  misc_RNA (1)...(19): siRNA sense strand
acagagaagagauugauuu

SEQ ID NO: 1235757 - RNA, 19 nt, Homo sapiens
  misc_RNA (1)...(19): siRNA sense strand
gggaagauaaucagggaaa

SEQ ID NO: 1235758 - RNA, 19 nt, Homo sapiens
  misc_RNA (1)...(19): siRNA sense strand
gcccaaguauucaaauuac

SEQ ID NO: 1235759 - RNA, 19 nt, Homo sapiens
  misc_RNA (1)...(19): siRNA sense strand
cagaagaucgagagccuaa

SEQ ID NO: 1235760 - RNA, 19 nt, Homo sapiens
  misc_RNA (1)...(19): siRNA sense strand
gggauaucauuguucaaau

SEQ ID NO: 1235761 - RNA, 19 nt, Homo sapiens
  misc_RNA (1)...(19): siRNA sense strand
augcaacucuuucugguuu

SEQ ID NO: 1235762 - RNA, 19 nt, Homo sapiens
  misc_RNA (1)...(19): siRNA sense strand
gaugagaguguuaguaaag

SEQ ID NO: 1235763 - RNA, 19 nt, Homo sapiens
  misc_RNA (1)...(19): siRNA sense strand
cgacuuguguuucguguac

SEQ ID NO: 1235764 - RNA, 19 nt, Homo sapiens
  misc_RNA (1)...(19): siRNA sense strand
aaacuccgcaauucagaua

SEQ ID NO: 1235765 - RNA, 19 nt, Homo sapiens
  misc_RNA (1)...(19): siRNA sense strand
aauuagagcuguguucaga

SEQ ID NO: 1235766 - RNA, 19 nt, Homo sapiens
  misc_RNA (1)...(19): siRNA sense strand
ucaaauacaggacaaagau

SEQ ID NO: 1235767 - RNA, 19 nt, Homo sapiens
  misc_RNA (1)...(19): siRNA sense strand
uggacaaugugaacugaaa

SEQ ID NO: 1235768 - RNA, 19 nt, Homo sapiens
  misc_RNA (1)...(19): siRNA sense strand
cgacuucaaacucgucuuu

SEQ ID NO: 1235769 - RNA, 19 nt, Homo sapiens
  misc_RNA (1)...(19): siRNA sense strand
uccaguggcugaccagauu

SEQ ID NO: 1235770 - RNA, 19 nt, Homo sapiens
  misc_RNA (1)...(19): siRNA sense strand
caaccacugucauccauac

SEQ ID NO: 1235771 - RNA, 19 nt, Homo sapiens
  misc_RNA (1)...(19): siRNA sense strand
caucccaucugccacaguu

SEQ ID NO: 1235772 - RNA, 19 nt, Homo sapiens
  misc_RNA (1)...(19): siRNA sense strand
agcagaugaucgauauuua

SEQ ID NO: 1235773 - RNA, 19 nt, Homo sapiens
  misc_RNA (1)...(19): siRNA sense strand
ugaagcuccugggcuauaa

SEQ ID NO: 1235774 - RNA, 19 nt, Homo sapiens
  misc_RNA (1)...(19): siRNA sense strand
gagguagaagggaagauaa

SEQ ID NO: 1235775 - RNA, 19 nt, Homo sapiens
  misc_RNA (1)...(19): siRNA sense strand
gagccuaacuuugcaacca

SEQ ID NO: 1235776 - RNA, 19 nt, Homo sapiens
  misc_RNA (1)...(19): siRNA sense strand
ugagaguguuaguaaagaa

SEQ ID NO: 1235777 - RNA, 19 nt, Homo sapiens
  misc_RNA (1)...(19): siRNA sense strand
gaaguuugauuugcuccau

SEQ ID NO: 1235778 - RNA, 19 nt, Homo sapiens
  misc_RNA (1)...(19): siRNA sense strand
gcaagaacacagagaagag

SEQ ID NO: 1235779 - RNA, 19 nt, Homo sapiens
  misc_RNA (1)...(19): siRNA sense strand
gaucgagagccuaacuuug

SEQ ID NO: 1235780 - RNA, 19 nt, Homo sapiens
  misc_RNA (1)...(19): siRNA sense strand
ucucaucccuuggcuaguu

SEQ ID NO: 1235781 - RNA, 19 nt, Homo sapiens
  misc_RNA (1)...(19): siRNA sense strand
gauucaggguguucacaug

SEQ ID NO: 1235782 - RNA, 19 nt, Homo sapiens
  misc_RNA (1)...(19): siRNA sense strand
caacuugucuuccuauuaa

SEQ ID NO: 1235783 - RNA, 19 nt, Homo sapiens
  misc_RNA (1)...(19): siRNA sense strand
gaagaugaccuacagauaa

SEQ ID NO: 1235784 - RNA, 19 nt, Homo sapiens
  misc_RNA (1)...(19): siRNA sense strand
gaagauacguggcucaaug

SEQ ID NO: 1235785 - RNA, 19 nt, Homo sapiens
  misc_RNA (1)...(19): siRNA sense strand
ggacagagaaguuugauuu

SEQ ID NO: 1235786 - RNA, 19 nt, Homo sapiens
  misc_RNA (1)...(19): siRNA sense strand
ggacaucucuuagcccaua

SEQ ID NO: 1235787 - RNA, 19 nt, Homo sapiens
  misc_RNA (1)...(19): siRNA sense strand
ugaaggaacuugugagauu

SEQ ID NO: 1235788 - RNA, 19 nt, Homo sapiens
  misc_RNA (1)...(19): siRNA sense strand
ggaaaggccuucuagagau

SEQ ID NO: 1235789 - RNA, 19 nt, Homo sapiens
  misc_RNA (1)...(19): siRNA sense strand
gagaagagauugauuuguc

SEQ ID NO: 1235790 - RNA, 19 nt, Homo sapiens
  misc_RNA (1)...(19): siRNA sense strand
ggacagcacucaacucaag

SEQ ID NO: 1235791 - RNA, 19 nt, Homo sapiens
  misc_RNA (1)...(19): siRNA sense strand
gccaauaaaucuacaaaug

SEQ ID NO: 1235792 - RNA, 19 nt, Homo sapiens
  misc_RNA (1)...(19): siRNA sense strand
gcacucaacucaagcacaa

SEQ ID NO: 1235793 - RNA, 19 nt, Homo sapiens
  misc_RNA (1)...(19): siRNA sense strand
gagaugagaguguuaguaa

SEQ ID NO: 1235794 - RNA, 19 nt, Homo sapiens
  misc_RNA (1)...(19): siRNA sense strand
agaauuagaugcacaugaa

SEQ ID NO: 1235795 - RNA, 19 nt, Homo sapiens
  misc_RNA (1)...(19): siRNA sense strand
gaaucgcuuucacauauuu

SEQ ID NO: 1235796 - RNA, 19 nt, Homo sapiens
  misc_RNA (1)...(19): siRNA sense strand
aaauagaagugcaaccuaa

SEQ ID NO: 1235797 - RNA, 19 nt, Homo sapiens
  misc_RNA (1)...(19): siRNA sense strand
gaagaaacuuggcaucaac

SEQ ID NO: 1235798 - RNA, 19 nt, Homo sapiens
  misc_RNA (1)...(19): siRNA sense strand
ggaccaacuugucuuccua

SEQ ID NO: 1235799 - RNA, 19 nt, Homo sapiens
  misc_RNA (1)...(19): siRNA sense strand
gaaguuccuccauaucaua

SEQ ID NO: 1235800 - RNA, 19 nt, Homo sapiens
  misc_RNA (1)...(19): siRNA sense strand
gacagcagaugaucgauau

SEQ ID NO: 1235801 - RNA, 19 nt, Homo sapiens
  misc_RNA (1)...(19): siRNA sense strand
gauaauaauugccaguaca

SEQ ID NO: 1235802 - RNA, 19 nt, Homo sapiens
  misc_RNA (1)...(19): siRNA sense strand
cauuaaaccugaaccagaa

SEQ ID NO: 1235803 - RNA, 19 nt, Homo sapiens
  misc_RNA (1)...(19): siRNA sense strand
gcaccuucauccuuaauau

SEQ ID NO: 1235804 - RNA, 19 nt, Homo sapiens
  misc_RNA (1)...(19): siRNA sense strand
aaauggaggucaugaaaug

SEQ ID NO: 1235805 - RNA, 19 nt, Homo sapiens
  misc_RNA (1)...(19): siRNA sense strand
ucaagaacuuccucauauu

SEQ ID NO: 1235806 - RNA, 19 nt, Homo sapiens
  misc_RNA (1)...(19): siRNA sense strand
uuacaucuaucucuccuaa

SEQ ID NO: 1235807 - RNA, 19 nt, Homo sapiens
  misc_RNA (1)...(19): siRNA sense strand
guaaauggaggucaugaaa

SEQ ID NO: 1235808 - RNA, 19 nt, Homo sapiens
  misc_RNA (1)...(19): siRNA sense strand
aaacugauauuggcagaaa

SEQ ID NO: 1235809 - RNA, 19 nt, Homo sapiens
  misc_RNA (1)...(19): siRNA sense strand
gaaaggccuucuagagauc

SEQ ID NO: 1235810 - RNA, 19 nt, Homo sapiens
  misc_RNA (1)...(19): siRNA sense strand
ccaccuccaucuacuuuaa

SEQ ID NO: 1235811 - RNA, 19 nt, Homo sapiens
  misc_RNA (1)...(19): siRNA sense strand
gcucaagaacuuccucaua

SEQ ID NO: 1235812 - RNA, 19 nt, Homo sapiens
  misc_RNA (1)...(19): siRNA sense strand
ggacagcagaugaucgaua

SEQ ID NO: 1235813 - RNA, 19 nt, Homo sapiens
  misc_RNA (1)...(19): siRNA sense strand
gaaggaacuugugagauuc

SEQ ID NO: 1235814 - RNA, 19 nt, Homo sapiens
  misc_RNA (1)...(19): siRNA sense strand
aaacuuggcaucaacagua

SEQ ID NO: 1235815 - RNA, 19 nt, Homo sapiens
  misc_RNA (1)...(19): siRNA sense strand
gggcaacugugagcauuaa

SEQ ID NO: 1235816 - RNA, 19 nt, Homo sapiens
  misc_RNA (1)...(19): siRNA sense strand
aagaugaccuacagauaaa

SEQ ID NO: 1235817 - RNA, 19 nt, Homo sapiens
  misc_RNA (1)...(19): siRNA sense strand
guaaagaacagcauaugau

SEQ ID NO: 1235818 - RNA, 19 nt, Homo sapiens
  misc_RNA (1)...(19): siRNA sense strand
agaucaagcugccauacua

SEQ ID NO: 1235819 - RNA, 19 nt, Homo sapiens
  misc_RNA (1)...(19): siRNA sense strand
gcagaaagaauacuagagu

SEQ ID NO: 1235820 - RNA, 19 nt, Homo sapiens
  misc_RNA (1)...(19): siRNA sense strand
ccacuuugcuuaccacauc

SEQ ID NO: 1235821 - RNA, 19 nt, Homo sapiens
  misc_RNA (1)...(19): siRNA sense strand
ggagguagaagggaagaua

SEQ ID NO: 1235822 - RNA, 19 nt, Homo sapiens
  misc_RNA (1)...(19): siRNA sense strand
gaaguacaguaucaacagu

SEQ ID NO: 1235823 - RNA, 19 nt, Homo sapiens
  misc_RNA (1)...(19): siRNA sense strand
aauaauaugucagccagua

SEQ ID NO: 1235824 - RNA, 19 nt, Homo sapiens
  misc_RNA (1)...(19): siRNA sense strand
ggacuuggacacucauuau

SEQ ID NO: 1235825 - RNA, 19 nt, Homo sapiens
  misc_RNA (1)...(19): siRNA sense strand
gaagcaagaacacagagaa

SEQ ID NO: 1235826 - RNA, 19 nt, Homo sapiens
  misc_RNA (1)...(19): siRNA sense strand
cucaagaacuuccucauau

SEQ ID NO: 1235827 - RNA, 19 nt, Homo sapiens
  misc_RNA (1)...(19): siRNA sense strand
gaacacagagaagagauug

SEQ ID NO: 1235828 - RNA, 19 nt, Homo sapiens
  misc_RNA (1)...(19): siRNA sense strand
caagaacuuccucauauug

SEQ ID NO: 1235829 - RNA, 19 nt, Homo sapiens
  misc_RNA (1)...(19): siRNA sense strand
gaagcugcagcccgauuua

SEQ ID NO: 1235830 - RNA, 19 nt, Homo sapiens
  misc_RNA (1)...(19): siRNA sense strand
cuuaauaugucacaguuug

SEQ ID NO: 1235831 - RNA, 19 nt, Homo sapiens
  misc_RNA (1)...(19): siRNA sense strand
uaccgggagucuucucuua

SEQ ID NO: 1235832 - RNA, 19 nt, Homo sapiens
  misc_RNA (1)...(19): siRNA sense strand
gcaaacuaauguuguguac

SEQ ID NO: 1235833 - RNA, 19 nt, Homo sapiens
  misc_RNA (1)...(19): siRNA sense strand
uaugauuccuucuccaauu

SEQ ID NO: 1235834 - RNA, 19 nt, Homo sapiens
  misc_RNA (1)...(19): siRNA sense strand
guacaaaaguucuggaaau

SEQ ID NO: 1235835 - RNA, 19 nt, Homo sapiens
  misc_RNA (1)...(19): siRNA sense strand
ccacuagacuggccuuuac

SEQ ID NO: 1235836 - RNA, 19 nt, Homo sapiens
  misc_RNA (1)...(19): siRNA sense strand
ucacucaccuguuccuuca

SEQ ID NO: 1235837 - RNA, 19 nt, Homo sapiens
  misc_RNA (1)...(19): siRNA sense strand
ucaguuccuucacccuuua

SEQ ID NO: 1235838 - RNA, 19 nt, Homo sapiens
  misc_RNA (1)...(19): siRNA sense strand
gcucaaugcuucuguccau

SEQ ID NO: 1235839 - RNA, 19 nt, Homo sapiens
  misc_RNA (1)...(19): siRNA sense strand
gggcucacauuguccuuga

SEQ ID NO: 1235840 - RNA, 19 nt, Homo sapiens
  misc_RNA (1)...(19): siRNA sense strand
ccaacuugucuuccuauua

SEQ ID NO: 1235841 - RNA, 19 nt, Homo sapiens
  misc_RNA (1)...(19): siRNA sense strand
ugaagaugaccuacagaua

SEQ ID NO: 1235842 - RNA, 19 nt, Homo sapiens
  misc_RNA (1)...(19): siRNA sense strand
ugucuucaguuccaucuuu

SEQ ID NO: 1235843 - RNA, 19 nt, Homo sapiens
  misc_RNA (1)...(19): siRNA sense strand
gcauccauuuacaucuuua

SEQ ID NO: 1235844 - RNA, 19 nt, Homo sapiens
  misc_RNA (1)...(19): siRNA sense strand
ccagcggucugcucaagaa

SEQ ID NO: 1235845 - RNA, 19 nt, Homo sapiens
  misc_RNA (1)...(19): siRNA sense strand
gcaagccaagagauaauaa

SEQ ID NO: 1235846 - RNA, 19 nt, Homo sapiens
  misc_RNA (1)...(19): siRNA sense strand
uuuacgaccucaugcauuu

SEQ ID NO: 1235847 - RNA, 19 nt, Homo sapiens
  misc_RNA (1)...(19): siRNA sense strand
agaagaaacuuggcaucaa

SEQ ID NO: 1235848 - RNA, 19 nt, Homo sapiens
  misc_RNA (1)...(19): siRNA sense strand
gaacagcauaugauuccuu

SEQ ID NO: 1235849 - RNA, 19 nt, Homo sapiens
  misc_RNA (1)...(19): siRNA sense strand
gagauaauaauugccagua

SEQ ID NO: 1235850 - RNA, 19 nt, Homo sapiens
  misc_RNA (1)...(19): siRNA sense strand
gccaagagauaauaauugc

SEQ ID NO: 1235851 - RNA, 19 nt, Homo sapiens
  misc_RNA (1)...(19): siRNA sense strand
ggaagugugacagaagaua

SEQ ID NO: 1235852 - RNA, 19 nt, Homo sapiens
  misc_RNA (1)...(19): siRNA sense strand
gagaagaaacuuggcauca

SEQ ID NO: 1235853 - RNA, 19 nt, Homo sapiens
  misc_RNA (1)...(19): siRNA sense strand
gugcauccauuuacaucuu

SEQ ID NO: 1235854 - RNA, 19 nt, Homo sapiens
  misc_RNA (1)...(19): siRNA sense strand
cagcagaugaucgauauuu

SEQ ID NO: 1235855 - RNA, 19 nt, Homo sapiens
  misc_RNA (1)...(19): siRNA sense strand
cuuaccacaucauggauua

SEQ ID NO: 1235856 - RNA, 19 nt, Homo sapiens
  misc_RNA (1)...(19): siRNA sense strand
acagagaagagauugauuu

SEQ ID NO: 1235857 - RNA, 19 nt, Homo sapiens
  misc_RNA (1)...(19): siRNA sense strand
gggaagauaaucagggaaa

SEQ ID NO: 1235858 - RNA, 19 nt, Homo sapiens
  misc_RNA (1)...(19): siRNA sense strand
gcccaaguauucaaauuac

SEQ ID NO: 1235859 - RNA, 19 nt, Homo sapiens
  misc_RNA (1)...(19): siRNA sense strand
cagaagaucgagagccuaa

SEQ ID NO: 1235860 - RNA, 19 nt, Homo sapiens
  misc_RNA (1)...(19): siRNA sense strand
gggauaucauuguucaaau

SEQ ID NO: 1235861 - RNA, 19 nt, Homo sapiens
  misc_RNA (1)...(19): siRNA sense strand
augcaacucuuucugguuu

SEQ ID NO: 1235862 - RNA, 19 nt, Homo sapiens
  misc_RNA (1)...(19): siRNA sense strand
gaugagaguguuaguaaag

SEQ ID NO: 1235863 - RNA, 19 nt, Homo sapiens
  misc_RNA (1)...(19): siRNA sense strand
cgacuuguguuucguguac

SEQ ID NO: 1235864 - RNA, 19 nt, Homo sapiens
  misc_RNA (1)...(19): siRNA sense strand
aaacuccgcaauucagaua

SEQ ID NO: 1235865 - RNA, 19 nt, Homo sapiens
  misc_RNA (1)...(19): siRNA sense strand
aauuagagcuguguucaga

SEQ ID NO: 1235866 - RNA, 19 nt, Homo sapiens
  misc_RNA (1)...(19): siRNA sense strand
ucaaauacaggacaaagau

SEQ ID NO: 1235867 - RNA, 19 nt, Homo sapiens
  misc_RNA (1)...(19): siRNA sense strand
uggacaaugugaacugaaa

SEQ ID NO: 1235868 - RNA, 19 nt, Homo sapiens
  misc_RNA (1)...(19): siRNA sense strand
cgacuucaaacucgucuuu

SEQ ID NO: 1235869 - RNA, 19 nt, Homo sapiens
  misc_RNA (1)...(19): siRNA sense strand
uccaguggcugaccagauu

SEQ ID NO: 1235870 - RNA, 19 nt, Homo sapiens
  misc_RNA (1)...(19): siRNA sense strand
caaccacugucauccauac

SEQ ID NO: 1235871 - RNA, 19 nt, Homo sapiens
  misc_RNA (1)...(19): siRNA sense strand
caucccaucugccacaguu

SEQ ID NO: 1235872 - RNA, 19 nt, Homo sapiens
  misc_RNA (1)...(19): siRNA sense strand
agcagaugaucgauauuua

SEQ ID NO: 1235873 - RNA, 19 nt, Homo sapiens
  misc_RNA (1)...(19): siRNA sense strand
ugaagcuccugggcuauaa

SEQ ID NO: 1235874 - RNA, 19 nt, Homo sapiens
  misc_RNA (1)...(19): siRNA sense strand
gagguagaagggaagauaa

SEQ ID NO: 1235875 - RNA, 19 nt, Homo sapiens
  misc_RNA (1)...(19): siRNA sense strand
gagccuaacuuugcaacca

SEQ ID NO: 1235876 - RNA, 19 nt, Homo sapiens
  misc_RNA (1)...(19): siRNA sense strand
ugagaguguuaguaaagaa

SEQ ID NO: 1235877 - RNA, 19 nt, Homo sapiens
  misc_RNA (1)...(19): siRNA sense strand
gaaguuugauuugcuccau

SEQ ID NO: 1235878 - RNA, 19 nt, Homo sapiens
  misc_RNA (1)...(19): siRNA sense strand
gcaagaacacagagaagag

SEQ ID NO: 1235879 - RNA, 19 nt, Homo sapiens
  misc_RNA (1)...(19): siRNA sense strand
gaucgagagccuaacuuug

SEQ ID NO: 1235880 - RNA, 19 nt, Homo sapiens
  misc_RNA (1)...(19): siRNA sense strand
ucucaucccuuggcuaguu

SEQ ID NO: 1235881 - RNA, 19 nt, Homo sapiens
  misc_RNA (1)...(19): siRNA sense strand
gauucaggguguucacaug

SEQ ID NO: 1235882 - RNA, 19 nt, Homo sapiens
  misc_RNA (1)...(19): siRNA sense strand
caacuugucuuccuauuaa

SEQ ID NO: 1235883 - RNA, 19 nt, Homo sapiens
  misc_RNA (1)...(19): siRNA sense strand
gaagaugaccuacagauaa

SEQ ID NO: 1235884 - RNA, 19 nt, Homo sapiens
  misc_RNA (1)...(19): siRNA sense strand
gaagauacguggcucaaug

SEQ ID NO: 1235885 - RNA, 19 nt, Homo sapiens
  misc_RNA (1)...(19): siRNA sense strand
ggacagagaaguuugauuu

SEQ ID NO: 1235886 - RNA, 19 nt, Homo sapiens
  misc_RNA (1)...(19): siRNA sense strand
ggacaucucuuagcccaua

SEQ ID NO: 1235887 - RNA, 19 nt, Homo sapiens
  misc_RNA (1)...(19): siRNA sense strand
ugaaggaacuugugagauu

SEQ ID NO: 1235888 - RNA, 19 nt, Homo sapiens
  misc_RNA (1)...(19): siRNA sense strand
ggaaaggccuucuagagau

SEQ ID NO: 1235889 - RNA, 19 nt, Homo sapiens
  misc_RNA (1)...(19): siRNA sense strand
gagaagagauugauuuguc

SEQ ID NO: 1235890 - RNA, 19 nt, Homo sapiens
  misc_RNA (1)...(19): siRNA sense strand
ggacagcacucaacucaag

SEQ ID NO: 1235891 - RNA, 19 nt, Homo sapiens
  misc_RNA (1)...(19): siRNA sense strand
gccaauaaaucuacaaaug

SEQ ID NO: 1235892 - RNA, 19 nt, Homo sapiens
  misc_RNA (1)...(19): siRNA sense strand
gcacucaacucaagcacaa

SEQ ID NO: 1235893 - RNA, 19 nt, Homo sapiens
  misc_RNA (1)...(19): siRNA sense strand
gagaugagaguguuaguaa

SEQ ID NO: 1235894 - RNA, 19 nt, Homo sapiens
  misc_RNA (1)...(19): siRNA sense strand
agaauuagaugcacaugaa

SEQ ID NO: 1235895 - RNA, 19 nt, Homo sapiens
  misc_RNA (1)...(19): siRNA sense strand
gaaucgcuuucacauauuu

SEQ ID NO: 1235896 - RNA, 19 nt, Homo sapiens
  misc_RNA (1)...(19): siRNA sense strand
aaauagaagugcaaccuaa

SEQ ID NO: 1235897 - RNA, 19 nt, Homo sapiens
  misc_RNA (1)...(19): siRNA sense strand
gaagaaacuuggcaucaac

SEQ ID NO: 1235898 - RNA, 19 nt, Homo sapiens
  misc_RNA (1)...(19): siRNA sense strand
ggaccaacuugucuuccua

SEQ ID NO: 1235899 - RNA, 19 nt, Homo sapiens
  misc_RNA (1)...(19): siRNA sense strand
gaaguuccuccauaucaua

SEQ ID NO: 1235900 - RNA, 19 nt, Homo sapiens
  misc_RNA (1)...(19): siRNA sense strand
gacagcagaugaucgauau

SEQ ID NO: 1235901 - RNA, 19 nt, Homo sapiens
  misc_RNA (1)...(19): siRNA sense strand
gauaauaauugccaguaca

SEQ ID NO: 1235902 - RNA, 19 nt, Homo sapiens
  misc_RNA (1)...(19): siRNA sense strand
cauuaaaccugaaccagaa

SEQ ID NO: 1235903 - RNA, 19 nt, Homo sapiens
  misc_RNA (1)...(19): siRNA sense strand
gcaccuucauccuuaauau

SEQ ID NO: 1235904 - RNA, 19 nt, Homo sapiens
  misc_RNA (1)...(19): siRNA sense strand
aaauggaggucaugaaaug

SEQ ID NO: 1235905 - RNA, 19 nt, Homo sapiens
  misc_RNA (1)...(19): siRNA sense strand
ucaagaacuuccucauauu

SEQ ID NO: 1235906 - RNA, 19 nt, Homo sapiens
  misc_RNA (1)...(19): siRNA sense strand
uuacaucuaucucuccuaa

SEQ ID NO: 1235907 - RNA, 19 nt, Homo sapiens
  misc_RNA (1)...(19): siRNA sense strand
guaaauggaggucaugaaa

SEQ ID NO: 1235908 - RNA, 19 nt, Homo sapiens
  misc_RNA (1)...(19): siRNA sense strand
aaacugauauuggcagaaa

SEQ ID NO: 1235909 - RNA, 19 nt, Homo sapiens
  misc_RNA (1)...(19): siRNA sense strand
gaaaggccuucuagagauc

SEQ ID NO: 1235910 - RNA, 19 nt, Homo sapiens
  misc_RNA (1)...(19): siRNA sense strand
ccaccuccaucuacuuuaa

SEQ ID NO: 1235911 - RNA, 19 nt, Homo sapiens
  misc_RNA (1)...(19): siRNA sense strand
gcucaagaacuuccucaua

SEQ ID NO: 1235912 - RNA, 19 nt, Homo sapiens
  misc_RNA (1)...(19): siRNA sense strand
ggacagcagaugaucgaua

SEQ ID NO: 1235913 - RNA, 19 nt, Homo sapiens
  misc_RNA (1)...(19): siRNA sense strand
gaaggaacuugugagauuc

SEQ ID NO: 1235914 - RNA, 19 nt, Homo sapiens
  misc_RNA (1)...(19): siRNA sense strand
aaacuuggcaucaacagua

SEQ ID NO: 1235915 - RNA, 19 nt, Homo sapiens
  misc_RNA (1)...(19): siRNA sense strand
gggcaacugugagcauuaa

SEQ ID NO: 1235916 - RNA, 19 nt, Homo sapiens
  misc_RNA (1)...(19): siRNA sense strand
aagaugaccuacagauaaa

SEQ ID NO: 1235917 - RNA, 19 nt, Homo sapiens
  misc_RNA (1)...(19): siRNA sense strand
guaaagaacagcauaugau

SEQ ID NO: 1235918 - RNA, 19 nt, Homo sapiens
  misc_RNA (1)...(19): siRNA sense strand
agaucaagcugccauacua

SEQ ID NO: 1235919 - RNA, 19 nt, Homo sapiens
  misc_RNA (1)...(19): siRNA sense strand
gcagaaagaauacuagagu

SEQ ID NO: 1235920 - RNA, 19 nt, Homo sapiens
  misc_RNA (1)...(19): siRNA sense strand
ccacuuugcuuaccacauc

SEQ ID NO: 1235921 - RNA, 19 nt, Homo sapiens
  misc_RNA (1)...(19): siRNA sense strand
ggagguagaagggaagaua

SEQ ID NO: 1235922 - RNA, 19 nt, Homo sapiens
  misc_RNA (1)...(19): siRNA sense strand
gaaguacaguaucaacagu

SEQ ID NO: 1235923 - RNA, 19 nt, Homo sapiens
  misc_RNA (1)...(19): siRNA sense strand
aauaauaugucagccagua

SEQ ID NO: 1235924 - RNA, 19 nt, Homo sapiens
  misc_RNA (1)...(19): siRNA sense strand
ggacuuggacacucauuau

SEQ ID NO: 1235925 - RNA, 19 nt, Homo sapiens
  misc_RNA (1)...(19): siRNA sense strand
gaagcaagaacacagagaa

SEQ ID NO: 1235926 - RNA, 19 nt, Homo sapiens
  misc_RNA (1)...(19): siRNA sense strand
cucaagaacuuccucauau

SEQ ID NO: 1235927 - RNA, 19 nt, Homo sapiens
  misc_RNA (1)...(19): siRNA sense strand
gaacacagagaagagauug

SEQ ID NO: 1235928 - RNA, 19 nt, Homo sapiens
  misc_RNA (1)...(19): siRNA sense strand
caagaacuuccucauauug

SEQ ID NO: 1235929 - RNA, 19 nt, Homo sapiens
  misc_RNA (1)...(19): siRNA sense strand
gaagcugcagcccgauuua

SEQ ID NO: 1235930 - RNA, 19 nt, Homo sapiens
  misc_RNA (1)...(19): siRNA sense strand
cuuaauaugucacaguuug

SEQ ID NO: 1235931 - RNA, 19 nt, Homo sapiens
  misc_RNA (1)...(19): siRNA sense strand
uaccgggagucuucucuua

SEQ ID NO: 1235932 - RNA, 19 nt, Homo sapiens
  misc_RNA (1)...(19): siRNA sense strand
gcaaacuaauguuguguac

SEQ ID NO: 1235933 - RNA, 19 nt, Homo sapiens
  misc_RNA (1)...(19): siRNA sense strand
uaugauuccuucuccaauu

SEQ ID NO: 1235934 - RNA, 19 nt, Homo sapiens
  misc_RNA (1)...(19): siRNA sense strand
guacaaaaguucuggaaau

SEQ ID NO: 1235935 - RNA, 19 nt, Homo sapiens
  misc_RNA (1)...(19): siRNA sense strand
ccacuagacuggccuuuac

SEQ ID NO: 1235936 - RNA, 19 nt, Homo sapiens
  misc_RNA (1)...(19): siRNA sense strand
ucacucaccuguuccuuca

SEQ ID NO: 1235937 - RNA, 19 nt, Homo sapiens
  misc_RNA (1)...(19): siRNA sense strand
ucaguuccuucacccuuua

SEQ ID NO: 1235938 - RNA, 19 nt, Homo sapiens
  misc_RNA (1)...(19): siRNA sense strand
gcucaaugcuucuguccau

SEQ ID NO: 1235939 - RNA, 19 nt, Homo sapiens
  misc_RNA (1)...(19): siRNA sense strand
gggcucacauuguccuuga

SEQ ID NO: 1235940 - RNA, 19 nt, Homo sapiens
  misc_RNA (1)...(19): siRNA sense strand
ccaacuugucuuccuauua

SEQ ID NO: 1235941 - RNA, 19 nt, Homo sapiens
  misc_RNA (1)...(19): siRNA sense strand
ugaagaugaccuacagaua

SEQ ID NO: 1235942 - RNA, 19 nt, Homo sapiens
  misc_RNA (1)...(19): siRNA sense strand
ugucuucaguuccaucuuu

SEQ ID NO: 1235943 - RNA, 19 nt, Homo sapiens
  misc_RNA (1)...(19): siRNA sense strand
gcauccauuuacaucuuua

SEQ ID NO: 1235944 - RNA, 19 nt, Homo sapiens
  misc_RNA (1)...(19): siRNA sense strand
ccagcggucugcucaagaa

SEQ ID NO: 1235945 - RNA, 19 nt, Homo sapiens
  misc_RNA (1)...(19): siRNA sense strand
gcaagccaagagauaauaa

SEQ ID NO: 1235946 - RNA, 19 nt, Homo sapiens
  misc_RNA (1)...(19): siRNA sense strand
uuuacgaccucaugcauuu

SEQ ID NO: 1235947 - RNA, 19 nt, Homo sapiens
  misc_RNA (1)...(19): siRNA sense strand
agaagaaacuuggcaucaa

SEQ ID NO: 1235948 - RNA, 19 nt, Homo sapiens
  misc_RNA (1)...(19): siRNA sense strand
gaacagcauaugauuccuu

SEQ ID NO: 1235949 - RNA, 19 nt, Homo sapiens
  misc_RNA (1)...(19): siRNA sense strand
gagauaauaauugccagua

SEQ ID NO: 1235950 - RNA, 19 nt, Homo sapiens
  misc_RNA (1)...(19): siRNA sense strand
gccaagagauaauaauugc

SEQ ID NO: 1235951 - RNA, 19 nt, Homo sapiens
  misc_RNA (1)...(19): siRNA sense strand
ggaagugugacagaagaua

SEQ ID NO: 1235952 - RNA, 19 nt, Homo sapiens
  misc_RNA (1)...(19): siRNA sense strand
gagaagaaacuuggcauca

SEQ ID NO: 1235953 - RNA, 19 nt, Homo sapiens
  misc_RNA (1)...(19): siRNA sense strand
gugcauccauuuacaucuu

SEQ ID NO: 1235954 - RNA, 19 nt, Homo sapiens
  misc_RNA (1)...(19): siRNA sense strand
cagcagaugaucgauauuu

SEQ ID NO: 1235955 - RNA, 19 nt, Homo sapiens
  misc_RNA (1)...(19): siRNA sense strand
cuuaccacaucauggauua

SEQ ID NO: 1235956 - RNA, 19 nt, Homo sapiens
  misc_RNA (1)...(19): siRNA sense strand
acagagaagagauugauuu

SEQ ID NO: 1235957 - RNA, 19 nt, Homo sapiens
  misc_RNA (1)...(19): siRNA sense strand
gggaagauaaucagggaaa

SEQ ID NO: 1235958 - RNA, 19 nt, Homo sapiens
  misc_RNA (1)...(19): siRNA sense strand
gcccaaguauucaaauuac

SEQ ID NO: 1235959 - RNA, 19 nt, Homo sapiens
  misc_RNA (1)...(19): siRNA sense strand
cagaagaucgagagccuaa

SEQ ID NO: 1235960 - RNA, 19 nt, Homo sapiens
  misc_RNA (1)...(19): siRNA sense strand
gggauaucauuguucaaau

SEQ ID NO: 1235961 - RNA, 19 nt, Homo sapiens
  misc_RNA (1)...(19): siRNA sense strand
augcaacucuuucugguuu

SEQ ID NO: 1235962 - RNA, 19 nt, Homo sapiens
  misc_RNA (1)...(19): siRNA sense strand
gaugagaguguuaguaaag

SEQ ID NO: 1235963 - RNA, 19 nt, Homo sapiens
  misc_RNA (1)...(19): siRNA sense strand
cgacuuguguuucguguac

SEQ ID NO: 1235964 - RNA, 19 nt, Homo sapiens
  misc_RNA (1)...(19): siRNA sense strand
aaacuccgcaauucagaua

SEQ ID NO: 1235965 - RNA, 19 nt, Homo sapiens
  misc_RNA (1)...(19): siRNA sense strand
aauuagagcuguguucaga

SEQ ID NO: 1235966 - RNA, 19 nt, Homo sapiens
  misc_RNA (1)...(19): siRNA sense strand
ucaaauacaggacaaagau

SEQ ID NO: 1235967 - RNA, 19 nt, Homo sapiens
  misc_RNA (1)...(19): siRNA sense strand
uggacaaugugaacugaaa

SEQ ID NO: 1235968 - RNA, 19 nt, Homo sapiens
  misc_RNA (1)...(19): siRNA sense strand
cgacuucaaacucgucuuu

SEQ ID NO: 1235969 - RNA, 19 nt, Homo sapiens
  misc_RNA (1)...(19): siRNA sense strand
uccaguggcugaccagauu

SEQ ID NO: 1235970 - RNA, 19 nt, Homo sapiens
  misc_RNA (1)...(19): siRNA sense strand
caaccacugucauccauac

SEQ ID NO: 1235971 - RNA, 19 nt, Homo sapiens
  misc_RNA (1)...(19): siRNA sense strand
caucccaucugccacaguu

SEQ ID NO: 1235972 - RNA, 19 nt, Homo sapiens
  misc_RNA (1)...(19): siRNA sense strand
agcagaugaucgauauuua

SEQ ID NO: 1235973 - RNA, 19 nt, Homo sapiens
  misc_RNA (1)...(19): siRNA sense strand
ugaagcuccugggcuauaa

SEQ ID NO: 1235974 - RNA, 19 nt, Homo sapiens
  misc_RNA (1)...(19): siRNA sense strand
gagguagaagggaagauaa

SEQ ID NO: 1235975 - RNA, 19 nt, Homo sapiens
  misc_RNA (1)...(19): siRNA sense strand
gagccuaacuuugcaacca

SEQ ID NO: 1235976 - RNA, 19 nt, Homo sapiens
  misc_RNA (1)...(19): siRNA sense strand
ugagaguguuaguaaagaa

SEQ ID NO: 1235977 - RNA, 19 nt, Homo sapiens
  misc_RNA (1)...(19): siRNA sense strand
gaaguuugauuugcuccau

SEQ ID NO: 1235978 - RNA, 19 nt, Homo sapiens
  misc_RNA (1)...(19): siRNA sense strand
gcaagaacacagagaagag

SEQ ID NO: 1235979 - RNA, 19 nt, Homo sapiens
  misc_RNA (1)...(19): siRNA sense strand
gaucgagagccuaacuuug

SEQ ID NO: 1235980 - RNA, 19 nt, Homo sapiens
  misc_RNA (1)...(19): siRNA sense strand
ucucaucccuuggcuaguu

SEQ ID NO: 1235981 - RNA, 19 nt, Homo sapiens
  misc_RNA (1)...(19): siRNA sense strand
gauucaggguguucacaug

SEQ ID NO: 1235982 - RNA, 19 nt, Homo sapiens
  misc_RNA (1)...(19): siRNA sense strand
caacuugucuuccuauuaa

SEQ ID NO: 1235983 - RNA, 19 nt, Homo sapiens
  misc_RNA (1)...(19): siRNA sense strand
gaagaugaccuacagauaa

SEQ ID NO: 1235984 - RNA, 19 nt, Homo sapiens
  misc_RNA (1)...(19): siRNA sense strand
gaagauacguggcucaaug

SEQ ID NO: 1235985 - RNA, 19 nt, Homo sapiens
  misc_RNA (1)...(19): siRNA sense strand
ggacagagaaguuugauuu

SEQ ID NO: 1235986 - RNA, 19 nt, Homo sapiens
  misc_RNA (1)...(19): siRNA sense strand
ggacaucucuuagcccaua

SEQ ID NO: 1235987 - RNA, 19 nt, Homo sapiens
  misc_RNA (1)...(19): siRNA sense strand
ugaaggaacuugugagauu

SEQ ID NO: 1235988 - RNA, 19 nt, Homo sapiens
  misc_RNA (1)...(19): siRNA sense strand
ggaaaggccuucuagagau

SEQ ID NO: 1235989 - RNA, 19 nt, Homo sapiens
  misc_RNA (1)...(19): siRNA sense strand
gagaagagauugauuuguc

SEQ ID NO: 1235990 - RNA, 19 nt, Homo sapiens
  misc_RNA (1)...(19): siRNA sense strand
ggacagcacucaacucaag

SEQ ID NO: 1235991 - RNA, 19 nt, Homo sapiens
  misc_RNA (1)...(19): siRNA sense strand
gccaauaaaucuacaaaug

SEQ ID NO: 1235992 - RNA, 19 nt, Homo sapiens
  misc_RNA (1)...(19): siRNA sense strand
gcacucaacucaagcacaa

SEQ ID NO: 1235993 - RNA, 19 nt, Homo sapiens
  misc_RNA (1)...(19): siRNA sense strand
gagaugagaguguuaguaa

SEQ ID NO: 1235994 - RNA, 19 nt, Homo sapiens
  misc_RNA (1)...(19): siRNA sense strand
agaauuagaugcacaugaa

SEQ ID NO: 1235995 - RNA, 19 nt, Homo sapiens
  misc_RNA (1)...(19): siRNA sense strand
gaaucgcuuucacauauuu

SEQ ID NO: 1235996 - RNA, 19 nt, Homo sapiens
  misc_RNA (1)...(19): siRNA sense strand
aaauagaagugcaaccuaa

SEQ ID NO: 1235997 - RNA, 19 nt, Homo sapiens
  misc_RNA (1)...(19): siRNA sense strand
gaagaaacuuggcaucaac

SEQ ID NO: 1235998 - RNA, 19 nt, Homo sapiens
  misc_RNA (1)...(19): siRNA sense strand
ggaccaacuugucuuccua

SEQ ID NO: 1235999 - RNA, 19 nt, Homo sapiens
  misc_RNA (1)...(19): siRNA sense strand
gaaguuccuccauaucaua

SEQ ID NO: 1236000 - RNA, 19 nt, Homo sapiens
  misc_RNA (1)...(19): siRNA sense strand
gacagcagaugaucgauau

SEQ ID NO: 1236001 - RNA, 19 nt, Homo sapiens
  misc_RNA (1)...(19): siRNA sense strand
gauaauaauugccaguaca

SEQ ID NO: 1236002 - RNA, 19 nt, Homo sapiens
  misc_RNA (1)...(19): siRNA sense strand
cauuaaaccugaaccagaa

SEQ ID NO: 1236003 - RNA, 19 nt, Homo sapiens
  misc_RNA (1)...(19): siRNA sense strand
gcaccuucauccuuaauau

SEQ ID NO: 1236004 - RNA, 19 nt, Homo sapiens
  misc_RNA (1)...(19): siRNA sense strand
aaauggaggucaugaaaug

SEQ ID NO: 1236005 - RNA, 19 nt, Homo sapiens
  misc_RNA (1)...(19): siRNA sense strand
ucaagaacuuccucauauu

SEQ ID NO: 1236006 - RNA, 19 nt, Homo sapiens
  misc_RNA (1)...(19): siRNA sense strand
uuacaucuaucucuccuaa

SEQ ID NO: 1236007 - RNA, 19 nt, Homo sapiens
  misc_RNA (1)...(19): siRNA sense strand
guaaauggaggucaugaaa

SEQ ID NO: 1236008 - RNA, 19 nt, Homo sapiens
  misc_RNA (1)...(19): siRNA sense strand
aaacugauauuggcagaaa

SEQ ID NO: 1236009 - RNA, 19 nt, Homo sapiens
  misc_RNA (1)...(19): siRNA sense strand
gaaaggccuucuagagauc

SEQ ID NO: 1236010 - RNA, 19 nt, Homo sapiens
  misc_RNA (1)...(19): siRNA sense strand
ccaccuccaucuacuuuaa

SEQ ID NO: 1236011 - RNA, 19 nt, Homo sapiens
  misc_RNA (1)...(19): siRNA sense strand
gcucaagaacuuccucaua

SEQ ID NO: 1236012 - RNA, 19 nt, Homo sapiens
  misc_RNA (1)...(19): siRNA sense strand
ggacagcagaugaucgaua

SEQ ID NO: 1236013 - RNA, 19 nt, Homo sapiens
  misc_RNA (1)...(19): siRNA sense strand
gaaggaacuugugagauuc

SEQ ID NO: 1236014 - RNA, 19 nt, Homo sapiens
  misc_RNA (1)...(19): siRNA sense strand
aaacuuggcaucaacagua

SEQ ID NO: 1236015 - RNA, 19 nt, Homo sapiens
  misc_RNA (1)...(19): siRNA sense strand
gggcaacugugagcauuaa

SEQ ID NO: 1236016 - RNA, 19 nt, Homo sapiens
  misc_RNA (1)...(19): siRNA sense strand
aagaugaccuacagauaaa

SEQ ID NO: 1236017 - RNA, 19 nt, Homo sapiens
  misc_RNA (1)...(19): siRNA sense strand
guaaagaacagcauaugau

SEQ ID NO: 1236018 - RNA, 19 nt, Homo sapiens
  misc_RNA (1)...(19): siRNA sense strand
agaucaagcugccauacua

SEQ ID NO: 1236019 - RNA, 19 nt, Homo sapiens
  misc_RNA (1)...(19): siRNA sense strand
gcagaaagaauacuagagu

SEQ ID NO: 1236020 - RNA, 19 nt, Homo sapiens
  misc_RNA (1)...(19): siRNA sense strand
ccacuuugcuuaccacauc

SEQ ID NO: 1236021 - RNA, 19 nt, Homo sapiens
  misc_RNA (1)...(19): siRNA sense strand
ggagguagaagggaagaua

SEQ ID NO: 1236022 - RNA, 19 nt, Homo sapiens
  misc_RNA (1)...(19): siRNA sense strand
gaaguacaguaucaacagu

SEQ ID NO: 1236023 - RNA, 19 nt, Homo sapiens
  misc_RNA (1)...(19): siRNA sense strand
aauaauaugucagccagua

SEQ ID NO: 1236024 - RNA, 19 nt, Homo sapiens
  misc_RNA (1)...(19): siRNA sense strand
ggacuuggacacucauuau

SEQ ID NO: 1236025 - RNA, 19 nt, Homo sapiens
  misc_RNA (1)...(19): siRNA sense strand
gaagcaagaacacagagaa

SEQ ID NO: 1236026 - RNA, 19 nt, Homo sapiens
  misc_RNA (1)...(19): siRNA sense strand
cucaagaacuuccucauau

SEQ ID NO: 1236027 - RNA, 19 nt, Homo sapiens
  misc_RNA (1)...(19): siRNA sense strand
gaacacagagaagagauug

SEQ ID NO: 1236028 - RNA, 19 nt, Homo sapiens
  misc_RNA (1)...(19): siRNA sense strand
caagaacuuccucauauug

SEQ ID NO: 1236029 - RNA, 19 nt, Homo sapiens
  misc_RNA (1)...(19): siRNA sense strand
gaagcugcagcccgauuua

SEQ ID NO: 1236030 - RNA, 19 nt, Homo sapiens
  misc_RNA (1)...(19): siRNA sense strand
cuuaauaugucacaguuug

SEQ ID NO: 1236031 - RNA, 19 nt, Homo sapiens
  misc_RNA (1)...(19): siRNA sense strand
uaccgggagucuucucuua

SEQ ID NO: 1236032 - RNA, 19 nt, Homo sapiens
  misc_RNA (1)...(19): siRNA sense strand
gcaaacuaauguuguguac

SEQ ID NO: 1236033 - RNA, 19 nt, Homo sapiens
  misc_RNA (1)...(19): siRNA sense strand
uaugauuccuucuccaauu

SEQ ID NO: 1236034 - RNA, 19 nt, Homo sapiens
  misc_RNA (1)...(19): siRNA sense strand
guacaaaaguucuggaaau

SEQ ID NO: 1236035 - RNA, 19 nt, Homo sapiens
  misc_RNA (1)...(19): siRNA sense strand
ccacuagacuggccuuuac

SEQ ID NO: 1236036 - RNA, 19 nt, Homo sapiens
  misc_RNA (1)...(19): siRNA sense strand
ucacucaccuguuccuuca

SEQ ID NO: 1236037 - RNA, 19 nt, Homo sapiens
  misc_RNA (1)...(19): siRNA sense strand
ucaguuccuucacccuuua

SEQ ID NO: 1236038 - RNA, 19 nt, Homo sapiens
  misc_RNA (1)...(19): siRNA sense strand
gcucaaugcuucuguccau

SEQ ID NO: 1236039 - RNA, 19 nt, Homo sapiens
  misc_RNA (1)...(19): siRNA sense strand
gggcucacauuguccuuga

SEQ ID NO: 1236040 - RNA, 19 nt, Homo sapiens
  misc_RNA (1)...(19): siRNA sense strand
ccaacuugucuuccuauua

SEQ ID NO: 1236041 - RNA, 19 nt, Homo sapiens
  misc_RNA (1)...(19): siRNA sense strand
ugaagaugaccuacagaua

SEQ ID NO: 1236042 - RNA, 19 nt, Homo sapiens
  misc_RNA (1)...(19): siRNA sense strand
ugucuucaguuccaucuuu

SEQ ID NO: 1236043 - RNA, 19 nt, Homo sapiens
  misc_RNA (1)...(19): siRNA sense strand
gcauccauuuacaucuuua

SEQ ID NO: 1236044 - RNA, 19 nt, Homo sapiens
  misc_RNA (1)...(19): siRNA sense strand
ccagcggucugcucaagaa

SEQ ID NO: 1236045 - RNA, 19 nt, Homo sapiens
  misc_RNA (1)...(19): siRNA sense strand
gcaagccaagagauaauaa

SEQ ID NO: 1236046 - RNA, 19 nt, Homo sapiens
  misc_RNA (1)...(19): siRNA sense strand
uuuacgaccucaugcauuu

SEQ ID NO: 1236047 - RNA, 19 nt, Homo sapiens
  misc_RNA (1)...(19): siRNA sense strand
agaagaaacuuggcaucaa

SEQ ID NO: 1236048 - RNA, 19 nt, Homo sapiens
  misc_RNA (1)...(19): siRNA sense strand
gaacagcauaugauuccuu

SEQ ID NO: 1236049 - RNA, 19 nt, Homo sapiens
  misc_RNA (1)...(19): siRNA sense strand
gagauaauaauugccagua

SEQ ID NO: 1236050 - RNA, 19 nt, Homo sapiens
  misc_RNA (1)...(19): siRNA sense strand
gccaagagauaauaauugc

SEQ ID NO: 1236051 - RNA, 19 nt, Homo sapiens
  misc_RNA (1)...(19): siRNA sense strand
ggaagugugacagaagaua

SEQ ID NO: 1236052 - RNA, 19 nt, Homo sapiens
  misc_RNA (1)...(19): siRNA sense strand
gagaagaaacuuggcauca

SEQ ID NO: 1236053 - RNA, 19 nt, Homo sapiens
  misc_RNA (1)...(19): siRNA sense strand
gugcauccauuuacaucuu

SEQ ID NO: 1236054 - RNA, 19 nt, Homo sapiens
  misc_RNA (1)...(19): siRNA sense strand
cagcagaugaucgauauuu

SEQ ID NO: 1236055 - RNA, 19 nt, Homo sapiens
  misc_RNA (1)...(19): siRNA sense strand
cuuaccacaucauggauua

SEQ ID NO: 1236056 - RNA, 19 nt, Homo sapiens
  misc_RNA (1)...(19): siRNA sense strand
acagagaagagauugauuu

SEQ ID NO: 1236057 - RNA, 19 nt, Homo sapiens
  misc_RNA (1)...(19): siRNA sense strand
gggaagauaaucagggaaa

SEQ ID NO: 1236058 - RNA, 19 nt, Homo sapiens
  misc_RNA (1)...(19): siRNA sense strand
gcccaaguauucaaauuac

SEQ ID NO: 1236059 - RNA, 19 nt, Homo sapiens
  misc_RNA (1)...(19): siRNA sense strand
cagaagaucgagagccuaa

SEQ ID NO: 1236060 - RNA, 19 nt, Homo sapiens
  misc_RNA (1)...(19): siRNA sense strand
gggauaucauuguucaaau

SEQ ID NO: 1236061 - RNA, 19 nt, Homo sapiens
  misc_RNA (1)...(19): siRNA sense strand
augcaacucuuucugguuu

SEQ ID NO: 1236062 - RNA, 19 nt, Homo sapiens
  misc_RNA (1)...(19): siRNA sense strand
gaugagaguguuaguaaag

SEQ ID NO: 1236063 - RNA, 19 nt, Homo sapiens
  misc_RNA (1)...(19): siRNA sense strand
cgacuuguguuucguguac

SEQ ID NO: 1236064 - RNA, 19 nt, Homo sapiens
  misc_RNA (1)...(19): siRNA sense strand
aaacuccgcaauucagaua

SEQ ID NO: 1236065 - RNA, 19 nt, Homo sapiens
  misc_RNA (1)...(19): siRNA sense strand
aauuagagcuguguucaga

SEQ ID NO: 1236066 - RNA, 19 nt, Homo sapiens
  misc_RNA (1)...(19): siRNA sense strand
ucaaauacaggacaaagau

SEQ ID NO: 1236067 - RNA, 19 nt, Homo sapiens
  misc_RNA (1)...(19): siRNA sense strand
uggacaaugugaacugaaa

SEQ ID NO: 1236068 - RNA, 19 nt, Homo sapiens
  misc_RNA (1)...(19): siRNA sense strand
cgacuucaaacucgucuuu

SEQ ID NO: 1236069 - RNA, 19 nt, Homo sapiens
  misc_RNA (1)...(19): siRNA sense strand
uccaguggcugaccagauu

SEQ ID NO: 1236070 - RNA, 19 nt, Homo sapiens
  misc_RNA (1)...(19): siRNA sense strand
caaccacugucauccauac

SEQ ID NO: 1236071 - RNA, 19 nt, Homo sapiens
  misc_RNA (1)...(19): siRNA sense strand
caucccaucugccacaguu

SEQ ID NO: 1236072 - RNA, 19 nt, Homo sapiens
  misc_RNA (1)...(19): siRNA sense strand
agcagaugaucgauauuua

SEQ ID NO: 1236073 - RNA, 19 nt, Homo sapiens
  misc_RNA (1)...(19): siRNA sense strand
ugaagcuccugggcuauaa

SEQ ID NO: 1236074 - RNA, 19 nt, Homo sapiens
  misc_RNA (1)...(19): siRNA sense strand
gagguagaagggaagauaa

SEQ ID NO: 1236075 - RNA, 19 nt, Homo sapiens
  misc_RNA (1)...(19): siRNA sense strand
gagccuaacuuugcaacca

SEQ ID NO: 1236076 - RNA, 19 nt, Homo sapiens
  misc_RNA (1)...(19): siRNA sense strand
ugagaguguuaguaaagaa

SEQ ID NO: 1236077 - RNA, 19 nt, Homo sapiens
  misc_RNA (1)...(19): siRNA sense strand
gaaguuugauuugcuccau

SEQ ID NO: 1236078 - RNA, 19 nt, Homo sapiens
  misc_RNA (1)...(19): siRNA sense strand
gcaagaacacagagaagag

SEQ ID NO: 1236079 - RNA, 19 nt, Homo sapiens
  misc_RNA (1)...(19): siRNA sense strand
gaucgagagccuaacuuug

SEQ ID NO: 1236080 - RNA, 19 nt, Homo sapiens
  misc_RNA (1)...(19): siRNA sense strand
ucucaucccuuggcuaguu

SEQ ID NO: 1236081 - RNA, 19 nt, Homo sapiens
  misc_RNA (1)...(19): siRNA sense strand
gauucaggguguucacaug

SEQ ID NO: 1236082 - RNA, 19 nt, Homo sapiens
  misc_RNA (1)...(19): siRNA sense strand
caacuugucuuccuauuaa

SEQ ID NO: 1236083 - RNA, 19 nt, Homo sapiens
  misc_RNA (1)...(19): siRNA sense strand
gaagaugaccuacagauaa

SEQ ID NO: 1236084 - RNA, 19 nt, Homo sapiens
  misc_RNA (1)...(19): siRNA sense strand
gaagauacguggcucaaug

SEQ ID NO: 1236085 - RNA, 19 nt, Homo sapiens
  misc_RNA (1)...(19): siRNA sense strand
ggacagagaaguuugauuu

SEQ ID NO: 1236086 - RNA, 19 nt, Homo sapiens
  misc_RNA (1)...(19): siRNA sense strand
ggacaucucuuagcccaua

SEQ ID NO: 1236087 - RNA, 19 nt, Homo sapiens
  misc_RNA (1)...(19): siRNA sense strand
ugaaggaacuugugagauu

SEQ ID NO: 1236088 - RNA, 19 nt, Homo sapiens
  misc_RNA (1)...(19): siRNA sense strand
ggaaaggccuucuagagau

SEQ ID NO: 1236089 - RNA, 19 nt, Homo sapiens
  misc_RNA (1)...(19): siRNA sense strand
gagaagagauugauuuguc

SEQ ID NO: 1236090 - RNA, 19 nt, Homo sapiens
  misc_RNA (1)...(19): siRNA sense strand
ggacagcacucaacucaag

SEQ ID NO: 1236091 - RNA, 19 nt, Homo sapiens
  misc_RNA (1)...(19): siRNA sense strand
gccaauaaaucuacaaaug

SEQ ID NO: 1236092 - RNA, 19 nt, Homo sapiens
  misc_RNA (1)...(19): siRNA sense strand
gcacucaacucaagcacaa

SEQ ID NO: 1236093 - RNA, 19 nt, Homo sapiens
  misc_RNA (1)...(19): siRNA sense strand
gagaugagaguguuaguaa

SEQ ID NO: 1236094 - RNA, 19 nt, Homo sapiens
  misc_RNA (1)...(19): siRNA sense strand
agaauuagaugcacaugaa

SEQ ID NO: 1236095 - RNA, 19 nt, Homo sapiens
  misc_RNA (1)...(19): siRNA sense strand
gaaucgcuuucacauauuu

SEQ ID NO: 1236096 - RNA, 19 nt, Homo sapiens
  misc_RNA (1)...(19): siRNA sense strand
aaauagaagugcaaccuaa

SEQ ID NO: 1236097 - RNA, 19 nt, Homo sapiens
  misc_RNA (1)...(19): siRNA sense strand
gaagaaacuuggcaucaac

SEQ ID NO: 1236098 - RNA, 19 nt, Homo sapiens
  misc_RNA (1)...(19): siRNA sense strand
ggaccaacuugucuuccua

SEQ ID NO: 1236099 - RNA, 19 nt, Homo sapiens
  misc_RNA (1)...(19): siRNA sense strand
gaaguuccuccauaucaua

SEQ ID NO: 1236100 - RNA, 19 nt, Homo sapiens
  misc_RNA (1)...(19): siRNA sense strand
gacagcagaugaucgauau

SEQ ID NO: 1236101 - RNA, 19 nt, Homo sapiens
  misc_RNA (1)...(19): siRNA sense strand
gauaauaauugccaguaca

SEQ ID NO: 1236102 - RNA, 19 nt, Homo sapiens
  misc_RNA (1)...(19): siRNA sense strand
cauuaaaccugaaccagaa

SEQ ID NO: 1236103 - RNA, 19 nt, Homo sapiens
  misc_RNA (1)...(19): siRNA sense strand
gcaccuucauccuuaauau

SEQ ID NO: 1236104 - RNA, 19 nt, Homo sapiens
  misc_RNA (1)...(19): siRNA sense strand
aaauggaggucaugaaaug

SEQ ID NO: 1236105 - RNA, 19 nt, Homo sapiens
  misc_RNA (1)...(19): siRNA sense strand
ucaagaacuuccucauauu

SEQ ID NO: 1236106 - RNA, 19 nt, Homo sapiens
  misc_RNA (1)...(19): siRNA sense strand
uuacaucuaucucuccuaa

SEQ ID NO: 1236107 - RNA, 19 nt, Homo sapiens
  misc_RNA (1)...(19): siRNA sense strand
guaaauggaggucaugaaa

SEQ ID NO: 1236108 - RNA, 19 nt, Homo sapiens
  misc_RNA (1)...(19): siRNA sense strand
aaacugauauuggcagaaa

SEQ ID NO: 1236109 - RNA, 19 nt, Homo sapiens
  misc_RNA (1)...(19): siRNA sense strand
gaaaggccuucuagagauc

SEQ ID NO: 1236110 - RNA, 19 nt, Homo sapiens
  misc_RNA (1)...(19): siRNA sense strand
ccaccuccaucuacuuuaa

SEQ ID NO: 1236111 - RNA, 19 nt, Homo sapiens
  misc_RNA (1)...(19): siRNA sense strand
gcucaagaacuuccucaua

SEQ ID NO: 1236112 - RNA, 19 nt, Homo sapiens
  misc_RNA (1)...(19): siRNA sense strand
ggacagcagaugaucgaua

SEQ ID NO: 1236113 - RNA, 19 nt, Homo sapiens
  misc_RNA (1)...(19): siRNA sense strand
gaaggaacuugugagauuc

SEQ ID NO: 1236114 - RNA, 19 nt, Homo sapiens
  misc_RNA (1)...(19): siRNA sense strand
aaacuuggcaucaacagua

SEQ ID NO: 1236115 - RNA, 19 nt, Homo sapiens
  misc_RNA (1)...(19): siRNA sense strand
gggcaacugugagcauuaa

SEQ ID NO: 1236116 - RNA, 19 nt, Homo sapiens
  misc_RNA (1)...(19): siRNA sense strand
aagaugaccuacagauaaa

SEQ ID NO: 1236117 - RNA, 19 nt, Homo sapiens
  misc_RNA (1)...(19): siRNA sense strand
guaaagaacagcauaugau

SEQ ID NO: 1236118 - RNA, 19 nt, Homo sapiens
  misc_RNA (1)...(19): siRNA sense strand
agaucaagcugccauacua

SEQ ID NO: 1236119 - RNA, 19 nt, Homo sapiens
  misc_RNA (1)...(19): siRNA sense strand
gcagaaagaauacuagagu

SEQ ID NO: 1236120 - RNA, 19 nt, Homo sapiens
  misc_RNA (1)...(19): siRNA sense strand
ccacuuugcuuaccacauc

SEQ ID NO: 1236121 - RNA, 19 nt, Homo sapiens
  misc_RNA (1)...(19): siRNA sense strand
ggagguagaagggaagaua

SEQ ID NO: 1236122 - RNA, 19 nt, Homo sapiens
  misc_RNA (1)...(19): siRNA sense strand
gaaguacaguaucaacagu

SEQ ID NO: 1236123 - RNA, 19 nt, Homo sapiens
  misc_RNA (1)...(19): siRNA sense strand
aauaauaugucagccagua

SEQ ID NO: 1236124 - RNA, 19 nt, Homo sapiens
  misc_RNA (1)...(19): siRNA sense strand
ggacuuggacacucauuau

SEQ ID NO: 1236125 - RNA, 19 nt, Homo sapiens
  misc_RNA (1)...(19): siRNA sense strand
gaagcaagaacacagagaa

SEQ ID NO: 1236126 - RNA, 19 nt, Homo sapiens
  misc_RNA (1)...(19): siRNA sense strand
cucaagaacuuccucauau

SEQ ID NO: 1236127 - RNA, 19 nt, Homo sapiens
  misc_RNA (1)...(19): siRNA sense strand
gaacacagagaagagauug

SEQ ID NO: 1236128 - RNA, 19 nt, Homo sapiens
  misc_RNA (1)...(19): siRNA sense strand
caagaacuuccucauauug

SEQ ID NO: 1236129 - RNA, 19 nt, Homo sapiens
  misc_RNA (1)...(19): siRNA sense strand
gaagcugcagcccgauuua

SEQ ID NO: 1236130 - RNA, 19 nt, Homo sapiens
  misc_RNA (1)...(19): siRNA sense strand
cuuaauaugucacaguuug

SEQ ID NO: 1236131 - RNA, 19 nt, Homo sapiens
  misc_RNA (1)...(19): siRNA sense strand
uaccgggagucuucucuua

SEQ ID NO: 1236132 - RNA, 19 nt, Homo sapiens
  misc_RNA (1)...(19): siRNA sense strand
gcaaacuaauguuguguac

SEQ ID NO: 1236133 - RNA, 19 nt, Homo sapiens
  misc_RNA (1)...(19): siRNA sense strand
uaugauuccuucuccaauu

SEQ ID NO: 1236134 - RNA, 19 nt, Homo sapiens
  misc_RNA (1)...(19): siRNA sense strand
guacaaaaguucuggaaau

SEQ ID NO: 1236135 - RNA, 19 nt, Homo sapiens
  misc_RNA (1)...(19): siRNA sense strand
ccacuagacuggccuuuac

SEQ ID NO: 1236136 - RNA, 19 nt, Homo sapiens
  misc_RNA (1)...(19): siRNA sense strand
ucacucaccuguuccuuca

SEQ ID NO: 1236137 - RNA, 19 nt, Homo sapiens
  misc_RNA (1)...(19): siRNA sense strand
ucaguuccuucacccuuua

SEQ ID NO: 1236138 - RNA, 19 nt, Homo sapiens
  misc_RNA (1)...(19): siRNA sense strand
gcucaaugcuucuguccau

SEQ ID NO: 1236139 - RNA, 19 nt, Homo sapiens
  misc_RNA (1)...(19): siRNA sense strand
gggcucacauuguccuuga

SEQ ID NO: 1236140 - RNA, 19 nt, Homo sapiens
  misc_RNA (1)...(19): siRNA sense strand
ccaacuugucuuccuauua

SEQ ID NO: 1236141 - RNA, 19 nt, Homo sapiens
  misc_RNA (1)...(19): siRNA sense strand
ugaagaugaccuacagaua

SEQ ID NO: 1236142 - RNA, 19 nt, Homo sapiens
  misc_RNA (1)...(19): siRNA sense strand
ugucuucaguuccaucuuu

SEQ ID NO: 1236143 - RNA, 19 nt, Homo sapiens
  misc_RNA (1)...(19): siRNA sense strand
gcauccauuuacaucuuua

SEQ ID NO: 1236144 - RNA, 19 nt, Homo sapiens
  misc_RNA (1)...(19): siRNA sense strand
ccagcggucugcucaagaa

SEQ ID NO: 1236145 - RNA, 19 nt, Homo sapiens
  misc_RNA (1)...(19): siRNA sense strand
gcaagccaagagauaauaa

SEQ ID NO: 1236146 - RNA, 19 nt, Homo sapiens
  misc_RNA (1)...(19): siRNA sense strand
uuuacgaccucaugcauuu

SEQ ID NO: 1236147 - RNA, 19 nt, Homo sapiens
  misc_RNA (1)...(19): siRNA sense strand
agaagaaacuuggcaucaa

SEQ ID NO: 1236148 - RNA, 19 nt, Homo sapiens
  misc_RNA (1)...(19): siRNA sense strand
gaacagcauaugauuccuu

SEQ ID NO: 1236149 - RNA, 19 nt, Homo sapiens
  misc_RNA (1)...(19): siRNA sense strand
gagauaauaauugccagua

SEQ ID NO: 1236150 - RNA, 19 nt, Homo sapiens
  misc_RNA (1)...(19): siRNA sense strand
gccaagagauaauaauugc

SEQ ID NO: 1236151 - RNA, 19 nt, Homo sapiens
  misc_RNA (1)...(19): siRNA sense strand
ggaagugugacagaagaua

SEQ ID NO: 1236152 - RNA, 19 nt, Homo sapiens
  misc_RNA (1)...(19): siRNA sense strand
gagaagaaacuuggcauca

SEQ ID NO: 1236153 - RNA, 19 nt, Homo sapiens
  misc_RNA (1)...(19): siRNA sense strand
gugcauccauuuacaucuu

SEQ ID NO: 1236154 - RNA, 19 nt, Homo sapiens
  misc_RNA (1)...(19): siRNA sense strand
cagcagaugaucgauauuu

SEQ ID NO: 1236155 - RNA, 19 nt, Homo sapiens
  misc_RNA (1)...(19): siRNA sense strand
cuuaccacaucauggauua

SEQ ID NO: 1236156 - RNA, 19 nt, Homo sapiens
  misc_RNA (1)...(19): siRNA sense strand
acagagaagagauugauuu

SEQ ID NO: 1236157 - RNA, 19 nt, Homo sapiens
  misc_RNA (1)...(19): siRNA sense strand
gggaagauaaucagggaaa

SEQ ID NO: 1236158 - RNA, 19 nt, Homo sapiens
  misc_RNA (1)...(19): siRNA sense strand
gcccaaguauucaaauuac

SEQ ID NO: 1236159 - RNA, 19 nt, Homo sapiens
  misc_RNA (1)...(19): siRNA sense strand
cagaagaucgagagccuaa

SEQ ID NO: 1236160 - RNA, 19 nt, Homo sapiens
  misc_RNA (1)...(19): siRNA sense strand
gggauaucauuguucaaau

SEQ ID NO: 1236161 - RNA, 19 nt, Homo sapiens
  misc_RNA (1)...(19): siRNA sense strand
augcaacucuuucugguuu

SEQ ID NO: 1236162 - RNA, 19 nt, Homo sapiens
  misc_RNA (1)...(19): siRNA sense strand
gaugagaguguuaguaaag

SEQ ID NO: 1236163 - RNA, 19 nt, Homo sapiens
  misc_RNA (1)...(19): siRNA sense strand
cgacuuguguuucguguac

SEQ ID NO: 1236164 - RNA, 19 nt, Homo sapiens
  misc_RNA (1)...(19): siRNA sense strand
aaacuccgcaauucagaua

SEQ ID NO: 1236165 - RNA, 19 nt, Homo sapiens
  misc_RNA (1)...(19): siRNA sense strand
aauuagagcuguguucaga

SEQ ID NO: 1236166 - RNA, 19 nt, Homo sapiens
  misc_RNA (1)...(19): siRNA sense strand
ucaaauacaggacaaagau

SEQ ID NO: 1236167 - RNA, 19 nt, Homo sapiens
  misc_RNA (1)...(19): siRNA sense strand
uggacaaugugaacugaaa

SEQ ID NO: 1236168 - RNA, 19 nt, Homo sapiens
  misc_RNA (1)...(19): siRNA sense strand
cgacuucaaacucgucuuu

SEQ ID NO: 1236169 - RNA, 19 nt, Homo sapiens
  misc_RNA (1)...(19): siRNA sense strand
uccaguggcugaccagauu

SEQ ID NO: 1236170 - RNA, 19 nt, Homo sapiens
  misc_RNA (1)...(19): siRNA sense strand
caaccacugucauccauac

SEQ ID NO: 1236171 - RNA, 19 nt, Homo sapiens
  misc_RNA (1)...(19): siRNA sense strand
caucccaucugccacaguu

SEQ ID NO: 1236172 - RNA, 19 nt, Homo sapiens
  misc_RNA (1)...(19): siRNA sense strand
agcagaugaucgauauuua

SEQ ID NO: 1236173 - RNA, 19 nt, Homo sapiens
  misc_RNA (1)...(19): siRNA sense strand
ugaagcuccugggcuauaa

SEQ ID NO: 1236174 - RNA, 19 nt, Homo sapiens
  misc_RNA (1)...(19): siRNA sense strand
gagguagaagggaagauaa

SEQ ID NO: 1236175 - RNA, 19 nt, Homo sapiens
  misc_RNA (1)...(19): siRNA sense strand
gagccuaacuuugcaacca

SEQ ID NO: 1236176 - RNA, 19 nt, Homo sapiens
  misc_RNA (1)...(19): siRNA sense strand
ugagaguguuaguaaagaa

SEQ ID NO: 1236177 - RNA, 19 nt, Homo sapiens
  misc_RNA (1)...(19): siRNA sense strand
gaaguuugauuugcuccau

SEQ ID NO: 1236178 - RNA, 19 nt, Homo sapiens
  misc_RNA (1)...(19): siRNA sense strand
gcaagaacacagagaagag

SEQ ID NO: 1236179 - RNA, 19 nt, Homo sapiens
  misc_RNA (1)...(19): siRNA sense strand
gaucgagagccuaacuuug

SEQ ID NO: 1236180 - RNA, 19 nt, Homo sapiens
  misc_RNA (1)...(19): siRNA sense strand
ucucaucccuuggcuaguu

SEQ ID NO: 1236181 - RNA, 19 nt, Homo sapiens
  misc_RNA (1)...(19): siRNA sense strand
gauucaggguguucacaug

SEQ ID NO: 1236182 - RNA, 19 nt, Homo sapiens
  misc_RNA (1)...(19): siRNA sense strand
caacuugucuuccuauuaa

SEQ ID NO: 1236183 - RNA, 19 nt, Homo sapiens
  misc_RNA (1)...(19): siRNA sense strand
gaagaugaccuacagauaa

SEQ ID NO: 1236184 - RNA, 19 nt, Homo sapiens
  misc_RNA (1)...(19): siRNA sense strand
gaagauacguggcucaaug

SEQ ID NO: 1236185 - RNA, 19 nt, Homo sapiens
  misc_RNA (1)...(19): siRNA sense strand
ggacagagaaguuugauuu

SEQ ID NO: 1236186 - RNA, 19 nt, Homo sapiens
  misc_RNA (1)...(19): siRNA sense strand
ggacaucucuuagcccaua

SEQ ID NO: 1236187 - RNA, 19 nt, Homo sapiens
  misc_RNA (1)...(19): siRNA sense strand
ugaaggaacuugugagauu

SEQ ID NO: 1236188 - RNA, 19 nt, Homo sapiens
  misc_RNA (1)...(19): siRNA sense strand
ggaaaggccuucuagagau

SEQ ID NO: 1236189 - RNA, 19 nt, Homo sapiens
  misc_RNA (1)...(19): siRNA sense strand
gagaagagauugauuuguc

SEQ ID NO: 1236190 - RNA, 19 nt, Homo sapiens
  misc_RNA (1)...(19): siRNA sense strand
ggacagcacucaacucaag

SEQ ID NO: 1236191 - RNA, 19 nt, Homo sapiens
  misc_RNA (1)...(19): siRNA sense strand
gccaauaaaucuacaaaug

SEQ ID NO: 1236192 - RNA, 19 nt, Homo sapiens
  misc_RNA (1)...(19): siRNA sense strand
gcacucaacucaagcacaa

SEQ ID NO: 1236193 - RNA, 19 nt, Homo sapiens
  misc_RNA (1)...(19): siRNA sense strand
gagaugagaguguuaguaa

SEQ ID NO: 1236194 - RNA, 19 nt, Homo sapiens
  misc_RNA (1)...(19): siRNA sense strand
agaauuagaugcacaugaa

SEQ ID NO: 1236195 - RNA, 19 nt, Homo sapiens
  misc_RNA (1)...(19): siRNA sense strand
gaaucgcuuucacauauuu

SEQ ID NO: 1236196 - RNA, 19 nt, Homo sapiens
  misc_RNA (1)...(19): siRNA sense strand
aaauagaagugcaaccuaa

SEQ ID NO: 1236197 - RNA, 19 nt, Homo sapiens
  misc_RNA (1)...(19): siRNA sense strand
gaagaaacuuggcaucaac

SEQ ID NO: 1236198 - RNA, 19 nt, Homo sapiens
  misc_RNA (1)...(19): siRNA sense strand
ggaccaacuugucuuccua

SEQ ID NO: 1236199 - RNA, 19 nt, Homo sapiens
  misc_RNA (1)...(19): siRNA sense strand
gaaguuccuccauaucaua

SEQ ID NO: 1236200 - RNA, 19 nt, Homo sapiens
  misc_RNA (1)...(19): siRNA sense strand
gacagcagaugaucgauau

SEQ ID NO: 1236201 - RNA, 19 nt, Homo sapiens
  misc_RNA (1)...(19): siRNA sense strand
gauaauaauugccaguaca

SEQ ID NO: 1236202 - RNA, 19 nt, Homo sapiens
  misc_RNA (1)...(19): siRNA sense strand
cauuaaaccugaaccagaa

SEQ ID NO: 1236203 - RNA, 19 nt, Homo sapiens
  misc_RNA (1)...(19): siRNA sense strand
gcaccuucauccuuaauau

SEQ ID NO: 1236204 - RNA, 19 nt, Homo sapiens
  misc_RNA (1)...(19): siRNA sense strand
aaauggaggucaugaaaug

SEQ ID NO: 1236205 - RNA, 19 nt, Homo sapiens
  misc_RNA (1)...(19): siRNA sense strand
ucaagaacuuccucauauu

SEQ ID NO: 1236206 - RNA, 19 nt, Homo sapiens
  misc_RNA (1)...(19): siRNA sense strand
uuacaucuaucucuccuaa

SEQ ID NO: 1236207 - RNA, 19 nt, Homo sapiens
  misc_RNA (1)...(19): siRNA sense strand
guaaauggaggucaugaaa

SEQ ID NO: 1236208 - RNA, 19 nt, Homo sapiens
  misc_RNA (1)...(19): siRNA sense strand
aaacugauauuggcagaaa

SEQ ID NO: 1236209 - RNA, 19 nt, Homo sapiens
  misc_RNA (1)...(19): siRNA sense strand
gaaaggccuucuagagauc

SEQ ID NO: 1236210 - RNA, 19 nt, Homo sapiens
  misc_RNA (1)...(19): siRNA sense strand
ccaccuccaucuacuuuaa

SEQ ID NO: 1236211 - RNA, 19 nt, Homo sapiens
  misc_RNA (1)...(19): siRNA sense strand
gcucaagaacuuccucaua

SEQ ID NO: 1236212 - RNA, 19 nt, Homo sapiens
  misc_RNA (1)...(19): siRNA sense strand
ggacagcagaugaucgaua

SEQ ID NO: 1236213 - RNA, 19 nt, Homo sapiens
  misc_RNA (1)...(19): siRNA sense strand
gaaggaacuugugagauuc

SEQ ID NO: 1236214 - RNA, 19 nt, Homo sapiens
  misc_RNA (1)...(19): siRNA sense strand
aaacuuggcaucaacagua

SEQ ID NO: 1236215 - RNA, 19 nt, Homo sapiens
  misc_RNA (1)...(19): siRNA sense strand
gggcaacugugagcauuaa

SEQ ID NO: 1236216 - RNA, 19 nt, Homo sapiens
  misc_RNA (1)...(19): siRNA sense strand
aagaugaccuacagauaaa

SEQ ID NO: 1236217 - RNA, 19 nt, Homo sapiens
  misc_RNA (1)...(19): siRNA sense strand
guaaagaacagcauaugau

SEQ ID NO: 1236218 - RNA, 19 nt, Homo sapiens
  misc_RNA (1)...(19): siRNA sense strand
agaucaagcugccauacua

SEQ ID NO: 1236219 - RNA, 19 nt, Homo sapiens
  misc_RNA (1)...(19): siRNA sense strand
gcagaaagaauacuagagu

SEQ ID NO: 1236220 - RNA, 19 nt, Homo sapiens
  misc_RNA (1)...(19): siRNA sense strand
ccacuuugcuuaccacauc

SEQ ID NO: 1236221 - RNA, 19 nt, Homo sapiens
  misc_RNA (1)...(19): siRNA sense strand
ggagguagaagggaagaua

SEQ ID NO: 1236222 - RNA, 19 nt, Homo sapiens
  misc_RNA (1)...(19): siRNA sense strand
gaaguacaguaucaacagu

SEQ ID NO: 1236223 - RNA, 19 nt, Homo sapiens
  misc_RNA (1)...(19): siRNA sense strand
aauaauaugucagccagua

SEQ ID NO: 1236224 - RNA, 19 nt, Homo sapiens
  misc_RNA (1)...(19): siRNA sense strand
ggacuuggacacucauuau

SEQ ID NO: 1236225 - RNA, 19 nt, Homo sapiens
  misc_RNA (1)...(19): siRNA sense strand
gaagcaagaacacagagaa

SEQ ID NO: 1236226 - RNA, 19 nt, Homo sapiens
  misc_RNA (1)...(19): siRNA sense strand
cucaagaacuuccucauau

SEQ ID NO: 1236227 - RNA, 19 nt, Homo sapiens
  misc_RNA (1)...(19): siRNA sense strand
gaacacagagaagagauug

SEQ ID NO: 1236228 - RNA, 19 nt, Homo sapiens
  misc_RNA (1)...(19): siRNA sense strand
caagaacuuccucauauug

SEQ ID NO: 1236229 - RNA, 19 nt, Homo sapiens
  misc_RNA (1)...(19): siRNA sense strand
gaagcugcagcccgauuua

SEQ ID NO: 1236230 - RNA, 19 nt, Homo sapiens
  misc_RNA (1)...(19): siRNA sense strand
cuuaauaugucacaguuug

SEQ ID NO: 1236231 - RNA, 19 nt, Homo sapiens
  misc_RNA (1)...(19): siRNA sense strand
uaccgggagucuucucuua

SEQ ID NO: 1236232 - RNA, 19 nt, Homo sapiens
  misc_RNA (1)...(19): siRNA sense strand
gcaaacuaauguuguguac

SEQ ID NO: 1236233 - RNA, 19 nt, Homo sapiens
  misc_RNA (1)...(19): siRNA sense strand
uaugauuccuucuccaauu

SEQ ID NO: 1236234 - RNA, 19 nt, Homo sapiens
  misc_RNA (1)...(19): siRNA sense strand
guacaaaaguucuggaaau

SEQ ID NO: 1236235 - RNA, 19 nt, Homo sapiens
  misc_RNA (1)...(19): siRNA sense strand
ccacuagacuggccuuuac

SEQ ID NO: 1236236 - RNA, 19 nt, Homo sapiens
  misc_RNA (1)...(19): siRNA sense strand
ucacucaccuguuccuuca

SEQ ID NO: 1236237 - RNA, 19 nt, Homo sapiens
  misc_RNA (1)...(19): siRNA sense strand
ucaguuccuucacccuuua

SEQ ID NO: 1236238 - RNA, 19 nt, Homo sapiens
  misc_RNA (1)...(19): siRNA sense strand
gcucaaugcuucuguccau

SEQ ID NO: 1236239 - RNA, 19 nt, Homo sapiens
  misc_RNA (1)...(19): siRNA sense strand
gggcucacauuguccuuga

SEQ ID NO: 1236240 - RNA, 19 nt, Homo sapiens
  misc_RNA (1)...(19): siRNA sense strand
ccaacuugucuuccuauua

SEQ ID NO: 1236241 - RNA, 19 nt, Homo sapiens
  misc_RNA (1)...(19): siRNA sense strand
ugaagaugaccuacagaua

SEQ ID NO: 1236242 - RNA, 19 nt, Homo sapiens
  misc_RNA (1)...(19): siRNA sense strand
ugucuucaguuccaucuuu

SEQ ID NO: 1236243 - RNA, 19 nt, Homo sapiens
  misc_RNA (1)...(19): siRNA sense strand
gcauccauuuacaucuuua

SEQ ID NO: 1236244 - RNA, 19 nt, Homo sapiens
  misc_RNA (1)...(19): siRNA sense strand
ccagcggucugcucaagaa

SEQ ID NO: 1236245 - RNA, 19 nt, Homo sapiens
  misc_RNA (1)...(19): siRNA sense strand
gcaagccaagagauaauaa

SEQ ID NO: 1236246 - RNA, 19 nt, Homo sapiens
  misc_RNA (1)...(19): siRNA sense strand
uuuacgaccucaugcauuu

SEQ ID NO: 1236247 - RNA, 19 nt, Homo sapiens
  misc_RNA (1)...(19): siRNA sense strand
agaagaaacuuggcaucaa

SEQ ID NO: 1236248 - RNA, 19 nt, Homo sapiens
  misc_RNA (1)...(19): siRNA sense strand
gaacagcauaugauuccuu

SEQ ID NO: 1236249 - RNA, 19 nt, Homo sapiens
  misc_RNA (1)...(19): siRNA sense strand
gagauaauaauugccagua

SEQ ID NO: 1236250 - RNA, 19 nt, Homo sapiens
  misc_RNA (1)...(19): siRNA sense strand
gccaagagauaauaauugc

SEQ ID NO: 1236251 - RNA, 19 nt, Homo sapiens
  misc_RNA (1)...(19): siRNA sense strand
ggaagugugacagaagaua

SEQ ID NO: 1236252 - RNA, 19 nt, Homo sapiens
  misc_RNA (1)...(19): siRNA sense strand
gagaagaaacuuggcauca

SEQ ID NO: 1236253 - RNA, 19 nt, Homo sapiens
  misc_RNA (1)...(19): siRNA sense strand
gugcauccauuuacaucuu

SEQ ID NO: 1236254 - RNA, 19 nt, Homo sapiens
  misc_RNA (1)...(19): siRNA sense strand
cagcagaugaucgauauuu

SEQ ID NO: 1236255 - RNA, 19 nt, Homo sapiens
  misc_RNA (1)...(19): siRNA sense strand
cuuaccacaucauggauua

SEQ ID NO: 1236256 - RNA, 19 nt, Homo sapiens
  misc_RNA (1)...(19): siRNA sense strand
acagagaagagauugauuu

SEQ ID NO: 1236257 - RNA, 19 nt, Homo sapiens
  misc_RNA (1)...(19): siRNA sense strand
gggaagauaaucagggaaa

SEQ ID NO: 1236258 - RNA, 19 nt, Homo sapiens
  misc_RNA (1)...(19): siRNA sense strand
gcccaaguauucaaauuac

SEQ ID NO: 1236259 - RNA, 19 nt, Homo sapiens
  misc_RNA (1)...(19): siRNA sense strand
cagaagaucgagagccuaa

SEQ ID NO: 1236260 - RNA, 19 nt, Homo sapiens
  misc_RNA (1)...(19): siRNA sense strand
gggauaucauuguucaaau

SEQ ID NO: 1236261 - RNA, 19 nt, Homo sapiens
  misc_RNA (1)...(19): siRNA sense strand
augcaacucuuucugguuu

SEQ ID NO: 1236262 - RNA, 19 nt, Homo sapiens
  misc_RNA (1)...(19): siRNA sense strand
gaugagaguguuaguaaag

SEQ ID NO: 1236263 - RNA, 19 nt, Homo sapiens
  misc_RNA (1)...(19): siRNA sense strand
cgacuuguguuucguguac

SEQ ID NO: 1236264 - RNA, 19 nt, Homo sapiens
  misc_RNA (1)...(19): siRNA sense strand
aaacuccgcaauucagaua

SEQ ID NO: 1236265 - RNA, 19 nt, Homo sapiens
  misc_RNA (1)...(19): siRNA sense strand
aauuagagcuguguucaga

SEQ ID NO: 1236266 - RNA, 19 nt, Homo sapiens
  misc_RNA (1)...(19): siRNA sense strand
ucaaauacaggacaaagau

SEQ ID NO: 1236267 - RNA, 19 nt, Homo sapiens
  misc_RNA (1)...(19): siRNA sense strand
uggacaaugugaacugaaa

SEQ ID NO: 1236268 - RNA, 19 nt, Homo sapiens
  misc_RNA (1)...(19): siRNA sense strand
cgacuucaaacucgucuuu

SEQ ID NO: 1236269 - RNA, 19 nt, Homo sapiens
  misc_RNA (1)...(19): siRNA sense strand
uccaguggcugaccagauu

SEQ ID NO: 1236270 - RNA, 19 nt, Homo sapiens
  misc_RNA (1)...(19): siRNA sense strand
caaccacugucauccauac

SEQ ID NO: 1236271 - RNA, 19 nt, Homo sapiens
  misc_RNA (1)...(19): siRNA sense strand
caucccaucugccacaguu

SEQ ID NO: 1236272 - RNA, 19 nt, Homo sapiens
  misc_RNA (1)...(19): siRNA sense strand
agcagaugaucgauauuua

SEQ ID NO: 1236273 - RNA, 19 nt, Homo sapiens
  misc_RNA (1)...(19): siRNA sense strand
ugaagcuccugggcuauaa

SEQ ID NO: 1236274 - RNA, 19 nt, Homo sapiens
  misc_RNA (1)...(19): siRNA sense strand
gagguagaagggaagauaa

SEQ ID NO: 1236275 - RNA, 19 nt, Homo sapiens
  misc_RNA (1)...(19): siRNA sense strand
gagccuaacuuugcaacca

SEQ ID NO: 1236276 - RNA, 19 nt, Homo sapiens
  misc_RNA (1)...(19): siRNA sense strand
ugagaguguuaguaaagaa

SEQ ID NO: 1236277 - RNA, 19 nt, Homo sapiens
  misc_RNA (1)...(19): siRNA sense strand
gaaguuugauuugcuccau

SEQ ID NO: 1236278 - RNA, 19 nt, Homo sapiens
  misc_RNA (1)...(19): siRNA sense strand
gcaagaacacagagaagag

SEQ ID NO: 1236279 - RNA, 19 nt, Homo sapiens
  misc_RNA (1)...(19): siRNA sense strand
gaucgagagccuaacuuug

SEQ ID NO: 1236280 - RNA, 19 nt, Homo sapiens
  misc_RNA (1)...(19): siRNA sense strand
ucucaucccuuggcuaguu

SEQ ID NO: 1236281 - RNA, 19 nt, Homo sapiens
  misc_RNA (1)...(19): siRNA sense strand
gauucaggguguucacaug

SEQ ID NO: 1236282 - RNA, 19 nt, Homo sapiens
  misc_RNA (1)...(19): siRNA sense strand
caacuugucuuccuauuaa

SEQ ID NO: 1236283 - RNA, 19 nt, Homo sapiens
  misc_RNA (1)...(19): siRNA sense strand
gaagaugaccuacagauaa

SEQ ID NO: 1236284 - RNA, 19 nt, Homo sapiens
  misc_RNA (1)...(19): siRNA sense strand
gaagauacguggcucaaug

SEQ ID NO: 1236285 - RNA, 19 nt, Homo sapiens
  misc_RNA (1)...(19): siRNA sense strand
ggacagagaaguuugauuu

SEQ ID NO: 1236286 - RNA, 19 nt, Homo sapiens
  misc_RNA (1)...(19): siRNA sense strand
ggacaucucuuagcccaua

SEQ ID NO: 1236287 - RNA, 19 nt, Homo sapiens
  misc_RNA (1)...(19): siRNA sense strand
ugaaggaacuugugagauu

SEQ ID NO: 1236288 - RNA, 19 nt, Homo sapiens
  misc_RNA (1)...(19): siRNA sense strand
ggaaaggccuucuagagau

SEQ ID NO: 1236289 - RNA, 19 nt, Homo sapiens
  misc_RNA (1)...(19): siRNA sense strand
gagaagagauugauuuguc

SEQ ID NO: 1236290 - RNA, 19 nt, Homo sapiens
  misc_RNA (1)...(19): siRNA sense strand
ggacagcacucaacucaag

SEQ ID NO: 1236291 - RNA, 19 nt, Homo sapiens
  misc_RNA (1)...(19): siRNA sense strand
gccaauaaaucuacaaaug

SEQ ID NO: 1236292 - RNA, 19 nt, Homo sapiens
  misc_RNA (1)...(19): siRNA sense strand
gcacucaacucaagcacaa

SEQ ID NO: 1236293 - RNA, 19 nt, Homo sapiens
  misc_RNA (1)...(19): siRNA sense strand
gagaugagaguguuaguaa

SEQ ID NO: 1236294 - RNA, 19 nt, Homo sapiens
  misc_RNA (1)...(19): siRNA sense strand
agaauuagaugcacaugaa

SEQ ID NO: 1236295 - RNA, 19 nt, Homo sapiens
  misc_RNA (1)...(19): siRNA sense strand
gaaucgcuuucacauauuu

SEQ ID NO: 1236296 - RNA, 19 nt, Homo sapiens
  misc_RNA (1)...(19): siRNA sense strand
aaauagaagugcaaccuaa

SEQ ID NO: 1236297 - RNA, 19 nt, Homo sapiens
  misc_RNA (1)...(19): siRNA sense strand
gaagaaacuuggcaucaac

SEQ ID NO: 1236298 - RNA, 19 nt, Homo sapiens
  misc_RNA (1)...(19): siRNA sense strand
ggaccaacuugucuuccua

SEQ ID NO: 1236299 - RNA, 19 nt, Homo sapiens
  misc_RNA (1)...(19): siRNA sense strand
gaaguuccuccauaucaua

SEQ ID NO: 1236300 - RNA, 19 nt, Homo sapiens
  misc_RNA (1)...(19): siRNA sense strand
gacagcagaugaucgauau

SEQ ID NO: 1236301 - RNA, 19 nt, Homo sapiens
  misc_RNA (1)...(19): siRNA sense strand
gauaauaauugccaguaca

SEQ ID NO: 1236302 - RNA, 19 nt, Homo sapiens
  misc_RNA (1)...(19): siRNA sense strand
cauuaaaccugaaccagaa

SEQ ID NO: 1236303 - RNA, 19 nt, Homo sapiens
  misc_RNA (1)...(19): siRNA sense strand
gcaccuucauccuuaauau

SEQ ID NO: 1236304 - RNA, 19 nt, Homo sapiens
  misc_RNA (1)...(19): siRNA sense strand
aaauggaggucaugaaaug

SEQ ID NO: 1236305 - RNA, 19 nt, Homo sapiens
  misc_RNA (1)...(19): siRNA sense strand
ucaagaacuuccucauauu

SEQ ID NO: 1236306 - RNA, 19 nt, Homo sapiens
  misc_RNA (1)...(19): siRNA sense strand
uuacaucuaucucuccuaa

SEQ ID NO: 1236307 - RNA, 19 nt, Homo sapiens
  misc_RNA (1)...(19): siRNA sense strand
guaaauggaggucaugaaa

SEQ ID NO: 1236308 - RNA, 19 nt, Homo sapiens
  misc_RNA (1)...(19): siRNA sense strand
aaacugauauuggcagaaa

SEQ ID NO: 1236309 - RNA, 19 nt, Homo sapiens
  misc_RNA (1)...(19): siRNA sense strand
gaaaggccuucuagagauc

SEQ ID NO: 1236310 - RNA, 19 nt, Homo sapiens
  misc_RNA (1)...(19): siRNA sense strand
ccaccuccaucuacuuuaa

SEQ ID NO: 1236311 - RNA, 19 nt, Homo sapiens
  misc_RNA (1)...(19): siRNA sense strand
gcucaagaacuuccucaua

SEQ ID NO: 1236312 - RNA, 19 nt, Homo sapiens
  misc_RNA (1)...(19): siRNA sense strand
ggacagcagaugaucgaua

SEQ ID NO: 1236313 - RNA, 19 nt, Homo sapiens
  misc_RNA (1)...(19): siRNA sense strand
gaaggaacuugugagauuc

SEQ ID NO: 1236314 - RNA, 19 nt, Homo sapiens
  misc_RNA (1)...(19): siRNA sense strand
aaacuuggcaucaacagua

SEQ ID NO: 1236315 - RNA, 19 nt, Homo sapiens
  misc_RNA (1)...(19): siRNA sense strand
gggcaacugugagcauuaa

SEQ ID NO: 1236316 - RNA, 19 nt, Homo sapiens
  misc_RNA (1)...(19): siRNA sense strand
aagaugaccuacagauaaa

SEQ ID NO: 1236317 - RNA, 19 nt, Homo sapiens
  misc_RNA (1)...(19): siRNA sense strand
guaaagaacagcauaugau

SEQ ID NO: 1236318 - RNA, 19 nt, Homo sapiens
  misc_RNA (1)...(19): siRNA sense strand
agaucaagcugccauacua

SEQ ID NO: 1236319 - RNA, 19 nt, Homo sapiens
  misc_RNA (1)...(19): siRNA sense strand
gcagaaagaauacuagagu

SEQ ID NO: 1236320 - RNA, 19 nt, Homo sapiens
  misc_RNA (1)...(19): siRNA sense strand
ccacuuugcuuaccacauc

SEQ ID NO: 1236321 - RNA, 19 nt, Homo sapiens
  misc_RNA (1)...(19): siRNA sense strand
ggagguagaagggaagaua

SEQ ID NO: 1236322 - RNA, 19 nt, Homo sapiens
  misc_RNA (1)...(19): siRNA sense strand
gaaguacaguaucaacagu

SEQ ID NO: 1236323 - RNA, 19 nt, Homo sapiens
  misc_RNA (1)...(19): siRNA sense strand
aauaauaugucagccagua

SEQ ID NO: 1236324 - RNA, 19 nt, Homo sapiens
  misc_RNA (1)...(19): siRNA sense strand
ggacuuggacacucauuau

SEQ ID NO: 1236325 - RNA, 19 nt, Homo sapiens
  misc_RNA (1)...(19): siRNA sense strand
gaagcaagaacacagagaa

SEQ ID NO: 1236326 - RNA, 19 nt, Homo sapiens
  misc_RNA (1)...(19): siRNA sense strand
cucaagaacuuccucauau

SEQ ID NO: 1236327 - RNA, 19 nt, Homo sapiens
  misc_RNA (1)...(19): siRNA sense strand
gaacacagagaagagauug

SEQ ID NO: 1236328 - RNA, 19 nt, Homo sapiens
  misc_RNA (1)...(19): siRNA sense strand
caagaacuuccucauauug

SEQ ID NO: 1236329 - RNA, 19 nt, Homo sapiens
  misc_RNA (1)...(19): siRNA sense strand
gaagcugcagcccgauuua

SEQ ID NO: 1236330 - RNA, 19 nt, Homo sapiens
  misc_RNA (1)...(19): siRNA sense strand
cuuaauaugucacaguuug

SEQ ID NO: 1236331 - RNA, 19 nt, Homo sapiens
  misc_RNA (1)...(19): siRNA sense strand
uaccgggagucuucucuua

SEQ ID NO: 1236332 - RNA, 19 nt, Homo sapiens
  misc_RNA (1)...(19): siRNA sense strand
gcaaacuaauguuguguac

SEQ ID NO: 1236333 - RNA, 19 nt, Homo sapiens
  misc_RNA (1)...(19): siRNA sense strand
uaugauuccuucuccaauu

SEQ ID NO: 1236334 - RNA, 19 nt, Homo sapiens
  misc_RNA (1)...(19): siRNA sense strand
guacaaaaguucuggaaau

SEQ ID NO: 1236335 - RNA, 19 nt, Homo sapiens
  misc_RNA (1)...(19): siRNA sense strand
ccacuagacuggccuuuac

SEQ ID NO: 1236336 - RNA, 19 nt, Homo sapiens
  misc_RNA (1)...(19): siRNA sense strand
ucacucaccuguuccuuca

SEQ ID NO: 1236337 - RNA, 19 nt, Homo sapiens
  misc_RNA (1)...(19): siRNA sense strand
ucaguuccuucacccuuua

SEQ ID NO: 1236338 - RNA, 19 nt, Homo sapiens
  misc_RNA (1)...(19): siRNA sense strand
gcucaaugcuucuguccau

SEQ ID NO: 1236339 - RNA, 19 nt, Homo sapiens
  misc_RNA (1)...(19): siRNA sense strand
gggcucacauuguccuuga

SEQ ID NO: 1236340 - RNA, 19 nt, Homo sapiens
  misc_RNA (1)...(19): siRNA sense strand
ccaacuugucuuccuauua

SEQ ID NO: 1236341 - RNA, 19 nt, Homo sapiens
  misc_RNA (1)...(19): siRNA sense strand
ugaagaugaccuacagaua

SEQ ID NO: 1236342 - RNA, 19 nt, Homo sapiens
  misc_RNA (1)...(19): siRNA sense strand
ugucuucaguuccaucuuu

SEQ ID NO: 1236343 - RNA, 19 nt, Homo sapiens
  misc_RNA (1)...(19): siRNA sense strand
gcauccauuuacaucuuua

SEQ ID NO: 1236344 - RNA, 19 nt, Homo sapiens
  misc_RNA (1)...(19): siRNA sense strand
ccagcggucugcucaagaa

SEQ ID NO: 1236345 - RNA, 19 nt, Homo sapiens
  misc_RNA (1)...(19): siRNA sense strand
gcaagccaagagauaauaa

SEQ ID NO: 1236346 - RNA, 19 nt, Homo sapiens
  misc_RNA (1)...(19): siRNA sense strand
uuuacgaccucaugcauuu

SEQ ID NO: 1236347 - RNA, 19 nt, Homo sapiens
  misc_RNA (1)...(19): siRNA sense strand
agaagaaacuuggcaucaa

SEQ ID NO: 1236348 - RNA, 19 nt, Homo sapiens
  misc_RNA (1)...(19): siRNA sense strand
gaacagcauaugauuccuu

SEQ ID NO: 1236349 - RNA, 19 nt, Homo sapiens
  misc_RNA (1)...(19): siRNA sense strand
gagauaauaauugccagua

SEQ ID NO: 1236350 - RNA, 19 nt, Homo sapiens
  misc_RNA (1)...(19): siRNA sense strand
gccaagagauaauaauugc

SEQ ID NO: 1236351 - RNA, 19 nt, Homo sapiens
  misc_RNA (1)...(19): siRNA sense strand
ggaagugugacagaagaua

SEQ ID NO: 1236352 - RNA, 19 nt, Homo sapiens
  misc_RNA (1)...(19): siRNA sense strand
gagaagaaacuuggcauca

SEQ ID NO: 1236353 - RNA, 19 nt, Homo sapiens
  misc_RNA (1)...(19): siRNA sense strand
gugcauccauuuacaucuu

SEQ ID NO: 1236354 - RNA, 19 nt, Homo sapiens
  misc_RNA (1)...(19): siRNA sense strand
cagcagaugaucgauauuu

SEQ ID NO: 1236355 - RNA, 19 nt, Homo sapiens
  misc_RNA (1)...(19): siRNA sense strand
cuuaccacaucauggauua

SEQ ID NO: 1236356 - RNA, 19 nt, Homo sapiens
  misc_RNA (1)...(19): siRNA sense strand
acagagaagagauugauuu

SEQ ID NO: 1236357 - RNA, 19 nt, Homo sapiens
  misc_RNA (1)...(19): siRNA sense strand
gggaagauaaucagggaaa

SEQ ID NO: 1236358 - RNA, 19 nt, Homo sapiens
  misc_RNA (1)...(19): siRNA sense strand
gcccaaguauucaaauuac

SEQ ID NO: 1236359 - RNA, 19 nt, Homo sapiens
  misc_RNA (1)...(19): siRNA sense strand
cagaagaucgagagccuaa

SEQ ID NO: 1236360 - RNA, 19 nt, Homo sapiens
  misc_RNA (1)...(19): siRNA sense strand
gggauaucauuguucaaau

SEQ ID NO: 1236361 - RNA, 19 nt, Homo sapiens
  misc_RNA (1)...(19): siRNA sense strand
augcaacucuuucugguuu

SEQ ID NO: 1236362 - RNA, 19 nt, Homo sapiens
  misc_RNA (1)...(19): siRNA sense strand
gaugagaguguuaguaaag

SEQ ID NO: 1236363 - RNA, 19 nt, Homo sapiens
  misc_RNA (1)...(19): siRNA sense strand
cgacuuguguuucguguac

SEQ ID NO: 1236364 - RNA, 19 nt, Homo sapiens
  misc_RNA (1)...(19): siRNA sense strand
aaacuccgcaauucagaua

SEQ ID NO: 1236365 - RNA, 19 nt, Homo sapiens
  misc_RNA (1)...(19): siRNA sense strand
aauuagagcuguguucaga

SEQ ID NO: 1236366 - RNA, 19 nt, Homo sapiens
  misc_RNA (1)...(19): siRNA sense strand
ucaaauacaggacaaagau

SEQ ID NO: 1236367 - RNA, 19 nt, Homo sapiens
  misc_RNA (1)...(19): siRNA sense strand
uggacaaugugaacugaaa

SEQ ID NO: 1236368 - RNA, 19 nt, Homo sapiens
  misc_RNA (1)...(19): siRNA sense strand
cgacuucaaacucgucuuu

SEQ ID NO: 1236369 - RNA, 19 nt, Homo sapiens
  misc_RNA (1)...(19): siRNA sense strand
uccaguggcugaccagauu

SEQ ID NO: 1236370 - RNA, 19 nt, Homo sapiens
  misc_RNA (1)...(19): siRNA sense strand
caaccacugucauccauac

SEQ ID NO: 1236371 - RNA, 19 nt, Homo sapiens
  misc_RNA (1)...(19): siRNA sense strand
caucccaucugccacaguu

SEQ ID NO: 1236372 - RNA, 19 nt, Homo sapiens
  misc_RNA (1)...(19): siRNA sense strand
agcagaugaucgauauuua

SEQ ID NO: 1236373 - RNA, 19 nt, Homo sapiens
  misc_RNA (1)...(19): siRNA sense strand
ugaagcuccugggcuauaa

SEQ ID NO: 1236374 - RNA, 19 nt, Homo sapiens
  misc_RNA (1)...(19): siRNA sense strand
gagguagaagggaagauaa

SEQ ID NO: 1236375 - RNA, 19 nt, Homo sapiens
  misc_RNA (1)...(19): siRNA sense strand
gagccuaacuuugcaacca

SEQ ID NO: 1236376 - RNA, 19 nt, Homo sapiens
  misc_RNA (1)...(19): siRNA sense strand
ugagaguguuaguaaagaa

SEQ ID NO: 1236377 - RNA, 19 nt, Homo sapiens
  misc_RNA (1)...(19): siRNA sense strand
gaaguuugauuugcuccau

SEQ ID NO: 1236378 - RNA, 19 nt, Homo sapiens
  misc_RNA (1)...(19): siRNA sense strand
gcaagaacacagagaagag

SEQ ID NO: 1236379 - RNA, 19 nt, Homo sapiens
  misc_RNA (1)...(19): siRNA sense strand
gaucgagagccuaacuuug

SEQ ID NO: 1236380 - RNA, 19 nt, Homo sapiens
  misc_RNA (1)...(19): siRNA sense strand
ucucaucccuuggcuaguu

SEQ ID NO: 1236381 - RNA, 19 nt, Homo sapiens
  misc_RNA (1)...(19): siRNA sense strand
gauucaggguguucacaug

SEQ ID NO: 1236382 - RNA, 19 nt, Homo sapiens
  misc_RNA (1)...(19): siRNA sense strand
gaaagcagcuggugauuua

SEQ ID NO: 1236383 - RNA, 19 nt, Homo sapiens
  misc_RNA (1)...(19): siRNA sense strand
gcaaguagcucugagaaga

SEQ ID NO: 1236384 - RNA, 19 nt, Homo sapiens
  misc_RNA (1)...(19): siRNA sense strand
gaacggagacgacgccuuu

SEQ ID NO: 1236385 - RNA, 19 nt, Homo sapiens
  misc_RNA (1)...(19): siRNA sense strand
ugaggaagaugacaaguaa

SEQ ID NO: 1236386 - RNA, 19 nt, Homo sapiens
  misc_RNA (1)...(19): siRNA sense strand
cgagagaucuggacccaaa

SEQ ID NO: 1236387 - RNA, 19 nt, Homo sapiens
  misc_RNA (1)...(19): siRNA sense strand
ccaaauacuucucuaagga

SEQ ID NO: 1236388 - RNA, 19 nt, Homo sapiens
  misc_RNA (1)...(19): siRNA sense strand
gcaaggccuucgaugauau

SEQ ID NO: 1236389 - RNA, 19 nt, Homo sapiens
  misc_RNA (1)...(19): siRNA sense strand
guaauaaacgggccacaga

SEQ ID NO: 1236390 - RNA, 19 nt, Homo sapiens
  misc_RNA (1)...(19): siRNA sense strand
gcuaaagcaucagagaaga

SEQ ID NO: 1236391 - RNA, 19 nt, Homo sapiens
  misc_RNA (1)...(19): siRNA sense strand
gcagaggaaggaagugauu

SEQ ID NO: 1236392 - RNA, 19 nt, Homo sapiens
  misc_RNA (1)...(19): siRNA sense strand
caaagagacccagggauga

SEQ ID NO: 1236393 - RNA, 19 nt, Homo sapiens
  misc_RNA (1)...(19): siRNA sense strand
caaauacuucucuaaggaa

SEQ ID NO: 1236394 - RNA, 19 nt, Homo sapiens
  misc_RNA (1)...(19): siRNA sense strand
caacgucacccucucacuu

SEQ ID NO: 1236395 - RNA, 19 nt, Homo sapiens
  misc_RNA (1)...(19): siRNA sense strand
aaaaucagcugugugcaua

SEQ ID NO: 1236396 - RNA, 19 nt, Homo sapiens
  misc_RNA (1)...(19): siRNA sense strand
ugagaagauucacgagaga

SEQ ID NO: 1236397 - RNA, 19 nt, Homo sapiens
  misc_RNA (1)...(19): siRNA sense strand
gccaaauacuucucuaagg

SEQ ID NO: 1236398 - RNA, 19 nt, Homo sapiens
  misc_RNA (1)...(19): siRNA sense strand
aguaugaggccaugacuaa

SEQ ID NO: 1236399 - RNA, 19 nt, Homo sapiens
  misc_RNA (1)...(19): siRNA sense strand
cgaagaucaugcccgagaa

SEQ ID NO: 1236400 - RNA, 19 nt, Homo sapiens
  misc_RNA (1)...(19): siRNA sense strand
gguugaacguccucagaug

SEQ ID NO: 1236401 - RNA, 19 nt, Homo sapiens
  misc_RNA (1)...(19): siRNA sense strand
ggccaugacuaaacuaggu

SEQ ID NO: 1236402 - RNA, 19 nt, Homo sapiens
  misc_RNA (1)...(19): siRNA sense strand
gagacgacgccuuugcaaa

SEQ ID NO: 1236403 - RNA, 19 nt, Homo sapiens
  misc_RNA (1)...(19): siRNA sense strand
ggugauuuaugaagagauc

SEQ ID NO: 1236404 - RNA, 19 nt, Homo sapiens
  misc_RNA (1)...(19): siRNA sense strand
gaagggagugccagaagca

SEQ ID NO: 1236405 - RNA, 19 nt, Homo sapiens
  misc_RNA (1)...(19): siRNA sense strand
cagagaaucaucccgaaga

SEQ ID NO: 1236406 - RNA, 19 nt, Homo sapiens
  misc_RNA (1)...(19): siRNA sense strand
agcaaggccuucgaugaua

SEQ ID NO: 1236407 - RNA, 19 nt, Homo sapiens
  misc_RNA (1)...(19): siRNA sense strand
agaaucaucccgaagauca

SEQ ID NO: 1236408 - RNA, 19 nt, Homo sapiens
  misc_RNA (1)...(19): siRNA sense strand
gaaaguaugaggccaugac

SEQ ID NO: 1236409 - RNA, 19 nt, Homo sapiens
  misc_RNA (1)...(19): siRNA sense strand
gugugcauaugaagagaaa

SEQ ID NO: 1236410 - RNA, 19 nt, Homo sapiens
  misc_RNA (1)...(19): siRNA sense strand
gcauaugaagagaaaguau

SEQ ID NO: 1236411 - RNA, 19 nt, Homo sapiens
  misc_RNA (1)...(19): siRNA sense strand
gggaaaagaugaaauucuc

SEQ ID NO: 1236412 - RNA, 19 nt, Homo sapiens
  misc_RNA (1)...(19): siRNA sense strand
ucagcugugugcauaugaa

SEQ ID NO: 1236413 - RNA, 19 nt, Homo sapiens
  misc_RNA (1)...(19): siRNA sense strand
agaaagcagcuggugauuu

SEQ ID NO: 1236414 - RNA, 19 nt, Homo sapiens
  misc_RNA (1)...(19): siRNA sense strand
gagaaagcagcuggugauu

SEQ ID NO: 1236415 - RNA, 19 nt, Homo sapiens
  misc_RNA (1)...(19): siRNA sense strand
gaagccagcagaggaagga

SEQ ID NO: 1236416 - RNA, 19 nt, Homo sapiens
  misc_RNA (1)...(19): siRNA sense strand
cgagaagccagcagaggaa

SEQ ID NO: 1236417 - RNA, 19 nt, Homo sapiens
  misc_RNA (1)...(19): siRNA sense strand
gaacguccucagaugacuu

SEQ ID NO: 1236418 - RNA, 19 nt, Homo sapiens
  misc_RNA (1)...(19): siRNA sense strand
gaccguaaccgugggaaug

SEQ ID NO: 1236419 - RNA, 19 nt, Homo sapiens
  misc_RNA (1)...(19): siRNA sense strand
cagcgacccugaggaagau

SEQ ID NO: 1236420 - RNA, 19 nt, Homo sapiens
  misc_RNA (1)...(19): siRNA sense strand
ccacagacugcgugagaga

SEQ ID NO: 1236421 - RNA, 19 nt, Homo sapiens
  misc_RNA (1)...(19): siRNA sense strand
ggagacgacgccuuugcaa

SEQ ID NO: 1236422 - RNA, 19 nt, Homo sapiens
  misc_RNA (1)...(19): siRNA sense strand
uaaagcaucagagaagaga

SEQ ID NO: 1236423 - RNA, 19 nt, Homo sapiens
  misc_RNA (1)...(19): siRNA sense strand
acccagggaugaugcuaaa

SEQ ID NO: 1236424 - RNA, 19 nt, Homo sapiens
  misc_RNA (1)...(19): siRNA sense strand
aaguagcucugagaagauu

SEQ ID NO: 1236425 - RNA, 19 nt, Homo sapiens
  misc_RNA (1)...(19): siRNA sense strand
guugaacguccucagauga

SEQ ID NO: 1236426 - RNA, 19 nt, Homo sapiens
  misc_RNA (1)...(19): siRNA sense strand
aagcaaggccuucgaugau

SEQ ID NO: 1236427 - RNA, 19 nt, Homo sapiens
  misc_RNA (1)...(19): siRNA sense strand
agagaaucaucccgaagau

SEQ ID NO: 1236428 - RNA, 19 nt, Homo sapiens
  misc_RNA (1)...(19): siRNA sense strand
gaagaucaugcccgagaag

SEQ ID NO: 1236429 - RNA, 19 nt, Homo sapiens
  misc_RNA (1)...(19): siRNA sense strand
aaucagcugugugcauaug

SEQ ID NO: 1236430 - RNA, 19 nt, Homo sapiens
  misc_RNA (1)...(19): siRNA sense strand
cugaggaagaugacaagua

SEQ ID NO: 1236431 - RNA, 19 nt, Homo sapiens
  misc_RNA (1)...(19): siRNA sense strand
gcuggugauuuaugaagag

SEQ ID NO: 1236432 - RNA, 19 nt, Homo sapiens
  misc_RNA (1)...(19): siRNA sense strand
caucagagaagagaagcaa

SEQ ID NO: 1236433 - RNA, 19 nt, Homo sapiens
  misc_RNA (1)...(19): siRNA sense strand
agagaaagcagcuggugau

SEQ ID NO: 1236434 - RNA, 19 nt, Homo sapiens
  misc_RNA (1)...(19): siRNA sense strand
gacccagggaugaugcuaa

SEQ ID NO: 1236435 - RNA, 19 nt, Homo sapiens
  misc_RNA (1)...(19): siRNA sense strand
caaguagcucugagaagau

SEQ ID NO: 1236436 - RNA, 19 nt, Homo sapiens
  misc_RNA (1)...(19): siRNA sense strand
gaaaagcaaguagcucuga

SEQ ID NO: 1236437 - RNA, 19 nt, Homo sapiens
  misc_RNA (1)...(19): siRNA sense strand
caaggccuucgaugauauu

SEQ ID NO: 1236438 - RNA, 19 nt, Homo sapiens
  misc_RNA (1)...(19): siRNA sense strand
cagcagaggaaggaaguga

SEQ ID NO: 1236439 - RNA, 19 nt, Homo sapiens
  misc_RNA (1)...(19): siRNA sense strand
gugcauaugaagagaaagu

SEQ ID NO: 1236440 - RNA, 19 nt, Homo sapiens
  misc_RNA (1)...(19): siRNA sense strand
gaaaaucagcugugugcau

SEQ ID NO: 1236441 - RNA, 19 nt, Homo sapiens
  misc_RNA (1)...(19): siRNA sense strand
ggcaggcuccagagaauca

SEQ ID NO: 1236442 - RNA, 19 nt, Homo sapiens
  misc_RNA (1)...(19): siRNA sense strand
uaaacgggccacagacucu

SEQ ID NO: 1236443 - RNA, 19 nt, Homo sapiens
  misc_RNA (1)...(19): siRNA sense strand
guaugaggccaugacuaaa

SEQ ID NO: 1236444 - RNA, 19 nt, Homo sapiens
  misc_RNA (1)...(19): siRNA sense strand
ucacuuuucaugcguaaua

SEQ ID NO: 1236445 - RNA, 19 nt, Homo sapiens
  misc_RNA (1)...(19): siRNA sense strand
cuucgaugauauugccaaa

SEQ ID NO: 1236446 - RNA, 19 nt, Homo sapiens
  misc_RNA (1)...(19): siRNA sense strand
acagacugcgugagagaaa

SEQ ID NO: 1236447 - RNA, 19 nt, Homo sapiens
  misc_RNA (1)...(19): siRNA sense strand
gaagagugggaaaagauga

SEQ ID NO: 1236448 - RNA, 19 nt, Homo sapiens
  misc_RNA (1)...(19): siRNA sense strand
gagaagauucacgagagau

SEQ ID NO: 1236449 - RNA, 19 nt, Homo sapiens
  misc_RNA (1)...(19): siRNA sense strand
gagaaucaucccgaagauc

SEQ ID NO: 1236450 - RNA, 19 nt, Homo sapiens
  misc_RNA (1)...(19): siRNA sense strand
aacgucacccucucacuuu

SEQ ID NO: 1236451 - RNA, 19 nt, Homo sapiens
  misc_RNA (1)...(19): siRNA sense strand
ggaaauaugauccaucuua

SEQ ID NO: 1236452 - RNA, 19 nt, Homo sapiens
  misc_RNA (1)...(19): siRNA sense strand
uaauuaaucuggccaauga

SEQ ID NO: 1236453 - RNA, 19 nt, Homo sapiens
  misc_RNA (1)...(19): siRNA sense strand
ggacaaagacuaccugaga

SEQ ID NO: 1236454 - RNA, 19 nt, Homo sapiens
  misc_RNA (1)...(19): siRNA sense strand
uaccugagaucacuaaaua

SEQ ID NO: 1236455 - RNA, 19 nt, Homo sapiens
  misc_RNA (1)...(19): siRNA sense strand
gaaacuguauucuggacaa

SEQ ID NO: 1236456 - RNA, 19 nt, Homo sapiens
  misc_RNA (1)...(19): siRNA sense strand
guccaaggcuuuaucuuug

SEQ ID NO: 1236457 - RNA, 19 nt, Homo sapiens
  misc_RNA (1)...(19): siRNA sense strand
ggaaggaggcggugacaga

SEQ ID NO: 1236458 - RNA, 19 nt, Homo sapiens
  misc_RNA (1)...(19): siRNA sense strand
cagaaggugugcuacauug

SEQ ID NO: 1236459 - RNA, 19 nt, Homo sapiens
  misc_RNA (1)...(19): siRNA sense strand
ggaaugcacuuggaaacug

SEQ ID NO: 1236460 - RNA, 19 nt, Homo sapiens
  misc_RNA (1)...(19): siRNA sense strand
gauguugguuaugguguua

SEQ ID NO: 1236461 - RNA, 19 nt, Homo sapiens
  misc_RNA (1)...(19): siRNA sense strand
gaaggaugguucauaucau

SEQ ID NO: 1236462 - RNA, 19 nt, Homo sapiens
  misc_RNA (1)...(19): siRNA sense strand
ggagaaagacuuccuugca

SEQ ID NO: 1236463 - RNA, 19 nt, Homo sapiens
  misc_RNA (1)...(19): siRNA sense strand
ccaguugccucuugaagug

SEQ ID NO: 1236464 - RNA, 19 nt, Homo sapiens
  misc_RNA (1)...(19): siRNA sense strand
ucaugaagauguugguuau

SEQ ID NO: 1236465 - RNA, 19 nt, Homo sapiens
  misc_RNA (1)...(19): siRNA sense strand
gacaaagacuaccugagau

SEQ ID NO: 1236466 - RNA, 19 nt, Homo sapiens
  misc_RNA (1)...(19): siRNA sense strand
gaaugcacuuggaaacugu

SEQ ID NO: 1236467 - RNA, 19 nt, Homo sapiens
  misc_RNA (1)...(19): siRNA sense strand
gcacuuggaaacuguauuc

SEQ ID NO: 1236468 - RNA, 19 nt, Homo sapiens
  misc_RNA (1)...(19): siRNA sense strand
ggaagagccaggacaugaa

SEQ ID NO: 1236469 - RNA, 19 nt, Homo sapiens
  misc_RNA (1)...(19): siRNA sense strand
gaccaacgcacaacaggaa

SEQ ID NO: 1236470 - RNA, 19 nt, Homo sapiens
  misc_RNA (1)...(19): siRNA sense strand
ggaaacugggaaucucaua

SEQ ID NO: 1236471 - RNA, 19 nt, Homo sapiens
  misc_RNA (1)...(19): siRNA sense strand
gaagacaacucugaaaagu

SEQ ID NO: 1236472 - RNA, 19 nt, Homo sapiens
  misc_RNA (1)...(19): siRNA sense strand
uaacuaaagcgaagagaca

SEQ ID NO: 1236473 - RNA, 19 nt, Homo sapiens
  misc_RNA (1)...(19): siRNA sense strand
ggucaucggguaauuaauc

SEQ ID NO: 1236474 - RNA, 19 nt, Homo sapiens
  misc_RNA (1)...(19): siRNA sense strand
ugagauguuugguuacaau

SEQ ID NO: 1236475 - RNA, 19 nt, Homo sapiens
  misc_RNA (1)...(19): siRNA sense strand
ccacgccaguugccucuug

SEQ ID NO: 1236476 - RNA, 19 nt, Homo sapiens
  misc_RNA (1)...(19): siRNA sense strand
ggcccagaauacauaagua

SEQ ID NO: 1236477 - RNA, 19 nt, Homo sapiens
  misc_RNA (1)...(19): siRNA sense strand
gggagucugugcauuugug

SEQ ID NO: 1236478 - RNA, 19 nt, Homo sapiens
  misc_RNA (1)...(19): siRNA sense strand
gagggucaucggguaauua

SEQ ID NO: 1236479 - RNA, 19 nt, Homo sapiens
  misc_RNA (1)...(19): siRNA sense strand
ugagaucacuaaauaagcu

SEQ ID NO: 1236480 - RNA, 19 nt, Homo sapiens
  misc_RNA (1)...(19): siRNA sense strand
aaggaaauaugauccaucu

SEQ ID NO: 1236481 - RNA, 19 nt, Homo sapiens
  misc_RNA (1)...(19): siRNA sense strand
gaaacugggaaucucauag

SEQ ID NO: 1236482 - RNA, 19 nt, Homo sapiens
  misc_RNA (1)...(19): siRNA sense strand
aaggaugguucauaucaug

SEQ ID NO: 1236483 - RNA, 19 nt, Homo sapiens
  misc_RNA (1)...(19): siRNA sense strand
gaagagccaggacaugaag

SEQ ID NO: 1236484 - RNA, 19 nt, Homo sapiens
  misc_RNA (1)...(19): siRNA sense strand
ggacugaggaagcaauucu

SEQ ID NO: 1236485 - RNA, 19 nt, Homo sapiens
  misc_RNA (1)...(19): siRNA sense strand
ccagaaggugugcuacauu

SEQ ID NO: 1236486 - RNA, 19 nt, Homo sapiens
  misc_RNA (1)...(19): siRNA sense strand
gucaagcccucgucuagag

SEQ ID NO: 1236487 - RNA, 19 nt, Homo sapiens
  misc_RNA (1)...(19): siRNA sense strand
gggagcggauggagaagca

SEQ ID NO: 1236488 - RNA, 19 nt, Homo sapiens
  misc_RNA (1)...(19): siRNA sense strand
gaaggugugcuacauugag

SEQ ID NO: 1236489 - RNA, 19 nt, Homo sapiens
  misc_RNA (1)...(19): siRNA sense strand
guaauuaaucuggccaaug

SEQ ID NO: 1236490 - RNA, 19 nt, Homo sapiens
  misc_RNA (1)...(19): siRNA sense strand
aguccaaggcuuuaucuuu

SEQ ID NO: 1236491 - RNA, 19 nt, Homo sapiens
  misc_RNA (1)...(19): siRNA sense strand
gccagaaggugugcuacau

SEQ ID NO: 1236492 - RNA, 19 nt, Homo sapiens
  misc_RNA (1)...(19): siRNA sense strand
gugggagucugugcauuug

SEQ ID NO: 1236493 - RNA, 19 nt, Homo sapiens
  misc_RNA (1)...(19): siRNA sense strand
caaagacuaccugagauca

SEQ ID NO: 1236494 - RNA, 19 nt, Homo sapiens
  misc_RNA (1)...(19): siRNA sense strand
aaacuguauucuggacaaa

SEQ ID NO: 1236495 - RNA, 19 nt, Homo sapiens
  misc_RNA (1)...(19): siRNA sense strand
gguaauuaaucuggccaau

SEQ ID NO: 1236496 - RNA, 19 nt, Homo sapiens
  misc_RNA (1)...(19): siRNA sense strand
ccucaaguccaaggcuuua

SEQ ID NO: 1236497 - RNA, 19 nt, Homo sapiens
  misc_RNA (1)...(19): siRNA sense strand
cgugggagucugugcauuu

SEQ ID NO: 1236498 - RNA, 19 nt, Homo sapiens
  misc_RNA (1)...(19): siRNA sense strand
ugaggaagcaauucuugga

SEQ ID NO: 1236499 - RNA, 19 nt, Homo sapiens
  misc_RNA (1)...(19): siRNA sense strand
aaugagauguuugguuaca

SEQ ID NO: 1236500 - RNA, 19 nt, Homo sapiens
  misc_RNA (1)...(19): siRNA sense strand
ccagaaaccacaagcaaaa

SEQ ID NO: 1236501 - RNA, 19 nt, Homo sapiens
  misc_RNA (1)...(19): siRNA sense strand
caccagaaaccacaagcaa

SEQ ID NO: 1236502 - RNA, 19 nt, Homo sapiens
  misc_RNA (1)...(19): siRNA sense strand
acuguauucuggacaaaga

SEQ ID NO: 1236503 - RNA, 19 nt, Homo sapiens
  misc_RNA (1)...(19): siRNA sense strand
uccuguaacugucucagaa

SEQ ID NO: 1236504 - RNA, 19 nt, Homo sapiens
  misc_RNA (1)...(19): siRNA sense strand
ugagggucaucggguaauu

SEQ ID NO: 1236505 - RNA, 19 nt, Homo sapiens
  misc_RNA (1)...(19): siRNA sense strand
ggucaagcccucgucuaga

SEQ ID NO: 1236506 - RNA, 19 nt, Homo sapiens
  misc_RNA (1)...(19): siRNA sense strand
ugaagauguugguuauggu

SEQ ID NO: 1236507 - RNA, 19 nt, Homo sapiens
  misc_RNA (1)...(19): siRNA sense strand
acacauuagccuugaacaa

SEQ ID NO: 1236508 - RNA, 19 nt, Homo sapiens
  misc_RNA (1)...(19): siRNA sense strand
ccugagaucacuaaauaag

SEQ ID NO: 1236509 - RNA, 19 nt, Homo sapiens
  misc_RNA (1)...(19): siRNA sense strand
ggcuuuaucuuuggagaag

SEQ ID NO: 1236510 - RNA, 19 nt, Homo sapiens
  misc_RNA (1)...(19): siRNA sense strand
guaccaggccauccagaag

SEQ ID NO: 1236511 - RNA, 19 nt, Homo sapiens
  misc_RNA (1)...(19): siRNA sense strand
aggaagagccaggacauga

SEQ ID NO: 1236512 - RNA, 19 nt, Homo sapiens
  misc_RNA (1)...(19): siRNA sense strand
gccgucagcugagaagagu

SEQ ID NO: 1236513 - RNA, 19 nt, Homo sapiens
  misc_RNA (1)...(19): siRNA sense strand
gaggaggcaagauacaaca

SEQ ID NO: 1236514 - RNA, 19 nt, Homo sapiens
  misc_RNA (1)...(19): siRNA sense strand
ggaggaggcaagauacaac

SEQ ID NO: 1236515 - RNA, 19 nt, Homo sapiens
  misc_RNA (1)...(19): siRNA sense strand
gcggcucaguguuaugcuu

SEQ ID NO: 1236516 - RNA, 19 nt, Homo sapiens
  misc_RNA (1)...(19): siRNA sense strand
cuaaagcgaagagacaaga

SEQ ID NO: 1236517 - RNA, 19 nt, Homo sapiens
  misc_RNA (1)...(19): siRNA sense strand
gagccaggacaugaagaaa

SEQ ID NO: 1236518 - RNA, 19 nt, Homo sapiens
  misc_RNA (1)...(19): siRNA sense strand
ggacuccacacagcguuug

SEQ ID NO: 1236519 - RNA, 19 nt, Homo sapiens
  misc_RNA (1)...(19): siRNA sense strand
cagaacaggacuccacaca

SEQ ID NO: 1236520 - RNA, 19 nt, Homo sapiens
  misc_RNA (1)...(19): siRNA sense strand
gcccagaauacauaaguag

SEQ ID NO: 1236521 - RNA, 19 nt, Homo sapiens
  misc_RNA (1)...(19): siRNA sense strand
cgucagcugagaagaguga

SEQ ID NO: 1236522 - RNA, 19 nt, Homo sapiens
  misc_RNA (1)...(19): siRNA sense strand
caacaggaaacugggaauc

SEQ ID NO: 1236523 - RNA, 19 nt, Homo sapiens
  misc_RNA (1)...(19): siRNA sense strand
ggagucugugcauuuguga

SEQ ID NO: 1236524 - RNA, 19 nt, Homo sapiens
  misc_RNA (1)...(19): siRNA sense strand
ugggaccuccaaacuuaua

SEQ ID NO: 1236525 - RNA, 19 nt, Homo sapiens
  misc_RNA (1)...(19): siRNA sense strand
gccaguacacagcagaaga

SEQ ID NO: 1236526 - RNA, 19 nt, Homo sapiens
  misc_RNA (1)...(19): siRNA sense strand
gaggccagaaggugugcua

SEQ ID NO: 1236527 - RNA, 19 nt, Homo sapiens
  misc_RNA (1)...(19): siRNA sense strand
augaagauguugguuaugg

SEQ ID NO: 1236528 - RNA, 19 nt, Homo sapiens
  misc_RNA (1)...(19): siRNA sense strand
acaggaaacugggaaucuc

SEQ ID NO: 1236529 - RNA, 19 nt, Homo sapiens
  misc_RNA (1)...(19): siRNA sense strand
uacaauggcugggcacacu

SEQ ID NO: 1236530 - RNA, 19 nt, Homo sapiens
  misc_RNA (1)...(19): siRNA sense strand
ucugacacauuagccuuga

SEQ ID NO: 1236531 - RNA, 19 nt, Homo sapiens
  misc_RNA (1)...(19): siRNA sense strand
gucaucggguaauuaaucu

SEQ ID NO: 1236532 - RNA, 19 nt, Homo sapiens
  misc_RNA (1)...(19): siRNA sense strand
agauguugguuaugguguu

SEQ ID NO: 1236533 - RNA, 19 nt, Homo sapiens
  misc_RNA (1)...(19): siRNA sense strand
gggcccagaauacauaagu

SEQ ID NO: 1236534 - RNA, 19 nt, Homo sapiens
  misc_RNA (1)...(19): siRNA sense strand
gggaaucucauaggaagag

SEQ ID NO: 1236535 - RNA, 19 nt, Homo sapiens
  misc_RNA (1)...(19): siRNA sense strand
ccaucacgcagcagaaugu

SEQ ID NO: 1236536 - RNA, 19 nt, Homo sapiens
  misc_RNA (1)...(19): siRNA sense strand
gacuaccugagaucacuaa

SEQ ID NO: 1236537 - RNA, 19 nt, Homo sapiens
  misc_RNA (1)...(19): siRNA sense strand
acaaagacuaccugagauc

SEQ ID NO: 1236538 - RNA, 19 nt, Homo sapiens
  misc_RNA (1)...(19): siRNA sense strand
uaauuaaucuggccaauga

SEQ ID NO: 1236539 - RNA, 19 nt, Homo sapiens
  misc_RNA (1)...(19): siRNA sense strand
cagaaggugugcuacauug

SEQ ID NO: 1236540 - RNA, 19 nt, Homo sapiens
  misc_RNA (1)...(19): siRNA sense strand
ggucaucggguaauuaauc

SEQ ID NO: 1236541 - RNA, 19 nt, Homo sapiens
  misc_RNA (1)...(19): siRNA sense strand
ugagauguuugguuacaau

SEQ ID NO: 1236542 - RNA, 19 nt, Homo sapiens
  misc_RNA (1)...(19): siRNA sense strand
ggcccagaauacauaagua

SEQ ID NO: 1236543 - RNA, 19 nt, Homo sapiens
  misc_RNA (1)...(19): siRNA sense strand
gagggucaucggguaauua

SEQ ID NO: 1236544 - RNA, 19 nt, Homo sapiens
  misc_RNA (1)...(19): siRNA sense strand
ggacugaggaagcaauucu

SEQ ID NO: 1236545 - RNA, 19 nt, Homo sapiens
  misc_RNA (1)...(19): siRNA sense strand
ccagaaggugugcuacauu

SEQ ID NO: 1236546 - RNA, 19 nt, Homo sapiens
  misc_RNA (1)...(19): siRNA sense strand
gaaggugugcuacauugag

SEQ ID NO: 1236547 - RNA, 19 nt, Homo sapiens
  misc_RNA (1)...(19): siRNA sense strand
gccagaaggugugcuacau

SEQ ID NO: 1236548 - RNA, 19 nt, Homo sapiens
  misc_RNA (1)...(19): siRNA sense strand
guaauuaaucuggccaaug

SEQ ID NO: 1236549 - RNA, 19 nt, Homo sapiens
  misc_RNA (1)...(19): siRNA sense strand
gguaauuaaucuggccaau

SEQ ID NO: 1236550 - RNA, 19 nt, Homo sapiens
  misc_RNA (1)...(19): siRNA sense strand
ugaggaagcaauucuugga

SEQ ID NO: 1236551 - RNA, 19 nt, Homo sapiens
  misc_RNA (1)...(19): siRNA sense strand
aaugagauguuugguuaca

SEQ ID NO: 1236552 - RNA, 19 nt, Homo sapiens
  misc_RNA (1)...(19): siRNA sense strand
ugagggucaucggguaauu

SEQ ID NO: 1236553 - RNA, 19 nt, Homo sapiens
  misc_RNA (1)...(19): siRNA sense strand
guaccaggccauccagaag

SEQ ID NO: 1236554 - RNA, 19 nt, Homo sapiens
  misc_RNA (1)...(19): siRNA sense strand
gcggcucaguguuaugcuu

SEQ ID NO: 1236555 - RNA, 19 nt, Homo sapiens
  misc_RNA (1)...(19): siRNA sense strand
gcccagaauacauaaguag

SEQ ID NO: 1236556 - RNA, 19 nt, Homo sapiens
  misc_RNA (1)...(19): siRNA sense strand
gccaguacacagcagaaga

SEQ ID NO: 1236557 - RNA, 19 nt, Homo sapiens
  misc_RNA (1)...(19): siRNA sense strand
gaggccagaaggugugcua

SEQ ID NO: 1236558 - RNA, 19 nt, Homo sapiens
  misc_RNA (1)...(19): siRNA sense strand
gucaucggguaauuaaucu

SEQ ID NO: 1236559 - RNA, 19 nt, Homo sapiens
  misc_RNA (1)...(19): siRNA sense strand
uacaauggcugggcacacu

SEQ ID NO: 1236560 - RNA, 19 nt, Homo sapiens
  misc_RNA (1)...(19): siRNA sense strand
gggcccagaauacauaagu

SEQ ID NO: 1236561 - RNA, 19 nt, Homo sapiens
  misc_RNA (1)...(19): siRNA sense strand
ccaucacgcagcagaaugu

SEQ ID NO: 1236562 - RNA, 19 nt, Homo sapiens
  misc_RNA (1)...(19): siRNA sense strand
uaauuaaucuggccaauga

SEQ ID NO: 1236563 - RNA, 19 nt, Homo sapiens
  misc_RNA (1)...(19): siRNA sense strand
cagaaggugugcuacauug

SEQ ID NO: 1236564 - RNA, 19 nt, Homo sapiens
  misc_RNA (1)...(19): siRNA sense strand
gaaggaugguucauaucau

SEQ ID NO: 1236565 - RNA, 19 nt, Homo sapiens
  misc_RNA (1)...(19): siRNA sense strand
ggucaucggguaauuaauc

SEQ ID NO: 1236566 - RNA, 19 nt, Homo sapiens
  misc_RNA (1)...(19): siRNA sense strand
ugagauguuugguuacaau

SEQ ID NO: 1236567 - RNA, 19 nt, Homo sapiens
  misc_RNA (1)...(19): siRNA sense strand
ggcccagaauacauaagua

SEQ ID NO: 1236568 - RNA, 19 nt, Homo sapiens
  misc_RNA (1)...(19): siRNA sense strand
gggagucugugcauuugug

SEQ ID NO: 1236569 - RNA, 19 nt, Homo sapiens
  misc_RNA (1)...(19): siRNA sense strand
gagggucaucggguaauua

SEQ ID NO: 1236570 - RNA, 19 nt, Homo sapiens
  misc_RNA (1)...(19): siRNA sense strand
ggacugaggaagcaauucu

SEQ ID NO: 1236571 - RNA, 19 nt, Homo sapiens
  misc_RNA (1)...(19): siRNA sense strand
aaggaugguucauaucaug

SEQ ID NO: 1236572 - RNA, 19 nt, Homo sapiens
  misc_RNA (1)...(19): siRNA sense strand
ccagaaggugugcuacauu

SEQ ID NO: 1236573 - RNA, 19 nt, Homo sapiens
  misc_RNA (1)...(19): siRNA sense strand
gaaggugugcuacauugag

SEQ ID NO: 1236574 - RNA, 19 nt, Homo sapiens
  misc_RNA (1)...(19): siRNA sense strand
gccagaaggugugcuacau

SEQ ID NO: 1236575 - RNA, 19 nt, Homo sapiens
  misc_RNA (1)...(19): siRNA sense strand
gugggagucugugcauuug

SEQ ID NO: 1236576 - RNA, 19 nt, Homo sapiens
  misc_RNA (1)...(19): siRNA sense strand
guaauuaaucuggccaaug

SEQ ID NO: 1236577 - RNA, 19 nt, Homo sapiens
  misc_RNA (1)...(19): siRNA sense strand
gguaauuaaucuggccaau

SEQ ID NO: 1236578 - RNA, 19 nt, Homo sapiens
  misc_RNA (1)...(19): siRNA sense strand
cgugggagucugugcauuu

SEQ ID NO: 1236579 - RNA, 19 nt, Homo sapiens
  misc_RNA (1)...(19): siRNA sense strand
ugaggaagcaauucuugga

SEQ ID NO: 1236580 - RNA, 19 nt, Homo sapiens
  misc_RNA (1)...(19): siRNA sense strand
aaugagauguuugguuaca

SEQ ID NO: 1236581 - RNA, 19 nt, Homo sapiens
  misc_RNA (1)...(19): siRNA sense strand
ugagggucaucggguaauu

SEQ ID NO: 1236582 - RNA, 19 nt, Homo sapiens
  misc_RNA (1)...(19): siRNA sense strand
guaccaggccauccagaag

SEQ ID NO: 1236583 - RNA, 19 nt, Homo sapiens
  misc_RNA (1)...(19): siRNA sense strand
gcggcucaguguuaugcuu

SEQ ID NO: 1236584 - RNA, 19 nt, Homo sapiens
  misc_RNA (1)...(19): siRNA sense strand
gcccagaauacauaaguag

SEQ ID NO: 1236585 - RNA, 19 nt, Homo sapiens
  misc_RNA (1)...(19): siRNA sense strand
gccaguacacagcagaaga

SEQ ID NO: 1236586 - RNA, 19 nt, Homo sapiens
  misc_RNA (1)...(19): siRNA sense strand
ggagucugugcauuuguga

SEQ ID NO: 1236587 - RNA, 19 nt, Homo sapiens
  misc_RNA (1)...(19): siRNA sense strand
gaggccagaaggugugcua

SEQ ID NO: 1236588 - RNA, 19 nt, Homo sapiens
  misc_RNA (1)...(19): siRNA sense strand
gucaucggguaauuaaucu

SEQ ID NO: 1236589 - RNA, 19 nt, Homo sapiens
  misc_RNA (1)...(19): siRNA sense strand
uacaauggcugggcacacu

SEQ ID NO: 1236590 - RNA, 19 nt, Homo sapiens
  misc_RNA (1)...(19): siRNA sense strand
gggcccagaauacauaagu

SEQ ID NO: 1236591 - RNA, 19 nt, Homo sapiens
  misc_RNA (1)...(19): siRNA sense strand
ccaucacgcagcagaaugu

SEQ ID NO: 1236592 - RNA, 19 nt, Homo sapiens
  misc_RNA (1)...(19): siRNA sense strand
uaauuaaucuggccaauga

SEQ ID NO: 1236593 - RNA, 19 nt, Homo sapiens
  misc_RNA (1)...(19): siRNA sense strand
ggacaaagacuaccugaga

SEQ ID NO: 1236594 - RNA, 19 nt, Homo sapiens
  misc_RNA (1)...(19): siRNA sense strand
uaccugagaucacuaaaua

SEQ ID NO: 1236595 - RNA, 19 nt, Homo sapiens
  misc_RNA (1)...(19): siRNA sense strand
gaaacuguauucuggacaa

SEQ ID NO: 1236596 - RNA, 19 nt, Homo sapiens
  misc_RNA (1)...(19): siRNA sense strand
guccaaggcuuuaucuuug

SEQ ID NO: 1236597 - RNA, 19 nt, Homo sapiens
  misc_RNA (1)...(19): siRNA sense strand
ggaaggaggcggugacaga

SEQ ID NO: 1236598 - RNA, 19 nt, Homo sapiens
  misc_RNA (1)...(19): siRNA sense strand
cagaaggugugcuacauug

SEQ ID NO: 1236599 - RNA, 19 nt, Homo sapiens
  misc_RNA (1)...(19): siRNA sense strand
ggaaugcacuuggaaacug

SEQ ID NO: 1236600 - RNA, 19 nt, Homo sapiens
  misc_RNA (1)...(19): siRNA sense strand
gauguugguuaugguguua

SEQ ID NO: 1236601 - RNA, 19 nt, Homo sapiens
  misc_RNA (1)...(19): siRNA sense strand
gaaggaugguucauaucau

SEQ ID NO: 1236602 - RNA, 19 nt, Homo sapiens
  misc_RNA (1)...(19): siRNA sense strand
ucaugaagauguugguuau

SEQ ID NO: 1236603 - RNA, 19 nt, Homo sapiens
  misc_RNA (1)...(19): siRNA sense strand
gacaaagacuaccugagau

SEQ ID NO: 1236604 - RNA, 19 nt, Homo sapiens
  misc_RNA (1)...(19): siRNA sense strand
gaaugcacuuggaaacugu

SEQ ID NO: 1236605 - RNA, 19 nt, Homo sapiens
  misc_RNA (1)...(19): siRNA sense strand
gcacuuggaaacuguauuc

SEQ ID NO: 1236606 - RNA, 19 nt, Homo sapiens
  misc_RNA (1)...(19): siRNA sense strand
ggucaucggguaauuaauc

SEQ ID NO: 1236607 - RNA, 19 nt, Homo sapiens
  misc_RNA (1)...(19): siRNA sense strand
ugagauguuugguuacaau

SEQ ID NO: 1236608 - RNA, 19 nt, Homo sapiens
  misc_RNA (1)...(19): siRNA sense strand
ggcccagaauacauaagua

SEQ ID NO: 1236609 - RNA, 19 nt, Homo sapiens
  misc_RNA (1)...(19): siRNA sense strand
gggagucugugcauuugug

SEQ ID NO: 1236610 - RNA, 19 nt, Homo sapiens
  misc_RNA (1)...(19): siRNA sense strand
gagggucaucggguaauua

SEQ ID NO: 1236611 - RNA, 19 nt, Homo sapiens
  misc_RNA (1)...(19): siRNA sense strand
aaggaugguucauaucaug

SEQ ID NO: 1236612 - RNA, 19 nt, Homo sapiens
  misc_RNA (1)...(19): siRNA sense strand
ggacugaggaagcaauucu

SEQ ID NO: 1236613 - RNA, 19 nt, Homo sapiens
  misc_RNA (1)...(19): siRNA sense strand
ccagaaggugugcuacauu

SEQ ID NO: 1236614 - RNA, 19 nt, Homo sapiens
  misc_RNA (1)...(19): siRNA sense strand
gaaggugugcuacauugag

SEQ ID NO: 1236615 - RNA, 19 nt, Homo sapiens
  misc_RNA (1)...(19): siRNA sense strand
gccagaaggugugcuacau

SEQ ID NO: 1236616 - RNA, 19 nt, Homo sapiens
  misc_RNA (1)...(19): siRNA sense strand
aguccaaggcuuuaucuuu

SEQ ID NO: 1236617 - RNA, 19 nt, Homo sapiens
  misc_RNA (1)...(19): siRNA sense strand
gugggagucugugcauuug

SEQ ID NO: 1236618 - RNA, 19 nt, Homo sapiens
  misc_RNA (1)...(19): siRNA sense strand
guaauuaaucuggccaaug

SEQ ID NO: 1236619 - RNA, 19 nt, Homo sapiens
  misc_RNA (1)...(19): siRNA sense strand
caaagacuaccugagauca

SEQ ID NO: 1236620 - RNA, 19 nt, Homo sapiens
  misc_RNA (1)...(19): siRNA sense strand
aaacuguauucuggacaaa

SEQ ID NO: 1236621 - RNA, 19 nt, Homo sapiens
  misc_RNA (1)...(19): siRNA sense strand
gguaauuaaucuggccaau

SEQ ID NO: 1236622 - RNA, 19 nt, Homo sapiens
  misc_RNA (1)...(19): siRNA sense strand
ccucaaguccaaggcuuua

SEQ ID NO: 1236623 - RNA, 19 nt, Homo sapiens
  misc_RNA (1)...(19): siRNA sense strand
cgugggagucugugcauuu

SEQ ID NO: 1236624 - RNA, 19 nt, Homo sapiens
  misc_RNA (1)...(19): siRNA sense strand
ugaggaagcaauucuugga

SEQ ID NO: 1236625 - RNA, 19 nt, Homo sapiens
  misc_RNA (1)...(19): siRNA sense strand
aaugagauguuugguuaca

SEQ ID NO: 1236626 - RNA, 19 nt, Homo sapiens
  misc_RNA (1)...(19): siRNA sense strand
acuguauucuggacaaaga

SEQ ID NO: 1236627 - RNA, 19 nt, Homo sapiens
  misc_RNA (1)...(19): siRNA sense strand
ugagggucaucggguaauu

SEQ ID NO: 1236628 - RNA, 19 nt, Homo sapiens
  misc_RNA (1)...(19): siRNA sense strand
ugaagauguugguuauggu

SEQ ID NO: 1236629 - RNA, 19 nt, Homo sapiens
  misc_RNA (1)...(19): siRNA sense strand
guaccaggccauccagaag

SEQ ID NO: 1236630 - RNA, 19 nt, Homo sapiens
  misc_RNA (1)...(19): siRNA sense strand
gcggcucaguguuaugcuu

SEQ ID NO: 1236631 - RNA, 19 nt, Homo sapiens
  misc_RNA (1)...(19): siRNA sense strand
ggcuuuaucuuuggagaag

SEQ ID NO: 1236632 - RNA, 19 nt, Homo sapiens
  misc_RNA (1)...(19): siRNA sense strand
gcccagaauacauaaguag

SEQ ID NO: 1236633 - RNA, 19 nt, Homo sapiens
  misc_RNA (1)...(19): siRNA sense strand
gccaguacacagcagaaga

SEQ ID NO: 1236634 - RNA, 19 nt, Homo sapiens
  misc_RNA (1)...(19): siRNA sense strand
gaggccagaaggugugcua

SEQ ID NO: 1236635 - RNA, 19 nt, Homo sapiens
  misc_RNA (1)...(19): siRNA sense strand
ggagucugugcauuuguga

SEQ ID NO: 1236636 - RNA, 19 nt, Homo sapiens
  misc_RNA (1)...(19): siRNA sense strand
gucaucggguaauuaaucu

SEQ ID NO: 1236637 - RNA, 19 nt, Homo sapiens
  misc_RNA (1)...(19): siRNA sense strand
agauguugguuaugguguu

SEQ ID NO: 1236638 - RNA, 19 nt, Homo sapiens
  misc_RNA (1)...(19): siRNA sense strand
augaagauguugguuaugg

SEQ ID NO: 1236639 - RNA, 19 nt, Homo sapiens
  misc_RNA (1)...(19): siRNA sense strand
uacaauggcugggcacacu

SEQ ID NO: 1236640 - RNA, 19 nt, Homo sapiens
  misc_RNA (1)...(19): siRNA sense strand
ccaucacgcagcagaaugu

SEQ ID NO: 1236641 - RNA, 19 nt, Homo sapiens
  misc_RNA (1)...(19): siRNA sense strand
gacuaccugagaucacuaa

SEQ ID NO: 1236642 - RNA, 19 nt, Homo sapiens
  misc_RNA (1)...(19): siRNA sense strand
acaaagacuaccugagauc

SEQ ID NO: 1236643 - RNA, 19 nt, Homo sapiens
  misc_RNA (1)...(19): siRNA sense strand
gggcccagaauacauaagu

SEQ ID NO: 1236644 - RNA, 19 nt, Homo sapiens
  misc_RNA (1)...(19): siRNA sense strand
ggaaauaugauccaucuua

SEQ ID NO: 1236645 - RNA, 19 nt, Homo sapiens
  misc_RNA (1)...(19): siRNA sense strand
uaauuaaucuggccaauga

SEQ ID NO: 1236646 - RNA, 19 nt, Homo sapiens
  misc_RNA (1)...(19): siRNA sense strand
ggacaaagacuaccugaga

SEQ ID NO: 1236647 - RNA, 19 nt, Homo sapiens
  misc_RNA (1)...(19): siRNA sense strand
uaccugagaucacuaaaua

SEQ ID NO: 1236648 - RNA, 19 nt, Homo sapiens
  misc_RNA (1)...(19): siRNA sense strand
gaaacuguauucuggacaa

SEQ ID NO: 1236649 - RNA, 19 nt, Homo sapiens
  misc_RNA (1)...(19): siRNA sense strand
guccaaggcuuuaucuuug

SEQ ID NO: 1236650 - RNA, 19 nt, Homo sapiens
  misc_RNA (1)...(19): siRNA sense strand
ggaaggaggcggugacaga

SEQ ID NO: 1236651 - RNA, 19 nt, Homo sapiens
  misc_RNA (1)...(19): siRNA sense strand
cagaaggugugcuacauug

SEQ ID NO: 1236652 - RNA, 19 nt, Homo sapiens
  misc_RNA (1)...(19): siRNA sense strand
ggaaugcacuuggaaacug

SEQ ID NO: 1236653 - RNA, 19 nt, Homo sapiens
  misc_RNA (1)...(19): siRNA sense strand
gauguugguuaugguguua

SEQ ID NO: 1236654 - RNA, 19 nt, Homo sapiens
  misc_RNA (1)...(19): siRNA sense strand
gaaggaugguucauaucau

SEQ ID NO: 1236655 - RNA, 19 nt, Homo sapiens
  misc_RNA (1)...(19): siRNA sense strand
ggagaaagacuuccuugca

SEQ ID NO: 1236656 - RNA, 19 nt, Homo sapiens
  misc_RNA (1)...(19): siRNA sense strand
ccaguugccucuugaagug

SEQ ID NO: 1236657 - RNA, 19 nt, Homo sapiens
  misc_RNA (1)...(19): siRNA sense strand
ucaugaagauguugguuau

SEQ ID NO: 1236658 - RNA, 19 nt, Homo sapiens
  misc_RNA (1)...(19): siRNA sense strand
gacaaagacuaccugagau

SEQ ID NO: 1236659 - RNA, 19 nt, Homo sapiens
  misc_RNA (1)...(19): siRNA sense strand
gaaugcacuuggaaacugu

SEQ ID NO: 1236660 - RNA, 19 nt, Homo sapiens
  misc_RNA (1)...(19): siRNA sense strand
gcacuuggaaacuguauuc

SEQ ID NO: 1236661 - RNA, 19 nt, Homo sapiens
  misc_RNA (1)...(19): siRNA sense strand
ggaagagccaggacaugaa

SEQ ID NO: 1236662 - RNA, 19 nt, Homo sapiens
  misc_RNA (1)...(19): siRNA sense strand
gaccaacgcacaacaggaa

SEQ ID NO: 1236663 - RNA, 19 nt, Homo sapiens
  misc_RNA (1)...(19): siRNA sense strand
ggaaacugggaaucucaua

SEQ ID NO: 1236664 - RNA, 19 nt, Homo sapiens
  misc_RNA (1)...(19): siRNA sense strand
gaagacaacucugaaaagu

SEQ ID NO: 1236665 - RNA, 19 nt, Homo sapiens
  misc_RNA (1)...(19): siRNA sense strand
uaacuaaagcgaagagaca

SEQ ID NO: 1236666 - RNA, 19 nt, Homo sapiens
  misc_RNA (1)...(19): siRNA sense strand
ggucaucggguaauuaauc

SEQ ID NO: 1236667 - RNA, 19 nt, Homo sapiens
  misc_RNA (1)...(19): siRNA sense strand
ugagauguuugguuacaau

SEQ ID NO: 1236668 - RNA, 19 nt, Homo sapiens
  misc_RNA (1)...(19): siRNA sense strand
ccacgccaguugccucuug

SEQ ID NO: 1236669 - RNA, 19 nt, Homo sapiens
  misc_RNA (1)...(19): siRNA sense strand
ggcccagaauacauaagua

SEQ ID NO: 1236670 - RNA, 19 nt, Homo sapiens
  misc_RNA (1)...(19): siRNA sense strand
gggagucugugcauuugug

SEQ ID NO: 1236671 - RNA, 19 nt, Homo sapiens
  misc_RNA (1)...(19): siRNA sense strand
gagggucaucggguaauua

SEQ ID NO: 1236672 - RNA, 19 nt, Homo sapiens
  misc_RNA (1)...(19): siRNA sense strand
ugagaucacuaaauaagcu

SEQ ID NO: 1236673 - RNA, 19 nt, Homo sapiens
  misc_RNA (1)...(19): siRNA sense strand
aaggaaauaugauccaucu

SEQ ID NO: 1236674 - RNA, 19 nt, Homo sapiens
  misc_RNA (1)...(19): siRNA sense strand
gaaacugggaaucucauag

SEQ ID NO: 1236675 - RNA, 19 nt, Homo sapiens
  misc_RNA (1)...(19): siRNA sense strand
aaggaugguucauaucaug

SEQ ID NO: 1236676 - RNA, 19 nt, Homo sapiens
  misc_RNA (1)...(19): siRNA sense strand
gaagagccaggacaugaag

SEQ ID NO: 1236677 - RNA, 19 nt, Homo sapiens
  misc_RNA (1)...(19): siRNA sense strand
ggacugaggaagcaauucu

SEQ ID NO: 1236678 - RNA, 19 nt, Homo sapiens
  misc_RNA (1)...(19): siRNA sense strand
ccagaaggugugcuacauu

SEQ ID NO: 1236679 - RNA, 19 nt, Homo sapiens
  misc_RNA (1)...(19): siRNA sense strand
gucaagcccucgucuagag

SEQ ID NO: 1236680 - RNA, 19 nt, Homo sapiens
  misc_RNA (1)...(19): siRNA sense strand
gggagcggauggagaagca

SEQ ID NO: 1236681 - RNA, 19 nt, Homo sapiens
  misc_RNA (1)...(19): siRNA sense strand
gaaggugugcuacauugag

SEQ ID NO: 1236682 - RNA, 19 nt, Homo sapiens
  misc_RNA (1)...(19): siRNA sense strand
guaauuaaucuggccaaug

SEQ ID NO: 1236683 - RNA, 19 nt, Homo sapiens
  misc_RNA (1)...(19): siRNA sense strand
aguccaaggcuuuaucuuu

SEQ ID NO: 1236684 - RNA, 19 nt, Homo sapiens
  misc_RNA (1)...(19): siRNA sense strand
gccagaaggugugcuacau

SEQ ID NO: 1236685 - RNA, 19 nt, Homo sapiens
  misc_RNA (1)...(19): siRNA sense strand
gugggagucugugcauuug

SEQ ID NO: 1236686 - RNA, 19 nt, Homo sapiens
  misc_RNA (1)...(19): siRNA sense strand
caaagacuaccugagauca

SEQ ID NO: 1236687 - RNA, 19 nt, Homo sapiens
  misc_RNA (1)...(19): siRNA sense strand
aaacuguauucuggacaaa

SEQ ID NO: 1236688 - RNA, 19 nt, Homo sapiens
  misc_RNA (1)...(19): siRNA sense strand
gguaauuaaucuggccaau

SEQ ID NO: 1236689 - RNA, 19 nt, Homo sapiens
  misc_RNA (1)...(19): siRNA sense strand
ccucaaguccaaggcuuua

SEQ ID NO: 1236690 - RNA, 19 nt, Homo sapiens
  misc_RNA (1)...(19): siRNA sense strand
cgugggagucugugcauuu

SEQ ID NO: 1236691 - RNA, 19 nt, Homo sapiens
  misc_RNA (1)...(19): siRNA sense strand
ugaggaagcaauucuugga

SEQ ID NO: 1236692 - RNA, 19 nt, Homo sapiens
  misc_RNA (1)...(19): siRNA sense strand
aaugagauguuugguuaca

SEQ ID NO: 1236693 - RNA, 19 nt, Homo sapiens
  misc_RNA (1)...(19): siRNA sense strand
ccagaaaccacaagcaaaa

SEQ ID NO: 1236694 - RNA, 19 nt, Homo sapiens
  misc_RNA (1)...(19): siRNA sense strand
caccagaaaccacaagcaa

SEQ ID NO: 1236695 - RNA, 19 nt, Homo sapiens
  misc_RNA (1)...(19): siRNA sense strand
acuguauucuggacaaaga

SEQ ID NO: 1236696 - RNA, 19 nt, Homo sapiens
  misc_RNA (1)...(19): siRNA sense strand
uccuguaacugucucagaa

SEQ ID NO: 1236697 - RNA, 19 nt, Homo sapiens
  misc_RNA (1)...(19): siRNA sense strand
ugagggucaucggguaauu

SEQ ID NO: 1236698 - RNA, 19 nt, Homo sapiens
  misc_RNA (1)...(19): siRNA sense strand
ggucaagcccucgucuaga

SEQ ID NO: 1236699 - RNA, 19 nt, Homo sapiens
  misc_RNA (1)...(19): siRNA sense strand
ugaagauguugguuauggu

SEQ ID NO: 1236700 - RNA, 19 nt, Homo sapiens
  misc_RNA (1)...(19): siRNA sense strand
acacauuagccuugaacaa

SEQ ID NO: 1236701 - RNA, 19 nt, Homo sapiens
  misc_RNA (1)...(19): siRNA sense strand
ccugagaucacuaaauaag

SEQ ID NO: 1236702 - RNA, 19 nt, Homo sapiens
  misc_RNA (1)...(19): siRNA sense strand
ggcuuuaucuuuggagaag

SEQ ID NO: 1236703 - RNA, 19 nt, Homo sapiens
  misc_RNA (1)...(19): siRNA sense strand
guaccaggccauccagaag

SEQ ID NO: 1236704 - RNA, 19 nt, Homo sapiens
  misc_RNA (1)...(19): siRNA sense strand
aggaagagccaggacauga

SEQ ID NO: 1236705 - RNA, 19 nt, Homo sapiens
  misc_RNA (1)...(19): siRNA sense strand
gccgucagcugagaagagu

SEQ ID NO: 1236706 - RNA, 19 nt, Homo sapiens
  misc_RNA (1)...(19): siRNA sense strand
gaggaggcaagauacaaca

SEQ ID NO: 1236707 - RNA, 19 nt, Homo sapiens
  misc_RNA (1)...(19): siRNA sense strand
ggaggaggcaagauacaac

SEQ ID NO: 1236708 - RNA, 19 nt, Homo sapiens
  misc_RNA (1)...(19): siRNA sense strand
gcggcucaguguuaugcuu

SEQ ID NO: 1236709 - RNA, 19 nt, Homo sapiens
  misc_RNA (1)...(19): siRNA sense strand
cuaaagcgaagagacaaga

SEQ ID NO: 1236710 - RNA, 19 nt, Homo sapiens
  misc_RNA (1)...(19): siRNA sense strand
gagccaggacaugaagaaa

SEQ ID NO: 1236711 - RNA, 19 nt, Homo sapiens
  misc_RNA (1)...(19): siRNA sense strand
ggacuccacacagcguuug

SEQ ID NO: 1236712 - RNA, 19 nt, Homo sapiens
  misc_RNA (1)...(19): siRNA sense strand
cagaacaggacuccacaca

SEQ ID NO: 1236713 - RNA, 19 nt, Homo sapiens
  misc_RNA (1)...(19): siRNA sense strand
gcccagaauacauaaguag

SEQ ID NO: 1236714 - RNA, 19 nt, Homo sapiens
  misc_RNA (1)...(19): siRNA sense strand
cgucagcugagaagaguga

SEQ ID NO: 1236715 - RNA, 19 nt, Homo sapiens
  misc_RNA (1)...(19): siRNA sense strand
caacaggaaacugggaauc

SEQ ID NO: 1236716 - RNA, 19 nt, Homo sapiens
  misc_RNA (1)...(19): siRNA sense strand
ggagucugugcauuuguga

SEQ ID NO: 1236717 - RNA, 19 nt, Homo sapiens
  misc_RNA (1)...(19): siRNA sense strand
ugggaccuccaaacuuaua

SEQ ID NO: 1236718 - RNA, 19 nt, Homo sapiens
  misc_RNA (1)...(19): siRNA sense strand
gccaguacacagcagaaga

SEQ ID NO: 1236719 - RNA, 19 nt, Homo sapiens
  misc_RNA (1)...(19): siRNA sense strand
gaggccagaaggugugcua

SEQ ID NO: 1236720 - RNA, 19 nt, Homo sapiens
  misc_RNA (1)...(19): siRNA sense strand
augaagauguugguuaugg

SEQ ID NO: 1236721 - RNA, 19 nt, Homo sapiens
  misc_RNA (1)...(19): siRNA sense strand
acaggaaacugggaaucuc

SEQ ID NO: 1236722 - RNA, 19 nt, Homo sapiens
  misc_RNA (1)...(19): siRNA sense strand
uacaauggcugggcacacu

SEQ ID NO: 1236723 - RNA, 19 nt, Homo sapiens
  misc_RNA (1)...(19): siRNA sense strand
ucugacacauuagccuuga

SEQ ID NO: 1236724 - RNA, 19 nt, Homo sapiens
  misc_RNA (1)...(19): siRNA sense strand
gucaucggguaauuaaucu

SEQ ID NO: 1236725 - RNA, 19 nt, Homo sapiens
  misc_RNA (1)...(19): siRNA sense strand
agauguugguuaugguguu

SEQ ID NO: 1236726 - RNA, 19 nt, Homo sapiens
  misc_RNA (1)...(19): siRNA sense strand
gggcccagaauacauaagu

SEQ ID NO: 1236727 - RNA, 19 nt, Homo sapiens
  misc_RNA (1)...(19): siRNA sense strand
gggaaucucauaggaagag

SEQ ID NO: 1236728 - RNA, 19 nt, Homo sapiens
  misc_RNA (1)...(19): siRNA sense strand
ccaucacgcagcagaaugu

SEQ ID NO: 1236729 - RNA, 19 nt, Homo sapiens
  misc_RNA (1)...(19): siRNA sense strand
gacuaccugagaucacuaa

SEQ ID NO: 1236730 - RNA, 19 nt, Homo sapiens
  misc_RNA (1)...(19): siRNA sense strand
acaaagacuaccugagauc

SEQ ID NO: 1236731 - RNA, 19 nt, Homo sapiens
  misc_RNA (1)...(19): siRNA sense strand
uaauuaaucuggccaauga

SEQ ID NO: 1236732 - RNA, 19 nt, Homo sapiens
  misc_RNA (1)...(19): siRNA sense strand
cagaaggugugcuacauug

SEQ ID NO: 1236733 - RNA, 19 nt, Homo sapiens
  misc_RNA (1)...(19): siRNA sense strand
ggucaucggguaauuaauc

SEQ ID NO: 1236734 - RNA, 19 nt, Homo sapiens
  misc_RNA (1)...(19): siRNA sense strand
ugagauguuugguuacaau

SEQ ID NO: 1236735 - RNA, 19 nt, Homo sapiens
  misc_RNA (1)...(19): siRNA sense strand
ggcccagaauacauaagua

SEQ ID NO: 1236736 - RNA, 19 nt, Homo sapiens
  misc_RNA (1)...(19): siRNA sense strand
gagggucaucggguaauua

SEQ ID NO: 1236737 - RNA, 19 nt, Homo sapiens
  misc_RNA (1)...(19): siRNA sense strand
ggacugaggaagcaauucu

SEQ ID NO: 1236738 - RNA, 19 nt, Homo sapiens
  misc_RNA (1)...(19): siRNA sense strand
ccagaaggugugcuacauu

SEQ ID NO: 1236739 - RNA, 19 nt, Homo sapiens
  misc_RNA (1)...(19): siRNA sense strand
gaaggugugcuacauugag

SEQ ID NO: 1236740 - RNA, 19 nt, Homo sapiens
  misc_RNA (1)...(19): siRNA sense strand
gccagaaggugugcuacau

SEQ ID NO: 1236741 - RNA, 19 nt, Homo sapiens
  misc_RNA (1)...(19): siRNA sense strand
guaauuaaucuggccaaug

SEQ ID NO: 1236742 - RNA, 19 nt, Homo sapiens
  misc_RNA (1)...(19): siRNA sense strand
gguaauuaaucuggccaau

SEQ ID NO: 1236743 - RNA, 19 nt, Homo sapiens
  misc_RNA (1)...(19): siRNA sense strand
ugaggaagcaauucuugga

SEQ ID NO: 1236744 - RNA, 19 nt, Homo sapiens
  misc_RNA (1)...(19): siRNA sense strand
aaugagauguuugguuaca

SEQ ID NO: 1236745 - RNA, 19 nt, Homo sapiens
  misc_RNA (1)...(19): siRNA sense strand
ugagggucaucggguaauu

SEQ ID NO: 1236746 - RNA, 19 nt, Homo sapiens
  misc_RNA (1)...(19): siRNA sense strand
guaccaggccauccagaag

SEQ ID NO: 1236747 - RNA, 19 nt, Homo sapiens
  misc_RNA (1)...(19): siRNA sense strand
gcggcucaguguuaugcuu

SEQ ID NO: 1236748 - RNA, 19 nt, Homo sapiens
  misc_RNA (1)...(19): siRNA sense strand
gcccagaauacauaaguag

SEQ ID NO: 1236749 - RNA, 19 nt, Homo sapiens
  misc_RNA (1)...(19): siRNA sense strand
gccaguacacagcagaaga

SEQ ID NO: 1236750 - RNA, 19 nt, Homo sapiens
  misc_RNA (1)...(19): siRNA sense strand
gaggccagaaggugugcua

SEQ ID NO: 1236751 - RNA, 19 nt, Homo sapiens
  misc_RNA (1)...(19): siRNA sense strand
gucaucggguaauuaaucu

SEQ ID NO: 1236752 - RNA, 19 nt, Homo sapiens
  misc_RNA (1)...(19): siRNA sense strand
uacaauggcugggcacacu

SEQ ID NO: 1236753 - RNA, 19 nt, Homo sapiens
  misc_RNA (1)...(19): siRNA sense strand
gggcccagaauacauaagu

SEQ ID NO: 1236754 - RNA, 19 nt, Homo sapiens
  misc_RNA (1)...(19): siRNA sense strand
ccaucacgcagcagaaugu

SEQ ID NO: 1236755 - RNA, 19 nt, Homo sapiens
  misc_RNA (1)...(19): siRNA sense strand
uaauuaaucuggccaauga

SEQ ID NO: 1236756 - RNA, 19 nt, Homo sapiens
  misc_RNA (1)...(19): siRNA sense strand
cagaaggugugcuacauug

SEQ ID NO: 1236757 - RNA, 19 nt, Homo sapiens
  misc_RNA (1)...(19): siRNA sense strand
gaaggaugguucauaucau

SEQ ID NO: 1236758 - RNA, 19 nt, Homo sapiens
  misc_RNA (1)...(19): siRNA sense strand
ggucaucggguaauuaauc

SEQ ID NO: 1236759 - RNA, 19 nt, Homo sapiens
  misc_RNA (1)...(19): siRNA sense strand
ugagauguuugguuacaau

SEQ ID NO: 1236760 - RNA, 19 nt, Homo sapiens
  misc_RNA (1)...(19): siRNA sense strand
ggcccagaauacauaagua

SEQ ID NO: 1236761 - RNA, 19 nt, Homo sapiens
  misc_RNA (1)...(19): siRNA sense strand
gggagucugugcauuugug

SEQ ID NO: 1236762 - RNA, 19 nt, Homo sapiens
  misc_RNA (1)...(19): siRNA sense strand
gagggucaucggguaauua

SEQ ID NO: 1236763 - RNA, 19 nt, Homo sapiens
  misc_RNA (1)...(19): siRNA sense strand
ggacugaggaagcaauucu

SEQ ID NO: 1236764 - RNA, 19 nt, Homo sapiens
  misc_RNA (1)...(19): siRNA sense strand
aaggaugguucauaucaug

SEQ ID NO: 1236765 - RNA, 19 nt, Homo sapiens
  misc_RNA (1)...(19): siRNA sense strand
ccagaaggugugcuacauu

SEQ ID NO: 1236766 - RNA, 19 nt, Homo sapiens
  misc_RNA (1)...(19): siRNA sense strand
gaaggugugcuacauugag

SEQ ID NO: 1236767 - RNA, 19 nt, Homo sapiens
  misc_RNA (1)...(19): siRNA sense strand
gccagaaggugugcuacau

SEQ ID NO: 1236768 - RNA, 19 nt, Homo sapiens
  misc_RNA (1)...(19): siRNA sense strand
gugggagucugugcauuug

SEQ ID NO: 1236769 - RNA, 19 nt, Homo sapiens
  misc_RNA (1)...(19): siRNA sense strand
guaauuaaucuggccaaug

SEQ ID NO: 1236770 - RNA, 19 nt, Homo sapiens
  misc_RNA (1)...(19): siRNA sense strand
gguaauuaaucuggccaau

SEQ ID NO: 1236771 - RNA, 19 nt, Homo sapiens
  misc_RNA (1)...(19): siRNA sense strand
cgugggagucugugcauuu

SEQ ID NO: 1236772 - RNA, 19 nt, Homo sapiens
  misc_RNA (1)...(19): siRNA sense strand
ugaggaagcaauucuugga

SEQ ID NO: 1236773 - RNA, 19 nt, Homo sapiens
  misc_RNA (1)...(19): siRNA sense strand
aaugagauguuugguuaca

SEQ ID NO: 1236774 - RNA, 19 nt, Homo sapiens
  misc_RNA (1)...(19): siRNA sense strand
ugagggucaucggguaauu

SEQ ID NO: 1236775 - RNA, 19 nt, Homo sapiens
  misc_RNA (1)...(19): siRNA sense strand
guaccaggccauccagaag

SEQ ID NO: 1236776 - RNA, 19 nt, Homo sapiens
  misc_RNA (1)...(19): siRNA sense strand
gcggcucaguguuaugcuu

SEQ ID NO: 1236777 - RNA, 19 nt, Homo sapiens
  misc_RNA (1)...(19): siRNA sense strand
gcccagaauacauaaguag

SEQ ID NO: 1236778 - RNA, 19 nt, Homo sapiens
  misc_RNA (1)...(19): siRNA sense strand
gccaguacacagcagaaga

SEQ ID NO: 1236779 - RNA, 19 nt, Homo sapiens
  misc_RNA (1)...(19): siRNA sense strand
ggagucugugcauuuguga

SEQ ID NO: 1236780 - RNA, 19 nt, Homo sapiens
  misc_RNA (1)...(19): siRNA sense strand
gaggccagaaggugugcua

SEQ ID NO: 1236781 - RNA, 19 nt, Homo sapiens
  misc_RNA (1)...(19): siRNA sense strand
gucaucggguaauuaaucu

SEQ ID NO: 1236782 - RNA, 19 nt, Homo sapiens
  misc_RNA (1)...(19): siRNA sense strand
uacaauggcugggcacacu

SEQ ID NO: 1236783 - RNA, 19 nt, Homo sapiens
  misc_RNA (1)...(19): siRNA sense strand
gggcccagaauacauaagu

SEQ ID NO: 1236784 - RNA, 19 nt, Homo sapiens
  misc_RNA (1)...(19): siRNA sense strand
ccaucacgcagcagaaugu

SEQ ID NO: 1236785 - RNA, 19 nt, Homo sapiens
  misc_RNA (1)...(19): siRNA sense strand
uaauuaaucuggccaauga

SEQ ID NO: 1236786 - RNA, 19 nt, Homo sapiens
  misc_RNA (1)...(19): siRNA sense strand
ggacaaagacuaccugaga

SEQ ID NO: 1236787 - RNA, 19 nt, Homo sapiens
  misc_RNA (1)...(19): siRNA sense strand
uaccugagaucacuaaaua

SEQ ID NO: 1236788 - RNA, 19 nt, Homo sapiens
  misc_RNA (1)...(19): siRNA sense strand
gaaacuguauucuggacaa

SEQ ID NO: 1236789 - RNA, 19 nt, Homo sapiens
  misc_RNA (1)...(19): siRNA sense strand
guccaaggcuuuaucuuug

SEQ ID NO: 1236790 - RNA, 19 nt, Homo sapiens
  misc_RNA (1)...(19): siRNA sense strand
ggaaggaggcggugacaga

SEQ ID NO: 1236791 - RNA, 19 nt, Homo sapiens
  misc_RNA (1)...(19): siRNA sense strand
cagaaggugugcuacauug

SEQ ID NO: 1236792 - RNA, 19 nt, Homo sapiens
  misc_RNA (1)...(19): siRNA sense strand
ggaaugcacuuggaaacug

SEQ ID NO: 1236793 - RNA, 19 nt, Homo sapiens
  misc_RNA (1)...(19): siRNA sense strand
gauguugguuaugguguua

SEQ ID NO: 1236794 - RNA, 19 nt, Homo sapiens
  misc_RNA (1)...(19): siRNA sense strand
gaaggaugguucauaucau

SEQ ID NO: 1236795 - RNA, 19 nt, Homo sapiens
  misc_RNA (1)...(19): siRNA sense strand
ucaugaagauguugguuau

SEQ ID NO: 1236796 - RNA, 19 nt, Homo sapiens
  misc_RNA (1)...(19): siRNA sense strand
gacaaagacuaccugagau

SEQ ID NO: 1236797 - RNA, 19 nt, Homo sapiens
  misc_RNA (1)...(19): siRNA sense strand
gaaugcacuuggaaacugu

SEQ ID NO: 1236798 - RNA, 19 nt, Homo sapiens
  misc_RNA (1)...(19): siRNA sense strand
gcacuuggaaacuguauuc

SEQ ID NO: 1236799 - RNA, 19 nt, Homo sapiens
  misc_RNA (1)...(19): siRNA sense strand
ggucaucggguaauuaauc

SEQ ID NO: 1236800 - RNA, 19 nt, Homo sapiens
  misc_RNA (1)...(19): siRNA sense strand
ugagauguuugguuacaau

SEQ ID NO: 1236801 - RNA, 19 nt, Homo sapiens
  misc_RNA (1)...(19): siRNA sense strand
ggcccagaauacauaagua

SEQ ID NO: 1236802 - RNA, 19 nt, Homo sapiens
  misc_RNA (1)...(19): siRNA sense strand
gggagucugugcauuugug

SEQ ID NO: 1236803 - RNA, 19 nt, Homo sapiens
  misc_RNA (1)...(19): siRNA sense strand
gagggucaucggguaauua

SEQ ID NO: 1236804 - RNA, 19 nt, Homo sapiens
  misc_RNA (1)...(19): siRNA sense strand
aaggaugguucauaucaug

SEQ ID NO: 1236805 - RNA, 19 nt, Homo sapiens
  misc_RNA (1)...(19): siRNA sense strand
ggacugaggaagcaauucu

SEQ ID NO: 1236806 - RNA, 19 nt, Homo sapiens
  misc_RNA (1)...(19): siRNA sense strand
ccagaaggugugcuacauu

SEQ ID NO: 1236807 - RNA, 19 nt, Homo sapiens
  misc_RNA (1)...(19): siRNA sense strand
gaaggugugcuacauugag

SEQ ID NO: 1236808 - RNA, 19 nt, Homo sapiens
  misc_RNA (1)...(19): siRNA sense strand
gccagaaggugugcuacau

SEQ ID NO: 1236809 - RNA, 19 nt, Homo sapiens
  misc_RNA (1)...(19): siRNA sense strand
aguccaaggcuuuaucuuu

SEQ ID NO: 1236810 - RNA, 19 nt, Homo sapiens
  misc_RNA (1)...(19): siRNA sense strand
gugggagucugugcauuug

SEQ ID NO: 1236811 - RNA, 19 nt, Homo sapiens
  misc_RNA (1)...(19): siRNA sense strand
guaauuaaucuggccaaug

SEQ ID NO: 1236812 - RNA, 19 nt, Homo sapiens
  misc_RNA (1)...(19): siRNA sense strand
caaagacuaccugagauca

SEQ ID NO: 1236813 - RNA, 19 nt, Homo sapiens
  misc_RNA (1)...(19): siRNA sense strand
aaacuguauucuggacaaa

SEQ ID NO: 1236814 - RNA, 19 nt, Homo sapiens
  misc_RNA (1)...(19): siRNA sense strand
gguaauuaaucuggccaau

SEQ ID NO: 1236815 - RNA, 19 nt, Homo sapiens
  misc_RNA (1)...(19): siRNA sense strand
ccucaaguccaaggcuuua

SEQ ID NO: 1236816 - RNA, 19 nt, Homo sapiens
  misc_RNA (1)...(19): siRNA sense strand
cgugggagucugugcauuu

SEQ ID NO: 1236817 - RNA, 19 nt, Homo sapiens
  misc_RNA (1)...(19): siRNA sense strand
ugaggaagcaauucuugga

SEQ ID NO: 1236818 - RNA, 19 nt, Homo sapiens
  misc_RNA (1)...(19): siRNA sense strand
aaugagauguuugguuaca

SEQ ID NO: 1236819 - RNA, 19 nt, Homo sapiens
  misc_RNA (1)...(19): siRNA sense strand
acuguauucuggacaaaga

SEQ ID NO: 1236820 - RNA, 19 nt, Homo sapiens
  misc_RNA (1)...(19): siRNA sense strand
ugagggucaucggguaauu

SEQ ID NO: 1236821 - RNA, 19 nt, Homo sapiens
  misc_RNA (1)...(19): siRNA sense strand
ugaagauguugguuauggu

SEQ ID NO: 1236822 - RNA, 19 nt, Homo sapiens
  misc_RNA (1)...(19): siRNA sense strand
guaccaggccauccagaag

SEQ ID NO: 1236823 - RNA, 19 nt, Homo sapiens
  misc_RNA (1)...(19): siRNA sense strand
gcggcucaguguuaugcuu

SEQ ID NO: 1236824 - RNA, 19 nt, Homo sapiens
  misc_RNA (1)...(19): siRNA sense strand
ggcuuuaucuuuggagaag

SEQ ID NO: 1236825 - RNA, 19 nt, Homo sapiens
  misc_RNA (1)...(19): siRNA sense strand
gcccagaauacauaaguag

SEQ ID NO: 1236826 - RNA, 19 nt, Homo sapiens
  misc_RNA (1)...(19): siRNA sense strand
gccaguacacagcagaaga

SEQ ID NO: 1236827 - RNA, 19 nt, Homo sapiens
  misc_RNA (1)...(19): siRNA sense strand
gaggccagaaggugugcua

SEQ ID NO: 1236828 - RNA, 19 nt, Homo sapiens
  misc_RNA (1)...(19): siRNA sense strand
ggagucugugcauuuguga

SEQ ID NO: 1236829 - RNA, 19 nt, Homo sapiens
  misc_RNA (1)...(19): siRNA sense strand
gucaucggguaauuaaucu

SEQ ID NO: 1236830 - RNA, 19 nt, Homo sapiens
  misc_RNA (1)...(19): siRNA sense strand
agauguugguuaugguguu

SEQ ID NO: 1236831 - RNA, 19 nt, Homo sapiens
  misc_RNA (1)...(19): siRNA sense strand
augaagauguugguuaugg

SEQ ID NO: 1236832 - RNA, 19 nt, Homo sapiens
  misc_RNA (1)...(19): siRNA sense strand
uacaauggcugggcacacu

SEQ ID NO: 1236833 - RNA, 19 nt, Homo sapiens
  misc_RNA (1)...(19): siRNA sense strand
ccaucacgcagcagaaugu

SEQ ID NO: 1236834 - RNA, 19 nt, Homo sapiens
  misc_RNA (1)...(19): siRNA sense strand
gacuaccugagaucacuaa

SEQ ID NO: 1236835 - RNA, 19 nt, Homo sapiens
  misc_RNA (1)...(19): siRNA sense strand
acaaagacuaccugagauc

SEQ ID NO: 1236836 - RNA, 19 nt, Homo sapiens
  misc_RNA (1)...(19): siRNA sense strand
gggcccagaauacauaagu

SEQ ID NO: 1236837 - RNA, 19 nt, Homo sapiens
  misc_RNA (1)...(19): siRNA sense strand
cagaggaacuggugaauga

SEQ ID NO: 1236838 - RNA, 19 nt, Homo sapiens
  misc_RNA (1)...(19): siRNA sense strand
ugaaauaccugcaaaguag

SEQ ID NO: 1236839 - RNA, 19 nt, Homo sapiens
  misc_RNA (1)...(19): siRNA sense strand
aagaacaucuccagaggaa

SEQ ID NO: 1236840 - RNA, 19 nt, Homo sapiens
  misc_RNA (1)...(19): siRNA sense strand
gaacaucuccagaggaacu

SEQ ID NO: 1236841 - RNA, 19 nt, Homo sapiens
  misc_RNA (1)...(19): siRNA sense strand
uugaaauaccugcaaagua

SEQ ID NO: 1236842 - RNA, 19 nt, Homo sapiens
  misc_RNA (1)...(19): siRNA sense strand
aaauggaggaggaggaauu

SEQ ID NO: 1236843 - RNA, 19 nt, Homo sapiens
  misc_RNA (1)...(19): siRNA sense strand
ccaaauggaggaggaggaa

SEQ ID NO: 1236844 - RNA, 19 nt, Homo sapiens
  misc_RNA (1)...(19): siRNA sense strand
cccgcaaccugcuccgaaa

SEQ ID NO: 1236845 - RNA, 19 nt, Homo sapiens
  misc_RNA (1)...(19): siRNA sense strand
guugaaauaccugcaaagu

SEQ ID NO: 1236846 - RNA, 19 nt, Homo sapiens
  misc_RNA (1)...(19): siRNA sense strand
ugguugaaauaccugcaaa

SEQ ID NO: 1236847 - RNA, 19 nt, Homo sapiens
  misc_RNA (1)...(19): siRNA sense strand
ggaagaggcucacggaauu

SEQ ID NO: 1236848 - RNA, 19 nt, Homo sapiens
  misc_RNA (1)...(19): siRNA sense strand
ugaaggaggucaucagugu

SEQ ID NO: 1236849 - RNA, 19 nt, Homo sapiens
  misc_RNA (1)...(19): siRNA sense strand
ggucaucaguguggucaaa

SEQ ID NO: 1236850 - RNA, 19 nt, Homo sapiens
  misc_RNA (1)...(19): siRNA sense strand
gaagaggcucacggaauuu

SEQ ID NO: 1236851 - RNA, 19 nt, Homo sapiens
  misc_RNA (1)...(19): siRNA sense strand
ggaugaagcgggacuggau

SEQ ID NO: 1236852 - RNA, 19 nt, Homo sapiens
  misc_RNA (1)...(19): siRNA sense strand
gcccugaggcuccuacaga

SEQ ID NO: 1236853 - RNA, 19 nt, Homo sapiens
  misc_RNA (1)...(19): siRNA sense strand
uugcgcaccugcuggaauu

SEQ ID NO: 1236854 - RNA, 19 nt, Homo sapiens
  misc_RNA (1)...(19): siRNA sense strand
gacccgugccuguauauuc

SEQ ID NO: 1236855 - RNA, 19 nt, Homo sapiens
  misc_RNA (1)...(19): siRNA sense strand
cggaagaggcucacggaau

SEQ ID NO: 1236856 - RNA, 19 nt, Homo sapiens
  misc_RNA (1)...(19): siRNA sense strand
cagccagaaugcaugacuu

SEQ ID NO: 1236857 - RNA, 19 nt, Homo sapiens
  misc_RNA (1)...(19): siRNA sense strand
ucaggaggacugugaagga

SEQ ID NO: 1236858 - RNA, 19 nt, Homo sapiens
  misc_RNA (1)...(19): siRNA sense strand
gaggcucacggaauuugaa

SEQ ID NO: 1236859 - RNA, 19 nt, Homo sapiens
  misc_RNA (1)...(19): siRNA sense strand
guugaccauugaugaguuc

SEQ ID NO: 1236860 - RNA, 19 nt, Homo sapiens
  misc_RNA (1)...(19): siRNA sense strand
ucaucaguguggucaaagu

SEQ ID NO: 1236861 - RNA, 19 nt, Homo sapiens
  misc_RNA (1)...(19): siRNA sense strand
ggaagaggcucacggaauu

SEQ ID NO: 1236862 - RNA, 19 nt, Homo sapiens
  misc_RNA (1)...(19): siRNA sense strand
ugaaggaggucaucagugu

SEQ ID NO: 1236863 - RNA, 19 nt, Homo sapiens
  misc_RNA (1)...(19): siRNA sense strand
ggucaucaguguggucaaa

SEQ ID NO: 1236864 - RNA, 19 nt, Homo sapiens
  misc_RNA (1)...(19): siRNA sense strand
gaagaggcucacggaauuu

SEQ ID NO: 1236865 - RNA, 19 nt, Homo sapiens
  misc_RNA (1)...(19): siRNA sense strand
ggaugaagcgggacuggau

SEQ ID NO: 1236866 - RNA, 19 nt, Homo sapiens
  misc_RNA (1)...(19): siRNA sense strand
gcccugaggcuccuacaga

SEQ ID NO: 1236867 - RNA, 19 nt, Homo sapiens
  misc_RNA (1)...(19): siRNA sense strand
cggaagaggcucacggaau

SEQ ID NO: 1236868 - RNA, 19 nt, Homo sapiens
  misc_RNA (1)...(19): siRNA sense strand
cagccagaaugcaugacuu

SEQ ID NO: 1236869 - RNA, 19 nt, Homo sapiens
  misc_RNA (1)...(19): siRNA sense strand
ucaggaggacugugaagga

SEQ ID NO: 1236870 - RNA, 19 nt, Homo sapiens
  misc_RNA (1)...(19): siRNA sense strand
gaggcucacggaauuugaa

SEQ ID NO: 1236871 - RNA, 19 nt, Homo sapiens
  misc_RNA (1)...(19): siRNA sense strand
guugaccauugaugaguuc

SEQ ID NO: 1236872 - RNA, 19 nt, Homo sapiens
  misc_RNA (1)...(19): siRNA sense strand
ucaucaguguggucaaagu

SEQ ID NO: 1236873 - RNA, 19 nt, Homo sapiens
  misc_RNA (1)...(19): siRNA sense strand
ggaagaggcucacggaauu

SEQ ID NO: 1236874 - RNA, 19 nt, Homo sapiens
  misc_RNA (1)...(19): siRNA sense strand
ugaaggaggucaucagugu

SEQ ID NO: 1236875 - RNA, 19 nt, Homo sapiens
  misc_RNA (1)...(19): siRNA sense strand
ggucaucaguguggucaaa

SEQ ID NO: 1236876 - RNA, 19 nt, Homo sapiens
  misc_RNA (1)...(19): siRNA sense strand
gaagaggcucacggaauuu

SEQ ID NO: 1236877 - RNA, 19 nt, Homo sapiens
  misc_RNA (1)...(19): siRNA sense strand
ggaugaagcgggacuggau

SEQ ID NO: 1236878 - RNA, 19 nt, Homo sapiens
  misc_RNA (1)...(19): siRNA sense strand
gcuucacccuguguccuua

SEQ ID NO: 1236879 - RNA, 19 nt, Homo sapiens
  misc_RNA (1)...(19): siRNA sense strand
gcccugaggcuccuacaga

SEQ ID NO: 1236880 - RNA, 19 nt, Homo sapiens
  misc_RNA (1)...(19): siRNA sense strand
cggaagaggcucacggaau

SEQ ID NO: 1236881 - RNA, 19 nt, Homo sapiens
  misc_RNA (1)...(19): siRNA sense strand
cagccagaaugcaugacuu

SEQ ID NO: 1236882 - RNA, 19 nt, Homo sapiens
  misc_RNA (1)...(19): siRNA sense strand
ucaggaggacugugaagga

SEQ ID NO: 1236883 - RNA, 19 nt, Homo sapiens
  misc_RNA (1)...(19): siRNA sense strand
gaggcucacggaauuugaa

SEQ ID NO: 1236884 - RNA, 19 nt, Homo sapiens
  misc_RNA (1)...(19): siRNA sense strand
guugaccauugaugaguuc

SEQ ID NO: 1236885 - RNA, 19 nt, Homo sapiens
  misc_RNA (1)...(19): siRNA sense strand
ucaucaguguggucaaagu

SEQ ID NO: 1236886 - RNA, 19 nt, Homo sapiens
  misc_RNA (1)...(19): siRNA sense strand
ggaagaggcucacggaauu

SEQ ID NO: 1236887 - RNA, 19 nt, Homo sapiens
  misc_RNA (1)...(19): siRNA sense strand
ugaaggaggucaucagugu

SEQ ID NO: 1236888 - RNA, 19 nt, Homo sapiens
  misc_RNA (1)...(19): siRNA sense strand
ggucaucaguguggucaaa

SEQ ID NO: 1236889 - RNA, 19 nt, Homo sapiens
  misc_RNA (1)...(19): siRNA sense strand
gaagaggcucacggaauuu

SEQ ID NO: 1236890 - RNA, 19 nt, Homo sapiens
  misc_RNA (1)...(19): siRNA sense strand
ggaugaagcgggacuggau

SEQ ID NO: 1236891 - RNA, 19 nt, Homo sapiens
  misc_RNA (1)...(19): siRNA sense strand
gcccugaggcuccuacaga

SEQ ID NO: 1236892 - RNA, 19 nt, Homo sapiens
  misc_RNA (1)...(19): siRNA sense strand
uugcgcaccugcuggaauu

SEQ ID NO: 1236893 - RNA, 19 nt, Homo sapiens
  misc_RNA (1)...(19): siRNA sense strand
gacccgugccuguauauuc

SEQ ID NO: 1236894 - RNA, 19 nt, Homo sapiens
  misc_RNA (1)...(19): siRNA sense strand
cggaagaggcucacggaau

SEQ ID NO: 1236895 - RNA, 19 nt, Homo sapiens
  misc_RNA (1)...(19): siRNA sense strand
cagccagaaugcaugacuu

SEQ ID NO: 1236896 - RNA, 19 nt, Homo sapiens
  misc_RNA (1)...(19): siRNA sense strand
ucaggaggacugugaagga

SEQ ID NO: 1236897 - RNA, 19 nt, Homo sapiens
  misc_RNA (1)...(19): siRNA sense strand
gaggcucacggaauuugaa

SEQ ID NO: 1236898 - RNA, 19 nt, Homo sapiens
  misc_RNA (1)...(19): siRNA sense strand
guugaccauugaugaguuc

SEQ ID NO: 1236899 - RNA, 19 nt, Homo sapiens
  misc_RNA (1)...(19): siRNA sense strand
ucaucaguguggucaaagu

SEQ ID NO: 1236900 - RNA, 19 nt, Homo sapiens
  misc_RNA (1)...(19): siRNA sense strand
ggaagaggcucacggaauu

SEQ ID NO: 1236901 - RNA, 19 nt, Homo sapiens
  misc_RNA (1)...(19): siRNA sense strand
ugaaggaggucaucagugu

SEQ ID NO: 1236902 - RNA, 19 nt, Homo sapiens
  misc_RNA (1)...(19): siRNA sense strand
ggucaucaguguggucaaa

SEQ ID NO: 1236903 - RNA, 19 nt, Homo sapiens
  misc_RNA (1)...(19): siRNA sense strand
gaagaggcucacggaauuu

SEQ ID NO: 1236904 - RNA, 19 nt, Homo sapiens
  misc_RNA (1)...(19): siRNA sense strand
ggaugaagcgggacuggau

SEQ ID NO: 1236905 - RNA, 19 nt, Homo sapiens
  misc_RNA (1)...(19): siRNA sense strand
gcccugaggcuccuacaga

SEQ ID NO: 1236906 - RNA, 19 nt, Homo sapiens
  misc_RNA (1)...(19): siRNA sense strand
cggaagaggcucacggaau

SEQ ID NO: 1236907 - RNA, 19 nt, Homo sapiens
  misc_RNA (1)...(19): siRNA sense strand
cagccagaaugcaugacuu

SEQ ID NO: 1236908 - RNA, 19 nt, Homo sapiens
  misc_RNA (1)...(19): siRNA sense strand
ucaggaggacugugaagga

SEQ ID NO: 1236909 - RNA, 19 nt, Homo sapiens
  misc_RNA (1)...(19): siRNA sense strand
gaggcucacggaauuugaa

SEQ ID NO: 1236910 - RNA, 19 nt, Homo sapiens
  misc_RNA (1)...(19): siRNA sense strand
guugaccauugaugaguuc

SEQ ID NO: 1236911 - RNA, 19 nt, Homo sapiens
  misc_RNA (1)...(19): siRNA sense strand
ucaucaguguggucaaagu

SEQ ID NO: 1236912 - RNA, 19 nt, Homo sapiens
  misc_RNA (1)...(19): siRNA sense strand
ggaagaggcucacggaauu

SEQ ID NO: 1236913 - RNA, 19 nt, Homo sapiens
  misc_RNA (1)...(19): siRNA sense strand
ugaaggaggucaucagugu

SEQ ID NO: 1236914 - RNA, 19 nt, Homo sapiens
  misc_RNA (1)...(19): siRNA sense strand
ggucaucaguguggucaaa

SEQ ID NO: 1236915 - RNA, 19 nt, Homo sapiens
  misc_RNA (1)...(19): siRNA sense strand
gaagaggcucacggaauuu

SEQ ID NO: 1236916 - RNA, 19 nt, Homo sapiens
  misc_RNA (1)...(19): siRNA sense strand
ggaugaagcgggacuggau

SEQ ID NO: 1236917 - RNA, 19 nt, Homo sapiens
  misc_RNA (1)...(19): siRNA sense strand
gcuucacccuguguccuua

SEQ ID NO: 1236918 - RNA, 19 nt, Homo sapiens
  misc_RNA (1)...(19): siRNA sense strand
gcccugaggcuccuacaga

SEQ ID NO: 1236919 - RNA, 19 nt, Homo sapiens
  misc_RNA (1)...(19): siRNA sense strand
cggaagaggcucacggaau

SEQ ID NO: 1236920 - RNA, 19 nt, Homo sapiens
  misc_RNA (1)...(19): siRNA sense strand
cagccagaaugcaugacuu

SEQ ID NO: 1236921 - RNA, 19 nt, Homo sapiens
  misc_RNA (1)...(19): siRNA sense strand
ucaggaggacugugaagga

SEQ ID NO: 1236922 - RNA, 19 nt, Homo sapiens
  misc_RNA (1)...(19): siRNA sense strand
gaggcucacggaauuugaa

SEQ ID NO: 1236923 - RNA, 19 nt, Homo sapiens
  misc_RNA (1)...(19): siRNA sense strand
guugaccauugaugaguuc

SEQ ID NO: 1236924 - RNA, 19 nt, Homo sapiens
  misc_RNA (1)...(19): siRNA sense strand
ucaucaguguggucaaagu

SEQ ID NO: 1236925 - RNA, 19 nt, Homo sapiens
  misc_RNA (1)...(19): siRNA sense strand
ccaaauggcccgagaauug

SEQ ID NO: 1236926 - RNA, 19 nt, Homo sapiens
  misc_RNA (1)...(19): siRNA sense strand
gaacgacuccgaagaggaa

SEQ ID NO: 1236927 - RNA, 19 nt, Homo sapiens
  misc_RNA (1)...(19): siRNA sense strand
ccgcagaagugaauaugua

SEQ ID NO: 1236928 - RNA, 19 nt, Homo sapiens
  misc_RNA (1)...(19): siRNA sense strand
agacagaacucaacucauc

SEQ ID NO: 1236929 - RNA, 19 nt, Homo sapiens
  misc_RNA (1)...(19): siRNA sense strand
ggaagaaaaugaagaaguu

SEQ ID NO: 1236930 - RNA, 19 nt, Homo sapiens
  misc_RNA (1)...(19): siRNA sense strand
ucaagaagauggaguuauc

SEQ ID NO: 1236931 - RNA, 19 nt, Homo sapiens
  misc_RNA (1)...(19): siRNA sense strand
ggauacaaaucaagaagau

SEQ ID NO: 1236932 - RNA, 19 nt, Homo sapiens
  misc_RNA (1)...(19): siRNA sense strand
gagugaugaugaugcuuua

SEQ ID NO: 1236933 - RNA, 19 nt, Homo sapiens
  misc_RNA (1)...(19): siRNA sense strand
aaauggauauggaaaguga

SEQ ID NO: 1236934 - RNA, 19 nt, Homo sapiens
  misc_RNA (1)...(19): siRNA sense strand
gaacaggagcagauaagga

SEQ ID NO: 1236935 - RNA, 19 nt, Homo sapiens
  misc_RNA (1)...(19): siRNA sense strand
ccagaacacuuaccagaca

SEQ ID NO: 1236936 - RNA, 19 nt, Homo sapiens
  misc_RNA (1)...(19): siRNA sense strand
gaagaaguuuucaaaguga

SEQ ID NO: 1236937 - RNA, 19 nt, Homo sapiens
  misc_RNA (1)...(19): siRNA sense strand
ccagggcuauugaaagauu

SEQ ID NO: 1236938 - RNA, 19 nt, Homo sapiens
  misc_RNA (1)...(19): siRNA sense strand
uaccagggcuauugaaaga

SEQ ID NO: 1236939 - RNA, 19 nt, Homo sapiens
  misc_RNA (1)...(19): siRNA sense strand
gcagauaaggaaaggaauu

SEQ ID NO: 1236940 - RNA, 19 nt, Homo sapiens
  misc_RNA (1)...(19): siRNA sense strand
gaggguauguccaagacuu

SEQ ID NO: 1236941 - RNA, 19 nt, Homo sapiens
  misc_RNA (1)...(19): siRNA sense strand
gauaauacagucccuuuca

SEQ ID NO: 1236942 - RNA, 19 nt, Homo sapiens
  misc_RNA (1)...(19): siRNA sense strand
ggagugaugaugaugcuuu

SEQ ID NO: 1236943 - RNA, 19 nt, Homo sapiens
  misc_RNA (1)...(19): siRNA sense strand
gagcagauaaggaaaggaa

SEQ ID NO: 1236944 - RNA, 19 nt, Homo sapiens
  misc_RNA (1)...(19): siRNA sense strand
ugaugaugaugcuuuagua

SEQ ID NO: 1236945 - RNA, 19 nt, Homo sapiens
  misc_RNA (1)...(19): siRNA sense strand
guaaagaaacagcuuaaag

SEQ ID NO: 1236946 - RNA, 19 nt, Homo sapiens
  misc_RNA (1)...(19): siRNA sense strand
uaaaauugcucaagaagga

SEQ ID NO: 1236947 - RNA, 19 nt, Homo sapiens
  misc_RNA (1)...(19): siRNA sense strand
cagauaaggaaaggaauua

SEQ ID NO: 1236948 - RNA, 19 nt, Homo sapiens
  misc_RNA (1)...(19): siRNA sense strand
gcaagaggccucgcgagaa

SEQ ID NO: 1236949 - RNA, 19 nt, Homo sapiens
  misc_RNA (1)...(19): siRNA sense strand
aagacuugcuugaguguuu

SEQ ID NO: 1236950 - RNA, 19 nt, Homo sapiens
  misc_RNA (1)...(19): siRNA sense strand
gcucaagaaggaauauaaa

SEQ ID NO: 1236951 - RNA, 19 nt, Homo sapiens
  misc_RNA (1)...(19): siRNA sense strand
ugacucccguuacuauuga

SEQ ID NO: 1236952 - RNA, 19 nt, Homo sapiens
  misc_RNA (1)...(19): siRNA sense strand
caagaggccucgcgagaac

SEQ ID NO: 1236953 - RNA, 19 nt, Homo sapiens
  misc_RNA (1)...(19): siRNA sense strand
gaacauggugaagaugaaa

SEQ ID NO: 1236954 - RNA, 19 nt, Homo sapiens
  misc_RNA (1)...(19): siRNA sense strand
gaaagaaaagucacaaaga

SEQ ID NO: 1236955 - RNA, 19 nt, Homo sapiens
  misc_RNA (1)...(19): siRNA sense strand
gaugaugaugcuuuaguaa

SEQ ID NO: 1236956 - RNA, 19 nt, Homo sapiens
  misc_RNA (1)...(19): siRNA sense strand
gaagaaaucaaguuauagc

SEQ ID NO: 1236957 - RNA, 19 nt, Homo sapiens
  misc_RNA (1)...(19): siRNA sense strand
ugaaauggauauggaaagu

SEQ ID NO: 1236958 - RNA, 19 nt, Homo sapiens
  misc_RNA (1)...(19): siRNA sense strand
caacucaucagcugaaagu

SEQ ID NO: 1236959 - RNA, 19 nt, Homo sapiens
  misc_RNA (1)...(19): siRNA sense strand
gaugagaaacgccggauag

SEQ ID NO: 1236960 - RNA, 19 nt, Homo sapiens
  misc_RNA (1)...(19): siRNA sense strand
aagaugaaauggauaugga

SEQ ID NO: 1236961 - RNA, 19 nt, Homo sapiens
  misc_RNA (1)...(19): siRNA sense strand
caaaucgacagcagcauga

SEQ ID NO: 1236962 - RNA, 19 nt, Homo sapiens
  misc_RNA (1)...(19): siRNA sense strand
gaugaaauggauauggaaa

SEQ ID NO: 1236963 - RNA, 19 nt, Homo sapiens
  misc_RNA (1)...(19): siRNA sense strand
uaauacagucccuuucaaa

SEQ ID NO: 1236964 - RNA, 19 nt, Homo sapiens
  misc_RNA (1)...(19): siRNA sense strand
uguacuaccagaacacuua

SEQ ID NO: 1236965 - RNA, 19 nt, Homo sapiens
  misc_RNA (1)...(19): siRNA sense strand
uauacaugcugcaaggaaa

SEQ ID NO: 1236966 - RNA, 19 nt, Homo sapiens
  misc_RNA (1)...(19): siRNA sense strand
uaagacagaacucaacuca

SEQ ID NO: 1236967 - RNA, 19 nt, Homo sapiens
  misc_RNA (1)...(19): siRNA sense strand
ggugaacgguauaaauuuu

SEQ ID NO: 1236968 - RNA, 19 nt, Homo sapiens
  misc_RNA (1)...(19): siRNA sense strand
uggcauuccuuauaguuau

SEQ ID NO: 1236969 - RNA, 19 nt, Homo sapiens
  misc_RNA (1)...(19): siRNA sense strand
uaauaucccucagguucaa

SEQ ID NO: 1236970 - RNA, 19 nt, Homo sapiens
  misc_RNA (1)...(19): siRNA sense strand
uuagagaagaugagaauga

SEQ ID NO: 1236971 - RNA, 19 nt, Homo sapiens
  misc_RNA (1)...(19): siRNA sense strand
ggaguuaucaucagugaac

SEQ ID NO: 1236972 - RNA, 19 nt, Homo sapiens
  misc_RNA (1)...(19): siRNA sense strand
gcaagaaaugcgaggguau

SEQ ID NO: 1236973 - RNA, 19 nt, Homo sapiens
  misc_RNA (1)...(19): siRNA sense strand
cagaagugaauauguacua

SEQ ID NO: 1236974 - RNA, 19 nt, Homo sapiens
  misc_RNA (1)...(19): siRNA sense strand
uagagaagaugagaaugau

SEQ ID NO: 1236975 - RNA, 19 nt, Homo sapiens
  misc_RNA (1)...(19): siRNA sense strand
ugaacauggugaagaugaa

SEQ ID NO: 1236976 - RNA, 19 nt, Homo sapiens
  misc_RNA (1)...(19): siRNA sense strand
gagauuucacuccucauga

SEQ ID NO: 1236977 - RNA, 19 nt, Homo sapiens
  misc_RNA (1)...(19): siRNA sense strand
gacagcagcaugagaaaca

SEQ ID NO: 1236978 - RNA, 19 nt, Homo sapiens
  misc_RNA (1)...(19): siRNA sense strand
ccagugaugaugaagauga

SEQ ID NO: 1236979 - RNA, 19 nt, Homo sapiens
  misc_RNA (1)...(19): siRNA sense strand
gaagaugaaauggauaugg

SEQ ID NO: 1236980 - RNA, 19 nt, Homo sapiens
  misc_RNA (1)...(19): siRNA sense strand
ugagaugacucccguuacu

SEQ ID NO: 1236981 - RNA, 19 nt, Homo sapiens
  misc_RNA (1)...(19): siRNA sense strand
cagauaauacagucccuuu

SEQ ID NO: 1236982 - RNA, 19 nt, Homo sapiens
  misc_RNA (1)...(19): siRNA sense strand
cauccuauggcauuccuua

SEQ ID NO: 1236983 - RNA, 19 nt, Homo sapiens
  misc_RNA (1)...(19): siRNA sense strand
ugaagaugacgaugagaaa

SEQ ID NO: 1236984 - RNA, 19 nt, Homo sapiens
  misc_RNA (1)...(19): siRNA sense strand
gugaacaaccuuuggacaa

SEQ ID NO: 1236985 - RNA, 19 nt, Homo sapiens
  misc_RNA (1)...(19): siRNA sense strand
caugaaagaauugcacaaa

SEQ ID NO: 1236986 - RNA, 19 nt, Homo sapiens
  misc_RNA (1)...(19): siRNA sense strand
gagaugacucccguuacua

SEQ ID NO: 1236987 - RNA, 19 nt, Homo sapiens
  misc_RNA (1)...(19): siRNA sense strand
gaauauguacuaccagaac

SEQ ID NO: 1236988 - RNA, 19 nt, Homo sapiens
  misc_RNA (1)...(19): siRNA sense strand
caggacauguuaaggauac

SEQ ID NO: 1236989 - RNA, 19 nt, Homo sapiens
  misc_RNA (1)...(19): siRNA sense strand
gauuucacuccucaugaua

SEQ ID NO: 1236990 - RNA, 19 nt, Homo sapiens
  misc_RNA (1)...(19): siRNA sense strand
cagugaacauggugaagau

SEQ ID NO: 1236991 - RNA, 19 nt, Homo sapiens
  misc_RNA (1)...(19): siRNA sense strand
ggguauuggugaacgguau

SEQ ID NO: 1236992 - RNA, 19 nt, Homo sapiens
  misc_RNA (1)...(19): siRNA sense strand
cagggcuauugaaagauua

SEQ ID NO: 1236993 - RNA, 19 nt, Homo sapiens
  misc_RNA (1)...(19): siRNA sense strand
gaugaugcuuuaguaacug

SEQ ID NO: 1236994 - RNA, 19 nt, Homo sapiens
  misc_RNA (1)...(19): siRNA sense strand
uaucaucagugaacauggu

SEQ ID NO: 1236995 - RNA, 19 nt, Homo sapiens
  misc_RNA (1)...(19): siRNA sense strand
aaugagaugacucccguua

SEQ ID NO: 1236996 - RNA, 19 nt, Homo sapiens
  misc_RNA (1)...(19): siRNA sense strand
ugaugaagaugacgaugag

SEQ ID NO: 1236997 - RNA, 19 nt, Homo sapiens
  misc_RNA (1)...(19): siRNA sense strand
gauaaugagccugguaaag

SEQ ID NO: 1236998 - RNA, 19 nt, Homo sapiens
  misc_RNA (1)...(19): siRNA sense strand
gaacacuuaccagacaaug

SEQ ID NO: 1236999 - RNA, 19 nt, Homo sapiens
  misc_RNA (1)...(19): siRNA sense strand
ugaugaugcuuuaguaacu

SEQ ID NO: 1237000 - RNA, 19 nt, Homo sapiens
  misc_RNA (1)...(19): siRNA sense strand
gugaacauggugaagauga

SEQ ID NO: 1237001 - RNA, 19 nt, Homo sapiens
  misc_RNA (1)...(19): siRNA sense strand
caagaaaugcgaggguaug

SEQ ID NO: 1237002 - RNA, 19 nt, Homo sapiens
  misc_RNA (1)...(19): siRNA sense strand
caugagaaacaucugcaaa

SEQ ID NO: 1237003 - RNA, 19 nt, Homo sapiens
  misc_RNA (1)...(19): siRNA sense strand
gguaaagaaacagcuuaaa

SEQ ID NO: 1237004 - RNA, 19 nt, Homo sapiens
  misc_RNA (1)...(19): siRNA sense strand
auaauacagucccuuucaa

SEQ ID NO: 1237005 - RNA, 19 nt, Homo sapiens
  misc_RNA (1)...(19): siRNA sense strand
cucaucagcugaaagugaa

SEQ ID NO: 1237006 - RNA, 19 nt, Homo sapiens
  misc_RNA (1)...(19): siRNA sense strand
gaaauggauauggaaagug

SEQ ID NO: 1237007 - RNA, 19 nt, Homo sapiens
  misc_RNA (1)...(19): siRNA sense strand
gugaagaugaaauggauau

SEQ ID NO: 1237008 - RNA, 19 nt, Homo sapiens
  misc_RNA (1)...(19): siRNA sense strand
gagaaugaugccagugaug

SEQ ID NO: 1237009 - RNA, 19 nt, Homo sapiens
  misc_RNA (1)...(19): siRNA sense strand
gaugacucccguuacuauu

SEQ ID NO: 1237010 - RNA, 19 nt, Homo sapiens
  misc_RNA (1)...(19): siRNA sense strand
gaugggaacaggagcagau

SEQ ID NO: 1237011 - RNA, 19 nt, Homo sapiens
  misc_RNA (1)...(19): siRNA sense strand
gcccgagaauugggagauu

SEQ ID NO: 1237012 - RNA, 19 nt, Homo sapiens
  misc_RNA (1)...(19): siRNA sense strand
cagaacacuuaccagacaa

SEQ ID NO: 1237013 - RNA, 19 nt, Homo sapiens
  misc_RNA (1)...(19): siRNA sense strand
gaaaagucacaaagacaaa

SEQ ID NO: 1237014 - RNA, 19 nt, Homo sapiens
  misc_RNA (1)...(19): siRNA sense strand
ugagaaacgccggauaguu

SEQ ID NO: 1237015 - RNA, 19 nt, Homo sapiens
  misc_RNA (1)...(19): siRNA sense strand
gaaugaugccagugaugau

SEQ ID NO: 1237016 - RNA, 19 nt, Homo sapiens
  misc_RNA (1)...(19): siRNA sense strand
ugagaaugaugccagugau

SEQ ID NO: 1237017 - RNA, 19 nt, Homo sapiens
  misc_RNA (1)...(19): siRNA sense strand
agauuucacuccucaugau

SEQ ID NO: 1237018 - RNA, 19 nt, Homo sapiens
  misc_RNA (1)...(19): siRNA sense strand
ugagaaacaucugcaaagc

SEQ ID NO: 1237019 - RNA, 19 nt, Homo sapiens
  misc_RNA (1)...(19): siRNA sense strand
ggacuccaugaaagaauug

SEQ ID NO: 1237020 - RNA, 19 nt, Homo sapiens
  misc_RNA (1)...(19): siRNA sense strand
agaaugaugccagugauga

SEQ ID NO: 1237021 - RNA, 19 nt, Homo sapiens
  misc_RNA (1)...(19): siRNA sense strand
uuuaguaacuggagaacag

SEQ ID NO: 1237022 - RNA, 19 nt, Homo sapiens
  misc_RNA (1)...(19): siRNA sense strand
gcgaggguauguccaagac

SEQ ID NO: 1237023 - RNA, 19 nt, Homo sapiens
  misc_RNA (1)...(19): siRNA sense strand
gaaagaauugcacaaaaca

SEQ ID NO: 1237024 - RNA, 19 nt, Homo sapiens
  misc_RNA (1)...(19): siRNA sense strand
uaacuggagaacaggauga

SEQ ID NO: 1237025 - RNA, 19 nt, Homo sapiens
  misc_RNA (1)...(19): siRNA sense strand
ccaaauggcccgagaauug

SEQ ID NO: 1237026 - RNA, 19 nt, Homo sapiens
  misc_RNA (1)...(19): siRNA sense strand
gaacgacuccgaagaggaa

SEQ ID NO: 1237027 - RNA, 19 nt, Homo sapiens
  misc_RNA (1)...(19): siRNA sense strand
ccgcagaagugaauaugua

SEQ ID NO: 1237028 - RNA, 19 nt, Homo sapiens
  misc_RNA (1)...(19): siRNA sense strand
agacagaacucaacucauc

SEQ ID NO: 1237029 - RNA, 19 nt, Homo sapiens
  misc_RNA (1)...(19): siRNA sense strand
ggaagaaaaugaagaaguu

SEQ ID NO: 1237030 - RNA, 19 nt, Homo sapiens
  misc_RNA (1)...(19): siRNA sense strand
ucaagaagauggaguuauc

SEQ ID NO: 1237031 - RNA, 19 nt, Homo sapiens
  misc_RNA (1)...(19): siRNA sense strand
ggauacaaaucaagaagau

SEQ ID NO: 1237032 - RNA, 19 nt, Homo sapiens
  misc_RNA (1)...(19): siRNA sense strand
gagugaugaugaugcuuua

SEQ ID NO: 1237033 - RNA, 19 nt, Homo sapiens
  misc_RNA (1)...(19): siRNA sense strand
aaauggauauggaaaguga

SEQ ID NO: 1237034 - RNA, 19 nt, Homo sapiens
  misc_RNA (1)...(19): siRNA sense strand
gaacaggagcagauaagga

SEQ ID NO: 1237035 - RNA, 19 nt, Homo sapiens
  misc_RNA (1)...(19): siRNA sense strand
ccagaacacuuaccagaca

SEQ ID NO: 1237036 - RNA, 19 nt, Homo sapiens
  misc_RNA (1)...(19): siRNA sense strand
gaagaaguuuucaaaguga

SEQ ID NO: 1237037 - RNA, 19 nt, Homo sapiens
  misc_RNA (1)...(19): siRNA sense strand
ccagggcuauugaaagauu

SEQ ID NO: 1237038 - RNA, 19 nt, Homo sapiens
  misc_RNA (1)...(19): siRNA sense strand
uaccagggcuauugaaaga

SEQ ID NO: 1237039 - RNA, 19 nt, Homo sapiens
  misc_RNA (1)...(19): siRNA sense strand
gcagauaaggaaaggaauu

SEQ ID NO: 1237040 - RNA, 19 nt, Homo sapiens
  misc_RNA (1)...(19): siRNA sense strand
gaggguauguccaagacuu

SEQ ID NO: 1237041 - RNA, 19 nt, Homo sapiens
  misc_RNA (1)...(19): siRNA sense strand
gauaauacagucccuuuca

SEQ ID NO: 1237042 - RNA, 19 nt, Homo sapiens
  misc_RNA (1)...(19): siRNA sense strand
ggagugaugaugaugcuuu

SEQ ID NO: 1237043 - RNA, 19 nt, Homo sapiens
  misc_RNA (1)...(19): siRNA sense strand
gagcagauaaggaaaggaa

SEQ ID NO: 1237044 - RNA, 19 nt, Homo sapiens
  misc_RNA (1)...(19): siRNA sense strand
ugaugaugaugcuuuagua

SEQ ID NO: 1237045 - RNA, 19 nt, Homo sapiens
  misc_RNA (1)...(19): siRNA sense strand
guaaagaaacagcuuaaag

SEQ ID NO: 1237046 - RNA, 19 nt, Homo sapiens
  misc_RNA (1)...(19): siRNA sense strand
uaaaauugcucaagaagga

SEQ ID NO: 1237047 - RNA, 19 nt, Homo sapiens
  misc_RNA (1)...(19): siRNA sense strand
cagauaaggaaaggaauua

SEQ ID NO: 1237048 - RNA, 19 nt, Homo sapiens
  misc_RNA (1)...(19): siRNA sense strand
gcaagaggccucgcgagaa

SEQ ID NO: 1237049 - RNA, 19 nt, Homo sapiens
  misc_RNA (1)...(19): siRNA sense strand
aagacuugcuugaguguuu

SEQ ID NO: 1237050 - RNA, 19 nt, Homo sapiens
  misc_RNA (1)...(19): siRNA sense strand
gcucaagaaggaauauaaa

SEQ ID NO: 1237051 - RNA, 19 nt, Homo sapiens
  misc_RNA (1)...(19): siRNA sense strand
ugacucccguuacuauuga

SEQ ID NO: 1237052 - RNA, 19 nt, Homo sapiens
  misc_RNA (1)...(19): siRNA sense strand
caagaggccucgcgagaac

SEQ ID NO: 1237053 - RNA, 19 nt, Homo sapiens
  misc_RNA (1)...(19): siRNA sense strand
gaacauggugaagaugaaa

SEQ ID NO: 1237054 - RNA, 19 nt, Homo sapiens
  misc_RNA (1)...(19): siRNA sense strand
gaaagaaaagucacaaaga

SEQ ID NO: 1237055 - RNA, 19 nt, Homo sapiens
  misc_RNA (1)...(19): siRNA sense strand
gaugaugaugcuuuaguaa

SEQ ID NO: 1237056 - RNA, 19 nt, Homo sapiens
  misc_RNA (1)...(19): siRNA sense strand
gaagaaaucaaguuauagc

SEQ ID NO: 1237057 - RNA, 19 nt, Homo sapiens
  misc_RNA (1)...(19): siRNA sense strand
ugaaauggauauggaaagu

SEQ ID NO: 1237058 - RNA, 19 nt, Homo sapiens
  misc_RNA (1)...(19): siRNA sense strand
caacucaucagcugaaagu

SEQ ID NO: 1237059 - RNA, 19 nt, Homo sapiens
  misc_RNA (1)...(19): siRNA sense strand
gaugagaaacgccggauag

SEQ ID NO: 1237060 - RNA, 19 nt, Homo sapiens
  misc_RNA (1)...(19): siRNA sense strand
aagaugaaauggauaugga

SEQ ID NO: 1237061 - RNA, 19 nt, Homo sapiens
  misc_RNA (1)...(19): siRNA sense strand
caaaucgacagcagcauga

SEQ ID NO: 1237062 - RNA, 19 nt, Homo sapiens
  misc_RNA (1)...(19): siRNA sense strand
gaugaaauggauauggaaa

SEQ ID NO: 1237063 - RNA, 19 nt, Homo sapiens
  misc_RNA (1)...(19): siRNA sense strand
uaauacagucccuuucaaa

SEQ ID NO: 1237064 - RNA, 19 nt, Homo sapiens
  misc_RNA (1)...(19): siRNA sense strand
uguacuaccagaacacuua

SEQ ID NO: 1237065 - RNA, 19 nt, Homo sapiens
  misc_RNA (1)...(19): siRNA sense strand
uauacaugcugcaaggaaa

SEQ ID NO: 1237066 - RNA, 19 nt, Homo sapiens
  misc_RNA (1)...(19): siRNA sense strand
uaagacagaacucaacuca

SEQ ID NO: 1237067 - RNA, 19 nt, Homo sapiens
  misc_RNA (1)...(19): siRNA sense strand
ggugaacgguauaaauuuu

SEQ ID NO: 1237068 - RNA, 19 nt, Homo sapiens
  misc_RNA (1)...(19): siRNA sense strand
uggcauuccuuauaguuau

SEQ ID NO: 1237069 - RNA, 19 nt, Homo sapiens
  misc_RNA (1)...(19): siRNA sense strand
uaauaucccucagguucaa

SEQ ID NO: 1237070 - RNA, 19 nt, Homo sapiens
  misc_RNA (1)...(19): siRNA sense strand
uuagagaagaugagaauga

SEQ ID NO: 1237071 - RNA, 19 nt, Homo sapiens
  misc_RNA (1)...(19): siRNA sense strand
ggaguuaucaucagugaac

SEQ ID NO: 1237072 - RNA, 19 nt, Homo sapiens
  misc_RNA (1)...(19): siRNA sense strand
gcaagaaaugcgaggguau

SEQ ID NO: 1237073 - RNA, 19 nt, Homo sapiens
  misc_RNA (1)...(19): siRNA sense strand
cagaagugaauauguacua

SEQ ID NO: 1237074 - RNA, 19 nt, Homo sapiens
  misc_RNA (1)...(19): siRNA sense strand
uagagaagaugagaaugau

SEQ ID NO: 1237075 - RNA, 19 nt, Homo sapiens
  misc_RNA (1)...(19): siRNA sense strand
ugaacauggugaagaugaa

SEQ ID NO: 1237076 - RNA, 19 nt, Homo sapiens
  misc_RNA (1)...(19): siRNA sense strand
gagauuucacuccucauga

SEQ ID NO: 1237077 - RNA, 19 nt, Homo sapiens
  misc_RNA (1)...(19): siRNA sense strand
gacagcagcaugagaaaca

SEQ ID NO: 1237078 - RNA, 19 nt, Homo sapiens
  misc_RNA (1)...(19): siRNA sense strand
ccagugaugaugaagauga

SEQ ID NO: 1237079 - RNA, 19 nt, Homo sapiens
  misc_RNA (1)...(19): siRNA sense strand
gaagaugaaauggauaugg

SEQ ID NO: 1237080 - RNA, 19 nt, Homo sapiens
  misc_RNA (1)...(19): siRNA sense strand
ugagaugacucccguuacu

SEQ ID NO: 1237081 - RNA, 19 nt, Homo sapiens
  misc_RNA (1)...(19): siRNA sense strand
cagauaauacagucccuuu

SEQ ID NO: 1237082 - RNA, 19 nt, Homo sapiens
  misc_RNA (1)...(19): siRNA sense strand
cauccuauggcauuccuua

SEQ ID NO: 1237083 - RNA, 19 nt, Homo sapiens
  misc_RNA (1)...(19): siRNA sense strand
ugaagaugacgaugagaaa

SEQ ID NO: 1237084 - RNA, 19 nt, Homo sapiens
  misc_RNA (1)...(19): siRNA sense strand
gugaacaaccuuuggacaa

SEQ ID NO: 1237085 - RNA, 19 nt, Homo sapiens
  misc_RNA (1)...(19): siRNA sense strand
caugaaagaauugcacaaa

SEQ ID NO: 1237086 - RNA, 19 nt, Homo sapiens
  misc_RNA (1)...(19): siRNA sense strand
gagaugacucccguuacua

SEQ ID NO: 1237087 - RNA, 19 nt, Homo sapiens
  misc_RNA (1)...(19): siRNA sense strand
gaauauguacuaccagaac

SEQ ID NO: 1237088 - RNA, 19 nt, Homo sapiens
  misc_RNA (1)...(19): siRNA sense strand
caggacauguuaaggauac

SEQ ID NO: 1237089 - RNA, 19 nt, Homo sapiens
  misc_RNA (1)...(19): siRNA sense strand
gauuucacuccucaugaua

SEQ ID NO: 1237090 - RNA, 19 nt, Homo sapiens
  misc_RNA (1)...(19): siRNA sense strand
cagugaacauggugaagau

SEQ ID NO: 1237091 - RNA, 19 nt, Homo sapiens
  misc_RNA (1)...(19): siRNA sense strand
ggguauuggugaacgguau

SEQ ID NO: 1237092 - RNA, 19 nt, Homo sapiens
  misc_RNA (1)...(19): siRNA sense strand
cagggcuauugaaagauua

SEQ ID NO: 1237093 - RNA, 19 nt, Homo sapiens
  misc_RNA (1)...(19): siRNA sense strand
gaugaugcuuuaguaacug

SEQ ID NO: 1237094 - RNA, 19 nt, Homo sapiens
  misc_RNA (1)...(19): siRNA sense strand
uaucaucagugaacauggu

SEQ ID NO: 1237095 - RNA, 19 nt, Homo sapiens
  misc_RNA (1)...(19): siRNA sense strand
aaugagaugacucccguua

SEQ ID NO: 1237096 - RNA, 19 nt, Homo sapiens
  misc_RNA (1)...(19): siRNA sense strand
ugaugaagaugacgaugag

SEQ ID NO: 1237097 - RNA, 19 nt, Homo sapiens
  misc_RNA (1)...(19): siRNA sense strand
gauaaugagccugguaaag

SEQ ID NO: 1237098 - RNA, 19 nt, Homo sapiens
  misc_RNA (1)...(19): siRNA sense strand
gaacacuuaccagacaaug

SEQ ID NO: 1237099 - RNA, 19 nt, Homo sapiens
  misc_RNA (1)...(19): siRNA sense strand
ugaugaugcuuuaguaacu

SEQ ID NO: 1237100 - RNA, 19 nt, Homo sapiens
  misc_RNA (1)...(19): siRNA sense strand
gugaacauggugaagauga

SEQ ID NO: 1237101 - RNA, 19 nt, Homo sapiens
  misc_RNA (1)...(19): siRNA sense strand
caagaaaugcgaggguaug

SEQ ID NO: 1237102 - RNA, 19 nt, Homo sapiens
  misc_RNA (1)...(19): siRNA sense strand
caugagaaacaucugcaaa

SEQ ID NO: 1237103 - RNA, 19 nt, Homo sapiens
  misc_RNA (1)...(19): siRNA sense strand
gguaaagaaacagcuuaaa

SEQ ID NO: 1237104 - RNA, 19 nt, Homo sapiens
  misc_RNA (1)...(19): siRNA sense strand
auaauacagucccuuucaa

SEQ ID NO: 1237105 - RNA, 19 nt, Homo sapiens
  misc_RNA (1)...(19): siRNA sense strand
cucaucagcugaaagugaa

SEQ ID NO: 1237106 - RNA, 19 nt, Homo sapiens
  misc_RNA (1)...(19): siRNA sense strand
gaaauggauauggaaagug

SEQ ID NO: 1237107 - RNA, 19 nt, Homo sapiens
  misc_RNA (1)...(19): siRNA sense strand
gugaagaugaaauggauau

SEQ ID NO: 1237108 - RNA, 19 nt, Homo sapiens
  misc_RNA (1)...(19): siRNA sense strand
gagaaugaugccagugaug

SEQ ID NO: 1237109 - RNA, 19 nt, Homo sapiens
  misc_RNA (1)...(19): siRNA sense strand
gaugacucccguuacuauu

SEQ ID NO: 1237110 - RNA, 19 nt, Homo sapiens
  misc_RNA (1)...(19): siRNA sense strand
gaugggaacaggagcagau

SEQ ID NO: 1237111 - RNA, 19 nt, Homo sapiens
  misc_RNA (1)...(19): siRNA sense strand
gcccgagaauugggagauu

SEQ ID NO: 1237112 - RNA, 19 nt, Homo sapiens
  misc_RNA (1)...(19): siRNA sense strand
cagaacacuuaccagacaa

SEQ ID NO: 1237113 - RNA, 19 nt, Homo sapiens
  misc_RNA (1)...(19): siRNA sense strand
gaaaagucacaaagacaaa

SEQ ID NO: 1237114 - RNA, 19 nt, Homo sapiens
  misc_RNA (1)...(19): siRNA sense strand
ugagaaacgccggauaguu

SEQ ID NO: 1237115 - RNA, 19 nt, Homo sapiens
  misc_RNA (1)...(19): siRNA sense strand
gaaugaugccagugaugau

SEQ ID NO: 1237116 - RNA, 19 nt, Homo sapiens
  misc_RNA (1)...(19): siRNA sense strand
ugagaaugaugccagugau

SEQ ID NO: 1237117 - RNA, 19 nt, Homo sapiens
  misc_RNA (1)...(19): siRNA sense strand
agauuucacuccucaugau

SEQ ID NO: 1237118 - RNA, 19 nt, Homo sapiens
  misc_RNA (1)...(19): siRNA sense strand
ugagaaacaucugcaaagc

SEQ ID NO: 1237119 - RNA, 19 nt, Homo sapiens
  misc_RNA (1)...(19): siRNA sense strand
ggacuccaugaaagaauug

SEQ ID NO: 1237120 - RNA, 19 nt, Homo sapiens
  misc_RNA (1)...(19): siRNA sense strand
agaaugaugccagugauga

SEQ ID NO: 1237121 - RNA, 19 nt, Homo sapiens
  misc_RNA (1)...(19): siRNA sense strand
uuuaguaacuggagaacag

SEQ ID NO: 1237122 - RNA, 19 nt, Homo sapiens
  misc_RNA (1)...(19): siRNA sense strand
gcgaggguauguccaagac

SEQ ID NO: 1237123 - RNA, 19 nt, Homo sapiens
  misc_RNA (1)...(19): siRNA sense strand
gaaagaauugcacaaaaca

SEQ ID NO: 1237124 - RNA, 19 nt, Homo sapiens
  misc_RNA (1)...(19): siRNA sense strand
uaacuggagaacaggauga

SEQ ID NO: 1237125 - RNA, 19 nt, Homo sapiens
  misc_RNA (1)...(19): siRNA sense strand
ccaaauggcccgagaauug

SEQ ID NO: 1237126 - RNA, 19 nt, Homo sapiens
  misc_RNA (1)...(19): siRNA sense strand
gaacgacuccgaagaggaa

SEQ ID NO: 1237127 - RNA, 19 nt, Homo sapiens
  misc_RNA (1)...(19): siRNA sense strand
ccgcagaagugaauaugua

SEQ ID NO: 1237128 - RNA, 19 nt, Homo sapiens
  misc_RNA (1)...(19): siRNA sense strand
agacagaacucaacucauc

SEQ ID NO: 1237129 - RNA, 19 nt, Homo sapiens
  misc_RNA (1)...(19): siRNA sense strand
ggaagaaaaugaagaaguu

SEQ ID NO: 1237130 - RNA, 19 nt, Homo sapiens
  misc_RNA (1)...(19): siRNA sense strand
ucaagaagauggaguuauc

SEQ ID NO: 1237131 - RNA, 19 nt, Homo sapiens
  misc_RNA (1)...(19): siRNA sense strand
ggauacaaaucaagaagau

SEQ ID NO: 1237132 - RNA, 19 nt, Homo sapiens
  misc_RNA (1)...(19): siRNA sense strand
gagugaugaugaugcuuua

SEQ ID NO: 1237133 - RNA, 19 nt, Homo sapiens
  misc_RNA (1)...(19): siRNA sense strand
aaauggauauggaaaguga

SEQ ID NO: 1237134 - RNA, 19 nt, Homo sapiens
  misc_RNA (1)...(19): siRNA sense strand
gaacaggagcagauaagga

SEQ ID NO: 1237135 - RNA, 19 nt, Homo sapiens
  misc_RNA (1)...(19): siRNA sense strand
ccagaacacuuaccagaca

SEQ ID NO: 1237136 - RNA, 19 nt, Homo sapiens
  misc_RNA (1)...(19): siRNA sense strand
gaagaaguuuucaaaguga

SEQ ID NO: 1237137 - RNA, 19 nt, Homo sapiens
  misc_RNA (1)...(19): siRNA sense strand
ccagggcuauugaaagauu

SEQ ID NO: 1237138 - RNA, 19 nt, Homo sapiens
  misc_RNA (1)...(19): siRNA sense strand
uaccagggcuauugaaaga

SEQ ID NO: 1237139 - RNA, 19 nt, Homo sapiens
  misc_RNA (1)...(19): siRNA sense strand
gcagauaaggaaaggaauu

SEQ ID NO: 1237140 - RNA, 19 nt, Homo sapiens
  misc_RNA (1)...(19): siRNA sense strand
gaggguauguccaagacuu

SEQ ID NO: 1237141 - RNA, 19 nt, Homo sapiens
  misc_RNA (1)...(19): siRNA sense strand
gauaauacagucccuuuca

SEQ ID NO: 1237142 - RNA, 19 nt, Homo sapiens
  misc_RNA (1)...(19): siRNA sense strand
ggagugaugaugaugcuuu

SEQ ID NO: 1237143 - RNA, 19 nt, Homo sapiens
  misc_RNA (1)...(19): siRNA sense strand
gagcagauaaggaaaggaa

SEQ ID NO: 1237144 - RNA, 19 nt, Homo sapiens
  misc_RNA (1)...(19): siRNA sense strand
ugaugaugaugcuuuagua

SEQ ID NO: 1237145 - RNA, 19 nt, Homo sapiens
  misc_RNA (1)...(19): siRNA sense strand
guaaagaaacagcuuaaag

SEQ ID NO: 1237146 - RNA, 19 nt, Homo sapiens
  misc_RNA (1)...(19): siRNA sense strand
uaaaauugcucaagaagga

SEQ ID NO: 1237147 - RNA, 19 nt, Homo sapiens
  misc_RNA (1)...(19): siRNA sense strand
cagauaaggaaaggaauua

SEQ ID NO: 1237148 - RNA, 19 nt, Homo sapiens
  misc_RNA (1)...(19): siRNA sense strand
gcaagaggccucgcgagaa

SEQ ID NO: 1237149 - RNA, 19 nt, Homo sapiens
  misc_RNA (1)...(19): siRNA sense strand
aagacuugcuugaguguuu

SEQ ID NO: 1237150 - RNA, 19 nt, Homo sapiens
  misc_RNA (1)...(19): siRNA sense strand
gcucaagaaggaauauaaa

SEQ ID NO: 1237151 - RNA, 19 nt, Homo sapiens
  misc_RNA (1)...(19): siRNA sense strand
ugacucccguuacuauuga

SEQ ID NO: 1237152 - RNA, 19 nt, Homo sapiens
  misc_RNA (1)...(19): siRNA sense strand
caagaggccucgcgagaac

SEQ ID NO: 1237153 - RNA, 19 nt, Homo sapiens
  misc_RNA (1)...(19): siRNA sense strand
gaacauggugaagaugaaa

SEQ ID NO: 1237154 - RNA, 19 nt, Homo sapiens
  misc_RNA (1)...(19): siRNA sense strand
gaaagaaaagucacaaaga

SEQ ID NO: 1237155 - RNA, 19 nt, Homo sapiens
  misc_RNA (1)...(19): siRNA sense strand
gaugaugaugcuuuaguaa

SEQ ID NO: 1237156 - RNA, 19 nt, Homo sapiens
  misc_RNA (1)...(19): siRNA sense strand
gaagaaaucaaguuauagc

SEQ ID NO: 1237157 - RNA, 19 nt, Homo sapiens
  misc_RNA (1)...(19): siRNA sense strand
ugaaauggauauggaaagu

SEQ ID NO: 1237158 - RNA, 19 nt, Homo sapiens
  misc_RNA (1)...(19): siRNA sense strand
caacucaucagcugaaagu

SEQ ID NO: 1237159 - RNA, 19 nt, Homo sapiens
  misc_RNA (1)...(19): siRNA sense strand
gaugagaaacgccggauag

SEQ ID NO: 1237160 - RNA, 19 nt, Homo sapiens
  misc_RNA (1)...(19): siRNA sense strand
aagaugaaauggauaugga

SEQ ID NO: 1237161 - RNA, 19 nt, Homo sapiens
  misc_RNA (1)...(19): siRNA sense strand
caaaucgacagcagcauga

SEQ ID NO: 1237162 - RNA, 19 nt, Homo sapiens
  misc_RNA (1)...(19): siRNA sense strand
gaugaaauggauauggaaa

SEQ ID NO: 1237163 - RNA, 19 nt, Homo sapiens
  misc_RNA (1)...(19): siRNA sense strand
uaauacagucccuuucaaa

SEQ ID NO: 1237164 - RNA, 19 nt, Homo sapiens
  misc_RNA (1)...(19): siRNA sense strand
uguacuaccagaacacuua

SEQ ID NO: 1237165 - RNA, 19 nt, Homo sapiens
  misc_RNA (1)...(19): siRNA sense strand
uauacaugcugcaaggaaa

SEQ ID NO: 1237166 - RNA, 19 nt, Homo sapiens
  misc_RNA (1)...(19): siRNA sense strand
uaagacagaacucaacuca

SEQ ID NO: 1237167 - RNA, 19 nt, Homo sapiens
  misc_RNA (1)...(19): siRNA sense strand
ggugaacgguauaaauuuu

SEQ ID NO: 1237168 - RNA, 19 nt, Homo sapiens
  misc_RNA (1)...(19): siRNA sense strand
uggcauuccuuauaguuau

SEQ ID NO: 1237169 - RNA, 19 nt, Homo sapiens
  misc_RNA (1)...(19): siRNA sense strand
uaauaucccucagguucaa

SEQ ID NO: 1237170 - RNA, 19 nt, Homo sapiens
  misc_RNA (1)...(19): siRNA sense strand
uuagagaagaugagaauga

SEQ ID NO: 1237171 - RNA, 19 nt, Homo sapiens
  misc_RNA (1)...(19): siRNA sense strand
ggaguuaucaucagugaac

SEQ ID NO: 1237172 - RNA, 19 nt, Homo sapiens
  misc_RNA (1)...(19): siRNA sense strand
gcaagaaaugcgaggguau

SEQ ID NO: 1237173 - RNA, 19 nt, Homo sapiens
  misc_RNA (1)...(19): siRNA sense strand
cagaagugaauauguacua

SEQ ID NO: 1237174 - RNA, 19 nt, Homo sapiens
  misc_RNA (1)...(19): siRNA sense strand
uagagaagaugagaaugau

SEQ ID NO: 1237175 - RNA, 19 nt, Homo sapiens
  misc_RNA (1)...(19): siRNA sense strand
ugaacauggugaagaugaa

SEQ ID NO: 1237176 - RNA, 19 nt, Homo sapiens
  misc_RNA (1)...(19): siRNA sense strand
gagauuucacuccucauga

SEQ ID NO: 1237177 - RNA, 19 nt, Homo sapiens
  misc_RNA (1)...(19): siRNA sense strand
gacagcagcaugagaaaca

SEQ ID NO: 1237178 - RNA, 19 nt, Homo sapiens
  misc_RNA (1)...(19): siRNA sense strand
ccagugaugaugaagauga

SEQ ID NO: 1237179 - RNA, 19 nt, Homo sapiens
  misc_RNA (1)...(19): siRNA sense strand
gaagaugaaauggauaugg

SEQ ID NO: 1237180 - RNA, 19 nt, Homo sapiens
  misc_RNA (1)...(19): siRNA sense strand
ugagaugacucccguuacu

SEQ ID NO: 1237181 - RNA, 19 nt, Homo sapiens
  misc_RNA (1)...(19): siRNA sense strand
cagauaauacagucccuuu

SEQ ID NO: 1237182 - RNA, 19 nt, Homo sapiens
  misc_RNA (1)...(19): siRNA sense strand
cauccuauggcauuccuua

SEQ ID NO: 1237183 - RNA, 19 nt, Homo sapiens
  misc_RNA (1)...(19): siRNA sense strand
ugaagaugacgaugagaaa

SEQ ID NO: 1237184 - RNA, 19 nt, Homo sapiens
  misc_RNA (1)...(19): siRNA sense strand
gugaacaaccuuuggacaa

SEQ ID NO: 1237185 - RNA, 19 nt, Homo sapiens
  misc_RNA (1)...(19): siRNA sense strand
caugaaagaauugcacaaa

SEQ ID NO: 1237186 - RNA, 19 nt, Homo sapiens
  misc_RNA (1)...(19): siRNA sense strand
gagaugacucccguuacua

SEQ ID NO: 1237187 - RNA, 19 nt, Homo sapiens
  misc_RNA (1)...(19): siRNA sense strand
gaauauguacuaccagaac

SEQ ID NO: 1237188 - RNA, 19 nt, Homo sapiens
  misc_RNA (1)...(19): siRNA sense strand
caggacauguuaaggauac

SEQ ID NO: 1237189 - RNA, 19 nt, Homo sapiens
  misc_RNA (1)...(19): siRNA sense strand
gauuucacuccucaugaua

SEQ ID NO: 1237190 - RNA, 19 nt, Homo sapiens
  misc_RNA (1)...(19): siRNA sense strand
cagugaacauggugaagau

SEQ ID NO: 1237191 - RNA, 19 nt, Homo sapiens
  misc_RNA (1)...(19): siRNA sense strand
ggguauuggugaacgguau

SEQ ID NO: 1237192 - RNA, 19 nt, Homo sapiens
  misc_RNA (1)...(19): siRNA sense strand
cagggcuauugaaagauua

SEQ ID NO: 1237193 - RNA, 19 nt, Homo sapiens
  misc_RNA (1)...(19): siRNA sense strand
gaugaugcuuuaguaacug

SEQ ID NO: 1237194 - RNA, 19 nt, Homo sapiens
  misc_RNA (1)...(19): siRNA sense strand
uaucaucagugaacauggu

SEQ ID NO: 1237195 - RNA, 19 nt, Homo sapiens
  misc_RNA (1)...(19): siRNA sense strand
aaugagaugacucccguua

SEQ ID NO: 1237196 - RNA, 19 nt, Homo sapiens
  misc_RNA (1)...(19): siRNA sense strand
ugaugaagaugacgaugag

SEQ ID NO: 1237197 - RNA, 19 nt, Homo sapiens
  misc_RNA (1)...(19): siRNA sense strand
gauaaugagccugguaaag

SEQ ID NO: 1237198 - RNA, 19 nt, Homo sapiens
  misc_RNA (1)...(19): siRNA sense strand
gaacacuuaccagacaaug

SEQ ID NO: 1237199 - RNA, 19 nt, Homo sapiens
  misc_RNA (1)...(19): siRNA sense strand
ugaugaugcuuuaguaacu

SEQ ID NO: 1237200 - RNA, 19 nt, Homo sapiens
  misc_RNA (1)...(19): siRNA sense strand
gugaacauggugaagauga

SEQ ID NO: 1237201 - RNA, 19 nt, Homo sapiens
  misc_RNA (1)...(19): siRNA sense strand
caagaaaugcgaggguaug

SEQ ID NO: 1237202 - RNA, 19 nt, Homo sapiens
  misc_RNA (1)...(19): siRNA sense strand
caugagaaacaucugcaaa

SEQ ID NO: 1237203 - RNA, 19 nt, Homo sapiens
  misc_RNA (1)...(19): siRNA sense strand
gguaaagaaacagcuuaaa

SEQ ID NO: 1237204 - RNA, 19 nt, Homo sapiens
  misc_RNA (1)...(19): siRNA sense strand
auaauacagucccuuucaa

SEQ ID NO: 1237205 - RNA, 19 nt, Homo sapiens
  misc_RNA (1)...(19): siRNA sense strand
cucaucagcugaaagugaa

SEQ ID NO: 1237206 - RNA, 19 nt, Homo sapiens
  misc_RNA (1)...(19): siRNA sense strand
gaaauggauauggaaagug

SEQ ID NO: 1237207 - RNA, 19 nt, Homo sapiens
  misc_RNA (1)...(19): siRNA sense strand
gugaagaugaaauggauau

SEQ ID NO: 1237208 - RNA, 19 nt, Homo sapiens
  misc_RNA (1)...(19): siRNA sense strand
gagaaugaugccagugaug

SEQ ID NO: 1237209 - RNA, 19 nt, Homo sapiens
  misc_RNA (1)...(19): siRNA sense strand
gaugacucccguuacuauu

SEQ ID NO: 1237210 - RNA, 19 nt, Homo sapiens
  misc_RNA (1)...(19): siRNA sense strand
gaugggaacaggagcagau

SEQ ID NO: 1237211 - RNA, 19 nt, Homo sapiens
  misc_RNA (1)...(19): siRNA sense strand
gcccgagaauugggagauu

SEQ ID NO: 1237212 - RNA, 19 nt, Homo sapiens
  misc_RNA (1)...(19): siRNA sense strand
cagaacacuuaccagacaa

SEQ ID NO: 1237213 - RNA, 19 nt, Homo sapiens
  misc_RNA (1)...(19): siRNA sense strand
gaaaagucacaaagacaaa

SEQ ID NO: 1237214 - RNA, 19 nt, Homo sapiens
  misc_RNA (1)...(19): siRNA sense strand
ugagaaacgccggauaguu

SEQ ID NO: 1237215 - RNA, 19 nt, Homo sapiens
  misc_RNA (1)...(19): siRNA sense strand
gaaugaugccagugaugau

SEQ ID NO: 1237216 - RNA, 19 nt, Homo sapiens
  misc_RNA (1)...(19): siRNA sense strand
ugagaaugaugccagugau

SEQ ID NO: 1237217 - RNA, 19 nt, Homo sapiens
  misc_RNA (1)...(19): siRNA sense strand
agauuucacuccucaugau

SEQ ID NO: 1237218 - RNA, 19 nt, Homo sapiens
  misc_RNA (1)...(19): siRNA sense strand
ugagaaacaucugcaaagc

SEQ ID NO: 1237219 - RNA, 19 nt, Homo sapiens
  misc_RNA (1)...(19): siRNA sense strand
ggacuccaugaaagaauug

SEQ ID NO: 1237220 - RNA, 19 nt, Homo sapiens
  misc_RNA (1)...(19): siRNA sense strand
agaaugaugccagugauga

SEQ ID NO: 1237221 - RNA, 19 nt, Homo sapiens
  misc_RNA (1)...(19): siRNA sense strand
uuuaguaacuggagaacag

SEQ ID NO: 1237222 - RNA, 19 nt, Homo sapiens
  misc_RNA (1)...(19): siRNA sense strand
gcgaggguauguccaagac

SEQ ID NO: 1237223 - RNA, 19 nt, Homo sapiens
  misc_RNA (1)...(19): siRNA sense strand
gaaagaauugcacaaaaca

SEQ ID NO: 1237224 - RNA, 19 nt, Homo sapiens
  misc_RNA (1)...(19): siRNA sense strand
uaacuggagaacaggauga

SEQ ID NO: 1237225 - RNA, 19 nt, Homo sapiens
  misc_RNA (1)...(19): siRNA sense strand
ccaaauggcccgagaauug

SEQ ID NO: 1237226 - RNA, 19 nt, Homo sapiens
  misc_RNA (1)...(19): siRNA sense strand
gaacgacuccgaagaggaa

SEQ ID NO: 1237227 - RNA, 19 nt, Homo sapiens
  misc_RNA (1)...(19): siRNA sense strand
ccgcagaagugaauaugua

SEQ ID NO: 1237228 - RNA, 19 nt, Homo sapiens
  misc_RNA (1)...(19): siRNA sense strand
agacagaacucaacucauc

SEQ ID NO: 1237229 - RNA, 19 nt, Homo sapiens
  misc_RNA (1)...(19): siRNA sense strand
ggaagaaaaugaagaaguu

SEQ ID NO: 1237230 - RNA, 19 nt, Homo sapiens
  misc_RNA (1)...(19): siRNA sense strand
ucaagaagauggaguuauc

SEQ ID NO: 1237231 - RNA, 19 nt, Homo sapiens
  misc_RNA (1)...(19): siRNA sense strand
ggauacaaaucaagaagau

SEQ ID NO: 1237232 - RNA, 19 nt, Homo sapiens
  misc_RNA (1)...(19): siRNA sense strand
gagugaugaugaugcuuua

SEQ ID NO: 1237233 - RNA, 19 nt, Homo sapiens
  misc_RNA (1)...(19): siRNA sense strand
aaauggauauggaaaguga

SEQ ID NO: 1237234 - RNA, 19 nt, Homo sapiens
  misc_RNA (1)...(19): siRNA sense strand
gaacaggagcagauaagga

SEQ ID NO: 1237235 - RNA, 19 nt, Homo sapiens
  misc_RNA (1)...(19): siRNA sense strand
ccagaacacuuaccagaca

SEQ ID NO: 1237236 - RNA, 19 nt, Homo sapiens
  misc_RNA (1)...(19): siRNA sense strand
gaagaaguuuucaaaguga

SEQ ID NO: 1237237 - RNA, 19 nt, Homo sapiens
  misc_RNA (1)...(19): siRNA sense strand
ccagggcuauugaaagauu

SEQ ID NO: 1237238 - RNA, 19 nt, Homo sapiens
  misc_RNA (1)...(19): siRNA sense strand
uaccagggcuauugaaaga

SEQ ID NO: 1237239 - RNA, 19 nt, Homo sapiens
  misc_RNA (1)...(19): siRNA sense strand
gcagauaaggaaaggaauu

SEQ ID NO: 1237240 - RNA, 19 nt, Homo sapiens
  misc_RNA (1)...(19): siRNA sense strand
gaggguauguccaagacuu

SEQ ID NO: 1237241 - RNA, 19 nt, Homo sapiens
  misc_RNA (1)...(19): siRNA sense strand
gauaauacagucccuuuca

SEQ ID NO: 1237242 - RNA, 19 nt, Homo sapiens
  misc_RNA (1)...(19): siRNA sense strand
ggagugaugaugaugcuuu

SEQ ID NO: 1237243 - RNA, 19 nt, Homo sapiens
  misc_RNA (1)...(19): siRNA sense strand
gagcagauaaggaaaggaa

SEQ ID NO: 1237244 - RNA, 19 nt, Homo sapiens
  misc_RNA (1)...(19): siRNA sense strand
ugaugaugaugcuuuagua

SEQ ID NO: 1237245 - RNA, 19 nt, Homo sapiens
  misc_RNA (1)...(19): siRNA sense strand
guaaagaaacagcuuaaag

SEQ ID NO: 1237246 - RNA, 19 nt, Homo sapiens
  misc_RNA (1)...(19): siRNA sense strand
uaaaauugcucaagaagga

SEQ ID NO: 1237247 - RNA, 19 nt, Homo sapiens
  misc_RNA (1)...(19): siRNA sense strand
cagauaaggaaaggaauua

SEQ ID NO: 1237248 - RNA, 19 nt, Homo sapiens
  misc_RNA (1)...(19): siRNA sense strand
gcaagaggccucgcgagaa

SEQ ID NO: 1237249 - RNA, 19 nt, Homo sapiens
  misc_RNA (1)...(19): siRNA sense strand
aagacuugcuugaguguuu

SEQ ID NO: 1237250 - RNA, 19 nt, Homo sapiens
  misc_RNA (1)...(19): siRNA sense strand
gcucaagaaggaauauaaa

SEQ ID NO: 1237251 - RNA, 19 nt, Homo sapiens
  misc_RNA (1)...(19): siRNA sense strand
ugacucccguuacuauuga

SEQ ID NO: 1237252 - RNA, 19 nt, Homo sapiens
  misc_RNA (1)...(19): siRNA sense strand
caagaggccucgcgagaac

SEQ ID NO: 1237253 - RNA, 19 nt, Homo sapiens
  misc_RNA (1)...(19): siRNA sense strand
gaacauggugaagaugaaa

SEQ ID NO: 1237254 - RNA, 19 nt, Homo sapiens
  misc_RNA (1)...(19): siRNA sense strand
gaaagaaaagucacaaaga

SEQ ID NO: 1237255 - RNA, 19 nt, Homo sapiens
  misc_RNA (1)...(19): siRNA sense strand
gaugaugaugcuuuaguaa

SEQ ID NO: 1237256 - RNA, 19 nt, Homo sapiens
  misc_RNA (1)...(19): siRNA sense strand
gaagaaaucaaguuauagc

SEQ ID NO: 1237257 - RNA, 19 nt, Homo sapiens
  misc_RNA (1)...(19): siRNA sense strand
ugaaauggauauggaaagu

SEQ ID NO: 1237258 - RNA, 19 nt, Homo sapiens
  misc_RNA (1)...(19): siRNA sense strand
caacucaucagcugaaagu

SEQ ID NO: 1237259 - RNA, 19 nt, Homo sapiens
  misc_RNA (1)...(19): siRNA sense strand
gaugagaaacgccggauag

SEQ ID NO: 1237260 - RNA, 19 nt, Homo sapiens
  misc_RNA (1)...(19): siRNA sense strand
aagaugaaauggauaugga

SEQ ID NO: 1237261 - RNA, 19 nt, Homo sapiens
  misc_RNA (1)...(19): siRNA sense strand
caaaucgacagcagcauga

SEQ ID NO: 1237262 - RNA, 19 nt, Homo sapiens
  misc_RNA (1)...(19): siRNA sense strand
gaugaaauggauauggaaa

SEQ ID NO: 1237263 - RNA, 19 nt, Homo sapiens
  misc_RNA (1)...(19): siRNA sense strand
uaauacagucccuuucaaa

SEQ ID NO: 1237264 - RNA, 19 nt, Homo sapiens
  misc_RNA (1)...(19): siRNA sense strand
uguacuaccagaacacuua

SEQ ID NO: 1237265 - RNA, 19 nt, Homo sapiens
  misc_RNA (1)...(19): siRNA sense strand
uauacaugcugcaaggaaa

SEQ ID NO: 1237266 - RNA, 19 nt, Homo sapiens
  misc_RNA (1)...(19): siRNA sense strand
uaagacagaacucaacuca

SEQ ID NO: 1237267 - RNA, 19 nt, Homo sapiens
  misc_RNA (1)...(19): siRNA sense strand
ggugaacgguauaaauuuu

SEQ ID NO: 1237268 - RNA, 19 nt, Homo sapiens
  misc_RNA (1)...(19): siRNA sense strand
uggcauuccuuauaguuau

SEQ ID NO: 1237269 - RNA, 19 nt, Homo sapiens
  misc_RNA (1)...(19): siRNA sense strand
uaauaucccucagguucaa

SEQ ID NO: 1237270 - RNA, 19 nt, Homo sapiens
  misc_RNA (1)...(19): siRNA sense strand
uuagagaagaugagaauga

SEQ ID NO: 1237271 - RNA, 19 nt, Homo sapiens
  misc_RNA (1)...(19): siRNA sense strand
ggaguuaucaucagugaac

SEQ ID NO: 1237272 - RNA, 19 nt, Homo sapiens
  misc_RNA (1)...(19): siRNA sense strand
gcaagaaaugcgaggguau

SEQ ID NO: 1237273 - RNA, 19 nt, Homo sapiens
  misc_RNA (1)...(19): siRNA sense strand
cagaagugaauauguacua

SEQ ID NO: 1237274 - RNA, 19 nt, Homo sapiens
  misc_RNA (1)...(19): siRNA sense strand
uagagaagaugagaaugau

SEQ ID NO: 1237275 - RNA, 19 nt, Homo sapiens
  misc_RNA (1)...(19): siRNA sense strand
ugaacauggugaagaugaa

SEQ ID NO: 1237276 - RNA, 19 nt, Homo sapiens
  misc_RNA (1)...(19): siRNA sense strand
gagauuucacuccucauga

SEQ ID NO: 1237277 - RNA, 19 nt, Homo sapiens
  misc_RNA (1)...(19): siRNA sense strand
gacagcagcaugagaaaca

SEQ ID NO: 1237278 - RNA, 19 nt, Homo sapiens
  misc_RNA (1)...(19): siRNA sense strand
ccagugaugaugaagauga

SEQ ID NO: 1237279 - RNA, 19 nt, Homo sapiens
  misc_RNA (1)...(19): siRNA sense strand
gaagaugaaauggauaugg

SEQ ID NO: 1237280 - RNA, 19 nt, Homo sapiens
  misc_RNA (1)...(19): siRNA sense strand
ugagaugacucccguuacu

SEQ ID NO: 1237281 - RNA, 19 nt, Homo sapiens
  misc_RNA (1)...(19): siRNA sense strand
cagauaauacagucccuuu

SEQ ID NO: 1237282 - RNA, 19 nt, Homo sapiens
  misc_RNA (1)...(19): siRNA sense strand
cauccuauggcauuccuua

SEQ ID NO: 1237283 - RNA, 19 nt, Homo sapiens
  misc_RNA (1)...(19): siRNA sense strand
ugaagaugacgaugagaaa

SEQ ID NO: 1237284 - RNA, 19 nt, Homo sapiens
  misc_RNA (1)...(19): siRNA sense strand
gugaacaaccuuuggacaa

SEQ ID NO: 1237285 - RNA, 19 nt, Homo sapiens
  misc_RNA (1)...(19): siRNA sense strand
caugaaagaauugcacaaa

SEQ ID NO: 1237286 - RNA, 19 nt, Homo sapiens
  misc_RNA (1)...(19): siRNA sense strand
gagaugacucccguuacua

SEQ ID NO: 1237287 - RNA, 19 nt, Homo sapiens
  misc_RNA (1)...(19): siRNA sense strand
gaauauguacuaccagaac

SEQ ID NO: 1237288 - RNA, 19 nt, Homo sapiens
  misc_RNA (1)...(19): siRNA sense strand
caggacauguuaaggauac

SEQ ID NO: 1237289 - RNA, 19 nt, Homo sapiens
  misc_RNA (1)...(19): siRNA sense strand
gauuucacuccucaugaua

SEQ ID NO: 1237290 - RNA, 19 nt, Homo sapiens
  misc_RNA (1)...(19): siRNA sense strand
cagugaacauggugaagau

SEQ ID NO: 1237291 - RNA, 19 nt, Homo sapiens
  misc_RNA (1)...(19): siRNA sense strand
ggguauuggugaacgguau

SEQ ID NO: 1237292 - RNA, 19 nt, Homo sapiens
  misc_RNA (1)...(19): siRNA sense strand
cagggcuauugaaagauua

SEQ ID NO: 1237293 - RNA, 19 nt, Homo sapiens
  misc_RNA (1)...(19): siRNA sense strand
gaugaugcuuuaguaacug

SEQ ID NO: 1237294 - RNA, 19 nt, Homo sapiens
  misc_RNA (1)...(19): siRNA sense strand
uaucaucagugaacauggu

SEQ ID NO: 1237295 - RNA, 19 nt, Homo sapiens
  misc_RNA (1)...(19): siRNA sense strand
aaugagaugacucccguua

SEQ ID NO: 1237296 - RNA, 19 nt, Homo sapiens
  misc_RNA (1)...(19): siRNA sense strand
ugaugaagaugacgaugag

SEQ ID NO: 1237297 - RNA, 19 nt, Homo sapiens
  misc_RNA (1)...(19): siRNA sense strand
gauaaugagccugguaaag

SEQ ID NO: 1237298 - RNA, 19 nt, Homo sapiens
  misc_RNA (1)...(19): siRNA sense strand
gaacacuuaccagacaaug

SEQ ID NO: 1237299 - RNA, 19 nt, Homo sapiens
  misc_RNA (1)...(19): siRNA sense strand
ugaugaugcuuuaguaacu

SEQ ID NO: 1237300 - RNA, 19 nt, Homo sapiens
  misc_RNA (1)...(19): siRNA sense strand
gugaacauggugaagauga

SEQ ID NO: 1237301 - RNA, 19 nt, Homo sapiens
  misc_RNA (1)...(19): siRNA sense strand
caagaaaugcgaggguaug

SEQ ID NO: 1237302 - RNA, 19 nt, Homo sapiens
  misc_RNA (1)...(19): siRNA sense strand
caugagaaacaucugcaaa

SEQ ID NO: 1237303 - RNA, 19 nt, Homo sapiens
  misc_RNA (1)...(19): siRNA sense strand
gguaaagaaacagcuuaaa

SEQ ID NO: 1237304 - RNA, 19 nt, Homo sapiens
  misc_RNA (1)...(19): siRNA sense strand
auaauacagucccuuucaa

SEQ ID NO: 1237305 - RNA, 19 nt, Homo sapiens
  misc_RNA (1)...(19): siRNA sense strand
cucaucagcugaaagugaa

SEQ ID NO: 1237306 - RNA, 19 nt, Homo sapiens
  misc_RNA (1)...(19): siRNA sense strand
gaaauggauauggaaagug

SEQ ID NO: 1237307 - RNA, 19 nt, Homo sapiens
  misc_RNA (1)...(19): siRNA sense strand
gugaagaugaaauggauau

SEQ ID NO: 1237308 - RNA, 19 nt, Homo sapiens
  misc_RNA (1)...(19): siRNA sense strand
gagaaugaugccagugaug

SEQ ID NO: 1237309 - RNA, 19 nt, Homo sapiens
  misc_RNA (1)...(19): siRNA sense strand
gaugacucccguuacuauu

SEQ ID NO: 1237310 - RNA, 19 nt, Homo sapiens
  misc_RNA (1)...(19): siRNA sense strand
gaugggaacaggagcagau

SEQ ID NO: 1237311 - RNA, 19 nt, Homo sapiens
  misc_RNA (1)...(19): siRNA sense strand
gcccgagaauugggagauu

SEQ ID NO: 1237312 - RNA, 19 nt, Homo sapiens
  misc_RNA (1)...(19): siRNA sense strand
cagaacacuuaccagacaa

SEQ ID NO: 1237313 - RNA, 19 nt, Homo sapiens
  misc_RNA (1)...(19): siRNA sense strand
gaaaagucacaaagacaaa

SEQ ID NO: 1237314 - RNA, 19 nt, Homo sapiens
  misc_RNA (1)...(19): siRNA sense strand
ugagaaacgccggauaguu

SEQ ID NO: 1237315 - RNA, 19 nt, Homo sapiens
  misc_RNA (1)...(19): siRNA sense strand
gaaugaugccagugaugau

SEQ ID NO: 1237316 - RNA, 19 nt, Homo sapiens
  misc_RNA (1)...(19): siRNA sense strand
ugagaaugaugccagugau

SEQ ID NO: 1237317 - RNA, 19 nt, Homo sapiens
  misc_RNA (1)...(19): siRNA sense strand
agauuucacuccucaugau

SEQ ID NO: 1237318 - RNA, 19 nt, Homo sapiens
  misc_RNA (1)...(19): siRNA sense strand
ugagaaacaucugcaaagc

SEQ ID NO: 1237319 - RNA, 19 nt, Homo sapiens
  misc_RNA (1)...(19): siRNA sense strand
ggacuccaugaaagaauug

SEQ ID NO: 1237320 - RNA, 19 nt, Homo sapiens
  misc_RNA (1)...(19): siRNA sense strand
agaaugaugccagugauga

SEQ ID NO: 1237321 - RNA, 19 nt, Homo sapiens
  misc_RNA (1)...(19): siRNA sense strand
uuuaguaacuggagaacag

SEQ ID NO: 1237322 - RNA, 19 nt, Homo sapiens
  misc_RNA (1)...(19): siRNA sense strand
gcgaggguauguccaagac

SEQ ID NO: 1237323 - RNA, 19 nt, Homo sapiens
  misc_RNA (1)...(19): siRNA sense strand
gaaagaauugcacaaaaca

SEQ ID NO: 1237324 - RNA, 19 nt, Homo sapiens
  misc_RNA (1)...(19): siRNA sense strand
uaacuggagaacaggauga

SEQ ID NO: 1237325 - RNA, 19 nt, Homo sapiens
  misc_RNA (1)...(19): siRNA sense strand
gaaauacucucaucacaga

SEQ ID NO: 1237326 - RNA, 19 nt, Homo sapiens
  misc_RNA (1)...(19): siRNA sense strand
gaccaacucuggcuuguua

SEQ ID NO: 1237327 - RNA, 19 nt, Homo sapiens
  misc_RNA (1)...(19): siRNA sense strand
gaagugaucuuuggucuug

SEQ ID NO: 1237328 - RNA, 19 nt, Homo sapiens
  misc_RNA (1)...(19): siRNA sense strand
gggaaggucuauccucuua

SEQ ID NO: 1237329 - RNA, 19 nt, Homo sapiens
  misc_RNA (1)...(19): siRNA sense strand
uuacagaccuugugaagaa

SEQ ID NO: 1237330 - RNA, 19 nt, Homo sapiens
  misc_RNA (1)...(19): siRNA sense strand
acagaaacauugcaacaua

SEQ ID NO: 1237331 - RNA, 19 nt, Homo sapiens
  misc_RNA (1)...(19): siRNA sense strand
cgaagacgauuucaacaaa

SEQ ID NO: 1237332 - RNA, 19 nt, Homo sapiens
  misc_RNA (1)...(19): siRNA sense strand
ggaacacacucaaagaaga

SEQ ID NO: 1237333 - RNA, 19 nt, Homo sapiens
  misc_RNA (1)...(19): siRNA sense strand
gaggagaguugaaagagaa

SEQ ID NO: 1237334 - RNA, 19 nt, Homo sapiens
  misc_RNA (1)...(19): siRNA sense strand
ggccagagguugaaaguga

SEQ ID NO: 1237335 - RNA, 19 nt, Homo sapiens
  misc_RNA (1)...(19): siRNA sense strand
ggugaaacuuguugacuuu

SEQ ID NO: 1237336 - RNA, 19 nt, Homo sapiens
  misc_RNA (1)...(19): siRNA sense strand
gaacccagaugccaccuau

SEQ ID NO: 1237337 - RNA, 19 nt, Homo sapiens
  misc_RNA (1)...(19): siRNA sense strand
gaacgugccuggugagucu

SEQ ID NO: 1237338 - RNA, 19 nt, Homo sapiens
  misc_RNA (1)...(19): siRNA sense strand
caaguuagaauccagcuua

SEQ ID NO: 1237339 - RNA, 19 nt, Homo sapiens
  misc_RNA (1)...(19): siRNA sense strand
uaaguuacgugucuacuau

SEQ ID NO: 1237340 - RNA, 19 nt, Homo sapiens
  misc_RNA (1)...(19): siRNA sense strand
gaaaucaaacuggagauaa

SEQ ID NO: 1237341 - RNA, 19 nt, Homo sapiens
  misc_RNA (1)...(19): siRNA sense strand
caaaagggcucaaagacua

SEQ ID NO: 1237342 - RNA, 19 nt, Homo sapiens
  misc_RNA (1)...(19): siRNA sense strand
gagccaaguuccauuguga

SEQ ID NO: 1237343 - RNA, 19 nt, Homo sapiens
  misc_RNA (1)...(19): siRNA sense strand
ccaaaugaaaggcaaguua

SEQ ID NO: 1237344 - RNA, 19 nt, Homo sapiens
  misc_RNA (1)...(19): siRNA sense strand
ucacaaugauccagaaguu

SEQ ID NO: 1237345 - RNA, 19 nt, Homo sapiens
  misc_RNA (1)...(19): siRNA sense strand
gaaggucuauccucuuauc

SEQ ID NO: 1237346 - RNA, 19 nt, Homo sapiens
  misc_RNA (1)...(19): siRNA sense strand
gaugagaccagaagccaua

SEQ ID NO: 1237347 - RNA, 19 nt, Homo sapiens
  misc_RNA (1)...(19): siRNA sense strand
ggagauaaauaugcuaaag

SEQ ID NO: 1237348 - RNA, 19 nt, Homo sapiens
  misc_RNA (1)...(19): siRNA sense strand
uaagucauuuggagaauug

SEQ ID NO: 1237349 - RNA, 19 nt, Homo sapiens
  misc_RNA (1)...(19): siRNA sense strand
aaagagaacaggaguauau

SEQ ID NO: 1237350 - RNA, 19 nt, Homo sapiens
  misc_RNA (1)...(19): siRNA sense strand
ggauugagcagcagaaaga

SEQ ID NO: 1237351 - RNA, 19 nt, Homo sapiens
  misc_RNA (1)...(19): siRNA sense strand
ugacaugcauccaaugaga

SEQ ID NO: 1237352 - RNA, 19 nt, Homo sapiens
  misc_RNA (1)...(19): siRNA sense strand
gaagagaggcgagaaagau

SEQ ID NO: 1237353 - RNA, 19 nt, Homo sapiens
  misc_RNA (1)...(19): siRNA sense strand
gcagucagguuuauuucau

SEQ ID NO: 1237354 - RNA, 19 nt, Homo sapiens
  misc_RNA (1)...(19): siRNA sense strand
gcggagaaauacguucaua

SEQ ID NO: 1237355 - RNA, 19 nt, Homo sapiens
  misc_RNA (1)...(19): siRNA sense strand
caccaaggauguaguucua

SEQ ID NO: 1237356 - RNA, 19 nt, Homo sapiens
  misc_RNA (1)...(19): siRNA sense strand
guaaauacaagaagagguu

SEQ ID NO: 1237357 - RNA, 19 nt, Homo sapiens
  misc_RNA (1)...(19): siRNA sense strand
gauuguccaugaugaugua

SEQ ID NO: 1237358 - RNA, 19 nt, Homo sapiens
  misc_RNA (1)...(19): siRNA sense strand
uaagggaucagccaaauga

SEQ ID NO: 1237359 - RNA, 19 nt, Homo sapiens
  misc_RNA (1)...(19): siRNA sense strand
uauaagggucgacauguua

SEQ ID NO: 1237360 - RNA, 19 nt, Homo sapiens
  misc_RNA (1)...(19): siRNA sense strand
gcagcagucagguuuauuu

SEQ ID NO: 1237361 - RNA, 19 nt, Homo sapiens
  misc_RNA (1)...(19): siRNA sense strand
ucacuuggaugguguguuc

SEQ ID NO: 1237362 - RNA, 19 nt, Homo sapiens
  misc_RNA (1)...(19): siRNA sense strand
uauauucgauccaaucaga

SEQ ID NO: 1237363 - RNA, 19 nt, Homo sapiens
  misc_RNA (1)...(19): siRNA sense strand
gcaagauccuacccggaaa

SEQ ID NO: 1237364 - RNA, 19 nt, Homo sapiens
  misc_RNA (1)...(19): siRNA sense strand
ggagagaaggcgcaaagaa

SEQ ID NO: 1237365 - RNA, 19 nt, Homo sapiens
  misc_RNA (1)...(19): siRNA sense strand
gaagaagagaggcgagaaa

SEQ ID NO: 1237366 - RNA, 19 nt, Homo sapiens
  misc_RNA (1)...(19): siRNA sense strand
cagaaacauugcaacauau

SEQ ID NO: 1237367 - RNA, 19 nt, Homo sapiens
  misc_RNA (1)...(19): siRNA sense strand
gaagaguucuguggaaguc

SEQ ID NO: 1237368 - RNA, 19 nt, Homo sapiens
  misc_RNA (1)...(19): siRNA sense strand
ugacaucuguggugggauu

SEQ ID NO: 1237369 - RNA, 19 nt, Homo sapiens
  misc_RNA (1)...(19): siRNA sense strand
gcuuaaggaucauauagau

SEQ ID NO: 1237370 - RNA, 19 nt, Homo sapiens
  misc_RNA (1)...(19): siRNA sense strand
ccaaagccauaucacaaau

SEQ ID NO: 1237371 - RNA, 19 nt, Homo sapiens
  misc_RNA (1)...(19): siRNA sense strand
ggaaacuggucacuuggau

SEQ ID NO: 1237372 - RNA, 19 nt, Homo sapiens
  misc_RNA (1)...(19): siRNA sense strand
cuaaagaaauacucucauc

SEQ ID NO: 1237373 - RNA, 19 nt, Homo sapiens
  misc_RNA (1)...(19): siRNA sense strand
gaucguaccaggaagaaga

SEQ ID NO: 1237374 - RNA, 19 nt, Homo sapiens
  misc_RNA (1)...(19): siRNA sense strand
cagaugccaccuaugauua

SEQ ID NO: 1237375 - RNA, 19 nt, Homo sapiens
  misc_RNA (1)...(19): siRNA sense strand
uuacagaagugaucuuugg

SEQ ID NO: 1237376 - RNA, 19 nt, Homo sapiens
  misc_RNA (1)...(19): siRNA sense strand
ggagagaaggccauagaga

SEQ ID NO: 1237377 - RNA, 19 nt, Homo sapiens
  misc_RNA (1)...(19): siRNA sense strand
gaucagucuaugacauuua

SEQ ID NO: 1237378 - RNA, 19 nt, Homo sapiens
  misc_RNA (1)...(19): siRNA sense strand
gcucaguggucaaugugaa

SEQ ID NO: 1237379 - RNA, 19 nt, Homo sapiens
  misc_RNA (1)...(19): siRNA sense strand
gaucaucauccaagucuga

SEQ ID NO: 1237380 - RNA, 19 nt, Homo sapiens
  misc_RNA (1)...(19): siRNA sense strand
gcagugggcagcagaauag

SEQ ID NO: 1237381 - RNA, 19 nt, Homo sapiens
  misc_RNA (1)...(19): siRNA sense strand
gaaagagaacaggaguaua

SEQ ID NO: 1237382 - RNA, 19 nt, Homo sapiens
  misc_RNA (1)...(19): siRNA sense strand
ggugccuggugaagaauua

SEQ ID NO: 1237383 - RNA, 19 nt, Homo sapiens
  misc_RNA (1)...(19): siRNA sense strand
uggcacaucuucacauuca

SEQ ID NO: 1237384 - RNA, 19 nt, Homo sapiens
  misc_RNA (1)...(19): siRNA sense strand
uguggaaacuggucacuug

SEQ ID NO: 1237385 - RNA, 19 nt, Homo sapiens
  misc_RNA (1)...(19): siRNA sense strand
gagagaaggccauagagau

SEQ ID NO: 1237386 - RNA, 19 nt, Homo sapiens
  misc_RNA (1)...(19): siRNA sense strand
guaaacacauauggaagga

SEQ ID NO: 1237387 - RNA, 19 nt, Homo sapiens
  misc_RNA (1)...(19): siRNA sense strand
gauucugugugcugccuua

SEQ ID NO: 1237388 - RNA, 19 nt, Homo sapiens
  misc_RNA (1)...(19): siRNA sense strand
guagcacacuccagaaaca

SEQ ID NO: 1237389 - RNA, 19 nt, Homo sapiens
  misc_RNA (1)...(19): siRNA sense strand
ugaccgcacuggccaaaga

SEQ ID NO: 1237390 - RNA, 19 nt, Homo sapiens
  misc_RNA (1)...(19): siRNA sense strand
ggaugucacugaggaugaa

SEQ ID NO: 1237391 - RNA, 19 nt, Homo sapiens
  misc_RNA (1)...(19): siRNA sense strand
ucacaaauuuauggccuuu

SEQ ID NO: 1237392 - RNA, 19 nt, Homo sapiens
  misc_RNA (1)...(19): siRNA sense strand
ccagauuacuacagauuuc

SEQ ID NO: 1237393 - RNA, 19 nt, Homo sapiens
  misc_RNA (1)...(19): siRNA sense strand
gaaagaugaaacugaguau

SEQ ID NO: 1237394 - RNA, 19 nt, Homo sapiens
  misc_RNA (1)...(19): siRNA sense strand
gaaaggagcaagccaagcu

SEQ ID NO: 1237395 - RNA, 19 nt, Homo sapiens
  misc_RNA (1)...(19): siRNA sense strand
ggcaggacuucucuucuga

SEQ ID NO: 1237396 - RNA, 19 nt, Homo sapiens
  misc_RNA (1)...(19): siRNA sense strand
ggaucagucuaugacauuu

SEQ ID NO: 1237397 - RNA, 19 nt, Homo sapiens
  misc_RNA (1)...(19): siRNA sense strand
ggagaaauacguucauagg

SEQ ID NO: 1237398 - RNA, 19 nt, Homo sapiens
  misc_RNA (1)...(19): siRNA sense strand
gcaaugacaagguguucuu

SEQ ID NO: 1237399 - RNA, 19 nt, Homo sapiens
  misc_RNA (1)...(19): siRNA sense strand
gagagaaggcgcaaagaag

SEQ ID NO: 1237400 - RNA, 19 nt, Homo sapiens
  misc_RNA (1)...(19): siRNA sense strand
gaacagcgaaggagagaac

SEQ ID NO: 1237401 - RNA, 19 nt, Homo sapiens
  misc_RNA (1)...(19): siRNA sense strand
gaacgugaacagcgaagga

SEQ ID NO: 1237402 - RNA, 19 nt, Homo sapiens
  misc_RNA (1)...(19): siRNA sense strand
ggaugaagaggaagaaauc

SEQ ID NO: 1237403 - RNA, 19 nt, Homo sapiens
  misc_RNA (1)...(19): siRNA sense strand
gaggaaggccagagguuga

SEQ ID NO: 1237404 - RNA, 19 nt, Homo sapiens
  misc_RNA (1)...(19): siRNA sense strand
gcagcgucaucucugaauu

SEQ ID NO: 1237405 - RNA, 19 nt, Homo sapiens
  misc_RNA (1)...(19): siRNA sense strand
gaaaagaggagaguugaaa

SEQ ID NO: 1237406 - RNA, 19 nt, Homo sapiens
  misc_RNA (1)...(19): siRNA sense strand
gagacgggcagaagaagaa

SEQ ID NO: 1237407 - RNA, 19 nt, Homo sapiens
  misc_RNA (1)...(19): siRNA sense strand
gagaaggcgcaaagaagaa

SEQ ID NO: 1237408 - RNA, 19 nt, Homo sapiens
  misc_RNA (1)...(19): siRNA sense strand
gggagcaggaagaauauaa

SEQ ID NO: 1237409 - RNA, 19 nt, Homo sapiens
  misc_RNA (1)...(19): siRNA sense strand
ggagagccaaguuccauug

SEQ ID NO: 1237410 - RNA, 19 nt, Homo sapiens
  misc_RNA (1)...(19): siRNA sense strand
aagaugaaacugaguauga

SEQ ID NO: 1237411 - RNA, 19 nt, Homo sapiens
  misc_RNA (1)...(19): siRNA sense strand
gaaacuuguugacuuuggu

SEQ ID NO: 1237412 - RNA, 19 nt, Homo sapiens
  misc_RNA (1)...(19): siRNA sense strand
ugaagaggaagaaaucaaa

SEQ ID NO: 1237413 - RNA, 19 nt, Homo sapiens
  misc_RNA (1)...(19): siRNA sense strand
uagcauauauucgauccaa

SEQ ID NO: 1237414 - RNA, 19 nt, Homo sapiens
  misc_RNA (1)...(19): siRNA sense strand
ugacauuuaucuaccaaca

SEQ ID NO: 1237415 - RNA, 19 nt, Homo sapiens
  misc_RNA (1)...(19): siRNA sense strand
cuauaagggucgacauguu

SEQ ID NO: 1237416 - RNA, 19 nt, Homo sapiens
  misc_RNA (1)...(19): siRNA sense strand
ggagcaggaagaauauaaa

SEQ ID NO: 1237417 - RNA, 19 nt, Homo sapiens
  misc_RNA (1)...(19): siRNA sense strand
ggaagaagaggaggaagug

SEQ ID NO: 1237418 - RNA, 19 nt, Homo sapiens
  misc_RNA (1)...(19): siRNA sense strand
gcgagaaagaugaaacuga

SEQ ID NO: 1237419 - RNA, 19 nt, Homo sapiens
  misc_RNA (1)...(19): siRNA sense strand
gaggagacgggcagaagaa

SEQ ID NO: 1237420 - RNA, 19 nt, Homo sapiens
  misc_RNA (1)...(19): siRNA sense strand
gguugaaagugaucuaugg

SEQ ID NO: 1237421 - RNA, 19 nt, Homo sapiens
  misc_RNA (1)...(19): siRNA sense strand
ucaaauuucuggugauugc

SEQ ID NO: 1237422 - RNA, 19 nt, Homo sapiens
  misc_RNA (1)...(19): siRNA sense strand
ggagauucguaaauacaag

SEQ ID NO: 1237423 - RNA, 19 nt, Homo sapiens
  misc_RNA (1)...(19): siRNA sense strand
aaaucuuccuccuccuuua

SEQ ID NO: 1237424 - RNA, 19 nt, Homo sapiens
  misc_RNA (1)...(19): siRNA sense strand
ggggaacgcuucagaguga

SEQ ID NO: 1237425 - RNA, 19 nt, Homo sapiens
  misc_RNA (1)...(19): siRNA sense strand
gaaauacucucaucacaga

SEQ ID NO: 1237426 - RNA, 19 nt, Homo sapiens
  misc_RNA (1)...(19): siRNA sense strand
gaccaacucuggcuuguua

SEQ ID NO: 1237427 - RNA, 19 nt, Homo sapiens
  misc_RNA (1)...(19): siRNA sense strand
gaagugaucuuuggucuug

SEQ ID NO: 1237428 - RNA, 19 nt, Homo sapiens
  misc_RNA (1)...(19): siRNA sense strand
gggaaggucuauccucuua

SEQ ID NO: 1237429 - RNA, 19 nt, Homo sapiens
  misc_RNA (1)...(19): siRNA sense strand
uuacagaccuugugaagaa

SEQ ID NO: 1237430 - RNA, 19 nt, Homo sapiens
  misc_RNA (1)...(19): siRNA sense strand
acagaaacauugcaacaua

SEQ ID NO: 1237431 - RNA, 19 nt, Homo sapiens
  misc_RNA (1)...(19): siRNA sense strand
cgaagacgauuucaacaaa

SEQ ID NO: 1237432 - RNA, 19 nt, Homo sapiens
  misc_RNA (1)...(19): siRNA sense strand
ggaacacacucaaagaaga

SEQ ID NO: 1237433 - RNA, 19 nt, Homo sapiens
  misc_RNA (1)...(19): siRNA sense strand
gaggagaguugaaagagaa

SEQ ID NO: 1237434 - RNA, 19 nt, Homo sapiens
  misc_RNA (1)...(19): siRNA sense strand
ggccagagguugaaaguga

SEQ ID NO: 1237435 - RNA, 19 nt, Homo sapiens
  misc_RNA (1)...(19): siRNA sense strand
ggugaaacuuguugacuuu

SEQ ID NO: 1237436 - RNA, 19 nt, Homo sapiens
  misc_RNA (1)...(19): siRNA sense strand
gaacccagaugccaccuau

SEQ ID NO: 1237437 - RNA, 19 nt, Homo sapiens
  misc_RNA (1)...(19): siRNA sense strand
gaacgugccuggugagucu

SEQ ID NO: 1237438 - RNA, 19 nt, Homo sapiens
  misc_RNA (1)...(19): siRNA sense strand
caaguuagaauccagcuua

SEQ ID NO: 1237439 - RNA, 19 nt, Homo sapiens
  misc_RNA (1)...(19): siRNA sense strand
uaaguuacgugucuacuau

SEQ ID NO: 1237440 - RNA, 19 nt, Homo sapiens
  misc_RNA (1)...(19): siRNA sense strand
gaaaucaaacuggagauaa

SEQ ID NO: 1237441 - RNA, 19 nt, Homo sapiens
  misc_RNA (1)...(19): siRNA sense strand
caaaagggcucaaagacua

SEQ ID NO: 1237442 - RNA, 19 nt, Homo sapiens
  misc_RNA (1)...(19): siRNA sense strand
gagccaaguuccauuguga

SEQ ID NO: 1237443 - RNA, 19 nt, Homo sapiens
  misc_RNA (1)...(19): siRNA sense strand
ccaaaugaaaggcaaguua

SEQ ID NO: 1237444 - RNA, 19 nt, Homo sapiens
  misc_RNA (1)...(19): siRNA sense strand
ucacaaugauccagaaguu

SEQ ID NO: 1237445 - RNA, 19 nt, Homo sapiens
  misc_RNA (1)...(19): siRNA sense strand
gaaggucuauccucuuauc

SEQ ID NO: 1237446 - RNA, 19 nt, Homo sapiens
  misc_RNA (1)...(19): siRNA sense strand
gaugagaccagaagccaua

SEQ ID NO: 1237447 - RNA, 19 nt, Homo sapiens
  misc_RNA (1)...(19): siRNA sense strand
ggagauaaauaugcuaaag

SEQ ID NO: 1237448 - RNA, 19 nt, Homo sapiens
  misc_RNA (1)...(19): siRNA sense strand
uaagucauuuggagaauug

SEQ ID NO: 1237449 - RNA, 19 nt, Homo sapiens
  misc_RNA (1)...(19): siRNA sense strand
aaagagaacaggaguauau

SEQ ID NO: 1237450 - RNA, 19 nt, Homo sapiens
  misc_RNA (1)...(19): siRNA sense strand
ggauugagcagcagaaaga

SEQ ID NO: 1237451 - RNA, 19 nt, Homo sapiens
  misc_RNA (1)...(19): siRNA sense strand
ugacaugcauccaaugaga

SEQ ID NO: 1237452 - RNA, 19 nt, Homo sapiens
  misc_RNA (1)...(19): siRNA sense strand
gaagagaggcgagaaagau

SEQ ID NO: 1237453 - RNA, 19 nt, Homo sapiens
  misc_RNA (1)...(19): siRNA sense strand
gcagucagguuuauuucau

SEQ ID NO: 1237454 - RNA, 19 nt, Homo sapiens
  misc_RNA (1)...(19): siRNA sense strand
gcggagaaauacguucaua

SEQ ID NO: 1237455 - RNA, 19 nt, Homo sapiens
  misc_RNA (1)...(19): siRNA sense strand
caccaaggauguaguucua

SEQ ID NO: 1237456 - RNA, 19 nt, Homo sapiens
  misc_RNA (1)...(19): siRNA sense strand
guaaauacaagaagagguu

SEQ ID NO: 1237457 - RNA, 19 nt, Homo sapiens
  misc_RNA (1)...(19): siRNA sense strand
gauuguccaugaugaugua

SEQ ID NO: 1237458 - RNA, 19 nt, Homo sapiens
  misc_RNA (1)...(19): siRNA sense strand
uaagggaucagccaaauga

SEQ ID NO: 1237459 - RNA, 19 nt, Homo sapiens
  misc_RNA (1)...(19): siRNA sense strand
uauaagggucgacauguua

SEQ ID NO: 1237460 - RNA, 19 nt, Homo sapiens
  misc_RNA (1)...(19): siRNA sense strand
gcagcagucagguuuauuu

SEQ ID NO: 1237461 - RNA, 19 nt, Homo sapiens
  misc_RNA (1)...(19): siRNA sense strand
ucacuuggaugguguguuc

SEQ ID NO: 1237462 - RNA, 19 nt, Homo sapiens
  misc_RNA (1)...(19): siRNA sense strand
uauauucgauccaaucaga

SEQ ID NO: 1237463 - RNA, 19 nt, Homo sapiens
  misc_RNA (1)...(19): siRNA sense strand
gcaagauccuacccggaaa

SEQ ID NO: 1237464 - RNA, 19 nt, Homo sapiens
  misc_RNA (1)...(19): siRNA sense strand
ggagagaaggcgcaaagaa

SEQ ID NO: 1237465 - RNA, 19 nt, Homo sapiens
  misc_RNA (1)...(19): siRNA sense strand
gaagaagagaggcgagaaa

SEQ ID NO: 1237466 - RNA, 19 nt, Homo sapiens
  misc_RNA (1)...(19): siRNA sense strand
cagaaacauugcaacauau

SEQ ID NO: 1237467 - RNA, 19 nt, Homo sapiens
  misc_RNA (1)...(19): siRNA sense strand
gaagaguucuguggaaguc

SEQ ID NO: 1237468 - RNA, 19 nt, Homo sapiens
  misc_RNA (1)...(19): siRNA sense strand
ugacaucuguggugggauu

SEQ ID NO: 1237469 - RNA, 19 nt, Homo sapiens
  misc_RNA (1)...(19): siRNA sense strand
gcuuaaggaucauauagau

SEQ ID NO: 1237470 - RNA, 19 nt, Homo sapiens
  misc_RNA (1)...(19): siRNA sense strand
ccaaagccauaucacaaau

SEQ ID NO: 1237471 - RNA, 19 nt, Homo sapiens
  misc_RNA (1)...(19): siRNA sense strand
ggaaacuggucacuuggau

SEQ ID NO: 1237472 - RNA, 19 nt, Homo sapiens
  misc_RNA (1)...(19): siRNA sense strand
cuaaagaaauacucucauc

SEQ ID NO: 1237473 - RNA, 19 nt, Homo sapiens
  misc_RNA (1)...(19): siRNA sense strand
gaucguaccaggaagaaga

SEQ ID NO: 1237474 - RNA, 19 nt, Homo sapiens
  misc_RNA (1)...(19): siRNA sense strand
cagaugccaccuaugauua

SEQ ID NO: 1237475 - RNA, 19 nt, Homo sapiens
  misc_RNA (1)...(19): siRNA sense strand
uuacagaagugaucuuugg

SEQ ID NO: 1237476 - RNA, 19 nt, Homo sapiens
  misc_RNA (1)...(19): siRNA sense strand
ggagagaaggccauagaga

SEQ ID NO: 1237477 - RNA, 19 nt, Homo sapiens
  misc_RNA (1)...(19): siRNA sense strand
gaucagucuaugacauuua

SEQ ID NO: 1237478 - RNA, 19 nt, Homo sapiens
  misc_RNA (1)...(19): siRNA sense strand
gcucaguggucaaugugaa

SEQ ID NO: 1237479 - RNA, 19 nt, Homo sapiens
  misc_RNA (1)...(19): siRNA sense strand
gaucaucauccaagucuga

SEQ ID NO: 1237480 - RNA, 19 nt, Homo sapiens
  misc_RNA (1)...(19): siRNA sense strand
gcagugggcagcagaauag

SEQ ID NO: 1237481 - RNA, 19 nt, Homo sapiens
  misc_RNA (1)...(19): siRNA sense strand
gaaagagaacaggaguaua

SEQ ID NO: 1237482 - RNA, 19 nt, Homo sapiens
  misc_RNA (1)...(19): siRNA sense strand
ggugccuggugaagaauua

SEQ ID NO: 1237483 - RNA, 19 nt, Homo sapiens
  misc_RNA (1)...(19): siRNA sense strand
uggcacaucuucacauuca

SEQ ID NO: 1237484 - RNA, 19 nt, Homo sapiens
  misc_RNA (1)...(19): siRNA sense strand
uguggaaacuggucacuug

SEQ ID NO: 1237485 - RNA, 19 nt, Homo sapiens
  misc_RNA (1)...(19): siRNA sense strand
gagagaaggccauagagau

SEQ ID NO: 1237486 - RNA, 19 nt, Homo sapiens
  misc_RNA (1)...(19): siRNA sense strand
guaaacacauauggaagga

SEQ ID NO: 1237487 - RNA, 19 nt, Homo sapiens
  misc_RNA (1)...(19): siRNA sense strand
gauucugugugcugccuua

SEQ ID NO: 1237488 - RNA, 19 nt, Homo sapiens
  misc_RNA (1)...(19): siRNA sense strand
guagcacacuccagaaaca

SEQ ID NO: 1237489 - RNA, 19 nt, Homo sapiens
  misc_RNA (1)...(19): siRNA sense strand
ugaccgcacuggccaaaga

SEQ ID NO: 1237490 - RNA, 19 nt, Homo sapiens
  misc_RNA (1)...(19): siRNA sense strand
ggaugucacugaggaugaa

SEQ ID NO: 1237491 - RNA, 19 nt, Homo sapiens
  misc_RNA (1)...(19): siRNA sense strand
ucacaaauuuauggccuuu

SEQ ID NO: 1237492 - RNA, 19 nt, Homo sapiens
  misc_RNA (1)...(19): siRNA sense strand
ccagauuacuacagauuuc

SEQ ID NO: 1237493 - RNA, 19 nt, Homo sapiens
  misc_RNA (1)...(19): siRNA sense strand
gaaagaugaaacugaguau

SEQ ID NO: 1237494 - RNA, 19 nt, Homo sapiens
  misc_RNA (1)...(19): siRNA sense strand
gaaaggagcaagccaagcu

SEQ ID NO: 1237495 - RNA, 19 nt, Homo sapiens
  misc_RNA (1)...(19): siRNA sense strand
ggcaggacuucucuucuga

SEQ ID NO: 1237496 - RNA, 19 nt, Homo sapiens
  misc_RNA (1)...(19): siRNA sense strand
ggaucagucuaugacauuu

SEQ ID NO: 1237497 - RNA, 19 nt, Homo sapiens
  misc_RNA (1)...(19): siRNA sense strand
ggagaaauacguucauagg

SEQ ID NO: 1237498 - RNA, 19 nt, Homo sapiens
  misc_RNA (1)...(19): siRNA sense strand
gcaaugacaagguguucuu

SEQ ID NO: 1237499 - RNA, 19 nt, Homo sapiens
  misc_RNA (1)...(19): siRNA sense strand
gagagaaggcgcaaagaag

SEQ ID NO: 1237500 - RNA, 19 nt, Homo sapiens
  misc_RNA (1)...(19): siRNA sense strand
gaacagcgaaggagagaac

SEQ ID NO: 1237501 - RNA, 19 nt, Homo sapiens
  misc_RNA (1)...(19): siRNA sense strand
gaacgugaacagcgaagga

SEQ ID NO: 1237502 - RNA, 19 nt, Homo sapiens
  misc_RNA (1)...(19): siRNA sense strand
ggaugaagaggaagaaauc

SEQ ID NO: 1237503 - RNA, 19 nt, Homo sapiens
  misc_RNA (1)...(19): siRNA sense strand
gaggaaggccagagguuga

SEQ ID NO: 1237504 - RNA, 19 nt, Homo sapiens
  misc_RNA (1)...(19): siRNA sense strand
gcagcgucaucucugaauu

SEQ ID NO: 1237505 - RNA, 19 nt, Homo sapiens
  misc_RNA (1)...(19): siRNA sense strand
gaaaagaggagaguugaaa

SEQ ID NO: 1237506 - RNA, 19 nt, Homo sapiens
  misc_RNA (1)...(19): siRNA sense strand
gagacgggcagaagaagaa

SEQ ID NO: 1237507 - RNA, 19 nt, Homo sapiens
  misc_RNA (1)...(19): siRNA sense strand
gagaaggcgcaaagaagaa

SEQ ID NO: 1237508 - RNA, 19 nt, Homo sapiens
  misc_RNA (1)...(19): siRNA sense strand
gggagcaggaagaauauaa

SEQ ID NO: 1237509 - RNA, 19 nt, Homo sapiens
  misc_RNA (1)...(19): siRNA sense strand
ggagagccaaguuccauug

SEQ ID NO: 1237510 - RNA, 19 nt, Homo sapiens
  misc_RNA (1)...(19): siRNA sense strand
aagaugaaacugaguauga

SEQ ID NO: 1237511 - RNA, 19 nt, Homo sapiens
  misc_RNA (1)...(19): siRNA sense strand
gaaacuuguugacuuuggu

SEQ ID NO: 1237512 - RNA, 19 nt, Homo sapiens
  misc_RNA (1)...(19): siRNA sense strand
ugaagaggaagaaaucaaa

SEQ ID NO: 1237513 - RNA, 19 nt, Homo sapiens
  misc_RNA (1)...(19): siRNA sense strand
uagcauauauucgauccaa

SEQ ID NO: 1237514 - RNA, 19 nt, Homo sapiens
  misc_RNA (1)...(19): siRNA sense strand
ugacauuuaucuaccaaca

SEQ ID NO: 1237515 - RNA, 19 nt, Homo sapiens
  misc_RNA (1)...(19): siRNA sense strand
cuauaagggucgacauguu

SEQ ID NO: 1237516 - RNA, 19 nt, Homo sapiens
  misc_RNA (1)...(19): siRNA sense strand
ggagcaggaagaauauaaa

SEQ ID NO: 1237517 - RNA, 19 nt, Homo sapiens
  misc_RNA (1)...(19): siRNA sense strand
ggaagaagaggaggaagug

SEQ ID NO: 1237518 - RNA, 19 nt, Homo sapiens
  misc_RNA (1)...(19): siRNA sense strand
gcgagaaagaugaaacuga

SEQ ID NO: 1237519 - RNA, 19 nt, Homo sapiens
  misc_RNA (1)...(19): siRNA sense strand
gaggagacgggcagaagaa

SEQ ID NO: 1237520 - RNA, 19 nt, Homo sapiens
  misc_RNA (1)...(19): siRNA sense strand
gguugaaagugaucuaugg

SEQ ID NO: 1237521 - RNA, 19 nt, Homo sapiens
  misc_RNA (1)...(19): siRNA sense strand
ucaaauuucuggugauugc

SEQ ID NO: 1237522 - RNA, 19 nt, Homo sapiens
  misc_RNA (1)...(19): siRNA sense strand
ggagauucguaaauacaag

SEQ ID NO: 1237523 - RNA, 19 nt, Homo sapiens
  misc_RNA (1)...(19): siRNA sense strand
aaaucuuccuccuccuuua

SEQ ID NO: 1237524 - RNA, 19 nt, Homo sapiens
  misc_RNA (1)...(19): siRNA sense strand
ggggaacgcuucagaguga

SEQ ID NO: 1237525 - RNA, 19 nt, Homo sapiens
  misc_RNA (1)...(19): siRNA sense strand
gaaauacucucaucacaga

SEQ ID NO: 1237526 - RNA, 19 nt, Homo sapiens
  misc_RNA (1)...(19): siRNA sense strand
gaccaacucuggcuuguua

SEQ ID NO: 1237527 - RNA, 19 nt, Homo sapiens
  misc_RNA (1)...(19): siRNA sense strand
gaagugaucuuuggucuug

SEQ ID NO: 1237528 - RNA, 19 nt, Homo sapiens
  misc_RNA (1)...(19): siRNA sense strand
gggaaggucuauccucuua

SEQ ID NO: 1237529 - RNA, 19 nt, Homo sapiens
  misc_RNA (1)...(19): siRNA sense strand
uuacagaccuugugaagaa

SEQ ID NO: 1237530 - RNA, 19 nt, Homo sapiens
  misc_RNA (1)...(19): siRNA sense strand
acagaaacauugcaacaua

SEQ ID NO: 1237531 - RNA, 19 nt, Homo sapiens
  misc_RNA (1)...(19): siRNA sense strand
cgaagacgauuucaacaaa

SEQ ID NO: 1237532 - RNA, 19 nt, Homo sapiens
  misc_RNA (1)...(19): siRNA sense strand
ggaacacacucaaagaaga

SEQ ID NO: 1237533 - RNA, 19 nt, Homo sapiens
  misc_RNA (1)...(19): siRNA sense strand
gaggagaguugaaagagaa

SEQ ID NO: 1237534 - RNA, 19 nt, Homo sapiens
  misc_RNA (1)...(19): siRNA sense strand
ggccagagguugaaaguga

SEQ ID NO: 1237535 - RNA, 19 nt, Homo sapiens
  misc_RNA (1)...(19): siRNA sense strand
ggugaaacuuguugacuuu

SEQ ID NO: 1237536 - RNA, 19 nt, Homo sapiens
  misc_RNA (1)...(19): siRNA sense strand
gaacccagaugccaccuau

SEQ ID NO: 1237537 - RNA, 19 nt, Homo sapiens
  misc_RNA (1)...(19): siRNA sense strand
gaacgugccuggugagucu

SEQ ID NO: 1237538 - RNA, 19 nt, Homo sapiens
  misc_RNA (1)...(19): siRNA sense strand
caaguuagaauccagcuua

SEQ ID NO: 1237539 - RNA, 19 nt, Homo sapiens
  misc_RNA (1)...(19): siRNA sense strand
uaaguuacgugucuacuau

SEQ ID NO: 1237540 - RNA, 19 nt, Homo sapiens
  misc_RNA (1)...(19): siRNA sense strand
gaaaucaaacuggagauaa

SEQ ID NO: 1237541 - RNA, 19 nt, Homo sapiens
  misc_RNA (1)...(19): siRNA sense strand
caaaagggcucaaagacua

SEQ ID NO: 1237542 - RNA, 19 nt, Homo sapiens
  misc_RNA (1)...(19): siRNA sense strand
gagccaaguuccauuguga

SEQ ID NO: 1237543 - RNA, 19 nt, Homo sapiens
  misc_RNA (1)...(19): siRNA sense strand
ccaaaugaaaggcaaguua

SEQ ID NO: 1237544 - RNA, 19 nt, Homo sapiens
  misc_RNA (1)...(19): siRNA sense strand
ucacaaugauccagaaguu

SEQ ID NO: 1237545 - RNA, 19 nt, Homo sapiens
  misc_RNA (1)...(19): siRNA sense strand
gaaggucuauccucuuauc

SEQ ID NO: 1237546 - RNA, 19 nt, Homo sapiens
  misc_RNA (1)...(19): siRNA sense strand
gaugagaccagaagccaua

SEQ ID NO: 1237547 - RNA, 19 nt, Homo sapiens
  misc_RNA (1)...(19): siRNA sense strand
ggagauaaauaugcuaaag

SEQ ID NO: 1237548 - RNA, 19 nt, Homo sapiens
  misc_RNA (1)...(19): siRNA sense strand
uaagucauuuggagaauug

SEQ ID NO: 1237549 - RNA, 19 nt, Homo sapiens
  misc_RNA (1)...(19): siRNA sense strand
aaagagaacaggaguauau

SEQ ID NO: 1237550 - RNA, 19 nt, Homo sapiens
  misc_RNA (1)...(19): siRNA sense strand
ggauugagcagcagaaaga

SEQ ID NO: 1237551 - RNA, 19 nt, Homo sapiens
  misc_RNA (1)...(19): siRNA sense strand
ugacaugcauccaaugaga

SEQ ID NO: 1237552 - RNA, 19 nt, Homo sapiens
  misc_RNA (1)...(19): siRNA sense strand
gaagagaggcgagaaagau

SEQ ID NO: 1237553 - RNA, 19 nt, Homo sapiens
  misc_RNA (1)...(19): siRNA sense strand
gcagucagguuuauuucau

SEQ ID NO: 1237554 - RNA, 19 nt, Homo sapiens
  misc_RNA (1)...(19): siRNA sense strand
gcggagaaauacguucaua

SEQ ID NO: 1237555 - RNA, 19 nt, Homo sapiens
  misc_RNA (1)...(19): siRNA sense strand
caccaaggauguaguucua

SEQ ID NO: 1237556 - RNA, 19 nt, Homo sapiens
  misc_RNA (1)...(19): siRNA sense strand
guaaauacaagaagagguu

SEQ ID NO: 1237557 - RNA, 19 nt, Homo sapiens
  misc_RNA (1)...(19): siRNA sense strand
gauuguccaugaugaugua

SEQ ID NO: 1237558 - RNA, 19 nt, Homo sapiens
  misc_RNA (1)...(19): siRNA sense strand
uaagggaucagccaaauga

SEQ ID NO: 1237559 - RNA, 19 nt, Homo sapiens
  misc_RNA (1)...(19): siRNA sense strand
uauaagggucgacauguua

SEQ ID NO: 1237560 - RNA, 19 nt, Homo sapiens
  misc_RNA (1)...(19): siRNA sense strand
gcagcagucagguuuauuu

SEQ ID NO: 1237561 - RNA, 19 nt, Homo sapiens
  misc_RNA (1)...(19): siRNA sense strand
ucacuuggaugguguguuc

SEQ ID NO: 1237562 - RNA, 19 nt, Homo sapiens
  misc_RNA (1)...(19): siRNA sense strand
uauauucgauccaaucaga

SEQ ID NO: 1237563 - RNA, 19 nt, Homo sapiens
  misc_RNA (1)...(19): siRNA sense strand
gcaagauccuacccggaaa

SEQ ID NO: 1237564 - RNA, 19 nt, Homo sapiens
  misc_RNA (1)...(19): siRNA sense strand
ggagagaaggcgcaaagaa

SEQ ID NO: 1237565 - RNA, 19 nt, Homo sapiens
  misc_RNA (1)...(19): siRNA sense strand
gaagaagagaggcgagaaa

SEQ ID NO: 1237566 - RNA, 19 nt, Homo sapiens
  misc_RNA (1)...(19): siRNA sense strand
cagaaacauugcaacauau

SEQ ID NO: 1237567 - RNA, 19 nt, Homo sapiens
  misc_RNA (1)...(19): siRNA sense strand
gaagaguucuguggaaguc

SEQ ID NO: 1237568 - RNA, 19 nt, Homo sapiens
  misc_RNA (1)...(19): siRNA sense strand
ugacaucuguggugggauu

SEQ ID NO: 1237569 - RNA, 19 nt, Homo sapiens
  misc_RNA (1)...(19): siRNA sense strand
gcuuaaggaucauauagau

SEQ ID NO: 1237570 - RNA, 19 nt, Homo sapiens
  misc_RNA (1)...(19): siRNA sense strand
ccaaagccauaucacaaau

SEQ ID NO: 1237571 - RNA, 19 nt, Homo sapiens
  misc_RNA (1)...(19): siRNA sense strand
ggaaacuggucacuuggau

SEQ ID NO: 1237572 - RNA, 19 nt, Homo sapiens
  misc_RNA (1)...(19): siRNA sense strand
cuaaagaaauacucucauc

SEQ ID NO: 1237573 - RNA, 19 nt, Homo sapiens
  misc_RNA (1)...(19): siRNA sense strand
gaucguaccaggaagaaga

SEQ ID NO: 1237574 - RNA, 19 nt, Homo sapiens
  misc_RNA (1)...(19): siRNA sense strand
cagaugccaccuaugauua

SEQ ID NO: 1237575 - RNA, 19 nt, Homo sapiens
  misc_RNA (1)...(19): siRNA sense strand
uuacagaagugaucuuugg

SEQ ID NO: 1237576 - RNA, 19 nt, Homo sapiens
  misc_RNA (1)...(19): siRNA sense strand
ggagagaaggccauagaga

SEQ ID NO: 1237577 - RNA, 19 nt, Homo sapiens
  misc_RNA (1)...(19): siRNA sense strand
gaucagucuaugacauuua

SEQ ID NO: 1237578 - RNA, 19 nt, Homo sapiens
  misc_RNA (1)...(19): siRNA sense strand
gcucaguggucaaugugaa

SEQ ID NO: 1237579 - RNA, 19 nt, Homo sapiens
  misc_RNA (1)...(19): siRNA sense strand
gaucaucauccaagucuga

SEQ ID NO: 1237580 - RNA, 19 nt, Homo sapiens
  misc_RNA (1)...(19): siRNA sense strand
gcagugggcagcagaauag

SEQ ID NO: 1237581 - RNA, 19 nt, Homo sapiens
  misc_RNA (1)...(19): siRNA sense strand
gaaagagaacaggaguaua

SEQ ID NO: 1237582 - RNA, 19 nt, Homo sapiens
  misc_RNA (1)...(19): siRNA sense strand
ggugccuggugaagaauua

SEQ ID NO: 1237583 - RNA, 19 nt, Homo sapiens
  misc_RNA (1)...(19): siRNA sense strand
uggcacaucuucacauuca

SEQ ID NO: 1237584 - RNA, 19 nt, Homo sapiens
  misc_RNA (1)...(19): siRNA sense strand
uguggaaacuggucacuug

SEQ ID NO: 1237585 - RNA, 19 nt, Homo sapiens
  misc_RNA (1)...(19): siRNA sense strand
gagagaaggccauagagau

SEQ ID NO: 1237586 - RNA, 19 nt, Homo sapiens
  misc_RNA (1)...(19): siRNA sense strand
guaaacacauauggaagga

SEQ ID NO: 1237587 - RNA, 19 nt, Homo sapiens
  misc_RNA (1)...(19): siRNA sense strand
gauucugugugcugccuua

SEQ ID NO: 1237588 - RNA, 19 nt, Homo sapiens
  misc_RNA (1)...(19): siRNA sense strand
guagcacacuccagaaaca

SEQ ID NO: 1237589 - RNA, 19 nt, Homo sapiens
  misc_RNA (1)...(19): siRNA sense strand
ugaccgcacuggccaaaga

SEQ ID NO: 1237590 - RNA, 19 nt, Homo sapiens
  misc_RNA (1)...(19): siRNA sense strand
ggaugucacugaggaugaa

SEQ ID NO: 1237591 - RNA, 19 nt, Homo sapiens
  misc_RNA (1)...(19): siRNA sense strand
ucacaaauuuauggccuuu

SEQ ID NO: 1237592 - RNA, 19 nt, Homo sapiens
  misc_RNA (1)...(19): siRNA sense strand
ccagauuacuacagauuuc

SEQ ID NO: 1237593 - RNA, 19 nt, Homo sapiens
  misc_RNA (1)...(19): siRNA sense strand
gaaagaugaaacugaguau

SEQ ID NO: 1237594 - RNA, 19 nt, Homo sapiens
  misc_RNA (1)...(19): siRNA sense strand
gaaaggagcaagccaagcu

SEQ ID NO: 1237595 - RNA, 19 nt, Homo sapiens
  misc_RNA (1)...(19): siRNA sense strand
ggcaggacuucucuucuga

SEQ ID NO: 1237596 - RNA, 19 nt, Homo sapiens
  misc_RNA (1)...(19): siRNA sense strand
ggaucagucuaugacauuu

SEQ ID NO: 1237597 - RNA, 19 nt, Homo sapiens
  misc_RNA (1)...(19): siRNA sense strand
ggagaaauacguucauagg

SEQ ID NO: 1237598 - RNA, 19 nt, Homo sapiens
  misc_RNA (1)...(19): siRNA sense strand
gcaaugacaagguguucuu

SEQ ID NO: 1237599 - RNA, 19 nt, Homo sapiens
  misc_RNA (1)...(19): siRNA sense strand
gagagaaggcgcaaagaag

SEQ ID NO: 1237600 - RNA, 19 nt, Homo sapiens
  misc_RNA (1)...(19): siRNA sense strand
gaacagcgaaggagagaac

SEQ ID NO: 1237601 - RNA, 19 nt, Homo sapiens
  misc_RNA (1)...(19): siRNA sense strand
gaacgugaacagcgaagga

SEQ ID NO: 1237602 - RNA, 19 nt, Homo sapiens
  misc_RNA (1)...(19): siRNA sense strand
ggaugaagaggaagaaauc

SEQ ID NO: 1237603 - RNA, 19 nt, Homo sapiens
  misc_RNA (1)...(19): siRNA sense strand
gaggaaggccagagguuga

SEQ ID NO: 1237604 - RNA, 19 nt, Homo sapiens
  misc_RNA (1)...(19): siRNA sense strand
gcagcgucaucucugaauu

SEQ ID NO: 1237605 - RNA, 19 nt, Homo sapiens
  misc_RNA (1)...(19): siRNA sense strand
gaaaagaggagaguugaaa

SEQ ID NO: 1237606 - RNA, 19 nt, Homo sapiens
  misc_RNA (1)...(19): siRNA sense strand
gagacgggcagaagaagaa

SEQ ID NO: 1237607 - RNA, 19 nt, Homo sapiens
  misc_RNA (1)...(19): siRNA sense strand
gagaaggcgcaaagaagaa

SEQ ID NO: 1237608 - RNA, 19 nt, Homo sapiens
  misc_RNA (1)...(19): siRNA sense strand
gggagcaggaagaauauaa

SEQ ID NO: 1237609 - RNA, 19 nt, Homo sapiens
  misc_RNA (1)...(19): siRNA sense strand
ggagagccaaguuccauug

SEQ ID NO: 1237610 - RNA, 19 nt, Homo sapiens
  misc_RNA (1)...(19): siRNA sense strand
aagaugaaacugaguauga

SEQ ID NO: 1237611 - RNA, 19 nt, Homo sapiens
  misc_RNA (1)...(19): siRNA sense strand
gaaacuuguugacuuuggu

SEQ ID NO: 1237612 - RNA, 19 nt, Homo sapiens
  misc_RNA (1)...(19): siRNA sense strand
ugaagaggaagaaaucaaa

SEQ ID NO: 1237613 - RNA, 19 nt, Homo sapiens
  misc_RNA (1)...(19): siRNA sense strand
uagcauauauucgauccaa

SEQ ID NO: 1237614 - RNA, 19 nt, Homo sapiens
  misc_RNA (1)...(19): siRNA sense strand
ugacauuuaucuaccaaca

SEQ ID NO: 1237615 - RNA, 19 nt, Homo sapiens
  misc_RNA (1)...(19): siRNA sense strand
cuauaagggucgacauguu

SEQ ID NO: 1237616 - RNA, 19 nt, Homo sapiens
  misc_RNA (1)...(19): siRNA sense strand
ggagcaggaagaauauaaa

SEQ ID NO: 1237617 - RNA, 19 nt, Homo sapiens
  misc_RNA (1)...(19): siRNA sense strand
ggaagaagaggaggaagug

SEQ ID NO: 1237618 - RNA, 19 nt, Homo sapiens
  misc_RNA (1)...(19): siRNA sense strand
gcgagaaagaugaaacuga

SEQ ID NO: 1237619 - RNA, 19 nt, Homo sapiens
  misc_RNA (1)...(19): siRNA sense strand
gaggagacgggcagaagaa

SEQ ID NO: 1237620 - RNA, 19 nt, Homo sapiens
  misc_RNA (1)...(19): siRNA sense strand
gguugaaagugaucuaugg

SEQ ID NO: 1237621 - RNA, 19 nt, Homo sapiens
  misc_RNA (1)...(19): siRNA sense strand
ucaaauuucuggugauugc

SEQ ID NO: 1237622 - RNA, 19 nt, Homo sapiens
  misc_RNA (1)...(19): siRNA sense strand
ggagauucguaaauacaag

SEQ ID NO: 1237623 - RNA, 19 nt, Homo sapiens
  misc_RNA (1)...(19): siRNA sense strand
aaaucuuccuccuccuuua

SEQ ID NO: 1237624 - RNA, 19 nt, Homo sapiens
  misc_RNA (1)...(19): siRNA sense strand
ggggaacgcuucagaguga

SEQ ID NO: 1237625 - RNA, 19 nt, Homo sapiens
  misc_RNA (1)...(19): siRNA sense strand
gaaauacucucaucacaga

SEQ ID NO: 1237626 - RNA, 19 nt, Homo sapiens
  misc_RNA (1)...(19): siRNA sense strand
gaccaacucuggcuuguua

SEQ ID NO: 1237627 - RNA, 19 nt, Homo sapiens
  misc_RNA (1)...(19): siRNA sense strand
gaagugaucuuuggucuug

SEQ ID NO: 1237628 - RNA, 19 nt, Homo sapiens
  misc_RNA (1)...(19): siRNA sense strand
gggaaggucuauccucuua

SEQ ID NO: 1237629 - RNA, 19 nt, Homo sapiens
  misc_RNA (1)...(19): siRNA sense strand
uuacagaccuugugaagaa

SEQ ID NO: 1237630 - RNA, 19 nt, Homo sapiens
  misc_RNA (1)...(19): siRNA sense strand
acagaaacauugcaacaua

SEQ ID NO: 1237631 - RNA, 19 nt, Homo sapiens
  misc_RNA (1)...(19): siRNA sense strand
cgaagacgauuucaacaaa

SEQ ID NO: 1237632 - RNA, 19 nt, Homo sapiens
  misc_RNA (1)...(19): siRNA sense strand
ggaacacacucaaagaaga

SEQ ID NO: 1237633 - RNA, 19 nt, Homo sapiens
  misc_RNA (1)...(19): siRNA sense strand
gaggagaguugaaagagaa

SEQ ID NO: 1237634 - RNA, 19 nt, Homo sapiens
  misc_RNA (1)...(19): siRNA sense strand
ggccagagguugaaaguga

SEQ ID NO: 1237635 - RNA, 19 nt, Homo sapiens
  misc_RNA (1)...(19): siRNA sense strand
ggugaaacuuguugacuuu

SEQ ID NO: 1237636 - RNA, 19 nt, Homo sapiens
  misc_RNA (1)...(19): siRNA sense strand
gaacccagaugccaccuau

SEQ ID NO: 1237637 - RNA, 19 nt, Homo sapiens
  misc_RNA (1)...(19): siRNA sense strand
gaacgugccuggugagucu

SEQ ID NO: 1237638 - RNA, 19 nt, Homo sapiens
  misc_RNA (1)...(19): siRNA sense strand
caaguuagaauccagcuua

SEQ ID NO: 1237639 - RNA, 19 nt, Homo sapiens
  misc_RNA (1)...(19): siRNA sense strand
uaaguuacgugucuacuau

SEQ ID NO: 1237640 - RNA, 19 nt, Homo sapiens
  misc_RNA (1)...(19): siRNA sense strand
gaaaucaaacuggagauaa

SEQ ID NO: 1237641 - RNA, 19 nt, Homo sapiens
  misc_RNA (1)...(19): siRNA sense strand
caaaagggcucaaagacua

SEQ ID NO: 1237642 - RNA, 19 nt, Homo sapiens
  misc_RNA (1)...(19): siRNA sense strand
gagccaaguuccauuguga

SEQ ID NO: 1237643 - RNA, 19 nt, Homo sapiens
  misc_RNA (1)...(19): siRNA sense strand
ccaaaugaaaggcaaguua

SEQ ID NO: 1237644 - RNA, 19 nt, Homo sapiens
  misc_RNA (1)...(19): siRNA sense strand
ucacaaugauccagaaguu

SEQ ID NO: 1237645 - RNA, 19 nt, Homo sapiens
  misc_RNA (1)...(19): siRNA sense strand
gaaggucuauccucuuauc

SEQ ID NO: 1237646 - RNA, 19 nt, Homo sapiens
  misc_RNA (1)...(19): siRNA sense strand
gaugagaccagaagccaua

SEQ ID NO: 1237647 - RNA, 19 nt, Homo sapiens
  misc_RNA (1)...(19): siRNA sense strand
ggagauaaauaugcuaaag

SEQ ID NO: 1237648 - RNA, 19 nt, Homo sapiens
  misc_RNA (1)...(19): siRNA sense strand
uaagucauuuggagaauug

SEQ ID NO: 1237649 - RNA, 19 nt, Homo sapiens
  misc_RNA (1)...(19): siRNA sense strand
aaagagaacaggaguauau

SEQ ID NO: 1237650 - RNA, 19 nt, Homo sapiens
  misc_RNA (1)...(19): siRNA sense strand
ggauugagcagcagaaaga

SEQ ID NO: 1237651 - RNA, 19 nt, Homo sapiens
  misc_RNA (1)...(19): siRNA sense strand
ugacaugcauccaaugaga

SEQ ID NO: 1237652 - RNA, 19 nt, Homo sapiens
  misc_RNA (1)...(19): siRNA sense strand
gaagagaggcgagaaagau

SEQ ID NO: 1237653 - RNA, 19 nt, Homo sapiens
  misc_RNA (1)...(19): siRNA sense strand
gcagucagguuuauuucau

SEQ ID NO: 1237654 - RNA, 19 nt, Homo sapiens
  misc_RNA (1)...(19): siRNA sense strand
gcggagaaauacguucaua

SEQ ID NO: 1237655 - RNA, 19 nt, Homo sapiens
  misc_RNA (1)...(19): siRNA sense strand
caccaaggauguaguucua

SEQ ID NO: 1237656 - RNA, 19 nt, Homo sapiens
  misc_RNA (1)...(19): siRNA sense strand
guaaauacaagaagagguu

SEQ ID NO: 1237657 - RNA, 19 nt, Homo sapiens
  misc_RNA (1)...(19): siRNA sense strand
gauuguccaugaugaugua

SEQ ID NO: 1237658 - RNA, 19 nt, Homo sapiens
  misc_RNA (1)...(19): siRNA sense strand
uaagggaucagccaaauga

SEQ ID NO: 1237659 - RNA, 19 nt, Homo sapiens
  misc_RNA (1)...(19): siRNA sense strand
uauaagggucgacauguua

SEQ ID NO: 1237660 - RNA, 19 nt, Homo sapiens
  misc_RNA (1)...(19): siRNA sense strand
gcagcagucagguuuauuu

SEQ ID NO: 1237661 - RNA, 19 nt, Homo sapiens
  misc_RNA (1)...(19): siRNA sense strand
ucacuuggaugguguguuc

SEQ ID NO: 1237662 - RNA, 19 nt, Homo sapiens
  misc_RNA (1)...(19): siRNA sense strand
uauauucgauccaaucaga

SEQ ID NO: 1237663 - RNA, 19 nt, Homo sapiens
  misc_RNA (1)...(19): siRNA sense strand
gcaagauccuacccggaaa

SEQ ID NO: 1237664 - RNA, 19 nt, Homo sapiens
  misc_RNA (1)...(19): siRNA sense strand
ggagagaaggcgcaaagaa

SEQ ID NO: 1237665 - RNA, 19 nt, Homo sapiens
  misc_RNA (1)...(19): siRNA sense strand
gaagaagagaggcgagaaa

SEQ ID NO: 1237666 - RNA, 19 nt, Homo sapiens
  misc_RNA (1)...(19): siRNA sense strand
cagaaacauugcaacauau

SEQ ID NO: 1237667 - RNA, 19 nt, Homo sapiens
  misc_RNA (1)...(19): siRNA sense strand
gaagaguucuguggaaguc

SEQ ID NO: 1237668 - RNA, 19 nt, Homo sapiens
  misc_RNA (1)...(19): siRNA sense strand
ugacaucuguggugggauu

SEQ ID NO: 1237669 - RNA, 19 nt, Homo sapiens
  misc_RNA (1)...(19): siRNA sense strand
gcuuaaggaucauauagau

SEQ ID NO: 1237670 - RNA, 19 nt, Homo sapiens
  misc_RNA (1)...(19): siRNA sense strand
ccaaagccauaucacaaau

SEQ ID NO: 1237671 - RNA, 19 nt, Homo sapiens
  misc_RNA (1)...(19): siRNA sense strand
ggaaacuggucacuuggau

SEQ ID NO: 1237672 - RNA, 19 nt, Homo sapiens
  misc_RNA (1)...(19): siRNA sense strand
cuaaagaaauacucucauc

SEQ ID NO: 1237673 - RNA, 19 nt, Homo sapiens
  misc_RNA (1)...(19): siRNA sense strand
gaucguaccaggaagaaga

SEQ ID NO: 1237674 - RNA, 19 nt, Homo sapiens
  misc_RNA (1)...(19): siRNA sense strand
cagaugccaccuaugauua

SEQ ID NO: 1237675 - RNA, 19 nt, Homo sapiens
  misc_RNA (1)...(19): siRNA sense strand
uuacagaagugaucuuugg

SEQ ID NO: 1237676 - RNA, 19 nt, Homo sapiens
  misc_RNA (1)...(19): siRNA sense strand
ggagagaaggccauagaga

SEQ ID NO: 1237677 - RNA, 19 nt, Homo sapiens
  misc_RNA (1)...(19): siRNA sense strand
gaucagucuaugacauuua

SEQ ID NO: 1237678 - RNA, 19 nt, Homo sapiens
  misc_RNA (1)...(19): siRNA sense strand
gcucaguggucaaugugaa

SEQ ID NO: 1237679 - RNA, 19 nt, Homo sapiens
  misc_RNA (1)...(19): siRNA sense strand
gaucaucauccaagucuga

SEQ ID NO: 1237680 - RNA, 19 nt, Homo sapiens
  misc_RNA (1)...(19): siRNA sense strand
gcagugggcagcagaauag

SEQ ID NO: 1237681 - RNA, 19 nt, Homo sapiens
  misc_RNA (1)...(19): siRNA sense strand
gaaagagaacaggaguaua

SEQ ID NO: 1237682 - RNA, 19 nt, Homo sapiens
  misc_RNA (1)...(19): siRNA sense strand
ggugccuggugaagaauua

SEQ ID NO: 1237683 - RNA, 19 nt, Homo sapiens
  misc_RNA (1)...(19): siRNA sense strand
uggcacaucuucacauuca

SEQ ID NO: 1237684 - RNA, 19 nt, Homo sapiens
  misc_RNA (1)...(19): siRNA sense strand
uguggaaacuggucacuug

SEQ ID NO: 1237685 - RNA, 19 nt, Homo sapiens
  misc_RNA (1)...(19): siRNA sense strand
gagagaaggccauagagau

SEQ ID NO: 1237686 - RNA, 19 nt, Homo sapiens
  misc_RNA (1)...(19): siRNA sense strand
guaaacacauauggaagga

SEQ ID NO: 1237687 - RNA, 19 nt, Homo sapiens
  misc_RNA (1)...(19): siRNA sense strand
gauucugugugcugccuua

SEQ ID NO: 1237688 - RNA, 19 nt, Homo sapiens
  misc_RNA (1)...(19): siRNA sense strand
guagcacacuccagaaaca

SEQ ID NO: 1237689 - RNA, 19 nt, Homo sapiens
  misc_RNA (1)...(19): siRNA sense strand
ugaccgcacuggccaaaga

SEQ ID NO: 1237690 - RNA, 19 nt, Homo sapiens
  misc_RNA (1)...(19): siRNA sense strand
ggaugucacugaggaugaa

SEQ ID NO: 1237691 - RNA, 19 nt, Homo sapiens
  misc_RNA (1)...(19): siRNA sense strand
ucacaaauuuauggccuuu

SEQ ID NO: 1237692 - RNA, 19 nt, Homo sapiens
  misc_RNA (1)...(19): siRNA sense strand
ccagauuacuacagauuuc

SEQ ID NO: 1237693 - RNA, 19 nt, Homo sapiens
  misc_RNA (1)...(19): siRNA sense strand
gaaagaugaaacugaguau

SEQ ID NO: 1237694 - RNA, 19 nt, Homo sapiens
  misc_RNA (1)...(19): siRNA sense strand
gaaaggagcaagccaagcu

SEQ ID NO: 1237695 - RNA, 19 nt, Homo sapiens
  misc_RNA (1)...(19): siRNA sense strand
ggcaggacuucucuucuga

SEQ ID NO: 1237696 - RNA, 19 nt, Homo sapiens
  misc_RNA (1)...(19): siRNA sense strand
ggaucagucuaugacauuu

SEQ ID NO: 1237697 - RNA, 19 nt, Homo sapiens
  misc_RNA (1)...(19): siRNA sense strand
ggagaaauacguucauagg

SEQ ID NO: 1237698 - RNA, 19 nt, Homo sapiens
  misc_RNA (1)...(19): siRNA sense strand
gcaaugacaagguguucuu

SEQ ID NO: 1237699 - RNA, 19 nt, Homo sapiens
  misc_RNA (1)...(19): siRNA sense strand
gagagaaggcgcaaagaag

SEQ ID NO: 1237700 - RNA, 19 nt, Homo sapiens
  misc_RNA (1)...(19): siRNA sense strand
gaacagcgaaggagagaac

SEQ ID NO: 1237701 - RNA, 19 nt, Homo sapiens
  misc_RNA (1)...(19): siRNA sense strand
gaacgugaacagcgaagga

SEQ ID NO: 1237702 - RNA, 19 nt, Homo sapiens
  misc_RNA (1)...(19): siRNA sense strand
ggaugaagaggaagaaauc

SEQ ID NO: 1237703 - RNA, 19 nt, Homo sapiens
  misc_RNA (1)...(19): siRNA sense strand
gaggaaggccagagguuga

SEQ ID NO: 1237704 - RNA, 19 nt, Homo sapiens
  misc_RNA (1)...(19): siRNA sense strand
gcagcgucaucucugaauu

SEQ ID NO: 1237705 - RNA, 19 nt, Homo sapiens
  misc_RNA (1)...(19): siRNA sense strand
gaaaagaggagaguugaaa

SEQ ID NO: 1237706 - RNA, 19 nt, Homo sapiens
  misc_RNA (1)...(19): siRNA sense strand
gagacgggcagaagaagaa

SEQ ID NO: 1237707 - RNA, 19 nt, Homo sapiens
  misc_RNA (1)...(19): siRNA sense strand
gagaaggcgcaaagaagaa

SEQ ID NO: 1237708 - RNA, 19 nt, Homo sapiens
  misc_RNA (1)...(19): siRNA sense strand
gggagcaggaagaauauaa

SEQ ID NO: 1237709 - RNA, 19 nt, Homo sapiens
  misc_RNA (1)...(19): siRNA sense strand
ggagagccaaguuccauug

SEQ ID NO: 1237710 - RNA, 19 nt, Homo sapiens
  misc_RNA (1)...(19): siRNA sense strand
aagaugaaacugaguauga

SEQ ID NO: 1237711 - RNA, 19 nt, Homo sapiens
  misc_RNA (1)...(19): siRNA sense strand
gaaacuuguugacuuuggu

SEQ ID NO: 1237712 - RNA, 19 nt, Homo sapiens
  misc_RNA (1)...(19): siRNA sense strand
ugaagaggaagaaaucaaa

SEQ ID NO: 1237713 - RNA, 19 nt, Homo sapiens
  misc_RNA (1)...(19): siRNA sense strand
uagcauauauucgauccaa

SEQ ID NO: 1237714 - RNA, 19 nt, Homo sapiens
  misc_RNA (1)...(19): siRNA sense strand
ugacauuuaucuaccaaca

SEQ ID NO: 1237715 - RNA, 19 nt, Homo sapiens
  misc_RNA (1)...(19): siRNA sense strand
cuauaagggucgacauguu

SEQ ID NO: 1237716 - RNA, 19 nt, Homo sapiens
  misc_RNA (1)...(19): siRNA sense strand
ggagcaggaagaauauaaa

SEQ ID NO: 1237717 - RNA, 19 nt, Homo sapiens
  misc_RNA (1)...(19): siRNA sense strand
ggaagaagaggaggaagug

SEQ ID NO: 1237718 - RNA, 19 nt, Homo sapiens
  misc_RNA (1)...(19): siRNA sense strand
gcgagaaagaugaaacuga

SEQ ID NO: 1237719 - RNA, 19 nt, Homo sapiens
  misc_RNA (1)...(19): siRNA sense strand
gaggagacgggcagaagaa

SEQ ID NO: 1237720 - RNA, 19 nt, Homo sapiens
  misc_RNA (1)...(19): siRNA sense strand
gguugaaagugaucuaugg

SEQ ID NO: 1237721 - RNA, 19 nt, Homo sapiens
  misc_RNA (1)...(19): siRNA sense strand
ucaaauuucuggugauugc

SEQ ID NO: 1237722 - RNA, 19 nt, Homo sapiens
  misc_RNA (1)...(19): siRNA sense strand
ggagauucguaaauacaag

SEQ ID NO: 1237723 - RNA, 19 nt, Homo sapiens
  misc_RNA (1)...(19): siRNA sense strand
aaaucuuccuccuccuuua

SEQ ID NO: 1237724 - RNA, 19 nt, Homo sapiens
  misc_RNA (1)...(19): siRNA sense strand
ggggaacgcuucagaguga

SEQ ID NO: 1237725 - RNA, 19 nt, Homo sapiens
  misc_RNA (1)...(19): siRNA sense strand
gaaauacucucaucacaga

SEQ ID NO: 1237726 - RNA, 19 nt, Homo sapiens
  misc_RNA (1)...(19): siRNA sense strand
gaccaacucuggcuuguua

SEQ ID NO: 1237727 - RNA, 19 nt, Homo sapiens
  misc_RNA (1)...(19): siRNA sense strand
gaagugaucuuuggucuug

SEQ ID NO: 1237728 - RNA, 19 nt, Homo sapiens
  misc_RNA (1)...(19): siRNA sense strand
gggaaggucuauccucuua

SEQ ID NO: 1237729 - RNA, 19 nt, Homo sapiens
  misc_RNA (1)...(19): siRNA sense strand
uuacagaccuugugaagaa

SEQ ID NO: 1237730 - RNA, 19 nt, Homo sapiens
  misc_RNA (1)...(19): siRNA sense strand
acagaaacauugcaacaua

SEQ ID NO: 1237731 - RNA, 19 nt, Homo sapiens
  misc_RNA (1)...(19): siRNA sense strand
cgaagacgauuucaacaaa

SEQ ID NO: 1237732 - RNA, 19 nt, Homo sapiens
  misc_RNA (1)...(19): siRNA sense strand
ggaacacacucaaagaaga

SEQ ID NO: 1237733 - RNA, 19 nt, Homo sapiens
  misc_RNA (1)...(19): siRNA sense strand
gaggagaguugaaagagaa

SEQ ID NO: 1237734 - RNA, 19 nt, Homo sapiens
  misc_RNA (1)...(19): siRNA sense strand
ggccagagguugaaaguga

SEQ ID NO: 1237735 - RNA, 19 nt, Homo sapiens
  misc_RNA (1)...(19): siRNA sense strand
ggugaaacuuguugacuuu

SEQ ID NO: 1237736 - RNA, 19 nt, Homo sapiens
  misc_RNA (1)...(19): siRNA sense strand
gaacccagaugccaccuau

SEQ ID NO: 1237737 - RNA, 19 nt, Homo sapiens
  misc_RNA (1)...(19): siRNA sense strand
gaacgugccuggugagucu

SEQ ID NO: 1237738 - RNA, 19 nt, Homo sapiens
  misc_RNA (1)...(19): siRNA sense strand
caaguuagaauccagcuua

SEQ ID NO: 1237739 - RNA, 19 nt, Homo sapiens
  misc_RNA (1)...(19): siRNA sense strand
uaaguuacgugucuacuau

SEQ ID NO: 1237740 - RNA, 19 nt, Homo sapiens
  misc_RNA (1)...(19): siRNA sense strand
gaaaucaaacuggagauaa

SEQ ID NO: 1237741 - RNA, 19 nt, Homo sapiens
  misc_RNA (1)...(19): siRNA sense strand
caaaagggcucaaagacua

SEQ ID NO: 1237742 - RNA, 19 nt, Homo sapiens
  misc_RNA (1)...(19): siRNA sense strand
gagccaaguuccauuguga

SEQ ID NO: 1237743 - RNA, 19 nt, Homo sapiens
  misc_RNA (1)...(19): siRNA sense strand
ccaaaugaaaggcaaguua

SEQ ID NO: 1237744 - RNA, 19 nt, Homo sapiens
  misc_RNA (1)...(19): siRNA sense strand
ucacaaugauccagaaguu

SEQ ID NO: 1237745 - RNA, 19 nt, Homo sapiens
  misc_RNA (1)...(19): siRNA sense strand
gaaggucuauccucuuauc

SEQ ID NO: 1237746 - RNA, 19 nt, Homo sapiens
  misc_RNA (1)...(19): siRNA sense strand
gaugagaccagaagccaua

SEQ ID NO: 1237747 - RNA, 19 nt, Homo sapiens
  misc_RNA (1)...(19): siRNA sense strand
ggagauaaauaugcuaaag

SEQ ID NO: 1237748 - RNA, 19 nt, Homo sapiens
  misc_RNA (1)...(19): siRNA sense strand
uaagucauuuggagaauug

SEQ ID NO: 1237749 - RNA, 19 nt, Homo sapiens
  misc_RNA (1)...(19): siRNA sense strand
aaagagaacaggaguauau

SEQ ID NO: 1237750 - RNA, 19 nt, Homo sapiens
  misc_RNA (1)...(19): siRNA sense strand
ggauugagcagcagaaaga

SEQ ID NO: 1237751 - RNA, 19 nt, Homo sapiens
  misc_RNA (1)...(19): siRNA sense strand
ugacaugcauccaaugaga

SEQ ID NO: 1237752 - RNA, 19 nt, Homo sapiens
  misc_RNA (1)...(19): siRNA sense strand
gaagagaggcgagaaagau

SEQ ID NO: 1237753 - RNA, 19 nt, Homo sapiens
  misc_RNA (1)...(19): siRNA sense strand
gcagucagguuuauuucau

SEQ ID NO: 1237754 - RNA, 19 nt, Homo sapiens
  misc_RNA (1)...(19): siRNA sense strand
gcggagaaauacguucaua

SEQ ID NO: 1237755 - RNA, 19 nt, Homo sapiens
  misc_RNA (1)...(19): siRNA sense strand
caccaaggauguaguucua

SEQ ID NO: 1237756 - RNA, 19 nt, Homo sapiens
  misc_RNA (1)...(19): siRNA sense strand
guaaauacaagaagagguu

SEQ ID NO: 1237757 - RNA, 19 nt, Homo sapiens
  misc_RNA (1)...(19): siRNA sense strand
gauuguccaugaugaugua

SEQ ID NO: 1237758 - RNA, 19 nt, Homo sapiens
  misc_RNA (1)...(19): siRNA sense strand
uaagggaucagccaaauga

SEQ ID NO: 1237759 - RNA, 19 nt, Homo sapiens
  misc_RNA (1)...(19): siRNA sense strand
uauaagggucgacauguua

SEQ ID NO: 1237760 - RNA, 19 nt, Homo sapiens
  misc_RNA (1)...(19): siRNA sense strand
gcagcagucagguuuauuu

SEQ ID NO: 1237761 - RNA, 19 nt, Homo sapiens
  misc_RNA (1)...(19): siRNA sense strand
ucacuuggaugguguguuc

SEQ ID NO: 1237762 - RNA, 19 nt, Homo sapiens
  misc_RNA (1)...(19): siRNA sense strand
uauauucgauccaaucaga

SEQ ID NO: 1237763 - RNA, 19 nt, Homo sapiens
  misc_RNA (1)...(19): siRNA sense strand
gcaagauccuacccggaaa

SEQ ID NO: 1237764 - RNA, 19 nt, Homo sapiens
  misc_RNA (1)...(19): siRNA sense strand
ggagagaaggcgcaaagaa

SEQ ID NO: 1237765 - RNA, 19 nt, Homo sapiens
  misc_RNA (1)...(19): siRNA sense strand
gaagaagagaggcgagaaa

SEQ ID NO: 1237766 - RNA, 19 nt, Homo sapiens
  misc_RNA (1)...(19): siRNA sense strand
cagaaacauugcaacauau

SEQ ID NO: 1237767 - RNA, 19 nt, Homo sapiens
  misc_RNA (1)...(19): siRNA sense strand
gaagaguucuguggaaguc

SEQ ID NO: 1237768 - RNA, 19 nt, Homo sapiens
  misc_RNA (1)...(19): siRNA sense strand
ugacaucuguggugggauu

SEQ ID NO: 1237769 - RNA, 19 nt, Homo sapiens
  misc_RNA (1)...(19): siRNA sense strand
gcuuaaggaucauauagau

SEQ ID NO: 1237770 - RNA, 19 nt, Homo sapiens
  misc_RNA (1)...(19): siRNA sense strand
ccaaagccauaucacaaau

SEQ ID NO: 1237771 - RNA, 19 nt, Homo sapiens
  misc_RNA (1)...(19): siRNA sense strand
ggaaacuggucacuuggau

SEQ ID NO: 1237772 - RNA, 19 nt, Homo sapiens
  misc_RNA (1)...(19): siRNA sense strand
cuaaagaaauacucucauc

SEQ ID NO: 1237773 - RNA, 19 nt, Homo sapiens
  misc_RNA (1)...(19): siRNA sense strand
gaucguaccaggaagaaga

SEQ ID NO: 1237774 - RNA, 19 nt, Homo sapiens
  misc_RNA (1)...(19): siRNA sense strand
cagaugccaccuaugauua

SEQ ID NO: 1237775 - RNA, 19 nt, Homo sapiens
  misc_RNA (1)...(19): siRNA sense strand
uuacagaagugaucuuugg

SEQ ID NO: 1237776 - RNA, 19 nt, Homo sapiens
  misc_RNA (1)...(19): siRNA sense strand
ggagagaaggccauagaga

SEQ ID NO: 1237777 - RNA, 19 nt, Homo sapiens
  misc_RNA (1)...(19): siRNA sense strand
gaucagucuaugacauuua

SEQ ID NO: 1237778 - RNA, 19 nt, Homo sapiens
  misc_RNA (1)...(19): siRNA sense strand
gcucaguggucaaugugaa

SEQ ID NO: 1237779 - RNA, 19 nt, Homo sapiens
  misc_RNA (1)...(19): siRNA sense strand
gaucaucauccaagucuga

SEQ ID NO: 1237780 - RNA, 19 nt, Homo sapiens
  misc_RNA (1)...(19): siRNA sense strand
gcagugggcagcagaauag

SEQ ID NO: 1237781 - RNA, 19 nt, Homo sapiens
  misc_RNA (1)...(19): siRNA sense strand
gaaagagaacaggaguaua

SEQ ID NO: 1237782 - RNA, 19 nt, Homo sapiens
  misc_RNA (1)...(19): siRNA sense strand
ggugccuggugaagaauua

SEQ ID NO: 1237783 - RNA, 19 nt, Homo sapiens
  misc_RNA (1)...(19): siRNA sense strand
uggcacaucuucacauuca

SEQ ID NO: 1237784 - RNA, 19 nt, Homo sapiens
  misc_RNA (1)...(19): siRNA sense strand
uguggaaacuggucacuug

SEQ ID NO: 1237785 - RNA, 19 nt, Homo sapiens
  misc_RNA (1)...(19): siRNA sense strand
gagagaaggccauagagau

SEQ ID NO: 1237786 - RNA, 19 nt, Homo sapiens
  misc_RNA (1)...(19): siRNA sense strand
guaaacacauauggaagga

SEQ ID NO: 1237787 - RNA, 19 nt, Homo sapiens
  misc_RNA (1)...(19): siRNA sense strand
gauucugugugcugccuua

SEQ ID NO: 1237788 - RNA, 19 nt, Homo sapiens
  misc_RNA (1)...(19): siRNA sense strand
guagcacacuccagaaaca

SEQ ID NO: 1237789 - RNA, 19 nt, Homo sapiens
  misc_RNA (1)...(19): siRNA sense strand
ugaccgcacuggccaaaga

SEQ ID NO: 1237790 - RNA, 19 nt, Homo sapiens
  misc_RNA (1)...(19): siRNA sense strand
ggaugucacugaggaugaa

SEQ ID NO: 1237791 - RNA, 19 nt, Homo sapiens
  misc_RNA (1)...(19): siRNA sense strand
ucacaaauuuauggccuuu

SEQ ID NO: 1237792 - RNA, 19 nt, Homo sapiens
  misc_RNA (1)...(19): siRNA sense strand
ccagauuacuacagauuuc

SEQ ID NO: 1237793 - RNA, 19 nt, Homo sapiens
  misc_RNA (1)...(19): siRNA sense strand
gaaagaugaaacugaguau

SEQ ID NO: 1237794 - RNA, 19 nt, Homo sapiens
  misc_RNA (1)...(19): siRNA sense strand
gaaaggagcaagccaagcu

SEQ ID NO: 1237795 - RNA, 19 nt, Homo sapiens
  misc_RNA (1)...(19): siRNA sense strand
ggcaggacuucucuucuga

SEQ ID NO: 1237796 - RNA, 19 nt, Homo sapiens
  misc_RNA (1)...(19): siRNA sense strand
ggaucagucuaugacauuu

SEQ ID NO: 1237797 - RNA, 19 nt, Homo sapiens
  misc_RNA (1)...(19): siRNA sense strand
ggagaaauacguucauagg

SEQ ID NO: 1237798 - RNA, 19 nt, Homo sapiens
  misc_RNA (1)...(19): siRNA sense strand
gcaaugacaagguguucuu

SEQ ID NO: 1237799 - RNA, 19 nt, Homo sapiens
  misc_RNA (1)...(19): siRNA sense strand
gagagaaggcgcaaagaag

SEQ ID NO: 1237800 - RNA, 19 nt, Homo sapiens
  misc_RNA (1)...(19): siRNA sense strand
gaacagcgaaggagagaac

SEQ ID NO: 1237801 - RNA, 19 nt, Homo sapiens
  misc_RNA (1)...(19): siRNA sense strand
gaacgugaacagcgaagga

SEQ ID NO: 1237802 - RNA, 19 nt, Homo sapiens
  misc_RNA (1)...(19): siRNA sense strand
ggaugaagaggaagaaauc

SEQ ID NO: 1237803 - RNA, 19 nt, Homo sapiens
  misc_RNA (1)...(19): siRNA sense strand
gaggaaggccagagguuga

SEQ ID NO: 1237804 - RNA, 19 nt, Homo sapiens
  misc_RNA (1)...(19): siRNA sense strand
gcagcgucaucucugaauu

SEQ ID NO: 1237805 - RNA, 19 nt, Homo sapiens
  misc_RNA (1)...(19): siRNA sense strand
gaaaagaggagaguugaaa

SEQ ID NO: 1237806 - RNA, 19 nt, Homo sapiens
  misc_RNA (1)...(19): siRNA sense strand
gagacgggcagaagaagaa

SEQ ID NO: 1237807 - RNA, 19 nt, Homo sapiens
  misc_RNA (1)...(19): siRNA sense strand
gagaaggcgcaaagaagaa

SEQ ID NO: 1237808 - RNA, 19 nt, Homo sapiens
  misc_RNA (1)...(19): siRNA sense strand
gggagcaggaagaauauaa

SEQ ID NO: 1237809 - RNA, 19 nt, Homo sapiens
  misc_RNA (1)...(19): siRNA sense strand
ggagagccaaguuccauug

SEQ ID NO: 1237810 - RNA, 19 nt, Homo sapiens
  misc_RNA (1)...(19): siRNA sense strand
aagaugaaacugaguauga

SEQ ID NO: 1237811 - RNA, 19 nt, Homo sapiens
  misc_RNA (1)...(19): siRNA sense strand
gaaacuuguugacuuuggu

SEQ ID NO: 1237812 - RNA, 19 nt, Homo sapiens
  misc_RNA (1)...(19): siRNA sense strand
ugaagaggaagaaaucaaa

SEQ ID NO: 1237813 - RNA, 19 nt, Homo sapiens
  misc_RNA (1)...(19): siRNA sense strand
uagcauauauucgauccaa

SEQ ID NO: 1237814 - RNA, 19 nt, Homo sapiens
  misc_RNA (1)...(19): siRNA sense strand
ugacauuuaucuaccaaca

SEQ ID NO: 1237815 - RNA, 19 nt, Homo sapiens
  misc_RNA (1)...(19): siRNA sense strand
cuauaagggucgacauguu

SEQ ID NO: 1237816 - RNA, 19 nt, Homo sapiens
  misc_RNA (1)...(19): siRNA sense strand
ggagcaggaagaauauaaa

SEQ ID NO: 1237817 - RNA, 19 nt, Homo sapiens
  misc_RNA (1)...(19): siRNA sense strand
ggaagaagaggaggaagug

SEQ ID NO: 1237818 - RNA, 19 nt, Homo sapiens
  misc_RNA (1)...(19): siRNA sense strand
gcgagaaagaugaaacuga

SEQ ID NO: 1237819 - RNA, 19 nt, Homo sapiens
  misc_RNA (1)...(19): siRNA sense strand
gaggagacgggcagaagaa

SEQ ID NO: 1237820 - RNA, 19 nt, Homo sapiens
  misc_RNA (1)...(19): siRNA sense strand
gguugaaagugaucuaugg

SEQ ID NO: 1237821 - RNA, 19 nt, Homo sapiens
  misc_RNA (1)...(19): siRNA sense strand
ucaaauuucuggugauugc

SEQ ID NO: 1237822 - RNA, 19 nt, Homo sapiens
  misc_RNA (1)...(19): siRNA sense strand
ggagauucguaaauacaag

SEQ ID NO: 1237823 - RNA, 19 nt, Homo sapiens
  misc_RNA (1)...(19): siRNA sense strand
aaaucuuccuccuccuuua

SEQ ID NO: 1237824 - RNA, 19 nt, Homo sapiens
  misc_RNA (1)...(19): siRNA sense strand
ggggaacgcuucagaguga

SEQ ID NO: 1237825 - RNA, 19 nt, Homo sapiens
  misc_RNA (1)...(19): siRNA sense strand
gaaauacucucaucacaga

SEQ ID NO: 1237826 - RNA, 19 nt, Homo sapiens
  misc_RNA (1)...(19): siRNA sense strand
gaccaacucuggcuuguua

SEQ ID NO: 1237827 - RNA, 19 nt, Homo sapiens
  misc_RNA (1)...(19): siRNA sense strand
gaagugaucuuuggucuug

SEQ ID NO: 1237828 - RNA, 19 nt, Homo sapiens
  misc_RNA (1)...(19): siRNA sense strand
gggaaggucuauccucuua

SEQ ID NO: 1237829 - RNA, 19 nt, Homo sapiens
  misc_RNA (1)...(19): siRNA sense strand
uuacagaccuugugaagaa

SEQ ID NO: 1237830 - RNA, 19 nt, Homo sapiens
  misc_RNA (1)...(19): siRNA sense strand
acagaaacauugcaacaua

SEQ ID NO: 1237831 - RNA, 19 nt, Homo sapiens
  misc_RNA (1)...(19): siRNA sense strand
cgaagacgauuucaacaaa

SEQ ID NO: 1237832 - RNA, 19 nt, Homo sapiens
  misc_RNA (1)...(19): siRNA sense strand
ggaacacacucaaagaaga

SEQ ID NO: 1237833 - RNA, 19 nt, Homo sapiens
  misc_RNA (1)...(19): siRNA sense strand
gaggagaguugaaagagaa

SEQ ID NO: 1237834 - RNA, 19 nt, Homo sapiens
  misc_RNA (1)...(19): siRNA sense strand
ggccagagguugaaaguga

SEQ ID NO: 1237835 - RNA, 19 nt, Homo sapiens
  misc_RNA (1)...(19): siRNA sense strand
ggugaaacuuguugacuuu

SEQ ID NO: 1237836 - RNA, 19 nt, Homo sapiens
  misc_RNA (1)...(19): siRNA sense strand
gaacccagaugccaccuau

SEQ ID NO: 1237837 - RNA, 19 nt, Homo sapiens
  misc_RNA (1)...(19): siRNA sense strand
gaacgugccuggugagucu

SEQ ID NO: 1237838 - RNA, 19 nt, Homo sapiens
  misc_RNA (1)...(19): siRNA sense strand
caaguuagaauccagcuua

SEQ ID NO: 1237839 - RNA, 19 nt, Homo sapiens
  misc_RNA (1)...(19): siRNA sense strand
uaaguuacgugucuacuau

SEQ ID NO: 1237840 - RNA, 19 nt, Homo sapiens
  misc_RNA (1)...(19): siRNA sense strand
gaaaucaaacuggagauaa

SEQ ID NO: 1237841 - RNA, 19 nt, Homo sapiens
  misc_RNA (1)...(19): siRNA sense strand
caaaagggcucaaagacua

SEQ ID NO: 1237842 - RNA, 19 nt, Homo sapiens
  misc_RNA (1)...(19): siRNA sense strand
gagccaaguuccauuguga

SEQ ID NO: 1237843 - RNA, 19 nt, Homo sapiens
  misc_RNA (1)...(19): siRNA sense strand
ccaaaugaaaggcaaguua

SEQ ID NO: 1237844 - RNA, 19 nt, Homo sapiens
  misc_RNA (1)...(19): siRNA sense strand
ucacaaugauccagaaguu

SEQ ID NO: 1237845 - RNA, 19 nt, Homo sapiens
  misc_RNA (1)...(19): siRNA sense strand
gaaggucuauccucuuauc

SEQ ID NO: 1237846 - RNA, 19 nt, Homo sapiens
  misc_RNA (1)...(19): siRNA sense strand
gaugagaccagaagccaua

SEQ ID NO: 1237847 - RNA, 19 nt, Homo sapiens
  misc_RNA (1)...(19): siRNA sense strand
ggagauaaauaugcuaaag

SEQ ID NO: 1237848 - RNA, 19 nt, Homo sapiens
  misc_RNA (1)...(19): siRNA sense strand
uaagucauuuggagaauug

SEQ ID NO: 1237849 - RNA, 19 nt, Homo sapiens
  misc_RNA (1)...(19): siRNA sense strand
aaagagaacaggaguauau

SEQ ID NO: 1237850 - RNA, 19 nt, Homo sapiens
  misc_RNA (1)...(19): siRNA sense strand
ggauugagcagcagaaaga

SEQ ID NO: 1237851 - RNA, 19 nt, Homo sapiens
  misc_RNA (1)...(19): siRNA sense strand
ugacaugcauccaaugaga

SEQ ID NO: 1237852 - RNA, 19 nt, Homo sapiens
  misc_RNA (1)...(19): siRNA sense strand
gaagagaggcgagaaagau

SEQ ID NO: 1237853 - RNA, 19 nt, Homo sapiens
  misc_RNA (1)...(19): siRNA sense strand
gcagucagguuuauuucau

SEQ ID NO: 1237854 - RNA, 19 nt, Homo sapiens
  misc_RNA (1)...(19): siRNA sense strand
gcggagaaauacguucaua

SEQ ID NO: 1237855 - RNA, 19 nt, Homo sapiens
  misc_RNA (1)...(19): siRNA sense strand
caccaaggauguaguucua

SEQ ID NO: 1237856 - RNA, 19 nt, Homo sapiens
  misc_RNA (1)...(19): siRNA sense strand
guaaauacaagaagagguu

SEQ ID NO: 1237857 - RNA, 19 nt, Homo sapiens
  misc_RNA (1)...(19): siRNA sense strand
gauuguccaugaugaugua

SEQ ID NO: 1237858 - RNA, 19 nt, Homo sapiens
  misc_RNA (1)...(19): siRNA sense strand
uaagggaucagccaaauga

SEQ ID NO: 1237859 - RNA, 19 nt, Homo sapiens
  misc_RNA (1)...(19): siRNA sense strand
uauaagggucgacauguua

SEQ ID NO: 1237860 - RNA, 19 nt, Homo sapiens
  misc_RNA (1)...(19): siRNA sense strand
gcagcagucagguuuauuu

SEQ ID NO: 1237861 - RNA, 19 nt, Homo sapiens
  misc_RNA (1)...(19): siRNA sense strand
ucacuuggaugguguguuc

SEQ ID NO: 1237862 - RNA, 19 nt, Homo sapiens
  misc_RNA (1)...(19): siRNA sense strand
uauauucgauccaaucaga

SEQ ID NO: 1237863 - RNA, 19 nt, Homo sapiens
  misc_RNA (1)...(19): siRNA sense strand
gcaagauccuacccggaaa

SEQ ID NO: 1237864 - RNA, 19 nt, Homo sapiens
  misc_RNA (1)...(19): siRNA sense strand
ggagagaaggcgcaaagaa

SEQ ID NO: 1237865 - RNA, 19 nt, Homo sapiens
  misc_RNA (1)...(19): siRNA sense strand
gaagaagagaggcgagaaa

SEQ ID NO: 1237866 - RNA, 19 nt, Homo sapiens
  misc_RNA (1)...(19): siRNA sense strand
cagaaacauugcaacauau

SEQ ID NO: 1237867 - RNA, 19 nt, Homo sapiens
  misc_RNA (1)...(19): siRNA sense strand
gaagaguucuguggaaguc

SEQ ID NO: 1237868 - RNA, 19 nt, Homo sapiens
  misc_RNA (1)...(19): siRNA sense strand
ugacaucuguggugggauu

SEQ ID NO: 1237869 - RNA, 19 nt, Homo sapiens
  misc_RNA (1)...(19): siRNA sense strand
gcuuaaggaucauauagau

SEQ ID NO: 1237870 - RNA, 19 nt, Homo sapiens
  misc_RNA (1)...(19): siRNA sense strand
ccaaagccauaucacaaau

SEQ ID NO: 1237871 - RNA, 19 nt, Homo sapiens
  misc_RNA (1)...(19): siRNA sense strand
ggaaacuggucacuuggau

SEQ ID NO: 1237872 - RNA, 19 nt, Homo sapiens
  misc_RNA (1)...(19): siRNA sense strand
cuaaagaaauacucucauc

SEQ ID NO: 1237873 - RNA, 19 nt, Homo sapiens
  misc_RNA (1)...(19): siRNA sense strand
gaucguaccaggaagaaga

SEQ ID NO: 1237874 - RNA, 19 nt, Homo sapiens
  misc_RNA (1)...(19): siRNA sense strand
cagaugccaccuaugauua

SEQ ID NO: 1237875 - RNA, 19 nt, Homo sapiens
  misc_RNA (1)...(19): siRNA sense strand
uuacagaagugaucuuugg

SEQ ID NO: 1237876 - RNA, 19 nt, Homo sapiens
  misc_RNA (1)...(19): siRNA sense strand
ggagagaaggccauagaga

SEQ ID NO: 1237877 - RNA, 19 nt, Homo sapiens
  misc_RNA (1)...(19): siRNA sense strand
gaucagucuaugacauuua

SEQ ID NO: 1237878 - RNA, 19 nt, Homo sapiens
  misc_RNA (1)...(19): siRNA sense strand
gcucaguggucaaugugaa

SEQ ID NO: 1237879 - RNA, 19 nt, Homo sapiens
  misc_RNA (1)...(19): siRNA sense strand
gaucaucauccaagucuga

SEQ ID NO: 1237880 - RNA, 19 nt, Homo sapiens
  misc_RNA (1)...(19): siRNA sense strand
gcagugggcagcagaauag

SEQ ID NO: 1237881 - RNA, 19 nt, Homo sapiens
  misc_RNA (1)...(19): siRNA sense strand
gaaagagaacaggaguaua

SEQ ID NO: 1237882 - RNA, 19 nt, Homo sapiens
  misc_RNA (1)...(19): siRNA sense strand
ggugccuggugaagaauua

SEQ ID NO: 1237883 - RNA, 19 nt, Homo sapiens
  misc_RNA (1)...(19): siRNA sense strand
uggcacaucuucacauuca

SEQ ID NO: 1237884 - RNA, 19 nt, Homo sapiens
  misc_RNA (1)...(19): siRNA sense strand
uguggaaacuggucacuug

SEQ ID NO: 1237885 - RNA, 19 nt, Homo sapiens
  misc_RNA (1)...(19): siRNA sense strand
gagagaaggccauagagau

SEQ ID NO: 1237886 - RNA, 19 nt, Homo sapiens
  misc_RNA (1)...(19): siRNA sense strand
guaaacacauauggaagga

SEQ ID NO: 1237887 - RNA, 19 nt, Homo sapiens
  misc_RNA (1)...(19): siRNA sense strand
gauucugugugcugccuua

SEQ ID NO: 1237888 - RNA, 19 nt, Homo sapiens
  misc_RNA (1)...(19): siRNA sense strand
guagcacacuccagaaaca

SEQ ID NO: 1237889 - RNA, 19 nt, Homo sapiens
  misc_RNA (1)...(19): siRNA sense strand
ugaccgcacuggccaaaga

SEQ ID NO: 1237890 - RNA, 19 nt, Homo sapiens
  misc_RNA (1)...(19): siRNA sense strand
ggaugucacugaggaugaa

SEQ ID NO: 1237891 - RNA, 19 nt, Homo sapiens
  misc_RNA (1)...(19): siRNA sense strand
ucacaaauuuauggccuuu

SEQ ID NO: 1237892 - RNA, 19 nt, Homo sapiens
  misc_RNA (1)...(19): siRNA sense strand
ccagauuacuacagauuuc

SEQ ID NO: 1237893 - RNA, 19 nt, Homo sapiens
  misc_RNA (1)...(19): siRNA sense strand
gaaagaugaaacugaguau

SEQ ID NO: 1237894 - RNA, 19 nt, Homo sapiens
  misc_RNA (1)...(19): siRNA sense strand
gaaaggagcaagccaagcu

SEQ ID NO: 1237895 - RNA, 19 nt, Homo sapiens
  misc_RNA (1)...(19): siRNA sense strand
ggcaggacuucucuucuga

SEQ ID NO: 1237896 - RNA, 19 nt, Homo sapiens
  misc_RNA (1)...(19): siRNA sense strand
ggaucagucuaugacauuu

SEQ ID NO: 1237897 - RNA, 19 nt, Homo sapiens
  misc_RNA (1)...(19): siRNA sense strand
ggagaaauacguucauagg

SEQ ID NO: 1237898 - RNA, 19 nt, Homo sapiens
  misc_RNA (1)...(19): siRNA sense strand
gcaaugacaagguguucuu

SEQ ID NO: 1237899 - RNA, 19 nt, Homo sapiens
  misc_RNA (1)...(19): siRNA sense strand
gagagaaggcgcaaagaag

SEQ ID NO: 1237900 - RNA, 19 nt, Homo sapiens
  misc_RNA (1)...(19): siRNA sense strand
gaacagcgaaggagagaac

SEQ ID NO: 1237901 - RNA, 19 nt, Homo sapiens
  misc_RNA (1)...(19): siRNA sense strand
gaacgugaacagcgaagga

SEQ ID NO: 1237902 - RNA, 19 nt, Homo sapiens
  misc_RNA (1)...(19): siRNA sense strand
ggaugaagaggaagaaauc

SEQ ID NO: 1237903 - RNA, 19 nt, Homo sapiens
  misc_RNA (1)...(19): siRNA sense strand
gaggaaggccagagguuga

SEQ ID NO: 1237904 - RNA, 19 nt, Homo sapiens
  misc_RNA (1)...(19): siRNA sense strand
gcagcgucaucucugaauu

SEQ ID NO: 1237905 - RNA, 19 nt, Homo sapiens
  misc_RNA (1)...(19): siRNA sense strand
gaaaagaggagaguugaaa

SEQ ID NO: 1237906 - RNA, 19 nt, Homo sapiens
  misc_RNA (1)...(19): siRNA sense strand
gagacgggcagaagaagaa

SEQ ID NO: 1237907 - RNA, 19 nt, Homo sapiens
  misc_RNA (1)...(19): siRNA sense strand
gagaaggcgcaaagaagaa

SEQ ID NO: 1237908 - RNA, 19 nt, Homo sapiens
  misc_RNA (1)...(19): siRNA sense strand
gggagcaggaagaauauaa

SEQ ID NO: 1237909 - RNA, 19 nt, Homo sapiens
  misc_RNA (1)...(19): siRNA sense strand
ggagagccaaguuccauug

SEQ ID NO: 1237910 - RNA, 19 nt, Homo sapiens
  misc_RNA (1)...(19): siRNA sense strand
aagaugaaacugaguauga

SEQ ID NO: 1237911 - RNA, 19 nt, Homo sapiens
  misc_RNA (1)...(19): siRNA sense strand
gaaacuuguugacuuuggu

SEQ ID NO: 1237912 - RNA, 19 nt, Homo sapiens
  misc_RNA (1)...(19): siRNA sense strand
ugaagaggaagaaaucaaa

SEQ ID NO: 1237913 - RNA, 19 nt, Homo sapiens
  misc_RNA (1)...(19): siRNA sense strand
uagcauauauucgauccaa

SEQ ID NO: 1237914 - RNA, 19 nt, Homo sapiens
  misc_RNA (1)...(19): siRNA sense strand
ugacauuuaucuaccaaca

SEQ ID NO: 1237915 - RNA, 19 nt, Homo sapiens
  misc_RNA (1)...(19): siRNA sense strand
cuauaagggucgacauguu

SEQ ID NO: 1237916 - RNA, 19 nt, Homo sapiens
  misc_RNA (1)...(19): siRNA sense strand
ggagcaggaagaauauaaa

SEQ ID NO: 1237917 - RNA, 19 nt, Homo sapiens
  misc_RNA (1)...(19): siRNA sense strand
ggaagaagaggaggaagug

SEQ ID NO: 1237918 - RNA, 19 nt, Homo sapiens
  misc_RNA (1)...(19): siRNA sense strand
gcgagaaagaugaaacuga

SEQ ID NO: 1237919 - RNA, 19 nt, Homo sapiens
  misc_RNA (1)...(19): siRNA sense strand
gaggagacgggcagaagaa

SEQ ID NO: 1237920 - RNA, 19 nt, Homo sapiens
  misc_RNA (1)...(19): siRNA sense strand
gguugaaagugaucuaugg

SEQ ID NO: 1237921 - RNA, 19 nt, Homo sapiens
  misc_RNA (1)...(19): siRNA sense strand
ucaaauuucuggugauugc

SEQ ID NO: 1237922 - RNA, 19 nt, Homo sapiens
  misc_RNA (1)...(19): siRNA sense strand
ggagauucguaaauacaag

SEQ ID NO: 1237923 - RNA, 19 nt, Homo sapiens
  misc_RNA (1)...(19): siRNA sense strand
aaaucuuccuccuccuuua

SEQ ID NO: 1237924 - RNA, 19 nt, Homo sapiens
  misc_RNA (1)...(19): siRNA sense strand
ggggaacgcuucagaguga

SEQ ID NO: 1237925 - RNA, 19 nt, Homo sapiens
  misc_RNA (1)...(19): siRNA sense strand
ggaaggacguccacacauu

SEQ ID NO: 1237926 - RNA, 19 nt, Homo sapiens
  misc_RNA (1)...(19): siRNA sense strand
ggaaagacauguaccugau

SEQ ID NO: 1237927 - RNA, 19 nt, Homo sapiens
  misc_RNA (1)...(19): siRNA sense strand
gaaccucgaugucccuuug

SEQ ID NO: 1237928 - RNA, 19 nt, Homo sapiens
  misc_RNA (1)...(19): siRNA sense strand
cauguuaccuguagacaaa

SEQ ID NO: 1237929 - RNA, 19 nt, Homo sapiens
  misc_RNA (1)...(19): siRNA sense strand
gaaggacguccacacauuu

SEQ ID NO: 1237930 - RNA, 19 nt, Homo sapiens
  misc_RNA (1)...(19): siRNA sense strand
gcaaguagauuuuccaaca

SEQ ID NO: 1237931 - RNA, 19 nt, Homo sapiens
  misc_RNA (1)...(19): siRNA sense strand
cacgagaucugcuccaaga

SEQ ID NO: 1237932 - RNA, 19 nt, Homo sapiens
  misc_RNA (1)...(19): siRNA sense strand
cgaugucccuuugcaagua

SEQ ID NO: 1237933 - RNA, 19 nt, Homo sapiens
  misc_RNA (1)...(19): siRNA sense strand
gcaguacuugggcauguua

SEQ ID NO: 1237934 - RNA, 19 nt, Homo sapiens
  misc_RNA (1)...(19): siRNA sense strand
gaggaagucuuaguggaau

SEQ ID NO: 1237935 - RNA, 19 nt, Homo sapiens
  misc_RNA (1)...(19): siRNA sense strand
guagcaagagauaaagaua

SEQ ID NO: 1237936 - RNA, 19 nt, Homo sapiens
  misc_RNA (1)...(19): siRNA sense strand
ccagaagagucacaaccaa

SEQ ID NO: 1237937 - RNA, 19 nt, Homo sapiens
  misc_RNA (1)...(19): siRNA sense strand
ggaaagggccaaugugaac

SEQ ID NO: 1237938 - RNA, 19 nt, Homo sapiens
  misc_RNA (1)...(19): siRNA sense strand
ccacacauuugccuucauc

SEQ ID NO: 1237939 - RNA, 19 nt, Homo sapiens
  misc_RNA (1)...(19): siRNA sense strand
ucaggcaacuuuccuacug

SEQ ID NO: 1237940 - RNA, 19 nt, Homo sapiens
  misc_RNA (1)...(19): siRNA sense strand
gcaacuuuccuacugcaaa

SEQ ID NO: 1237941 - RNA, 19 nt, Homo sapiens
  misc_RNA (1)...(19): siRNA sense strand
agacaaaccagucggaaug

SEQ ID NO: 1237942 - RNA, 19 nt, Homo sapiens
  misc_RNA (1)...(19): siRNA sense strand
gaagagucacaaccaaugu

SEQ ID NO: 1237943 - RNA, 19 nt, Homo sapiens
  misc_RNA (1)...(19): siRNA sense strand
gaacagugccauagaaaau

SEQ ID NO: 1237944 - RNA, 19 nt, Homo sapiens
  misc_RNA (1)...(19): siRNA sense strand
caggaaagggccaauguga

SEQ ID NO: 1237945 - RNA, 19 nt, Homo sapiens
  misc_RNA (1)...(19): siRNA sense strand
gagacacagucgggauuug

SEQ ID NO: 1237946 - RNA, 19 nt, Homo sapiens
  misc_RNA (1)...(19): siRNA sense strand
gaaagacauguaccugauc

SEQ ID NO: 1237947 - RNA, 19 nt, Homo sapiens
  misc_RNA (1)...(19): siRNA sense strand
aaaccagucggaauggaua

SEQ ID NO: 1237948 - RNA, 19 nt, Homo sapiens
  misc_RNA (1)...(19): siRNA sense strand
gcuuauguagcaagagaua

SEQ ID NO: 1237949 - RNA, 19 nt, Homo sapiens
  misc_RNA (1)...(19): siRNA sense strand
ugucauguauuucgaugug

SEQ ID NO: 1237950 - RNA, 19 nt, Homo sapiens
  misc_RNA (1)...(19): siRNA sense strand
gaacaugaacguggcugau

SEQ ID NO: 1237951 - RNA, 19 nt, Homo sapiens
  misc_RNA (1)...(19): siRNA sense strand
ugaaaagaaugaagaggaa

SEQ ID NO: 1237952 - RNA, 19 nt, Homo sapiens
  misc_RNA (1)...(19): siRNA sense strand
caacuuuccuacugcaaaa

SEQ ID NO: 1237953 - RNA, 19 nt, Homo sapiens
  misc_RNA (1)...(19): siRNA sense strand
ucaguaaccagaagaguca

SEQ ID NO: 1237954 - RNA, 19 nt, Homo sapiens
  misc_RNA (1)...(19): siRNA sense strand
gcagauucaguaaccagaa

SEQ ID NO: 1237955 - RNA, 19 nt, Homo sapiens
  misc_RNA (1)...(19): siRNA sense strand
ccgccugcauguuacgaua

SEQ ID NO: 1237956 - RNA, 19 nt, Homo sapiens
  misc_RNA (1)...(19): siRNA sense strand
caagagauaaagauacaag

SEQ ID NO: 1237957 - RNA, 19 nt, Homo sapiens
  misc_RNA (1)...(19): siRNA sense strand
aaaguaguguugcggucaa

SEQ ID NO: 1237958 - RNA, 19 nt, Homo sapiens
  misc_RNA (1)...(19): siRNA sense strand
uuugaacagugccauagaa

SEQ ID NO: 1237959 - RNA, 19 nt, Homo sapiens
  misc_RNA (1)...(19): siRNA sense strand
gaauggauauuuugaacag

SEQ ID NO: 1237960 - RNA, 19 nt, Homo sapiens
  misc_RNA (1)...(19): siRNA sense strand
agcaagagauaaagauaca

SEQ ID NO: 1237961 - RNA, 19 nt, Homo sapiens
  misc_RNA (1)...(19): siRNA sense strand
caaaagccauugccacaag

SEQ ID NO: 1237962 - RNA, 19 nt, Homo sapiens
  misc_RNA (1)...(19): siRNA sense strand
gaugucccuuugcaaguag

SEQ ID NO: 1237963 - RNA, 19 nt, Homo sapiens
  misc_RNA (1)...(19): siRNA sense strand
ggucuuaucccucauugac

SEQ ID NO: 1237964 - RNA, 19 nt, Homo sapiens
  misc_RNA (1)...(19): siRNA sense strand
gcauguuaccuguagacaa

SEQ ID NO: 1237965 - RNA, 19 nt, Homo sapiens
  misc_RNA (1)...(19): siRNA sense strand
agaggaagucuuaguggaa

SEQ ID NO: 1237966 - RNA, 19 nt, Homo sapiens
  misc_RNA (1)...(19): siRNA sense strand
gcaucaggcaacuuuccua

SEQ ID NO: 1237967 - RNA, 19 nt, Homo sapiens
  misc_RNA (1)...(19): siRNA sense strand
ucauugacacuuugaaaca

SEQ ID NO: 1237968 - RNA, 19 nt, Homo sapiens
  misc_RNA (1)...(19): siRNA sense strand
agaagagucacaaccaaug

SEQ ID NO: 1237969 - RNA, 19 nt, Homo sapiens
  misc_RNA (1)...(19): siRNA sense strand
cagauucaguaaccagaag

SEQ ID NO: 1237970 - RNA, 19 nt, Homo sapiens
  misc_RNA (1)...(19): siRNA sense strand
gugcaguacuugggcaugu

SEQ ID NO: 1237971 - RNA, 19 nt, Homo sapiens
  misc_RNA (1)...(19): siRNA sense strand
cacauuugccuucaucaug

SEQ ID NO: 1237972 - RNA, 19 nt, Homo sapiens
  misc_RNA (1)...(19): siRNA sense strand
cagaagagucacaaccaau

SEQ ID NO: 1237973 - RNA, 19 nt, Homo sapiens
  misc_RNA (1)...(19): siRNA sense strand
gaacggaagaaugccaaag

SEQ ID NO: 1237974 - RNA, 19 nt, Homo sapiens
  misc_RNA (1)...(19): siRNA sense strand
ccucauugacacuuugaaa

SEQ ID NO: 1237975 - RNA, 19 nt, Homo sapiens
  misc_RNA (1)...(19): siRNA sense strand
agagucacaaccaauguaa

SEQ ID NO: 1237976 - RNA, 19 nt, Homo sapiens
  misc_RNA (1)...(19): siRNA sense strand
ccagucggaauggauauuu

SEQ ID NO: 1237977 - RNA, 19 nt, Homo sapiens
  misc_RNA (1)...(19): siRNA sense strand
ggaagucuuaguggaaugu

SEQ ID NO: 1237978 - RNA, 19 nt, Homo sapiens
  misc_RNA (1)...(19): siRNA sense strand
uaucccucauugacacuuu

SEQ ID NO: 1237979 - RNA, 19 nt, Homo sapiens
  misc_RNA (1)...(19): siRNA sense strand
agaaguuccacgugcagua

SEQ ID NO: 1237980 - RNA, 19 nt, Homo sapiens
  misc_RNA (1)...(19): siRNA sense strand
ggcugucagugaacaugaa

SEQ ID NO: 1237981 - RNA, 19 nt, Homo sapiens
  misc_RNA (1)...(19): siRNA sense strand
caaggaggacuggcuguca

SEQ ID NO: 1237982 - RNA, 19 nt, Homo sapiens
  misc_RNA (1)...(19): siRNA sense strand
cgagacacagucgggauuu

SEQ ID NO: 1237983 - RNA, 19 nt, Homo sapiens
  misc_RNA (1)...(19): siRNA sense strand
caaaccagucggaauggau

SEQ ID NO: 1237984 - RNA, 19 nt, Homo sapiens
  misc_RNA (1)...(19): siRNA sense strand
gaaguuccacgugcaguac

SEQ ID NO: 1237985 - RNA, 19 nt, Homo sapiens
  misc_RNA (1)...(19): siRNA sense strand
gauccuggagaaugacaug

SEQ ID NO: 1237986 - RNA, 19 nt, Homo sapiens
  misc_RNA (1)...(19): siRNA sense strand
gccagcagauucaguaacc

SEQ ID NO: 1237987 - RNA, 19 nt, Homo sapiens
  misc_RNA (1)...(19): siRNA sense strand
uggaaugucgugugcgauu

SEQ ID NO: 1237988 - RNA, 19 nt, Homo sapiens
  misc_RNA (1)...(19): siRNA sense strand
ccaaugugaaccucgaugu

SEQ ID NO: 1237989 - RNA, 19 nt, Homo sapiens
  misc_RNA (1)...(19): siRNA sense strand
aagagucacaaccaaugua

SEQ ID NO: 1237990 - RNA, 19 nt, Homo sapiens
  misc_RNA (1)...(19): siRNA sense strand
gcauguuacgauaucagaa

SEQ ID NO: 1237991 - RNA, 19 nt, Homo sapiens
  misc_RNA (1)...(19): siRNA sense strand
gggaaggacguccacacau

SEQ ID NO: 1237992 - RNA, 19 nt, Homo sapiens
  misc_RNA (1)...(19): siRNA sense strand
acaaaccagucggaaugga

SEQ ID NO: 1237993 - RNA, 19 nt, Homo sapiens
  misc_RNA (1)...(19): siRNA sense strand
uacgauaucagaagugcuu

SEQ ID NO: 1237994 - RNA, 19 nt, Homo sapiens
  misc_RNA (1)...(19): siRNA sense strand
gcgagccuaaugcugguaa

SEQ ID NO: 1237995 - RNA, 19 nt, Homo sapiens
  misc_RNA (1)...(19): siRNA sense strand
gagucacaaccaauguaaa

SEQ ID NO: 1237996 - RNA, 19 nt, Homo sapiens
  misc_RNA (1)...(19): siRNA sense strand
gaagaagaguccaaauuua

SEQ ID NO: 1237997 - RNA, 19 nt, Homo sapiens
  misc_RNA (1)...(19): siRNA sense strand
ggacagaccuuaucuccaa

SEQ ID NO: 1237998 - RNA, 19 nt, Homo sapiens
  misc_RNA (1)...(19): siRNA sense strand
caacaagacugcuuuaaau

SEQ ID NO: 1237999 - RNA, 19 nt, Homo sapiens
  misc_RNA (1)...(19): siRNA sense strand
acaaagaccuaccaacuua

SEQ ID NO: 1238000 - RNA, 19 nt, Homo sapiens
  misc_RNA (1)...(19): siRNA sense strand
ggaaggaacucccaggaaa

SEQ ID NO: 1238001 - RNA, 19 nt, Homo sapiens
  misc_RNA (1)...(19): siRNA sense strand
gcaaaugaauuacuuggaa

SEQ ID NO: 1238002 - RNA, 19 nt, Homo sapiens
  misc_RNA (1)...(19): siRNA sense strand
gaagaucauuucagaagaa

SEQ ID NO: 1238003 - RNA, 19 nt, Homo sapiens
  misc_RNA (1)...(19): siRNA sense strand
gcccagaaguguuccauua

SEQ ID NO: 1238004 - RNA, 19 nt, Homo sapiens
  misc_RNA (1)...(19): siRNA sense strand
cgaaauagcagccagcuua

SEQ ID NO: 1238005 - RNA, 19 nt, Homo sapiens
  misc_RNA (1)...(19): siRNA sense strand
gagaacccaucacuaauuu

SEQ ID NO: 1238006 - RNA, 19 nt, Homo sapiens
  misc_RNA (1)...(19): siRNA sense strand
gaacaggcacugcaaauga

SEQ ID NO: 1238007 - RNA, 19 nt, Homo sapiens
  misc_RNA (1)...(19): siRNA sense strand
gcugagagauuaagaguug

SEQ ID NO: 1238008 - RNA, 19 nt, Homo sapiens
  misc_RNA (1)...(19): siRNA sense strand
gaaauuccagcaacaguua

SEQ ID NO: 1238009 - RNA, 19 nt, Homo sapiens
  misc_RNA (1)...(19): siRNA sense strand
cgaaguauaugggauguua

SEQ ID NO: 1238010 - RNA, 19 nt, Homo sapiens
  misc_RNA (1)...(19): siRNA sense strand
ucaguuaccucacuacuaa

SEQ ID NO: 1238011 - RNA, 19 nt, Homo sapiens
  misc_RNA (1)...(19): siRNA sense strand
ggaaauagcaguccagguu

SEQ ID NO: 1238012 - RNA, 19 nt, Homo sapiens
  misc_RNA (1)...(19): siRNA sense strand
caaauuaccugcauucuac

SEQ ID NO: 1238013 - RNA, 19 nt, Homo sapiens
  misc_RNA (1)...(19): siRNA sense strand
gacuacagcuucucgguua

SEQ ID NO: 1238014 - RNA, 19 nt, Homo sapiens
  misc_RNA (1)...(19): siRNA sense strand
gaccagaaguccuaugaaa

SEQ ID NO: 1238015 - RNA, 19 nt, Homo sapiens
  misc_RNA (1)...(19): siRNA sense strand
ggacgaggauuuacuguca

SEQ ID NO: 1238016 - RNA, 19 nt, Homo sapiens
  misc_RNA (1)...(19): siRNA sense strand
gaauggccuucaucacuua

SEQ ID NO: 1238017 - RNA, 19 nt, Homo sapiens
  misc_RNA (1)...(19): siRNA sense strand
ucaacagccugaauaauuu

SEQ ID NO: 1238018 - RNA, 19 nt, Homo sapiens
  misc_RNA (1)...(19): siRNA sense strand
gaacaacauugacaucauc

SEQ ID NO: 1238019 - RNA, 19 nt, Homo sapiens
  misc_RNA (1)...(19): siRNA sense strand
gaagagcaauggccucaug

SEQ ID NO: 1238020 - RNA, 19 nt, Homo sapiens
  misc_RNA (1)...(19): siRNA sense strand
ggaaagaccacuauauuca

SEQ ID NO: 1238021 - RNA, 19 nt, Homo sapiens
  misc_RNA (1)...(19): siRNA sense strand
gaucauggcuauacucauc

SEQ ID NO: 1238022 - RNA, 19 nt, Homo sapiens
  misc_RNA (1)...(19): siRNA sense strand
ggaagaacauuuguauuuc

SEQ ID NO: 1238023 - RNA, 19 nt, Homo sapiens
  misc_RNA (1)...(19): siRNA sense strand
ggaauggccuucaucacuu

SEQ ID NO: 1238024 - RNA, 19 nt, Homo sapiens
  misc_RNA (1)...(19): siRNA sense strand
ccagugaucuacaguguuu

SEQ ID NO: 1238025 - RNA, 19 nt, Homo sapiens
  misc_RNA (1)...(19): siRNA sense strand
gaacaaaacugccagaaca

SEQ ID NO: 1238026 - RNA, 19 nt, Homo sapiens
  misc_RNA (1)...(19): siRNA sense strand
gauuauagcuguaaacaac

SEQ ID NO: 1238027 - RNA, 19 nt, Homo sapiens
  misc_RNA (1)...(19): siRNA sense strand
ugagacagcuggcggaauu

SEQ ID NO: 1238028 - RNA, 19 nt, Homo sapiens
  misc_RNA (1)...(19): siRNA sense strand
caacaguuauccagagauu

SEQ ID NO: 1238029 - RNA, 19 nt, Homo sapiens
  misc_RNA (1)...(19): siRNA sense strand
ugaccgaacuucuuuguga

SEQ ID NO: 1238030 - RNA, 19 nt, Homo sapiens
  misc_RNA (1)...(19): siRNA sense strand
gcacuugucucagcaaugu

SEQ ID NO: 1238031 - RNA, 19 nt, Homo sapiens
  misc_RNA (1)...(19): siRNA sense strand
ugaagaagaucauggcuau

SEQ ID NO: 1238032 - RNA, 19 nt, Homo sapiens
  misc_RNA (1)...(19): siRNA sense strand
gaagaggaaguuaucuaua

SEQ ID NO: 1238033 - RNA, 19 nt, Homo sapiens
  misc_RNA (1)...(19): siRNA sense strand
gcaauggccucauguuuac

SEQ ID NO: 1238034 - RNA, 19 nt, Homo sapiens
  misc_RNA (1)...(19): siRNA sense strand
gccaugagcuaucuuauca

SEQ ID NO: 1238035 - RNA, 19 nt, Homo sapiens
  misc_RNA (1)...(19): siRNA sense strand
guaaauauuuccucuugug

SEQ ID NO: 1238036 - RNA, 19 nt, Homo sapiens
  misc_RNA (1)...(19): siRNA sense strand
gacaauagaugaggaugaa

SEQ ID NO: 1238037 - RNA, 19 nt, Homo sapiens
  misc_RNA (1)...(19): siRNA sense strand
gaacacaccacaaggauca

SEQ ID NO: 1238038 - RNA, 19 nt, Homo sapiens
  misc_RNA (1)...(19): siRNA sense strand
ucucacagcucauuaguug

SEQ ID NO: 1238039 - RNA, 19 nt, Homo sapiens
  misc_RNA (1)...(19): siRNA sense strand
ggagaacccaucacuaauu

SEQ ID NO: 1238040 - RNA, 19 nt, Homo sapiens
  misc_RNA (1)...(19): siRNA sense strand
ccacaaggaucauuuagca

SEQ ID NO: 1238041 - RNA, 19 nt, Homo sapiens
  misc_RNA (1)...(19): siRNA sense strand
gauccgacuuuagaacuua

SEQ ID NO: 1238042 - RNA, 19 nt, Homo sapiens
  misc_RNA (1)...(19): siRNA sense strand
caacaggacuauugacaag

SEQ ID NO: 1238043 - RNA, 19 nt, Homo sapiens
  misc_RNA (1)...(19): siRNA sense strand
gaucauuucagaagaagua

SEQ ID NO: 1238044 - RNA, 19 nt, Homo sapiens
  misc_RNA (1)...(19): siRNA sense strand
ggaagaucauuucagaaga

SEQ ID NO: 1238045 - RNA, 19 nt, Homo sapiens
  misc_RNA (1)...(19): siRNA sense strand
ggcauuaauuccauuguuu

SEQ ID NO: 1238046 - RNA, 19 nt, Homo sapiens
  misc_RNA (1)...(19): siRNA sense strand
ggccagagguucaccagaa

SEQ ID NO: 1238047 - RNA, 19 nt, Homo sapiens
  misc_RNA (1)...(19): siRNA sense strand
cagccaagguuccacuaua

SEQ ID NO: 1238048 - RNA, 19 nt, Homo sapiens
  misc_RNA (1)...(19): siRNA sense strand
gagaaugaguugagcuaug

SEQ ID NO: 1238049 - RNA, 19 nt, Homo sapiens
  misc_RNA (1)...(19): siRNA sense strand
uugaagagcugaaagaaga

SEQ ID NO: 1238050 - RNA, 19 nt, Homo sapiens
  misc_RNA (1)...(19): siRNA sense strand
ggaauuaccacugaauauu

SEQ ID NO: 1238051 - RNA, 19 nt, Homo sapiens
  misc_RNA (1)...(19): siRNA sense strand
guaaacaacaucagcauug

SEQ ID NO: 1238052 - RNA, 19 nt, Homo sapiens
  misc_RNA (1)...(19): siRNA sense strand
caucccagguaauuuauaa

SEQ ID NO: 1238053 - RNA, 19 nt, Homo sapiens
  misc_RNA (1)...(19): siRNA sense strand
gaacaaucauucugucaac

SEQ ID NO: 1238054 - RNA, 19 nt, Homo sapiens
  misc_RNA (1)...(19): siRNA sense strand
cuacaucauugccuucuuu

SEQ ID NO: 1238055 - RNA, 19 nt, Homo sapiens
  misc_RNA (1)...(19): siRNA sense strand
gaacagacagccuucuaug

SEQ ID NO: 1238056 - RNA, 19 nt, Homo sapiens
  misc_RNA (1)...(19): siRNA sense strand
agaagaagaguccaaauuu

SEQ ID NO: 1238057 - RNA, 19 nt, Homo sapiens
  misc_RNA (1)...(19): siRNA sense strand
caguaaauauuuccucuug

SEQ ID NO: 1238058 - RNA, 19 nt, Homo sapiens
  misc_RNA (1)...(19): siRNA sense strand
gcacauaaagagcagguuu

SEQ ID NO: 1238059 - RNA, 19 nt, Homo sapiens
  misc_RNA (1)...(19): siRNA sense strand
gaaagaccacuauauucaa

SEQ ID NO: 1238060 - RNA, 19 nt, Homo sapiens
  misc_RNA (1)...(19): siRNA sense strand
gaugcccucuuaaauauau

SEQ ID NO: 1238061 - RNA, 19 nt, Homo sapiens
  misc_RNA (1)...(19): siRNA sense strand
gaacagggcauuggucuuc

SEQ ID NO: 1238062 - RNA, 19 nt, Homo sapiens
  misc_RNA (1)...(19): siRNA sense strand
gaguugagcuauguauuga

SEQ ID NO: 1238063 - RNA, 19 nt, Homo sapiens
  misc_RNA (1)...(19): siRNA sense strand
uaucaccacucccaaacua

SEQ ID NO: 1238064 - RNA, 19 nt, Homo sapiens
  misc_RNA (1)...(19): siRNA sense strand
ccaaagaccagaaguccua

SEQ ID NO: 1238065 - RNA, 19 nt, Homo sapiens
  misc_RNA (1)...(19): siRNA sense strand
gaacaugggagucuguaug

SEQ ID NO: 1238066 - RNA, 19 nt, Homo sapiens
  misc_RNA (1)...(19): siRNA sense strand
cauguuaacugggcuguuu

SEQ ID NO: 1238067 - RNA, 19 nt, Homo sapiens
  misc_RNA (1)...(19): siRNA sense strand
uauagagaguguuggauuu

SEQ ID NO: 1238068 - RNA, 19 nt, Homo sapiens
  misc_RNA (1)...(19): siRNA sense strand
acuagaagaugcaaugaaa

SEQ ID NO: 1238069 - RNA, 19 nt, Homo sapiens
  misc_RNA (1)...(19): siRNA sense strand
ggaggagucgcaaacauuu

SEQ ID NO: 1238070 - RNA, 19 nt, Homo sapiens
  misc_RNA (1)...(19): siRNA sense strand
cagaagaaguacagaacaa

SEQ ID NO: 1238071 - RNA, 19 nt, Homo sapiens
  misc_RNA (1)...(19): siRNA sense strand
uagaugaccugguaacugu

SEQ ID NO: 1238072 - RNA, 19 nt, Homo sapiens
  misc_RNA (1)...(19): siRNA sense strand
uaacgcauguguggaauga

SEQ ID NO: 1238073 - RNA, 19 nt, Homo sapiens
  misc_RNA (1)...(19): siRNA sense strand
gcugggcucuuccaugaaa

SEQ ID NO: 1238074 - RNA, 19 nt, Homo sapiens
  misc_RNA (1)...(19): siRNA sense strand
gaacaccagugaucuacag

SEQ ID NO: 1238075 - RNA, 19 nt, Homo sapiens
  misc_RNA (1)...(19): siRNA sense strand
gaacuggaaaggucucauu

SEQ ID NO: 1238076 - RNA, 19 nt, Homo sapiens
  misc_RNA (1)...(19): siRNA sense strand
gagcaauggccucauguuu

SEQ ID NO: 1238077 - RNA, 19 nt, Homo sapiens
  misc_RNA (1)...(19): siRNA sense strand
caccaucucccaagcauua

SEQ ID NO: 1238078 - RNA, 19 nt, Homo sapiens
  misc_RNA (1)...(19): siRNA sense strand
gcacacauccgcugcuaga

SEQ ID NO: 1238079 - RNA, 19 nt, Homo sapiens
  misc_RNA (1)...(19): siRNA sense strand
ucaggaagaugccuuagau

SEQ ID NO: 1238080 - RNA, 19 nt, Homo sapiens
  misc_RNA (1)...(19): siRNA sense strand
ggaguggaauacccaaaug

SEQ ID NO: 1238081 - RNA, 19 nt, Homo sapiens
  misc_RNA (1)...(19): siRNA sense strand
gaucaaggguaguaauuuu

SEQ ID NO: 1238082 - RNA, 19 nt, Homo sapiens
  misc_RNA (1)...(19): siRNA sense strand
cuauauagccaucgucaua

SEQ ID NO: 1238083 - RNA, 19 nt, Homo sapiens
  misc_RNA (1)...(19): siRNA sense strand
uaaccagugucucuuauuc

SEQ ID NO: 1238084 - RNA, 19 nt, Homo sapiens
  misc_RNA (1)...(19): siRNA sense strand
ugagaucccugaagcaaau

SEQ ID NO: 1238085 - RNA, 19 nt, Homo sapiens
  misc_RNA (1)...(19): siRNA sense strand
ccaggucaguuacuagaaa

SEQ ID NO: 1238086 - RNA, 19 nt, Homo sapiens
  misc_RNA (1)...(19): siRNA sense strand
ccaacaagacugcuuuaaa

SEQ ID NO: 1238087 - RNA, 19 nt, Homo sapiens
  misc_RNA (1)...(19): siRNA sense strand
guggagaacccaucacuaa

SEQ ID NO: 1238088 - RNA, 19 nt, Homo sapiens
  misc_RNA (1)...(19): siRNA sense strand
guugagcuauguauugaaa

SEQ ID NO: 1238089 - RNA, 19 nt, Homo sapiens
  misc_RNA (1)...(19): siRNA sense strand
gaugaacucgauauucuaa

SEQ ID NO: 1238090 - RNA, 19 nt, Homo sapiens
  misc_RNA (1)...(19): siRNA sense strand
acagauagaugaacucgau

SEQ ID NO: 1238091 - RNA, 19 nt, Homo sapiens
  misc_RNA (1)...(19): siRNA sense strand
acgaaucccugauaaagaa

SEQ ID NO: 1238092 - RNA, 19 nt, Homo sapiens
  misc_RNA (1)...(19): siRNA sense strand
gauaauauaacgcaugugu

SEQ ID NO: 1238093 - RNA, 19 nt, Homo sapiens
  misc_RNA (1)...(19): siRNA sense strand
caggaaagaccacuauauu

SEQ ID NO: 1238094 - RNA, 19 nt, Homo sapiens
  misc_RNA (1)...(19): siRNA sense strand
gcaggaaagaccacuauau

SEQ ID NO: 1238095 - RNA, 19 nt, Homo sapiens
  misc_RNA (1)...(19): siRNA sense strand
caacaucagcauugggaua

SEQ ID NO: 1238096 - RNA, 19 nt, Homo sapiens
  misc_RNA (1)...(19): siRNA sense strand
gaagaagaguccaaauuua

SEQ ID NO: 1238097 - RNA, 19 nt, Homo sapiens
  misc_RNA (1)...(19): siRNA sense strand
ggacagaccuuaucuccaa

SEQ ID NO: 1238098 - RNA, 19 nt, Homo sapiens
  misc_RNA (1)...(19): siRNA sense strand
caacaagacugcuuuaaau

SEQ ID NO: 1238099 - RNA, 19 nt, Homo sapiens
  misc_RNA (1)...(19): siRNA sense strand
acaaagaccuaccaacuua

SEQ ID NO: 1238100 - RNA, 19 nt, Homo sapiens
  misc_RNA (1)...(19): siRNA sense strand
ggaaggaacucccaggaaa

SEQ ID NO: 1238101 - RNA, 19 nt, Homo sapiens
  misc_RNA (1)...(19): siRNA sense strand
gcaaaugaauuacuuggaa

SEQ ID NO: 1238102 - RNA, 19 nt, Homo sapiens
  misc_RNA (1)...(19): siRNA sense strand
gaagaucauuucagaagaa

SEQ ID NO: 1238103 - RNA, 19 nt, Homo sapiens
  misc_RNA (1)...(19): siRNA sense strand
gcccagaaguguuccauua

SEQ ID NO: 1238104 - RNA, 19 nt, Homo sapiens
  misc_RNA (1)...(19): siRNA sense strand
cgaaauagcagccagcuua

SEQ ID NO: 1238105 - RNA, 19 nt, Homo sapiens
  misc_RNA (1)...(19): siRNA sense strand
gagaacccaucacuaauuu

SEQ ID NO: 1238106 - RNA, 19 nt, Homo sapiens
  misc_RNA (1)...(19): siRNA sense strand
gaacaggcacugcaaauga

SEQ ID NO: 1238107 - RNA, 19 nt, Homo sapiens
  misc_RNA (1)...(19): siRNA sense strand
gcugagagauuaagaguug

SEQ ID NO: 1238108 - RNA, 19 nt, Homo sapiens
  misc_RNA (1)...(19): siRNA sense strand
gaaauuccagcaacaguua

SEQ ID NO: 1238109 - RNA, 19 nt, Homo sapiens
  misc_RNA (1)...(19): siRNA sense strand
cgaaguauaugggauguua

SEQ ID NO: 1238110 - RNA, 19 nt, Homo sapiens
  misc_RNA (1)...(19): siRNA sense strand
ucaguuaccucacuacuaa

SEQ ID NO: 1238111 - RNA, 19 nt, Homo sapiens
  misc_RNA (1)...(19): siRNA sense strand
ggaaauagcaguccagguu

SEQ ID NO: 1238112 - RNA, 19 nt, Homo sapiens
  misc_RNA (1)...(19): siRNA sense strand
caaauuaccugcauucuac

SEQ ID NO: 1238113 - RNA, 19 nt, Homo sapiens
  misc_RNA (1)...(19): siRNA sense strand
gacuacagcuucucgguua

SEQ ID NO: 1238114 - RNA, 19 nt, Homo sapiens
  misc_RNA (1)...(19): siRNA sense strand
gaccagaaguccuaugaaa

SEQ ID NO: 1238115 - RNA, 19 nt, Homo sapiens
  misc_RNA (1)...(19): siRNA sense strand
ggacgaggauuuacuguca

SEQ ID NO: 1238116 - RNA, 19 nt, Homo sapiens
  misc_RNA (1)...(19): siRNA sense strand
gaauggccuucaucacuua

SEQ ID NO: 1238117 - RNA, 19 nt, Homo sapiens
  misc_RNA (1)...(19): siRNA sense strand
ucaacagccugaauaauuu

SEQ ID NO: 1238118 - RNA, 19 nt, Homo sapiens
  misc_RNA (1)...(19): siRNA sense strand
gaacaacauugacaucauc

SEQ ID NO: 1238119 - RNA, 19 nt, Homo sapiens
  misc_RNA (1)...(19): siRNA sense strand
gaagagcaauggccucaug

SEQ ID NO: 1238120 - RNA, 19 nt, Homo sapiens
  misc_RNA (1)...(19): siRNA sense strand
ggaaagaccacuauauuca

SEQ ID NO: 1238121 - RNA, 19 nt, Homo sapiens
  misc_RNA (1)...(19): siRNA sense strand
gaucauggcuauacucauc

SEQ ID NO: 1238122 - RNA, 19 nt, Homo sapiens
  misc_RNA (1)...(19): siRNA sense strand
ggaagaacauuuguauuuc

SEQ ID NO: 1238123 - RNA, 19 nt, Homo sapiens
  misc_RNA (1)...(19): siRNA sense strand
ggaauggccuucaucacuu

SEQ ID NO: 1238124 - RNA, 19 nt, Homo sapiens
  misc_RNA (1)...(19): siRNA sense strand
ccagugaucuacaguguuu

SEQ ID NO: 1238125 - RNA, 19 nt, Homo sapiens
  misc_RNA (1)...(19): siRNA sense strand
gaacaaaacugccagaaca

SEQ ID NO: 1238126 - RNA, 19 nt, Homo sapiens
  misc_RNA (1)...(19): siRNA sense strand
gauuauagcuguaaacaac

SEQ ID NO: 1238127 - RNA, 19 nt, Homo sapiens
  misc_RNA (1)...(19): siRNA sense strand
ugagacagcuggcggaauu

SEQ ID NO: 1238128 - RNA, 19 nt, Homo sapiens
  misc_RNA (1)...(19): siRNA sense strand
caacaguuauccagagauu

SEQ ID NO: 1238129 - RNA, 19 nt, Homo sapiens
  misc_RNA (1)...(19): siRNA sense strand
ugaccgaacuucuuuguga

SEQ ID NO: 1238130 - RNA, 19 nt, Homo sapiens
  misc_RNA (1)...(19): siRNA sense strand
gcacuugucucagcaaugu

SEQ ID NO: 1238131 - RNA, 19 nt, Homo sapiens
  misc_RNA (1)...(19): siRNA sense strand
ugaagaagaucauggcuau

SEQ ID NO: 1238132 - RNA, 19 nt, Homo sapiens
  misc_RNA (1)...(19): siRNA sense strand
gaagaggaaguuaucuaua

SEQ ID NO: 1238133 - RNA, 19 nt, Homo sapiens
  misc_RNA (1)...(19): siRNA sense strand
gcaauggccucauguuuac

SEQ ID NO: 1238134 - RNA, 19 nt, Homo sapiens
  misc_RNA (1)...(19): siRNA sense strand
gccaugagcuaucuuauca

SEQ ID NO: 1238135 - RNA, 19 nt, Homo sapiens
  misc_RNA (1)...(19): siRNA sense strand
guaaauauuuccucuugug

SEQ ID NO: 1238136 - RNA, 19 nt, Homo sapiens
  misc_RNA (1)...(19): siRNA sense strand
gacaauagaugaggaugaa

SEQ ID NO: 1238137 - RNA, 19 nt, Homo sapiens
  misc_RNA (1)...(19): siRNA sense strand
gaacacaccacaaggauca

SEQ ID NO: 1238138 - RNA, 19 nt, Homo sapiens
  misc_RNA (1)...(19): siRNA sense strand
ucucacagcucauuaguug

SEQ ID NO: 1238139 - RNA, 19 nt, Homo sapiens
  misc_RNA (1)...(19): siRNA sense strand
ggagaacccaucacuaauu

SEQ ID NO: 1238140 - RNA, 19 nt, Homo sapiens
  misc_RNA (1)...(19): siRNA sense strand
ccacaaggaucauuuagca

SEQ ID NO: 1238141 - RNA, 19 nt, Homo sapiens
  misc_RNA (1)...(19): siRNA sense strand
gauccgacuuuagaacuua

SEQ ID NO: 1238142 - RNA, 19 nt, Homo sapiens
  misc_RNA (1)...(19): siRNA sense strand
caacaggacuauugacaag

SEQ ID NO: 1238143 - RNA, 19 nt, Homo sapiens
  misc_RNA (1)...(19): siRNA sense strand
gaucauuucagaagaagua

SEQ ID NO: 1238144 - RNA, 19 nt, Homo sapiens
  misc_RNA (1)...(19): siRNA sense strand
ggaagaucauuucagaaga

SEQ ID NO: 1238145 - RNA, 19 nt, Homo sapiens
  misc_RNA (1)...(19): siRNA sense strand
ggcauuaauuccauuguuu

SEQ ID NO: 1238146 - RNA, 19 nt, Homo sapiens
  misc_RNA (1)...(19): siRNA sense strand
ggccagagguucaccagaa

SEQ ID NO: 1238147 - RNA, 19 nt, Homo sapiens
  misc_RNA (1)...(19): siRNA sense strand
cagccaagguuccacuaua

SEQ ID NO: 1238148 - RNA, 19 nt, Homo sapiens
  misc_RNA (1)...(19): siRNA sense strand
gagaaugaguugagcuaug

SEQ ID NO: 1238149 - RNA, 19 nt, Homo sapiens
  misc_RNA (1)...(19): siRNA sense strand
uugaagagcugaaagaaga

SEQ ID NO: 1238150 - RNA, 19 nt, Homo sapiens
  misc_RNA (1)...(19): siRNA sense strand
ggaauuaccacugaauauu

SEQ ID NO: 1238151 - RNA, 19 nt, Homo sapiens
  misc_RNA (1)...(19): siRNA sense strand
guaaacaacaucagcauug

SEQ ID NO: 1238152 - RNA, 19 nt, Homo sapiens
  misc_RNA (1)...(19): siRNA sense strand
caucccagguaauuuauaa

SEQ ID NO: 1238153 - RNA, 19 nt, Homo sapiens
  misc_RNA (1)...(19): siRNA sense strand
gaacaaucauucugucaac

SEQ ID NO: 1238154 - RNA, 19 nt, Homo sapiens
  misc_RNA (1)...(19): siRNA sense strand
cuacaucauugccuucuuu

SEQ ID NO: 1238155 - RNA, 19 nt, Homo sapiens
  misc_RNA (1)...(19): siRNA sense strand
gaacagacagccuucuaug

SEQ ID NO: 1238156 - RNA, 19 nt, Homo sapiens
  misc_RNA (1)...(19): siRNA sense strand
agaagaagaguccaaauuu

SEQ ID NO: 1238157 - RNA, 19 nt, Homo sapiens
  misc_RNA (1)...(19): siRNA sense strand
caguaaauauuuccucuug

SEQ ID NO: 1238158 - RNA, 19 nt, Homo sapiens
  misc_RNA (1)...(19): siRNA sense strand
gcacauaaagagcagguuu

SEQ ID NO: 1238159 - RNA, 19 nt, Homo sapiens
  misc_RNA (1)...(19): siRNA sense strand
gaaagaccacuauauucaa

SEQ ID NO: 1238160 - RNA, 19 nt, Homo sapiens
  misc_RNA (1)...(19): siRNA sense strand
gaugcccucuuaaauauau

SEQ ID NO: 1238161 - RNA, 19 nt, Homo sapiens
  misc_RNA (1)...(19): siRNA sense strand
gaacagggcauuggucuuc

SEQ ID NO: 1238162 - RNA, 19 nt, Homo sapiens
  misc_RNA (1)...(19): siRNA sense strand
gaguugagcuauguauuga

SEQ ID NO: 1238163 - RNA, 19 nt, Homo sapiens
  misc_RNA (1)...(19): siRNA sense strand
uaucaccacucccaaacua

SEQ ID NO: 1238164 - RNA, 19 nt, Homo sapiens
  misc_RNA (1)...(19): siRNA sense strand
ccaaagaccagaaguccua

SEQ ID NO: 1238165 - RNA, 19 nt, Homo sapiens
  misc_RNA (1)...(19): siRNA sense strand
gaacaugggagucuguaug

SEQ ID NO: 1238166 - RNA, 19 nt, Homo sapiens
  misc_RNA (1)...(19): siRNA sense strand
cauguuaacugggcuguuu

SEQ ID NO: 1238167 - RNA, 19 nt, Homo sapiens
  misc_RNA (1)...(19): siRNA sense strand
uauagagaguguuggauuu

SEQ ID NO: 1238168 - RNA, 19 nt, Homo sapiens
  misc_RNA (1)...(19): siRNA sense strand
acuagaagaugcaaugaaa

SEQ ID NO: 1238169 - RNA, 19 nt, Homo sapiens
  misc_RNA (1)...(19): siRNA sense strand
ggaggagucgcaaacauuu

SEQ ID NO: 1238170 - RNA, 19 nt, Homo sapiens
  misc_RNA (1)...(19): siRNA sense strand
cagaagaaguacagaacaa

SEQ ID NO: 1238171 - RNA, 19 nt, Homo sapiens
  misc_RNA (1)...(19): siRNA sense strand
uagaugaccugguaacugu

SEQ ID NO: 1238172 - RNA, 19 nt, Homo sapiens
  misc_RNA (1)...(19): siRNA sense strand
uaacgcauguguggaauga

SEQ ID NO: 1238173 - RNA, 19 nt, Homo sapiens
  misc_RNA (1)...(19): siRNA sense strand
gcugggcucuuccaugaaa

SEQ ID NO: 1238174 - RNA, 19 nt, Homo sapiens
  misc_RNA (1)...(19): siRNA sense strand
gaacaccagugaucuacag

SEQ ID NO: 1238175 - RNA, 19 nt, Homo sapiens
  misc_RNA (1)...(19): siRNA sense strand
gaacuggaaaggucucauu

SEQ ID NO: 1238176 - RNA, 19 nt, Homo sapiens
  misc_RNA (1)...(19): siRNA sense strand
gagcaauggccucauguuu

SEQ ID NO: 1238177 - RNA, 19 nt, Homo sapiens
  misc_RNA (1)...(19): siRNA sense strand
caccaucucccaagcauua

SEQ ID NO: 1238178 - RNA, 19 nt, Homo sapiens
  misc_RNA (1)...(19): siRNA sense strand
gcacacauccgcugcuaga

SEQ ID NO: 1238179 - RNA, 19 nt, Homo sapiens
  misc_RNA (1)...(19): siRNA sense strand
ucaggaagaugccuuagau

SEQ ID NO: 1238180 - RNA, 19 nt, Homo sapiens
  misc_RNA (1)...(19): siRNA sense strand
ggaguggaauacccaaaug

SEQ ID NO: 1238181 - RNA, 19 nt, Homo sapiens
  misc_RNA (1)...(19): siRNA sense strand
gaucaaggguaguaauuuu

SEQ ID NO: 1238182 - RNA, 19 nt, Homo sapiens
  misc_RNA (1)...(19): siRNA sense strand
cuauauagccaucgucaua

SEQ ID NO: 1238183 - RNA, 19 nt, Homo sapiens
  misc_RNA (1)...(19): siRNA sense strand
uaaccagugucucuuauuc

SEQ ID NO: 1238184 - RNA, 19 nt, Homo sapiens
  misc_RNA (1)...(19): siRNA sense strand
ugagaucccugaagcaaau

SEQ ID NO: 1238185 - RNA, 19 nt, Homo sapiens
  misc_RNA (1)...(19): siRNA sense strand
ccaggucaguuacuagaaa

SEQ ID NO: 1238186 - RNA, 19 nt, Homo sapiens
  misc_RNA (1)...(19): siRNA sense strand
ccaacaagacugcuuuaaa

SEQ ID NO: 1238187 - RNA, 19 nt, Homo sapiens
  misc_RNA (1)...(19): siRNA sense strand
guggagaacccaucacuaa

SEQ ID NO: 1238188 - RNA, 19 nt, Homo sapiens
  misc_RNA (1)...(19): siRNA sense strand
guugagcuauguauugaaa

SEQ ID NO: 1238189 - RNA, 19 nt, Homo sapiens
  misc_RNA (1)...(19): siRNA sense strand
gaugaacucgauauucuaa

SEQ ID NO: 1238190 - RNA, 19 nt, Homo sapiens
  misc_RNA (1)...(19): siRNA sense strand
acagauagaugaacucgau

SEQ ID NO: 1238191 - RNA, 19 nt, Homo sapiens
  misc_RNA (1)...(19): siRNA sense strand
acgaaucccugauaaagaa

SEQ ID NO: 1238192 - RNA, 19 nt, Homo sapiens
  misc_RNA (1)...(19): siRNA sense strand
gauaauauaacgcaugugu

SEQ ID NO: 1238193 - RNA, 19 nt, Homo sapiens
  misc_RNA (1)...(19): siRNA sense strand
caggaaagaccacuauauu

SEQ ID NO: 1238194 - RNA, 19 nt, Homo sapiens
  misc_RNA (1)...(19): siRNA sense strand
gcaggaaagaccacuauau

SEQ ID NO: 1238195 - RNA, 19 nt, Homo sapiens
  misc_RNA (1)...(19): siRNA sense strand
caacaucagcauugggaua

SEQ ID NO: 1238196 - RNA, 19 nt, Homo sapiens
  misc_RNA (1)...(19): siRNA sense strand
caacaauuccggaacauuu

SEQ ID NO: 1238197 - RNA, 19 nt, Homo sapiens
  misc_RNA (1)...(19): siRNA sense strand
gaacaucgacuuugacagu

SEQ ID NO: 1238198 - RNA, 19 nt, Homo sapiens
  misc_RNA (1)...(19): siRNA sense strand
cagaugagcucaagaaggu

SEQ ID NO: 1238199 - RNA, 19 nt, Homo sapiens
  misc_RNA (1)...(19): siRNA sense strand
acaaggaccugaagacaca

SEQ ID NO: 1238200 - RNA, 19 nt, Homo sapiens
  misc_RNA (1)...(19): siRNA sense strand
gcucugaucaggaaaguga

SEQ ID NO: 1238201 - RNA, 19 nt, Homo sapiens
  misc_RNA (1)...(19): siRNA sense strand
ucaacaaccagcucuauga

SEQ ID NO: 1238202 - RNA, 19 nt, Homo sapiens
  misc_RNA (1)...(19): siRNA sense strand
ggcugcagcucaccaugua

SEQ ID NO: 1238203 - RNA, 19 nt, Homo sapiens
  misc_RNA (1)...(19): siRNA sense strand
ugacaaggauggagauggu

SEQ ID NO: 1238204 - RNA, 19 nt, Homo sapiens
  misc_RNA (1)...(19): siRNA sense strand
acaugaacaucgacuuuga

SEQ ID NO: 1238205 - RNA, 19 nt, Homo sapiens
  misc_RNA (1)...(19): siRNA sense strand
uggcagcucugaucaggaa

SEQ ID NO: 1238206 - RNA, 19 nt, Homo sapiens
  misc_RNA (1)...(19): siRNA sense strand
cagcaacaauuccggaaca

SEQ ID NO: 1238207 - RNA, 19 nt, Homo sapiens
  misc_RNA (1)...(19): siRNA sense strand
gcagauagcaggagaugac

SEQ ID NO: 1238208 - RNA, 19 nt, Homo sapiens
  misc_RNA (1)...(19): siRNA sense strand
uaacacagucgugaacaaa

SEQ ID NO: 1238209 - RNA, 19 nt, Homo sapiens
  misc_RNA (1)...(19): siRNA sense strand
gauuaaggccuggcagaaa

SEQ ID NO: 1238210 - RNA, 19 nt, Homo sapiens
  misc_RNA (1)...(19): siRNA sense strand
gugaggaacagcaacaauu

SEQ ID NO: 1238211 - RNA, 19 nt, Homo sapiens
  misc_RNA (1)...(19): siRNA sense strand
acaaacacaugaacaucga

SEQ ID NO: 1238212 - RNA, 19 nt, Homo sapiens
  misc_RNA (1)...(19): siRNA sense strand
caccaccucuggaacaaga

SEQ ID NO: 1238213 - RNA, 19 nt, Homo sapiens
  misc_RNA (1)...(19): siRNA sense strand
gagggcauguucagagcuu

SEQ ID NO: 1238214 - RNA, 19 nt, Homo sapiens
  misc_RNA (1)...(19): siRNA sense strand
ggaaagugaggaacagcaa

SEQ ID NO: 1238215 - RNA, 19 nt, Homo sapiens
  misc_RNA (1)...(19): siRNA sense strand
gauagcaggagaugacaug

SEQ ID NO: 1238216 - RNA, 19 nt, Homo sapiens
  misc_RNA (1)...(19): siRNA sense strand
ugauugcgcucauggauac

SEQ ID NO: 1238217 - RNA, 19 nt, Homo sapiens
  misc_RNA (1)...(19): siRNA sense strand
acacaugaacaucgacuuu

SEQ ID NO: 1238218 - RNA, 19 nt, Homo sapiens
  misc_RNA (1)...(19): siRNA sense strand
acacagucgugaacaaaca

SEQ ID NO: 1238219 - RNA, 19 nt, Homo sapiens
  misc_RNA (1)...(19): siRNA sense strand
guacgcagacaaacacaug

SEQ ID NO: 1238220 - RNA, 19 nt, Homo sapiens
  misc_RNA (1)...(19): siRNA sense strand
gugcagaugagcucaagaa

SEQ ID NO: 1238221 - RNA, 19 nt, Homo sapiens
  misc_RNA (1)...(19): siRNA sense strand
acaaccagcucuaugacau

SEQ ID NO: 1238222 - RNA, 19 nt, Homo sapiens
  misc_RNA (1)...(19): siRNA sense strand
gcaacaauuccggaacauu

SEQ ID NO: 1238223 - RNA, 19 nt, Homo sapiens
  misc_RNA (1)...(19): siRNA sense strand
guucagagcuuuucaugca

SEQ ID NO: 1238224 - RNA, 19 nt, Homo sapiens
  misc_RNA (1)...(19): siRNA sense strand
gcagacaaacacaugaaca

SEQ ID NO: 1238225 - RNA, 19 nt, Homo sapiens
  misc_RNA (1)...(19): siRNA sense strand
gaugcgaaaugcagucaac

SEQ ID NO: 1238226 - RNA, 19 nt, Homo sapiens
  misc_RNA (1)...(19): siRNA sense strand
gaagacacacggguucaca

SEQ ID NO: 1238227 - RNA, 19 nt, Homo sapiens
  misc_RNA (1)...(19): siRNA sense strand
ucaucaagcucaacguucu

SEQ ID NO: 1238228 - RNA, 19 nt, Homo sapiens
  misc_RNA (1)...(19): siRNA sense strand
acaucgacuuugacaguuu

SEQ ID NO: 1238229 - RNA, 19 nt, Homo sapiens
  misc_RNA (1)...(19): siRNA sense strand
gcuacgagaugcgaaaugc

SEQ ID NO: 1238230 - RNA, 19 nt, Homo sapiens
  misc_RNA (1)...(19): siRNA sense strand
uuaacacagucgugaacaa

SEQ ID NO: 1238231 - RNA, 19 nt, Homo sapiens
  misc_RNA (1)...(19): siRNA sense strand
ugaggaacagcaacaauuc

SEQ ID NO: 1238232 - RNA, 19 nt, Homo sapiens
  misc_RNA (1)...(19): siRNA sense strand
caucgacuuugacaguuuc

SEQ ID NO: 1238233 - RNA, 19 nt, Homo sapiens
  misc_RNA (1)...(19): siRNA sense strand
gauuccaccucaacaacca

SEQ ID NO: 1238234 - RNA, 19 nt, Homo sapiens
  misc_RNA (1)...(19): siRNA sense strand
uucaucugcugcuucguua

SEQ ID NO: 1238235 - RNA, 19 nt, Homo sapiens
  misc_RNA (1)...(19): siRNA sense strand
ucaaacacuaugacacaga

SEQ ID NO: 1238236 - RNA, 19 nt, Homo sapiens
  misc_RNA (1)...(19): siRNA sense strand
aaacacaaggaccugaaga

SEQ ID NO: 1238237 - RNA, 19 nt, Homo sapiens
  misc_RNA (1)...(19): siRNA sense strand
uaucaucaagcucaacguu

SEQ ID NO: 1238238 - RNA, 19 nt, Homo sapiens
  misc_RNA (1)...(19): siRNA sense strand
guccugccguagcaugauu

SEQ ID NO: 1238239 - RNA, 19 nt, Homo sapiens
  misc_RNA (1)...(19): siRNA sense strand
cagacaaacacaugaacau

SEQ ID NO: 1238240 - RNA, 19 nt, Homo sapiens
  misc_RNA (1)...(19): siRNA sense strand
gcaggauuccaccucaaca

SEQ ID NO: 1238241 - RNA, 19 nt, Homo sapiens
  misc_RNA (1)...(19): siRNA sense strand
gaccaguccggcaccauca

SEQ ID NO: 1238242 - RNA, 19 nt, Homo sapiens
  misc_RNA (1)...(19): siRNA sense strand
caacaaccagcucuaugac

SEQ ID NO: 1238243 - RNA, 19 nt, Homo sapiens
  misc_RNA (1)...(19): siRNA sense strand
ucaggaaagugaggaacag

SEQ ID NO: 1238244 - RNA, 19 nt, Homo sapiens
  misc_RNA (1)...(19): siRNA sense strand
gacaaggauggagauggua

SEQ ID NO: 1238245 - RNA, 19 nt, Homo sapiens
  misc_RNA (1)...(19): siRNA sense strand
cgacuuugacaguuucauc

SEQ ID NO: 1238246 - RNA, 19 nt, Homo sapiens
  misc_RNA (1)...(19): siRNA sense strand
aaccagcucuaugacauca

SEQ ID NO: 1238247 - RNA, 19 nt, Homo sapiens
  misc_RNA (1)...(19): siRNA sense strand
agucaacgacgcaggauuc

SEQ ID NO: 1238248 - RNA, 19 nt, Homo sapiens
  misc_RNA (1)...(19): siRNA sense strand
uuucaaacacuaugacaca

SEQ ID NO: 1238249 - RNA, 19 nt, Homo sapiens
  misc_RNA (1)...(19): siRNA sense strand
acaaacacaaggaccugaa

SEQ ID NO: 1238250 - RNA, 19 nt, Homo sapiens
  misc_RNA (1)...(19): siRNA sense strand
caacaauuccggaacauuu

SEQ ID NO: 1238251 - RNA, 19 nt, Homo sapiens
  misc_RNA (1)...(19): siRNA sense strand
gaacaucgacuuugacagu

SEQ ID NO: 1238252 - RNA, 19 nt, Homo sapiens
  misc_RNA (1)...(19): siRNA sense strand
cagaugagcucaagaaggu

SEQ ID NO: 1238253 - RNA, 19 nt, Homo sapiens
  misc_RNA (1)...(19): siRNA sense strand
acaaggaccugaagacaca

SEQ ID NO: 1238254 - RNA, 19 nt, Homo sapiens
  misc_RNA (1)...(19): siRNA sense strand
gcucugaucaggaaaguga

SEQ ID NO: 1238255 - RNA, 19 nt, Homo sapiens
  misc_RNA (1)...(19): siRNA sense strand
ucaacaaccagcucuauga

SEQ ID NO: 1238256 - RNA, 19 nt, Homo sapiens
  misc_RNA (1)...(19): siRNA sense strand
ggcugcagcucaccaugua

SEQ ID NO: 1238257 - RNA, 19 nt, Homo sapiens
  misc_RNA (1)...(19): siRNA sense strand
ugacaaggauggagauggu

SEQ ID NO: 1238258 - RNA, 19 nt, Homo sapiens
  misc_RNA (1)...(19): siRNA sense strand
acaugaacaucgacuuuga

SEQ ID NO: 1238259 - RNA, 19 nt, Homo sapiens
  misc_RNA (1)...(19): siRNA sense strand
uggcagcucugaucaggaa

SEQ ID NO: 1238260 - RNA, 19 nt, Homo sapiens
  misc_RNA (1)...(19): siRNA sense strand
cagcaacaauuccggaaca

SEQ ID NO: 1238261 - RNA, 19 nt, Homo sapiens
  misc_RNA (1)...(19): siRNA sense strand
gcagauagcaggagaugac

SEQ ID NO: 1238262 - RNA, 19 nt, Homo sapiens
  misc_RNA (1)...(19): siRNA sense strand
uaacacagucgugaacaaa

SEQ ID NO: 1238263 - RNA, 19 nt, Homo sapiens
  misc_RNA (1)...(19): siRNA sense strand
gauuaaggccuggcagaaa

SEQ ID NO: 1238264 - RNA, 19 nt, Homo sapiens
  misc_RNA (1)...(19): siRNA sense strand
gugaggaacagcaacaauu

SEQ ID NO: 1238265 - RNA, 19 nt, Homo sapiens
  misc_RNA (1)...(19): siRNA sense strand
acaaacacaugaacaucga

SEQ ID NO: 1238266 - RNA, 19 nt, Homo sapiens
  misc_RNA (1)...(19): siRNA sense strand
caccaccucuggaacaaga

SEQ ID NO: 1238267 - RNA, 19 nt, Homo sapiens
  misc_RNA (1)...(19): siRNA sense strand
gagggcauguucagagcuu

SEQ ID NO: 1238268 - RNA, 19 nt, Homo sapiens
  misc_RNA (1)...(19): siRNA sense strand
ggaaagugaggaacagcaa

SEQ ID NO: 1238269 - RNA, 19 nt, Homo sapiens
  misc_RNA (1)...(19): siRNA sense strand
gauagcaggagaugacaug

SEQ ID NO: 1238270 - RNA, 19 nt, Homo sapiens
  misc_RNA (1)...(19): siRNA sense strand
ugauugcgcucauggauac

SEQ ID NO: 1238271 - RNA, 19 nt, Homo sapiens
  misc_RNA (1)...(19): siRNA sense strand
acacaugaacaucgacuuu

SEQ ID NO: 1238272 - RNA, 19 nt, Homo sapiens
  misc_RNA (1)...(19): siRNA sense strand
acacagucgugaacaaaca

SEQ ID NO: 1238273 - RNA, 19 nt, Homo sapiens
  misc_RNA (1)...(19): siRNA sense strand
guacgcagacaaacacaug

SEQ ID NO: 1238274 - RNA, 19 nt, Homo sapiens
  misc_RNA (1)...(19): siRNA sense strand
gugcagaugagcucaagaa

SEQ ID NO: 1238275 - RNA, 19 nt, Homo sapiens
  misc_RNA (1)...(19): siRNA sense strand
acaaccagcucuaugacau

SEQ ID NO: 1238276 - RNA, 19 nt, Homo sapiens
  misc_RNA (1)...(19): siRNA sense strand
gcaacaauuccggaacauu

SEQ ID NO: 1238277 - RNA, 19 nt, Homo sapiens
  misc_RNA (1)...(19): siRNA sense strand
guucagagcuuuucaugca

SEQ ID NO: 1238278 - RNA, 19 nt, Homo sapiens
  misc_RNA (1)...(19): siRNA sense strand
gcagacaaacacaugaaca

SEQ ID NO: 1238279 - RNA, 19 nt, Homo sapiens
  misc_RNA (1)...(19): siRNA sense strand
gaugcgaaaugcagucaac

SEQ ID NO: 1238280 - RNA, 19 nt, Homo sapiens
  misc_RNA (1)...(19): siRNA sense strand
gaagacacacggguucaca

SEQ ID NO: 1238281 - RNA, 19 nt, Homo sapiens
  misc_RNA (1)...(19): siRNA sense strand
ucaucaagcucaacguucu

SEQ ID NO: 1238282 - RNA, 19 nt, Homo sapiens
  misc_RNA (1)...(19): siRNA sense strand
acaucgacuuugacaguuu

SEQ ID NO: 1238283 - RNA, 19 nt, Homo sapiens
  misc_RNA (1)...(19): siRNA sense strand
gcuacgagaugcgaaaugc

SEQ ID NO: 1238284 - RNA, 19 nt, Homo sapiens
  misc_RNA (1)...(19): siRNA sense strand
uuaacacagucgugaacaa

SEQ ID NO: 1238285 - RNA, 19 nt, Homo sapiens
  misc_RNA (1)...(19): siRNA sense strand
ugaggaacagcaacaauuc

SEQ ID NO: 1238286 - RNA, 19 nt, Homo sapiens
  misc_RNA (1)...(19): siRNA sense strand
caucgacuuugacaguuuc

SEQ ID NO: 1238287 - RNA, 19 nt, Homo sapiens
  misc_RNA (1)...(19): siRNA sense strand
gauuccaccucaacaacca

SEQ ID NO: 1238288 - RNA, 19 nt, Homo sapiens
  misc_RNA (1)...(19): siRNA sense strand
uucaucugcugcuucguua

SEQ ID NO: 1238289 - RNA, 19 nt, Homo sapiens
  misc_RNA (1)...(19): siRNA sense strand
ucaaacacuaugacacaga

SEQ ID NO: 1238290 - RNA, 19 nt, Homo sapiens
  misc_RNA (1)...(19): siRNA sense strand
aaacacaaggaccugaaga

SEQ ID NO: 1238291 - RNA, 19 nt, Homo sapiens
  misc_RNA (1)...(19): siRNA sense strand
uaucaucaagcucaacguu

SEQ ID NO: 1238292 - RNA, 19 nt, Homo sapiens
  misc_RNA (1)...(19): siRNA sense strand
guccugccguagcaugauu

SEQ ID NO: 1238293 - RNA, 19 nt, Homo sapiens
  misc_RNA (1)...(19): siRNA sense strand
cagacaaacacaugaacau

SEQ ID NO: 1238294 - RNA, 19 nt, Homo sapiens
  misc_RNA (1)...(19): siRNA sense strand
gcaggauuccaccucaaca

SEQ ID NO: 1238295 - RNA, 19 nt, Homo sapiens
  misc_RNA (1)...(19): siRNA sense strand
gaccaguccggcaccauca

SEQ ID NO: 1238296 - RNA, 19 nt, Homo sapiens
  misc_RNA (1)...(19): siRNA sense strand
caacaaccagcucuaugac

SEQ ID NO: 1238297 - RNA, 19 nt, Homo sapiens
  misc_RNA (1)...(19): siRNA sense strand
ucaggaaagugaggaacag

SEQ ID NO: 1238298 - RNA, 19 nt, Homo sapiens
  misc_RNA (1)...(19): siRNA sense strand
gacaaggauggagauggua

SEQ ID NO: 1238299 - RNA, 19 nt, Homo sapiens
  misc_RNA (1)...(19): siRNA sense strand
cgacuuugacaguuucauc

SEQ ID NO: 1238300 - RNA, 19 nt, Homo sapiens
  misc_RNA (1)...(19): siRNA sense strand
aaccagcucuaugacauca

SEQ ID NO: 1238301 - RNA, 19 nt, Homo sapiens
  misc_RNA (1)...(19): siRNA sense strand
agucaacgacgcaggauuc

SEQ ID NO: 1238302 - RNA, 19 nt, Homo sapiens
  misc_RNA (1)...(19): siRNA sense strand
uuucaaacacuaugacaca

SEQ ID NO: 1238303 - RNA, 19 nt, Homo sapiens
  misc_RNA (1)...(19): siRNA sense strand
acaaacacaaggaccugaa

SEQ ID NO: 1238304 - RNA, 19 nt, Homo sapiens
  misc_RNA (1)...(19): siRNA sense strand
caacaauuccggaacauuu

SEQ ID NO: 1238305 - RNA, 19 nt, Homo sapiens
  misc_RNA (1)...(19): siRNA sense strand
gaacaucgacuuugacagu

SEQ ID NO: 1238306 - RNA, 19 nt, Homo sapiens
  misc_RNA (1)...(19): siRNA sense strand
cagaugagcucaagaaggu

SEQ ID NO: 1238307 - RNA, 19 nt, Homo sapiens
  misc_RNA (1)...(19): siRNA sense strand
acaaggaccugaagacaca

SEQ ID NO: 1238308 - RNA, 19 nt, Homo sapiens
  misc_RNA (1)...(19): siRNA sense strand
gcucugaucaggaaaguga

SEQ ID NO: 1238309 - RNA, 19 nt, Homo sapiens
  misc_RNA (1)...(19): siRNA sense strand
ucaacaaccagcucuauga

SEQ ID NO: 1238310 - RNA, 19 nt, Homo sapiens
  misc_RNA (1)...(19): siRNA sense strand
ggcugcagcucaccaugua

SEQ ID NO: 1238311 - RNA, 19 nt, Homo sapiens
  misc_RNA (1)...(19): siRNA sense strand
ugacaaggauggagauggu

SEQ ID NO: 1238312 - RNA, 19 nt, Homo sapiens
  misc_RNA (1)...(19): siRNA sense strand
acaugaacaucgacuuuga

SEQ ID NO: 1238313 - RNA, 19 nt, Homo sapiens
  misc_RNA (1)...(19): siRNA sense strand
uggcagcucugaucaggaa

SEQ ID NO: 1238314 - RNA, 19 nt, Homo sapiens
  misc_RNA (1)...(19): siRNA sense strand
cagcaacaauuccggaaca

SEQ ID NO: 1238315 - RNA, 19 nt, Homo sapiens
  misc_RNA (1)...(19): siRNA sense strand
gcagauagcaggagaugac

SEQ ID NO: 1238316 - RNA, 19 nt, Homo sapiens
  misc_RNA (1)...(19): siRNA sense strand
uaacacagucgugaacaaa

SEQ ID NO: 1238317 - RNA, 19 nt, Homo sapiens
  misc_RNA (1)...(19): siRNA sense strand
gauuaaggccuggcagaaa

SEQ ID NO: 1238318 - RNA, 19 nt, Homo sapiens
  misc_RNA (1)...(19): siRNA sense strand
gugaggaacagcaacaauu

SEQ ID NO: 1238319 - RNA, 19 nt, Homo sapiens
  misc_RNA (1)...(19): siRNA sense strand
acaaacacaugaacaucga

SEQ ID NO: 1238320 - RNA, 19 nt, Homo sapiens
  misc_RNA (1)...(19): siRNA sense strand
caccaccucuggaacaaga

SEQ ID NO: 1238321 - RNA, 19 nt, Homo sapiens
  misc_RNA (1)...(19): siRNA sense strand
gagggcauguucagagcuu

SEQ ID NO: 1238322 - RNA, 19 nt, Homo sapiens
  misc_RNA (1)...(19): siRNA sense strand
ggaaagugaggaacagcaa

SEQ ID NO: 1238323 - RNA, 19 nt, Homo sapiens
  misc_RNA (1)...(19): siRNA sense strand
gauagcaggagaugacaug

SEQ ID NO: 1238324 - RNA, 19 nt, Homo sapiens
  misc_RNA (1)...(19): siRNA sense strand
ugauugcgcucauggauac

SEQ ID NO: 1238325 - RNA, 19 nt, Homo sapiens
  misc_RNA (1)...(19): siRNA sense strand
acacaugaacaucgacuuu

SEQ ID NO: 1238326 - RNA, 19 nt, Homo sapiens
  misc_RNA (1)...(19): siRNA sense strand
acacagucgugaacaaaca

SEQ ID NO: 1238327 - RNA, 19 nt, Homo sapiens
  misc_RNA (1)...(19): siRNA sense strand
guacgcagacaaacacaug

SEQ ID NO: 1238328 - RNA, 19 nt, Homo sapiens
  misc_RNA (1)...(19): siRNA sense strand
gugcagaugagcucaagaa

SEQ ID NO: 1238329 - RNA, 19 nt, Homo sapiens
  misc_RNA (1)...(19): siRNA sense strand
acaaccagcucuaugacau

SEQ ID NO: 1238330 - RNA, 19 nt, Homo sapiens
  misc_RNA (1)...(19): siRNA sense strand
gcaacaauuccggaacauu

SEQ ID NO: 1238331 - RNA, 19 nt, Homo sapiens
  misc_RNA (1)...(19): siRNA sense strand
guucagagcuuuucaugca

SEQ ID NO: 1238332 - RNA, 19 nt, Homo sapiens
  misc_RNA (1)...(19): siRNA sense strand
gcagacaaacacaugaaca

SEQ ID NO: 1238333 - RNA, 19 nt, Homo sapiens
  misc_RNA (1)...(19): siRNA sense strand
gaugcgaaaugcagucaac

SEQ ID NO: 1238334 - RNA, 19 nt, Homo sapiens
  misc_RNA (1)...(19): siRNA sense strand
gaagacacacggguucaca

SEQ ID NO: 1238335 - RNA, 19 nt, Homo sapiens
  misc_RNA (1)...(19): siRNA sense strand
ucaucaagcucaacguucu

SEQ ID NO: 1238336 - RNA, 19 nt, Homo sapiens
  misc_RNA (1)...(19): siRNA sense strand
acaucgacuuugacaguuu

SEQ ID NO: 1238337 - RNA, 19 nt, Homo sapiens
  misc_RNA (1)...(19): siRNA sense strand
gcuacgagaugcgaaaugc

SEQ ID NO: 1238338 - RNA, 19 nt, Homo sapiens
  misc_RNA (1)...(19): siRNA sense strand
uuaacacagucgugaacaa

SEQ ID NO: 1238339 - RNA, 19 nt, Homo sapiens
  misc_RNA (1)...(19): siRNA sense strand
ugaggaacagcaacaauuc

SEQ ID NO: 1238340 - RNA, 19 nt, Homo sapiens
  misc_RNA (1)...(19): siRNA sense strand
caucgacuuugacaguuuc

SEQ ID NO: 1238341 - RNA, 19 nt, Homo sapiens
  misc_RNA (1)...(19): siRNA sense strand
gauuccaccucaacaacca

SEQ ID NO: 1238342 - RNA, 19 nt, Homo sapiens
  misc_RNA (1)...(19): siRNA sense strand
uucaucugcugcuucguua

SEQ ID NO: 1238343 - RNA, 19 nt, Homo sapiens
  misc_RNA (1)...(19): siRNA sense strand
ucaaacacuaugacacaga

SEQ ID NO: 1238344 - RNA, 19 nt, Homo sapiens
  misc_RNA (1)...(19): siRNA sense strand
aaacacaaggaccugaaga

SEQ ID NO: 1238345 - RNA, 19 nt, Homo sapiens
  misc_RNA (1)...(19): siRNA sense strand
uaucaucaagcucaacguu

SEQ ID NO: 1238346 - RNA, 19 nt, Homo sapiens
  misc_RNA (1)...(19): siRNA sense strand
guccugccguagcaugauu

SEQ ID NO: 1238347 - RNA, 19 nt, Homo sapiens
  misc_RNA (1)...(19): siRNA sense strand
cagacaaacacaugaacau

SEQ ID NO: 1238348 - RNA, 19 nt, Homo sapiens
  misc_RNA (1)...(19): siRNA sense strand
gcaggauuccaccucaaca

SEQ ID NO: 1238349 - RNA, 19 nt, Homo sapiens
  misc_RNA (1)...(19): siRNA sense strand
gaccaguccggcaccauca

SEQ ID NO: 1238350 - RNA, 19 nt, Homo sapiens
  misc_RNA (1)...(19): siRNA sense strand
caacaaccagcucuaugac

SEQ ID NO: 1238351 - RNA, 19 nt, Homo sapiens
  misc_RNA (1)...(19): siRNA sense strand
ucaggaaagugaggaacag

SEQ ID NO: 1238352 - RNA, 19 nt, Homo sapiens
  misc_RNA (1)...(19): siRNA sense strand
gacaaggauggagauggua

SEQ ID NO: 1238353 - RNA, 19 nt, Homo sapiens
  misc_RNA (1)...(19): siRNA sense strand
cgacuuugacaguuucauc

SEQ ID NO: 1238354 - RNA, 19 nt, Homo sapiens
  misc_RNA (1)...(19): siRNA sense strand
aaccagcucuaugacauca

SEQ ID NO: 1238355 - RNA, 19 nt, Homo sapiens
  misc_RNA (1)...(19): siRNA sense strand
agucaacgacgcaggauuc

SEQ ID NO: 1238356 - RNA, 19 nt, Homo sapiens
  misc_RNA (1)...(19): siRNA sense strand
uuucaaacacuaugacaca

SEQ ID NO: 1238357 - RNA, 19 nt, Homo sapiens
  misc_RNA (1)...(19): siRNA sense strand
acaaacacaaggaccugaa

SEQ ID NO: 1238358 - RNA, 19 nt, Homo sapiens
  misc_RNA (1)...(19): siRNA sense strand
caacaauuccggaacauuu

SEQ ID NO: 1238359 - RNA, 19 nt, Homo sapiens
  misc_RNA (1)...(19): siRNA sense strand
gaacaucgacuuugacagu

SEQ ID NO: 1238360 - RNA, 19 nt, Homo sapiens
  misc_RNA (1)...(19): siRNA sense strand
cagaugagcucaagaaggu

SEQ ID NO: 1238361 - RNA, 19 nt, Homo sapiens
  misc_RNA (1)...(19): siRNA sense strand
acaaggaccugaagacaca

SEQ ID NO: 1238362 - RNA, 19 nt, Homo sapiens
  misc_RNA (1)...(19): siRNA sense strand
gcucugaucaggaaaguga

SEQ ID NO: 1238363 - RNA, 19 nt, Homo sapiens
  misc_RNA (1)...(19): siRNA sense strand
ucaacaaccagcucuauga

SEQ ID NO: 1238364 - RNA, 19 nt, Homo sapiens
  misc_RNA (1)...(19): siRNA sense strand
ggcugcagcucaccaugua

SEQ ID NO: 1238365 - RNA, 19 nt, Homo sapiens
  misc_RNA (1)...(19): siRNA sense strand
ugacaaggauggagauggu

SEQ ID NO: 1238366 - RNA, 19 nt, Homo sapiens
  misc_RNA (1)...(19): siRNA sense strand
acaugaacaucgacuuuga

SEQ ID NO: 1238367 - RNA, 19 nt, Homo sapiens
  misc_RNA (1)...(19): siRNA sense strand
uggcagcucugaucaggaa

SEQ ID NO: 1238368 - RNA, 19 nt, Homo sapiens
  misc_RNA (1)...(19): siRNA sense strand
cagcaacaauuccggaaca

SEQ ID NO: 1238369 - RNA, 19 nt, Homo sapiens
  misc_RNA (1)...(19): siRNA sense strand
gcagauagcaggagaugac

SEQ ID NO: 1238370 - RNA, 19 nt, Homo sapiens
  misc_RNA (1)...(19): siRNA sense strand
uaacacagucgugaacaaa

SEQ ID NO: 1238371 - RNA, 19 nt, Homo sapiens
  misc_RNA (1)...(19): siRNA sense strand
gauuaaggccuggcagaaa

SEQ ID NO: 1238372 - RNA, 19 nt, Homo sapiens
  misc_RNA (1)...(19): siRNA sense strand
gugaggaacagcaacaauu

SEQ ID NO: 1238373 - RNA, 19 nt, Homo sapiens
  misc_RNA (1)...(19): siRNA sense strand
acaaacacaugaacaucga

SEQ ID NO: 1238374 - RNA, 19 nt, Homo sapiens
  misc_RNA (1)...(19): siRNA sense strand
caccaccucuggaacaaga

SEQ ID NO: 1238375 - RNA, 19 nt, Homo sapiens
  misc_RNA (1)...(19): siRNA sense strand
gagggcauguucagagcuu

SEQ ID NO: 1238376 - RNA, 19 nt, Homo sapiens
  misc_RNA (1)...(19): siRNA sense strand
ggaaagugaggaacagcaa

SEQ ID NO: 1238377 - RNA, 19 nt, Homo sapiens
  misc_RNA (1)...(19): siRNA sense strand
gauagcaggagaugacaug

SEQ ID NO: 1238378 - RNA, 19 nt, Homo sapiens
  misc_RNA (1)...(19): siRNA sense strand
ugauugcgcucauggauac

SEQ ID NO: 1238379 - RNA, 19 nt, Homo sapiens
  misc_RNA (1)...(19): siRNA sense strand
acacaugaacaucgacuuu

SEQ ID NO: 1238380 - RNA, 19 nt, Homo sapiens
  misc_RNA (1)...(19): siRNA sense strand
acacagucgugaacaaaca

SEQ ID NO: 1238381 - RNA, 19 nt, Homo sapiens
  misc_RNA (1)...(19): siRNA sense strand
guacgcagacaaacacaug

SEQ ID NO: 1238382 - RNA, 19 nt, Homo sapiens
  misc_RNA (1)...(19): siRNA sense strand
gugcagaugagcucaagaa

SEQ ID NO: 1238383 - RNA, 19 nt, Homo sapiens
  misc_RNA (1)...(19): siRNA sense strand
acaaccagcucuaugacau

SEQ ID NO: 1238384 - RNA, 19 nt, Homo sapiens
  misc_RNA (1)...(19): siRNA sense strand
gcaacaauuccggaacauu

SEQ ID NO: 1238385 - RNA, 19 nt, Homo sapiens
  misc_RNA (1)...(19): siRNA sense strand
guucagagcuuuucaugca

SEQ ID NO: 1238386 - RNA, 19 nt, Homo sapiens
  misc_RNA (1)...(19): siRNA sense strand
gcagacaaacacaugaaca

SEQ ID NO: 1238387 - RNA, 19 nt, Homo sapiens
  misc_RNA (1)...(19): siRNA sense strand
gaugcgaaaugcagucaac

SEQ ID NO: 1238388 - RNA, 19 nt, Homo sapiens
  misc_RNA (1)...(19): siRNA sense strand
gaagacacacggguucaca

SEQ ID NO: 1238389 - RNA, 19 nt, Homo sapiens
  misc_RNA (1)...(19): siRNA sense strand
ucaucaagcucaacguucu

SEQ ID NO: 1238390 - RNA, 19 nt, Homo sapiens
  misc_RNA (1)...(19): siRNA sense strand
acaucgacuuugacaguuu

SEQ ID NO: 1238391 - RNA, 19 nt, Homo sapiens
  misc_RNA (1)...(19): siRNA sense strand
gcuacgagaugcgaaaugc

SEQ ID NO: 1238392 - RNA, 19 nt, Homo sapiens
  misc_RNA (1)...(19): siRNA sense strand
uuaacacagucgugaacaa

SEQ ID NO: 1238393 - RNA, 19 nt, Homo sapiens
  misc_RNA (1)...(19): siRNA sense strand
ugaggaacagcaacaauuc

SEQ ID NO: 1238394 - RNA, 19 nt, Homo sapiens
  misc_RNA (1)...(19): siRNA sense strand
caucgacuuugacaguuuc

SEQ ID NO: 1238395 - RNA, 19 nt, Homo sapiens
  misc_RNA (1)...(19): siRNA sense strand
gauuccaccucaacaacca

SEQ ID NO: 1238396 - RNA, 19 nt, Homo sapiens
  misc_RNA (1)...(19): siRNA sense strand
uucaucugcugcuucguua

SEQ ID NO: 1238397 - RNA, 19 nt, Homo sapiens
  misc_RNA (1)...(19): siRNA sense strand
ucaaacacuaugacacaga

SEQ ID NO: 1238398 - RNA, 19 nt, Homo sapiens
  misc_RNA (1)...(19): siRNA sense strand
aaacacaaggaccugaaga

SEQ ID NO: 1238399 - RNA, 19 nt, Homo sapiens
  misc_RNA (1)...(19): siRNA sense strand
uaucaucaagcucaacguu

SEQ ID NO: 1238400 - RNA, 19 nt, Homo sapiens
  misc_RNA (1)...(19): siRNA sense strand
guccugccguagcaugauu

SEQ ID NO: 1238401 - RNA, 19 nt, Homo sapiens
  misc_RNA (1)...(19): siRNA sense strand
cagacaaacacaugaacau

SEQ ID NO: 1238402 - RNA, 19 nt, Homo sapiens
  misc_RNA (1)...(19): siRNA sense strand
gcaggauuccaccucaaca

SEQ ID NO: 1238403 - RNA, 19 nt, Homo sapiens
  misc_RNA (1)...(19): siRNA sense strand
gaccaguccggcaccauca

SEQ ID NO: 1238404 - RNA, 19 nt, Homo sapiens
  misc_RNA (1)...(19): siRNA sense strand
caacaaccagcucuaugac

SEQ ID NO: 1238405 - RNA, 19 nt, Homo sapiens
  misc_RNA (1)...(19): siRNA sense strand
ucaggaaagugaggaacag

SEQ ID NO: 1238406 - RNA, 19 nt, Homo sapiens
  misc_RNA (1)...(19): siRNA sense strand
gacaaggauggagauggua

SEQ ID NO: 1238407 - RNA, 19 nt, Homo sapiens
  misc_RNA (1)...(19): siRNA sense strand
cgacuuugacaguuucauc

SEQ ID NO: 1238408 - RNA, 19 nt, Homo sapiens
  misc_RNA (1)...(19): siRNA sense strand
aaccagcucuaugacauca

SEQ ID NO: 1238409 - RNA, 19 nt, Homo sapiens
  misc_RNA (1)...(19): siRNA sense strand
agucaacgacgcaggauuc

SEQ ID NO: 1238410 - RNA, 19 nt, Homo sapiens
  misc_RNA (1)...(19): siRNA sense strand
uuucaaacacuaugacaca

SEQ ID NO: 1238411 - RNA, 19 nt, Homo sapiens
  misc_RNA (1)...(19): siRNA sense strand
acaaacacaaggaccugaa

SEQ ID NO: 1238412 - RNA, 19 nt, Homo sapiens
  misc_RNA (1)...(19): siRNA sense strand
gaacaucgacuuugacagu

SEQ ID NO: 1238413 - RNA, 19 nt, Homo sapiens
  misc_RNA (1)...(19): siRNA sense strand
cagaugagcucaagaaggu

SEQ ID NO: 1238414 - RNA, 19 nt, Homo sapiens
  misc_RNA (1)...(19): siRNA sense strand
acaaggaccugaagacaca

SEQ ID NO: 1238415 - RNA, 19 nt, Homo sapiens
  misc_RNA (1)...(19): siRNA sense strand
ucaacaaccagcucuauga

SEQ ID NO: 1238416 - RNA, 19 nt, Homo sapiens
  misc_RNA (1)...(19): siRNA sense strand
ggcugcagcucaccaugua

SEQ ID NO: 1238417 - RNA, 19 nt, Homo sapiens
  misc_RNA (1)...(19): siRNA sense strand
ugacaaggauggagauggu

SEQ ID NO: 1238418 - RNA, 19 nt, Homo sapiens
  misc_RNA (1)...(19): siRNA sense strand
acaugaacaucgacuuuga

SEQ ID NO: 1238419 - RNA, 19 nt, Homo sapiens
  misc_RNA (1)...(19): siRNA sense strand
uaacacagucgugaacaaa

SEQ ID NO: 1238420 - RNA, 19 nt, Homo sapiens
  misc_RNA (1)...(19): siRNA sense strand
gauuaaggccuggcagaaa

SEQ ID NO: 1238421 - RNA, 19 nt, Homo sapiens
  misc_RNA (1)...(19): siRNA sense strand
acaaacacaugaacaucga

SEQ ID NO: 1238422 - RNA, 19 nt, Homo sapiens
  misc_RNA (1)...(19): siRNA sense strand
caccaccucuggaacaaga

SEQ ID NO: 1238423 - RNA, 19 nt, Homo sapiens
  misc_RNA (1)...(19): siRNA sense strand
gagggcauguucagagcuu

SEQ ID NO: 1238424 - RNA, 19 nt, Homo sapiens
  misc_RNA (1)...(19): siRNA sense strand
ugauugcgcucauggauac

SEQ ID NO: 1238425 - RNA, 19 nt, Homo sapiens
  misc_RNA (1)...(19): siRNA sense strand
acacaugaacaucgacuuu

SEQ ID NO: 1238426 - RNA, 19 nt, Homo sapiens
  misc_RNA (1)...(19): siRNA sense strand
acacagucgugaacaaaca

SEQ ID NO: 1238427 - RNA, 19 nt, Homo sapiens
  misc_RNA (1)...(19): siRNA sense strand
guacgcagacaaacacaug

SEQ ID NO: 1238428 - RNA, 19 nt, Homo sapiens
  misc_RNA (1)...(19): siRNA sense strand
gugcagaugagcucaagaa

SEQ ID NO: 1238429 - RNA, 19 nt, Homo sapiens
  misc_RNA (1)...(19): siRNA sense strand
acaaccagcucuaugacau

SEQ ID NO: 1238430 - RNA, 19 nt, Homo sapiens
  misc_RNA (1)...(19): siRNA sense strand
guucagagcuuuucaugca

SEQ ID NO: 1238431 - RNA, 19 nt, Homo sapiens
  misc_RNA (1)...(19): siRNA sense strand
gcagacaaacacaugaaca

SEQ ID NO: 1238432 - RNA, 19 nt, Homo sapiens
  misc_RNA (1)...(19): siRNA sense strand
gaugcgaaaugcagucaac

SEQ ID NO: 1238433 - RNA, 19 nt, Homo sapiens
  misc_RNA (1)...(19): siRNA sense strand
gaagacacacggguucaca

SEQ ID NO: 1238434 - RNA, 19 nt, Homo sapiens
  misc_RNA (1)...(19): siRNA sense strand
ucaucaagcucaacguucu

SEQ ID NO: 1238435 - RNA, 19 nt, Homo sapiens
  misc_RNA (1)...(19): siRNA sense strand
acaucgacuuugacaguuu

SEQ ID NO: 1238436 - RNA, 19 nt, Homo sapiens
  misc_RNA (1)...(19): siRNA sense strand
gcuacgagaugcgaaaugc

SEQ ID NO: 1238437 - RNA, 19 nt, Homo sapiens
  misc_RNA (1)...(19): siRNA sense strand
uuaacacagucgugaacaa

SEQ ID NO: 1238438 - RNA, 19 nt, Homo sapiens
  misc_RNA (1)...(19): siRNA sense strand
caucgacuuugacaguuuc

SEQ ID NO: 1238439 - RNA, 19 nt, Homo sapiens
  misc_RNA (1)...(19): siRNA sense strand
gauuccaccucaacaacca

SEQ ID NO: 1238440 - RNA, 19 nt, Homo sapiens
  misc_RNA (1)...(19): siRNA sense strand
uucaucugcugcuucguua

SEQ ID NO: 1238441 - RNA, 19 nt, Homo sapiens
  misc_RNA (1)...(19): siRNA sense strand
ucaaacacuaugacacaga

SEQ ID NO: 1238442 - RNA, 19 nt, Homo sapiens
  misc_RNA (1)...(19): siRNA sense strand
aaacacaaggaccugaaga

SEQ ID NO: 1238443 - RNA, 19 nt, Homo sapiens
  misc_RNA (1)...(19): siRNA sense strand
uaucaucaagcucaacguu

SEQ ID NO: 1238444 - RNA, 19 nt, Homo sapiens
  misc_RNA (1)...(19): siRNA sense strand
guccugccguagcaugauu

SEQ ID NO: 1238445 - RNA, 19 nt, Homo sapiens
  misc_RNA (1)...(19): siRNA sense strand
cagacaaacacaugaacau

SEQ ID NO: 1238446 - RNA, 19 nt, Homo sapiens
  misc_RNA (1)...(19): siRNA sense strand
gcaggauuccaccucaaca

SEQ ID NO: 1238447 - RNA, 19 nt, Homo sapiens
  misc_RNA (1)...(19): siRNA sense strand
gaccaguccggcaccauca

SEQ ID NO: 1238448 - RNA, 19 nt, Homo sapiens
  misc_RNA (1)...(19): siRNA sense strand
caacaaccagcucuaugac

SEQ ID NO: 1238449 - RNA, 19 nt, Homo sapiens
  misc_RNA (1)...(19): siRNA sense strand
uuucaaacacuaugacaca

SEQ ID NO: 1238450 - RNA, 19 nt, Homo sapiens
  misc_RNA (1)...(19): siRNA sense strand
gacaaggauggagauggua

SEQ ID NO: 1238451 - RNA, 19 nt, Homo sapiens
  misc_RNA (1)...(19): siRNA sense strand
cgacuuugacaguuucauc

SEQ ID NO: 1238452 - RNA, 19 nt, Homo sapiens
  misc_RNA (1)...(19): siRNA sense strand
acaaacacaaggaccugaa

SEQ ID NO: 1238453 - RNA, 19 nt, Homo sapiens
  misc_RNA (1)...(19): siRNA sense strand
aaccagcucuaugacauca

SEQ ID NO: 1238454 - RNA, 19 nt, Homo sapiens
  misc_RNA (1)...(19): siRNA sense strand
agucaacgacgcaggauuc

SEQ ID NO: 1238455 - RNA, 19 nt, Homo sapiens
  misc_RNA (1)...(19): siRNA sense strand
gaacaucgacuuugacagu

SEQ ID NO: 1238456 - RNA, 19 nt, Homo sapiens
  misc_RNA (1)...(19): siRNA sense strand
cagaugagcucaagaaggu

SEQ ID NO: 1238457 - RNA, 19 nt, Homo sapiens
  misc_RNA (1)...(19): siRNA sense strand
acaaggaccugaagacaca

SEQ ID NO: 1238458 - RNA, 19 nt, Homo sapiens
  misc_RNA (1)...(19): siRNA sense strand
ucaacaaccagcucuauga

SEQ ID NO: 1238459 - RNA, 19 nt, Homo sapiens
  misc_RNA (1)...(19): siRNA sense strand
ggcugcagcucaccaugua

SEQ ID NO: 1238460 - RNA, 19 nt, Homo sapiens
  misc_RNA (1)...(19): siRNA sense strand
ugacaaggauggagauggu

SEQ ID NO: 1238461 - RNA, 19 nt, Homo sapiens
  misc_RNA (1)...(19): siRNA sense strand
acaugaacaucgacuuuga

SEQ ID NO: 1238462 - RNA, 19 nt, Homo sapiens
  misc_RNA (1)...(19): siRNA sense strand
uaacacagucgugaacaaa

SEQ ID NO: 1238463 - RNA, 19 nt, Homo sapiens
  misc_RNA (1)...(19): siRNA sense strand
gauuaaggccuggcagaaa

SEQ ID NO: 1238464 - RNA, 19 nt, Homo sapiens
  misc_RNA (1)...(19): siRNA sense strand
acaaacacaugaacaucga

SEQ ID NO: 1238465 - RNA, 19 nt, Homo sapiens
  misc_RNA (1)...(19): siRNA sense strand
caccaccucuggaacaaga

SEQ ID NO: 1238466 - RNA, 19 nt, Homo sapiens
  misc_RNA (1)...(19): siRNA sense strand
gagggcauguucagagcuu

SEQ ID NO: 1238467 - RNA, 19 nt, Homo sapiens
  misc_RNA (1)...(19): siRNA sense strand
ugauugcgcucauggauac

SEQ ID NO: 1238468 - RNA, 19 nt, Homo sapiens
  misc_RNA (1)...(19): siRNA sense strand
acacaugaacaucgacuuu

SEQ ID NO: 1238469 - RNA, 19 nt, Homo sapiens
  misc_RNA (1)...(19): siRNA sense strand
acacagucgugaacaaaca

SEQ ID NO: 1238470 - RNA, 19 nt, Homo sapiens
  misc_RNA (1)...(19): siRNA sense strand
guacgcagacaaacacaug

SEQ ID NO: 1238471 - RNA, 19 nt, Homo sapiens
  misc_RNA (1)...(19): siRNA sense strand
gugcagaugagcucaagaa

SEQ ID NO: 1238472 - RNA, 19 nt, Homo sapiens
  misc_RNA (1)...(19): siRNA sense strand
acaaccagcucuaugacau

SEQ ID NO: 1238473 - RNA, 19 nt, Homo sapiens
  misc_RNA (1)...(19): siRNA sense strand
guucagagcuuuucaugca

SEQ ID NO: 1238474 - RNA, 19 nt, Homo sapiens
  misc_RNA (1)...(19): siRNA sense strand
gcagacaaacacaugaaca

SEQ ID NO: 1238475 - RNA, 19 nt, Homo sapiens
  misc_RNA (1)...(19): siRNA sense strand
gaugcgaaaugcagucaac

SEQ ID NO: 1238476 - RNA, 19 nt, Homo sapiens
  misc_RNA (1)...(19): siRNA sense strand
gaagacacacggguucaca

SEQ ID NO: 1238477 - RNA, 19 nt, Homo sapiens
  misc_RNA (1)...(19): siRNA sense strand
ucaucaagcucaacguucu

SEQ ID NO: 1238478 - RNA, 19 nt, Homo sapiens
  misc_RNA (1)...(19): siRNA sense strand
acaucgacuuugacaguuu

SEQ ID NO: 1238479 - RNA, 19 nt, Homo sapiens
  misc_RNA (1)...(19): siRNA sense strand
gcuacgagaugcgaaaugc

SEQ ID NO: 1238480 - RNA, 19 nt, Homo sapiens
  misc_RNA (1)...(19): siRNA sense strand
uuaacacagucgugaacaa

SEQ ID NO: 1238481 - RNA, 19 nt, Homo sapiens
  misc_RNA (1)...(19): siRNA sense strand
caucgacuuugacaguuuc

SEQ ID NO: 1238482 - RNA, 19 nt, Homo sapiens
  misc_RNA (1)...(19): siRNA sense strand
gauuccaccucaacaacca

SEQ ID NO: 1238483 - RNA, 19 nt, Homo sapiens
  misc_RNA (1)...(19): siRNA sense strand
uucaucugcugcuucguua

SEQ ID NO: 1238484 - RNA, 19 nt, Homo sapiens
  misc_RNA (1)...(19): siRNA sense strand
ucaaacacuaugacacaga

SEQ ID NO: 1238485 - RNA, 19 nt, Homo sapiens
  misc_RNA (1)...(19): siRNA sense strand
aaacacaaggaccugaaga

SEQ ID NO: 1238486 - RNA, 19 nt, Homo sapiens
  misc_RNA (1)...(19): siRNA sense strand
uaucaucaagcucaacguu

SEQ ID NO: 1238487 - RNA, 19 nt, Homo sapiens
  misc_RNA (1)...(19): siRNA sense strand
guccugccguagcaugauu

SEQ ID NO: 1238488 - RNA, 19 nt, Homo sapiens
  misc_RNA (1)...(19): siRNA sense strand
cagacaaacacaugaacau

SEQ ID NO: 1238489 - RNA, 19 nt, Homo sapiens
  misc_RNA (1)...(19): siRNA sense strand
gcaggauuccaccucaaca

SEQ ID NO: 1238490 - RNA, 19 nt, Homo sapiens
  misc_RNA (1)...(19): siRNA sense strand
gaccaguccggcaccauca

SEQ ID NO: 1238491 - RNA, 19 nt, Homo sapiens
  misc_RNA (1)...(19): siRNA sense strand
caacaaccagcucuaugac

SEQ ID NO: 1238492 - RNA, 19 nt, Homo sapiens
  misc_RNA (1)...(19): siRNA sense strand
uuucaaacacuaugacaca

SEQ ID NO: 1238493 - RNA, 19 nt, Homo sapiens
  misc_RNA (1)...(19): siRNA sense strand
gacaaggauggagauggua

SEQ ID NO: 1238494 - RNA, 19 nt, Homo sapiens
  misc_RNA (1)...(19): siRNA sense strand
cgacuuugacaguuucauc

SEQ ID NO: 1238495 - RNA, 19 nt, Homo sapiens
  misc_RNA (1)...(19): siRNA sense strand
acaaacacaaggaccugaa

SEQ ID NO: 1238496 - RNA, 19 nt, Homo sapiens
  misc_RNA (1)...(19): siRNA sense strand
aaccagcucuaugacauca

SEQ ID NO: 1238497 - RNA, 19 nt, Homo sapiens
  misc_RNA (1)...(19): siRNA sense strand
agucaacgacgcaggauuc

SEQ ID NO: 1238498 - RNA, 19 nt, Homo sapiens
  misc_RNA (1)...(19): siRNA sense strand
caacaauuccggaacauuu

SEQ ID NO: 1238499 - RNA, 19 nt, Homo sapiens
  misc_RNA (1)...(19): siRNA sense strand
gaacaucgacuuugacagu

SEQ ID NO: 1238500 - RNA, 19 nt, Homo sapiens
  misc_RNA (1)...(19): siRNA sense strand
cagaugagcucaagaaggu

SEQ ID NO: 1238501 - RNA, 19 nt, Homo sapiens
  misc_RNA (1)...(19): siRNA sense strand
acaaggaccugaagacaca

SEQ ID NO: 1238502 - RNA, 19 nt, Homo sapiens
  misc_RNA (1)...(19): siRNA sense strand
gcucugaucaggaaaguga

SEQ ID NO: 1238503 - RNA, 19 nt, Homo sapiens
  misc_RNA (1)...(19): siRNA sense strand
ucaacaaccagcucuauga

SEQ ID NO: 1238504 - RNA, 19 nt, Homo sapiens
  misc_RNA (1)...(19): siRNA sense strand
ggcugcagcucaccaugua

SEQ ID NO: 1238505 - RNA, 19 nt, Homo sapiens
  misc_RNA (1)...(19): siRNA sense strand
ugacaaggauggagauggu

SEQ ID NO: 1238506 - RNA, 19 nt, Homo sapiens
  misc_RNA (1)...(19): siRNA sense strand
acaugaacaucgacuuuga

SEQ ID NO: 1238507 - RNA, 19 nt, Homo sapiens
  misc_RNA (1)...(19): siRNA sense strand
uggcagcucugaucaggaa

SEQ ID NO: 1238508 - RNA, 19 nt, Homo sapiens
  misc_RNA (1)...(19): siRNA sense strand
cagcaacaauuccggaaca

SEQ ID NO: 1238509 - RNA, 19 nt, Homo sapiens
  misc_RNA (1)...(19): siRNA sense strand
gcagauagcaggagaugac

SEQ ID NO: 1238510 - RNA, 19 nt, Homo sapiens
  misc_RNA (1)...(19): siRNA sense strand
uaacacagucgugaacaaa

SEQ ID NO: 1238511 - RNA, 19 nt, Homo sapiens
  misc_RNA (1)...(19): siRNA sense strand
gauuaaggccuggcagaaa

SEQ ID NO: 1238512 - RNA, 19 nt, Homo sapiens
  misc_RNA (1)...(19): siRNA sense strand
gugaggaacagcaacaauu

SEQ ID NO: 1238513 - RNA, 19 nt, Homo sapiens
  misc_RNA (1)...(19): siRNA sense strand
acaaacacaugaacaucga

SEQ ID NO: 1238514 - RNA, 19 nt, Homo sapiens
  misc_RNA (1)...(19): siRNA sense strand
caccaccucuggaacaaga

SEQ ID NO: 1238515 - RNA, 19 nt, Homo sapiens
  misc_RNA (1)...(19): siRNA sense strand
gagggcauguucagagcuu

SEQ ID NO: 1238516 - RNA, 19 nt, Homo sapiens
  misc_RNA (1)...(19): siRNA sense strand
ggaaagugaggaacagcaa

SEQ ID NO: 1238517 - RNA, 19 nt, Homo sapiens
  misc_RNA (1)...(19): siRNA sense strand
gauagcaggagaugacaug

SEQ ID NO: 1238518 - RNA, 19 nt, Homo sapiens
  misc_RNA (1)...(19): siRNA sense strand
ugauugcgcucauggauac

SEQ ID NO: 1238519 - RNA, 19 nt, Homo sapiens
  misc_RNA (1)...(19): siRNA sense strand
acacaugaacaucgacuuu

SEQ ID NO: 1238520 - RNA, 19 nt, Homo sapiens
  misc_RNA (1)...(19): siRNA sense strand
acacagucgugaacaaaca

SEQ ID NO: 1238521 - RNA, 19 nt, Homo sapiens
  misc_RNA (1)...(19): siRNA sense strand
guacgcagacaaacacaug

SEQ ID NO: 1238522 - RNA, 19 nt, Homo sapiens
  misc_RNA (1)...(19): siRNA sense strand
gugcagaugagcucaagaa

SEQ ID NO: 1238523 - RNA, 19 nt, Homo sapiens
  misc_RNA (1)...(19): siRNA sense strand
acaaccagcucuaugacau

SEQ ID NO: 1238524 - RNA, 19 nt, Homo sapiens
  misc_RNA (1)...(19): siRNA sense strand
gcaacaauuccggaacauu

SEQ ID NO: 1238525 - RNA, 19 nt, Homo sapiens
  misc_RNA (1)...(19): siRNA sense strand
guucagagcuuuucaugca

SEQ ID NO: 1238526 - RNA, 19 nt, Homo sapiens
  misc_RNA (1)...(19): siRNA sense strand
gcagacaaacacaugaaca

SEQ ID NO: 1238527 - RNA, 19 nt, Homo sapiens
  misc_RNA (1)...(19): siRNA sense strand
gaugcgaaaugcagucaac

SEQ ID NO: 1238528 - RNA, 19 nt, Homo sapiens
  misc_RNA (1)...(19): siRNA sense strand
gaagacacacggguucaca

SEQ ID NO: 1238529 - RNA, 19 nt, Homo sapiens
  misc_RNA (1)...(19): siRNA sense strand
ucaucaagcucaacguucu

SEQ ID NO: 1238530 - RNA, 19 nt, Homo sapiens
  misc_RNA (1)...(19): siRNA sense strand
acaucgacuuugacaguuu

SEQ ID NO: 1238531 - RNA, 19 nt, Homo sapiens
  misc_RNA (1)...(19): siRNA sense strand
gcuacgagaugcgaaaugc

SEQ ID NO: 1238532 - RNA, 19 nt, Homo sapiens
  misc_RNA (1)...(19): siRNA sense strand
uuaacacagucgugaacaa

SEQ ID NO: 1238533 - RNA, 19 nt, Homo sapiens
  misc_RNA (1)...(19): siRNA sense strand
ugaggaacagcaacaauuc

SEQ ID NO: 1238534 - RNA, 19 nt, Homo sapiens
  misc_RNA (1)...(19): siRNA sense strand
caucgacuuugacaguuuc

SEQ ID NO: 1238535 - RNA, 19 nt, Homo sapiens
  misc_RNA (1)...(19): siRNA sense strand
gauuccaccucaacaacca

SEQ ID NO: 1238536 - RNA, 19 nt, Homo sapiens
  misc_RNA (1)...(19): siRNA sense strand
uucaucugcugcuucguua

SEQ ID NO: 1238537 - RNA, 19 nt, Homo sapiens
  misc_RNA (1)...(19): siRNA sense strand
ucaaacacuaugacacaga

SEQ ID NO: 1238538 - RNA, 19 nt, Homo sapiens
  misc_RNA (1)...(19): siRNA sense strand
aaacacaaggaccugaaga

SEQ ID NO: 1238539 - RNA, 19 nt, Homo sapiens
  misc_RNA (1)...(19): siRNA sense strand
uaucaucaagcucaacguu

SEQ ID NO: 1238540 - RNA, 19 nt, Homo sapiens
  misc_RNA (1)...(19): siRNA sense strand
guccugccguagcaugauu

SEQ ID NO: 1238541 - RNA, 19 nt, Homo sapiens
  misc_RNA (1)...(19): siRNA sense strand
cagacaaacacaugaacau

SEQ ID NO: 1238542 - RNA, 19 nt, Homo sapiens
  misc_RNA (1)...(19): siRNA sense strand
gcaggauuccaccucaaca

SEQ ID NO: 1238543 - RNA, 19 nt, Homo sapiens
  misc_RNA (1)...(19): siRNA sense strand
gaccaguccggcaccauca

SEQ ID NO: 1238544 - RNA, 19 nt, Homo sapiens
  misc_RNA (1)...(19): siRNA sense strand
caacaaccagcucuaugac

SEQ ID NO: 1238545 - RNA, 19 nt, Homo sapiens
  misc_RNA (1)...(19): siRNA sense strand
ucaggaaagugaggaacag

SEQ ID NO: 1238546 - RNA, 19 nt, Homo sapiens
  misc_RNA (1)...(19): siRNA sense strand
gacaaggauggagauggua

SEQ ID NO: 1238547 - RNA, 19 nt, Homo sapiens
  misc_RNA (1)...(19): siRNA sense strand
cgacuuugacaguuucauc

SEQ ID NO: 1238548 - RNA, 19 nt, Homo sapiens
  misc_RNA (1)...(19): siRNA sense strand
aaccagcucuaugacauca

SEQ ID NO: 1238549 - RNA, 19 nt, Homo sapiens
  misc_RNA (1)...(19): siRNA sense strand
agucaacgacgcaggauuc

SEQ ID NO: 1238550 - RNA, 19 nt, Homo sapiens
  misc_RNA (1)...(19): siRNA sense strand
uuucaaacacuaugacaca

SEQ ID NO: 1238551 - RNA, 19 nt, Homo sapiens
  misc_RNA (1)...(19): siRNA sense strand
acaaacacaaggaccugaa

SEQ ID NO: 1238552 - RNA, 19 nt, Homo sapiens
  misc_RNA (1)...(19): siRNA sense strand
caacaauuccggaacauuu

SEQ ID NO: 1238553 - RNA, 19 nt, Homo sapiens
  misc_RNA (1)...(19): siRNA sense strand
gaacaucgacuuugacagu

SEQ ID NO: 1238554 - RNA, 19 nt, Homo sapiens
  misc_RNA (1)...(19): siRNA sense strand
cagaugagcucaagaaggu

SEQ ID NO: 1238555 - RNA, 19 nt, Homo sapiens
  misc_RNA (1)...(19): siRNA sense strand
acaaggaccugaagacaca

SEQ ID NO: 1238556 - RNA, 19 nt, Homo sapiens
  misc_RNA (1)...(19): siRNA sense strand
gcucugaucaggaaaguga

SEQ ID NO: 1238557 - RNA, 19 nt, Homo sapiens
  misc_RNA (1)...(19): siRNA sense strand
ucaacaaccagcucuauga

SEQ ID NO: 1238558 - RNA, 19 nt, Homo sapiens
  misc_RNA (1)...(19): siRNA sense strand
ggcugcagcucaccaugua

SEQ ID NO: 1238559 - RNA, 19 nt, Homo sapiens
  misc_RNA (1)...(19): siRNA sense strand
ugacaaggauggagauggu

SEQ ID NO: 1238560 - RNA, 19 nt, Homo sapiens
  misc_RNA (1)...(19): siRNA sense strand
acaugaacaucgacuuuga

SEQ ID NO: 1238561 - RNA, 19 nt, Homo sapiens
  misc_RNA (1)...(19): siRNA sense strand
uggcagcucugaucaggaa

SEQ ID NO: 1238562 - RNA, 19 nt, Homo sapiens
  misc_RNA (1)...(19): siRNA sense strand
cagcaacaauuccggaaca

SEQ ID NO: 1238563 - RNA, 19 nt, Homo sapiens
  misc_RNA (1)...(19): siRNA sense strand
gcagauagcaggagaugac

SEQ ID NO: 1238564 - RNA, 19 nt, Homo sapiens
  misc_RNA (1)...(19): siRNA sense strand
uaacacagucgugaacaaa

SEQ ID NO: 1238565 - RNA, 19 nt, Homo sapiens
  misc_RNA (1)...(19): siRNA sense strand
gauuaaggccuggcagaaa

SEQ ID NO: 1238566 - RNA, 19 nt, Homo sapiens
  misc_RNA (1)...(19): siRNA sense strand
gugaggaacagcaacaauu

SEQ ID NO: 1238567 - RNA, 19 nt, Homo sapiens
  misc_RNA (1)...(19): siRNA sense strand
acaaacacaugaacaucga

SEQ ID NO: 1238568 - RNA, 19 nt, Homo sapiens
  misc_RNA (1)...(19): siRNA sense strand
caccaccucuggaacaaga

SEQ ID NO: 1238569 - RNA, 19 nt, Homo sapiens
  misc_RNA (1)...(19): siRNA sense strand
gagggcauguucagagcuu

SEQ ID NO: 1238570 - RNA, 19 nt, Homo sapiens
  misc_RNA (1)...(19): siRNA sense strand
ggaaagugaggaacagcaa

SEQ ID NO: 1238571 - RNA, 19 nt, Homo sapiens
  misc_RNA (1)...(19): siRNA sense strand
gauagcaggagaugacaug

SEQ ID NO: 1238572 - RNA, 19 nt, Homo sapiens
  misc_RNA (1)...(19): siRNA sense strand
ugauugcgcucauggauac

SEQ ID NO: 1238573 - RNA, 19 nt, Homo sapiens
  misc_RNA (1)...(19): siRNA sense strand
acacaugaacaucgacuuu

SEQ ID NO: 1238574 - RNA, 19 nt, Homo sapiens
  misc_RNA (1)...(19): siRNA sense strand
acacagucgugaacaaaca

SEQ ID NO: 1238575 - RNA, 19 nt, Homo sapiens
  misc_RNA (1)...(19): siRNA sense strand
guacgcagacaaacacaug

SEQ ID NO: 1238576 - RNA, 19 nt, Homo sapiens
  misc_RNA (1)...(19): siRNA sense strand
gugcagaugagcucaagaa

SEQ ID NO: 1238577 - RNA, 19 nt, Homo sapiens
  misc_RNA (1)...(19): siRNA sense strand
acaaccagcucuaugacau

SEQ ID NO: 1238578 - RNA, 19 nt, Homo sapiens
  misc_RNA (1)...(19): siRNA sense strand
gcaacaauuccggaacauu

SEQ ID NO: 1238579 - RNA, 19 nt, Homo sapiens
  misc_RNA (1)...(19): siRNA sense strand
guucagagcuuuucaugca

SEQ ID NO: 1238580 - RNA, 19 nt, Homo sapiens
  misc_RNA (1)...(19): siRNA sense strand
gcagacaaacacaugaaca

SEQ ID NO: 1238581 - RNA, 19 nt, Homo sapiens
  misc_RNA (1)...(19): siRNA sense strand
gaugcgaaaugcagucaac

SEQ ID NO: 1238582 - RNA, 19 nt, Homo sapiens
  misc_RNA (1)...(19): siRNA sense strand
gaagacacacggguucaca

SEQ ID NO: 1238583 - RNA, 19 nt, Homo sapiens
  misc_RNA (1)...(19): siRNA sense strand
ucaucaagcucaacguucu

SEQ ID NO: 1238584 - RNA, 19 nt, Homo sapiens
  misc_RNA (1)...(19): siRNA sense strand
acaucgacuuugacaguuu

SEQ ID NO: 1238585 - RNA, 19 nt, Homo sapiens
  misc_RNA (1)...(19): siRNA sense strand
gcuacgagaugcgaaaugc

SEQ ID NO: 1238586 - RNA, 19 nt, Homo sapiens
  misc_RNA (1)...(19): siRNA sense strand
uuaacacagucgugaacaa

SEQ ID NO: 1238587 - RNA, 19 nt, Homo sapiens
  misc_RNA (1)...(19): siRNA sense strand
ugaggaacagcaacaauuc

SEQ ID NO: 1238588 - RNA, 19 nt, Homo sapiens
  misc_RNA (1)...(19): siRNA sense strand
caucgacuuugacaguuuc

SEQ ID NO: 1238589 - RNA, 19 nt, Homo sapiens
  misc_RNA (1)...(19): siRNA sense strand
gauuccaccucaacaacca

SEQ ID NO: 1238590 - RNA, 19 nt, Homo sapiens
  misc_RNA (1)...(19): siRNA sense strand
uucaucugcugcuucguua

SEQ ID NO: 1238591 - RNA, 19 nt, Homo sapiens
  misc_RNA (1)...(19): siRNA sense strand
ucaaacacuaugacacaga

SEQ ID NO: 1238592 - RNA, 19 nt, Homo sapiens
  misc_RNA (1)...(19): siRNA sense strand
aaacacaaggaccugaaga

SEQ ID NO: 1238593 - RNA, 19 nt, Homo sapiens
  misc_RNA (1)...(19): siRNA sense strand
uaucaucaagcucaacguu

SEQ ID NO: 1238594 - RNA, 19 nt, Homo sapiens
  misc_RNA (1)...(19): siRNA sense strand
guccugccguagcaugauu

SEQ ID NO: 1238595 - RNA, 19 nt, Homo sapiens
  misc_RNA (1)...(19): siRNA sense strand
cagacaaacacaugaacau

SEQ ID NO: 1238596 - RNA, 19 nt, Homo sapiens
  misc_RNA (1)...(19): siRNA sense strand
gcaggauuccaccucaaca

SEQ ID NO: 1238597 - RNA, 19 nt, Homo sapiens
  misc_RNA (1)...(19): siRNA sense strand
gaccaguccggcaccauca

SEQ ID NO: 1238598 - RNA, 19 nt, Homo sapiens
  misc_RNA (1)...(19): siRNA sense strand
caacaaccagcucuaugac

SEQ ID NO: 1238599 - RNA, 19 nt, Homo sapiens
  misc_RNA (1)...(19): siRNA sense strand
ucaggaaagugaggaacag

SEQ ID NO: 1238600 - RNA, 19 nt, Homo sapiens
  misc_RNA (1)...(19): siRNA sense strand
gacaaggauggagauggua

SEQ ID NO: 1238601 - RNA, 19 nt, Homo sapiens
  misc_RNA (1)...(19): siRNA sense strand
cgacuuugacaguuucauc

SEQ ID NO: 1238602 - RNA, 19 nt, Homo sapiens
  misc_RNA (1)...(19): siRNA sense strand
aaccagcucuaugacauca

SEQ ID NO: 1238603 - RNA, 19 nt, Homo sapiens
  misc_RNA (1)...(19): siRNA sense strand
agucaacgacgcaggauuc

SEQ ID NO: 1238604 - RNA, 19 nt, Homo sapiens
  misc_RNA (1)...(19): siRNA sense strand
uuucaaacacuaugacaca

SEQ ID NO: 1238605 - RNA, 19 nt, Homo sapiens
  misc_RNA (1)...(19): siRNA sense strand
acaaacacaaggaccugaa

SEQ ID NO: 1238606 - RNA, 19 nt, Homo sapiens
  misc_RNA (1)...(19): siRNA sense strand
caacaauuccggaacauuu

SEQ ID NO: 1238607 - RNA, 19 nt, Homo sapiens
  misc_RNA (1)...(19): siRNA sense strand
gaacaucgacuuugacagu

SEQ ID NO: 1238608 - RNA, 19 nt, Homo sapiens
  misc_RNA (1)...(19): siRNA sense strand
cagaugagcucaagaaggu

SEQ ID NO: 1238609 - RNA, 19 nt, Homo sapiens
  misc_RNA (1)...(19): siRNA sense strand
acaaggaccugaagacaca

SEQ ID NO: 1238610 - RNA, 19 nt, Homo sapiens
  misc_RNA (1)...(19): siRNA sense strand
gcucugaucaggaaaguga

SEQ ID NO: 1238611 - RNA, 19 nt, Homo sapiens
  misc_RNA (1)...(19): siRNA sense strand
ucaacaaccagcucuauga

SEQ ID NO: 1238612 - RNA, 19 nt, Homo sapiens
  misc_RNA (1)...(19): siRNA sense strand
ggcugcagcucaccaugua

SEQ ID NO: 1238613 - RNA, 19 nt, Homo sapiens
  misc_RNA (1)...(19): siRNA sense strand
ugacaaggauggagauggu

SEQ ID NO: 1238614 - RNA, 19 nt, Homo sapiens
  misc_RNA (1)...(19): siRNA sense strand
acaugaacaucgacuuuga

SEQ ID NO: 1238615 - RNA, 19 nt, Homo sapiens
  misc_RNA (1)...(19): siRNA sense strand
uggcagcucugaucaggaa

SEQ ID NO: 1238616 - RNA, 19 nt, Homo sapiens
  misc_RNA (1)...(19): siRNA sense strand
cagcaacaauuccggaaca

SEQ ID NO: 1238617 - RNA, 19 nt, Homo sapiens
  misc_RNA (1)...(19): siRNA sense strand
gcagauagcaggagaugac

SEQ ID NO: 1238618 - RNA, 19 nt, Homo sapiens
  misc_RNA (1)...(19): siRNA sense strand
uaacacagucgugaacaaa

SEQ ID NO: 1238619 - RNA, 19 nt, Homo sapiens
  misc_RNA (1)...(19): siRNA sense strand
gauuaaggccuggcagaaa

SEQ ID NO: 1238620 - RNA, 19 nt, Homo sapiens
  misc_RNA (1)...(19): siRNA sense strand
gugaggaacagcaacaauu

SEQ ID NO: 1238621 - RNA, 19 nt, Homo sapiens
  misc_RNA (1)...(19): siRNA sense strand
acaaacacaugaacaucga

SEQ ID NO: 1238622 - RNA, 19 nt, Homo sapiens
  misc_RNA (1)...(19): siRNA sense strand
caccaccucuggaacaaga

SEQ ID NO: 1238623 - RNA, 19 nt, Homo sapiens
  misc_RNA (1)...(19): siRNA sense strand
gagggcauguucagagcuu

SEQ ID NO: 1238624 - RNA, 19 nt, Homo sapiens
  misc_RNA (1)...(19): siRNA sense strand
ggaaagugaggaacagcaa

SEQ ID NO: 1238625 - RNA, 19 nt, Homo sapiens
  misc_RNA (1)...(19): siRNA sense strand
gauagcaggagaugacaug

SEQ ID NO: 1238626 - RNA, 19 nt, Homo sapiens
  misc_RNA (1)...(19): siRNA sense strand
ugauugcgcucauggauac

SEQ ID NO: 1238627 - RNA, 19 nt, Homo sapiens
  misc_RNA (1)...(19): siRNA sense strand
acacaugaacaucgacuuu

SEQ ID NO: 1238628 - RNA, 19 nt, Homo sapiens
  misc_RNA (1)...(19): siRNA sense strand
acacagucgugaacaaaca

SEQ ID NO: 1238629 - RNA, 19 nt, Homo sapiens
  misc_RNA (1)...(19): siRNA sense strand
guacgcagacaaacacaug

SEQ ID NO: 1238630 - RNA, 19 nt, Homo sapiens
  misc_RNA (1)...(19): siRNA sense strand
gugcagaugagcucaagaa

SEQ ID NO: 1238631 - RNA, 19 nt, Homo sapiens
  misc_RNA (1)...(19): siRNA sense strand
acaaccagcucuaugacau

SEQ ID NO: 1238632 - RNA, 19 nt, Homo sapiens
  misc_RNA (1)...(19): siRNA sense strand
gcaacaauuccggaacauu

SEQ ID NO: 1238633 - RNA, 19 nt, Homo sapiens
  misc_RNA (1)...(19): siRNA sense strand
guucagagcuuuucaugca

SEQ ID NO: 1238634 - RNA, 19 nt, Homo sapiens
  misc_RNA (1)...(19): siRNA sense strand
gcagacaaacacaugaaca

SEQ ID NO: 1238635 - RNA, 19 nt, Homo sapiens
  misc_RNA (1)...(19): siRNA sense strand
gaugcgaaaugcagucaac

SEQ ID NO: 1238636 - RNA, 19 nt, Homo sapiens
  misc_RNA (1)...(19): siRNA sense strand
gaagacacacggguucaca

SEQ ID NO: 1238637 - RNA, 19 nt, Homo sapiens
  misc_RNA (1)...(19): siRNA sense strand
ucaucaagcucaacguucu

SEQ ID NO: 1238638 - RNA, 19 nt, Homo sapiens
  misc_RNA (1)...(19): siRNA sense strand
acaucgacuuugacaguuu

SEQ ID NO: 1238639 - RNA, 19 nt, Homo sapiens
  misc_RNA (1)...(19): siRNA sense strand
gcuacgagaugcgaaaugc

SEQ ID NO: 1238640 - RNA, 19 nt, Homo sapiens
  misc_RNA (1)...(19): siRNA sense strand
uuaacacagucgugaacaa

SEQ ID NO: 1238641 - RNA, 19 nt, Homo sapiens
  misc_RNA (1)...(19): siRNA sense strand
ugaggaacagcaacaauuc

SEQ ID NO: 1238642 - RNA, 19 nt, Homo sapiens
  misc_RNA (1)...(19): siRNA sense strand
caucgacuuugacaguuuc

SEQ ID NO: 1238643 - RNA, 19 nt, Homo sapiens
  misc_RNA (1)...(19): siRNA sense strand
gauuccaccucaacaacca

SEQ ID NO: 1238644 - RNA, 19 nt, Homo sapiens
  misc_RNA (1)...(19): siRNA sense strand
uucaucugcugcuucguua

SEQ ID NO: 1238645 - RNA, 19 nt, Homo sapiens
  misc_RNA (1)...(19): siRNA sense strand
ucaaacacuaugacacaga

SEQ ID NO: 1238646 - RNA, 19 nt, Homo sapiens
  misc_RNA (1)...(19): siRNA sense strand
aaacacaaggaccugaaga

SEQ ID NO: 1238647 - RNA, 19 nt, Homo sapiens
  misc_RNA (1)...(19): siRNA sense strand
uaucaucaagcucaacguu

SEQ ID NO: 1238648 - RNA, 19 nt, Homo sapiens
  misc_RNA (1)...(19): siRNA sense strand
guccugccguagcaugauu

SEQ ID NO: 1238649 - RNA, 19 nt, Homo sapiens
  misc_RNA (1)...(19): siRNA sense strand
cagacaaacacaugaacau

SEQ ID NO: 1238650 - RNA, 19 nt, Homo sapiens
  misc_RNA (1)...(19): siRNA sense strand
gcaggauuccaccucaaca

SEQ ID NO: 1238651 - RNA, 19 nt, Homo sapiens
  misc_RNA (1)...(19): siRNA sense strand
gaccaguccggcaccauca

SEQ ID NO: 1238652 - RNA, 19 nt, Homo sapiens
  misc_RNA (1)...(19): siRNA sense strand
caacaaccagcucuaugac

SEQ ID NO: 1238653 - RNA, 19 nt, Homo sapiens
  misc_RNA (1)...(19): siRNA sense strand
ucaggaaagugaggaacag

SEQ ID NO: 1238654 - RNA, 19 nt, Homo sapiens
  misc_RNA (1)...(19): siRNA sense strand
gacaaggauggagauggua

SEQ ID NO: 1238655 - RNA, 19 nt, Homo sapiens
  misc_RNA (1)...(19): siRNA sense strand
cgacuuugacaguuucauc

SEQ ID NO: 1238656 - RNA, 19 nt, Homo sapiens
  misc_RNA (1)...(19): siRNA sense strand
aaccagcucuaugacauca

SEQ ID NO: 1238657 - RNA, 19 nt, Homo sapiens
  misc_RNA (1)...(19): siRNA sense strand
agucaacgacgcaggauuc

SEQ ID NO: 1238658 - RNA, 19 nt, Homo sapiens
  misc_RNA (1)...(19): siRNA sense strand
uuucaaacacuaugacaca

SEQ ID NO: 1238659 - RNA, 19 nt, Homo sapiens
  misc_RNA (1)...(19): siRNA sense strand
acaaacacaaggaccugaa

SEQ ID NO: 1238660 - RNA, 19 nt, Homo sapiens
  misc_RNA (1)...(19): siRNA sense strand
caacaauuccggaacauuu

SEQ ID NO: 1238661 - RNA, 19 nt, Homo sapiens
  misc_RNA (1)...(19): siRNA sense strand
gaacaucgacuuugacagu

SEQ ID NO: 1238662 - RNA, 19 nt, Homo sapiens
  misc_RNA (1)...(19): siRNA sense strand
cagaugagcucaagaaggu

SEQ ID NO: 1238663 - RNA, 19 nt, Homo sapiens
  misc_RNA (1)...(19): siRNA sense strand
acaaggaccugaagacaca

SEQ ID NO: 1238664 - RNA, 19 nt, Homo sapiens
  misc_RNA (1)...(19): siRNA sense strand
gcucugaucaggaaaguga

SEQ ID NO: 1238665 - RNA, 19 nt, Homo sapiens
  misc_RNA (1)...(19): siRNA sense strand
ucaacaaccagcucuauga

SEQ ID NO: 1238666 - RNA, 19 nt, Homo sapiens
  misc_RNA (1)...(19): siRNA sense strand
ggcugcagcucaccaugua

SEQ ID NO: 1238667 - RNA, 19 nt, Homo sapiens
  misc_RNA (1)...(19): siRNA sense strand
ugacaaggauggagauggu

SEQ ID NO: 1238668 - RNA, 19 nt, Homo sapiens
  misc_RNA (1)...(19): siRNA sense strand
acaugaacaucgacuuuga

SEQ ID NO: 1238669 - RNA, 19 nt, Homo sapiens
  misc_RNA (1)...(19): siRNA sense strand
uggcagcucugaucaggaa

SEQ ID NO: 1238670 - RNA, 19 nt, Homo sapiens
  misc_RNA (1)...(19): siRNA sense strand
cagcaacaauuccggaaca

SEQ ID NO: 1238671 - RNA, 19 nt, Homo sapiens
  misc_RNA (1)...(19): siRNA sense strand
gcagauagcaggagaugac

SEQ ID NO: 1238672 - RNA, 19 nt, Homo sapiens
  misc_RNA (1)...(19): siRNA sense strand
uaacacagucgugaacaaa

SEQ ID NO: 1238673 - RNA, 19 nt, Homo sapiens
  misc_RNA (1)...(19): siRNA sense strand
gauuaaggccuggcagaaa

SEQ ID NO: 1238674 - RNA, 19 nt, Homo sapiens
  misc_RNA (1)...(19): siRNA sense strand
gugaggaacagcaacaauu

SEQ ID NO: 1238675 - RNA, 19 nt, Homo sapiens
  misc_RNA (1)...(19): siRNA sense strand
acaaacacaugaacaucga

SEQ ID NO: 1238676 - RNA, 19 nt, Homo sapiens
  misc_RNA (1)...(19): siRNA sense strand
caccaccucuggaacaaga

SEQ ID NO: 1238677 - RNA, 19 nt, Homo sapiens
  misc_RNA (1)...(19): siRNA sense strand
gagggcauguucagagcuu

SEQ ID NO: 1238678 - RNA, 19 nt, Homo sapiens
  misc_RNA (1)...(19): siRNA sense strand
ggaaagugaggaacagcaa

SEQ ID NO: 1238679 - RNA, 19 nt, Homo sapiens
  misc_RNA (1)...(19): siRNA sense strand
gauagcaggagaugacaug

SEQ ID NO: 1238680 - RNA, 19 nt, Homo sapiens
  misc_RNA (1)...(19): siRNA sense strand
ugauugcgcucauggauac

SEQ ID NO: 1238681 - RNA, 19 nt, Homo sapiens
  misc_RNA (1)...(19): siRNA sense strand
acacaugaacaucgacuuu

SEQ ID NO: 1238682 - RNA, 19 nt, Homo sapiens
  misc_RNA (1)...(19): siRNA sense strand
acacagucgugaacaaaca

SEQ ID NO: 1238683 - RNA, 19 nt, Homo sapiens
  misc_RNA (1)...(19): siRNA sense strand
guacgcagacaaacacaug

SEQ ID NO: 1238684 - RNA, 19 nt, Homo sapiens
  misc_RNA (1)...(19): siRNA sense strand
gugcagaugagcucaagaa

SEQ ID NO: 1238685 - RNA, 19 nt, Homo sapiens
  misc_RNA (1)...(19): siRNA sense strand
acaaccagcucuaugacau

SEQ ID NO: 1238686 - RNA, 19 nt, Homo sapiens
  misc_RNA (1)...(19): siRNA sense strand
gcaacaauuccggaacauu

SEQ ID NO: 1238687 - RNA, 19 nt, Homo sapiens
  misc_RNA (1)...(19): siRNA sense strand
guucagagcuuuucaugca

SEQ ID NO: 1238688 - RNA, 19 nt, Homo sapiens
  misc_RNA (1)...(19): siRNA sense strand
gcagacaaacacaugaaca

SEQ ID NO: 1238689 - RNA, 19 nt, Homo sapiens
  misc_RNA (1)...(19): siRNA sense strand
gaugcgaaaugcagucaac

SEQ ID NO: 1238690 - RNA, 19 nt, Homo sapiens
  misc_RNA (1)...(19): siRNA sense strand
gaagacacacggguucaca

SEQ ID NO: 1238691 - RNA, 19 nt, Homo sapiens
  misc_RNA (1)...(19): siRNA sense strand
ucaucaagcucaacguucu

SEQ ID NO: 1238692 - RNA, 19 nt, Homo sapiens
  misc_RNA (1)...(19): siRNA sense strand
acaucgacuuugacaguuu

SEQ ID NO: 1238693 - RNA, 19 nt, Homo sapiens
  misc_RNA (1)...(19): siRNA sense strand
gcuacgagaugcgaaaugc

SEQ ID NO: 1238694 - RNA, 19 nt, Homo sapiens
  misc_RNA (1)...(19): siRNA sense strand
uuaacacagucgugaacaa

SEQ ID NO: 1238695 - RNA, 19 nt, Homo sapiens
  misc_RNA (1)...(19): siRNA sense strand
ugaggaacagcaacaauuc

SEQ ID NO: 1238696 - RNA, 19 nt, Homo sapiens
  misc_RNA (1)...(19): siRNA sense strand
caucgacuuugacaguuuc

SEQ ID NO: 1238697 - RNA, 19 nt, Homo sapiens
  misc_RNA (1)...(19): siRNA sense strand
gauuccaccucaacaacca

SEQ ID NO: 1238698 - RNA, 19 nt, Homo sapiens
  misc_RNA (1)...(19): siRNA sense strand
uucaucugcugcuucguua

SEQ ID NO: 1238699 - RNA, 19 nt, Homo sapiens
  misc_RNA (1)...(19): siRNA sense strand
ucaaacacuaugacacaga

SEQ ID NO: 1238700 - RNA, 19 nt, Homo sapiens
  misc_RNA (1)...(19): siRNA sense strand
aaacacaaggaccugaaga

SEQ ID NO: 1238701 - RNA, 19 nt, Homo sapiens
  misc_RNA (1)...(19): siRNA sense strand
uaucaucaagcucaacguu

SEQ ID NO: 1238702 - RNA, 19 nt, Homo sapiens
  misc_RNA (1)...(19): siRNA sense strand
guccugccguagcaugauu

SEQ ID NO: 1238703 - RNA, 19 nt, Homo sapiens
  misc_RNA (1)...(19): siRNA sense strand
cagacaaacacaugaacau

SEQ ID NO: 1238704 - RNA, 19 nt, Homo sapiens
  misc_RNA (1)...(19): siRNA sense strand
gcaggauuccaccucaaca

SEQ ID NO: 1238705 - RNA, 19 nt, Homo sapiens
  misc_RNA (1)...(19): siRNA sense strand
gaccaguccggcaccauca

SEQ ID NO: 1238706 - RNA, 19 nt, Homo sapiens
  misc_RNA (1)...(19): siRNA sense strand
caacaaccagcucuaugac

SEQ ID NO: 1238707 - RNA, 19 nt, Homo sapiens
  misc_RNA (1)...(19): siRNA sense strand
ucaggaaagugaggaacag

SEQ ID NO: 1238708 - RNA, 19 nt, Homo sapiens
  misc_RNA (1)...(19): siRNA sense strand
gacaaggauggagauggua

SEQ ID NO: 1238709 - RNA, 19 nt, Homo sapiens
  misc_RNA (1)...(19): siRNA sense strand
cgacuuugacaguuucauc

SEQ ID NO: 1238710 - RNA, 19 nt, Homo sapiens
  misc_RNA (1)...(19): siRNA sense strand
aaccagcucuaugacauca

SEQ ID NO: 1238711 - RNA, 19 nt, Homo sapiens
  misc_RNA (1)...(19): siRNA sense strand
agucaacgacgcaggauuc

SEQ ID NO: 1238712 - RNA, 19 nt, Homo sapiens
  misc_RNA (1)...(19): siRNA sense strand
uuucaaacacuaugacaca

SEQ ID NO: 1238713 - RNA, 19 nt, Homo sapiens
  misc_RNA (1)...(19): siRNA sense strand
acaaacacaaggaccugaa

SEQ ID NO: 1238714 - RNA, 19 nt, Homo sapiens
  misc_RNA (1)...(19): siRNA sense strand
gaacaucgacuuugacagu

SEQ ID NO: 1238715 - RNA, 19 nt, Homo sapiens
  misc_RNA (1)...(19): siRNA sense strand
cagaugagcucaagaaggu

SEQ ID NO: 1238716 - RNA, 19 nt, Homo sapiens
  misc_RNA (1)...(19): siRNA sense strand
acaaggaccugaagacaca

SEQ ID NO: 1238717 - RNA, 19 nt, Homo sapiens
  misc_RNA (1)...(19): siRNA sense strand
ucaacaaccagcucuauga

SEQ ID NO: 1238718 - RNA, 19 nt, Homo sapiens
  misc_RNA (1)...(19): siRNA sense strand
ggcugcagcucaccaugua

SEQ ID NO: 1238719 - RNA, 19 nt, Homo sapiens
  misc_RNA (1)...(19): siRNA sense strand
ugacaaggauggagauggu

SEQ ID NO: 1238720 - RNA, 19 nt, Homo sapiens
  misc_RNA (1)...(19): siRNA sense strand
acaugaacaucgacuuuga

SEQ ID NO: 1238721 - RNA, 19 nt, Homo sapiens
  misc_RNA (1)...(19): siRNA sense strand
uaacacagucgugaacaaa

SEQ ID NO: 1238722 - RNA, 19 nt, Homo sapiens
  misc_RNA (1)...(19): siRNA sense strand
gauuaaggccuggcagaaa

SEQ ID NO: 1238723 - RNA, 19 nt, Homo sapiens
  misc_RNA (1)...(19): siRNA sense strand
acaaacacaugaacaucga

SEQ ID NO: 1238724 - RNA, 19 nt, Homo sapiens
  misc_RNA (1)...(19): siRNA sense strand
caccaccucuggaacaaga

SEQ ID NO: 1238725 - RNA, 19 nt, Homo sapiens
  misc_RNA (1)...(19): siRNA sense strand
gagggcauguucagagcuu

SEQ ID NO: 1238726 - RNA, 19 nt, Homo sapiens
  misc_RNA (1)...(19): siRNA sense strand
ugauugcgcucauggauac

SEQ ID NO: 1238727 - RNA, 19 nt, Homo sapiens
  misc_RNA (1)...(19): siRNA sense strand
acacaugaacaucgacuuu

SEQ ID NO: 1238728 - RNA, 19 nt, Homo sapiens
  misc_RNA (1)...(19): siRNA sense strand
acacagucgugaacaaaca

SEQ ID NO: 1238729 - RNA, 19 nt, Homo sapiens
  misc_RNA (1)...(19): siRNA sense strand
guacgcagacaaacacaug

SEQ ID NO: 1238730 - RNA, 19 nt, Homo sapiens
  misc_RNA (1)...(19): siRNA sense strand
gugcagaugagcucaagaa

SEQ ID NO: 1238731 - RNA, 19 nt, Homo sapiens
  misc_RNA (1)...(19): siRNA sense strand
acaaccagcucuaugacau

SEQ ID NO: 1238732 - RNA, 19 nt, Homo sapiens
  misc_RNA (1)...(19): siRNA sense strand
guucagagcuuuucaugca

SEQ ID NO: 1238733 - RNA, 19 nt, Homo sapiens
  misc_RNA (1)...(19): siRNA sense strand
gcagacaaacacaugaaca

SEQ ID NO: 1238734 - RNA, 19 nt, Homo sapiens
  misc_RNA (1)...(19): siRNA sense strand
gaugcgaaaugcagucaac

SEQ ID NO: 1238735 - RNA, 19 nt, Homo sapiens
  misc_RNA (1)...(19): siRNA sense strand
gaagacacacggguucaca

SEQ ID NO: 1238736 - RNA, 19 nt, Homo sapiens
  misc_RNA (1)...(19): siRNA sense strand
ucaucaagcucaacguucu

SEQ ID NO: 1238737 - RNA, 19 nt, Homo sapiens
  misc_RNA (1)...(19): siRNA sense strand
acaucgacuuugacaguuu

SEQ ID NO: 1238738 - RNA, 19 nt, Homo sapiens
  misc_RNA (1)...(19): siRNA sense strand
gcuacgagaugcgaaaugc

SEQ ID NO: 1238739 - RNA, 19 nt, Homo sapiens
  misc_RNA (1)...(19): siRNA sense strand
uuaacacagucgugaacaa

SEQ ID NO: 1238740 - RNA, 19 nt, Homo sapiens
  misc_RNA (1)...(19): siRNA sense strand
caucgacuuugacaguuuc

SEQ ID NO: 1238741 - RNA, 19 nt, Homo sapiens
  misc_RNA (1)...(19): siRNA sense strand
gauuccaccucaacaacca

SEQ ID NO: 1238742 - RNA, 19 nt, Homo sapiens
  misc_RNA (1)...(19): siRNA sense strand
uucaucugcugcuucguua

SEQ ID NO: 1238743 - RNA, 19 nt, Homo sapiens
  misc_RNA (1)...(19): siRNA sense strand
ucaaacacuaugacacaga

SEQ ID NO: 1238744 - RNA, 19 nt, Homo sapiens
  misc_RNA (1)...(19): siRNA sense strand
aaacacaaggaccugaaga

SEQ ID NO: 1238745 - RNA, 19 nt, Homo sapiens
  misc_RNA (1)...(19): siRNA sense strand
uaucaucaagcucaacguu

SEQ ID NO: 1238746 - RNA, 19 nt, Homo sapiens
  misc_RNA (1)...(19): siRNA sense strand
guccugccguagcaugauu

SEQ ID NO: 1238747 - RNA, 19 nt, Homo sapiens
  misc_RNA (1)...(19): siRNA sense strand
cagacaaacacaugaacau

SEQ ID NO: 1238748 - RNA, 19 nt, Homo sapiens
  misc_RNA (1)...(19): siRNA sense strand
gcaggauuccaccucaaca

SEQ ID NO: 1238749 - RNA, 19 nt, Homo sapiens
  misc_RNA (1)...(19): siRNA sense strand
gaccaguccggcaccauca

SEQ ID NO: 1238750 - RNA, 19 nt, Homo sapiens
  misc_RNA (1)...(19): siRNA sense strand
caacaaccagcucuaugac

SEQ ID NO: 1238751 - RNA, 19 nt, Homo sapiens
  misc_RNA (1)...(19): siRNA sense strand
uuucaaacacuaugacaca

SEQ ID NO: 1238752 - RNA, 19 nt, Homo sapiens
  misc_RNA (1)...(19): siRNA sense strand
gacaaggauggagauggua

SEQ ID NO: 1238753 - RNA, 19 nt, Homo sapiens
  misc_RNA (1)...(19): siRNA sense strand
cgacuuugacaguuucauc

SEQ ID NO: 1238754 - RNA, 19 nt, Homo sapiens
  misc_RNA (1)...(19): siRNA sense strand
acaaacacaaggaccugaa

SEQ ID NO: 1238755 - RNA, 19 nt, Homo sapiens
  misc_RNA (1)...(19): siRNA sense strand
aaccagcucuaugacauca

SEQ ID NO: 1238756 - RNA, 19 nt, Homo sapiens
  misc_RNA (1)...(19): siRNA sense strand
agucaacgacgcaggauuc

SEQ ID NO: 1238757 - RNA, 19 nt, Homo sapiens
  misc_RNA (1)...(19): siRNA sense strand
gaacaucgacuuugacagu

SEQ ID NO: 1238758 - RNA, 19 nt, Homo sapiens
  misc_RNA (1)...(19): siRNA sense strand
cagaugagcucaagaaggu

SEQ ID NO: 1238759 - RNA, 19 nt, Homo sapiens
  misc_RNA (1)...(19): siRNA sense strand
acaaggaccugaagacaca

SEQ ID NO: 1238760 - RNA, 19 nt, Homo sapiens
  misc_RNA (1)...(19): siRNA sense strand
ucaacaaccagcucuauga

SEQ ID NO: 1238761 - RNA, 19 nt, Homo sapiens
  misc_RNA (1)...(19): siRNA sense strand
ggcugcagcucaccaugua

SEQ ID NO: 1238762 - RNA, 19 nt, Homo sapiens
  misc_RNA (1)...(19): siRNA sense strand
ugacaaggauggagauggu

SEQ ID NO: 1238763 - RNA, 19 nt, Homo sapiens
  misc_RNA (1)...(19): siRNA sense strand
acaugaacaucgacuuuga

SEQ ID NO: 1238764 - RNA, 19 nt, Homo sapiens
  misc_RNA (1)...(19): siRNA sense strand
uaacacagucgugaacaaa

SEQ ID NO: 1238765 - RNA, 19 nt, Homo sapiens
  misc_RNA (1)...(19): siRNA sense strand
gauuaaggccuggcagaaa

SEQ ID NO: 1238766 - RNA, 19 nt, Homo sapiens
  misc_RNA (1)...(19): siRNA sense strand
acaaacacaugaacaucga

SEQ ID NO: 1238767 - RNA, 19 nt, Homo sapiens
  misc_RNA (1)...(19): siRNA sense strand
caccaccucuggaacaaga

SEQ ID NO: 1238768 - RNA, 19 nt, Homo sapiens
  misc_RNA (1)...(19): siRNA sense strand
gagggcauguucagagcuu

SEQ ID NO: 1238769 - RNA, 19 nt, Homo sapiens
  misc_RNA (1)...(19): siRNA sense strand
ugauugcgcucauggauac

SEQ ID NO: 1238770 - RNA, 19 nt, Homo sapiens
  misc_RNA (1)...(19): siRNA sense strand
acacaugaacaucgacuuu

SEQ ID NO: 1238771 - RNA, 19 nt, Homo sapiens
  misc_RNA (1)...(19): siRNA sense strand
acacagucgugaacaaaca

SEQ ID NO: 1238772 - RNA, 19 nt, Homo sapiens
  misc_RNA (1)...(19): siRNA sense strand
guacgcagacaaacacaug

SEQ ID NO: 1238773 - RNA, 19 nt, Homo sapiens
  misc_RNA (1)...(19): siRNA sense strand
gugcagaugagcucaagaa

SEQ ID NO: 1238774 - RNA, 19 nt, Homo sapiens
  misc_RNA (1)...(19): siRNA sense strand
acaaccagcucuaugacau

SEQ ID NO: 1238775 - RNA, 19 nt, Homo sapiens
  misc_RNA (1)...(19): siRNA sense strand
guucagagcuuuucaugca

SEQ ID NO: 1238776 - RNA, 19 nt, Homo sapiens
  misc_RNA (1)...(19): siRNA sense strand
gcagacaaacacaugaaca

SEQ ID NO: 1238777 - RNA, 19 nt, Homo sapiens
  misc_RNA (1)...(19): siRNA sense strand
gaugcgaaaugcagucaac

SEQ ID NO: 1238778 - RNA, 19 nt, Homo sapiens
  misc_RNA (1)...(19): siRNA sense strand
gaagacacacggguucaca

SEQ ID NO: 1238779 - RNA, 19 nt, Homo sapiens
  misc_RNA (1)...(19): siRNA sense strand
ucaucaagcucaacguucu

SEQ ID NO: 1238780 - RNA, 19 nt, Homo sapiens
  misc_RNA (1)...(19): siRNA sense strand
acaucgacuuugacaguuu

SEQ ID NO: 1238781 - RNA, 19 nt, Homo sapiens
  misc_RNA (1)...(19): siRNA sense strand
gcuacgagaugcgaaaugc

SEQ ID NO: 1238782 - RNA, 19 nt, Homo sapiens
  misc_RNA (1)...(19): siRNA sense strand
uuaacacagucgugaacaa

SEQ ID NO: 1238783 - RNA, 19 nt, Homo sapiens
  misc_RNA (1)...(19): siRNA sense strand
caucgacuuugacaguuuc

SEQ ID NO: 1238784 - RNA, 19 nt, Homo sapiens
  misc_RNA (1)...(19): siRNA sense strand
gauuccaccucaacaacca

SEQ ID NO: 1238785 - RNA, 19 nt, Homo sapiens
  misc_RNA (1)...(19): siRNA sense strand
uucaucugcugcuucguua

SEQ ID NO: 1238786 - RNA, 19 nt, Homo sapiens
  misc_RNA (1)...(19): siRNA sense strand
ucaaacacuaugacacaga

SEQ ID NO: 1238787 - RNA, 19 nt, Homo sapiens
  misc_RNA (1)...(19): siRNA sense strand
aaacacaaggaccugaaga

SEQ ID NO: 1238788 - RNA, 19 nt, Homo sapiens
  misc_RNA (1)...(19): siRNA sense strand
uaucaucaagcucaacguu

SEQ ID NO: 1238789 - RNA, 19 nt, Homo sapiens
  misc_RNA (1)...(19): siRNA sense strand
guccugccguagcaugauu

SEQ ID NO: 1238790 - RNA, 19 nt, Homo sapiens
  misc_RNA (1)...(19): siRNA sense strand
cagacaaacacaugaacau

SEQ ID NO: 1238791 - RNA, 19 nt, Homo sapiens
  misc_RNA (1)...(19): siRNA sense strand
gcaggauuccaccucaaca

SEQ ID NO: 1238792 - RNA, 19 nt, Homo sapiens
  misc_RNA (1)...(19): siRNA sense strand
gaccaguccggcaccauca

SEQ ID NO: 1238793 - RNA, 19 nt, Homo sapiens
  misc_RNA (1)...(19): siRNA sense strand
caacaaccagcucuaugac

SEQ ID NO: 1238794 - RNA, 19 nt, Homo sapiens
  misc_RNA (1)...(19): siRNA sense strand
uuucaaacacuaugacaca

SEQ ID NO: 1238795 - RNA, 19 nt, Homo sapiens
  misc_RNA (1)...(19): siRNA sense strand
gacaaggauggagauggua

SEQ ID NO: 1238796 - RNA, 19 nt, Homo sapiens
  misc_RNA (1)...(19): siRNA sense strand
cgacuuugacaguuucauc

SEQ ID NO: 1238797 - RNA, 19 nt, Homo sapiens
  misc_RNA (1)...(19): siRNA sense strand
acaaacacaaggaccugaa

SEQ ID NO: 1238798 - RNA, 19 nt, Homo sapiens
  misc_RNA (1)...(19): siRNA sense strand
aaccagcucuaugacauca

SEQ ID NO: 1238799 - RNA, 19 nt, Homo sapiens
  misc_RNA (1)...(19): siRNA sense strand
agucaacgacgcaggauuc

SEQ ID NO: 1238800 - RNA, 19 nt, Homo sapiens
  misc_RNA (1)...(19): siRNA sense strand
caacaauuccggaacauuu

SEQ ID NO: 1238801 - RNA, 19 nt, Homo sapiens
  misc_RNA (1)...(19): siRNA sense strand
gaacaucgacuuugacagu

SEQ ID NO: 1238802 - RNA, 19 nt, Homo sapiens
  misc_RNA (1)...(19): siRNA sense strand
cagaugagcucaagaaggu

SEQ ID NO: 1238803 - RNA, 19 nt, Homo sapiens
  misc_RNA (1)...(19): siRNA sense strand
acaaggaccugaagacaca

SEQ ID NO: 1238804 - RNA, 19 nt, Homo sapiens
  misc_RNA (1)...(19): siRNA sense strand
gcucugaucaggaaaguga

SEQ ID NO: 1238805 - RNA, 19 nt, Homo sapiens
  misc_RNA (1)...(19): siRNA sense strand
ucaacaaccagcucuauga

SEQ ID NO: 1238806 - RNA, 19 nt, Homo sapiens
  misc_RNA (1)...(19): siRNA sense strand
ggcugcagcucaccaugua

SEQ ID NO: 1238807 - RNA, 19 nt, Homo sapiens
  misc_RNA (1)...(19): siRNA sense strand
ugacaaggauggagauggu

SEQ ID NO: 1238808 - RNA, 19 nt, Homo sapiens
  misc_RNA (1)...(19): siRNA sense strand
acaugaacaucgacuuuga

SEQ ID NO: 1238809 - RNA, 19 nt, Homo sapiens
  misc_RNA (1)...(19): siRNA sense strand
uggcagcucugaucaggaa

SEQ ID NO: 1238810 - RNA, 19 nt, Homo sapiens
  misc_RNA (1)...(19): siRNA sense strand
cagcaacaauuccggaaca

SEQ ID NO: 1238811 - RNA, 19 nt, Homo sapiens
  misc_RNA (1)...(19): siRNA sense strand
gcagauagcaggagaugac

SEQ ID NO: 1238812 - RNA, 19 nt, Homo sapiens
  misc_RNA (1)...(19): siRNA sense strand
uaacacagucgugaacaaa

SEQ ID NO: 1238813 - RNA, 19 nt, Homo sapiens
  misc_RNA (1)...(19): siRNA sense strand
gauuaaggccuggcagaaa

SEQ ID NO: 1238814 - RNA, 19 nt, Homo sapiens
  misc_RNA (1)...(19): siRNA sense strand
gugaggaacagcaacaauu

SEQ ID NO: 1238815 - RNA, 19 nt, Homo sapiens
  misc_RNA (1)...(19): siRNA sense strand
acaaacacaugaacaucga

SEQ ID NO: 1238816 - RNA, 19 nt, Homo sapiens
  misc_RNA (1)...(19): siRNA sense strand
caccaccucuggaacaaga

SEQ ID NO: 1238817 - RNA, 19 nt, Homo sapiens
  misc_RNA (1)...(19): siRNA sense strand
gagggcauguucagagcuu

SEQ ID NO: 1238818 - RNA, 19 nt, Homo sapiens
  misc_RNA (1)...(19): siRNA sense strand
ggaaagugaggaacagcaa

SEQ ID NO: 1238819 - RNA, 19 nt, Homo sapiens
  misc_RNA (1)...(19): siRNA sense strand
gauagcaggagaugacaug

SEQ ID NO: 1238820 - RNA, 19 nt, Homo sapiens
  misc_RNA (1)...(19): siRNA sense strand
ugauugcgcucauggauac

SEQ ID NO: 1238821 - RNA, 19 nt, Homo sapiens
  misc_RNA (1)...(19): siRNA sense strand
acacaugaacaucgacuuu

SEQ ID NO: 1238822 - RNA, 19 nt, Homo sapiens
  misc_RNA (1)...(19): siRNA sense strand
acacagucgugaacaaaca

SEQ ID NO: 1238823 - RNA, 19 nt, Homo sapiens
  misc_RNA (1)...(19): siRNA sense strand
guacgcagacaaacacaug

SEQ ID NO: 1238824 - RNA, 19 nt, Homo sapiens
  misc_RNA (1)...(19): siRNA sense strand
gugcagaugagcucaagaa

SEQ ID NO: 1238825 - RNA, 19 nt, Homo sapiens
  misc_RNA (1)...(19): siRNA sense strand
acaaccagcucuaugacau

SEQ ID NO: 1238826 - RNA, 19 nt, Homo sapiens
  misc_RNA (1)...(19): siRNA sense strand
gcaacaauuccggaacauu

SEQ ID NO: 1238827 - RNA, 19 nt, Homo sapiens
  misc_RNA (1)...(19): siRNA sense strand
guucagagcuuuucaugca

SEQ ID NO: 1238828 - RNA, 19 nt, Homo sapiens
  misc_RNA (1)...(19): siRNA sense strand
gcagacaaacacaugaaca

SEQ ID NO: 1238829 - RNA, 19 nt, Homo sapiens
  misc_RNA (1)...(19): siRNA sense strand
gaugcgaaaugcagucaac

SEQ ID NO: 1238830 - RNA, 19 nt, Homo sapiens
  misc_RNA (1)...(19): siRNA sense strand
gaagacacacggguucaca

SEQ ID NO: 1238831 - RNA, 19 nt, Homo sapiens
  misc_RNA (1)...(19): siRNA sense strand
ucaucaagcucaacguucu

SEQ ID NO: 1238832 - RNA, 19 nt, Homo sapiens
  misc_RNA (1)...(19): siRNA sense strand
acaucgacuuugacaguuu

SEQ ID NO: 1238833 - RNA, 19 nt, Homo sapiens
  misc_RNA (1)...(19): siRNA sense strand
gcuacgagaugcgaaaugc

SEQ ID NO: 1238834 - RNA, 19 nt, Homo sapiens
  misc_RNA (1)...(19): siRNA sense strand
uuaacacagucgugaacaa

SEQ ID NO: 1238835 - RNA, 19 nt, Homo sapiens
  misc_RNA (1)...(19): siRNA sense strand
ugaggaacagcaacaauuc

SEQ ID NO: 1238836 - RNA, 19 nt, Homo sapiens
  misc_RNA (1)...(19): siRNA sense strand
caucgacuuugacaguuuc

SEQ ID NO: 1238837 - RNA, 19 nt, Homo sapiens
  misc_RNA (1)...(19): siRNA sense strand
gauuccaccucaacaacca

SEQ ID NO: 1238838 - RNA, 19 nt, Homo sapiens
  misc_RNA (1)...(19): siRNA sense strand
uucaucugcugcuucguua

SEQ ID NO: 1238839 - RNA, 19 nt, Homo sapiens
  misc_RNA (1)...(19): siRNA sense strand
ucaaacacuaugacacaga

SEQ ID NO: 1238840 - RNA, 19 nt, Homo sapiens
  misc_RNA (1)...(19): siRNA sense strand
aaacacaaggaccugaaga

SEQ ID NO: 1238841 - RNA, 19 nt, Homo sapiens
  misc_RNA (1)...(19): siRNA sense strand
uaucaucaagcucaacguu

SEQ ID NO: 1238842 - RNA, 19 nt, Homo sapiens
  misc_RNA (1)...(19): siRNA sense strand
guccugccguagcaugauu

SEQ ID NO: 1238843 - RNA, 19 nt, Homo sapiens
  misc_RNA (1)...(19): siRNA sense strand
cagacaaacacaugaacau

SEQ ID NO: 1238844 - RNA, 19 nt, Homo sapiens
  misc_RNA (1)...(19): siRNA sense strand
gcaggauuccaccucaaca

SEQ ID NO: 1238845 - RNA, 19 nt, Homo sapiens
  misc_RNA (1)...(19): siRNA sense strand
gaccaguccggcaccauca

SEQ ID NO: 1238846 - RNA, 19 nt, Homo sapiens
  misc_RNA (1)...(19): siRNA sense strand
caacaaccagcucuaugac

SEQ ID NO: 1238847 - RNA, 19 nt, Homo sapiens
  misc_RNA (1)...(19): siRNA sense strand
ucaggaaagugaggaacag

SEQ ID NO: 1238848 - RNA, 19 nt, Homo sapiens
  misc_RNA (1)...(19): siRNA sense strand
gacaaggauggagauggua

SEQ ID NO: 1238849 - RNA, 19 nt, Homo sapiens
  misc_RNA (1)...(19): siRNA sense strand
cgacuuugacaguuucauc

SEQ ID NO: 1238850 - RNA, 19 nt, Homo sapiens
  misc_RNA (1)...(19): siRNA sense strand
aaccagcucuaugacauca

SEQ ID NO: 1238851 - RNA, 19 nt, Homo sapiens
  misc_RNA (1)...(19): siRNA sense strand
agucaacgacgcaggauuc

SEQ ID NO: 1238852 - RNA, 19 nt, Homo sapiens
  misc_RNA (1)...(19): siRNA sense strand
uuucaaacacuaugacaca

SEQ ID NO: 1238853 - RNA, 19 nt, Homo sapiens
  misc_RNA (1)...(19): siRNA sense strand
acaaacacaaggaccugaa

SEQ ID NO: 1238854 - RNA, 19 nt, Homo sapiens
  misc_RNA (1)...(19): siRNA sense strand
caacaauuccggaacauuu

SEQ ID NO: 1238855 - RNA, 19 nt, Homo sapiens
  misc_RNA (1)...(19): siRNA sense strand
gaacaucgacuuugacagu

SEQ ID NO: 1238856 - RNA, 19 nt, Homo sapiens
  misc_RNA (1)...(19): siRNA sense strand
cagaugagcucaagaaggu

SEQ ID NO: 1238857 - RNA, 19 nt, Homo sapiens
  misc_RNA (1)...(19): siRNA sense strand
acaaggaccugaagacaca

SEQ ID NO: 1238858 - RNA, 19 nt, Homo sapiens
  misc_RNA (1)...(19): siRNA sense strand
gcucugaucaggaaaguga

SEQ ID NO: 1238859 - RNA, 19 nt, Homo sapiens
  misc_RNA (1)...(19): siRNA sense strand
ucaacaaccagcucuauga

SEQ ID NO: 1238860 - RNA, 19 nt, Homo sapiens
  misc_RNA (1)...(19): siRNA sense strand
ggcugcagcucaccaugua

SEQ ID NO: 1238861 - RNA, 19 nt, Homo sapiens
  misc_RNA (1)...(19): siRNA sense strand
ugacaaggauggagauggu

SEQ ID NO: 1238862 - RNA, 19 nt, Homo sapiens
  misc_RNA (1)...(19): siRNA sense strand
acaugaacaucgacuuuga

SEQ ID NO: 1238863 - RNA, 19 nt, Homo sapiens
  misc_RNA (1)...(19): siRNA sense strand
uggcagcucugaucaggaa

SEQ ID NO: 1238864 - RNA, 19 nt, Homo sapiens
  misc_RNA (1)...(19): siRNA sense strand
cagcaacaauuccggaaca

SEQ ID NO: 1238865 - RNA, 19 nt, Homo sapiens
  misc_RNA (1)...(19): siRNA sense strand
gcagauagcaggagaugac

SEQ ID NO: 1238866 - RNA, 19 nt, Homo sapiens
  misc_RNA (1)...(19): siRNA sense strand
uaacacagucgugaacaaa

SEQ ID NO: 1238867 - RNA, 19 nt, Homo sapiens
  misc_RNA (1)...(19): siRNA sense strand
gauuaaggccuggcagaaa

SEQ ID NO: 1238868 - RNA, 19 nt, Homo sapiens
  misc_RNA (1)...(19): siRNA sense strand
gugaggaacagcaacaauu

SEQ ID NO: 1238869 - RNA, 19 nt, Homo sapiens
  misc_RNA (1)...(19): siRNA sense strand
acaaacacaugaacaucga

SEQ ID NO: 1238870 - RNA, 19 nt, Homo sapiens
  misc_RNA (1)...(19): siRNA sense strand
caccaccucuggaacaaga

SEQ ID NO: 1238871 - RNA, 19 nt, Homo sapiens
  misc_RNA (1)...(19): siRNA sense strand
gagggcauguucagagcuu

SEQ ID NO: 1238872 - RNA, 19 nt, Homo sapiens
  misc_RNA (1)...(19): siRNA sense strand
ggaaagugaggaacagcaa

SEQ ID NO: 1238873 - RNA, 19 nt, Homo sapiens
  misc_RNA (1)...(19): siRNA sense strand
gauagcaggagaugacaug

SEQ ID NO: 1238874 - RNA, 19 nt, Homo sapiens
  misc_RNA (1)...(19): siRNA sense strand
ugauugcgcucauggauac

SEQ ID NO: 1238875 - RNA, 19 nt, Homo sapiens
  misc_RNA (1)...(19): siRNA sense strand
acacaugaacaucgacuuu

SEQ ID NO: 1238876 - RNA, 19 nt, Homo sapiens
  misc_RNA (1)...(19): siRNA sense strand
acacagucgugaacaaaca

SEQ ID NO: 1238877 - RNA, 19 nt, Homo sapiens
  misc_RNA (1)...(19): siRNA sense strand
guacgcagacaaacacaug

SEQ ID NO: 1238878 - RNA, 19 nt, Homo sapiens
  misc_RNA (1)...(19): siRNA sense strand
gugcagaugagcucaagaa

SEQ ID NO: 1238879 - RNA, 19 nt, Homo sapiens
  misc_RNA (1)...(19): siRNA sense strand
acaaccagcucuaugacau

SEQ ID NO: 1238880 - RNA, 19 nt, Homo sapiens
  misc_RNA (1)...(19): siRNA sense strand
gcaacaauuccggaacauu

SEQ ID NO: 1238881 - RNA, 19 nt, Homo sapiens
  misc_RNA (1)...(19): siRNA sense strand
guucagagcuuuucaugca

SEQ ID NO: 1238882 - RNA, 19 nt, Homo sapiens
  misc_RNA (1)...(19): siRNA sense strand
gcagacaaacacaugaaca

SEQ ID NO: 1238883 - RNA, 19 nt, Homo sapiens
  misc_RNA (1)...(19): siRNA sense strand
gaugcgaaaugcagucaac

SEQ ID NO: 1238884 - RNA, 19 nt, Homo sapiens
  misc_RNA (1)...(19): siRNA sense strand
gaagacacacggguucaca

SEQ ID NO: 1238885 - RNA, 19 nt, Homo sapiens
  misc_RNA (1)...(19): siRNA sense strand
ucaucaagcucaacguucu

SEQ ID NO: 1238886 - RNA, 19 nt, Homo sapiens
  misc_RNA (1)...(19): siRNA sense strand
acaucgacuuugacaguuu

SEQ ID NO: 1238887 - RNA, 19 nt, Homo sapiens
  misc_RNA (1)...(19): siRNA sense strand
gcuacgagaugcgaaaugc

SEQ ID NO: 1238888 - RNA, 19 nt, Homo sapiens
  misc_RNA (1)...(19): siRNA sense strand
uuaacacagucgugaacaa

SEQ ID NO: 1238889 - RNA, 19 nt, Homo sapiens
  misc_RNA (1)...(19): siRNA sense strand
ugaggaacagcaacaauuc

SEQ ID NO: 1238890 - RNA, 19 nt, Homo sapiens
  misc_RNA (1)...(19): siRNA sense strand
caucgacuuugacaguuuc

SEQ ID NO: 1238891 - RNA, 19 nt, Homo sapiens
  misc_RNA (1)...(19): siRNA sense strand
gauuccaccucaacaacca

SEQ ID NO: 1238892 - RNA, 19 nt, Homo sapiens
  misc_RNA (1)...(19): siRNA sense strand
uucaucugcugcuucguua

SEQ ID NO: 1238893 - RNA, 19 nt, Homo sapiens
  misc_RNA (1)...(19): siRNA sense strand
ucaaacacuaugacacaga

SEQ ID NO: 1238894 - RNA, 19 nt, Homo sapiens
  misc_RNA (1)...(19): siRNA sense strand
aaacacaaggaccugaaga

SEQ ID NO: 1238895 - RNA, 19 nt, Homo sapiens
  misc_RNA (1)...(19): siRNA sense strand
uaucaucaagcucaacguu

SEQ ID NO: 1238896 - RNA, 19 nt, Homo sapiens
  misc_RNA (1)...(19): siRNA sense strand
guccugccguagcaugauu

SEQ ID NO: 1238897 - RNA, 19 nt, Homo sapiens
  misc_RNA (1)...(19): siRNA sense strand
cagacaaacacaugaacau

SEQ ID NO: 1238898 - RNA, 19 nt, Homo sapiens
  misc_RNA (1)...(19): siRNA sense strand
gcaggauuccaccucaaca

SEQ ID NO: 1238899 - RNA, 19 nt, Homo sapiens
  misc_RNA (1)...(19): siRNA sense strand
gaccaguccggcaccauca

SEQ ID NO: 1238900 - RNA, 19 nt, Homo sapiens
  misc_RNA (1)...(19): siRNA sense strand
caacaaccagcucuaugac

SEQ ID NO: 1238901 - RNA, 19 nt, Homo sapiens
  misc_RNA (1)...(19): siRNA sense strand
ucaggaaagugaggaacag

SEQ ID NO: 1238902 - RNA, 19 nt, Homo sapiens
  misc_RNA (1)...(19): siRNA sense strand
gacaaggauggagauggua

SEQ ID NO: 1238903 - RNA, 19 nt, Homo sapiens
  misc_RNA (1)...(19): siRNA sense strand
cgacuuugacaguuucauc

SEQ ID NO: 1238904 - RNA, 19 nt, Homo sapiens
  misc_RNA (1)...(19): siRNA sense strand
aaccagcucuaugacauca

SEQ ID NO: 1238905 - RNA, 19 nt, Homo sapiens
  misc_RNA (1)...(19): siRNA sense strand
agucaacgacgcaggauuc

SEQ ID NO: 1238906 - RNA, 19 nt, Homo sapiens
  misc_RNA (1)...(19): siRNA sense strand
uuucaaacacuaugacaca

SEQ ID NO: 1238907 - RNA, 19 nt, Homo sapiens
  misc_RNA (1)...(19): siRNA sense strand
acaaacacaaggaccugaa

SEQ ID NO: 1238908 - RNA, 19 nt, Homo sapiens
  misc_RNA (1)...(19): siRNA sense strand
caacaauuccggaacauuu

SEQ ID NO: 1238909 - RNA, 19 nt, Homo sapiens
  misc_RNA (1)...(19): siRNA sense strand
gaacaucgacuuugacagu

SEQ ID NO: 1238910 - RNA, 19 nt, Homo sapiens
  misc_RNA (1)...(19): siRNA sense strand
cagaugagcucaagaaggu

SEQ ID NO: 1238911 - RNA, 19 nt, Homo sapiens
  misc_RNA (1)...(19): siRNA sense strand
acaaggaccugaagacaca

SEQ ID NO: 1238912 - RNA, 19 nt, Homo sapiens
  misc_RNA (1)...(19): siRNA sense strand
gcucugaucaggaaaguga

SEQ ID NO: 1238913 - RNA, 19 nt, Homo sapiens
  misc_RNA (1)...(19): siRNA sense strand
ucaacaaccagcucuauga

SEQ ID NO: 1238914 - RNA, 19 nt, Homo sapiens
  misc_RNA (1)...(19): siRNA sense strand
ggcugcagcucaccaugua

SEQ ID NO: 1238915 - RNA, 19 nt, Homo sapiens
  misc_RNA (1)...(19): siRNA sense strand
ugacaaggauggagauggu

SEQ ID NO: 1238916 - RNA, 19 nt, Homo sapiens
  misc_RNA (1)...(19): siRNA sense strand
acaugaacaucgacuuuga

SEQ ID NO: 1238917 - RNA, 19 nt, Homo sapiens
  misc_RNA (1)...(19): siRNA sense strand
uggcagcucugaucaggaa

SEQ ID NO: 1238918 - RNA, 19 nt, Homo sapiens
  misc_RNA (1)...(19): siRNA sense strand
cagcaacaauuccggaaca

SEQ ID NO: 1238919 - RNA, 19 nt, Homo sapiens
  misc_RNA (1)...(19): siRNA sense strand
gcagauagcaggagaugac

SEQ ID NO: 1238920 - RNA, 19 nt, Homo sapiens
  misc_RNA (1)...(19): siRNA sense strand
uaacacagucgugaacaaa

SEQ ID NO: 1238921 - RNA, 19 nt, Homo sapiens
  misc_RNA (1)...(19): siRNA sense strand
gauuaaggccuggcagaaa

SEQ ID NO: 1238922 - RNA, 19 nt, Homo sapiens
  misc_RNA (1)...(19): siRNA sense strand
gugaggaacagcaacaauu

SEQ ID NO: 1238923 - RNA, 19 nt, Homo sapiens
  misc_RNA (1)...(19): siRNA sense strand
acaaacacaugaacaucga

SEQ ID NO: 1238924 - RNA, 19 nt, Homo sapiens
  misc_RNA (1)...(19): siRNA sense strand
caccaccucuggaacaaga

SEQ ID NO: 1238925 - RNA, 19 nt, Homo sapiens
  misc_RNA (1)...(19): siRNA sense strand
gagggcauguucagagcuu

SEQ ID NO: 1238926 - RNA, 19 nt, Homo sapiens
  misc_RNA (1)...(19): siRNA sense strand
ggaaagugaggaacagcaa

SEQ ID NO: 1238927 - RNA, 19 nt, Homo sapiens
  misc_RNA (1)...(19): siRNA sense strand
gauagcaggagaugacaug

SEQ ID NO: 1238928 - RNA, 19 nt, Homo sapiens
  misc_RNA (1)...(19): siRNA sense strand
ugauugcgcucauggauac

SEQ ID NO: 1238929 - RNA, 19 nt, Homo sapiens
  misc_RNA (1)...(19): siRNA sense strand
acacaugaacaucgacuuu

SEQ ID NO: 1238930 - RNA, 19 nt, Homo sapiens
  misc_RNA (1)...(19): siRNA sense strand
acacagucgugaacaaaca

SEQ ID NO: 1238931 - RNA, 19 nt, Homo sapiens
  misc_RNA (1)...(19): siRNA sense strand
guacgcagacaaacacaug

SEQ ID NO: 1238932 - RNA, 19 nt, Homo sapiens
  misc_RNA (1)...(19): siRNA sense strand
gugcagaugagcucaagaa

SEQ ID NO: 1238933 - RNA, 19 nt, Homo sapiens
  misc_RNA (1)...(19): siRNA sense strand
acaaccagcucuaugacau

SEQ ID NO: 1238934 - RNA, 19 nt, Homo sapiens
  misc_RNA (1)...(19): siRNA sense strand
gcaacaauuccggaacauu

SEQ ID NO: 1238935 - RNA, 19 nt, Homo sapiens
  misc_RNA (1)...(19): siRNA sense strand
guucagagcuuuucaugca

SEQ ID NO: 1238936 - RNA, 19 nt, Homo sapiens
  misc_RNA (1)...(19): siRNA sense strand
gcagacaaacacaugaaca

SEQ ID NO: 1238937 - RNA, 19 nt, Homo sapiens
  misc_RNA (1)...(19): siRNA sense strand
gaugcgaaaugcagucaac

SEQ ID NO: 1238938 - RNA, 19 nt, Homo sapiens
  misc_RNA (1)...(19): siRNA sense strand
gaagacacacggguucaca

SEQ ID NO: 1238939 - RNA, 19 nt, Homo sapiens
  misc_RNA (1)...(19): siRNA sense strand
ucaucaagcucaacguucu

SEQ ID NO: 1238940 - RNA, 19 nt, Homo sapiens
  misc_RNA (1)...(19): siRNA sense strand
acaucgacuuugacaguuu

SEQ ID NO: 1238941 - RNA, 19 nt, Homo sapiens
  misc_RNA (1)...(19): siRNA sense strand
gcuacgagaugcgaaaugc

SEQ ID NO: 1238942 - RNA, 19 nt, Homo sapiens
  misc_RNA (1)...(19): siRNA sense strand
uuaacacagucgugaacaa

SEQ ID NO: 1238943 - RNA, 19 nt, Homo sapiens
  misc_RNA (1)...(19): siRNA sense strand
ugaggaacagcaacaauuc

SEQ ID NO: 1238944 - RNA, 19 nt, Homo sapiens
  misc_RNA (1)...(19): siRNA sense strand
caucgacuuugacaguuuc

SEQ ID NO: 1238945 - RNA, 19 nt, Homo sapiens
  misc_RNA (1)...(19): siRNA sense strand
gauuccaccucaacaacca

SEQ ID NO: 1238946 - RNA, 19 nt, Homo sapiens
  misc_RNA (1)...(19): siRNA sense strand
uucaucugcugcuucguua

SEQ ID NO: 1238947 - RNA, 19 nt, Homo sapiens
  misc_RNA (1)...(19): siRNA sense strand
ucaaacacuaugacacaga

SEQ ID NO: 1238948 - RNA, 19 nt, Homo sapiens
  misc_RNA (1)...(19): siRNA sense strand
aaacacaaggaccugaaga

SEQ ID NO: 1238949 - RNA, 19 nt, Homo sapiens
  misc_RNA (1)...(19): siRNA sense strand
uaucaucaagcucaacguu

SEQ ID NO: 1238950 - RNA, 19 nt, Homo sapiens
  misc_RNA (1)...(19): siRNA sense strand
guccugccguagcaugauu

SEQ ID NO: 1238951 - RNA, 19 nt, Homo sapiens
  misc_RNA (1)...(19): siRNA sense strand
cagacaaacacaugaacau

SEQ ID NO: 1238952 - RNA, 19 nt, Homo sapiens
  misc_RNA (1)...(19): siRNA sense strand
gcaggauuccaccucaaca

SEQ ID NO: 1238953 - RNA, 19 nt, Homo sapiens
  misc_RNA (1)...(19): siRNA sense strand
gaccaguccggcaccauca

SEQ ID NO: 1238954 - RNA, 19 nt, Homo sapiens
  misc_RNA (1)...(19): siRNA sense strand
caacaaccagcucuaugac

SEQ ID NO: 1238955 - RNA, 19 nt, Homo sapiens
  misc_RNA (1)...(19): siRNA sense strand
ucaggaaagugaggaacag

SEQ ID NO: 1238956 - RNA, 19 nt, Homo sapiens
  misc_RNA (1)...(19): siRNA sense strand
gacaaggauggagauggua

SEQ ID NO: 1238957 - RNA, 19 nt, Homo sapiens
  misc_RNA (1)...(19): siRNA sense strand
cgacuuugacaguuucauc

SEQ ID NO: 1238958 - RNA, 19 nt, Homo sapiens
  misc_RNA (1)...(19): siRNA sense strand
aaccagcucuaugacauca

SEQ ID NO: 1238959 - RNA, 19 nt, Homo sapiens
  misc_RNA (1)...(19): siRNA sense strand
agucaacgacgcaggauuc

SEQ ID NO: 1238960 - RNA, 19 nt, Homo sapiens
  misc_RNA (1)...(19): siRNA sense strand
uuucaaacacuaugacaca

SEQ ID NO: 1238961 - RNA, 19 nt, Homo sapiens
  misc_RNA (1)...(19): siRNA sense strand
acaaacacaaggaccugaa

SEQ ID NO: 1238962 - RNA, 19 nt, Homo sapiens
  misc_RNA (1)...(19): siRNA sense strand
caacaauuccggaacauuu

SEQ ID NO: 1238963 - RNA, 19 nt, Homo sapiens
  misc_RNA (1)...(19): siRNA sense strand
gaacaucgacuuugacagu

SEQ ID NO: 1238964 - RNA, 19 nt, Homo sapiens
  misc_RNA (1)...(19): siRNA sense strand
cagaugagcucaagaaggu

SEQ ID NO: 1238965 - RNA, 19 nt, Homo sapiens
  misc_RNA (1)...(19): siRNA sense strand
acaaggaccugaagacaca

SEQ ID NO: 1238966 - RNA, 19 nt, Homo sapiens
  misc_RNA (1)...(19): siRNA sense strand
gcucugaucaggaaaguga

SEQ ID NO: 1238967 - RNA, 19 nt, Homo sapiens
  misc_RNA (1)...(19): siRNA sense strand
ucaacaaccagcucuauga

SEQ ID NO: 1238968 - RNA, 19 nt, Homo sapiens
  misc_RNA (1)...(19): siRNA sense strand
ggcugcagcucaccaugua

SEQ ID NO: 1238969 - RNA, 19 nt, Homo sapiens
  misc_RNA (1)...(19): siRNA sense strand
ugacaaggauggagauggu

SEQ ID NO: 1238970 - RNA, 19 nt, Homo sapiens
  misc_RNA (1)...(19): siRNA sense strand
acaugaacaucgacuuuga

SEQ ID NO: 1238971 - RNA, 19 nt, Homo sapiens
  misc_RNA (1)...(19): siRNA sense strand
uggcagcucugaucaggaa

SEQ ID NO: 1238972 - RNA, 19 nt, Homo sapiens
  misc_RNA (1)...(19): siRNA sense strand
cagcaacaauuccggaaca

SEQ ID NO: 1238973 - RNA, 19 nt, Homo sapiens
  misc_RNA (1)...(19): siRNA sense strand
gcagauagcaggagaugac

SEQ ID NO: 1238974 - RNA, 19 nt, Homo sapiens
  misc_RNA (1)...(19): siRNA sense strand
uaacacagucgugaacaaa

SEQ ID NO: 1238975 - RNA, 19 nt, Homo sapiens
  misc_RNA (1)...(19): siRNA sense strand
gauuaaggccuggcagaaa

SEQ ID NO: 1238976 - RNA, 19 nt, Homo sapiens
  misc_RNA (1)...(19): siRNA sense strand
gugaggaacagcaacaauu

SEQ ID NO: 1238977 - RNA, 19 nt, Homo sapiens
  misc_RNA (1)...(19): siRNA sense strand
acaaacacaugaacaucga

SEQ ID NO: 1238978 - RNA, 19 nt, Homo sapiens
  misc_RNA (1)...(19): siRNA sense strand
caccaccucuggaacaaga

SEQ ID NO: 1238979 - RNA, 19 nt, Homo sapiens
  misc_RNA (1)...(19): siRNA sense strand
gagggcauguucagagcuu

SEQ ID NO: 1238980 - RNA, 19 nt, Homo sapiens
  misc_RNA (1)...(19): siRNA sense strand
ggaaagugaggaacagcaa

SEQ ID NO: 1238981 - RNA, 19 nt, Homo sapiens
  misc_RNA (1)...(19): siRNA sense strand
gauagcaggagaugacaug

SEQ ID NO: 1238982 - RNA, 19 nt, Homo sapiens
  misc_RNA (1)...(19): siRNA sense strand
ugauugcgcucauggauac

SEQ ID NO: 1238983 - RNA, 19 nt, Homo sapiens
  misc_RNA (1)...(19): siRNA sense strand
acacaugaacaucgacuuu

SEQ ID NO: 1238984 - RNA, 19 nt, Homo sapiens
  misc_RNA (1)...(19): siRNA sense strand
acacagucgugaacaaaca

SEQ ID NO: 1238985 - RNA, 19 nt, Homo sapiens
  misc_RNA (1)...(19): siRNA sense strand
guacgcagacaaacacaug

SEQ ID NO: 1238986 - RNA, 19 nt, Homo sapiens
  misc_RNA (1)...(19): siRNA sense strand
gugcagaugagcucaagaa

SEQ ID NO: 1238987 - RNA, 19 nt, Homo sapiens
  misc_RNA (1)...(19): siRNA sense strand
acaaccagcucuaugacau

SEQ ID NO: 1238988 - RNA, 19 nt, Homo sapiens
  misc_RNA (1)...(19): siRNA sense strand
gcaacaauuccggaacauu

SEQ ID NO: 1238989 - RNA, 19 nt, Homo sapiens
  misc_RNA (1)...(19): siRNA sense strand
guucagagcuuuucaugca

SEQ ID NO: 1238990 - RNA, 19 nt, Homo sapiens
  misc_RNA (1)...(19): siRNA sense strand
gcagacaaacacaugaaca

SEQ ID NO: 1238991 - RNA, 19 nt, Homo sapiens
  misc_RNA (1)...(19): siRNA sense strand
gaugcgaaaugcagucaac

SEQ ID NO: 1238992 - RNA, 19 nt, Homo sapiens
  misc_RNA (1)...(19): siRNA sense strand
gaagacacacggguucaca

SEQ ID NO: 1238993 - RNA, 19 nt, Homo sapiens
  misc_RNA (1)...(19): siRNA sense strand
ucaucaagcucaacguucu

SEQ ID NO: 1238994 - RNA, 19 nt, Homo sapiens
  misc_RNA (1)...(19): siRNA sense strand
acaucgacuuugacaguuu

SEQ ID NO: 1238995 - RNA, 19 nt, Homo sapiens
  misc_RNA (1)...(19): siRNA sense strand
gcuacgagaugcgaaaugc

SEQ ID NO: 1238996 - RNA, 19 nt, Homo sapiens
  misc_RNA (1)...(19): siRNA sense strand
uuaacacagucgugaacaa

SEQ ID NO: 1238997 - RNA, 19 nt, Homo sapiens
  misc_RNA (1)...(19): siRNA sense strand
ugaggaacagcaacaauuc

SEQ ID NO: 1238998 - RNA, 19 nt, Homo sapiens
  misc_RNA (1)...(19): siRNA sense strand
caucgacuuugacaguuuc

SEQ ID NO: 1238999 - RNA, 19 nt, Homo sapiens
  misc_RNA (1)...(19): siRNA sense strand
gauuccaccucaacaacca

SEQ ID NO: 1239000 - RNA, 19 nt, Homo sapiens
  misc_RNA (1)...(19): siRNA sense strand
uucaucugcugcuucguua

SEQ ID NO: 1239001 - RNA, 19 nt, Homo sapiens
  misc_RNA (1)...(19): siRNA sense strand
ucaaacacuaugacacaga

SEQ ID NO: 1239002 - RNA, 19 nt, Homo sapiens
  misc_RNA (1)...(19): siRNA sense strand
aaacacaaggaccugaaga

SEQ ID NO: 1239003 - RNA, 19 nt, Homo sapiens
  misc_RNA (1)...(19): siRNA sense strand
uaucaucaagcucaacguu

SEQ ID NO: 1239004 - RNA, 19 nt, Homo sapiens
  misc_RNA (1)...(19): siRNA sense strand
guccugccguagcaugauu

SEQ ID NO: 1239005 - RNA, 19 nt, Homo sapiens
  misc_RNA (1)...(19): siRNA sense strand
cagacaaacacaugaacau

SEQ ID NO: 1239006 - RNA, 19 nt, Homo sapiens
  misc_RNA (1)...(19): siRNA sense strand
gcaggauuccaccucaaca

SEQ ID NO: 1239007 - RNA, 19 nt, Homo sapiens
  misc_RNA (1)...(19): siRNA sense strand
gaccaguccggcaccauca

SEQ ID NO: 1239008 - RNA, 19 nt, Homo sapiens
  misc_RNA (1)...(19): siRNA sense strand
caacaaccagcucuaugac

SEQ ID NO: 1239009 - RNA, 19 nt, Homo sapiens
  misc_RNA (1)...(19): siRNA sense strand
ucaggaaagugaggaacag

SEQ ID NO: 1239010 - RNA, 19 nt, Homo sapiens
  misc_RNA (1)...(19): siRNA sense strand
gacaaggauggagauggua

SEQ ID NO: 1239011 - RNA, 19 nt, Homo sapiens
  misc_RNA (1)...(19): siRNA sense strand
cgacuuugacaguuucauc

SEQ ID NO: 1239012 - RNA, 19 nt, Homo sapiens
  misc_RNA (1)...(19): siRNA sense strand
aaccagcucuaugacauca

SEQ ID NO: 1239013 - RNA, 19 nt, Homo sapiens
  misc_RNA (1)...(19): siRNA sense strand
agucaacgacgcaggauuc

SEQ ID NO: 1239014 - RNA, 19 nt, Homo sapiens
  misc_RNA (1)...(19): siRNA sense strand
uuucaaacacuaugacaca

SEQ ID NO: 1239015 - RNA, 19 nt, Homo sapiens
  misc_RNA (1)...(19): siRNA sense strand
acaaacacaaggaccugaa

SEQ ID NO: 1239016 - RNA, 19 nt, Homo sapiens
  misc_RNA (1)...(19): siRNA sense strand
gaacaucgacuuugacagu

SEQ ID NO: 1239017 - RNA, 19 nt, Homo sapiens
  misc_RNA (1)...(19): siRNA sense strand
cagaugagcucaagaaggu

SEQ ID NO: 1239018 - RNA, 19 nt, Homo sapiens
  misc_RNA (1)...(19): siRNA sense strand
acaaggaccugaagacaca

SEQ ID NO: 1239019 - RNA, 19 nt, Homo sapiens
  misc_RNA (1)...(19): siRNA sense strand
ucaacaaccagcucuauga

SEQ ID NO: 1239020 - RNA, 19 nt, Homo sapiens
  misc_RNA (1)...(19): siRNA sense strand
ggcugcagcucaccaugua

SEQ ID NO: 1239021 - RNA, 19 nt, Homo sapiens
  misc_RNA (1)...(19): siRNA sense strand
ugacaaggauggagauggu

SEQ ID NO: 1239022 - RNA, 19 nt, Homo sapiens
  misc_RNA (1)...(19): siRNA sense strand
acaugaacaucgacuuuga

SEQ ID NO: 1239023 - RNA, 19 nt, Homo sapiens
  misc_RNA (1)...(19): siRNA sense strand
uaacacagucgugaacaaa

SEQ ID NO: 1239024 - RNA, 19 nt, Homo sapiens
  misc_RNA (1)...(19): siRNA sense strand
gauuaaggccuggcagaaa

SEQ ID NO: 1239025 - RNA, 19 nt, Homo sapiens
  misc_RNA (1)...(19): siRNA sense strand
acaaacacaugaacaucga

SEQ ID NO: 1239026 - RNA, 19 nt, Homo sapiens
  misc_RNA (1)...(19): siRNA sense strand
caccaccucuggaacaaga

SEQ ID NO: 1239027 - RNA, 19 nt, Homo sapiens
  misc_RNA (1)...(19): siRNA sense strand
gagggcauguucagagcuu

SEQ ID NO: 1239028 - RNA, 19 nt, Homo sapiens
  misc_RNA (1)...(19): siRNA sense strand
ugauugcgcucauggauac

SEQ ID NO: 1239029 - RNA, 19 nt, Homo sapiens
  misc_RNA (1)...(19): siRNA sense strand
acacaugaacaucgacuuu

SEQ ID NO: 1239030 - RNA, 19 nt, Homo sapiens
  misc_RNA (1)...(19): siRNA sense strand
acacagucgugaacaaaca

SEQ ID NO: 1239031 - RNA, 19 nt, Homo sapiens
  misc_RNA (1)...(19): siRNA sense strand
guacgcagacaaacacaug

SEQ ID NO: 1239032 - RNA, 19 nt, Homo sapiens
  misc_RNA (1)...(19): siRNA sense strand
gugcagaugagcucaagaa

SEQ ID NO: 1239033 - RNA, 19 nt, Homo sapiens
  misc_RNA (1)...(19): siRNA sense strand
acaaccagcucuaugacau

SEQ ID NO: 1239034 - RNA, 19 nt, Homo sapiens
  misc_RNA (1)...(19): siRNA sense strand
guucagagcuuuucaugca

SEQ ID NO: 1239035 - RNA, 19 nt, Homo sapiens
  misc_RNA (1)...(19): siRNA sense strand
gcagacaaacacaugaaca

SEQ ID NO: 1239036 - RNA, 19 nt, Homo sapiens
  misc_RNA (1)...(19): siRNA sense strand
gaugcgaaaugcagucaac

SEQ ID NO: 1239037 - RNA, 19 nt, Homo sapiens
  misc_RNA (1)...(19): siRNA sense strand
gaagacacacggguucaca

SEQ ID NO: 1239038 - RNA, 19 nt, Homo sapiens
  misc_RNA (1)...(19): siRNA sense strand
ucaucaagcucaacguucu

SEQ ID NO: 1239039 - RNA, 19 nt, Homo sapiens
  misc_RNA (1)...(19): siRNA sense strand
acaucgacuuugacaguuu

SEQ ID NO: 1239040 - RNA, 19 nt, Homo sapiens
  misc_RNA (1)...(19): siRNA sense strand
gcuacgagaugcgaaaugc

SEQ ID NO: 1239041 - RNA, 19 nt, Homo sapiens
  misc_RNA (1)...(19): siRNA sense strand
uuaacacagucgugaacaa

SEQ ID NO: 1239042 - RNA, 19 nt, Homo sapiens
  misc_RNA (1)...(19): siRNA sense strand
caucgacuuugacaguuuc

SEQ ID NO: 1239043 - RNA, 19 nt, Homo sapiens
  misc_RNA (1)...(19): siRNA sense strand
gauuccaccucaacaacca

SEQ ID NO: 1239044 - RNA, 19 nt, Homo sapiens
  misc_RNA (1)...(19): siRNA sense strand
uucaucugcugcuucguua

SEQ ID NO: 1239045 - RNA, 19 nt, Homo sapiens
  misc_RNA (1)...(19): siRNA sense strand
ucaaacacuaugacacaga

SEQ ID NO: 1239046 - RNA, 19 nt, Homo sapiens
  misc_RNA (1)...(19): siRNA sense strand
aaacacaaggaccugaaga

SEQ ID NO: 1239047 - RNA, 19 nt, Homo sapiens
  misc_RNA (1)...(19): siRNA sense strand
uaucaucaagcucaacguu

SEQ ID NO: 1239048 - RNA, 19 nt, Homo sapiens
  misc_RNA (1)...(19): siRNA sense strand
guccugccguagcaugauu

SEQ ID NO: 1239049 - RNA, 19 nt, Homo sapiens
  misc_RNA (1)...(19): siRNA sense strand
cagacaaacacaugaacau

SEQ ID NO: 1239050 - RNA, 19 nt, Homo sapiens
  misc_RNA (1)...(19): siRNA sense strand
gcaggauuccaccucaaca

SEQ ID NO: 1239051 - RNA, 19 nt, Homo sapiens
  misc_RNA (1)...(19): siRNA sense strand
gaccaguccggcaccauca

SEQ ID NO: 1239052 - RNA, 19 nt, Homo sapiens
  misc_RNA (1)...(19): siRNA sense strand
caacaaccagcucuaugac

SEQ ID NO: 1239053 - RNA, 19 nt, Homo sapiens
  misc_RNA (1)...(19): siRNA sense strand
uuucaaacacuaugacaca

SEQ ID NO: 1239054 - RNA, 19 nt, Homo sapiens
  misc_RNA (1)...(19): siRNA sense strand
gacaaggauggagauggua

SEQ ID NO: 1239055 - RNA, 19 nt, Homo sapiens
  misc_RNA (1)...(19): siRNA sense strand
cgacuuugacaguuucauc

SEQ ID NO: 1239056 - RNA, 19 nt, Homo sapiens
  misc_RNA (1)...(19): siRNA sense strand
acaaacacaaggaccugaa

SEQ ID NO: 1239057 - RNA, 19 nt, Homo sapiens
  misc_RNA (1)...(19): siRNA sense strand
aaccagcucuaugacauca

SEQ ID NO: 1239058 - RNA, 19 nt, Homo sapiens
  misc_RNA (1)...(19): siRNA sense strand
agucaacgacgcaggauuc

SEQ ID NO: 1239059 - RNA, 19 nt, Homo sapiens
  misc_RNA (1)...(19): siRNA sense strand
gaacaucgacuuugacagu

SEQ ID NO: 1239060 - RNA, 19 nt, Homo sapiens
  misc_RNA (1)...(19): siRNA sense strand
cagaugagcucaagaaggu

SEQ ID NO: 1239061 - RNA, 19 nt, Homo sapiens
  misc_RNA (1)...(19): siRNA sense strand
acaaggaccugaagacaca

SEQ ID NO: 1239062 - RNA, 19 nt, Homo sapiens
  misc_RNA (1)...(19): siRNA sense strand
ucaacaaccagcucuauga

SEQ ID NO: 1239063 - RNA, 19 nt, Homo sapiens
  misc_RNA (1)...(19): siRNA sense strand
ggcugcagcucaccaugua

SEQ ID NO: 1239064 - RNA, 19 nt, Homo sapiens
  misc_RNA (1)...(19): siRNA sense strand
ugacaaggauggagauggu

SEQ ID NO: 1239065 - RNA, 19 nt, Homo sapiens
  misc_RNA (1)...(19): siRNA sense strand
acaugaacaucgacuuuga

SEQ ID NO: 1239066 - RNA, 19 nt, Homo sapiens
  misc_RNA (1)...(19): siRNA sense strand
uaacacagucgugaacaaa

SEQ ID NO: 1239067 - RNA, 19 nt, Homo sapiens
  misc_RNA (1)...(19): siRNA sense strand
gauuaaggccuggcagaaa

SEQ ID NO: 1239068 - RNA, 19 nt, Homo sapiens
  misc_RNA (1)...(19): siRNA sense strand
acaaacacaugaacaucga

SEQ ID NO: 1239069 - RNA, 19 nt, Homo sapiens
  misc_RNA (1)...(19): siRNA sense strand
caccaccucuggaacaaga

SEQ ID NO: 1239070 - RNA, 19 nt, Homo sapiens
  misc_RNA (1)...(19): siRNA sense strand
gagggcauguucagagcuu

SEQ ID NO: 1239071 - RNA, 19 nt, Homo sapiens
  misc_RNA (1)...(19): siRNA sense strand
ugauugcgcucauggauac

SEQ ID NO: 1239072 - RNA, 19 nt, Homo sapiens
  misc_RNA (1)...(19): siRNA sense strand
acacaugaacaucgacuuu

SEQ ID NO: 1239073 - RNA, 19 nt, Homo sapiens
  misc_RNA (1)...(19): siRNA sense strand
acacagucgugaacaaaca

SEQ ID NO: 1239074 - RNA, 19 nt, Homo sapiens
  misc_RNA (1)...(19): siRNA sense strand
guacgcagacaaacacaug

SEQ ID NO: 1239075 - RNA, 19 nt, Homo sapiens
  misc_RNA (1)...(19): siRNA sense strand
gugcagaugagcucaagaa

SEQ ID NO: 1239076 - RNA, 19 nt, Homo sapiens
  misc_RNA (1)...(19): siRNA sense strand
acaaccagcucuaugacau

SEQ ID NO: 1239077 - RNA, 19 nt, Homo sapiens
  misc_RNA (1)...(19): siRNA sense strand
guucagagcuuuucaugca

SEQ ID NO: 1239078 - RNA, 19 nt, Homo sapiens
  misc_RNA (1)...(19): siRNA sense strand
gcagacaaacacaugaaca

SEQ ID NO: 1239079 - RNA, 19 nt, Homo sapiens
  misc_RNA (1)...(19): siRNA sense strand
gaugcgaaaugcagucaac

SEQ ID NO: 1239080 - RNA, 19 nt, Homo sapiens
  misc_RNA (1)...(19): siRNA sense strand
gaagacacacggguucaca

SEQ ID NO: 1239081 - RNA, 19 nt, Homo sapiens
  misc_RNA (1)...(19): siRNA sense strand
ucaucaagcucaacguucu

SEQ ID NO: 1239082 - RNA, 19 nt, Homo sapiens
  misc_RNA (1)...(19): siRNA sense strand
acaucgacuuugacaguuu

SEQ ID NO: 1239083 - RNA, 19 nt, Homo sapiens
  misc_RNA (1)...(19): siRNA sense strand
gcuacgagaugcgaaaugc

SEQ ID NO: 1239084 - RNA, 19 nt, Homo sapiens
  misc_RNA (1)...(19): siRNA sense strand
uuaacacagucgugaacaa

SEQ ID NO: 1239085 - RNA, 19 nt, Homo sapiens
  misc_RNA (1)...(19): siRNA sense strand
caucgacuuugacaguuuc

SEQ ID NO: 1239086 - RNA, 19 nt, Homo sapiens
  misc_RNA (1)...(19): siRNA sense strand
gauuccaccucaacaacca

SEQ ID NO: 1239087 - RNA, 19 nt, Homo sapiens
  misc_RNA (1)...(19): siRNA sense strand
uucaucugcugcuucguua

SEQ ID NO: 1239088 - RNA, 19 nt, Homo sapiens
  misc_RNA (1)...(19): siRNA sense strand
ucaaacacuaugacacaga

SEQ ID NO: 1239089 - RNA, 19 nt, Homo sapiens
  misc_RNA (1)...(19): siRNA sense strand
aaacacaaggaccugaaga

SEQ ID NO: 1239090 - RNA, 19 nt, Homo sapiens
  misc_RNA (1)...(19): siRNA sense strand
uaucaucaagcucaacguu

SEQ ID NO: 1239091 - RNA, 19 nt, Homo sapiens
  misc_RNA (1)...(19): siRNA sense strand
guccugccguagcaugauu

SEQ ID NO: 1239092 - RNA, 19 nt, Homo sapiens
  misc_RNA (1)...(19): siRNA sense strand
cagacaaacacaugaacau

SEQ ID NO: 1239093 - RNA, 19 nt, Homo sapiens
  misc_RNA (1)...(19): siRNA sense strand
gcaggauuccaccucaaca

SEQ ID NO: 1239094 - RNA, 19 nt, Homo sapiens
  misc_RNA (1)...(19): siRNA sense strand
gaccaguccggcaccauca

SEQ ID NO: 1239095 - RNA, 19 nt, Homo sapiens
  misc_RNA (1)...(19): siRNA sense strand
caacaaccagcucuaugac

SEQ ID NO: 1239096 - RNA, 19 nt, Homo sapiens
  misc_RNA (1)...(19): siRNA sense strand
uuucaaacacuaugacaca

SEQ ID NO: 1239097 - RNA, 19 nt, Homo sapiens
  misc_RNA (1)...(19): siRNA sense strand
gacaaggauggagauggua

SEQ ID NO: 1239098 - RNA, 19 nt, Homo sapiens
  misc_RNA (1)...(19): siRNA sense strand
cgacuuugacaguuucauc

SEQ ID NO: 1239099 - RNA, 19 nt, Homo sapiens
  misc_RNA (1)...(19): siRNA sense strand
acaaacacaaggaccugaa

SEQ ID NO: 1239100 - RNA, 19 nt, Homo sapiens
  misc_RNA (1)...(19): siRNA sense strand
aaccagcucuaugacauca

SEQ ID NO: 1239101 - RNA, 19 nt, Homo sapiens
  misc_RNA (1)...(19): siRNA sense strand
agucaacgacgcaggauuc

SEQ ID NO: 1239102 - RNA, 19 nt, Homo sapiens
  misc_RNA (1)...(19): siRNA sense strand
caacaauuccggaacauuu

SEQ ID NO: 1239103 - RNA, 19 nt, Homo sapiens
  misc_RNA (1)...(19): siRNA sense strand
gaacaucgacuuugacagu

SEQ ID NO: 1239104 - RNA, 19 nt, Homo sapiens
  misc_RNA (1)...(19): siRNA sense strand
cagaugagcucaagaaggu

SEQ ID NO: 1239105 - RNA, 19 nt, Homo sapiens
  misc_RNA (1)...(19): siRNA sense strand
acaaggaccugaagacaca

SEQ ID NO: 1239106 - RNA, 19 nt, Homo sapiens
  misc_RNA (1)...(19): siRNA sense strand
gcucugaucaggaaaguga

SEQ ID NO: 1239107 - RNA, 19 nt, Homo sapiens
  misc_RNA (1)...(19): siRNA sense strand
ucaacaaccagcucuauga

SEQ ID NO: 1239108 - RNA, 19 nt, Homo sapiens
  misc_RNA (1)...(19): siRNA sense strand
ggcugcagcucaccaugua

SEQ ID NO: 1239109 - RNA, 19 nt, Homo sapiens
  misc_RNA (1)...(19): siRNA sense strand
ugacaaggauggagauggu

SEQ ID NO: 1239110 - RNA, 19 nt, Homo sapiens
  misc_RNA (1)...(19): siRNA sense strand
acaugaacaucgacuuuga

SEQ ID NO: 1239111 - RNA, 19 nt, Homo sapiens
  misc_RNA (1)...(19): siRNA sense strand
uggcagcucugaucaggaa

SEQ ID NO: 1239112 - RNA, 19 nt, Homo sapiens
  misc_RNA (1)...(19): siRNA sense strand
cagcaacaauuccggaaca

SEQ ID NO: 1239113 - RNA, 19 nt, Homo sapiens
  misc_RNA (1)...(19): siRNA sense strand
gcagauagcaggagaugac

SEQ ID NO: 1239114 - RNA, 19 nt, Homo sapiens
  misc_RNA (1)...(19): siRNA sense strand
uaacacagucgugaacaaa

SEQ ID NO: 1239115 - RNA, 19 nt, Homo sapiens
  misc_RNA (1)...(19): siRNA sense strand
gauuaaggccuggcagaaa

SEQ ID NO: 1239116 - RNA, 19 nt, Homo sapiens
  misc_RNA (1)...(19): siRNA sense strand
gugaggaacagcaacaauu

SEQ ID NO: 1239117 - RNA, 19 nt, Homo sapiens
  misc_RNA (1)...(19): siRNA sense strand
acaaacacaugaacaucga

SEQ ID NO: 1239118 - RNA, 19 nt, Homo sapiens
  misc_RNA (1)...(19): siRNA sense strand
caccaccucuggaacaaga

SEQ ID NO: 1239119 - RNA, 19 nt, Homo sapiens
  misc_RNA (1)...(19): siRNA sense strand
gagggcauguucagagcuu

SEQ ID NO: 1239120 - RNA, 19 nt, Homo sapiens
  misc_RNA (1)...(19): siRNA sense strand
ggaaagugaggaacagcaa

SEQ ID NO: 1239121 - RNA, 19 nt, Homo sapiens
  misc_RNA (1)...(19): siRNA sense strand
gauagcaggagaugacaug

SEQ ID NO: 1239122 - RNA, 19 nt, Homo sapiens
  misc_RNA (1)...(19): siRNA sense strand
ugauugcgcucauggauac

SEQ ID NO: 1239123 - RNA, 19 nt, Homo sapiens
  misc_RNA (1)...(19): siRNA sense strand
acacaugaacaucgacuuu

SEQ ID NO: 1239124 - RNA, 19 nt, Homo sapiens
  misc_RNA (1)...(19): siRNA sense strand
acacagucgugaacaaaca

SEQ ID NO: 1239125 - RNA, 19 nt, Homo sapiens
  misc_RNA (1)...(19): siRNA sense strand
guacgcagacaaacacaug

SEQ ID NO: 1239126 - RNA, 19 nt, Homo sapiens
  misc_RNA (1)...(19): siRNA sense strand
gugcagaugagcucaagaa

SEQ ID NO: 1239127 - RNA, 19 nt, Homo sapiens
  misc_RNA (1)...(19): siRNA sense strand
acaaccagcucuaugacau

SEQ ID NO: 1239128 - RNA, 19 nt, Homo sapiens
  misc_RNA (1)...(19): siRNA sense strand
gcaacaauuccggaacauu

SEQ ID NO: 1239129 - RNA, 19 nt, Homo sapiens
  misc_RNA (1)...(19): siRNA sense strand
guucagagcuuuucaugca

SEQ ID NO: 1239130 - RNA, 19 nt, Homo sapiens
  misc_RNA (1)...(19): siRNA sense strand
gcagacaaacacaugaaca

SEQ ID NO: 1239131 - RNA, 19 nt, Homo sapiens
  misc_RNA (1)...(19): siRNA sense strand
gaugcgaaaugcagucaac

SEQ ID NO: 1239132 - RNA, 19 nt, Homo sapiens
  misc_RNA (1)...(19): siRNA sense strand
gaagacacacggguucaca

SEQ ID NO: 1239133 - RNA, 19 nt, Homo sapiens
  misc_RNA (1)...(19): siRNA sense strand
ucaucaagcucaacguucu

SEQ ID NO: 1239134 - RNA, 19 nt, Homo sapiens
  misc_RNA (1)...(19): siRNA sense strand
acaucgacuuugacaguuu

SEQ ID NO: 1239135 - RNA, 19 nt, Homo sapiens
  misc_RNA (1)...(19): siRNA sense strand
gcuacgagaugcgaaaugc

SEQ ID NO: 1239136 - RNA, 19 nt, Homo sapiens
  misc_RNA (1)...(19): siRNA sense strand
uuaacacagucgugaacaa

SEQ ID NO: 1239137 - RNA, 19 nt, Homo sapiens
  misc_RNA (1)...(19): siRNA sense strand
ugaggaacagcaacaauuc

SEQ ID NO: 1239138 - RNA, 19 nt, Homo sapiens
  misc_RNA (1)...(19): siRNA sense strand
caucgacuuugacaguuuc

SEQ ID NO: 1239139 - RNA, 19 nt, Homo sapiens
  misc_RNA (1)...(19): siRNA sense strand
gauuccaccucaacaacca

SEQ ID NO: 1239140 - RNA, 19 nt, Homo sapiens
  misc_RNA (1)...(19): siRNA sense strand
uucaucugcugcuucguua

SEQ ID NO: 1239141 - RNA, 19 nt, Homo sapiens
  misc_RNA (1)...(19): siRNA sense strand
ucaaacacuaugacacaga

SEQ ID NO: 1239142 - RNA, 19 nt, Homo sapiens
  misc_RNA (1)...(19): siRNA sense strand
aaacacaaggaccugaaga

SEQ ID NO: 1239143 - RNA, 19 nt, Homo sapiens
  misc_RNA (1)...(19): siRNA sense strand
uaucaucaagcucaacguu

SEQ ID NO: 1239144 - RNA, 19 nt, Homo sapiens
  misc_RNA (1)...(19): siRNA sense strand
guccugccguagcaugauu

SEQ ID NO: 1239145 - RNA, 19 nt, Homo sapiens
  misc_RNA (1)...(19): siRNA sense strand
cagacaaacacaugaacau

SEQ ID NO: 1239146 - RNA, 19 nt, Homo sapiens
  misc_RNA (1)...(19): siRNA sense strand
gcaggauuccaccucaaca

SEQ ID NO: 1239147 - RNA, 19 nt, Homo sapiens
  misc_RNA (1)...(19): siRNA sense strand
gaccaguccggcaccauca

SEQ ID NO: 1239148 - RNA, 19 nt, Homo sapiens
  misc_RNA (1)...(19): siRNA sense strand
caacaaccagcucuaugac

SEQ ID NO: 1239149 - RNA, 19 nt, Homo sapiens
  misc_RNA (1)...(19): siRNA sense strand
ucaggaaagugaggaacag

SEQ ID NO: 1239150 - RNA, 19 nt, Homo sapiens
  misc_RNA (1)...(19): siRNA sense strand
gacaaggauggagauggua

SEQ ID NO: 1239151 - RNA, 19 nt, Homo sapiens
  misc_RNA (1)...(19): siRNA sense strand
cgacuuugacaguuucauc

SEQ ID NO: 1239152 - RNA, 19 nt, Homo sapiens
  misc_RNA (1)...(19): siRNA sense strand
aaccagcucuaugacauca

SEQ ID NO: 1239153 - RNA, 19 nt, Homo sapiens
  misc_RNA (1)...(19): siRNA sense strand
agucaacgacgcaggauuc

SEQ ID NO: 1239154 - RNA, 19 nt, Homo sapiens
  misc_RNA (1)...(19): siRNA sense strand
uuucaaacacuaugacaca

SEQ ID NO: 1239155 - RNA, 19 nt, Homo sapiens
  misc_RNA (1)...(19): siRNA sense strand
acaaacacaaggaccugaa

SEQ ID NO: 1239156 - RNA, 19 nt, Homo sapiens
  misc_RNA (1)...(19): siRNA sense strand
caacaauuccggaacauuu

SEQ ID NO: 1239157 - RNA, 19 nt, Homo sapiens
  misc_RNA (1)...(19): siRNA sense strand
gaacaucgacuuugacagu

SEQ ID NO: 1239158 - RNA, 19 nt, Homo sapiens
  misc_RNA (1)...(19): siRNA sense strand
cagaugagcucaagaaggu

SEQ ID NO: 1239159 - RNA, 19 nt, Homo sapiens
  misc_RNA (1)...(19): siRNA sense strand
acaaggaccugaagacaca

SEQ ID NO: 1239160 - RNA, 19 nt, Homo sapiens
  misc_RNA (1)...(19): siRNA sense strand
gcucugaucaggaaaguga

SEQ ID NO: 1239161 - RNA, 19 nt, Homo sapiens
  misc_RNA (1)...(19): siRNA sense strand
ucaacaaccagcucuauga

SEQ ID NO: 1239162 - RNA, 19 nt, Homo sapiens
  misc_RNA (1)...(19): siRNA sense strand
ggcugcagcucaccaugua

SEQ ID NO: 1239163 - RNA, 19 nt, Homo sapiens
  misc_RNA (1)...(19): siRNA sense strand
ugacaaggauggagauggu

SEQ ID NO: 1239164 - RNA, 19 nt, Homo sapiens
  misc_RNA (1)...(19): siRNA sense strand
acaugaacaucgacuuuga

SEQ ID NO: 1239165 - RNA, 19 nt, Homo sapiens
  misc_RNA (1)...(19): siRNA sense strand
uggcagcucugaucaggaa

SEQ ID NO: 1239166 - RNA, 19 nt, Homo sapiens
  misc_RNA (1)...(19): siRNA sense strand
cagcaacaauuccggaaca

SEQ ID NO: 1239167 - RNA, 19 nt, Homo sapiens
  misc_RNA (1)...(19): siRNA sense strand
gcagauagcaggagaugac

SEQ ID NO: 1239168 - RNA, 19 nt, Homo sapiens
  misc_RNA (1)...(19): siRNA sense strand
uaacacagucgugaacaaa

SEQ ID NO: 1239169 - RNA, 19 nt, Homo sapiens
  misc_RNA (1)...(19): siRNA sense strand
gauuaaggccuggcagaaa

SEQ ID NO: 1239170 - RNA, 19 nt, Homo sapiens
  misc_RNA (1)...(19): siRNA sense strand
gugaggaacagcaacaauu

SEQ ID NO: 1239171 - RNA, 19 nt, Homo sapiens
  misc_RNA (1)...(19): siRNA sense strand
acaaacacaugaacaucga

SEQ ID NO: 1239172 - RNA, 19 nt, Homo sapiens
  misc_RNA (1)...(19): siRNA sense strand
caccaccucuggaacaaga

SEQ ID NO: 1239173 - RNA, 19 nt, Homo sapiens
  misc_RNA (1)...(19): siRNA sense strand
gagggcauguucagagcuu

SEQ ID NO: 1239174 - RNA, 19 nt, Homo sapiens
  misc_RNA (1)...(19): siRNA sense strand
ggaaagugaggaacagcaa

SEQ ID NO: 1239175 - RNA, 19 nt, Homo sapiens
  misc_RNA (1)...(19): siRNA sense strand
gauagcaggagaugacaug

SEQ ID NO: 1239176 - RNA, 19 nt, Homo sapiens
  misc_RNA (1)...(19): siRNA sense strand
ugauugcgcucauggauac

SEQ ID NO: 1239177 - RNA, 19 nt, Homo sapiens
  misc_RNA (1)...(19): siRNA sense strand
acacaugaacaucgacuuu

SEQ ID NO: 1239178 - RNA, 19 nt, Homo sapiens
  misc_RNA (1)...(19): siRNA sense strand
acacagucgugaacaaaca

SEQ ID NO: 1239179 - RNA, 19 nt, Homo sapiens
  misc_RNA (1)...(19): siRNA sense strand
guacgcagacaaacacaug

SEQ ID NO: 1239180 - RNA, 19 nt, Homo sapiens
  misc_RNA (1)...(19): siRNA sense strand
gugcagaugagcucaagaa

SEQ ID NO: 1239181 - RNA, 19 nt, Homo sapiens
  misc_RNA (1)...(19): siRNA sense strand
acaaccagcucuaugacau

SEQ ID NO: 1239182 - RNA, 19 nt, Homo sapiens
  misc_RNA (1)...(19): siRNA sense strand
gcaacaauuccggaacauu

SEQ ID NO: 1239183 - RNA, 19 nt, Homo sapiens
  misc_RNA (1)...(19): siRNA sense strand
guucagagcuuuucaugca

SEQ ID NO: 1239184 - RNA, 19 nt, Homo sapiens
  misc_RNA (1)...(19): siRNA sense strand
gcagacaaacacaugaaca

SEQ ID NO: 1239185 - RNA, 19 nt, Homo sapiens
  misc_RNA (1)...(19): siRNA sense strand
gaugcgaaaugcagucaac

SEQ ID NO: 1239186 - RNA, 19 nt, Homo sapiens
  misc_RNA (1)...(19): siRNA sense strand
gaagacacacggguucaca

SEQ ID NO: 1239187 - RNA, 19 nt, Homo sapiens
  misc_RNA (1)...(19): siRNA sense strand
ucaucaagcucaacguucu

SEQ ID NO: 1239188 - RNA, 19 nt, Homo sapiens
  misc_RNA (1)...(19): siRNA sense strand
acaucgacuuugacaguuu

SEQ ID NO: 1239189 - RNA, 19 nt, Homo sapiens
  misc_RNA (1)...(19): siRNA sense strand
gcuacgagaugcgaaaugc

SEQ ID NO: 1239190 - RNA, 19 nt, Homo sapiens
  misc_RNA (1)...(19): siRNA sense strand
uuaacacagucgugaacaa

SEQ ID NO: 1239191 - RNA, 19 nt, Homo sapiens
  misc_RNA (1)...(19): siRNA sense strand
ugaggaacagcaacaauuc

SEQ ID NO: 1239192 - RNA, 19 nt, Homo sapiens
  misc_RNA (1)...(19): siRNA sense strand
caucgacuuugacaguuuc

SEQ ID NO: 1239193 - RNA, 19 nt, Homo sapiens
  misc_RNA (1)...(19): siRNA sense strand
gauuccaccucaacaacca

SEQ ID NO: 1239194 - RNA, 19 nt, Homo sapiens
  misc_RNA (1)...(19): siRNA sense strand
uucaucugcugcuucguua

SEQ ID NO: 1239195 - RNA, 19 nt, Homo sapiens
  misc_RNA (1)...(19): siRNA sense strand
ucaaacacuaugacacaga

SEQ ID NO: 1239196 - RNA, 19 nt, Homo sapiens
  misc_RNA (1)...(19): siRNA sense strand
aaacacaaggaccugaaga

SEQ ID NO: 1239197 - RNA, 19 nt, Homo sapiens
  misc_RNA (1)...(19): siRNA sense strand
uaucaucaagcucaacguu

SEQ ID NO: 1239198 - RNA, 19 nt, Homo sapiens
  misc_RNA (1)...(19): siRNA sense strand
guccugccguagcaugauu

SEQ ID NO: 1239199 - RNA, 19 nt, Homo sapiens
  misc_RNA (1)...(19): siRNA sense strand
cagacaaacacaugaacau

SEQ ID NO: 1239200 - RNA, 19 nt, Homo sapiens
  misc_RNA (1)...(19): siRNA sense strand
gcaggauuccaccucaaca

SEQ ID NO: 1239201 - RNA, 19 nt, Homo sapiens
  misc_RNA (1)...(19): siRNA sense strand
gaccaguccggcaccauca

SEQ ID NO: 1239202 - RNA, 19 nt, Homo sapiens
  misc_RNA (1)...(19): siRNA sense strand
caacaaccagcucuaugac

SEQ ID NO: 1239203 - RNA, 19 nt, Homo sapiens
  misc_RNA (1)...(19): siRNA sense strand
ucaggaaagugaggaacag

SEQ ID NO: 1239204 - RNA, 19 nt, Homo sapiens
  misc_RNA (1)...(19): siRNA sense strand
gacaaggauggagauggua

SEQ ID NO: 1239205 - RNA, 19 nt, Homo sapiens
  misc_RNA (1)...(19): siRNA sense strand
cgacuuugacaguuucauc

SEQ ID NO: 1239206 - RNA, 19 nt, Homo sapiens
  misc_RNA (1)...(19): siRNA sense strand
aaccagcucuaugacauca

SEQ ID NO: 1239207 - RNA, 19 nt, Homo sapiens
  misc_RNA (1)...(19): siRNA sense strand
agucaacgacgcaggauuc

SEQ ID NO: 1239208 - RNA, 19 nt, Homo sapiens
  misc_RNA (1)...(19): siRNA sense strand
uuucaaacacuaugacaca

SEQ ID NO: 1239209 - RNA, 19 nt, Homo sapiens
  misc_RNA (1)...(19): siRNA sense strand
acaaacacaaggaccugaa

SEQ ID NO: 1239210 - RNA, 19 nt, Homo sapiens
  misc_RNA (1)...(19): siRNA sense strand
caacaauuccggaacauuu

SEQ ID NO: 1239211 - RNA, 19 nt, Homo sapiens
  misc_RNA (1)...(19): siRNA sense strand
gaacaucgacuuugacagu

SEQ ID NO: 1239212 - RNA, 19 nt, Homo sapiens
  misc_RNA (1)...(19): siRNA sense strand
cagaugagcucaagaaggu

SEQ ID NO: 1239213 - RNA, 19 nt, Homo sapiens
  misc_RNA (1)...(19): siRNA sense strand
acaaggaccugaagacaca

SEQ ID NO: 1239214 - RNA, 19 nt, Homo sapiens
  misc_RNA (1)...(19): siRNA sense strand
gcucugaucaggaaaguga

SEQ ID NO: 1239215 - RNA, 19 nt, Homo sapiens
  misc_RNA (1)...(19): siRNA sense strand
ucaacaaccagcucuauga

SEQ ID NO: 1239216 - RNA, 19 nt, Homo sapiens
  misc_RNA (1)...(19): siRNA sense strand
ggcugcagcucaccaugua

SEQ ID NO: 1239217 - RNA, 19 nt, Homo sapiens
  misc_RNA (1)...(19): siRNA sense strand
ugacaaggauggagauggu

SEQ ID NO: 1239218 - RNA, 19 nt, Homo sapiens
  misc_RNA (1)...(19): siRNA sense strand
acaugaacaucgacuuuga

SEQ ID NO: 1239219 - RNA, 19 nt, Homo sapiens
  misc_RNA (1)...(19): siRNA sense strand
uggcagcucugaucaggaa

SEQ ID NO: 1239220 - RNA, 19 nt, Homo sapiens
  misc_RNA (1)...(19): siRNA sense strand
cagcaacaauuccggaaca

SEQ ID NO: 1239221 - RNA, 19 nt, Homo sapiens
  misc_RNA (1)...(19): siRNA sense strand
gcagauagcaggagaugac

SEQ ID NO: 1239222 - RNA, 19 nt, Homo sapiens
  misc_RNA (1)...(19): siRNA sense strand
uaacacagucgugaacaaa

SEQ ID NO: 1239223 - RNA, 19 nt, Homo sapiens
  misc_RNA (1)...(19): siRNA sense strand
gauuaaggccuggcagaaa

SEQ ID NO: 1239224 - RNA, 19 nt, Homo sapiens
  misc_RNA (1)...(19): siRNA sense strand
gugaggaacagcaacaauu

SEQ ID NO: 1239225 - RNA, 19 nt, Homo sapiens
  misc_RNA (1)...(19): siRNA sense strand
acaaacacaugaacaucga

SEQ ID NO: 1239226 - RNA, 19 nt, Homo sapiens
  misc_RNA (1)...(19): siRNA sense strand
caccaccucuggaacaaga

SEQ ID NO: 1239227 - RNA, 19 nt, Homo sapiens
  misc_RNA (1)...(19): siRNA sense strand
gagggcauguucagagcuu

SEQ ID NO: 1239228 - RNA, 19 nt, Homo sapiens
  misc_RNA (1)...(19): siRNA sense strand
ggaaagugaggaacagcaa

SEQ ID NO: 1239229 - RNA, 19 nt, Homo sapiens
  misc_RNA (1)...(19): siRNA sense strand
gauagcaggagaugacaug

SEQ ID NO: 1239230 - RNA, 19 nt, Homo sapiens
  misc_RNA (1)...(19): siRNA sense strand
ugauugcgcucauggauac

SEQ ID NO: 1239231 - RNA, 19 nt, Homo sapiens
  misc_RNA (1)...(19): siRNA sense strand
acacaugaacaucgacuuu

SEQ ID NO: 1239232 - RNA, 19 nt, Homo sapiens
  misc_RNA (1)...(19): siRNA sense strand
acacagucgugaacaaaca

SEQ ID NO: 1239233 - RNA, 19 nt, Homo sapiens
  misc_RNA (1)...(19): siRNA sense strand
guacgcagacaaacacaug

SEQ ID NO: 1239234 - RNA, 19 nt, Homo sapiens
  misc_RNA (1)...(19): siRNA sense strand
gugcagaugagcucaagaa

SEQ ID NO: 1239235 - RNA, 19 nt, Homo sapiens
  misc_RNA (1)...(19): siRNA sense strand
acaaccagcucuaugacau

SEQ ID NO: 1239236 - RNA, 19 nt, Homo sapiens
  misc_RNA (1)...(19): siRNA sense strand
gcaacaauuccggaacauu

SEQ ID NO: 1239237 - RNA, 19 nt, Homo sapiens
  misc_RNA (1)...(19): siRNA sense strand
guucagagcuuuucaugca

SEQ ID NO: 1239238 - RNA, 19 nt, Homo sapiens
  misc_RNA (1)...(19): siRNA sense strand
gcagacaaacacaugaaca

SEQ ID NO: 1239239 - RNA, 19 nt, Homo sapiens
  misc_RNA (1)...(19): siRNA sense strand
gaugcgaaaugcagucaac

SEQ ID NO: 1239240 - RNA, 19 nt, Homo sapiens
  misc_RNA (1)...(19): siRNA sense strand
gaagacacacggguucaca

SEQ ID NO: 1239241 - RNA, 19 nt, Homo sapiens
  misc_RNA (1)...(19): siRNA sense strand
ucaucaagcucaacguucu

SEQ ID NO: 1239242 - RNA, 19 nt, Homo sapiens
  misc_RNA (1)...(19): siRNA sense strand
acaucgacuuugacaguuu

SEQ ID NO: 1239243 - RNA, 19 nt, Homo sapiens
  misc_RNA (1)...(19): siRNA sense strand
gcuacgagaugcgaaaugc

SEQ ID NO: 1239244 - RNA, 19 nt, Homo sapiens
  misc_RNA (1)...(19): siRNA sense strand
uuaacacagucgugaacaa

SEQ ID NO: 1239245 - RNA, 19 nt, Homo sapiens
  misc_RNA (1)...(19): siRNA sense strand
ugaggaacagcaacaauuc

SEQ ID NO: 1239246 - RNA, 19 nt, Homo sapiens
  misc_RNA (1)...(19): siRNA sense strand
caucgacuuugacaguuuc

SEQ ID NO: 1239247 - RNA, 19 nt, Homo sapiens
  misc_RNA (1)...(19): siRNA sense strand
gauuccaccucaacaacca

SEQ ID NO: 1239248 - RNA, 19 nt, Homo sapiens
  misc_RNA (1)...(19): siRNA sense strand
uucaucugcugcuucguua

SEQ ID NO: 1239249 - RNA, 19 nt, Homo sapiens
  misc_RNA (1)...(19): siRNA sense strand
ucaaacacuaugacacaga

SEQ ID NO: 1239250 - RNA, 19 nt, Homo sapiens
  misc_RNA (1)...(19): siRNA sense strand
aaacacaaggaccugaaga

SEQ ID NO: 1239251 - RNA, 19 nt, Homo sapiens
  misc_RNA (1)...(19): siRNA sense strand
uaucaucaagcucaacguu

SEQ ID NO: 1239252 - RNA, 19 nt, Homo sapiens
  misc_RNA (1)...(19): siRNA sense strand
guccugccguagcaugauu

SEQ ID NO: 1239253 - RNA, 19 nt, Homo sapiens
  misc_RNA (1)...(19): siRNA sense strand
cagacaaacacaugaacau

SEQ ID NO: 1239254 - RNA, 19 nt, Homo sapiens
  misc_RNA (1)...(19): siRNA sense strand
gcaggauuccaccucaaca

SEQ ID NO: 1239255 - RNA, 19 nt, Homo sapiens
  misc_RNA (1)...(19): siRNA sense strand
gaccaguccggcaccauca

SEQ ID NO: 1239256 - RNA, 19 nt, Homo sapiens
  misc_RNA (1)...(19): siRNA sense strand
caacaaccagcucuaugac

SEQ ID NO: 1239257 - RNA, 19 nt, Homo sapiens
  misc_RNA (1)...(19): siRNA sense strand
ucaggaaagugaggaacag

SEQ ID NO: 1239258 - RNA, 19 nt, Homo sapiens
  misc_RNA (1)...(19): siRNA sense strand
gacaaggauggagauggua

SEQ ID NO: 1239259 - RNA, 19 nt, Homo sapiens
  misc_RNA (1)...(19): siRNA sense strand
cgacuuugacaguuucauc

SEQ ID NO: 1239260 - RNA, 19 nt, Homo sapiens
  misc_RNA (1)...(19): siRNA sense strand
aaccagcucuaugacauca

SEQ ID NO: 1239261 - RNA, 19 nt, Homo sapiens
  misc_RNA (1)...(19): siRNA sense strand
agucaacgacgcaggauuc

SEQ ID NO: 1239262 - RNA, 19 nt, Homo sapiens
  misc_RNA (1)...(19): siRNA sense strand
uuucaaacacuaugacaca

SEQ ID NO: 1239263 - RNA, 19 nt, Homo sapiens
  misc_RNA (1)...(19): siRNA sense strand
acaaacacaaggaccugaa

SEQ ID NO: 1239264 - RNA, 19 nt, Homo sapiens
  misc_RNA (1)...(19): siRNA sense strand
caacaauuccggaacauuu

SEQ ID NO: 1239265 - RNA, 19 nt, Homo sapiens
  misc_RNA (1)...(19): siRNA sense strand
gaacaucgacuuugacagu

SEQ ID NO: 1239266 - RNA, 19 nt, Homo sapiens
  misc_RNA (1)...(19): siRNA sense strand
cagaugagcucaagaaggu

SEQ ID NO: 1239267 - RNA, 19 nt, Homo sapiens
  misc_RNA (1)...(19): siRNA sense strand
acaaggaccugaagacaca

SEQ ID NO: 1239268 - RNA, 19 nt, Homo sapiens
  misc_RNA (1)...(19): siRNA sense strand
gcucugaucaggaaaguga

SEQ ID NO: 1239269 - RNA, 19 nt, Homo sapiens
  misc_RNA (1)...(19): siRNA sense strand
ucaacaaccagcucuauga

SEQ ID NO: 1239270 - RNA, 19 nt, Homo sapiens
  misc_RNA (1)...(19): siRNA sense strand
ggcugcagcucaccaugua

SEQ ID NO: 1239271 - RNA, 19 nt, Homo sapiens
  misc_RNA (1)...(19): siRNA sense strand
ugacaaggauggagauggu

SEQ ID NO: 1239272 - RNA, 19 nt, Homo sapiens
  misc_RNA (1)...(19): siRNA sense strand
acaugaacaucgacuuuga

SEQ ID NO: 1239273 - RNA, 19 nt, Homo sapiens
  misc_RNA (1)...(19): siRNA sense strand
uggcagcucugaucaggaa

SEQ ID NO: 1239274 - RNA, 19 nt, Homo sapiens
  misc_RNA (1)...(19): siRNA sense strand
cagcaacaauuccggaaca

SEQ ID NO: 1239275 - RNA, 19 nt, Homo sapiens
  misc_RNA (1)...(19): siRNA sense strand
gcagauagcaggagaugac

SEQ ID NO: 1239276 - RNA, 19 nt, Homo sapiens
  misc_RNA (1)...(19): siRNA sense strand
uaacacagucgugaacaaa

SEQ ID NO: 1239277 - RNA, 19 nt, Homo sapiens
  misc_RNA (1)...(19): siRNA sense strand
gauuaaggccuggcagaaa

SEQ ID NO: 1239278 - RNA, 19 nt, Homo sapiens
  misc_RNA (1)...(19): siRNA sense strand
gugaggaacagcaacaauu

SEQ ID NO: 1239279 - RNA, 19 nt, Homo sapiens
  misc_RNA (1)...(19): siRNA sense strand
acaaacacaugaacaucga

SEQ ID NO: 1239280 - RNA, 19 nt, Homo sapiens
  misc_RNA (1)...(19): siRNA sense strand
caccaccucuggaacaaga

SEQ ID NO: 1239281 - RNA, 19 nt, Homo sapiens
  misc_RNA (1)...(19): siRNA sense strand
gagggcauguucagagcuu

SEQ ID NO: 1239282 - RNA, 19 nt, Homo sapiens
  misc_RNA (1)...(19): siRNA sense strand
ggaaagugaggaacagcaa

SEQ ID NO: 1239283 - RNA, 19 nt, Homo sapiens
  misc_RNA (1)...(19): siRNA sense strand
gauagcaggagaugacaug

SEQ ID NO: 1239284 - RNA, 19 nt, Homo sapiens
  misc_RNA (1)...(19): siRNA sense strand
ugauugcgcucauggauac

SEQ ID NO: 1239285 - RNA, 19 nt, Homo sapiens
  misc_RNA (1)...(19): siRNA sense strand
acacaugaacaucgacuuu

SEQ ID NO: 1239286 - RNA, 19 nt, Homo sapiens
  misc_RNA (1)...(19): siRNA sense strand
acacagucgugaacaaaca

SEQ ID NO: 1239287 - RNA, 19 nt, Homo sapiens
  misc_RNA (1)...(19): siRNA sense strand
guacgcagacaaacacaug

SEQ ID NO: 1239288 - RNA, 19 nt, Homo sapiens
  misc_RNA (1)...(19): siRNA sense strand
gugcagaugagcucaagaa

SEQ ID NO: 1239289 - RNA, 19 nt, Homo sapiens
  misc_RNA (1)...(19): siRNA sense strand
acaaccagcucuaugacau

SEQ ID NO: 1239290 - RNA, 19 nt, Homo sapiens
  misc_RNA (1)...(19): siRNA sense strand
gcaacaauuccggaacauu

SEQ ID NO: 1239291 - RNA, 19 nt, Homo sapiens
  misc_RNA (1)...(19): siRNA sense strand
guucagagcuuuucaugca

SEQ ID NO: 1239292 - RNA, 19 nt, Homo sapiens
  misc_RNA (1)...(19): siRNA sense strand
gcagacaaacacaugaaca

SEQ ID NO: 1239293 - RNA, 19 nt, Homo sapiens
  misc_RNA (1)...(19): siRNA sense strand
gaugcgaaaugcagucaac

SEQ ID NO: 1239294 - RNA, 19 nt, Homo sapiens
  misc_RNA (1)...(19): siRNA sense strand
gaagacacacggguucaca

SEQ ID NO: 1239295 - RNA, 19 nt, Homo sapiens
  misc_RNA (1)...(19): siRNA sense strand
ucaucaagcucaacguucu

SEQ ID NO: 1239296 - RNA, 19 nt, Homo sapiens
  misc_RNA (1)...(19): siRNA sense strand
acaucgacuuugacaguuu

SEQ ID NO: 1239297 - RNA, 19 nt, Homo sapiens
  misc_RNA (1)...(19): siRNA sense strand
gcuacgagaugcgaaaugc

SEQ ID NO: 1239298 - RNA, 19 nt, Homo sapiens
  misc_RNA (1)...(19): siRNA sense strand
uuaacacagucgugaacaa

SEQ ID NO: 1239299 - RNA, 19 nt, Homo sapiens
  misc_RNA (1)...(19): siRNA sense strand
ugaggaacagcaacaauuc

SEQ ID NO: 1239300 - RNA, 19 nt, Homo sapiens
  misc_RNA (1)...(19): siRNA sense strand
caucgacuuugacaguuuc

SEQ ID NO: 1239301 - RNA, 19 nt, Homo sapiens
  misc_RNA (1)...(19): siRNA sense strand
gauuccaccucaacaacca

SEQ ID NO: 1239302 - RNA, 19 nt, Homo sapiens
  misc_RNA (1)...(19): siRNA sense strand
uucaucugcugcuucguua

SEQ ID NO: 1239303 - RNA, 19 nt, Homo sapiens
  misc_RNA (1)...(19): siRNA sense strand
ucaaacacuaugacacaga

SEQ ID NO: 1239304 - RNA, 19 nt, Homo sapiens
  misc_RNA (1)...(19): siRNA sense strand
aaacacaaggaccugaaga

SEQ ID NO: 1239305 - RNA, 19 nt, Homo sapiens
  misc_RNA (1)...(19): siRNA sense strand
uaucaucaagcucaacguu

SEQ ID NO: 1239306 - RNA, 19 nt, Homo sapiens
  misc_RNA (1)...(19): siRNA sense strand
guccugccguagcaugauu

SEQ ID NO: 1239307 - RNA, 19 nt, Homo sapiens
  misc_RNA (1)...(19): siRNA sense strand
cagacaaacacaugaacau

SEQ ID NO: 1239308 - RNA, 19 nt, Homo sapiens
  misc_RNA (1)...(19): siRNA sense strand
gcaggauuccaccucaaca

SEQ ID NO: 1239309 - RNA, 19 nt, Homo sapiens
  misc_RNA (1)...(19): siRNA sense strand
gaccaguccggcaccauca

SEQ ID NO: 1239310 - RNA, 19 nt, Homo sapiens
  misc_RNA (1)...(19): siRNA sense strand
caacaaccagcucuaugac

SEQ ID NO: 1239311 - RNA, 19 nt, Homo sapiens
  misc_RNA (1)...(19): siRNA sense strand
ucaggaaagugaggaacag

SEQ ID NO: 1239312 - RNA, 19 nt, Homo sapiens
  misc_RNA (1)...(19): siRNA sense strand
gacaaggauggagauggua

SEQ ID NO: 1239313 - RNA, 19 nt, Homo sapiens
  misc_RNA (1)...(19): siRNA sense strand
cgacuuugacaguuucauc

SEQ ID NO: 1239314 - RNA, 19 nt, Homo sapiens
  misc_RNA (1)...(19): siRNA sense strand
aaccagcucuaugacauca

SEQ ID NO: 1239315 - RNA, 19 nt, Homo sapiens
  misc_RNA (1)...(19): siRNA sense strand
agucaacgacgcaggauuc

SEQ ID NO: 1239316 - RNA, 19 nt, Homo sapiens
  misc_RNA (1)...(19): siRNA sense strand
uuucaaacacuaugacaca

SEQ ID NO: 1239317 - RNA, 19 nt, Homo sapiens
  misc_RNA (1)...(19): siRNA sense strand
acaaacacaaggaccugaa

SEQ ID NO: 1239318 - RNA, 19 nt, Homo sapiens
  misc_RNA (1)...(19): siRNA sense strand
gaacaucgacuuugacagu

SEQ ID NO: 1239319 - RNA, 19 nt, Homo sapiens
  misc_RNA (1)...(19): siRNA sense strand
cagaugagcucaagaaggu

SEQ ID NO: 1239320 - RNA, 19 nt, Homo sapiens
  misc_RNA (1)...(19): siRNA sense strand
acaaggaccugaagacaca

SEQ ID NO: 1239321 - RNA, 19 nt, Homo sapiens
  misc_RNA (1)...(19): siRNA sense strand
ucaacaaccagcucuauga

SEQ ID NO: 1239322 - RNA, 19 nt, Homo sapiens
  misc_RNA (1)...(19): siRNA sense strand
ggcugcagcucaccaugua

SEQ ID NO: 1239323 - RNA, 19 nt, Homo sapiens
  misc_RNA (1)...(19): siRNA sense strand
ugacaaggauggagauggu

SEQ ID NO: 1239324 - RNA, 19 nt, Homo sapiens
  misc_RNA (1)...(19): siRNA sense strand
acaugaacaucgacuuuga

SEQ ID NO: 1239325 - RNA, 19 nt, Homo sapiens
  misc_RNA (1)...(19): siRNA sense strand
uaacacagucgugaacaaa

SEQ ID NO: 1239326 - RNA, 19 nt, Homo sapiens
  misc_RNA (1)...(19): siRNA sense strand
gauuaaggccuggcagaaa

SEQ ID NO: 1239327 - RNA, 19 nt, Homo sapiens
  misc_RNA (1)...(19): siRNA sense strand
acaaacacaugaacaucga

SEQ ID NO: 1239328 - RNA, 19 nt, Homo sapiens
  misc_RNA (1)...(19): siRNA sense strand
caccaccucuggaacaaga

SEQ ID NO: 1239329 - RNA, 19 nt, Homo sapiens
  misc_RNA (1)...(19): siRNA sense strand
gagggcauguucagagcuu

SEQ ID NO: 1239330 - RNA, 19 nt, Homo sapiens
  misc_RNA (1)...(19): siRNA sense strand
ugauugcgcucauggauac

SEQ ID NO: 1239331 - RNA, 19 nt, Homo sapiens
  misc_RNA (1)...(19): siRNA sense strand
acacaugaacaucgacuuu

SEQ ID NO: 1239332 - RNA, 19 nt, Homo sapiens
  misc_RNA (1)...(19): siRNA sense strand
acacagucgugaacaaaca

SEQ ID NO: 1239333 - RNA, 19 nt, Homo sapiens
  misc_RNA (1)...(19): siRNA sense strand
guacgcagacaaacacaug

SEQ ID NO: 1239334 - RNA, 19 nt, Homo sapiens
  misc_RNA (1)...(19): siRNA sense strand
gugcagaugagcucaagaa

SEQ ID NO: 1239335 - RNA, 19 nt, Homo sapiens
  misc_RNA (1)...(19): siRNA sense strand
acaaccagcucuaugacau

SEQ ID NO: 1239336 - RNA, 19 nt, Homo sapiens
  misc_RNA (1)...(19): siRNA sense strand
guucagagcuuuucaugca

SEQ ID NO: 1239337 - RNA, 19 nt, Homo sapiens
  misc_RNA (1)...(19): siRNA sense strand
gcagacaaacacaugaaca

SEQ ID NO: 1239338 - RNA, 19 nt, Homo sapiens
  misc_RNA (1)...(19): siRNA sense strand
gaugcgaaaugcagucaac

SEQ ID NO: 1239339 - RNA, 19 nt, Homo sapiens
  misc_RNA (1)...(19): siRNA sense strand
gaagacacacggguucaca

SEQ ID NO: 1239340 - RNA, 19 nt, Homo sapiens
  misc_RNA (1)...(19): siRNA sense strand
ucaucaagcucaacguucu

SEQ ID NO: 1239341 - RNA, 19 nt, Homo sapiens
  misc_RNA (1)...(19): siRNA sense strand
acaucgacuuugacaguuu

SEQ ID NO: 1239342 - RNA, 19 nt, Homo sapiens
  misc_RNA (1)...(19): siRNA sense strand
gcuacgagaugcgaaaugc

SEQ ID NO: 1239343 - RNA, 19 nt, Homo sapiens
  misc_RNA (1)...(19): siRNA sense strand
uuaacacagucgugaacaa

SEQ ID NO: 1239344 - RNA, 19 nt, Homo sapiens
  misc_RNA (1)...(19): siRNA sense strand
caucgacuuugacaguuuc

SEQ ID NO: 1239345 - RNA, 19 nt, Homo sapiens
  misc_RNA (1)...(19): siRNA sense strand
gauuccaccucaacaacca

SEQ ID NO: 1239346 - RNA, 19 nt, Homo sapiens
  misc_RNA (1)...(19): siRNA sense strand
uucaucugcugcuucguua

SEQ ID NO: 1239347 - RNA, 19 nt, Homo sapiens
  misc_RNA (1)...(19): siRNA sense strand
ucaaacacuaugacacaga

SEQ ID NO: 1239348 - RNA, 19 nt, Homo sapiens
  misc_RNA (1)...(19): siRNA sense strand
aaacacaaggaccugaaga

SEQ ID NO: 1239349 - RNA, 19 nt, Homo sapiens
  misc_RNA (1)...(19): siRNA sense strand
uaucaucaagcucaacguu

SEQ ID NO: 1239350 - RNA, 19 nt, Homo sapiens
  misc_RNA (1)...(19): siRNA sense strand
guccugccguagcaugauu

SEQ ID NO: 1239351 - RNA, 19 nt, Homo sapiens
  misc_RNA (1)...(19): siRNA sense strand
cagacaaacacaugaacau

SEQ ID NO: 1239352 - RNA, 19 nt, Homo sapiens
  misc_RNA (1)...(19): siRNA sense strand
gcaggauuccaccucaaca

SEQ ID NO: 1239353 - RNA, 19 nt, Homo sapiens
  misc_RNA (1)...(19): siRNA sense strand
gaccaguccggcaccauca

SEQ ID NO: 1239354 - RNA, 19 nt, Homo sapiens
  misc_RNA (1)...(19): siRNA sense strand
caacaaccagcucuaugac

SEQ ID NO: 1239355 - RNA, 19 nt, Homo sapiens
  misc_RNA (1)...(19): siRNA sense strand
uuucaaacacuaugacaca

SEQ ID NO: 1239356 - RNA, 19 nt, Homo sapiens
  misc_RNA (1)...(19): siRNA sense strand
gacaaggauggagauggua

SEQ ID NO: 1239357 - RNA, 19 nt, Homo sapiens
  misc_RNA (1)...(19): siRNA sense strand
cgacuuugacaguuucauc

SEQ ID NO: 1239358 - RNA, 19 nt, Homo sapiens
  misc_RNA (1)...(19): siRNA sense strand
acaaacacaaggaccugaa

SEQ ID NO: 1239359 - RNA, 19 nt, Homo sapiens
  misc_RNA (1)...(19): siRNA sense strand
aaccagcucuaugacauca

SEQ ID NO: 1239360 - RNA, 19 nt, Homo sapiens
  misc_RNA (1)...(19): siRNA sense strand
agucaacgacgcaggauuc

SEQ ID NO: 1239361 - RNA, 19 nt, Homo sapiens
  misc_RNA (1)...(19): siRNA sense strand
gaacaucgacuuugacagu

SEQ ID NO: 1239362 - RNA, 19 nt, Homo sapiens
  misc_RNA (1)...(19): siRNA sense strand
cagaugagcucaagaaggu

SEQ ID NO: 1239363 - RNA, 19 nt, Homo sapiens
  misc_RNA (1)...(19): siRNA sense strand
acaaggaccugaagacaca

SEQ ID NO: 1239364 - RNA, 19 nt, Homo sapiens
  misc_RNA (1)...(19): siRNA sense strand
ucaacaaccagcucuauga

SEQ ID NO: 1239365 - RNA, 19 nt, Homo sapiens
  misc_RNA (1)...(19): siRNA sense strand
ggcugcagcucaccaugua

SEQ ID NO: 1239366 - RNA, 19 nt, Homo sapiens
  misc_RNA (1)...(19): siRNA sense strand
ugacaaggauggagauggu

SEQ ID NO: 1239367 - RNA, 19 nt, Homo sapiens
  misc_RNA (1)...(19): siRNA sense strand
acaugaacaucgacuuuga

SEQ ID NO: 1239368 - RNA, 19 nt, Homo sapiens
  misc_RNA (1)...(19): siRNA sense strand
uaacacagucgugaacaaa

SEQ ID NO: 1239369 - RNA, 19 nt, Homo sapiens
  misc_RNA (1)...(19): siRNA sense strand
gauuaaggccuggcagaaa

SEQ ID NO: 1239370 - RNA, 19 nt, Homo sapiens
  misc_RNA (1)...(19): siRNA sense strand
acaaacacaugaacaucga

SEQ ID NO: 1239371 - RNA, 19 nt, Homo sapiens
  misc_RNA (1)...(19): siRNA sense strand
caccaccucuggaacaaga

SEQ ID NO: 1239372 - RNA, 19 nt, Homo sapiens
  misc_RNA (1)...(19): siRNA sense strand
gagggcauguucagagcuu

SEQ ID NO: 1239373 - RNA, 19 nt, Homo sapiens
  misc_RNA (1)...(19): siRNA sense strand
ugauugcgcucauggauac

SEQ ID NO: 1239374 - RNA, 19 nt, Homo sapiens
  misc_RNA (1)...(19): siRNA sense strand
acacaugaacaucgacuuu

SEQ ID NO: 1239375 - RNA, 19 nt, Homo sapiens
  misc_RNA (1)...(19): siRNA sense strand
acacagucgugaacaaaca

SEQ ID NO: 1239376 - RNA, 19 nt, Homo sapiens
  misc_RNA (1)...(19): siRNA sense strand
guacgcagacaaacacaug

SEQ ID NO: 1239377 - RNA, 19 nt, Homo sapiens
  misc_RNA (1)...(19): siRNA sense strand
gugcagaugagcucaagaa

SEQ ID NO: 1239378 - RNA, 19 nt, Homo sapiens
  misc_RNA (1)...(19): siRNA sense strand
acaaccagcucuaugacau

SEQ ID NO: 1239379 - RNA, 19 nt, Homo sapiens
  misc_RNA (1)...(19): siRNA sense strand
guucagagcuuuucaugca

SEQ ID NO: 1239380 - RNA, 19 nt, Homo sapiens
  misc_RNA (1)...(19): siRNA sense strand
gcagacaaacacaugaaca

SEQ ID NO: 1239381 - RNA, 19 nt, Homo sapiens
  misc_RNA (1)...(19): siRNA sense strand
gaugcgaaaugcagucaac

SEQ ID NO: 1239382 - RNA, 19 nt, Homo sapiens
  misc_RNA (1)...(19): siRNA sense strand
gaagacacacggguucaca

SEQ ID NO: 1239383 - RNA, 19 nt, Homo sapiens
  misc_RNA (1)...(19): siRNA sense strand
ucaucaagcucaacguucu

SEQ ID NO: 1239384 - RNA, 19 nt, Homo sapiens
  misc_RNA (1)...(19): siRNA sense strand
acaucgacuuugacaguuu

SEQ ID NO: 1239385 - RNA, 19 nt, Homo sapiens
  misc_RNA (1)...(19): siRNA sense strand
gcuacgagaugcgaaaugc

SEQ ID NO: 1239386 - RNA, 19 nt, Homo sapiens
  misc_RNA (1)...(19): siRNA sense strand
uuaacacagucgugaacaa

SEQ ID NO: 1239387 - RNA, 19 nt, Homo sapiens
  misc_RNA (1)...(19): siRNA sense strand
caucgacuuugacaguuuc

SEQ ID NO: 1239388 - RNA, 19 nt, Homo sapiens
  misc_RNA (1)...(19): siRNA sense strand
gauuccaccucaacaacca

SEQ ID NO: 1239389 - RNA, 19 nt, Homo sapiens
  misc_RNA (1)...(19): siRNA sense strand
uucaucugcugcuucguua

SEQ ID NO: 1239390 - RNA, 19 nt, Homo sapiens
  misc_RNA (1)...(19): siRNA sense strand
ucaaacacuaugacacaga

SEQ ID NO: 1239391 - RNA, 19 nt, Homo sapiens
  misc_RNA (1)...(19): siRNA sense strand
aaacacaaggaccugaaga

SEQ ID NO: 1239392 - RNA, 19 nt, Homo sapiens
  misc_RNA (1)...(19): siRNA sense strand
uaucaucaagcucaacguu

SEQ ID NO: 1239393 - RNA, 19 nt, Homo sapiens
  misc_RNA (1)...(19): siRNA sense strand
guccugccguagcaugauu

SEQ ID NO: 1239394 - RNA, 19 nt, Homo sapiens
  misc_RNA (1)...(19): siRNA sense strand
cagacaaacacaugaacau

SEQ ID NO: 1239395 - RNA, 19 nt, Homo sapiens
  misc_RNA (1)...(19): siRNA sense strand
gcaggauuccaccucaaca

SEQ ID NO: 1239396 - RNA, 19 nt, Homo sapiens
  misc_RNA (1)...(19): siRNA sense strand
gaccaguccggcaccauca

SEQ ID NO: 1239397 - RNA, 19 nt, Homo sapiens
  misc_RNA (1)...(19): siRNA sense strand
caacaaccagcucuaugac

SEQ ID NO: 1239398 - RNA, 19 nt, Homo sapiens
  misc_RNA (1)...(19): siRNA sense strand
uuucaaacacuaugacaca

SEQ ID NO: 1239399 - RNA, 19 nt, Homo sapiens
  misc_RNA (1)...(19): siRNA sense strand
gacaaggauggagauggua

SEQ ID NO: 1239400 - RNA, 19 nt, Homo sapiens
  misc_RNA (1)...(19): siRNA sense strand
cgacuuugacaguuucauc

SEQ ID NO: 1239401 - RNA, 19 nt, Homo sapiens
  misc_RNA (1)...(19): siRNA sense strand
acaaacacaaggaccugaa

SEQ ID NO: 1239402 - RNA, 19 nt, Homo sapiens
  misc_RNA (1)...(19): siRNA sense strand
aaccagcucuaugacauca

SEQ ID NO: 1239403 - RNA, 19 nt, Homo sapiens
  misc_RNA (1)...(19): siRNA sense strand
agucaacgacgcaggauuc

SEQ ID NO: 1239404 - RNA, 19 nt, Homo sapiens
  misc_RNA (1)...(19): siRNA sense strand
aaacaucccugcucauuau

SEQ ID NO: 1239405 - RNA, 19 nt, Homo sapiens
  misc_RNA (1)...(19): siRNA sense strand
ccaauaaugucaccucgaa

SEQ ID NO: 1239406 - RNA, 19 nt, Homo sapiens
  misc_RNA (1)...(19): siRNA sense strand
cccagaaccucgccaauaa

SEQ ID NO: 1239407 - RNA, 19 nt, Homo sapiens
  misc_RNA (1)...(19): siRNA sense strand
ccaaaguuguguuuacuga

SEQ ID NO: 1239408 - RNA, 19 nt, Homo sapiens
  misc_RNA (1)...(19): siRNA sense strand
gaacuucuacgucaucaau

SEQ ID NO: 1239409 - RNA, 19 nt, Homo sapiens
  misc_RNA (1)...(19): siRNA sense strand
gaccacagauggacagcaa

SEQ ID NO: 1239410 - RNA, 19 nt, Homo sapiens
  misc_RNA (1)...(19): siRNA sense strand
gaucauggaugcccugaac

SEQ ID NO: 1239411 - RNA, 19 nt, Homo sapiens
  misc_RNA (1)...(19): siRNA sense strand
gaauaucggaacaagcaua

SEQ ID NO: 1239412 - RNA, 19 nt, Homo sapiens
  misc_RNA (1)...(19): siRNA sense strand
ggacuucagaucuucauug

SEQ ID NO: 1239413 - RNA, 19 nt, Homo sapiens
  misc_RNA (1)...(19): siRNA sense strand
agacggagcccacggauga

SEQ ID NO: 1239414 - RNA, 19 nt, Homo sapiens
  misc_RNA (1)...(19): siRNA sense strand
aaaguuguguuuacugaga

SEQ ID NO: 1239415 - RNA, 19 nt, Homo sapiens
  misc_RNA (1)...(19): siRNA sense strand
gcagaaucgucucuuuaca

SEQ ID NO: 1239416 - RNA, 19 nt, Homo sapiens
  misc_RNA (1)...(19): siRNA sense strand
gagaaacucggcuccagaa

SEQ ID NO: 1239417 - RNA, 19 nt, Homo sapiens
  misc_RNA (1)...(19): siRNA sense strand
agaaucgucucuuuacaga

SEQ ID NO: 1239418 - RNA, 19 nt, Homo sapiens
  misc_RNA (1)...(19): siRNA sense strand
gcggggaucuugaagcuua

SEQ ID NO: 1239419 - RNA, 19 nt, Homo sapiens
  misc_RNA (1)...(19): siRNA sense strand
caccagcuaugagaagaua

SEQ ID NO: 1239420 - RNA, 19 nt, Homo sapiens
  misc_RNA (1)...(19): siRNA sense strand
gaaacucggcuccagaauc

SEQ ID NO: 1239421 - RNA, 19 nt, Homo sapiens
  misc_RNA (1)...(19): siRNA sense strand
agacggacauuggaagaaa

SEQ ID NO: 1239422 - RNA, 19 nt, Homo sapiens
  misc_RNA (1)...(19): siRNA sense strand
gcugaugagcggauccuua

SEQ ID NO: 1239423 - RNA, 19 nt, Homo sapiens
  misc_RNA (1)...(19): siRNA sense strand
aaacaagccucugggacuu

SEQ ID NO: 1239424 - RNA, 19 nt, Homo sapiens
  misc_RNA (1)...(19): siRNA sense strand
acagauggacagcaaauuu

SEQ ID NO: 1239425 - RNA, 19 nt, Homo sapiens
  misc_RNA (1)...(19): siRNA sense strand
gaacgaagaagagccgaau

SEQ ID NO: 1239426 - RNA, 19 nt, Homo sapiens
  misc_RNA (1)...(19): siRNA sense strand
gacaagagccagcccaaca

SEQ ID NO: 1239427 - RNA, 19 nt, Homo sapiens
  misc_RNA (1)...(19): siRNA sense strand
gaaccucgccaauaauguc

SEQ ID NO: 1239428 - RNA, 19 nt, Homo sapiens
  misc_RNA (1)...(19): siRNA sense strand
gcccaugguugaaagacaa

SEQ ID NO: 1239429 - RNA, 19 nt, Homo sapiens
  misc_RNA (1)...(19): siRNA sense strand
gaagagccgaaugcacaua

SEQ ID NO: 1239430 - RNA, 19 nt, Homo sapiens
  misc_RNA (1)...(19): siRNA sense strand
uuguugagaucccugaaua

SEQ ID NO: 1239431 - RNA, 19 nt, Homo sapiens
  misc_RNA (1)...(19): siRNA sense strand
gagcagggcgagaggagaa

SEQ ID NO: 1239432 - RNA, 19 nt, Homo sapiens
  misc_RNA (1)...(19): siRNA sense strand
gauagugggcaacaccaaa

SEQ ID NO: 1239433 - RNA, 19 nt, Homo sapiens
  misc_RNA (1)...(19): siRNA sense strand
cauauccgcacaccuguaa

SEQ ID NO: 1239434 - RNA, 19 nt, Homo sapiens
  misc_RNA (1)...(19): siRNA sense strand
gcucugccgugaucaugga

SEQ ID NO: 1239435 - RNA, 19 nt, Homo sapiens
  misc_RNA (1)...(19): siRNA sense strand
uggcagaaucgucucuuua

SEQ ID NO: 1239436 - RNA, 19 nt, Homo sapiens
  misc_RNA (1)...(19): siRNA sense strand
gcuuagaaacgccgacauu

SEQ ID NO: 1239437 - RNA, 19 nt, Homo sapiens
  misc_RNA (1)...(19): siRNA sense strand
ggaccagaccuacuuggau

SEQ ID NO: 1239438 - RNA, 19 nt, Homo sapiens
  misc_RNA (1)...(19): siRNA sense strand
gaaaggcgagacggacauu

SEQ ID NO: 1239439 - RNA, 19 nt, Homo sapiens
  misc_RNA (1)...(19): siRNA sense strand
cgaccuguguccgcaguuu

SEQ ID NO: 1239440 - RNA, 19 nt, Homo sapiens
  misc_RNA (1)...(19): siRNA sense strand
gaauaugaccccacucuga

SEQ ID NO: 1239441 - RNA, 19 nt, Homo sapiens
  misc_RNA (1)...(19): siRNA sense strand
uuagaaacgccgacauuga

SEQ ID NO: 1239442 - RNA, 19 nt, Homo sapiens
  misc_RNA (1)...(19): siRNA sense strand
aaacucggcuccagaaucc

SEQ ID NO: 1239443 - RNA, 19 nt, Homo sapiens
  misc_RNA (1)...(19): siRNA sense strand
caccaaaguccuggagaua

SEQ ID NO: 1239444 - RNA, 19 nt, Homo sapiens
  misc_RNA (1)...(19): siRNA sense strand
cagauggacagcaaauuug

SEQ ID NO: 1239445 - RNA, 19 nt, Homo sapiens
  misc_RNA (1)...(19): siRNA sense strand
cugaugagcggauccuuaa

SEQ ID NO: 1239446 - RNA, 19 nt, Homo sapiens
  misc_RNA (1)...(19): siRNA sense strand
gaaagacaagacacagaca

SEQ ID NO: 1239447 - RNA, 19 nt, Homo sapiens
  misc_RNA (1)...(19): siRNA sense strand
guggcagaaucgucucuuu

SEQ ID NO: 1239448 - RNA, 19 nt, Homo sapiens
  misc_RNA (1)...(19): siRNA sense strand
gacuucagaucuucauugg

SEQ ID NO: 1239449 - RNA, 19 nt, Homo sapiens
  misc_RNA (1)...(19): siRNA sense strand
ccauuaaacaggagcagaa

SEQ ID NO: 1239450 - RNA, 19 nt, Homo sapiens
  misc_RNA (1)...(19): siRNA sense strand
cagaaugccacgagccaaa

SEQ ID NO: 1239451 - RNA, 19 nt, Homo sapiens
  misc_RNA (1)...(19): siRNA sense strand
guauuugaauccgaacgaa

SEQ ID NO: 1239452 - RNA, 19 nt, Homo sapiens
  misc_RNA (1)...(19): siRNA sense strand
cagaaccucgccaauaaug

SEQ ID NO: 1239453 - RNA, 19 nt, Homo sapiens
  misc_RNA (1)...(19): siRNA sense strand
caucauguacugcgagaau

SEQ ID NO: 1239454 - RNA, 19 nt, Homo sapiens
  misc_RNA (1)...(19): siRNA sense strand
gagcugcccaugguugaaa

SEQ ID NO: 1239455 - RNA, 19 nt, Homo sapiens
  misc_RNA (1)...(19): siRNA sense strand
ccucuucgacuaugaguau

SEQ ID NO: 1239456 - RNA, 19 nt, Homo sapiens
  misc_RNA (1)...(19): siRNA sense strand
acaccaaaguccuggagau

SEQ ID NO: 1239457 - RNA, 19 nt, Homo sapiens
  misc_RNA (1)...(19): siRNA sense strand
ggaguuccagcacaucaug

SEQ ID NO: 1239458 - RNA, 19 nt, Homo sapiens
  misc_RNA (1)...(19): siRNA sense strand
ggagcccacggaugaauau

SEQ ID NO: 1239459 - RNA, 19 nt, Homo sapiens
  misc_RNA (1)...(19): siRNA sense strand
cgucaucaaugggaagaga

SEQ ID NO: 1239460 - RNA, 19 nt, Homo sapiens
  misc_RNA (1)...(19): siRNA sense strand
gcauauccgcacaccugua

SEQ ID NO: 1239461 - RNA, 19 nt, Homo sapiens
  misc_RNA (1)...(19): siRNA sense strand
gacuaugaguauuugaauc

SEQ ID NO: 1239462 - RNA, 19 nt, Homo sapiens
  misc_RNA (1)...(19): siRNA sense strand
ccacagauggacagcaaau

SEQ ID NO: 1239463 - RNA, 19 nt, Homo sapiens
  misc_RNA (1)...(19): siRNA sense strand
uuacugagaagaccacaga

SEQ ID NO: 1239464 - RNA, 19 nt, Homo sapiens
  misc_RNA (1)...(19): siRNA sense strand
aagacgagcuugacuucuc

SEQ ID NO: 1239465 - RNA, 19 nt, Homo sapiens
  misc_RNA (1)...(19): siRNA sense strand
uuaaacaggagcagaacuu

SEQ ID NO: 1239466 - RNA, 19 nt, Homo sapiens
  misc_RNA (1)...(19): siRNA sense strand
cgacuaugaguauuugaau

SEQ ID NO: 1239467 - RNA, 19 nt, Homo sapiens
  misc_RNA (1)...(19): siRNA sense strand
ugaccaaaaggaaguauua

SEQ ID NO: 1239468 - RNA, 19 nt, Homo sapiens
  misc_RNA (1)...(19): siRNA sense strand
ugacuucuccauccucuuc

SEQ ID NO: 1239469 - RNA, 19 nt, Homo sapiens
  misc_RNA (1)...(19): siRNA sense strand
caagagccagcccaacaug

SEQ ID NO: 1239470 - RNA, 19 nt, Homo sapiens
  misc_RNA (1)...(19): siRNA sense strand
uagaaacgccgacauugag

SEQ ID NO: 1239471 - RNA, 19 nt, Homo sapiens
  misc_RNA (1)...(19): siRNA sense strand
gagaagauagugggcaaca

SEQ ID NO: 1239472 - RNA, 19 nt, Homo sapiens
  misc_RNA (1)...(19): siRNA sense strand
ucauguacugcgagaauuu

SEQ ID NO: 1239473 - RNA, 19 nt, Homo sapiens
  misc_RNA (1)...(19): siRNA sense strand
gcaaauuugggagauggaa

SEQ ID NO: 1239474 - RNA, 19 nt, Homo sapiens
  misc_RNA (1)...(19): siRNA sense strand
gacagcaaauuugggagau

SEQ ID NO: 1239475 - RNA, 19 nt, Homo sapiens
  misc_RNA (1)...(19): siRNA sense strand
gacauuggaagaaagaaca

SEQ ID NO: 1239476 - RNA, 19 nt, Homo sapiens
  misc_RNA (1)...(19): siRNA sense strand
caaaacaucccugcucauu

SEQ ID NO: 1239477 - RNA, 19 nt, Homo sapiens
  misc_RNA (1)...(19): siRNA sense strand
gaaugccacgagccaaaga

SEQ ID NO: 1239478 - RNA, 19 nt, Homo sapiens
  misc_RNA (1)...(19): siRNA sense strand
acauugagcugcggaaagg

SEQ ID NO: 1239479 - RNA, 19 nt, Homo sapiens
  misc_RNA (1)...(19): siRNA sense strand
gagccaaagagccgccaaa

SEQ ID NO: 1239480 - RNA, 19 nt, Homo sapiens
  misc_RNA (1)...(19): siRNA sense strand
ggaaaggcgagacggacau

SEQ ID NO: 1239481 - RNA, 19 nt, Homo sapiens
  misc_RNA (1)...(19): siRNA sense strand
ccaaaguccuggagauacc

SEQ ID NO: 1239482 - RNA, 19 nt, Homo sapiens
  misc_RNA (1)...(19): siRNA sense strand
gcggaagccaccaggaguu

SEQ ID NO: 1239483 - RNA, 19 nt, Homo sapiens
  misc_RNA (1)...(19): siRNA sense strand
acagcugccuggucuaugg

SEQ ID NO: 1239484 - RNA, 19 nt, Homo sapiens
  misc_RNA (1)...(19): siRNA sense strand
cuuuacagacugcaucuaa

SEQ ID NO: 1239485 - RNA, 19 nt, Homo sapiens
  misc_RNA (1)...(19): siRNA sense strand
gagacggacauuggaagaa

SEQ ID NO: 1239486 - RNA, 19 nt, Homo sapiens
  misc_RNA (1)...(19): siRNA sense strand
ccagucagucaggcucuua

SEQ ID NO: 1239487 - RNA, 19 nt, Homo sapiens
  misc_RNA (1)...(19): siRNA sense strand
ccucgccugugauccacua

SEQ ID NO: 1239488 - RNA, 19 nt, Homo sapiens
  misc_RNA (1)...(19): siRNA sense strand
gcacaccuguaaaagugaa

SEQ ID NO: 1239489 - RNA, 19 nt, Homo sapiens
  misc_RNA (1)...(19): siRNA sense strand
cgaguccaaaguuguguuu

SEQ ID NO: 1239490 - RNA, 19 nt, Homo sapiens
  misc_RNA (1)...(19): siRNA sense strand
gaucacuccgucccacgaa

SEQ ID NO: 1239491 - RNA, 19 nt, Homo sapiens
  misc_RNA (1)...(19): siRNA sense strand
ggcagaaucgucucuuuac

SEQ ID NO: 1239492 - RNA, 19 nt, Homo sapiens
  misc_RNA (1)...(19): siRNA sense strand
gagggcaaccaucgacugu

SEQ ID NO: 1239493 - RNA, 19 nt, Homo sapiens
  misc_RNA (1)...(19): siRNA sense strand
ggaucuugaagcuuagaaa

SEQ ID NO: 1239494 - RNA, 19 nt, Homo sapiens
  misc_RNA (1)...(19): siRNA sense strand
uaaacaggagcagaacuug

SEQ ID NO: 1239495 - RNA, 19 nt, Homo sapiens
  misc_RNA (1)...(19): siRNA sense strand
guugagaucccugaauauc

SEQ ID NO: 1239496 - RNA, 19 nt, Homo sapiens
  misc_RNA (1)...(19): siRNA sense strand
ugagaagaccacagaugga

SEQ ID NO: 1239497 - RNA, 19 nt, Homo sapiens
  misc_RNA (1)...(19): siRNA sense strand
cuucgacuaugaguauuug

SEQ ID NO: 1239498 - RNA, 19 nt, Homo sapiens
  misc_RNA (1)...(19): siRNA sense strand
ugaauccgaacgaagaaga

SEQ ID NO: 1239499 - RNA, 19 nt, Homo sapiens
  misc_RNA (1)...(19): siRNA sense strand
ccgcacaccuguaaaagug

SEQ ID NO: 1239500 - RNA, 19 nt, Homo sapiens
  misc_RNA (1)...(19): siRNA sense strand
cugaauaucggaacaagca

SEQ ID NO: 1239501 - RNA, 19 nt, Homo sapiens
  misc_RNA (1)...(19): siRNA sense strand
ggacauuggaagaaagaac

SEQ ID NO: 1239502 - RNA, 19 nt, Homo sapiens
  misc_RNA (1)...(19): siRNA sense strand
gacggacauuggaagaaag

SEQ ID NO: 1239503 - RNA, 19 nt, Homo sapiens
  misc_RNA (1)...(19): siRNA sense strand
cgagacggacauuggaaga

SEQ ID NO: 1239504 - RNA, 19 nt, Homo sapiens
  misc_RNA (1)...(19): siRNA sense strand
aaacaucccugcucauuau

SEQ ID NO: 1239505 - RNA, 19 nt, Homo sapiens
  misc_RNA (1)...(19): siRNA sense strand
ccaauaaugucaccucgaa

SEQ ID NO: 1239506 - RNA, 19 nt, Homo sapiens
  misc_RNA (1)...(19): siRNA sense strand
cccagaaccucgccaauaa

SEQ ID NO: 1239507 - RNA, 19 nt, Homo sapiens
  misc_RNA (1)...(19): siRNA sense strand
ccaaaguuguguuuacuga

SEQ ID NO: 1239508 - RNA, 19 nt, Homo sapiens
  misc_RNA (1)...(19): siRNA sense strand
gaacuucuacgucaucaau

SEQ ID NO: 1239509 - RNA, 19 nt, Homo sapiens
  misc_RNA (1)...(19): siRNA sense strand
gaccacagauggacagcaa

SEQ ID NO: 1239510 - RNA, 19 nt, Homo sapiens
  misc_RNA (1)...(19): siRNA sense strand
gaucauggaugcccugaac

SEQ ID NO: 1239511 - RNA, 19 nt, Homo sapiens
  misc_RNA (1)...(19): siRNA sense strand
gaauaucggaacaagcaua

SEQ ID NO: 1239512 - RNA, 19 nt, Homo sapiens
  misc_RNA (1)...(19): siRNA sense strand
ggacuucagaucuucauug

SEQ ID NO: 1239513 - RNA, 19 nt, Homo sapiens
  misc_RNA (1)...(19): siRNA sense strand
agacggagcccacggauga

SEQ ID NO: 1239514 - RNA, 19 nt, Homo sapiens
  misc_RNA (1)...(19): siRNA sense strand
aaaguuguguuuacugaga

SEQ ID NO: 1239515 - RNA, 19 nt, Homo sapiens
  misc_RNA (1)...(19): siRNA sense strand
gcagaaucgucucuuuaca

SEQ ID NO: 1239516 - RNA, 19 nt, Homo sapiens
  misc_RNA (1)...(19): siRNA sense strand
gagaaacucggcuccagaa

SEQ ID NO: 1239517 - RNA, 19 nt, Homo sapiens
  misc_RNA (1)...(19): siRNA sense strand
agaaucgucucuuuacaga

SEQ ID NO: 1239518 - RNA, 19 nt, Homo sapiens
  misc_RNA (1)...(19): siRNA sense strand
gcggggaucuugaagcuua

SEQ ID NO: 1239519 - RNA, 19 nt, Homo sapiens
  misc_RNA (1)...(19): siRNA sense strand
caccagcuaugagaagaua

SEQ ID NO: 1239520 - RNA, 19 nt, Homo sapiens
  misc_RNA (1)...(19): siRNA sense strand
gaaacucggcuccagaauc

SEQ ID NO: 1239521 - RNA, 19 nt, Homo sapiens
  misc_RNA (1)...(19): siRNA sense strand
agacggacauuggaagaaa

SEQ ID NO: 1239522 - RNA, 19 nt, Homo sapiens
  misc_RNA (1)...(19): siRNA sense strand
gcugaugagcggauccuua

SEQ ID NO: 1239523 - RNA, 19 nt, Homo sapiens
  misc_RNA (1)...(19): siRNA sense strand
aaacaagccucugggacuu

SEQ ID NO: 1239524 - RNA, 19 nt, Homo sapiens
  misc_RNA (1)...(19): siRNA sense strand
acagauggacagcaaauuu

SEQ ID NO: 1239525 - RNA, 19 nt, Homo sapiens
  misc_RNA (1)...(19): siRNA sense strand
gaacgaagaagagccgaau

SEQ ID NO: 1239526 - RNA, 19 nt, Homo sapiens
  misc_RNA (1)...(19): siRNA sense strand
gacaagagccagcccaaca

SEQ ID NO: 1239527 - RNA, 19 nt, Homo sapiens
  misc_RNA (1)...(19): siRNA sense strand
gaaccucgccaauaauguc

SEQ ID NO: 1239528 - RNA, 19 nt, Homo sapiens
  misc_RNA (1)...(19): siRNA sense strand
gcccaugguugaaagacaa

SEQ ID NO: 1239529 - RNA, 19 nt, Homo sapiens
  misc_RNA (1)...(19): siRNA sense strand
gaagagccgaaugcacaua

SEQ ID NO: 1239530 - RNA, 19 nt, Homo sapiens
  misc_RNA (1)...(19): siRNA sense strand
uuguugagaucccugaaua

SEQ ID NO: 1239531 - RNA, 19 nt, Homo sapiens
  misc_RNA (1)...(19): siRNA sense strand
gagcagggcgagaggagaa

SEQ ID NO: 1239532 - RNA, 19 nt, Homo sapiens
  misc_RNA (1)...(19): siRNA sense strand
gauagugggcaacaccaaa

SEQ ID NO: 1239533 - RNA, 19 nt, Homo sapiens
  misc_RNA (1)...(19): siRNA sense strand
cauauccgcacaccuguaa

SEQ ID NO: 1239534 - RNA, 19 nt, Homo sapiens
  misc_RNA (1)...(19): siRNA sense strand
gcucugccgugaucaugga

SEQ ID NO: 1239535 - RNA, 19 nt, Homo sapiens
  misc_RNA (1)...(19): siRNA sense strand
uggcagaaucgucucuuua

SEQ ID NO: 1239536 - RNA, 19 nt, Homo sapiens
  misc_RNA (1)...(19): siRNA sense strand
gcuuagaaacgccgacauu

SEQ ID NO: 1239537 - RNA, 19 nt, Homo sapiens
  misc_RNA (1)...(19): siRNA sense strand
ggaccagaccuacuuggau

SEQ ID NO: 1239538 - RNA, 19 nt, Homo sapiens
  misc_RNA (1)...(19): siRNA sense strand
gaaaggcgagacggacauu

SEQ ID NO: 1239539 - RNA, 19 nt, Homo sapiens
  misc_RNA (1)...(19): siRNA sense strand
cgaccuguguccgcaguuu

SEQ ID NO: 1239540 - RNA, 19 nt, Homo sapiens
  misc_RNA (1)...(19): siRNA sense strand
gaauaugaccccacucuga

SEQ ID NO: 1239541 - RNA, 19 nt, Homo sapiens
  misc_RNA (1)...(19): siRNA sense strand
uuagaaacgccgacauuga

SEQ ID NO: 1239542 - RNA, 19 nt, Homo sapiens
  misc_RNA (1)...(19): siRNA sense strand
aaacucggcuccagaaucc

SEQ ID NO: 1239543 - RNA, 19 nt, Homo sapiens
  misc_RNA (1)...(19): siRNA sense strand
caccaaaguccuggagaua

SEQ ID NO: 1239544 - RNA, 19 nt, Homo sapiens
  misc_RNA (1)...(19): siRNA sense strand
cagauggacagcaaauuug

SEQ ID NO: 1239545 - RNA, 19 nt, Homo sapiens
  misc_RNA (1)...(19): siRNA sense strand
cugaugagcggauccuuaa

SEQ ID NO: 1239546 - RNA, 19 nt, Homo sapiens
  misc_RNA (1)...(19): siRNA sense strand
gaaagacaagacacagaca

SEQ ID NO: 1239547 - RNA, 19 nt, Homo sapiens
  misc_RNA (1)...(19): siRNA sense strand
guggcagaaucgucucuuu

SEQ ID NO: 1239548 - RNA, 19 nt, Homo sapiens
  misc_RNA (1)...(19): siRNA sense strand
gacuucagaucuucauugg

SEQ ID NO: 1239549 - RNA, 19 nt, Homo sapiens
  misc_RNA (1)...(19): siRNA sense strand
ccauuaaacaggagcagaa

SEQ ID NO: 1239550 - RNA, 19 nt, Homo sapiens
  misc_RNA (1)...(19): siRNA sense strand
cagaaugccacgagccaaa

SEQ ID NO: 1239551 - RNA, 19 nt, Homo sapiens
  misc_RNA (1)...(19): siRNA sense strand
guauuugaauccgaacgaa

SEQ ID NO: 1239552 - RNA, 19 nt, Homo sapiens
  misc_RNA (1)...(19): siRNA sense strand
cagaaccucgccaauaaug

SEQ ID NO: 1239553 - RNA, 19 nt, Homo sapiens
  misc_RNA (1)...(19): siRNA sense strand
caucauguacugcgagaau

SEQ ID NO: 1239554 - RNA, 19 nt, Homo sapiens
  misc_RNA (1)...(19): siRNA sense strand
gagcugcccaugguugaaa

SEQ ID NO: 1239555 - RNA, 19 nt, Homo sapiens
  misc_RNA (1)...(19): siRNA sense strand
ccucuucgacuaugaguau

SEQ ID NO: 1239556 - RNA, 19 nt, Homo sapiens
  misc_RNA (1)...(19): siRNA sense strand
acaccaaaguccuggagau

SEQ ID NO: 1239557 - RNA, 19 nt, Homo sapiens
  misc_RNA (1)...(19): siRNA sense strand
ggaguuccagcacaucaug

SEQ ID NO: 1239558 - RNA, 19 nt, Homo sapiens
  misc_RNA (1)...(19): siRNA sense strand
ggagcccacggaugaauau

SEQ ID NO: 1239559 - RNA, 19 nt, Homo sapiens
  misc_RNA (1)...(19): siRNA sense strand
cgucaucaaugggaagaga

SEQ ID NO: 1239560 - RNA, 19 nt, Homo sapiens
  misc_RNA (1)...(19): siRNA sense strand
gcauauccgcacaccugua

SEQ ID NO: 1239561 - RNA, 19 nt, Homo sapiens
  misc_RNA (1)...(19): siRNA sense strand
gacuaugaguauuugaauc

SEQ ID NO: 1239562 - RNA, 19 nt, Homo sapiens
  misc_RNA (1)...(19): siRNA sense strand
ccacagauggacagcaaau

SEQ ID NO: 1239563 - RNA, 19 nt, Homo sapiens
  misc_RNA (1)...(19): siRNA sense strand
uuacugagaagaccacaga

SEQ ID NO: 1239564 - RNA, 19 nt, Homo sapiens
  misc_RNA (1)...(19): siRNA sense strand
aagacgagcuugacuucuc

SEQ ID NO: 1239565 - RNA, 19 nt, Homo sapiens
  misc_RNA (1)...(19): siRNA sense strand
uuaaacaggagcagaacuu

SEQ ID NO: 1239566 - RNA, 19 nt, Homo sapiens
  misc_RNA (1)...(19): siRNA sense strand
cgacuaugaguauuugaau

SEQ ID NO: 1239567 - RNA, 19 nt, Homo sapiens
  misc_RNA (1)...(19): siRNA sense strand
ugaccaaaaggaaguauua

SEQ ID NO: 1239568 - RNA, 19 nt, Homo sapiens
  misc_RNA (1)...(19): siRNA sense strand
ugacuucuccauccucuuc

SEQ ID NO: 1239569 - RNA, 19 nt, Homo sapiens
  misc_RNA (1)...(19): siRNA sense strand
caagagccagcccaacaug

SEQ ID NO: 1239570 - RNA, 19 nt, Homo sapiens
  misc_RNA (1)...(19): siRNA sense strand
uagaaacgccgacauugag

SEQ ID NO: 1239571 - RNA, 19 nt, Homo sapiens
  misc_RNA (1)...(19): siRNA sense strand
gagaagauagugggcaaca

SEQ ID NO: 1239572 - RNA, 19 nt, Homo sapiens
  misc_RNA (1)...(19): siRNA sense strand
ucauguacugcgagaauuu

SEQ ID NO: 1239573 - RNA, 19 nt, Homo sapiens
  misc_RNA (1)...(19): siRNA sense strand
gcaaauuugggagauggaa

SEQ ID NO: 1239574 - RNA, 19 nt, Homo sapiens
  misc_RNA (1)...(19): siRNA sense strand
gacagcaaauuugggagau

SEQ ID NO: 1239575 - RNA, 19 nt, Homo sapiens
  misc_RNA (1)...(19): siRNA sense strand
gacauuggaagaaagaaca

SEQ ID NO: 1239576 - RNA, 19 nt, Homo sapiens
  misc_RNA (1)...(19): siRNA sense strand
caaaacaucccugcucauu

SEQ ID NO: 1239577 - RNA, 19 nt, Homo sapiens
  misc_RNA (1)...(19): siRNA sense strand
gaaugccacgagccaaaga

SEQ ID NO: 1239578 - RNA, 19 nt, Homo sapiens
  misc_RNA (1)...(19): siRNA sense strand
acauugagcugcggaaagg

SEQ ID NO: 1239579 - RNA, 19 nt, Homo sapiens
  misc_RNA (1)...(19): siRNA sense strand
gagccaaagagccgccaaa

SEQ ID NO: 1239580 - RNA, 19 nt, Homo sapiens
  misc_RNA (1)...(19): siRNA sense strand
ggaaaggcgagacggacau

SEQ ID NO: 1239581 - RNA, 19 nt, Homo sapiens
  misc_RNA (1)...(19): siRNA sense strand
ccaaaguccuggagauacc

SEQ ID NO: 1239582 - RNA, 19 nt, Homo sapiens
  misc_RNA (1)...(19): siRNA sense strand
gcggaagccaccaggaguu

SEQ ID NO: 1239583 - RNA, 19 nt, Homo sapiens
  misc_RNA (1)...(19): siRNA sense strand
acagcugccuggucuaugg

SEQ ID NO: 1239584 - RNA, 19 nt, Homo sapiens
  misc_RNA (1)...(19): siRNA sense strand
cuuuacagacugcaucuaa

SEQ ID NO: 1239585 - RNA, 19 nt, Homo sapiens
  misc_RNA (1)...(19): siRNA sense strand
gagacggacauuggaagaa

SEQ ID NO: 1239586 - RNA, 19 nt, Homo sapiens
  misc_RNA (1)...(19): siRNA sense strand
ccagucagucaggcucuua

SEQ ID NO: 1239587 - RNA, 19 nt, Homo sapiens
  misc_RNA (1)...(19): siRNA sense strand
ccucgccugugauccacua

SEQ ID NO: 1239588 - RNA, 19 nt, Homo sapiens
  misc_RNA (1)...(19): siRNA sense strand
gcacaccuguaaaagugaa

SEQ ID NO: 1239589 - RNA, 19 nt, Homo sapiens
  misc_RNA (1)...(19): siRNA sense strand
cgaguccaaaguuguguuu

SEQ ID NO: 1239590 - RNA, 19 nt, Homo sapiens
  misc_RNA (1)...(19): siRNA sense strand
gaucacuccgucccacgaa

SEQ ID NO: 1239591 - RNA, 19 nt, Homo sapiens
  misc_RNA (1)...(19): siRNA sense strand
ggcagaaucgucucuuuac

SEQ ID NO: 1239592 - RNA, 19 nt, Homo sapiens
  misc_RNA (1)...(19): siRNA sense strand
gagggcaaccaucgacugu

SEQ ID NO: 1239593 - RNA, 19 nt, Homo sapiens
  misc_RNA (1)...(19): siRNA sense strand
ggaucuugaagcuuagaaa

SEQ ID NO: 1239594 - RNA, 19 nt, Homo sapiens
  misc_RNA (1)...(19): siRNA sense strand
uaaacaggagcagaacuug

SEQ ID NO: 1239595 - RNA, 19 nt, Homo sapiens
  misc_RNA (1)...(19): siRNA sense strand
guugagaucccugaauauc

SEQ ID NO: 1239596 - RNA, 19 nt, Homo sapiens
  misc_RNA (1)...(19): siRNA sense strand
ugagaagaccacagaugga

SEQ ID NO: 1239597 - RNA, 19 nt, Homo sapiens
  misc_RNA (1)...(19): siRNA sense strand
cuucgacuaugaguauuug

SEQ ID NO: 1239598 - RNA, 19 nt, Homo sapiens
  misc_RNA (1)...(19): siRNA sense strand
ugaauccgaacgaagaaga

SEQ ID NO: 1239599 - RNA, 19 nt, Homo sapiens
  misc_RNA (1)...(19): siRNA sense strand
ccgcacaccuguaaaagug

SEQ ID NO: 1239600 - RNA, 19 nt, Homo sapiens
  misc_RNA (1)...(19): siRNA sense strand
cugaauaucggaacaagca

SEQ ID NO: 1239601 - RNA, 19 nt, Homo sapiens
  misc_RNA (1)...(19): siRNA sense strand
ggacauuggaagaaagaac

SEQ ID NO: 1239602 - RNA, 19 nt, Homo sapiens
  misc_RNA (1)...(19): siRNA sense strand
gacggacauuggaagaaag

SEQ ID NO: 1239603 - RNA, 19 nt, Homo sapiens
  misc_RNA (1)...(19): siRNA sense strand
cgagacggacauuggaaga

SEQ ID NO: 1239604 - RNA, 19 nt, Homo sapiens
  misc_RNA (1)...(19): siRNA sense strand
gaucuacgccaacuucuuc

SEQ ID NO: 1239605 - RNA, 19 nt, Homo sapiens
  misc_RNA (1)...(19): siRNA sense strand
cggcgacgcuuccaaguuc

SEQ ID NO: 1239606 - RNA, 19 nt, Homo sapiens
  misc_RNA (1)...(19): siRNA sense strand
gcagauggacaccaacaau

SEQ ID NO: 1239607 - RNA, 19 nt, Homo sapiens
  misc_RNA (1)...(19): siRNA sense strand
guacaagggcuuccucaag

SEQ ID NO: 1239608 - RNA, 19 nt, Homo sapiens
  misc_RNA (1)...(19): siRNA sense strand
caccaacaaugacggcaaa

SEQ ID NO: 1239609 - RNA, 19 nt, Homo sapiens
  misc_RNA (1)...(19): siRNA sense strand
gagaagcgcacagacaaga

SEQ ID NO: 1239610 - RNA, 19 nt, Homo sapiens
  misc_RNA (1)...(19): siRNA sense strand
ugaagaugccggaggauga

SEQ ID NO: 1239611 - RNA, 19 nt, Homo sapiens
  misc_RNA (1)...(19): siRNA sense strand
caacaaugacggcaaacug

SEQ ID NO: 1239612 - RNA, 19 nt, Homo sapiens
  misc_RNA (1)...(19): siRNA sense strand
caaacuguccuuggaagaa

SEQ ID NO: 1239613 - RNA, 19 nt, Homo sapiens
  misc_RNA (1)...(19): siRNA sense strand
aagauggugucgucuguga

SEQ ID NO: 1239614 - RNA, 19 nt, Homo sapiens
  misc_RNA (1)...(19): siRNA sense strand
ucaggcagauggacaccaa

SEQ ID NO: 1239615 - RNA, 19 nt, Homo sapiens
  misc_RNA (1)...(19): siRNA sense strand
gcaaacuguccuuggaaga

SEQ ID NO: 1239616 - RNA, 19 nt, Homo sapiens
  misc_RNA (1)...(19): siRNA sense strand
aaacuguccuuggaagaau

SEQ ID NO: 1239617 - RNA, 19 nt, Homo sapiens
  misc_RNA (1)...(19): siRNA sense strand
acaagauggugucgucugu

SEQ ID NO: 1239618 - RNA, 19 nt, Homo sapiens
  misc_RNA (1)...(19): siRNA sense strand
gcacagacaagaucuucag

SEQ ID NO: 1239619 - RNA, 19 nt, Homo sapiens
  misc_RNA (1)...(19): siRNA sense strand
ggacggcaacggcuacauc

SEQ ID NO: 1239620 - RNA, 19 nt, Homo sapiens
  misc_RNA (1)...(19): siRNA sense strand
gauggugucgucugugaug

SEQ ID NO: 1239621 - RNA, 19 nt, Homo sapiens
  misc_RNA (1)...(19): siRNA sense strand
gaagcgcacagacaagauc

SEQ ID NO: 1239622 - RNA, 19 nt, Homo sapiens
  misc_RNA (1)...(19): siRNA sense strand
guggacgaguucaagaaga

SEQ ID NO: 1239623 - RNA, 19 nt, Homo sapiens
  misc_RNA (1)...(19): siRNA sense strand
agauggacaccaacaauga

SEQ ID NO: 1239624 - RNA, 19 nt, Homo sapiens
  misc_RNA (1)...(19): siRNA sense strand
gcgagaugcuggagaucgu

SEQ ID NO: 1239625 - RNA, 19 nt, Homo sapiens
  misc_RNA (1)...(19): siRNA sense strand
gugcaggccaucuacaaga

SEQ ID NO: 1239626 - RNA, 19 nt, Homo sapiens
  misc_RNA (1)...(19): siRNA sense strand
ugucgucugugaugaagau

SEQ ID NO: 1239627 - RNA, 19 nt, Homo sapiens
  misc_RNA (1)...(19): siRNA sense strand
uggacgaguucaagaagau

SEQ ID NO: 1239628 - RNA, 19 nt, Homo sapiens
  misc_RNA (1)...(19): siRNA sense strand
cgacggcaccaucgacuuc

SEQ ID NO: 1239629 - RNA, 19 nt, Homo sapiens
  misc_RNA (1)...(19): siRNA sense strand
cagauggacaccaacaaug

SEQ ID NO: 1239630 - RNA, 19 nt, Homo sapiens
  misc_RNA (1)...(19): siRNA sense strand
cggagaagcgcacagacaa

SEQ ID NO: 1239631 - RNA, 19 nt, Homo sapiens
  misc_RNA (1)...(19): siRNA sense strand
gcaaacagaacagcaagcu

SEQ ID NO: 1239632 - RNA, 19 nt, Homo sapiens
  misc_RNA (1)...(19): siRNA sense strand
cagcagugccagucaguuc

SEQ ID NO: 1239633 - RNA, 19 nt, Homo sapiens
  misc_RNA (1)...(19): siRNA sense strand
ggggcaagcuggagcagaa

SEQ ID NO: 1239634 - RNA, 19 nt, Homo sapiens
  misc_RNA (1)...(19): siRNA sense strand
gaagaugccggaggaugag

SEQ ID NO: 1239635 - RNA, 19 nt, Homo sapiens
  misc_RNA (1)...(19): siRNA sense strand
ggagaagcgcacagacaag

SEQ ID NO: 1239636 - RNA, 19 nt, Homo sapiens
  misc_RNA (1)...(19): siRNA sense strand
gcgcacagacaagaucuuc

SEQ ID NO: 1239637 - RNA, 19 nt, Homo sapiens
  misc_RNA (1)...(19): siRNA sense strand
aagaagaucuacgccaacu

SEQ ID NO: 1239638 - RNA, 19 nt, Homo sapiens
  misc_RNA (1)...(19): siRNA sense strand
aagugggccuucagcaugu

SEQ ID NO: 1239639 - RNA, 19 nt, Homo sapiens
  misc_RNA (1)...(19): siRNA sense strand
gacggcaacggcuacauca

SEQ ID NO: 1239640 - RNA, 19 nt, Homo sapiens
  misc_RNA (1)...(19): siRNA sense strand
gaucuacgccaacuucuuc

SEQ ID NO: 1239641 - RNA, 19 nt, Homo sapiens
  misc_RNA (1)...(19): siRNA sense strand
cggcgacgcuuccaaguuc

SEQ ID NO: 1239642 - RNA, 19 nt, Homo sapiens
  misc_RNA (1)...(19): siRNA sense strand
gcagauggacaccaacaau

SEQ ID NO: 1239643 - RNA, 19 nt, Homo sapiens
  misc_RNA (1)...(19): siRNA sense strand
guacaagggcuuccucaag

SEQ ID NO: 1239644 - RNA, 19 nt, Homo sapiens
  misc_RNA (1)...(19): siRNA sense strand
caccaacaaugacggcaaa

SEQ ID NO: 1239645 - RNA, 19 nt, Homo sapiens
  misc_RNA (1)...(19): siRNA sense strand
gagaagcgcacagacaaga

SEQ ID NO: 1239646 - RNA, 19 nt, Homo sapiens
  misc_RNA (1)...(19): siRNA sense strand
ugaagaugccggaggauga

SEQ ID NO: 1239647 - RNA, 19 nt, Homo sapiens
  misc_RNA (1)...(19): siRNA sense strand
caacaaugacggcaaacug

SEQ ID NO: 1239648 - RNA, 19 nt, Homo sapiens
  misc_RNA (1)...(19): siRNA sense strand
caaacuguccuuggaagaa

SEQ ID NO: 1239649 - RNA, 19 nt, Homo sapiens
  misc_RNA (1)...(19): siRNA sense strand
aagauggugucgucuguga

SEQ ID NO: 1239650 - RNA, 19 nt, Homo sapiens
  misc_RNA (1)...(19): siRNA sense strand
ucaggcagauggacaccaa

SEQ ID NO: 1239651 - RNA, 19 nt, Homo sapiens
  misc_RNA (1)...(19): siRNA sense strand
gcaaacuguccuuggaaga

SEQ ID NO: 1239652 - RNA, 19 nt, Homo sapiens
  misc_RNA (1)...(19): siRNA sense strand
aaacuguccuuggaagaau

SEQ ID NO: 1239653 - RNA, 19 nt, Homo sapiens
  misc_RNA (1)...(19): siRNA sense strand
acaagauggugucgucugu

SEQ ID NO: 1239654 - RNA, 19 nt, Homo sapiens
  misc_RNA (1)...(19): siRNA sense strand
gcacagacaagaucuucag

SEQ ID NO: 1239655 - RNA, 19 nt, Homo sapiens
  misc_RNA (1)...(19): siRNA sense strand
ggacggcaacggcuacauc

SEQ ID NO: 1239656 - RNA, 19 nt, Homo sapiens
  misc_RNA (1)...(19): siRNA sense strand
gauggugucgucugugaug

SEQ ID NO: 1239657 - RNA, 19 nt, Homo sapiens
  misc_RNA (1)...(19): siRNA sense strand
gaagcgcacagacaagauc

SEQ ID NO: 1239658 - RNA, 19 nt, Homo sapiens
  misc_RNA (1)...(19): siRNA sense strand
guggacgaguucaagaaga

SEQ ID NO: 1239659 - RNA, 19 nt, Homo sapiens
  misc_RNA (1)...(19): siRNA sense strand
agauggacaccaacaauga

SEQ ID NO: 1239660 - RNA, 19 nt, Homo sapiens
  misc_RNA (1)...(19): siRNA sense strand
gcgagaugcuggagaucgu

SEQ ID NO: 1239661 - RNA, 19 nt, Homo sapiens
  misc_RNA (1)...(19): siRNA sense strand
gugcaggccaucuacaaga

SEQ ID NO: 1239662 - RNA, 19 nt, Homo sapiens
  misc_RNA (1)...(19): siRNA sense strand
ugucgucugugaugaagau

SEQ ID NO: 1239663 - RNA, 19 nt, Homo sapiens
  misc_RNA (1)...(19): siRNA sense strand
uggacgaguucaagaagau

SEQ ID NO: 1239664 - RNA, 19 nt, Homo sapiens
  misc_RNA (1)...(19): siRNA sense strand
cgacggcaccaucgacuuc

SEQ ID NO: 1239665 - RNA, 19 nt, Homo sapiens
  misc_RNA (1)...(19): siRNA sense strand
cagauggacaccaacaaug

SEQ ID NO: 1239666 - RNA, 19 nt, Homo sapiens
  misc_RNA (1)...(19): siRNA sense strand
cggagaagcgcacagacaa

SEQ ID NO: 1239667 - RNA, 19 nt, Homo sapiens
  misc_RNA (1)...(19): siRNA sense strand
gcaaacagaacagcaagcu

SEQ ID NO: 1239668 - RNA, 19 nt, Homo sapiens
  misc_RNA (1)...(19): siRNA sense strand
cagcagugccagucaguuc

SEQ ID NO: 1239669 - RNA, 19 nt, Homo sapiens
  misc_RNA (1)...(19): siRNA sense strand
ggggcaagcuggagcagaa

SEQ ID NO: 1239670 - RNA, 19 nt, Homo sapiens
  misc_RNA (1)...(19): siRNA sense strand
gaagaugccggaggaugag

SEQ ID NO: 1239671 - RNA, 19 nt, Homo sapiens
  misc_RNA (1)...(19): siRNA sense strand
ggagaagcgcacagacaag

SEQ ID NO: 1239672 - RNA, 19 nt, Homo sapiens
  misc_RNA (1)...(19): siRNA sense strand
gcgcacagacaagaucuuc

SEQ ID NO: 1239673 - RNA, 19 nt, Homo sapiens
  misc_RNA (1)...(19): siRNA sense strand
aagaagaucuacgccaacu

SEQ ID NO: 1239674 - RNA, 19 nt, Homo sapiens
  misc_RNA (1)...(19): siRNA sense strand
aagugggccuucagcaugu

SEQ ID NO: 1239675 - RNA, 19 nt, Homo sapiens
  misc_RNA (1)...(19): siRNA sense strand
gacggcaacggcuacauca

SEQ ID NO: 1239676 - RNA, 19 nt, Homo sapiens
  misc_RNA (1)...(19): siRNA sense strand
gaucuacgccaacuucuuc

SEQ ID NO: 1239677 - RNA, 19 nt, Homo sapiens
  misc_RNA (1)...(19): siRNA sense strand
cggcgacgcuuccaaguuc

SEQ ID NO: 1239678 - RNA, 19 nt, Homo sapiens
  misc_RNA (1)...(19): siRNA sense strand
gcagauggacaccaacaau

SEQ ID NO: 1239679 - RNA, 19 nt, Homo sapiens
  misc_RNA (1)...(19): siRNA sense strand
guacaagggcuuccucaag

SEQ ID NO: 1239680 - RNA, 19 nt, Homo sapiens
  misc_RNA (1)...(19): siRNA sense strand
caccaacaaugacggcaaa

SEQ ID NO: 1239681 - RNA, 19 nt, Homo sapiens
  misc_RNA (1)...(19): siRNA sense strand
gagaagcgcacagacaaga

SEQ ID NO: 1239682 - RNA, 19 nt, Homo sapiens
  misc_RNA (1)...(19): siRNA sense strand
ugaagaugccggaggauga

SEQ ID NO: 1239683 - RNA, 19 nt, Homo sapiens
  misc_RNA (1)...(19): siRNA sense strand
caacaaugacggcaaacug

SEQ ID NO: 1239684 - RNA, 19 nt, Homo sapiens
  misc_RNA (1)...(19): siRNA sense strand
caaacuguccuuggaagaa

SEQ ID NO: 1239685 - RNA, 19 nt, Homo sapiens
  misc_RNA (1)...(19): siRNA sense strand
aagauggugucgucuguga

SEQ ID NO: 1239686 - RNA, 19 nt, Homo sapiens
  misc_RNA (1)...(19): siRNA sense strand
ucaggcagauggacaccaa

SEQ ID NO: 1239687 - RNA, 19 nt, Homo sapiens
  misc_RNA (1)...(19): siRNA sense strand
gcaaacuguccuuggaaga

SEQ ID NO: 1239688 - RNA, 19 nt, Homo sapiens
  misc_RNA (1)...(19): siRNA sense strand
aaacuguccuuggaagaau

SEQ ID NO: 1239689 - RNA, 19 nt, Homo sapiens
  misc_RNA (1)...(19): siRNA sense strand
acaagauggugucgucugu

SEQ ID NO: 1239690 - RNA, 19 nt, Homo sapiens
  misc_RNA (1)...(19): siRNA sense strand
gcacagacaagaucuucag

SEQ ID NO: 1239691 - RNA, 19 nt, Homo sapiens
  misc_RNA (1)...(19): siRNA sense strand
ggacggcaacggcuacauc

SEQ ID NO: 1239692 - RNA, 19 nt, Homo sapiens
  misc_RNA (1)...(19): siRNA sense strand
gauggugucgucugugaug

SEQ ID NO: 1239693 - RNA, 19 nt, Homo sapiens
  misc_RNA (1)...(19): siRNA sense strand
gaagcgcacagacaagauc

SEQ ID NO: 1239694 - RNA, 19 nt, Homo sapiens
  misc_RNA (1)...(19): siRNA sense strand
guggacgaguucaagaaga

SEQ ID NO: 1239695 - RNA, 19 nt, Homo sapiens
  misc_RNA (1)...(19): siRNA sense strand
agauggacaccaacaauga

SEQ ID NO: 1239696 - RNA, 19 nt, Homo sapiens
  misc_RNA (1)...(19): siRNA sense strand
gcgagaugcuggagaucgu

SEQ ID NO: 1239697 - RNA, 19 nt, Homo sapiens
  misc_RNA (1)...(19): siRNA sense strand
gugcaggccaucuacaaga

SEQ ID NO: 1239698 - RNA, 19 nt, Homo sapiens
  misc_RNA (1)...(19): siRNA sense strand
ugucgucugugaugaagau

SEQ ID NO: 1239699 - RNA, 19 nt, Homo sapiens
  misc_RNA (1)...(19): siRNA sense strand
uggacgaguucaagaagau

SEQ ID NO: 1239700 - RNA, 19 nt, Homo sapiens
  misc_RNA (1)...(19): siRNA sense strand
cgacggcaccaucgacuuc

SEQ ID NO: 1239701 - RNA, 19 nt, Homo sapiens
  misc_RNA (1)...(19): siRNA sense strand
cagauggacaccaacaaug

SEQ ID NO: 1239702 - RNA, 19 nt, Homo sapiens
  misc_RNA (1)...(19): siRNA sense strand
cggagaagcgcacagacaa

SEQ ID NO: 1239703 - RNA, 19 nt, Homo sapiens
  misc_RNA (1)...(19): siRNA sense strand
gcaaacagaacagcaagcu

SEQ ID NO: 1239704 - RNA, 19 nt, Homo sapiens
  misc_RNA (1)...(19): siRNA sense strand
cagcagugccagucaguuc

SEQ ID NO: 1239705 - RNA, 19 nt, Homo sapiens
  misc_RNA (1)...(19): siRNA sense strand
ggggcaagcuggagcagaa

SEQ ID NO: 1239706 - RNA, 19 nt, Homo sapiens
  misc_RNA (1)...(19): siRNA sense strand
gaagaugccggaggaugag

SEQ ID NO: 1239707 - RNA, 19 nt, Homo sapiens
  misc_RNA (1)...(19): siRNA sense strand
ggagaagcgcacagacaag

SEQ ID NO: 1239708 - RNA, 19 nt, Homo sapiens
  misc_RNA (1)...(19): siRNA sense strand
gcgcacagacaagaucuuc

SEQ ID NO: 1239709 - RNA, 19 nt, Homo sapiens
  misc_RNA (1)...(19): siRNA sense strand
aagaagaucuacgccaacu

SEQ ID NO: 1239710 - RNA, 19 nt, Homo sapiens
  misc_RNA (1)...(19): siRNA sense strand
aagugggccuucagcaugu

SEQ ID NO: 1239711 - RNA, 19 nt, Homo sapiens
  misc_RNA (1)...(19): siRNA sense strand
gacggcaacggcuacauca

SEQ ID NO: 1239712 - RNA, 19 nt, Homo sapiens
  misc_RNA (1)...(19): siRNA sense strand
gaucuacgccaacuucuuc

SEQ ID NO: 1239713 - RNA, 19 nt, Homo sapiens
  misc_RNA (1)...(19): siRNA sense strand
cggcgacgcuuccaaguuc

SEQ ID NO: 1239714 - RNA, 19 nt, Homo sapiens
  misc_RNA (1)...(19): siRNA sense strand
gcagauggacaccaacaau

SEQ ID NO: 1239715 - RNA, 19 nt, Homo sapiens
  misc_RNA (1)...(19): siRNA sense strand
guacaagggcuuccucaag

SEQ ID NO: 1239716 - RNA, 19 nt, Homo sapiens
  misc_RNA (1)...(19): siRNA sense strand
caccaacaaugacggcaaa

SEQ ID NO: 1239717 - RNA, 19 nt, Homo sapiens
  misc_RNA (1)...(19): siRNA sense strand
gagaagcgcacagacaaga

SEQ ID NO: 1239718 - RNA, 19 nt, Homo sapiens
  misc_RNA (1)...(19): siRNA sense strand
ugaagaugccggaggauga

SEQ ID NO: 1239719 - RNA, 19 nt, Homo sapiens
  misc_RNA (1)...(19): siRNA sense strand
caacaaugacggcaaacug

SEQ ID NO: 1239720 - RNA, 19 nt, Homo sapiens
  misc_RNA (1)...(19): siRNA sense strand
caaacuguccuuggaagaa

SEQ ID NO: 1239721 - RNA, 19 nt, Homo sapiens
  misc_RNA (1)...(19): siRNA sense strand
aagauggugucgucuguga

SEQ ID NO: 1239722 - RNA, 19 nt, Homo sapiens
  misc_RNA (1)...(19): siRNA sense strand
ucaggcagauggacaccaa

SEQ ID NO: 1239723 - RNA, 19 nt, Homo sapiens
  misc_RNA (1)...(19): siRNA sense strand
gcaaacuguccuuggaaga

SEQ ID NO: 1239724 - RNA, 19 nt, Homo sapiens
  misc_RNA (1)...(19): siRNA sense strand
aaacuguccuuggaagaau

SEQ ID NO: 1239725 - RNA, 19 nt, Homo sapiens
  misc_RNA (1)...(19): siRNA sense strand
acaagauggugucgucugu

SEQ ID NO: 1239726 - RNA, 19 nt, Homo sapiens
  misc_RNA (1)...(19): siRNA sense strand
gcacagacaagaucuucag

SEQ ID NO: 1239727 - RNA, 19 nt, Homo sapiens
  misc_RNA (1)...(19): siRNA sense strand
ggacggcaacggcuacauc

SEQ ID NO: 1239728 - RNA, 19 nt, Homo sapiens
  misc_RNA (1)...(19): siRNA sense strand
gauggugucgucugugaug

SEQ ID NO: 1239729 - RNA, 19 nt, Homo sapiens
  misc_RNA (1)...(19): siRNA sense strand
gaagcgcacagacaagauc

SEQ ID NO: 1239730 - RNA, 19 nt, Homo sapiens
  misc_RNA (1)...(19): siRNA sense strand
guggacgaguucaagaaga

SEQ ID NO: 1239731 - RNA, 19 nt, Homo sapiens
  misc_RNA (1)...(19): siRNA sense strand
agauggacaccaacaauga

SEQ ID NO: 1239732 - RNA, 19 nt, Homo sapiens
  misc_RNA (1)...(19): siRNA sense strand
gcgagaugcuggagaucgu

SEQ ID NO: 1239733 - RNA, 19 nt, Homo sapiens
  misc_RNA (1)...(19): siRNA sense strand
gugcaggccaucuacaaga

SEQ ID NO: 1239734 - RNA, 19 nt, Homo sapiens
  misc_RNA (1)...(19): siRNA sense strand
ugucgucugugaugaagau

SEQ ID NO: 1239735 - RNA, 19 nt, Homo sapiens
  misc_RNA (1)...(19): siRNA sense strand
uggacgaguucaagaagau

SEQ ID NO: 1239736 - RNA, 19 nt, Homo sapiens
  misc_RNA (1)...(19): siRNA sense strand
cgacggcaccaucgacuuc

SEQ ID NO: 1239737 - RNA, 19 nt, Homo sapiens
  misc_RNA (1)...(19): siRNA sense strand
cagauggacaccaacaaug

SEQ ID NO: 1239738 - RNA, 19 nt, Homo sapiens
  misc_RNA (1)...(19): siRNA sense strand
cggagaagcgcacagacaa

SEQ ID NO: 1239739 - RNA, 19 nt, Homo sapiens
  misc_RNA (1)...(19): siRNA sense strand
gcaaacagaacagcaagcu

SEQ ID NO: 1239740 - RNA, 19 nt, Homo sapiens
  misc_RNA (1)...(19): siRNA sense strand
cagcagugccagucaguuc

SEQ ID NO: 1239741 - RNA, 19 nt, Homo sapiens
  misc_RNA (1)...(19): siRNA sense strand
ggggcaagcuggagcagaa

SEQ ID NO: 1239742 - RNA, 19 nt, Homo sapiens
  misc_RNA (1)...(19): siRNA sense strand
gaagaugccggaggaugag

SEQ ID NO: 1239743 - RNA, 19 nt, Homo sapiens
  misc_RNA (1)...(19): siRNA sense strand
ggagaagcgcacagacaag

SEQ ID NO: 1239744 - RNA, 19 nt, Homo sapiens
  misc_RNA (1)...(19): siRNA sense strand
gcgcacagacaagaucuuc

SEQ ID NO: 1239745 - RNA, 19 nt, Homo sapiens
  misc_RNA (1)...(19): siRNA sense strand
aagaagaucuacgccaacu

SEQ ID NO: 1239746 - RNA, 19 nt, Homo sapiens
  misc_RNA (1)...(19): siRNA sense strand
aagugggccuucagcaugu

SEQ ID NO: 1239747 - RNA, 19 nt, Homo sapiens
  misc_RNA (1)...(19): siRNA sense strand
gacggcaacggcuacauca

SEQ ID NO: 1239748 - RNA, 19 nt, Homo sapiens
  misc_RNA (1)...(19): siRNA sense strand
gaauguaccuguugcuaaa

SEQ ID NO: 1239749 - RNA, 19 nt, Homo sapiens
  misc_RNA (1)...(19): siRNA sense strand
gcagagauguccacacguu

SEQ ID NO: 1239750 - RNA, 19 nt, Homo sapiens
  misc_RNA (1)...(19): siRNA sense strand
caugagaucugcucuaaga

SEQ ID NO: 1239751 - RNA, 19 nt, Homo sapiens
  misc_RNA (1)...(19): siRNA sense strand
cuacguagcucgugauaag

SEQ ID NO: 1239752 - RNA, 19 nt, Homo sapiens
  misc_RNA (1)...(19): siRNA sense strand
ggaggaugaugaugaugaa

SEQ ID NO: 1239753 - RNA, 19 nt, Homo sapiens
  misc_RNA (1)...(19): siRNA sense strand
gugauaagcugacccagau

SEQ ID NO: 1239754 - RNA, 19 nt, Homo sapiens
  misc_RNA (1)...(19): siRNA sense strand
ggaauguaccuguugcuaa

SEQ ID NO: 1239755 - RNA, 19 nt, Homo sapiens
  misc_RNA (1)...(19): siRNA sense strand
ggaggaggaugaugaugau

SEQ ID NO: 1239756 - RNA, 19 nt, Homo sapiens
  misc_RNA (1)...(19): siRNA sense strand
ggaugucccuuuccaagug

SEQ ID NO: 1239757 - RNA, 19 nt, Homo sapiens
  misc_RNA (1)...(19): siRNA sense strand
ggaaggaaaggaucugcua

SEQ ID NO: 1239758 - RNA, 19 nt, Homo sapiens
  misc_RNA (1)...(19): siRNA sense strand
agaaugaguugguccagaa

SEQ ID NO: 1239759 - RNA, 19 nt, Homo sapiens
  misc_RNA (1)...(19): siRNA sense strand
ggaccacucuaaacuugug

SEQ ID NO: 1239760 - RNA, 19 nt, Homo sapiens
  misc_RNA (1)...(19): siRNA sense strand
ggguagaugugauuaaugg

SEQ ID NO: 1239761 - RNA, 19 nt, Homo sapiens
  misc_RNA (1)...(19): siRNA sense strand
ucagcucucuuaccacaaa

SEQ ID NO: 1239762 - RNA, 19 nt, Homo sapiens
  misc_RNA (1)...(19): siRNA sense strand
gcucaagugccacguguuu

SEQ ID NO: 1239763 - RNA, 19 nt, Homo sapiens
  misc_RNA (1)...(19): siRNA sense strand
gaggaggacuuaucuucuc

SEQ ID NO: 1239764 - RNA, 19 nt, Homo sapiens
  misc_RNA (1)...(19): siRNA sense strand
gaccagaaucgcaauguga

SEQ ID NO: 1239765 - RNA, 19 nt, Homo sapiens
  misc_RNA (1)...(19): siRNA sense strand
acucuaaacuuguggaugu

SEQ ID NO: 1239766 - RNA, 19 nt, Homo sapiens
  misc_RNA (1)...(19): siRNA sense strand
ggaaggaugaacccaguga

SEQ ID NO: 1239767 - RNA, 19 nt, Homo sapiens
  misc_RNA (1)...(19): siRNA sense strand
gaacagugcagccagugau

SEQ ID NO: 1239768 - RNA, 19 nt, Homo sapiens
  misc_RNA (1)...(19): siRNA sense strand
gagagugucgggugcguuu

SEQ ID NO: 1239769 - RNA, 19 nt, Homo sapiens
  misc_RNA (1)...(19): siRNA sense strand
acccagggaucaaguguuu

SEQ ID NO: 1239770 - RNA, 19 nt, Homo sapiens
  misc_RNA (1)...(19): siRNA sense strand
cagcagccgugaacaaugg

SEQ ID NO: 1239771 - RNA, 19 nt, Homo sapiens
  misc_RNA (1)...(19): siRNA sense strand
ugacccagaugcucaagug

SEQ ID NO: 1239772 - RNA, 19 nt, Homo sapiens
  misc_RNA (1)...(19): siRNA sense strand
ggaugaugaugaugaagag

SEQ ID NO: 1239773 - RNA, 19 nt, Homo sapiens
  misc_RNA (1)...(19): siRNA sense strand
agaaguuccaagucuauua

SEQ ID NO: 1239774 - RNA, 19 nt, Homo sapiens
  misc_RNA (1)...(19): siRNA sense strand
ugcaugagaucugcucuaa

SEQ ID NO: 1239775 - RNA, 19 nt, Homo sapiens
  misc_RNA (1)...(19): siRNA sense strand
ggaugagacacuaaagcua

SEQ ID NO: 1239776 - RNA, 19 nt, Homo sapiens
  misc_RNA (1)...(19): siRNA sense strand
cuuugaggauggagaauuu

SEQ ID NO: 1239777 - RNA, 19 nt, Homo sapiens
  misc_RNA (1)...(19): siRNA sense strand
gcaaugugaccuugaccuu

SEQ ID NO: 1239778 - RNA, 19 nt, Homo sapiens
  misc_RNA (1)...(19): siRNA sense strand
gcuggaggaugagacacua

SEQ ID NO: 1239779 - RNA, 19 nt, Homo sapiens
  misc_RNA (1)...(19): siRNA sense strand
ucccagcgccuaagaauga

SEQ ID NO: 1239780 - RNA, 19 nt, Homo sapiens
  misc_RNA (1)...(19): siRNA sense strand
ccaccagccugcaugagau

SEQ ID NO: 1239781 - RNA, 19 nt, Homo sapiens
  misc_RNA (1)...(19): siRNA sense strand
ggacuuugccuacguagcu

SEQ ID NO: 1239782 - RNA, 19 nt, Homo sapiens
  misc_RNA (1)...(19): siRNA sense strand
ccacacguuugcauucauc

SEQ ID NO: 1239783 - RNA, 19 nt, Homo sapiens
  misc_RNA (1)...(19): siRNA sense strand
gaaguuccaagucuauuac

SEQ ID NO: 1239784 - RNA, 19 nt, Homo sapiens
  misc_RNA (1)...(19): siRNA sense strand
guccagaaguuccaagucu

SEQ ID NO: 1239785 - RNA, 19 nt, Homo sapiens
  misc_RNA (1)...(19): siRNA sense strand
gcauccgucagcucucuua

SEQ ID NO: 1239786 - RNA, 19 nt, Homo sapiens
  misc_RNA (1)...(19): siRNA sense strand
ggaggaggaggacuuaucu

SEQ ID NO: 1239787 - RNA, 19 nt, Homo sapiens
  misc_RNA (1)...(19): siRNA sense strand
uacugcagcuggaggauga

SEQ ID NO: 1239788 - RNA, 19 nt, Homo sapiens
  misc_RNA (1)...(19): siRNA sense strand
acaccucagggaccuauua

SEQ ID NO: 1239789 - RNA, 19 nt, Homo sapiens
  misc_RNA (1)...(19): siRNA sense strand
cuggaccacucuaaacuug

SEQ ID NO: 1239790 - RNA, 19 nt, Homo sapiens
  misc_RNA (1)...(19): siRNA sense strand
ggaggaggacuuaucuucu

SEQ ID NO: 1239791 - RNA, 19 nt, Homo sapiens
  misc_RNA (1)...(19): siRNA sense strand
ucuguuccaucaucacuga

SEQ ID NO: 1239792 - RNA, 19 nt, Homo sapiens
  misc_RNA (1)...(19): siRNA sense strand
ccagaaguuccaagucuau

SEQ ID NO: 1239793 - RNA, 19 nt, Homo sapiens
  misc_RNA (1)...(19): siRNA sense strand
gcagcaguguggcagucaa

SEQ ID NO: 1239794 - RNA, 19 nt, Homo sapiens
  misc_RNA (1)...(19): siRNA sense strand
ggaacagugcagccaguga

SEQ ID NO: 1239795 - RNA, 19 nt, Homo sapiens
  misc_RNA (1)...(19): siRNA sense strand
ugaccagaaucgcaaugug

SEQ ID NO: 1239796 - RNA, 19 nt, Homo sapiens
  misc_RNA (1)...(19): siRNA sense strand
gggaauguaccuguugcua

SEQ ID NO: 1239797 - RNA, 19 nt, Homo sapiens
  misc_RNA (1)...(19): siRNA sense strand
ggaggaggaggaugaugau

SEQ ID NO: 1239798 - RNA, 19 nt, Homo sapiens
  misc_RNA (1)...(19): siRNA sense strand
uccagaaguuccaagucua

SEQ ID NO: 1239799 - RNA, 19 nt, Homo sapiens
  misc_RNA (1)...(19): siRNA sense strand
gaucaucagcacucaagag

SEQ ID NO: 1239800 - RNA, 19 nt, Homo sapiens
  misc_RNA (1)...(19): siRNA sense strand
acgaggaccuggccugauc

SEQ ID NO: 1239801 - RNA, 19 nt, Homo sapiens
  misc_RNA (1)...(19): siRNA sense strand
aaugcccgcugcuugguaa

SEQ ID NO: 1239802 - RNA, 19 nt, Homo sapiens
  misc_RNA (1)...(19): siRNA sense strand
ggacaccucagggaccuau

SEQ ID NO: 1239803 - RNA, 19 nt, Homo sapiens
  misc_RNA (1)...(19): siRNA sense strand
gaauucccagcgccuaaga

SEQ ID NO: 1239804 - RNA, 19 nt, Homo sapiens
  misc_RNA (1)...(19): siRNA sense strand
gagccagucggccauuaau

SEQ ID NO: 1239805 - RNA, 19 nt, Homo sapiens
  misc_RNA (1)...(19): siRNA sense strand
cugcuacccucaccaucuu

SEQ ID NO: 1239806 - RNA, 19 nt, Homo sapiens
  misc_RNA (1)...(19): siRNA sense strand
gcccgcugcuugguaaaug

SEQ ID NO: 1239807 - RNA, 19 nt, Homo sapiens
  misc_RNA (1)...(19): siRNA sense strand
ccucagggaccuauuacug

SEQ ID NO: 1239808 - RNA, 19 nt, Homo sapiens
  misc_RNA (1)...(19): siRNA sense strand
cagaugagggagaggagaa

SEQ ID NO: 1239809 - RNA, 19 nt, Homo sapiens
  misc_RNA (1)...(19): siRNA sense strand
gccaccagccugcaugaga

SEQ ID NO: 1239810 - RNA, 19 nt, Homo sapiens
  misc_RNA (1)...(19): siRNA sense strand
caagcugggcuaccuuauc

SEQ ID NO: 1239811 - RNA, 19 nt, Homo sapiens
  misc_RNA (1)...(19): siRNA sense strand
agagauguccacacguuug

SEQ ID NO: 1239812 - RNA, 19 nt, Homo sapiens
  misc_RNA (1)...(19): siRNA sense strand
ggaugaacccagugaugag

SEQ ID NO: 1239813 - RNA, 19 nt, Homo sapiens
  misc_RNA (1)...(19): siRNA sense strand
gugccagccuccuguuugg

SEQ ID NO: 1239814 - RNA, 19 nt, Homo sapiens
  misc_RNA (1)...(19): siRNA sense strand
guccacacguuugcauuca

SEQ ID NO: 1239815 - RNA, 19 nt, Homo sapiens
  misc_RNA (1)...(19): siRNA sense strand
aggaggaggaugaugauga

SEQ ID NO: 1239816 - RNA, 19 nt, Homo sapiens
  misc_RNA (1)...(19): siRNA sense strand
agaggaggaggaggacuua

SEQ ID NO: 1239817 - RNA, 19 nt, Homo sapiens
  misc_RNA (1)...(19): siRNA sense strand
gaaggaugaacccagugau

SEQ ID NO: 1239818 - RNA, 19 nt, Homo sapiens
  misc_RNA (1)...(19): siRNA sense strand
ucccuaggcuggguagaga

SEQ ID NO: 1239819 - RNA, 19 nt, Homo sapiens
  misc_RNA (1)...(19): siRNA sense strand
cagagauguccacacguuu

SEQ ID NO: 1239820 - RNA, 19 nt, Homo sapiens
  misc_RNA (1)...(19): siRNA sense strand
ugagccagucggccauuaa

SEQ ID NO: 1239821 - RNA, 19 nt, Homo sapiens
  misc_RNA (1)...(19): siRNA sense strand
aagcugggcuaccuuaucc

SEQ ID NO: 1239822 - RNA, 19 nt, Homo sapiens
  misc_RNA (1)...(19): siRNA sense strand
cugagccagucggccauua

SEQ ID NO: 1239823 - RNA, 19 nt, Homo sapiens
  misc_RNA (1)...(19): siRNA sense strand
aggaggaggaggaugauga

SEQ ID NO: 1239824 - RNA, 19 nt, Homo sapiens
  misc_RNA (1)...(19): siRNA sense strand
gcagcuggaggaugagaca

SEQ ID NO: 1239825 - RNA, 19 nt, Homo sapiens
  misc_RNA (1)...(19): siRNA sense strand
aggaaaggaucugcuacug

SEQ ID NO: 1239826 - RNA, 19 nt, Homo sapiens
  misc_RNA (1)...(19): siRNA sense strand
aggaugaacccagugauga

SEQ ID NO: 1239827 - RNA, 19 nt, Homo sapiens
  misc_RNA (1)...(19): siRNA sense strand
gcuuugaggauggagaauu

SEQ ID NO: 1239828 - RNA, 19 nt, Homo sapiens
  misc_RNA (1)...(19): siRNA sense strand
gagugccagccuccuguuu

SEQ ID NO: 1239829 - RNA, 19 nt, Homo sapiens
  misc_RNA (1)...(19): siRNA sense strand
uggagaaggcuuugaggau

SEQ ID NO: 1239830 - RNA, 19 nt, Homo sapiens
  misc_RNA (1)...(19): siRNA sense strand
ggcccaccgugaccagaau

SEQ ID NO: 1239831 - RNA, 19 nt, Homo sapiens
  misc_RNA (1)...(19): siRNA sense strand
augaguugguccagaaguu

SEQ ID NO: 1239832 - RNA, 19 nt, Homo sapiens
  misc_RNA (1)...(19): siRNA sense strand
caacccagggaucaagugu

SEQ ID NO: 1239833 - RNA, 19 nt, Homo sapiens
  misc_RNA (1)...(19): siRNA sense strand
gaauguaccuguugcuaaa

SEQ ID NO: 1239834 - RNA, 19 nt, Homo sapiens
  misc_RNA (1)...(19): siRNA sense strand
gcagagauguccacacguu

SEQ ID NO: 1239835 - RNA, 19 nt, Homo sapiens
  misc_RNA (1)...(19): siRNA sense strand
caugagaucugcucuaaga

SEQ ID NO: 1239836 - RNA, 19 nt, Homo sapiens
  misc_RNA (1)...(19): siRNA sense strand
cuacguagcucgugauaag

SEQ ID NO: 1239837 - RNA, 19 nt, Homo sapiens
  misc_RNA (1)...(19): siRNA sense strand
ggaggaugaugaugaugaa

SEQ ID NO: 1239838 - RNA, 19 nt, Homo sapiens
  misc_RNA (1)...(19): siRNA sense strand
gugauaagcugacccagau

SEQ ID NO: 1239839 - RNA, 19 nt, Homo sapiens
  misc_RNA (1)...(19): siRNA sense strand
ggaauguaccuguugcuaa

SEQ ID NO: 1239840 - RNA, 19 nt, Homo sapiens
  misc_RNA (1)...(19): siRNA sense strand
ggaggaggaugaugaugau

SEQ ID NO: 1239841 - RNA, 19 nt, Homo sapiens
  misc_RNA (1)...(19): siRNA sense strand
ggaugucccuuuccaagug

SEQ ID NO: 1239842 - RNA, 19 nt, Homo sapiens
  misc_RNA (1)...(19): siRNA sense strand
ggaaggaaaggaucugcua

SEQ ID NO: 1239843 - RNA, 19 nt, Homo sapiens
  misc_RNA (1)...(19): siRNA sense strand
agaaugaguugguccagaa

SEQ ID NO: 1239844 - RNA, 19 nt, Homo sapiens
  misc_RNA (1)...(19): siRNA sense strand
ggaccacucuaaacuugug

SEQ ID NO: 1239845 - RNA, 19 nt, Homo sapiens
  misc_RNA (1)...(19): siRNA sense strand
ggguagaugugauuaaugg

SEQ ID NO: 1239846 - RNA, 19 nt, Homo sapiens
  misc_RNA (1)...(19): siRNA sense strand
ucagcucucuuaccacaaa

SEQ ID NO: 1239847 - RNA, 19 nt, Homo sapiens
  misc_RNA (1)...(19): siRNA sense strand
gcucaagugccacguguuu

SEQ ID NO: 1239848 - RNA, 19 nt, Homo sapiens
  misc_RNA (1)...(19): siRNA sense strand
gaggaggacuuaucuucuc

SEQ ID NO: 1239849 - RNA, 19 nt, Homo sapiens
  misc_RNA (1)...(19): siRNA sense strand
gaccagaaucgcaauguga

SEQ ID NO: 1239850 - RNA, 19 nt, Homo sapiens
  misc_RNA (1)...(19): siRNA sense strand
acucuaaacuuguggaugu

SEQ ID NO: 1239851 - RNA, 19 nt, Homo sapiens
  misc_RNA (1)...(19): siRNA sense strand
ggaaggaugaacccaguga

SEQ ID NO: 1239852 - RNA, 19 nt, Homo sapiens
  misc_RNA (1)...(19): siRNA sense strand
gaacagugcagccagugau

SEQ ID NO: 1239853 - RNA, 19 nt, Homo sapiens
  misc_RNA (1)...(19): siRNA sense strand
gagagugucgggugcguuu

SEQ ID NO: 1239854 - RNA, 19 nt, Homo sapiens
  misc_RNA (1)...(19): siRNA sense strand
acccagggaucaaguguuu

SEQ ID NO: 1239855 - RNA, 19 nt, Homo sapiens
  misc_RNA (1)...(19): siRNA sense strand
cagcagccgugaacaaugg

SEQ ID NO: 1239856 - RNA, 19 nt, Homo sapiens
  misc_RNA (1)...(19): siRNA sense strand
ugacccagaugcucaagug

SEQ ID NO: 1239857 - RNA, 19 nt, Homo sapiens
  misc_RNA (1)...(19): siRNA sense strand
ggaugaugaugaugaagag

SEQ ID NO: 1239858 - RNA, 19 nt, Homo sapiens
  misc_RNA (1)...(19): siRNA sense strand
agaaguuccaagucuauua

SEQ ID NO: 1239859 - RNA, 19 nt, Homo sapiens
  misc_RNA (1)...(19): siRNA sense strand
ugcaugagaucugcucuaa

SEQ ID NO: 1239860 - RNA, 19 nt, Homo sapiens
  misc_RNA (1)...(19): siRNA sense strand
ggaugagacacuaaagcua

SEQ ID NO: 1239861 - RNA, 19 nt, Homo sapiens
  misc_RNA (1)...(19): siRNA sense strand
cuuugaggauggagaauuu

SEQ ID NO: 1239862 - RNA, 19 nt, Homo sapiens
  misc_RNA (1)...(19): siRNA sense strand
gcaaugugaccuugaccuu

SEQ ID NO: 1239863 - RNA, 19 nt, Homo sapiens
  misc_RNA (1)...(19): siRNA sense strand
gcuggaggaugagacacua

SEQ ID NO: 1239864 - RNA, 19 nt, Homo sapiens
  misc_RNA (1)...(19): siRNA sense strand
ucccagcgccuaagaauga

SEQ ID NO: 1239865 - RNA, 19 nt, Homo sapiens
  misc_RNA (1)...(19): siRNA sense strand
ccaccagccugcaugagau

SEQ ID NO: 1239866 - RNA, 19 nt, Homo sapiens
  misc_RNA (1)...(19): siRNA sense strand
ggacuuugccuacguagcu

SEQ ID NO: 1239867 - RNA, 19 nt, Homo sapiens
  misc_RNA (1)...(19): siRNA sense strand
ccacacguuugcauucauc

SEQ ID NO: 1239868 - RNA, 19 nt, Homo sapiens
  misc_RNA (1)...(19): siRNA sense strand
gaaguuccaagucuauuac

SEQ ID NO: 1239869 - RNA, 19 nt, Homo sapiens
  misc_RNA (1)...(19): siRNA sense strand
guccagaaguuccaagucu

SEQ ID NO: 1239870 - RNA, 19 nt, Homo sapiens
  misc_RNA (1)...(19): siRNA sense strand
gcauccgucagcucucuua

SEQ ID NO: 1239871 - RNA, 19 nt, Homo sapiens
  misc_RNA (1)...(19): siRNA sense strand
ggaggaggaggacuuaucu

SEQ ID NO: 1239872 - RNA, 19 nt, Homo sapiens
  misc_RNA (1)...(19): siRNA sense strand
uacugcagcuggaggauga

SEQ ID NO: 1239873 - RNA, 19 nt, Homo sapiens
  misc_RNA (1)...(19): siRNA sense strand
acaccucagggaccuauua

SEQ ID NO: 1239874 - RNA, 19 nt, Homo sapiens
  misc_RNA (1)...(19): siRNA sense strand
cuggaccacucuaaacuug

SEQ ID NO: 1239875 - RNA, 19 nt, Homo sapiens
  misc_RNA (1)...(19): siRNA sense strand
ggaggaggacuuaucuucu

SEQ ID NO: 1239876 - RNA, 19 nt, Homo sapiens
  misc_RNA (1)...(19): siRNA sense strand
ucuguuccaucaucacuga

SEQ ID NO: 1239877 - RNA, 19 nt, Homo sapiens
  misc_RNA (1)...(19): siRNA sense strand
ccagaaguuccaagucuau

SEQ ID NO: 1239878 - RNA, 19 nt, Homo sapiens
  misc_RNA (1)...(19): siRNA sense strand
gcagcaguguggcagucaa

SEQ ID NO: 1239879 - RNA, 19 nt, Homo sapiens
  misc_RNA (1)...(19): siRNA sense strand
ggaacagugcagccaguga

SEQ ID NO: 1239880 - RNA, 19 nt, Homo sapiens
  misc_RNA (1)...(19): siRNA sense strand
ugaccagaaucgcaaugug

SEQ ID NO: 1239881 - RNA, 19 nt, Homo sapiens
  misc_RNA (1)...(19): siRNA sense strand
gggaauguaccuguugcua

SEQ ID NO: 1239882 - RNA, 19 nt, Homo sapiens
  misc_RNA (1)...(19): siRNA sense strand
ggaggaggaggaugaugau

SEQ ID NO: 1239883 - RNA, 19 nt, Homo sapiens
  misc_RNA (1)...(19): siRNA sense strand
uccagaaguuccaagucua

SEQ ID NO: 1239884 - RNA, 19 nt, Homo sapiens
  misc_RNA (1)...(19): siRNA sense strand
gaucaucagcacucaagag

SEQ ID NO: 1239885 - RNA, 19 nt, Homo sapiens
  misc_RNA (1)...(19): siRNA sense strand
acgaggaccuggccugauc

SEQ ID NO: 1239886 - RNA, 19 nt, Homo sapiens
  misc_RNA (1)...(19): siRNA sense strand
aaugcccgcugcuugguaa

SEQ ID NO: 1239887 - RNA, 19 nt, Homo sapiens
  misc_RNA (1)...(19): siRNA sense strand
ggacaccucagggaccuau

SEQ ID NO: 1239888 - RNA, 19 nt, Homo sapiens
  misc_RNA (1)...(19): siRNA sense strand
gaauucccagcgccuaaga

SEQ ID NO: 1239889 - RNA, 19 nt, Homo sapiens
  misc_RNA (1)...(19): siRNA sense strand
gagccagucggccauuaau

SEQ ID NO: 1239890 - RNA, 19 nt, Homo sapiens
  misc_RNA (1)...(19): siRNA sense strand
cugcuacccucaccaucuu

SEQ ID NO: 1239891 - RNA, 19 nt, Homo sapiens
  misc_RNA (1)...(19): siRNA sense strand
gcccgcugcuugguaaaug

SEQ ID NO: 1239892 - RNA, 19 nt, Homo sapiens
  misc_RNA (1)...(19): siRNA sense strand
ccucagggaccuauuacug

SEQ ID NO: 1239893 - RNA, 19 nt, Homo sapiens
  misc_RNA (1)...(19): siRNA sense strand
cagaugagggagaggagaa

SEQ ID NO: 1239894 - RNA, 19 nt, Homo sapiens
  misc_RNA (1)...(19): siRNA sense strand
gccaccagccugcaugaga

SEQ ID NO: 1239895 - RNA, 19 nt, Homo sapiens
  misc_RNA (1)...(19): siRNA sense strand
caagcugggcuaccuuauc

SEQ ID NO: 1239896 - RNA, 19 nt, Homo sapiens
  misc_RNA (1)...(19): siRNA sense strand
agagauguccacacguuug

SEQ ID NO: 1239897 - RNA, 19 nt, Homo sapiens
  misc_RNA (1)...(19): siRNA sense strand
ggaugaacccagugaugag

SEQ ID NO: 1239898 - RNA, 19 nt, Homo sapiens
  misc_RNA (1)...(19): siRNA sense strand
gugccagccuccuguuugg

SEQ ID NO: 1239899 - RNA, 19 nt, Homo sapiens
  misc_RNA (1)...(19): siRNA sense strand
guccacacguuugcauuca

SEQ ID NO: 1239900 - RNA, 19 nt, Homo sapiens
  misc_RNA (1)...(19): siRNA sense strand
aggaggaggaugaugauga

SEQ ID NO: 1239901 - RNA, 19 nt, Homo sapiens
  misc_RNA (1)...(19): siRNA sense strand
agaggaggaggaggacuua

SEQ ID NO: 1239902 - RNA, 19 nt, Homo sapiens
  misc_RNA (1)...(19): siRNA sense strand
gaaggaugaacccagugau

SEQ ID NO: 1239903 - RNA, 19 nt, Homo sapiens
  misc_RNA (1)...(19): siRNA sense strand
ucccuaggcuggguagaga

SEQ ID NO: 1239904 - RNA, 19 nt, Homo sapiens
  misc_RNA (1)...(19): siRNA sense strand
cagagauguccacacguuu

SEQ ID NO: 1239905 - RNA, 19 nt, Homo sapiens
  misc_RNA (1)...(19): siRNA sense strand
ugagccagucggccauuaa

SEQ ID NO: 1239906 - RNA, 19 nt, Homo sapiens
  misc_RNA (1)...(19): siRNA sense strand
aagcugggcuaccuuaucc

SEQ ID NO: 1239907 - RNA, 19 nt, Homo sapiens
  misc_RNA (1)...(19): siRNA sense strand
cugagccagucggccauua

SEQ ID NO: 1239908 - RNA, 19 nt, Homo sapiens
  misc_RNA (1)...(19): siRNA sense strand
aggaggaggaggaugauga

SEQ ID NO: 1239909 - RNA, 19 nt, Homo sapiens
  misc_RNA (1)...(19): siRNA sense strand
gcagcuggaggaugagaca

SEQ ID NO: 1239910 - RNA, 19 nt, Homo sapiens
  misc_RNA (1)...(19): siRNA sense strand
aggaaaggaucugcuacug

SEQ ID NO: 1239911 - RNA, 19 nt, Homo sapiens
  misc_RNA (1)...(19): siRNA sense strand
aggaugaacccagugauga

SEQ ID NO: 1239912 - RNA, 19 nt, Homo sapiens
  misc_RNA (1)...(19): siRNA sense strand
gcuuugaggauggagaauu

SEQ ID NO: 1239913 - RNA, 19 nt, Homo sapiens
  misc_RNA (1)...(19): siRNA sense strand
gagugccagccuccuguuu

SEQ ID NO: 1239914 - RNA, 19 nt, Homo sapiens
  misc_RNA (1)...(19): siRNA sense strand
uggagaaggcuuugaggau

SEQ ID NO: 1239915 - RNA, 19 nt, Homo sapiens
  misc_RNA (1)...(19): siRNA sense strand
ggcccaccgugaccagaau

SEQ ID NO: 1239916 - RNA, 19 nt, Homo sapiens
  misc_RNA (1)...(19): siRNA sense strand
augaguugguccagaaguu

SEQ ID NO: 1239917 - RNA, 19 nt, Homo sapiens
  misc_RNA (1)...(19): siRNA sense strand
caacccagggaucaagugu

SEQ ID NO: 1239918 - RNA, 19 nt, Homo sapiens
  misc_RNA (1)...(19): siRNA sense strand
gcagauggcucgagaauac

SEQ ID NO: 1239919 - RNA, 19 nt, Homo sapiens
  misc_RNA (1)...(19): siRNA sense strand
gcaaggagcugaauuaucc

SEQ ID NO: 1239920 - RNA, 19 nt, Homo sapiens
  misc_RNA (1)...(19): siRNA sense strand
uaagagauaucugcaauga

SEQ ID NO: 1239921 - RNA, 19 nt, Homo sapiens
  misc_RNA (1)...(19): siRNA sense strand
gagcugaauuauccaauga

SEQ ID NO: 1239922 - RNA, 19 nt, Homo sapiens
  misc_RNA (1)...(19): siRNA sense strand
agagauaucugcaaugaug

SEQ ID NO: 1239923 - RNA, 19 nt, Homo sapiens
  misc_RNA (1)...(19): siRNA sense strand
aaagacagcacgcuaauaa

SEQ ID NO: 1239924 - RNA, 19 nt, Homo sapiens
  misc_RNA (1)...(19): siRNA sense strand
gacggaaggugcugagaaa

SEQ ID NO: 1239925 - RNA, 19 nt, Homo sapiens
  misc_RNA (1)...(19): siRNA sense strand
uaacuucucuguguucuau

SEQ ID NO: 1239926 - RNA, 19 nt, Homo sapiens
  misc_RNA (1)...(19): siRNA sense strand
gcuaagagauaucugcaau

SEQ ID NO: 1239927 - RNA, 19 nt, Homo sapiens
  misc_RNA (1)...(19): siRNA sense strand
agagcaaagucuucuauuu

SEQ ID NO: 1239928 - RNA, 19 nt, Homo sapiens
  misc_RNA (1)...(19): siRNA sense strand
gcaaugauguacugucucu

SEQ ID NO: 1239929 - RNA, 19 nt, Homo sapiens
  misc_RNA (1)...(19): siRNA sense strand
agaaagggauugucgauca

SEQ ID NO: 1239930 - RNA, 19 nt, Homo sapiens
  misc_RNA (1)...(19): siRNA sense strand
ccaagaagcuuuugaaauc

SEQ ID NO: 1239931 - RNA, 19 nt, Homo sapiens
  misc_RNA (1)...(19): siRNA sense strand
gcccuuaacuucucugugu

SEQ ID NO: 1239932 - RNA, 19 nt, Homo sapiens
  misc_RNA (1)...(19): siRNA sense strand
aaaaugagcugguucagaa

SEQ ID NO: 1239933 - RNA, 19 nt, Homo sapiens
  misc_RNA (1)...(19): siRNA sense strand
ggagcugaauuauccaaug

SEQ ID NO: 1239934 - RNA, 19 nt, Homo sapiens
  misc_RNA (1)...(19): siRNA sense strand
uugcugaacuugauacauu

SEQ ID NO: 1239935 - RNA, 19 nt, Homo sapiens
  misc_RNA (1)...(19): siRNA sense strand
gaaaugcaaccaacacauc

SEQ ID NO: 1239936 - RNA, 19 nt, Homo sapiens
  misc_RNA (1)...(19): siRNA sense strand
gcaugaagucuguaacuga

SEQ ID NO: 1239937 - RNA, 19 nt, Homo sapiens
  misc_RNA (1)...(19): siRNA sense strand
gaagagucauacaaagaca

SEQ ID NO: 1239938 - RNA, 19 nt, Homo sapiens
  misc_RNA (1)...(19): siRNA sense strand
caacaagcauaccaagaag

SEQ ID NO: 1239939 - RNA, 19 nt, Homo sapiens
  misc_RNA (1)...(19): siRNA sense strand
agacggagcuaagagauau

SEQ ID NO: 1239940 - RNA, 19 nt, Homo sapiens
  misc_RNA (1)...(19): siRNA sense strand
ugagcaaggagcugaauua

SEQ ID NO: 1239941 - RNA, 19 nt, Homo sapiens
  misc_RNA (1)...(19): siRNA sense strand
ggagggucgucucaaguau

SEQ ID NO: 1239942 - RNA, 19 nt, Homo sapiens
  misc_RNA (1)...(19): siRNA sense strand
gcacgcuaauaaugcaauu

SEQ ID NO: 1239943 - RNA, 19 nt, Homo sapiens
  misc_RNA (1)...(19): siRNA sense strand
gcccguaggucaucuugga

SEQ ID NO: 1239944 - RNA, 19 nt, Homo sapiens
  misc_RNA (1)...(19): siRNA sense strand
gagacggagcuaagagaua

SEQ ID NO: 1239945 - RNA, 19 nt, Homo sapiens
  misc_RNA (1)...(19): siRNA sense strand
acaacaagcauaccaagaa

SEQ ID NO: 1239946 - RNA, 19 nt, Homo sapiens
  misc_RNA (1)...(19): siRNA sense strand
caacacauccuaucagacu

SEQ ID NO: 1239947 - RNA, 19 nt, Homo sapiens
  misc_RNA (1)...(19): siRNA sense strand
uacauuaagugaagaguca

SEQ ID NO: 1239948 - RNA, 19 nt, Homo sapiens
  misc_RNA (1)...(19): siRNA sense strand
ccaaggagacgaagcugaa

SEQ ID NO: 1239949 - RNA, 19 nt, Homo sapiens
  misc_RNA (1)...(19): siRNA sense strand
caaagacagcacgcuaaua

SEQ ID NO: 1239950 - RNA, 19 nt, Homo sapiens
  misc_RNA (1)...(19): siRNA sense strand
ucucucaguugcuuauaaa

SEQ ID NO: 1239951 - RNA, 19 nt, Homo sapiens
  misc_RNA (1)...(19): siRNA sense strand
gaaagggauugucgaucag

SEQ ID NO: 1239952 - RNA, 19 nt, Homo sapiens
  misc_RNA (1)...(19): siRNA sense strand
gacugggucuggcccuuaa

SEQ ID NO: 1239953 - RNA, 19 nt, Homo sapiens
  misc_RNA (1)...(19): siRNA sense strand
gagaaggaggggaaaauua

SEQ ID NO: 1239954 - RNA, 19 nt, Homo sapiens
  misc_RNA (1)...(19): siRNA sense strand
gcucgagaauacagagaga

SEQ ID NO: 1239955 - RNA, 19 nt, Homo sapiens
  misc_RNA (1)...(19): siRNA sense strand
agacagcacgcuaauaaug

SEQ ID NO: 1239956 - RNA, 19 nt, Homo sapiens
  misc_RNA (1)...(19): siRNA sense strand
gugaagagucauacaaaga

SEQ ID NO: 1239957 - RNA, 19 nt, Homo sapiens
  misc_RNA (1)...(19): siRNA sense strand
ugagcgauaugaugacaug

SEQ ID NO: 1239958 - RNA, 19 nt, Homo sapiens
  misc_RNA (1)...(19): siRNA sense strand
gaggaaucuucucucaguu

SEQ ID NO: 1239959 - RNA, 19 nt, Homo sapiens
  misc_RNA (1)...(19): siRNA sense strand
ugagagacaacuugacauu

SEQ ID NO: 1239960 - RNA, 19 nt, Homo sapiens
  misc_RNA (1)...(19): siRNA sense strand
caaccaacacauccuauca

SEQ ID NO: 1239961 - RNA, 19 nt, Homo sapiens
  misc_RNA (1)...(19): siRNA sense strand
ggagauuacuaccguuacu

SEQ ID NO: 1239962 - RNA, 19 nt, Homo sapiens
  misc_RNA (1)...(19): siRNA sense strand
ucucuguguucuauuauga

SEQ ID NO: 1239963 - RNA, 19 nt, Homo sapiens
  misc_RNA (1)...(19): siRNA sense strand
gagcaaggagcugaauuau

SEQ ID NO: 1239964 - RNA, 19 nt, Homo sapiens
  misc_RNA (1)...(19): siRNA sense strand
cgagcaggcugagcgauau

SEQ ID NO: 1239965 - RNA, 19 nt, Homo sapiens
  misc_RNA (1)...(19): siRNA sense strand
uaagugaagagucauacaa

SEQ ID NO: 1239966 - RNA, 19 nt, Homo sapiens
  misc_RNA (1)...(19): siRNA sense strand
gagagcaaagucuucuauu

SEQ ID NO: 1239967 - RNA, 19 nt, Homo sapiens
  misc_RNA (1)...(19): siRNA sense strand
caagaaagggauugucgau

SEQ ID NO: 1239968 - RNA, 19 nt, Homo sapiens
  misc_RNA (1)...(19): siRNA sense strand
uaucugcaaugauguacug

SEQ ID NO: 1239969 - RNA, 19 nt, Homo sapiens
  misc_RNA (1)...(19): siRNA sense strand
gacaucggauacccaagga

SEQ ID NO: 1239970 - RNA, 19 nt, Homo sapiens
  misc_RNA (1)...(19): siRNA sense strand
gagagacaacuugacauug

SEQ ID NO: 1239971 - RNA, 19 nt, Homo sapiens
  misc_RNA (1)...(19): siRNA sense strand
ggaaaugcaaccaacacau

SEQ ID NO: 1239972 - RNA, 19 nt, Homo sapiens
  misc_RNA (1)...(19): siRNA sense strand
ugcugaacuugauacauua

SEQ ID NO: 1239973 - RNA, 19 nt, Homo sapiens
  misc_RNA (1)...(19): siRNA sense strand
aaugauguacugucucuuu

SEQ ID NO: 1239974 - RNA, 19 nt, Homo sapiens
  misc_RNA (1)...(19): siRNA sense strand
cuugauacauuaagugaag

SEQ ID NO: 1239975 - RNA, 19 nt, Homo sapiens
  misc_RNA (1)...(19): siRNA sense strand
acuucucuguguucuauua

SEQ ID NO: 1239976 - RNA, 19 nt, Homo sapiens
  misc_RNA (1)...(19): siRNA sense strand
gagggucgucucaaguauu

SEQ ID NO: 1239977 - RNA, 19 nt, Homo sapiens
  misc_RNA (1)...(19): siRNA sense strand
gaauacagagagaaaauug

SEQ ID NO: 1239978 - RNA, 19 nt, Homo sapiens
  misc_RNA (1)...(19): siRNA sense strand
gaaagccugcucucuugca

SEQ ID NO: 1239979 - RNA, 19 nt, Homo sapiens
  misc_RNA (1)...(19): siRNA sense strand
ugaagccauugcugaacuu

SEQ ID NO: 1239980 - RNA, 19 nt, Homo sapiens
  misc_RNA (1)...(19): siRNA sense strand
agggucgucucaaguauug

SEQ ID NO: 1239981 - RNA, 19 nt, Homo sapiens
  misc_RNA (1)...(19): siRNA sense strand
uacaaagacagcacgcuaa

SEQ ID NO: 1239982 - RNA, 19 nt, Homo sapiens
  misc_RNA (1)...(19): siRNA sense strand
cagcagauggcucgagaau

SEQ ID NO: 1239983 - RNA, 19 nt, Homo sapiens
  misc_RNA (1)...(19): siRNA sense strand
cagccugcaugaagucugu

SEQ ID NO: 1239984 - RNA, 19 nt, Homo sapiens
  misc_RNA (1)...(19): siRNA sense strand
ccgagcaggcugagcgaua

SEQ ID NO: 1239985 - RNA, 19 nt, Homo sapiens
  misc_RNA (1)...(19): siRNA sense strand
gcaaccaacacauccuauc

SEQ ID NO: 1239986 - RNA, 19 nt, Homo sapiens
  misc_RNA (1)...(19): siRNA sense strand
aaggagauuacuaccguua

SEQ ID NO: 1239987 - RNA, 19 nt, Homo sapiens
  misc_RNA (1)...(19): siRNA sense strand
gcagagagcaaagucuucu

SEQ ID NO: 1239988 - RNA, 19 nt, Homo sapiens
  misc_RNA (1)...(19): siRNA sense strand
gcugagcgauaugaugaca

SEQ ID NO: 1239989 - RNA, 19 nt, Homo sapiens
  misc_RNA (1)...(19): siRNA sense strand
aaucuucucucaguugcuu

SEQ ID NO: 1239990 - RNA, 19 nt, Homo sapiens
  misc_RNA (1)...(19): siRNA sense strand
gcugaacuugauacauuaa

SEQ ID NO: 1239991 - RNA, 19 nt, Homo sapiens
  misc_RNA (1)...(19): siRNA sense strand
ugaugaagccauugcugaa

SEQ ID NO: 1239992 - RNA, 19 nt, Homo sapiens
  misc_RNA (1)...(19): siRNA sense strand
uggagggucgucucaagua

SEQ ID NO: 1239993 - RNA, 19 nt, Homo sapiens
  misc_RNA (1)...(19): siRNA sense strand
auuaugagauucugaacuc

SEQ ID NO: 1239994 - RNA, 19 nt, Homo sapiens
  misc_RNA (1)...(19): siRNA sense strand
gaaaaugaaaggagauuac

SEQ ID NO: 1239995 - RNA, 19 nt, Homo sapiens
  misc_RNA (1)...(19): siRNA sense strand
uuacugagagacaacuuga

SEQ ID NO: 1239996 - RNA, 19 nt, Homo sapiens
  misc_RNA (1)...(19): siRNA sense strand
accaacacauccuaucaga

SEQ ID NO: 1239997 - RNA, 19 nt, Homo sapiens
  misc_RNA (1)...(19): siRNA sense strand
ccaaugaggagaggaaucu

SEQ ID NO: 1239998 - RNA, 19 nt, Homo sapiens
  misc_RNA (1)...(19): siRNA sense strand
aggcugagcgauaugauga

SEQ ID NO: 1239999 - RNA, 19 nt, Homo sapiens
  misc_RNA (1)...(19): siRNA sense strand
acaaagacagcacgcuaau

SEQ ID NO: 1240000 - RNA, 19 nt, Homo sapiens
  misc_RNA (1)...(19): siRNA sense strand
ucgagaauacagagagaaa

SEQ ID NO: 1240001 - RNA, 19 nt, Homo sapiens
  misc_RNA (1)...(19): siRNA sense strand
aaagccugcucucuugcaa

SEQ ID NO: 1240002 - RNA, 19 nt, Homo sapiens
  misc_RNA (1)...(19): siRNA sense strand
caagaagcuuuugaaauca

SEQ ID NO: 1240003 - RNA, 19 nt, Homo sapiens
  misc_RNA (1)...(19): siRNA sense strand
gagauuacuaccguuacuu

SEQ ID NO: 1240004 - RNA, 19 nt, Homo sapiens
  misc_RNA (1)...(19): siRNA sense strand
agagagcaaagucuucuau

SEQ ID NO: 1240005 - RNA, 19 nt, Homo sapiens
  misc_RNA (1)...(19): siRNA sense strand
agaaggaggggaaaauuaa

SEQ ID NO: 1240006 - RNA, 19 nt, Homo sapiens
  misc_RNA (1)...(19): siRNA sense strand
cauuaagugaagagucaua

SEQ ID NO: 1240007 - RNA, 19 nt, Homo sapiens
  misc_RNA (1)...(19): siRNA sense strand
agacggaaggugcugagaa

SEQ ID NO: 1240008 - RNA, 19 nt, Homo sapiens
  misc_RNA (1)...(19): siRNA sense strand
agauaucugcaaugaugua

SEQ ID NO: 1240009 - RNA, 19 nt, Homo sapiens
  misc_RNA (1)...(19): siRNA sense strand
acagcacgcuaauaaugca

SEQ ID NO: 1240010 - RNA, 19 nt, Homo sapiens
  misc_RNA (1)...(19): siRNA sense strand
aagugaagagucauacaaa

SEQ ID NO: 1240011 - RNA, 19 nt, Homo sapiens
  misc_RNA (1)...(19): siRNA sense strand
agccauugcugaacuugau

SEQ ID NO: 1240012 - RNA, 19 nt, Homo sapiens
  misc_RNA (1)...(19): siRNA sense strand
ggucuggcccuuaacuucu

SEQ ID NO: 1240013 - RNA, 19 nt, Homo sapiens
  misc_RNA (1)...(19): siRNA sense strand
gagaauacagagagaaaau

SEQ ID NO: 1240014 - RNA, 19 nt, Homo sapiens
  misc_RNA (1)...(19): siRNA sense strand
aaugaaaggagauuacuac

SEQ ID NO: 1240015 - RNA, 19 nt, Homo sapiens
  misc_RNA (1)...(19): siRNA sense strand
cugcaaugauguacugucu

SEQ ID NO: 1240016 - RNA, 19 nt, Homo sapiens
  misc_RNA (1)...(19): siRNA sense strand
gucuguaacugagcaagga

SEQ ID NO: 1240017 - RNA, 19 nt, Homo sapiens
  misc_RNA (1)...(19): siRNA sense strand
gacagcacgcuaauaaugc

SEQ ID NO: 1240018 - RNA, 19 nt, Homo sapiens
  misc_RNA (1)...(19): siRNA sense strand
gcagauggcucgagaauac

SEQ ID NO: 1240019 - RNA, 19 nt, Homo sapiens
  misc_RNA (1)...(19): siRNA sense strand
gcaaggagcugaauuaucc

SEQ ID NO: 1240020 - RNA, 19 nt, Homo sapiens
  misc_RNA (1)...(19): siRNA sense strand
uaagagauaucugcaauga

SEQ ID NO: 1240021 - RNA, 19 nt, Homo sapiens
  misc_RNA (1)...(19): siRNA sense strand
gagcugaauuauccaauga

SEQ ID NO: 1240022 - RNA, 19 nt, Homo sapiens
  misc_RNA (1)...(19): siRNA sense strand
agagauaucugcaaugaug

SEQ ID NO: 1240023 - RNA, 19 nt, Homo sapiens
  misc_RNA (1)...(19): siRNA sense strand
aaagacagcacgcuaauaa

SEQ ID NO: 1240024 - RNA, 19 nt, Homo sapiens
  misc_RNA (1)...(19): siRNA sense strand
gacggaaggugcugagaaa

SEQ ID NO: 1240025 - RNA, 19 nt, Homo sapiens
  misc_RNA (1)...(19): siRNA sense strand
uaacuucucuguguucuau

SEQ ID NO: 1240026 - RNA, 19 nt, Homo sapiens
  misc_RNA (1)...(19): siRNA sense strand
gcuaagagauaucugcaau

SEQ ID NO: 1240027 - RNA, 19 nt, Homo sapiens
  misc_RNA (1)...(19): siRNA sense strand
agagcaaagucuucuauuu

SEQ ID NO: 1240028 - RNA, 19 nt, Homo sapiens
  misc_RNA (1)...(19): siRNA sense strand
gcaaugauguacugucucu

SEQ ID NO: 1240029 - RNA, 19 nt, Homo sapiens
  misc_RNA (1)...(19): siRNA sense strand
agaaagggauugucgauca

SEQ ID NO: 1240030 - RNA, 19 nt, Homo sapiens
  misc_RNA (1)...(19): siRNA sense strand
ccaagaagcuuuugaaauc

SEQ ID NO: 1240031 - RNA, 19 nt, Homo sapiens
  misc_RNA (1)...(19): siRNA sense strand
gcccuuaacuucucugugu

SEQ ID NO: 1240032 - RNA, 19 nt, Homo sapiens
  misc_RNA (1)...(19): siRNA sense strand
aaaaugagcugguucagaa

SEQ ID NO: 1240033 - RNA, 19 nt, Homo sapiens
  misc_RNA (1)...(19): siRNA sense strand
ggagcugaauuauccaaug

SEQ ID NO: 1240034 - RNA, 19 nt, Homo sapiens
  misc_RNA (1)...(19): siRNA sense strand
uugcugaacuugauacauu

SEQ ID NO: 1240035 - RNA, 19 nt, Homo sapiens
  misc_RNA (1)...(19): siRNA sense strand
gaaaugcaaccaacacauc

SEQ ID NO: 1240036 - RNA, 19 nt, Homo sapiens
  misc_RNA (1)...(19): siRNA sense strand
gcaugaagucuguaacuga

SEQ ID NO: 1240037 - RNA, 19 nt, Homo sapiens
  misc_RNA (1)...(19): siRNA sense strand
gaagagucauacaaagaca

SEQ ID NO: 1240038 - RNA, 19 nt, Homo sapiens
  misc_RNA (1)...(19): siRNA sense strand
caacaagcauaccaagaag

SEQ ID NO: 1240039 - RNA, 19 nt, Homo sapiens
  misc_RNA (1)...(19): siRNA sense strand
agacggagcuaagagauau

SEQ ID NO: 1240040 - RNA, 19 nt, Homo sapiens
  misc_RNA (1)...(19): siRNA sense strand
ugagcaaggagcugaauua

SEQ ID NO: 1240041 - RNA, 19 nt, Homo sapiens
  misc_RNA (1)...(19): siRNA sense strand
ggagggucgucucaaguau

SEQ ID NO: 1240042 - RNA, 19 nt, Homo sapiens
  misc_RNA (1)...(19): siRNA sense strand
gcacgcuaauaaugcaauu

SEQ ID NO: 1240043 - RNA, 19 nt, Homo sapiens
  misc_RNA (1)...(19): siRNA sense strand
gcccguaggucaucuugga

SEQ ID NO: 1240044 - RNA, 19 nt, Homo sapiens
  misc_RNA (1)...(19): siRNA sense strand
gagacggagcuaagagaua

SEQ ID NO: 1240045 - RNA, 19 nt, Homo sapiens
  misc_RNA (1)...(19): siRNA sense strand
acaacaagcauaccaagaa

SEQ ID NO: 1240046 - RNA, 19 nt, Homo sapiens
  misc_RNA (1)...(19): siRNA sense strand
caacacauccuaucagacu

SEQ ID NO: 1240047 - RNA, 19 nt, Homo sapiens
  misc_RNA (1)...(19): siRNA sense strand
uacauuaagugaagaguca

SEQ ID NO: 1240048 - RNA, 19 nt, Homo sapiens
  misc_RNA (1)...(19): siRNA sense strand
ccaaggagacgaagcugaa

SEQ ID NO: 1240049 - RNA, 19 nt, Homo sapiens
  misc_RNA (1)...(19): siRNA sense strand
caaagacagcacgcuaaua

SEQ ID NO: 1240050 - RNA, 19 nt, Homo sapiens
  misc_RNA (1)...(19): siRNA sense strand
ucucucaguugcuuauaaa

SEQ ID NO: 1240051 - RNA, 19 nt, Homo sapiens
  misc_RNA (1)...(19): siRNA sense strand
gaaagggauugucgaucag

SEQ ID NO: 1240052 - RNA, 19 nt, Homo sapiens
  misc_RNA (1)...(19): siRNA sense strand
gacugggucuggcccuuaa

SEQ ID NO: 1240053 - RNA, 19 nt, Homo sapiens
  misc_RNA (1)...(19): siRNA sense strand
gagaaggaggggaaaauua

SEQ ID NO: 1240054 - RNA, 19 nt, Homo sapiens
  misc_RNA (1)...(19): siRNA sense strand
gcucgagaauacagagaga

SEQ ID NO: 1240055 - RNA, 19 nt, Homo sapiens
  misc_RNA (1)...(19): siRNA sense strand
agacagcacgcuaauaaug

SEQ ID NO: 1240056 - RNA, 19 nt, Homo sapiens
  misc_RNA (1)...(19): siRNA sense strand
gugaagagucauacaaaga

SEQ ID NO: 1240057 - RNA, 19 nt, Homo sapiens
  misc_RNA (1)...(19): siRNA sense strand
ugagcgauaugaugacaug

SEQ ID NO: 1240058 - RNA, 19 nt, Homo sapiens
  misc_RNA (1)...(19): siRNA sense strand
gaggaaucuucucucaguu

SEQ ID NO: 1240059 - RNA, 19 nt, Homo sapiens
  misc_RNA (1)...(19): siRNA sense strand
ugagagacaacuugacauu

SEQ ID NO: 1240060 - RNA, 19 nt, Homo sapiens
  misc_RNA (1)...(19): siRNA sense strand
caaccaacacauccuauca

SEQ ID NO: 1240061 - RNA, 19 nt, Homo sapiens
  misc_RNA (1)...(19): siRNA sense strand
ggagauuacuaccguuacu

SEQ ID NO: 1240062 - RNA, 19 nt, Homo sapiens
  misc_RNA (1)...(19): siRNA sense strand
ucucuguguucuauuauga

SEQ ID NO: 1240063 - RNA, 19 nt, Homo sapiens
  misc_RNA (1)...(19): siRNA sense strand
gagcaaggagcugaauuau

SEQ ID NO: 1240064 - RNA, 19 nt, Homo sapiens
  misc_RNA (1)...(19): siRNA sense strand
cgagcaggcugagcgauau

SEQ ID NO: 1240065 - RNA, 19 nt, Homo sapiens
  misc_RNA (1)...(19): siRNA sense strand
uaagugaagagucauacaa

SEQ ID NO: 1240066 - RNA, 19 nt, Homo sapiens
  misc_RNA (1)...(19): siRNA sense strand
gagagcaaagucuucuauu

SEQ ID NO: 1240067 - RNA, 19 nt, Homo sapiens
  misc_RNA (1)...(19): siRNA sense strand
caagaaagggauugucgau

SEQ ID NO: 1240068 - RNA, 19 nt, Homo sapiens
  misc_RNA (1)...(19): siRNA sense strand
uaucugcaaugauguacug

SEQ ID NO: 1240069 - RNA, 19 nt, Homo sapiens
  misc_RNA (1)...(19): siRNA sense strand
gacaucggauacccaagga

SEQ ID NO: 1240070 - RNA, 19 nt, Homo sapiens
  misc_RNA (1)...(19): siRNA sense strand
gagagacaacuugacauug

SEQ ID NO: 1240071 - RNA, 19 nt, Homo sapiens
  misc_RNA (1)...(19): siRNA sense strand
ggaaaugcaaccaacacau

SEQ ID NO: 1240072 - RNA, 19 nt, Homo sapiens
  misc_RNA (1)...(19): siRNA sense strand
ugcugaacuugauacauua

SEQ ID NO: 1240073 - RNA, 19 nt, Homo sapiens
  misc_RNA (1)...(19): siRNA sense strand
aaugauguacugucucuuu

SEQ ID NO: 1240074 - RNA, 19 nt, Homo sapiens
  misc_RNA (1)...(19): siRNA sense strand
cuugauacauuaagugaag

SEQ ID NO: 1240075 - RNA, 19 nt, Homo sapiens
  misc_RNA (1)...(19): siRNA sense strand
acuucucuguguucuauua

SEQ ID NO: 1240076 - RNA, 19 nt, Homo sapiens
  misc_RNA (1)...(19): siRNA sense strand
gagggucgucucaaguauu

SEQ ID NO: 1240077 - RNA, 19 nt, Homo sapiens
  misc_RNA (1)...(19): siRNA sense strand
gaauacagagagaaaauug

SEQ ID NO: 1240078 - RNA, 19 nt, Homo sapiens
  misc_RNA (1)...(19): siRNA sense strand
gaaagccugcucucuugca

SEQ ID NO: 1240079 - RNA, 19 nt, Homo sapiens
  misc_RNA (1)...(19): siRNA sense strand
ugaagccauugcugaacuu

SEQ ID NO: 1240080 - RNA, 19 nt, Homo sapiens
  misc_RNA (1)...(19): siRNA sense strand
agggucgucucaaguauug

SEQ ID NO: 1240081 - RNA, 19 nt, Homo sapiens
  misc_RNA (1)...(19): siRNA sense strand
uacaaagacagcacgcuaa

SEQ ID NO: 1240082 - RNA, 19 nt, Homo sapiens
  misc_RNA (1)...(19): siRNA sense strand
cagcagauggcucgagaau

SEQ ID NO: 1240083 - RNA, 19 nt, Homo sapiens
  misc_RNA (1)...(19): siRNA sense strand
cagccugcaugaagucugu

SEQ ID NO: 1240084 - RNA, 19 nt, Homo sapiens
  misc_RNA (1)...(19): siRNA sense strand
ccgagcaggcugagcgaua

SEQ ID NO: 1240085 - RNA, 19 nt, Homo sapiens
  misc_RNA (1)...(19): siRNA sense strand
gcaaccaacacauccuauc

SEQ ID NO: 1240086 - RNA, 19 nt, Homo sapiens
  misc_RNA (1)...(19): siRNA sense strand
aaggagauuacuaccguua

SEQ ID NO: 1240087 - RNA, 19 nt, Homo sapiens
  misc_RNA (1)...(19): siRNA sense strand
gcagagagcaaagucuucu

SEQ ID NO: 1240088 - RNA, 19 nt, Homo sapiens
  misc_RNA (1)...(19): siRNA sense strand
gcugagcgauaugaugaca

SEQ ID NO: 1240089 - RNA, 19 nt, Homo sapiens
  misc_RNA (1)...(19): siRNA sense strand
aaucuucucucaguugcuu

SEQ ID NO: 1240090 - RNA, 19 nt, Homo sapiens
  misc_RNA (1)...(19): siRNA sense strand
gcugaacuugauacauuaa

SEQ ID NO: 1240091 - RNA, 19 nt, Homo sapiens
  misc_RNA (1)...(19): siRNA sense strand
ugaugaagccauugcugaa

SEQ ID NO: 1240092 - RNA, 19 nt, Homo sapiens
  misc_RNA (1)...(19): siRNA sense strand
uggagggucgucucaagua

SEQ ID NO: 1240093 - RNA, 19 nt, Homo sapiens
  misc_RNA (1)...(19): siRNA sense strand
auuaugagauucugaacuc

SEQ ID NO: 1240094 - RNA, 19 nt, Homo sapiens
  misc_RNA (1)...(19): siRNA sense strand
gaaaaugaaaggagauuac

SEQ ID NO: 1240095 - RNA, 19 nt, Homo sapiens
  misc_RNA (1)...(19): siRNA sense strand
uuacugagagacaacuuga

SEQ ID NO: 1240096 - RNA, 19 nt, Homo sapiens
  misc_RNA (1)...(19): siRNA sense strand
accaacacauccuaucaga

SEQ ID NO: 1240097 - RNA, 19 nt, Homo sapiens
  misc_RNA (1)...(19): siRNA sense strand
ccaaugaggagaggaaucu

SEQ ID NO: 1240098 - RNA, 19 nt, Homo sapiens
  misc_RNA (1)...(19): siRNA sense strand
aggcugagcgauaugauga

SEQ ID NO: 1240099 - RNA, 19 nt, Homo sapiens
  misc_RNA (1)...(19): siRNA sense strand
acaaagacagcacgcuaau

SEQ ID NO: 1240100 - RNA, 19 nt, Homo sapiens
  misc_RNA (1)...(19): siRNA sense strand
ucgagaauacagagagaaa

SEQ ID NO: 1240101 - RNA, 19 nt, Homo sapiens
  misc_RNA (1)...(19): siRNA sense strand
aaagccugcucucuugcaa

SEQ ID NO: 1240102 - RNA, 19 nt, Homo sapiens
  misc_RNA (1)...(19): siRNA sense strand
caagaagcuuuugaaauca

SEQ ID NO: 1240103 - RNA, 19 nt, Homo sapiens
  misc_RNA (1)...(19): siRNA sense strand
gagauuacuaccguuacuu

SEQ ID NO: 1240104 - RNA, 19 nt, Homo sapiens
  misc_RNA (1)...(19): siRNA sense strand
agagagcaaagucuucuau

SEQ ID NO: 1240105 - RNA, 19 nt, Homo sapiens
  misc_RNA (1)...(19): siRNA sense strand
agaaggaggggaaaauuaa

SEQ ID NO: 1240106 - RNA, 19 nt, Homo sapiens
  misc_RNA (1)...(19): siRNA sense strand
cauuaagugaagagucaua

SEQ ID NO: 1240107 - RNA, 19 nt, Homo sapiens
  misc_RNA (1)...(19): siRNA sense strand
agacggaaggugcugagaa

SEQ ID NO: 1240108 - RNA, 19 nt, Homo sapiens
  misc_RNA (1)...(19): siRNA sense strand
agauaucugcaaugaugua

SEQ ID NO: 1240109 - RNA, 19 nt, Homo sapiens
  misc_RNA (1)...(19): siRNA sense strand
acagcacgcuaauaaugca

SEQ ID NO: 1240110 - RNA, 19 nt, Homo sapiens
  misc_RNA (1)...(19): siRNA sense strand
aagugaagagucauacaaa

SEQ ID NO: 1240111 - RNA, 19 nt, Homo sapiens
  misc_RNA (1)...(19): siRNA sense strand
agccauugcugaacuugau

SEQ ID NO: 1240112 - RNA, 19 nt, Homo sapiens
  misc_RNA (1)...(19): siRNA sense strand
ggucuggcccuuaacuucu

SEQ ID NO: 1240113 - RNA, 19 nt, Homo sapiens
  misc_RNA (1)...(19): siRNA sense strand
gagaauacagagagaaaau

SEQ ID NO: 1240114 - RNA, 19 nt, Homo sapiens
  misc_RNA (1)...(19): siRNA sense strand
aaugaaaggagauuacuac

SEQ ID NO: 1240115 - RNA, 19 nt, Homo sapiens
  misc_RNA (1)...(19): siRNA sense strand
cugcaaugauguacugucu

SEQ ID NO: 1240116 - RNA, 19 nt, Homo sapiens
  misc_RNA (1)...(19): siRNA sense strand
gucuguaacugagcaagga

SEQ ID NO: 1240117 - RNA, 19 nt, Homo sapiens
  misc_RNA (1)...(19): siRNA sense strand
gacagcacgcuaauaaugc

SEQ ID NO: 1240118 - RNA, 19 nt, Homo sapiens
  misc_RNA (1)...(19): siRNA sense strand
gcaaagacaugauuaacaa

SEQ ID NO: 1240119 - RNA, 19 nt, Homo sapiens
  misc_RNA (1)...(19): siRNA sense strand
ccacugccauccauucgua

SEQ ID NO: 1240120 - RNA, 19 nt, Homo sapiens
  misc_RNA (1)...(19): siRNA sense strand
gaucagggaacuucuaaug

SEQ ID NO: 1240121 - RNA, 19 nt, Homo sapiens
  misc_RNA (1)...(19): siRNA sense strand
gagaucugcuuugacagua

SEQ ID NO: 1240122 - RNA, 19 nt, Homo sapiens
  misc_RNA (1)...(19): siRNA sense strand
ucagggaacuucuaaugga

SEQ ID NO: 1240123 - RNA, 19 nt, Homo sapiens
  misc_RNA (1)...(19): siRNA sense strand
gaucugcuuugacaguaaa

SEQ ID NO: 1240124 - RNA, 19 nt, Homo sapiens
  misc_RNA (1)...(19): siRNA sense strand
ggacuacgcggacaucaug

SEQ ID NO: 1240125 - RNA, 19 nt, Homo sapiens
  misc_RNA (1)...(19): siRNA sense strand
acaaggaccucaaguacug

SEQ ID NO: 1240126 - RNA, 19 nt, Homo sapiens
  misc_RNA (1)...(19): siRNA sense strand
agaaagggcugcaguucau

SEQ ID NO: 1240127 - RNA, 19 nt, Homo sapiens
  misc_RNA (1)...(19): siRNA sense strand
gcagaugaaguuuguaugu

SEQ ID NO: 1240128 - RNA, 19 nt, Homo sapiens
  misc_RNA (1)...(19): siRNA sense strand
agaagaauaugaggccuuu

SEQ ID NO: 1240129 - RNA, 19 nt, Homo sapiens
  misc_RNA (1)...(19): siRNA sense strand
gggaacuucuaauggauug

SEQ ID NO: 1240130 - RNA, 19 nt, Homo sapiens
  misc_RNA (1)...(19): siRNA sense strand
uuaacaagcaggacuguaa

SEQ ID NO: 1240131 - RNA, 19 nt, Homo sapiens
  misc_RNA (1)...(19): siRNA sense strand
gagaaagggcugcaguuca

SEQ ID NO: 1240132 - RNA, 19 nt, Homo sapiens
  misc_RNA (1)...(19): siRNA sense strand
gaacagcaacagcaagaag

SEQ ID NO: 1240133 - RNA, 19 nt, Homo sapiens
  misc_RNA (1)...(19): siRNA sense strand
gcaagaacagcaacagcaa

SEQ ID NO: 1240134 - RNA, 19 nt, Homo sapiens
  misc_RNA (1)...(19): siRNA sense strand
cagcagaccuaugacaugu

SEQ ID NO: 1240135 - RNA, 19 nt, Homo sapiens
  misc_RNA (1)...(19): siRNA sense strand
ccaugggccuguaugagaa

SEQ ID NO: 1240136 - RNA, 19 nt, Homo sapiens
  misc_RNA (1)...(19): siRNA sense strand
ggaaggcggacaucgagaa

SEQ ID NO: 1240137 - RNA, 19 nt, Homo sapiens
  misc_RNA (1)...(19): siRNA sense strand
gcagaucagggaacuucua

SEQ ID NO: 1240138 - RNA, 19 nt, Homo sapiens
  misc_RNA (1)...(19): siRNA sense strand
ggcacgcgcucucaaugaa

SEQ ID NO: 1240139 - RNA, 19 nt, Homo sapiens
  misc_RNA (1)...(19): siRNA sense strand
gaaggcggacaucgagaaa

SEQ ID NO: 1240140 - RNA, 19 nt, Homo sapiens
  misc_RNA (1)...(19): siRNA sense strand
gaacaagauccuggacaug

SEQ ID NO: 1240141 - RNA, 19 nt, Homo sapiens
  misc_RNA (1)...(19): siRNA sense strand
gcaagcugcaugucaauag

SEQ ID NO: 1240142 - RNA, 19 nt, Homo sapiens
  misc_RNA (1)...(19): siRNA sense strand
cagcaguacucaggcauga

SEQ ID NO: 1240143 - RNA, 19 nt, Homo sapiens
  misc_RNA (1)...(19): siRNA sense strand
gcaccgacagccuggauga

SEQ ID NO: 1240144 - RNA, 19 nt, Homo sapiens
  misc_RNA (1)...(19): siRNA sense strand
guucaggagucuaagaagu

SEQ ID NO: 1240145 - RNA, 19 nt, Homo sapiens
  misc_RNA (1)...(19): siRNA sense strand
ccuacuaccugugcaaaga

SEQ ID NO: 1240146 - RNA, 19 nt, Homo sapiens
  misc_RNA (1)...(19): siRNA sense strand
gggagaagcagauccagau

SEQ ID NO: 1240147 - RNA, 19 nt, Homo sapiens
  misc_RNA (1)...(19): siRNA sense strand
gcagcagaccuaugacaug

SEQ ID NO: 1240148 - RNA, 19 nt, Homo sapiens
  misc_RNA (1)...(19): siRNA sense strand
ugagggcaaugaucuguuc

SEQ ID NO: 1240149 - RNA, 19 nt, Homo sapiens
  misc_RNA (1)...(19): siRNA sense strand
gaccucaaguacuguagug

SEQ ID NO: 1240150 - RNA, 19 nt, Homo sapiens
  misc_RNA (1)...(19): siRNA sense strand
cagaugaaguuuguaugug

SEQ ID NO: 1240151 - RNA, 19 nt, Homo sapiens
  misc_RNA (1)...(19): siRNA sense strand
ccuuugaccugcagaugaa

SEQ ID NO: 1240152 - RNA, 19 nt, Homo sapiens
  misc_RNA (1)...(19): siRNA sense strand
gugagggccuugagcacaa

SEQ ID NO: 1240153 - RNA, 19 nt, Homo sapiens
  misc_RNA (1)...(19): siRNA sense strand
cagccuggaugacuucuca

SEQ ID NO: 1240154 - RNA, 19 nt, Homo sapiens
  misc_RNA (1)...(19): siRNA sense strand
guaacuucccacagcaaua

SEQ ID NO: 1240155 - RNA, 19 nt, Homo sapiens
  misc_RNA (1)...(19): siRNA sense strand
gggcugcaguucauucagu

SEQ ID NO: 1240156 - RNA, 19 nt, Homo sapiens
  misc_RNA (1)...(19): siRNA sense strand
agaacaagauccuggacau

SEQ ID NO: 1240157 - RNA, 19 nt, Homo sapiens
  misc_RNA (1)...(19): siRNA sense strand
ccgagaagcacaaggagaa

SEQ ID NO: 1240158 - RNA, 19 nt, Homo sapiens
  misc_RNA (1)...(19): siRNA sense strand
cggcgugccuagugaguug

SEQ ID NO: 1240159 - RNA, 19 nt, Homo sapiens
  misc_RNA (1)...(19): siRNA sense strand
ugacaaggaccucaaguac

SEQ ID NO: 1240160 - RNA, 19 nt, Homo sapiens
  misc_RNA (1)...(19): siRNA sense strand
ccaccucccucaaguacuc

SEQ ID NO: 1240161 - RNA, 19 nt, Homo sapiens
  misc_RNA (1)...(19): siRNA sense strand
gggagaaggacuauaagca

SEQ ID NO: 1240162 - RNA, 19 nt, Homo sapiens
  misc_RNA (1)...(19): siRNA sense strand
gcacauccaguccgagaag

SEQ ID NO: 1240163 - RNA, 19 nt, Homo sapiens
  misc_RNA (1)...(19): siRNA sense strand
ggccgcaagugccaauaug

SEQ ID NO: 1240164 - RNA, 19 nt, Homo sapiens
  misc_RNA (1)...(19): siRNA sense strand
ccuaaagcaagaagaauau

SEQ ID NO: 1240165 - RNA, 19 nt, Homo sapiens
  misc_RNA (1)...(19): siRNA sense strand
cagaucagggaacuucuaa

SEQ ID NO: 1240166 - RNA, 19 nt, Homo sapiens
  misc_RNA (1)...(19): siRNA sense strand
ggaggacagcugccacuuc

SEQ ID NO: 1240167 - RNA, 19 nt, Homo sapiens
  misc_RNA (1)...(19): siRNA sense strand
gaaagggcugcaguucauu

SEQ ID NO: 1240168 - RNA, 19 nt, Homo sapiens
  misc_RNA (1)...(19): siRNA sense strand
ugcgagaucugcuuugaca

SEQ ID NO: 1240169 - RNA, 19 nt, Homo sapiens
  misc_RNA (1)...(19): siRNA sense strand
gcacagcuucuacaacaac

SEQ ID NO: 1240170 - RNA, 19 nt, Homo sapiens
  misc_RNA (1)...(19): siRNA sense strand
gcaaggcacgcgcucucaa

SEQ ID NO: 1240171 - RNA, 19 nt, Homo sapiens
  misc_RNA (1)...(19): siRNA sense strand
acaacuuccugcugcaaga

SEQ ID NO: 1240172 - RNA, 19 nt, Homo sapiens
  misc_RNA (1)...(19): siRNA sense strand
cccuaaagcaagaagaaua

SEQ ID NO: 1240173 - RNA, 19 nt, Homo sapiens
  misc_RNA (1)...(19): siRNA sense strand
ccaggaauuggaaaccuuu

SEQ ID NO: 1240174 - RNA, 19 nt, Homo sapiens
  misc_RNA (1)...(19): siRNA sense strand
ggacaugcagcagaccuau

SEQ ID NO: 1240175 - RNA, 19 nt, Homo sapiens
  misc_RNA (1)...(19): siRNA sense strand
uggaugcacucgacagcuu

SEQ ID NO: 1240176 - RNA, 19 nt, Homo sapiens
  misc_RNA (1)...(19): siRNA sense strand
cagggaacuucuaauggau

SEQ ID NO: 1240177 - RNA, 19 nt, Homo sapiens
  misc_RNA (1)...(19): siRNA sense strand
agcaggcucuggugcagua

SEQ ID NO: 1240178 - RNA, 19 nt, Homo sapiens
  misc_RNA (1)...(19): siRNA sense strand
ggagaagcagauccagaug

SEQ ID NO: 1240179 - RNA, 19 nt, Homo sapiens
  misc_RNA (1)...(19): siRNA sense strand
acaugcagcagaccuauga

SEQ ID NO: 1240180 - RNA, 19 nt, Homo sapiens
  misc_RNA (1)...(19): siRNA sense strand
ggcugaacguggccgacua

SEQ ID NO: 1240181 - RNA, 19 nt, Homo sapiens
  misc_RNA (1)...(19): siRNA sense strand
gacaggaggagcucaacga

SEQ ID NO: 1240182 - RNA, 19 nt, Homo sapiens
  misc_RNA (1)...(19): siRNA sense strand
ucaagcuggugcagaaucu

SEQ ID NO: 1240183 - RNA, 19 nt, Homo sapiens
  misc_RNA (1)...(19): siRNA sense strand
acaagcaggacuguaagua

SEQ ID NO: 1240184 - RNA, 19 nt, Homo sapiens
  misc_RNA (1)...(19): siRNA sense strand
caagcugcaugucaauagg

SEQ ID NO: 1240185 - RNA, 19 nt, Homo sapiens
  misc_RNA (1)...(19): siRNA sense strand
ccaaggacucuccgucugu

SEQ ID NO: 1240186 - RNA, 19 nt, Homo sapiens
  misc_RNA (1)...(19): siRNA sense strand
ggaugcacucgacagcuuu

SEQ ID NO: 1240187 - RNA, 19 nt, Homo sapiens
  misc_RNA (1)...(19): siRNA sense strand
ggauugggguccauagaug

SEQ ID NO: 1240188 - RNA, 19 nt, Homo sapiens
  misc_RNA (1)...(19): siRNA sense strand
cccuagcggugcucagaaa

SEQ ID NO: 1240189 - RNA, 19 nt, Homo sapiens
  misc_RNA (1)...(19): siRNA sense strand
ccuaugacauguggcugaa

SEQ ID NO: 1240190 - RNA, 19 nt, Homo sapiens
  misc_RNA (1)...(19): siRNA sense strand
ccacagcaauacgaucucu

SEQ ID NO: 1240191 - RNA, 19 nt, Homo sapiens
  misc_RNA (1)...(19): siRNA sense strand
cgagaaagggcugcaguuc

SEQ ID NO: 1240192 - RNA, 19 nt, Homo sapiens
  misc_RNA (1)...(19): siRNA sense strand
caaggcacgcgcucucaau

SEQ ID NO: 1240193 - RNA, 19 nt, Homo sapiens
  misc_RNA (1)...(19): siRNA sense strand
aagaacagcaacagcaaga

SEQ ID NO: 1240194 - RNA, 19 nt, Homo sapiens
  misc_RNA (1)...(19): siRNA sense strand
acaagauccuggacaugca

SEQ ID NO: 1240195 - RNA, 19 nt, Homo sapiens
  misc_RNA (1)...(19): siRNA sense strand
gaaguacuggcagcagaug

SEQ ID NO: 1240196 - RNA, 19 nt, Homo sapiens
  misc_RNA (1)...(19): siRNA sense strand
cgagaucugcuuugacagu

SEQ ID NO: 1240197 - RNA, 19 nt, Homo sapiens
  misc_RNA (1)...(19): siRNA sense strand
acacugccuugcucaucaa

SEQ ID NO: 1240198 - RNA, 19 nt, Homo sapiens
  misc_RNA (1)...(19): siRNA sense strand
caacacugccuugcucauc

SEQ ID NO: 1240199 - RNA, 19 nt, Homo sapiens
  misc_RNA (1)...(19): siRNA sense strand
ccgacagccuggaugacuu

SEQ ID NO: 1240200 - RNA, 19 nt, Homo sapiens
  misc_RNA (1)...(19): siRNA sense strand
gcuccaccucccucaagua

SEQ ID NO: 1240201 - RNA, 19 nt, Homo sapiens
  misc_RNA (1)...(19): siRNA sense strand
agaucugcuuugacaguaa

SEQ ID NO: 1240202 - RNA, 19 nt, Homo sapiens
  misc_RNA (1)...(19): siRNA sense strand
caagcaggacuguaaguac

SEQ ID NO: 1240203 - RNA, 19 nt, Homo sapiens
  misc_RNA (1)...(19): siRNA sense strand
gaguucgcaaggcguauaa

SEQ ID NO: 1240204 - RNA, 19 nt, Homo sapiens
  misc_RNA (1)...(19): siRNA sense strand
uaacuucccacagcaauac

SEQ ID NO: 1240205 - RNA, 19 nt, Homo sapiens
  misc_RNA (1)...(19): siRNA sense strand
gacaaggaccucaaguacu

SEQ ID NO: 1240206 - RNA, 19 nt, Homo sapiens
  misc_RNA (1)...(19): siRNA sense strand
cugacaaggaccucaagua

SEQ ID NO: 1240207 - RNA, 19 nt, Homo sapiens
  misc_RNA (1)...(19): siRNA sense strand
ucugcgagaucugcuuuga

SEQ ID NO: 1240208 - RNA, 19 nt, Homo sapiens
  misc_RNA (1)...(19): siRNA sense strand
uaacaagcaggacuguaag

SEQ ID NO: 1240209 - RNA, 19 nt, Homo sapiens
  misc_RNA (1)...(19): siRNA sense strand
uccgggagaaggacuauaa

SEQ ID NO: 1240210 - RNA, 19 nt, Homo sapiens
  misc_RNA (1)...(19): siRNA sense strand
ucaugaaggagaacaagau

SEQ ID NO: 1240211 - RNA, 19 nt, Homo sapiens
  misc_RNA (1)...(19): siRNA sense strand
gccauccauucguaacuuc

SEQ ID NO: 1240212 - RNA, 19 nt, Homo sapiens
  misc_RNA (1)...(19): siRNA sense strand
uucaggagucuaagaagua

SEQ ID NO: 1240213 - RNA, 19 nt, Homo sapiens
  misc_RNA (1)...(19): siRNA sense strand
cgaguucgcaaggcguaua

SEQ ID NO: 1240214 - RNA, 19 nt, Homo sapiens
  misc_RNA (1)...(19): siRNA sense strand
gaccugcagaugaaguuug

SEQ ID NO: 1240215 - RNA, 19 nt, Homo sapiens
  misc_RNA (1)...(19): siRNA sense strand
ccaggagcacuuccaguuc

SEQ ID NO: 1240216 - RNA, 19 nt, Homo sapiens
  misc_RNA (1)...(19): siRNA sense strand
gcaccuucgccuaccauca

SEQ ID NO: 1240217 - RNA, 19 nt, Homo sapiens
  misc_RNA (1)...(19): siRNA sense strand
aacacugccuugcucauca

SEQ ID NO: 1240218 - RNA, 19 nt, Homo sapiens
  misc_RNA (1)...(19): siRNA sense strand
gaagguggcuuugagauaa

SEQ ID NO: 1240219 - RNA, 19 nt, Homo sapiens
  misc_RNA (1)...(19): siRNA sense strand
ggaggagcccgagacauua

SEQ ID NO: 1240220 - RNA, 19 nt, Homo sapiens
  misc_RNA (1)...(19): siRNA sense strand
ccaugcaccugaccacauu

SEQ ID NO: 1240221 - RNA, 19 nt, Homo sapiens
  misc_RNA (1)...(19): siRNA sense strand
gcaccacagucaagcacaa

SEQ ID NO: 1240222 - RNA, 19 nt, Homo sapiens
  misc_RNA (1)...(19): siRNA sense strand
uaguggaacuucaaaggaa

SEQ ID NO: 1240223 - RNA, 19 nt, Homo sapiens
  misc_RNA (1)...(19): siRNA sense strand
ggaagagguuuuaucagaa

SEQ ID NO: 1240224 - RNA, 19 nt, Homo sapiens
  misc_RNA (1)...(19): siRNA sense strand
caacacaugggcuuuacaa

SEQ ID NO: 1240225 - RNA, 19 nt, Homo sapiens
  misc_RNA (1)...(19): siRNA sense strand
ugaagguggcuuugagaua

SEQ ID NO: 1240226 - RNA, 19 nt, Homo sapiens
  misc_RNA (1)...(19): siRNA sense strand
gaacuucaaaggaaugagu

SEQ ID NO: 1240227 - RNA, 19 nt, Homo sapiens
  misc_RNA (1)...(19): siRNA sense strand
cgacagaaaggaagagguu

SEQ ID NO: 1240228 - RNA, 19 nt, Homo sapiens
  misc_RNA (1)...(19): siRNA sense strand
ggacaacccaacccagaga

SEQ ID NO: 1240229 - RNA, 19 nt, Homo sapiens
  misc_RNA (1)...(19): siRNA sense strand
gaagagguuuuaucagaau

SEQ ID NO: 1240230 - RNA, 19 nt, Homo sapiens
  misc_RNA (1)...(19): siRNA sense strand
ggaaugagugggauccaau

SEQ ID NO: 1240231 - RNA, 19 nt, Homo sapiens
  misc_RNA (1)...(19): siRNA sense strand
ugagugggauccaaucauc

SEQ ID NO: 1240232 - RNA, 19 nt, Homo sapiens
  misc_RNA (1)...(19): siRNA sense strand
gggauccaaucaucgaaug

SEQ ID NO: 1240233 - RNA, 19 nt, Homo sapiens
  misc_RNA (1)...(19): siRNA sense strand
gggcagccgugaaguuucu

SEQ ID NO: 1240234 - RNA, 19 nt, Homo sapiens
  misc_RNA (1)...(19): siRNA sense strand
ugagugggcccaugacuau

SEQ ID NO: 1240235 - RNA, 19 nt, Homo sapiens
  misc_RNA (1)...(19): siRNA sense strand
uggaggagcccgagacauu

SEQ ID NO: 1240236 - RNA, 19 nt, Homo sapiens
  misc_RNA (1)...(19): siRNA sense strand
aggauaccaucaaguacua

SEQ ID NO: 1240237 - RNA, 19 nt, Homo sapiens
  misc_RNA (1)...(19): siRNA sense strand
cgaaugggcugagaaaaga

SEQ ID NO: 1240238 - RNA, 19 nt, Homo sapiens
  misc_RNA (1)...(19): siRNA sense strand
uuacaacacaugggcuuua

SEQ ID NO: 1240239 - RNA, 19 nt, Homo sapiens
  misc_RNA (1)...(19): siRNA sense strand
agacauuaguggaacuuca

SEQ ID NO: 1240240 - RNA, 19 nt, Homo sapiens
  misc_RNA (1)...(19): siRNA sense strand
caucgaaugggcugagaaa

SEQ ID NO: 1240241 - RNA, 19 nt, Homo sapiens
  misc_RNA (1)...(19): siRNA sense strand
gacauuaguggaacuucaa

SEQ ID NO: 1240242 - RNA, 19 nt, Homo sapiens
  misc_RNA (1)...(19): siRNA sense strand
ccuggcaucuuacaacaca

SEQ ID NO: 1240243 - RNA, 19 nt, Homo sapiens
  misc_RNA (1)...(19): siRNA sense strand
ggaggaggaguaccagauc

SEQ ID NO: 1240244 - RNA, 19 nt, Homo sapiens
  misc_RNA (1)...(19): siRNA sense strand
gggugaagguggcuuugag

SEQ ID NO: 1240245 - RNA, 19 nt, Homo sapiens
  misc_RNA (1)...(19): siRNA sense strand
gcucaaguccauggugcua

SEQ ID NO: 1240246 - RNA, 19 nt, Homo sapiens
  misc_RNA (1)...(19): siRNA sense strand
gaaaggaagagguuuuauc

SEQ ID NO: 1240247 - RNA, 19 nt, Homo sapiens
  misc_RNA (1)...(19): siRNA sense strand
aggaagagguuuuaucaga

SEQ ID NO: 1240248 - RNA, 19 nt, Homo sapiens
  misc_RNA (1)...(19): siRNA sense strand
aagguggcuuugagauaaa

SEQ ID NO: 1240249 - RNA, 19 nt, Homo sapiens
  misc_RNA (1)...(19): siRNA sense strand
caccuggcaucuuacaaca

SEQ ID NO: 1240250 - RNA, 19 nt, Homo sapiens
  misc_RNA (1)...(19): siRNA sense strand
caacacaucauuggacaac

SEQ ID NO: 1240251 - RNA, 19 nt, Homo sapiens
  misc_RNA (1)...(19): siRNA sense strand
gaaugagugggauccaauc

SEQ ID NO: 1240252 - RNA, 19 nt, Homo sapiens
  misc_RNA (1)...(19): siRNA sense strand
caacccagagaaacaagga

SEQ ID NO: 1240253 - RNA, 19 nt, Homo sapiens
  misc_RNA (1)...(19): siRNA sense strand
agcaggauaccaucaagua

SEQ ID NO: 1240254 - RNA, 19 nt, Homo sapiens
  misc_RNA (1)...(19): siRNA sense strand
uaucagaaugucagcauca

SEQ ID NO: 1240255 - RNA, 19 nt, Homo sapiens
  misc_RNA (1)...(19): siRNA sense strand
acaccgacaccaucugcua

SEQ ID NO: 1240256 - RNA, 19 nt, Homo sapiens
  misc_RNA (1)...(19): siRNA sense strand
ucaaguccauggugcuaac

SEQ ID NO: 1240257 - RNA, 19 nt, Homo sapiens
  misc_RNA (1)...(19): siRNA sense strand
gaggagcccgagacauuag

SEQ ID NO: 1240258 - RNA, 19 nt, Homo sapiens
  misc_RNA (1)...(19): siRNA sense strand
ccagcaggauaccaucaag

SEQ ID NO: 1240259 - RNA, 19 nt, Homo sapiens
  misc_RNA (1)...(19): siRNA sense strand
aguaccagauccagaagug

SEQ ID NO: 1240260 - RNA, 19 nt, Homo sapiens
  misc_RNA (1)...(19): siRNA sense strand
uaaccuugggccugauuga

SEQ ID NO: 1240261 - RNA, 19 nt, Homo sapiens
  misc_RNA (1)...(19): siRNA sense strand
ggugaagguggcuuugaga

SEQ ID NO: 1240262 - RNA, 19 nt, Homo sapiens
  misc_RNA (1)...(19): siRNA sense strand
gcccgagacauuaguggaa

SEQ ID NO: 1240263 - RNA, 19 nt, Homo sapiens
  misc_RNA (1)...(19): siRNA sense strand
gcaggauaccaucaaguac

SEQ ID NO: 1240264 - RNA, 19 nt, Homo sapiens
  misc_RNA (1)...(19): siRNA sense strand
cagcuccuccaccagcaua

SEQ ID NO: 1240265 - RNA, 19 nt, Homo sapiens
  misc_RNA (1)...(19): siRNA sense strand
cgagagcaccacagucaag

SEQ ID NO: 1240266 - RNA, 19 nt, Homo sapiens
  misc_RNA (1)...(19): siRNA sense strand
ccgggcagccgugaaguuu

SEQ ID NO: 1240267 - RNA, 19 nt, Homo sapiens
  misc_RNA (1)...(19): siRNA sense strand
gcaacacaucauuggacaa

SEQ ID NO: 1240268 - RNA, 19 nt, Homo sapiens
  misc_RNA (1)...(19): siRNA sense strand
caagggauugaguuuguag

SEQ ID NO: 1240269 - RNA, 19 nt, Homo sapiens
  misc_RNA (1)...(19): siRNA sense strand
gacagaaaggaagagguuu

SEQ ID NO: 1240270 - RNA, 19 nt, Homo sapiens
  misc_RNA (1)...(19): siRNA sense strand
cagaaaggaagagguuuua

SEQ ID NO: 1240271 - RNA, 19 nt, Homo sapiens
  misc_RNA (1)...(19): siRNA sense strand
gaagagagaugacaacaug

SEQ ID NO: 1240272 - RNA, 19 nt, Homo sapiens
  misc_RNA (1)...(19): siRNA sense strand
gcagaacucuuccuaauga

SEQ ID NO: 1240273 - RNA, 19 nt, Homo sapiens
  misc_RNA (1)...(19): siRNA sense strand
gaaagugguugacauagaa

SEQ ID NO: 1240274 - RNA, 19 nt, Homo sapiens
  misc_RNA (1)...(19): siRNA sense strand
gaacaagccucagacagaa

SEQ ID NO: 1240275 - RNA, 19 nt, Homo sapiens
  misc_RNA (1)...(19): siRNA sense strand
gaacugggaugauaaaguc

SEQ ID NO: 1240276 - RNA, 19 nt, Homo sapiens
  misc_RNA (1)...(19): siRNA sense strand
cagcugauguguauucaua

SEQ ID NO: 1240277 - RNA, 19 nt, Homo sapiens
  misc_RNA (1)...(19): siRNA sense strand
ucgcuaagcuguaccauaa

SEQ ID NO: 1240278 - RNA, 19 nt, Homo sapiens
  misc_RNA (1)...(19): siRNA sense strand
guaggagugucuuugaaua

SEQ ID NO: 1240279 - RNA, 19 nt, Homo sapiens
  misc_RNA (1)...(19): siRNA sense strand
ucaagcagcucuguaguaa

SEQ ID NO: 1240280 - RNA, 19 nt, Homo sapiens
  misc_RNA (1)...(19): siRNA sense strand
ggaagaaacaccacaauca

SEQ ID NO: 1240281 - RNA, 19 nt, Homo sapiens
  misc_RNA (1)...(19): siRNA sense strand
ggagcaagcugugucauau

SEQ ID NO: 1240282 - RNA, 19 nt, Homo sapiens
  misc_RNA (1)...(19): siRNA sense strand
gaaaugcaguuugugaaug

SEQ ID NO: 1240283 - RNA, 19 nt, Homo sapiens
  misc_RNA (1)...(19): siRNA sense strand
aaacgaagccgacaucuug

SEQ ID NO: 1240284 - RNA, 19 nt, Homo sapiens
  misc_RNA (1)...(19): siRNA sense strand
gaagaaacaccacaaucaa

SEQ ID NO: 1240285 - RNA, 19 nt, Homo sapiens
  misc_RNA (1)...(19): siRNA sense strand
cauaugaaauugggagaua

SEQ ID NO: 1240286 - RNA, 19 nt, Homo sapiens
  misc_RNA (1)...(19): siRNA sense strand
cagcagaacucuuccuaau

SEQ ID NO: 1240287 - RNA, 19 nt, Homo sapiens
  misc_RNA (1)...(19): siRNA sense strand
gaaagaguccagcccauug

SEQ ID NO: 1240288 - RNA, 19 nt, Homo sapiens
  misc_RNA (1)...(19): siRNA sense strand
agacagaaaugcaguuugu

SEQ ID NO: 1240289 - RNA, 19 nt, Homo sapiens
  misc_RNA (1)...(19): siRNA sense strand
gagagccacugccaccuuu

SEQ ID NO: 1240290 - RNA, 19 nt, Homo sapiens
  misc_RNA (1)...(19): siRNA sense strand
gagccagaauggauauaaa

SEQ ID NO: 1240291 - RNA, 19 nt, Homo sapiens
  misc_RNA (1)...(19): siRNA sense strand
acaauuaccagaucagaua

SEQ ID NO: 1240292 - RNA, 19 nt, Homo sapiens
  misc_RNA (1)...(19): siRNA sense strand
gaacucuuccuaaugauau

SEQ ID NO: 1240293 - RNA, 19 nt, Homo sapiens
  misc_RNA (1)...(19): siRNA sense strand
gaaauugggagauaaugga

SEQ ID NO: 1240294 - RNA, 19 nt, Homo sapiens
  misc_RNA (1)...(19): siRNA sense strand
agacauggauccugaagug

SEQ ID NO: 1240295 - RNA, 19 nt, Homo sapiens
  misc_RNA (1)...(19): siRNA sense strand
gaaaggacagggcagaaga

SEQ ID NO: 1240296 - RNA, 19 nt, Homo sapiens
  misc_RNA (1)...(19): siRNA sense strand
ugauauaccuccauuccaa

SEQ ID NO: 1240297 - RNA, 19 nt, Homo sapiens
  misc_RNA (1)...(19): siRNA sense strand
gcacagagaagugauugaa

SEQ ID NO: 1240298 - RNA, 19 nt, Homo sapiens
  misc_RNA (1)...(19): siRNA sense strand
gcagaagaacccagaaaug

SEQ ID NO: 1240299 - RNA, 19 nt, Homo sapiens
  misc_RNA (1)...(19): siRNA sense strand
ggaggaagauggugguuuu

SEQ ID NO: 1240300 - RNA, 19 nt, Homo sapiens
  misc_RNA (1)...(19): siRNA sense strand
gaagaacccagaaaugcuu

SEQ ID NO: 1240301 - RNA, 19 nt, Homo sapiens
  misc_RNA (1)...(19): siRNA sense strand
gagagaaagugguugacau

SEQ ID NO: 1240302 - RNA, 19 nt, Homo sapiens
  misc_RNA (1)...(19): siRNA sense strand
agaccaacaucucuucgua

SEQ ID NO: 1240303 - RNA, 19 nt, Homo sapiens
  misc_RNA (1)...(19): siRNA sense strand
aaaugcaguuugugaauga

SEQ ID NO: 1240304 - RNA, 19 nt, Homo sapiens
  misc_RNA (1)...(19): siRNA sense strand
aagaagaccuggagaccuu

SEQ ID NO: 1240305 - RNA, 19 nt, Homo sapiens
  misc_RNA (1)...(19): siRNA sense strand
gacuuucccuguucggaua

SEQ ID NO: 1240306 - RNA, 19 nt, Homo sapiens
  misc_RNA (1)...(19): siRNA sense strand
ggagugucuuugaauagaa

SEQ ID NO: 1240307 - RNA, 19 nt, Homo sapiens
  misc_RNA (1)...(19): siRNA sense strand
agaaagugguugacauaga

SEQ ID NO: 1240308 - RNA, 19 nt, Homo sapiens
  misc_RNA (1)...(19): siRNA sense strand
gcagcucuguaguaaagaa

SEQ ID NO: 1240309 - RNA, 19 nt, Homo sapiens
  misc_RNA (1)...(19): siRNA sense strand
guaaagauugggaguaaau

SEQ ID NO: 1240310 - RNA, 19 nt, Homo sapiens
  misc_RNA (1)...(19): siRNA sense strand
gcgccacucuugcccauga

SEQ ID NO: 1240311 - RNA, 19 nt, Homo sapiens
  misc_RNA (1)...(19): siRNA sense strand
gagaagugauugaaaagaa

SEQ ID NO: 1240312 - RNA, 19 nt, Homo sapiens
  misc_RNA (1)...(19): siRNA sense strand
gaaguagucgaccacguuu

SEQ ID NO: 1240313 - RNA, 19 nt, Homo sapiens
  misc_RNA (1)...(19): siRNA sense strand
aagcagcucuguaguaaag

SEQ ID NO: 1240314 - RNA, 19 nt, Homo sapiens
  misc_RNA (1)...(19): siRNA sense strand
gauaaugaucaggaaguua

SEQ ID NO: 1240315 - RNA, 19 nt, Homo sapiens
  misc_RNA (1)...(19): siRNA sense strand
guucggauaccuucaguaa

SEQ ID NO: 1240316 - RNA, 19 nt, Homo sapiens
  misc_RNA (1)...(19): siRNA sense strand
gcuaagcuguaccauaaag

SEQ ID NO: 1240317 - RNA, 19 nt, Homo sapiens
  misc_RNA (1)...(19): siRNA sense strand
ccaccaggguaaagcauga

SEQ ID NO: 1240318 - RNA, 19 nt, Homo sapiens
  misc_RNA (1)...(19): siRNA sense strand
agagaaagugguugacaua

SEQ ID NO: 1240319 - RNA, 19 nt, Homo sapiens
  misc_RNA (1)...(19): siRNA sense strand
cagcgaaucuucagacacu

SEQ ID NO: 1240320 - RNA, 19 nt, Homo sapiens
  misc_RNA (1)...(19): siRNA sense strand
caaguaggagugucuuuga

SEQ ID NO: 1240321 - RNA, 19 nt, Homo sapiens
  misc_RNA (1)...(19): siRNA sense strand
gcaaguaggagugucuuug

SEQ ID NO: 1240322 - RNA, 19 nt, Homo sapiens
  misc_RNA (1)...(19): siRNA sense strand
ccgaccagcugauguguau

SEQ ID NO: 1240323 - RNA, 19 nt, Homo sapiens
  misc_RNA (1)...(19): siRNA sense strand
caaucaaggaggaaaguaa

SEQ ID NO: 1240324 - RNA, 19 nt, Homo sapiens
  misc_RNA (1)...(19): siRNA sense strand
gauaaagucaucauuucug

SEQ ID NO: 1240325 - RNA, 19 nt, Homo sapiens
  misc_RNA (1)...(19): siRNA sense strand
cuacuuggaugaccucaca

SEQ ID NO: 1240326 - RNA, 19 nt, Homo sapiens
  misc_RNA (1)...(19): siRNA sense strand
ugguaaagauugggaguaa

SEQ ID NO: 1240327 - RNA, 19 nt, Homo sapiens
  misc_RNA (1)...(19): siRNA sense strand
agaacaagccucagacaga

SEQ ID NO: 1240328 - RNA, 19 nt, Homo sapiens
  misc_RNA (1)...(19): siRNA sense strand
gcuugaaguugaagaaugg

SEQ ID NO: 1240329 - RNA, 19 nt, Homo sapiens
  misc_RNA (1)...(19): siRNA sense strand
cuuaaaagcuugaaguuga

SEQ ID NO: 1240330 - RNA, 19 nt, Homo sapiens
  misc_RNA (1)...(19): siRNA sense strand
ugugucauaucaacaguuu

SEQ ID NO: 1240331 - RNA, 19 nt, Homo sapiens
  misc_RNA (1)...(19): siRNA sense strand
gguaaagauugggaguaaa

SEQ ID NO: 1240332 - RNA, 19 nt, Homo sapiens
  misc_RNA (1)...(19): siRNA sense strand
gaacaugcaaagaccaaca

SEQ ID NO: 1240333 - RNA, 19 nt, Homo sapiens
  misc_RNA (1)...(19): siRNA sense strand
gaaacaccacaaucaagga

SEQ ID NO: 1240334 - RNA, 19 nt, Homo sapiens
  misc_RNA (1)...(19): siRNA sense strand
gauaaacgaagccgacauc

SEQ ID NO: 1240335 - RNA, 19 nt, Homo sapiens
  misc_RNA (1)...(19): siRNA sense strand
gcagcagaacucuuccuaa

SEQ ID NO: 1240336 - RNA, 19 nt, Homo sapiens
  misc_RNA (1)...(19): siRNA sense strand
ucggauaccuucaguaacu

SEQ ID NO: 1240337 - RNA, 19 nt, Homo sapiens
  misc_RNA (1)...(19): siRNA sense strand
aaugucagcuacaagaaga

SEQ ID NO: 1240338 - RNA, 19 nt, Homo sapiens
  misc_RNA (1)...(19): siRNA sense strand
uauuauaacuggacaacag

SEQ ID NO: 1240339 - RNA, 19 nt, Homo sapiens
  misc_RNA (1)...(19): siRNA sense strand
ggaacugggaugauaaagu

SEQ ID NO: 1240340 - RNA, 19 nt, Homo sapiens
  misc_RNA (1)...(19): siRNA sense strand
aagccauucuucagacuuu

SEQ ID NO: 1240341 - RNA, 19 nt, Homo sapiens
  misc_RNA (1)...(19): siRNA sense strand
gggcaucgcuaagcuguac

SEQ ID NO: 1240342 - RNA, 19 nt, Homo sapiens
  misc_RNA (1)...(19): siRNA sense strand
ggaaggauuggacccauca

SEQ ID NO: 1240343 - RNA, 19 nt, Homo sapiens
  misc_RNA (1)...(19): siRNA sense strand
guaguaaagaagagaagaa

SEQ ID NO: 1240344 - RNA, 19 nt, Homo sapiens
  misc_RNA (1)...(19): siRNA sense strand
ugaaguagucgaccacguu

SEQ ID NO: 1240345 - RNA, 19 nt, Homo sapiens
  misc_RNA (1)...(19): siRNA sense strand
gaccagaacaagccucaga

SEQ ID NO: 1240346 - RNA, 19 nt, Homo sapiens
  misc_RNA (1)...(19): siRNA sense strand
caagaaacagauaaugauc

SEQ ID NO: 1240347 - RNA, 19 nt, Homo sapiens
  misc_RNA (1)...(19): siRNA sense strand
gagugucuuugaauagaau

SEQ ID NO: 1240348 - RNA, 19 nt, Homo sapiens
  misc_RNA (1)...(19): siRNA sense strand
ggaaaccgaccagcugaug

SEQ ID NO: 1240349 - RNA, 19 nt, Homo sapiens
  misc_RNA (1)...(19): siRNA sense strand
aguuuaaaguccaguguuu

SEQ ID NO: 1240350 - RNA, 19 nt, Homo sapiens
  misc_RNA (1)...(19): siRNA sense strand
acagagaagugauugaaaa

SEQ ID NO: 1240351 - RNA, 19 nt, Homo sapiens
  misc_RNA (1)...(19): siRNA sense strand
gcgaaucuucagacacuuu

SEQ ID NO: 1240352 - RNA, 19 nt, Homo sapiens
  misc_RNA (1)...(19): siRNA sense strand
gucaagcagcucuguagua

SEQ ID NO: 1240353 - RNA, 19 nt, Homo sapiens
  misc_RNA (1)...(19): siRNA sense strand
ggacaauuaccagaucaga

SEQ ID NO: 1240354 - RNA, 19 nt, Homo sapiens
  misc_RNA (1)...(19): siRNA sense strand
acagaaaugcaguuuguga

SEQ ID NO: 1240355 - RNA, 19 nt, Homo sapiens
  misc_RNA (1)...(19): siRNA sense strand
ucaggaaguuaucccuaug

SEQ ID NO: 1240356 - RNA, 19 nt, Homo sapiens
  misc_RNA (1)...(19): siRNA sense strand
gaccagcugauguguauuc

SEQ ID NO: 1240357 - RNA, 19 nt, Homo sapiens
  misc_RNA (1)...(19): siRNA sense strand
aaaagaagccagaaaaguu

SEQ ID NO: 1240358 - RNA, 19 nt, Homo sapiens
  misc_RNA (1)...(19): siRNA sense strand
gccagaauggauauaaauu

SEQ ID NO: 1240359 - RNA, 19 nt, Homo sapiens
  misc_RNA (1)...(19): siRNA sense strand
aaagugagccagaauggau

SEQ ID NO: 1240360 - RNA, 19 nt, Homo sapiens
  misc_RNA (1)...(19): siRNA sense strand
gggcagaagaacccagaaa

SEQ ID NO: 1240361 - RNA, 19 nt, Homo sapiens
  misc_RNA (1)...(19): siRNA sense strand
cagcaaacaagacggauuc

SEQ ID NO: 1240362 - RNA, 19 nt, Homo sapiens
  misc_RNA (1)...(19): siRNA sense strand
cuucagacuuucccuguuc

SEQ ID NO: 1240363 - RNA, 19 nt, Homo sapiens
  misc_RNA (1)...(19): siRNA sense strand
gugagacucugugaaguag

SEQ ID NO: 1240364 - RNA, 19 nt, Homo sapiens
  misc_RNA (1)...(19): siRNA sense strand
gaaaagaagccagaaaagu

SEQ ID NO: 1240365 - RNA, 19 nt, Homo sapiens
  misc_RNA (1)...(19): siRNA sense strand
uggaugaccucacagacau

SEQ ID NO: 1240366 - RNA, 19 nt, Homo sapiens
  misc_RNA (1)...(19): siRNA sense strand
guacaggaacaugcaaaga

SEQ ID NO: 1240367 - RNA, 19 nt, Homo sapiens
  misc_RNA (1)...(19): siRNA sense strand
uauuuaccgucaacccuaa

SEQ ID NO: 1240368 - RNA, 19 nt, Homo sapiens
  misc_RNA (1)...(19): siRNA sense strand
gaaaccgaccagcugaugu

SEQ ID NO: 1240369 - RNA, 19 nt, Homo sapiens
  misc_RNA (1)...(19): siRNA sense strand
agaaacagauaaugaucag

SEQ ID NO: 1240370 - RNA, 19 nt, Homo sapiens
  misc_RNA (1)...(19): siRNA sense strand
gggaagaaacaccacaauc

SEQ ID NO: 1240371 - RNA, 19 nt, Homo sapiens
  misc_RNA (1)...(19): siRNA sense strand
gcucaucucugauuacuuc

SEQ ID NO: 1240372 - RNA, 19 nt, Homo sapiens
  misc_RNA (1)...(19): siRNA sense strand
gaaaguggcccuguucuau

SEQ ID NO: 1240373 - RNA, 19 nt, Homo sapiens
  misc_RNA (1)...(19): siRNA sense strand
gaagugccaacucuaauuu

SEQ ID NO: 1240374 - RNA, 19 nt, Homo sapiens
  misc_RNA (1)...(19): siRNA sense strand
ccucauugcuuucuucauu

SEQ ID NO: 1240375 - RNA, 19 nt, Homo sapiens
  misc_RNA (1)...(19): siRNA sense strand
gcacuucagccucuucuuu

SEQ ID NO: 1240376 - RNA, 19 nt, Homo sapiens
  misc_RNA (1)...(19): siRNA sense strand
gucuauggcuuuauacuuu

SEQ ID NO: 1240377 - RNA, 19 nt, Homo sapiens
  misc_RNA (1)...(19): siRNA sense strand
cgacauaccagucucugua

SEQ ID NO: 1240378 - RNA, 19 nt, Homo sapiens
  misc_RNA (1)...(19): siRNA sense strand
gcagaaacuccuccuagaa

SEQ ID NO: 1240379 - RNA, 19 nt, Homo sapiens
  misc_RNA (1)...(19): siRNA sense strand
ggaagugccaacucuaauu

SEQ ID NO: 1240380 - RNA, 19 nt, Homo sapiens
  misc_RNA (1)...(19): siRNA sense strand
guacauaccugugaaaaug

SEQ ID NO: 1240381 - RNA, 19 nt, Homo sapiens
  misc_RNA (1)...(19): siRNA sense strand
ggacguggcgcucuacaug

SEQ ID NO: 1240382 - RNA, 19 nt, Homo sapiens
  misc_RNA (1)...(19): siRNA sense strand
acaacacccucauugcuuu

SEQ ID NO: 1240383 - RNA, 19 nt, Homo sapiens
  misc_RNA (1)...(19): siRNA sense strand
guacuucuuugcagagaug

SEQ ID NO: 1240384 - RNA, 19 nt, Homo sapiens
  misc_RNA (1)...(19): siRNA sense strand
gggaguaugccaugaugua

SEQ ID NO: 1240385 - RNA, 19 nt, Homo sapiens
  misc_RNA (1)...(19): siRNA sense strand
ucacugcuauugcccugua

SEQ ID NO: 1240386 - RNA, 19 nt, Homo sapiens
  misc_RNA (1)...(19): siRNA sense strand
acacauggccucuacuuga

SEQ ID NO: 1240387 - RNA, 19 nt, Homo sapiens
  misc_RNA (1)...(19): siRNA sense strand
ugccaacucuaauuucuuu

SEQ ID NO: 1240388 - RNA, 19 nt, Homo sapiens
  misc_RNA (1)...(19): siRNA sense strand
gcaaagccuucuggaucuu

SEQ ID NO: 1240389 - RNA, 19 nt, Homo sapiens
  misc_RNA (1)...(19): siRNA sense strand
ccucuuucauuuccuaauu

SEQ ID NO: 1240390 - RNA, 19 nt, Homo sapiens
  misc_RNA (1)...(19): siRNA sense strand
guauguguguuucagauca

SEQ ID NO: 1240391 - RNA, 19 nt, Homo sapiens
  misc_RNA (1)...(19): siRNA sense strand
cgcagucuauggcuuuaua

SEQ ID NO: 1240392 - RNA, 19 nt, Homo sapiens
  misc_RNA (1)...(19): siRNA sense strand
cuucucagcucuugggauu

SEQ ID NO: 1240393 - RNA, 19 nt, Homo sapiens
  misc_RNA (1)...(19): siRNA sense strand
gcugucaucgccaucuuua

SEQ ID NO: 1240394 - RNA, 19 nt, Homo sapiens
  misc_RNA (1)...(19): siRNA sense strand
caucucugauuacuucuau

SEQ ID NO: 1240395 - RNA, 19 nt, Homo sapiens
  misc_RNA (1)...(19): siRNA sense strand
gcaauccaggacuucaaua

SEQ ID NO: 1240396 - RNA, 19 nt, Homo sapiens
  misc_RNA (1)...(19): siRNA sense strand
caauccaggacuucaauaa

SEQ ID NO: 1240397 - RNA, 19 nt, Homo sapiens
  misc_RNA (1)...(19): siRNA sense strand
uguggcaccucuggauuua

SEQ ID NO: 1240398 - RNA, 19 nt, Homo sapiens
  misc_RNA (1)...(19): siRNA sense strand
guggaaccaucucuacaga

SEQ ID NO: 1240399 - RNA, 19 nt, Homo sapiens
  misc_RNA (1)...(19): siRNA sense strand
gaucaacgucuucuucuac

SEQ ID NO: 1240400 - RNA, 19 nt, Homo sapiens
  misc_RNA (1)...(19): siRNA sense strand
gaucucacuccaaacauug

SEQ ID NO: 1240401 - RNA, 19 nt, Homo sapiens
  misc_RNA (1)...(19): siRNA sense strand
uuccagaucucacuccaaa

SEQ ID NO: 1240402 - RNA, 19 nt, Homo sapiens
  misc_RNA (1)...(19): siRNA sense strand
gcccuguucuaucucuuaa

SEQ ID NO: 1240403 - RNA, 19 nt, Homo sapiens
  misc_RNA (1)...(19): siRNA sense strand
ccuguucuaucucuuaaau

SEQ ID NO: 1240404 - RNA, 19 nt, Homo sapiens
  misc_RNA (1)...(19): siRNA sense strand
caggaagugccaacucuaa

SEQ ID NO: 1240405 - RNA, 19 nt, Homo sapiens
  misc_RNA (1)...(19): siRNA sense strand
gauaacugaugcacucacu

SEQ ID NO: 1240406 - RNA, 19 nt, Homo sapiens
  misc_RNA (1)...(19): siRNA sense strand
gcaggaagugccaacucua

SEQ ID NO: 1240407 - RNA, 19 nt, Homo sapiens
  misc_RNA (1)...(19): siRNA sense strand
cccaucuucuucauguuua

SEQ ID NO: 1240408 - RNA, 19 nt, Homo sapiens
  misc_RNA (1)...(19): siRNA sense strand
guccucaccugcaucauca

SEQ ID NO: 1240409 - RNA, 19 nt, Homo sapiens
  misc_RNA (1)...(19): siRNA sense strand
uggcaccucuggauuuaug

SEQ ID NO: 1240410 - RNA, 19 nt, Homo sapiens
  misc_RNA (1)...(19): siRNA sense strand
ugaaaguggcccuguucua

SEQ ID NO: 1240411 - RNA, 19 nt, Homo sapiens
  misc_RNA (1)...(19): siRNA sense strand
agaucucacuccaaacauu

SEQ ID NO: 1240412 - RNA, 19 nt, Homo sapiens
  misc_RNA (1)...(19): siRNA sense strand
caacaacacccucauugcu

SEQ ID NO: 1240413 - RNA, 19 nt, Homo sapiens
  misc_RNA (1)...(19): siRNA sense strand
cuaauugacuaugcugaau

SEQ ID NO: 1240414 - RNA, 19 nt, Homo sapiens
  misc_RNA (1)...(19): siRNA sense strand
ccagaucucacuccaaaca

SEQ ID NO: 1240415 - RNA, 19 nt, Homo sapiens
  misc_RNA (1)...(19): siRNA sense strand
ucauuugccucuccuucuu

SEQ ID NO: 1240416 - RNA, 19 nt, Homo sapiens
  misc_RNA (1)...(19): siRNA sense strand
ggcaguacauaccugugaa

SEQ ID NO: 1240417 - RNA, 19 nt, Homo sapiens
  misc_RNA (1)...(19): siRNA sense strand
gcaguacauaccugugaaa

SEQ ID NO: 1240418 - RNA, 19 nt, Homo sapiens
  misc_RNA (1)...(19): siRNA sense strand
gugggaagccuagugguaa

SEQ ID NO: 1240419 - RNA, 19 nt, Homo sapiens
  misc_RNA (1)...(19): siRNA sense strand
cugaugcacucacugcuau

SEQ ID NO: 1240420 - RNA, 19 nt, Homo sapiens
  misc_RNA (1)...(19): siRNA sense strand
ucucagcucuugggauuuc

SEQ ID NO: 1240421 - RNA, 19 nt, Homo sapiens
  misc_RNA (1)...(19): siRNA sense strand
gcugaauugguguuuauga

SEQ ID NO: 1240422 - RNA, 19 nt, Homo sapiens
  misc_RNA (1)...(19): siRNA sense strand
agaucaacgucuucuucua

SEQ ID NO: 1240423 - RNA, 19 nt, Homo sapiens
  misc_RNA (1)...(19): siRNA sense strand
aguaugccaugauguaugu

SEQ ID NO: 1240424 - RNA, 19 nt, Homo sapiens
  misc_RNA (1)...(19): siRNA sense strand
ggaguaugccaugauguau

SEQ ID NO: 1240425 - RNA, 19 nt, Homo sapiens
  misc_RNA (1)...(19): siRNA sense strand
caucaacaacacccucauu

SEQ ID NO: 1240426 - RNA, 19 nt, Homo sapiens
  misc_RNA (1)...(19): siRNA sense strand
gaaacuccuccuagaacug

SEQ ID NO: 1240427 - RNA, 19 nt, Homo sapiens
  misc_RNA (1)...(19): siRNA sense strand
uaugcugaauugguguuua

SEQ ID NO: 1240428 - RNA, 19 nt, Homo sapiens
  misc_RNA (1)...(19): siRNA sense strand
ucagaucaacgucuucuuc

SEQ ID NO: 1240429 - RNA, 19 nt, Homo sapiens
  misc_RNA (1)...(19): siRNA sense strand
ccaucacacugaccuucaa

SEQ ID NO: 1240430 - RNA, 19 nt, Homo sapiens
  misc_RNA (1)...(19): siRNA sense strand
gcaucaucaucgucuguuc

SEQ ID NO: 1240431 - RNA, 19 nt, Homo sapiens
  misc_RNA (1)...(19): siRNA sense strand
agcagaaacuccuccuaga

SEQ ID NO: 1240432 - RNA, 19 nt, Homo sapiens
  misc_RNA (1)...(19): siRNA sense strand
ccaugcucgugcucaagua

SEQ ID NO: 1240433 - RNA, 19 nt, Homo sapiens
  misc_RNA (1)...(19): siRNA sense strand
ccucacacauggccucuac

SEQ ID NO: 1240434 - RNA, 19 nt, Homo sapiens
  misc_RNA (1)...(19): siRNA sense strand
cagagauguuugagcacuu

SEQ ID NO: 1240435 - RNA, 19 nt, Homo sapiens
  misc_RNA (1)...(19): siRNA sense strand
gaguaugccaugauguaug

SEQ ID NO: 1240436 - RNA, 19 nt, Homo sapiens
  misc_RNA (1)...(19): siRNA sense strand
cucauugcuuucuucauuu

SEQ ID NO: 1240437 - RNA, 19 nt, Homo sapiens
  misc_RNA (1)...(19): siRNA sense strand
cugaauugguguuuaugau

SEQ ID NO: 1240438 - RNA, 19 nt, Homo sapiens
  misc_RNA (1)...(19): siRNA sense strand
cagaaacuccuccuagaac

SEQ ID NO: 1240439 - RNA, 19 nt, Homo sapiens
  misc_RNA (1)...(19): siRNA sense strand
ucacacauggccucuacuu

SEQ ID NO: 1240440 - RNA, 19 nt, Homo sapiens
  misc_RNA (1)...(19): siRNA sense strand
gccuagugguaaucauuug

SEQ ID NO: 1240441 - RNA, 19 nt, Homo sapiens
  misc_RNA (1)...(19): siRNA sense strand
gccuuucacuguuggacuu

SEQ ID NO: 1240442 - RNA, 19 nt, Homo sapiens
  misc_RNA (1)...(19): siRNA sense strand
ggcccuguucuaucucuua

SEQ ID NO: 1240443 - RNA, 19 nt, Homo sapiens
  misc_RNA (1)...(19): siRNA sense strand
aauccaggacuucaauaaa

SEQ ID NO: 1240444 - RNA, 19 nt, Homo sapiens
  misc_RNA (1)...(19): siRNA sense strand
cuggagcaguauuucauga

SEQ ID NO: 1240445 - RNA, 19 nt, Homo sapiens
  misc_RNA (1)...(19): siRNA sense strand
aggcagugcuuuccucagu

SEQ ID NO: 1240446 - RNA, 19 nt, Homo sapiens
  misc_RNA (1)...(19): siRNA sense strand
ggaguacuaccucacacau

SEQ ID NO: 1240447 - RNA, 19 nt, Homo sapiens
  misc_RNA (1)...(19): siRNA sense strand
ugcguuacaucccuuugaa

SEQ ID NO: 1240448 - RNA, 19 nt, Homo sapiens
  misc_RNA (1)...(19): siRNA sense strand
guauucuggagcaguauuu

SEQ ID NO: 1240449 - RNA, 19 nt, Homo sapiens
  misc_RNA (1)...(19): siRNA sense strand
auaccucuuucauuuccua

SEQ ID NO: 1240450 - RNA, 19 nt, Homo sapiens
  misc_RNA (1)...(19): siRNA sense strand
augcugaauugguguuuau

SEQ ID NO: 1240451 - RNA, 19 nt, Homo sapiens
  misc_RNA (1)...(19): siRNA sense strand
guacccacucaccuuguuu

SEQ ID NO: 1240452 - RNA, 19 nt, Homo sapiens
  misc_RNA (1)...(19): siRNA sense strand
gaugcacucacugcuauug

SEQ ID NO: 1240453 - RNA, 19 nt, Homo sapiens
  misc_RNA (1)...(19): siRNA sense strand
ucuacagauuccugagaaa

SEQ ID NO: 1240454 - RNA, 19 nt, Homo sapiens
  misc_RNA (1)...(19): siRNA sense strand
ggaagccuagugguaauca

SEQ ID NO: 1240455 - RNA, 19 nt, Homo sapiens
  misc_RNA (1)...(19): siRNA sense strand
auccaggacuucaauaaag

SEQ ID NO: 1240456 - RNA, 19 nt, Homo sapiens
  misc_RNA (1)...(19): siRNA sense strand
gaucuuuucuugggaguau

SEQ ID NO: 1240457 - RNA, 19 nt, Homo sapiens
  misc_RNA (1)...(19): siRNA sense strand
gugcuuuccucagugcuau

SEQ ID NO: 1240458 - RNA, 19 nt, Homo sapiens
  misc_RNA (1)...(19): siRNA sense strand
ucuauggcuuuauacuuuc

SEQ ID NO: 1240459 - RNA, 19 nt, Homo sapiens
  misc_RNA (1)...(19): siRNA sense strand
gcuauugcccuguauuuug

SEQ ID NO: 1240460 - RNA, 19 nt, Homo sapiens
  misc_RNA (1)...(19): siRNA sense strand
agaaacuccuccuagaacu

SEQ ID NO: 1240461 - RNA, 19 nt, Homo sapiens
  misc_RNA (1)...(19): siRNA sense strand
gaagccuagugguaaucau

SEQ ID NO: 1240462 - RNA, 19 nt, Homo sapiens
  misc_RNA (1)...(19): siRNA sense strand
ccuaauugacuaugcugaa

SEQ ID NO: 1240463 - RNA, 19 nt, Homo sapiens
  misc_RNA (1)...(19): siRNA sense strand
uccguauucuggagcagua

SEQ ID NO: 1240464 - RNA, 19 nt, Homo sapiens
  misc_RNA (1)...(19): siRNA sense strand
acagauuccugagaaacau

SEQ ID NO: 1240465 - RNA, 19 nt, Homo sapiens
  misc_RNA (1)...(19): siRNA sense strand
agagauguuugagcacuuc

SEQ ID NO: 1240466 - RNA, 19 nt, Homo sapiens
  misc_RNA (1)...(19): siRNA sense strand
acauuggucuuuucuggua

SEQ ID NO: 1240467 - RNA, 19 nt, Homo sapiens
  misc_RNA (1)...(19): siRNA sense strand
agcaaagccuucuggaucu

SEQ ID NO: 1240468 - RNA, 19 nt, Homo sapiens
  misc_RNA (1)...(19): siRNA sense strand
ugucaucgccaucuuuaag

SEQ ID NO: 1240469 - RNA, 19 nt, Homo sapiens
  misc_RNA (1)...(19): siRNA sense strand
ggcuuuauacuuucuguuc

SEQ ID NO: 1240470 - RNA, 19 nt, Homo sapiens
  misc_RNA (1)...(19): siRNA sense strand
ugugggaagccuaguggua

SEQ ID NO: 1240471 - RNA, 19 nt, Homo sapiens
  misc_RNA (1)...(19): siRNA sense strand
gaaagacaaucaacaguga

SEQ ID NO: 1240472 - RNA, 19 nt, Homo sapiens
  misc_RNA (1)...(19): siRNA sense strand
gcacacagauuccacauca

SEQ ID NO: 1240473 - RNA, 19 nt, Homo sapiens
  misc_RNA (1)...(19): siRNA sense strand
gcaagaagcuacaugaauc

SEQ ID NO: 1240474 - RNA, 19 nt, Homo sapiens
  misc_RNA (1)...(19): siRNA sense strand
gcacagaaaucauguugga

SEQ ID NO: 1240475 - RNA, 19 nt, Homo sapiens
  misc_RNA (1)...(19): siRNA sense strand
ccagagaaauucaacagua

SEQ ID NO: 1240476 - RNA, 19 nt, Homo sapiens
  misc_RNA (1)...(19): siRNA sense strand
uaaaugugcuucucaucua

SEQ ID NO: 1240477 - RNA, 19 nt, Homo sapiens
  misc_RNA (1)...(19): siRNA sense strand
gaaauugacuaugaucaug

SEQ ID NO: 1240478 - RNA, 19 nt, Homo sapiens
  misc_RNA (1)...(19): siRNA sense strand
gagaacgaauuuacagaaa

SEQ ID NO: 1240479 - RNA, 19 nt, Homo sapiens
  misc_RNA (1)...(19): siRNA sense strand
gcaacaaguuuccucauuc

SEQ ID NO: 1240480 - RNA, 19 nt, Homo sapiens
  misc_RNA (1)...(19): siRNA sense strand
gaagguaacugcccaacca

SEQ ID NO: 1240481 - RNA, 19 nt, Homo sapiens
  misc_RNA (1)...(19): siRNA sense strand
uggaagaaauugacuauga

SEQ ID NO: 1240482 - RNA, 19 nt, Homo sapiens
  misc_RNA (1)...(19): siRNA sense strand
uaacaaaccugccuauugc

SEQ ID NO: 1240483 - RNA, 19 nt, Homo sapiens
  misc_RNA (1)...(19): siRNA sense strand
ggaagaaauugacuaugau

SEQ ID NO: 1240484 - RNA, 19 nt, Homo sapiens
  misc_RNA (1)...(19): siRNA sense strand
ucacugaacuuaauccaau

SEQ ID NO: 1240485 - RNA, 19 nt, Homo sapiens
  misc_RNA (1)...(19): siRNA sense strand
ugacaaagaugagaaagga

SEQ ID NO: 1240486 - RNA, 19 nt, Homo sapiens
  misc_RNA (1)...(19): siRNA sense strand
gaggaagaccugaggauaa

SEQ ID NO: 1240487 - RNA, 19 nt, Homo sapiens
  misc_RNA (1)...(19): siRNA sense strand
caaacaaagugauugacaa

SEQ ID NO: 1240488 - RNA, 19 nt, Homo sapiens
  misc_RNA (1)...(19): siRNA sense strand
ccacaaaacuguuaaaugu

SEQ ID NO: 1240489 - RNA, 19 nt, Homo sapiens
  misc_RNA (1)...(19): siRNA sense strand
gaguuuauguuucgccuuu

SEQ ID NO: 1240490 - RNA, 19 nt, Homo sapiens
  misc_RNA (1)...(19): siRNA sense strand
ggaugucacugaacuuaau

SEQ ID NO: 1240491 - RNA, 19 nt, Homo sapiens
  misc_RNA (1)...(19): siRNA sense strand
ugacaggacugcauugugu

SEQ ID NO: 1240492 - RNA, 19 nt, Homo sapiens
  misc_RNA (1)...(19): siRNA sense strand
gcaccucccucuugcauca

SEQ ID NO: 1240493 - RNA, 19 nt, Homo sapiens
  misc_RNA (1)...(19): siRNA sense strand
guaauggugugcuugcaaa

SEQ ID NO: 1240494 - RNA, 19 nt, Homo sapiens
  misc_RNA (1)...(19): siRNA sense strand
gcaagucucugccaaugca

SEQ ID NO: 1240495 - RNA, 19 nt, Homo sapiens
  misc_RNA (1)...(19): siRNA sense strand
acaaagugauugacaagaa

SEQ ID NO: 1240496 - RNA, 19 nt, Homo sapiens
  misc_RNA (1)...(19): siRNA sense strand
aauagaaugugauggagua

SEQ ID NO: 1240497 - RNA, 19 nt, Homo sapiens
  misc_RNA (1)...(19): siRNA sense strand
gagcaagucucugccaaug

SEQ ID NO: 1240498 - RNA, 19 nt, Homo sapiens
  misc_RNA (1)...(19): siRNA sense strand
gaggauaagcuugaguuua

SEQ ID NO: 1240499 - RNA, 19 nt, Homo sapiens
  misc_RNA (1)...(19): siRNA sense strand
gaaaauaucaucagucaga

SEQ ID NO: 1240500 - RNA, 19 nt, Homo sapiens
  misc_RNA (1)...(19): siRNA sense strand
aaacaucucucuggaagga

SEQ ID NO: 1240501 - RNA, 19 nt, Homo sapiens
  misc_RNA (1)...(19): siRNA sense strand
caaagugauugacaagaau

SEQ ID NO: 1240502 - RNA, 19 nt, Homo sapiens
  misc_RNA (1)...(19): siRNA sense strand
gcaaguacacaguccauga

SEQ ID NO: 1240503 - RNA, 19 nt, Homo sapiens
  misc_RNA (1)...(19): siRNA sense strand
gaaaugauggaagaaauug

SEQ ID NO: 1240504 - RNA, 19 nt, Homo sapiens
  misc_RNA (1)...(19): siRNA sense strand
aaacaaggagaacgaauuu

SEQ ID NO: 1240505 - RNA, 19 nt, Homo sapiens
  misc_RNA (1)...(19): siRNA sense strand
ccucagcccuucggaauuu

SEQ ID NO: 1240506 - RNA, 19 nt, Homo sapiens
  misc_RNA (1)...(19): siRNA sense strand
ggagaacgaauuuacagaa

SEQ ID NO: 1240507 - RNA, 19 nt, Homo sapiens
  misc_RNA (1)...(19): siRNA sense strand
caacaaguuuccucauucu

SEQ ID NO: 1240508 - RNA, 19 nt, Homo sapiens
  misc_RNA (1)...(19): siRNA sense strand
guggaaguuugaagucaua

SEQ ID NO: 1240509 - RNA, 19 nt, Homo sapiens
  misc_RNA (1)...(19): siRNA sense strand
guauaauccugaagggaaa

SEQ ID NO: 1240510 - RNA, 19 nt, Homo sapiens
  misc_RNA (1)...(19): siRNA sense strand
gggaggagguuacgaaggu

SEQ ID NO: 1240511 - RNA, 19 nt, Homo sapiens
  misc_RNA (1)...(19): siRNA sense strand
cagaucacacugcauaaua

SEQ ID NO: 1240512 - RNA, 19 nt, Homo sapiens
  misc_RNA (1)...(19): siRNA sense strand
gaacuacuucuccugcaaa

SEQ ID NO: 1240513 - RNA, 19 nt, Homo sapiens
  misc_RNA (1)...(19): siRNA sense strand
agaucacacugcauaauaa

SEQ ID NO: 1240514 - RNA, 19 nt, Homo sapiens
  misc_RNA (1)...(19): siRNA sense strand
ggaaggaauugcuauuuug

SEQ ID NO: 1240515 - RNA, 19 nt, Homo sapiens
  misc_RNA (1)...(19): siRNA sense strand
ggaaggagccauggagaug

SEQ ID NO: 1240516 - RNA, 19 nt, Homo sapiens
  misc_RNA (1)...(19): siRNA sense strand
gaaugugacuguggaccuu

SEQ ID NO: 1240517 - RNA, 19 nt, Homo sapiens
  misc_RNA (1)...(19): siRNA sense strand
ucacagaugccaaagaguu

SEQ ID NO: 1240518 - RNA, 19 nt, Homo sapiens
  misc_RNA (1)...(19): siRNA sense strand
ucagucagaugaugcaugu

SEQ ID NO: 1240519 - RNA, 19 nt, Homo sapiens
  misc_RNA (1)...(19): siRNA sense strand
acgaagccaucgacgaaua

SEQ ID NO: 1240520 - RNA, 19 nt, Homo sapiens
  misc_RNA (1)...(19): siRNA sense strand
cagagaaauucaacaguag

SEQ ID NO: 1240521 - RNA, 19 nt, Homo sapiens
  misc_RNA (1)...(19): siRNA sense strand
ugacaacgauuccacuucu

SEQ ID NO: 1240522 - RNA, 19 nt, Homo sapiens
  misc_RNA (1)...(19): siRNA sense strand
uuaacaaaccugccuauug

SEQ ID NO: 1240523 - RNA, 19 nt, Homo sapiens
  misc_RNA (1)...(19): siRNA sense strand
aaaauaacgugaaggauga

SEQ ID NO: 1240524 - RNA, 19 nt, Homo sapiens
  misc_RNA (1)...(19): siRNA sense strand
aaacagcacagaaaucaug

SEQ ID NO: 1240525 - RNA, 19 nt, Homo sapiens
  misc_RNA (1)...(19): siRNA sense strand
gaucacacugcauaauaaa

SEQ ID NO: 1240526 - RNA, 19 nt, Homo sapiens
  misc_RNA (1)...(19): siRNA sense strand
gaagaauuccaugguaaug

SEQ ID NO: 1240527 - RNA, 19 nt, Homo sapiens
  misc_RNA (1)...(19): siRNA sense strand
aaaugugcuucucaucuaa

SEQ ID NO: 1240528 - RNA, 19 nt, Homo sapiens
  misc_RNA (1)...(19): siRNA sense strand
aaggaacacugaugucaug

SEQ ID NO: 1240529 - RNA, 19 nt, Homo sapiens
  misc_RNA (1)...(19): siRNA sense strand
ggucugagaaugaauaaag

SEQ ID NO: 1240530 - RNA, 19 nt, Homo sapiens
  misc_RNA (1)...(19): siRNA sense strand
gagaaauucaacaguagaa

SEQ ID NO: 1240531 - RNA, 19 nt, Homo sapiens
  misc_RNA (1)...(19): siRNA sense strand
gaaaacagcacagaaauca

SEQ ID NO: 1240532 - RNA, 19 nt, Homo sapiens
  misc_RNA (1)...(19): siRNA sense strand
ugucagaucacacugcaua

SEQ ID NO: 1240533 - RNA, 19 nt, Homo sapiens
  misc_RNA (1)...(19): siRNA sense strand
ugacuaugaucaugaugga

SEQ ID NO: 1240534 - RNA, 19 nt, Homo sapiens
  misc_RNA (1)...(19): siRNA sense strand
gauggaagaaauugacuau

SEQ ID NO: 1240535 - RNA, 19 nt, Homo sapiens
  misc_RNA (1)...(19): siRNA sense strand
uugaagaauuccaugguaa

SEQ ID NO: 1240536 - RNA, 19 nt, Homo sapiens
  misc_RNA (1)...(19): siRNA sense strand
gaagaaauugacuaugauc

SEQ ID NO: 1240537 - RNA, 19 nt, Homo sapiens
  misc_RNA (1)...(19): siRNA sense strand
agaaauagaaugugaugga

SEQ ID NO: 1240538 - RNA, 19 nt, Homo sapiens
  misc_RNA (1)...(19): siRNA sense strand
gaguuuggcacaucugaaa

SEQ ID NO: 1240539 - RNA, 19 nt, Homo sapiens
  misc_RNA (1)...(19): siRNA sense strand
caaaagugguggaaaacaa

SEQ ID NO: 1240540 - RNA, 19 nt, Homo sapiens
  misc_RNA (1)...(19): siRNA sense strand
gcugaguauucuacaaaga

SEQ ID NO: 1240541 - RNA, 19 nt, Homo sapiens
  misc_RNA (1)...(19): siRNA sense strand
aacaaucuguccaguggua

SEQ ID NO: 1240542 - RNA, 19 nt, Homo sapiens
  misc_RNA (1)...(19): siRNA sense strand
caaguuuccucauucuagu

SEQ ID NO: 1240543 - RNA, 19 nt, Homo sapiens
  misc_RNA (1)...(19): siRNA sense strand
acaguagaaugaagaacaa

SEQ ID NO: 1240544 - RNA, 19 nt, Homo sapiens
  misc_RNA (1)...(19): siRNA sense strand
gugagaaucugaugaaaau

SEQ ID NO: 1240545 - RNA, 19 nt, Homo sapiens
  misc_RNA (1)...(19): siRNA sense strand
gaaggugagaaucugauga

SEQ ID NO: 1240546 - RNA, 19 nt, Homo sapiens
  misc_RNA (1)...(19): siRNA sense strand
cuugaagaauuccauggua

SEQ ID NO: 1240547 - RNA, 19 nt, Homo sapiens
  misc_RNA (1)...(19): siRNA sense strand
gaccugaggauaagcuuga

SEQ ID NO: 1240548 - RNA, 19 nt, Homo sapiens
  misc_RNA (1)...(19): siRNA sense strand
gaaguuugcaagucaagau

SEQ ID NO: 1240549 - RNA, 19 nt, Homo sapiens
  misc_RNA (1)...(19): siRNA sense strand
ggaguacagauagauuuaa

SEQ ID NO: 1240550 - RNA, 19 nt, Homo sapiens
  misc_RNA (1)...(19): siRNA sense strand
cgucagguuuacagucuuu

SEQ ID NO: 1240551 - RNA, 19 nt, Homo sapiens
  misc_RNA (1)...(19): siRNA sense strand
ccaacucuguuacuguaga

SEQ ID NO: 1240552 - RNA, 19 nt, Homo sapiens
  misc_RNA (1)...(19): siRNA sense strand
cagcacguguggcgacuga

SEQ ID NO: 1240553 - RNA, 19 nt, Homo sapiens
  misc_RNA (1)...(19): siRNA sense strand
uaagccugcucuccuauca

SEQ ID NO: 1240554 - RNA, 19 nt, Homo sapiens
  misc_RNA (1)...(19): siRNA sense strand
cgucacagaugccaaagag

SEQ ID NO: 1240555 - RNA, 19 nt, Homo sapiens
  misc_RNA (1)...(19): siRNA sense strand
agacgaagccaucgacgaa

SEQ ID NO: 1240556 - RNA, 19 nt, Homo sapiens
  misc_RNA (1)...(19): siRNA sense strand
guagaaauagaaugugaug

SEQ ID NO: 1240557 - RNA, 19 nt, Homo sapiens
  misc_RNA (1)...(19): siRNA sense strand
ggaccaaugccaggguuaa

SEQ ID NO: 1240558 - RNA, 19 nt, Homo sapiens
  misc_RNA (1)...(19): siRNA sense strand
ucacacugcauaauaaaug

SEQ ID NO: 1240559 - RNA, 19 nt, Homo sapiens
  misc_RNA (1)...(19): siRNA sense strand
cugaugucaugcaccauua

SEQ ID NO: 1240560 - RNA, 19 nt, Homo sapiens
  misc_RNA (1)...(19): siRNA sense strand
uuaauccaauccuccauga

SEQ ID NO: 1240561 - RNA, 19 nt, Homo sapiens
  misc_RNA (1)...(19): siRNA sense strand
cgaacuacuucuccugcaa

SEQ ID NO: 1240562 - RNA, 19 nt, Homo sapiens
  misc_RNA (1)...(19): siRNA sense strand
gaauauaccaagcaugcau

SEQ ID NO: 1240563 - RNA, 19 nt, Homo sapiens
  misc_RNA (1)...(19): siRNA sense strand
agccaacucuguuacugua

SEQ ID NO: 1240564 - RNA, 19 nt, Homo sapiens
  misc_RNA (1)...(19): siRNA sense strand
gaagggaaacaagacauuc

SEQ ID NO: 1240565 - RNA, 19 nt, Homo sapiens
  misc_RNA (1)...(19): siRNA sense strand
gacugaagcacuuuaacaa

SEQ ID NO: 1240566 - RNA, 19 nt, Homo sapiens
  misc_RNA (1)...(19): siRNA sense strand
gcaucaagaccuaugugaa

SEQ ID NO: 1240567 - RNA, 19 nt, Homo sapiens
  misc_RNA (1)...(19): siRNA sense strand
uggcaaugaucuagcaaga

SEQ ID NO: 1240568 - RNA, 19 nt, Homo sapiens
  misc_RNA (1)...(19): siRNA sense strand
caaccaagugugauaagug

SEQ ID NO: 1240569 - RNA, 19 nt, Homo sapiens
  misc_RNA (1)...(19): siRNA sense strand
agaccuaugugaaguccaa

SEQ ID NO: 1240570 - RNA, 19 nt, Homo sapiens
  misc_RNA (1)...(19): siRNA sense strand
caagucaagaucucaguga

SEQ ID NO: 1240571 - RNA, 19 nt, Homo sapiens
  misc_RNA (1)...(19): siRNA sense strand
gaaagacaaucaacaguga

SEQ ID NO: 1240572 - RNA, 19 nt, Homo sapiens
  misc_RNA (1)...(19): siRNA sense strand
gcacacagauuccacauca

SEQ ID NO: 1240573 - RNA, 19 nt, Homo sapiens
  misc_RNA (1)...(19): siRNA sense strand
gcaagaagcuacaugaauc

SEQ ID NO: 1240574 - RNA, 19 nt, Homo sapiens
  misc_RNA (1)...(19): siRNA sense strand
gcacagaaaucauguugga

SEQ ID NO: 1240575 - RNA, 19 nt, Homo sapiens
  misc_RNA (1)...(19): siRNA sense strand
ccagagaaauucaacagua

SEQ ID NO: 1240576 - RNA, 19 nt, Homo sapiens
  misc_RNA (1)...(19): siRNA sense strand
uaaaugugcuucucaucua

SEQ ID NO: 1240577 - RNA, 19 nt, Homo sapiens
  misc_RNA (1)...(19): siRNA sense strand
gaaauugacuaugaucaug

SEQ ID NO: 1240578 - RNA, 19 nt, Homo sapiens
  misc_RNA (1)...(19): siRNA sense strand
gagaacgaauuuacagaaa

SEQ ID NO: 1240579 - RNA, 19 nt, Homo sapiens
  misc_RNA (1)...(19): siRNA sense strand
gcaacaaguuuccucauuc

SEQ ID NO: 1240580 - RNA, 19 nt, Homo sapiens
  misc_RNA (1)...(19): siRNA sense strand
gaagguaacugcccaacca

SEQ ID NO: 1240581 - RNA, 19 nt, Homo sapiens
  misc_RNA (1)...(19): siRNA sense strand
uggaagaaauugacuauga

SEQ ID NO: 1240582 - RNA, 19 nt, Homo sapiens
  misc_RNA (1)...(19): siRNA sense strand
uaacaaaccugccuauugc

SEQ ID NO: 1240583 - RNA, 19 nt, Homo sapiens
  misc_RNA (1)...(19): siRNA sense strand
ggaagaaauugacuaugau

SEQ ID NO: 1240584 - RNA, 19 nt, Homo sapiens
  misc_RNA (1)...(19): siRNA sense strand
ucacugaacuuaauccaau

SEQ ID NO: 1240585 - RNA, 19 nt, Homo sapiens
  misc_RNA (1)...(19): siRNA sense strand
ugacaaagaugagaaagga

SEQ ID NO: 1240586 - RNA, 19 nt, Homo sapiens
  misc_RNA (1)...(19): siRNA sense strand
gaggaagaccugaggauaa

SEQ ID NO: 1240587 - RNA, 19 nt, Homo sapiens
  misc_RNA (1)...(19): siRNA sense strand
caaacaaagugauugacaa

SEQ ID NO: 1240588 - RNA, 19 nt, Homo sapiens
  misc_RNA (1)...(19): siRNA sense strand
ccacaaaacuguuaaaugu

SEQ ID NO: 1240589 - RNA, 19 nt, Homo sapiens
  misc_RNA (1)...(19): siRNA sense strand
gaguuuauguuucgccuuu

SEQ ID NO: 1240590 - RNA, 19 nt, Homo sapiens
  misc_RNA (1)...(19): siRNA sense strand
ggaugucacugaacuuaau

SEQ ID NO: 1240591 - RNA, 19 nt, Homo sapiens
  misc_RNA (1)...(19): siRNA sense strand
ugacaggacugcauugugu

SEQ ID NO: 1240592 - RNA, 19 nt, Homo sapiens
  misc_RNA (1)...(19): siRNA sense strand
gcaccucccucuugcauca

SEQ ID NO: 1240593 - RNA, 19 nt, Homo sapiens
  misc_RNA (1)...(19): siRNA sense strand
guaauggugugcuugcaaa

SEQ ID NO: 1240594 - RNA, 19 nt, Homo sapiens
  misc_RNA (1)...(19): siRNA sense strand
gcaagucucugccaaugca

SEQ ID NO: 1240595 - RNA, 19 nt, Homo sapiens
  misc_RNA (1)...(19): siRNA sense strand
acaaagugauugacaagaa

SEQ ID NO: 1240596 - RNA, 19 nt, Homo sapiens
  misc_RNA (1)...(19): siRNA sense strand
aauagaaugugauggagua

SEQ ID NO: 1240597 - RNA, 19 nt, Homo sapiens
  misc_RNA (1)...(19): siRNA sense strand
gagcaagucucugccaaug

SEQ ID NO: 1240598 - RNA, 19 nt, Homo sapiens
  misc_RNA (1)...(19): siRNA sense strand
gaggauaagcuugaguuua

SEQ ID NO: 1240599 - RNA, 19 nt, Homo sapiens
  misc_RNA (1)...(19): siRNA sense strand
gaaaauaucaucagucaga

SEQ ID NO: 1240600 - RNA, 19 nt, Homo sapiens
  misc_RNA (1)...(19): siRNA sense strand
aaacaucucucuggaagga

SEQ ID NO: 1240601 - RNA, 19 nt, Homo sapiens
  misc_RNA (1)...(19): siRNA sense strand
caaagugauugacaagaau

SEQ ID NO: 1240602 - RNA, 19 nt, Homo sapiens
  misc_RNA (1)...(19): siRNA sense strand
gcaaguacacaguccauga

SEQ ID NO: 1240603 - RNA, 19 nt, Homo sapiens
  misc_RNA (1)...(19): siRNA sense strand
gaaaugauggaagaaauug

SEQ ID NO: 1240604 - RNA, 19 nt, Homo sapiens
  misc_RNA (1)...(19): siRNA sense strand
aaacaaggagaacgaauuu

SEQ ID NO: 1240605 - RNA, 19 nt, Homo sapiens
  misc_RNA (1)...(19): siRNA sense strand
ccucagcccuucggaauuu

SEQ ID NO: 1240606 - RNA, 19 nt, Homo sapiens
  misc_RNA (1)...(19): siRNA sense strand
ggagaacgaauuuacagaa

SEQ ID NO: 1240607 - RNA, 19 nt, Homo sapiens
  misc_RNA (1)...(19): siRNA sense strand
caacaaguuuccucauucu

SEQ ID NO: 1240608 - RNA, 19 nt, Homo sapiens
  misc_RNA (1)...(19): siRNA sense strand
guggaaguuugaagucaua

SEQ ID NO: 1240609 - RNA, 19 nt, Homo sapiens
  misc_RNA (1)...(19): siRNA sense strand
guauaauccugaagggaaa

SEQ ID NO: 1240610 - RNA, 19 nt, Homo sapiens
  misc_RNA (1)...(19): siRNA sense strand
gggaggagguuacgaaggu

SEQ ID NO: 1240611 - RNA, 19 nt, Homo sapiens
  misc_RNA (1)...(19): siRNA sense strand
cagaucacacugcauaaua

SEQ ID NO: 1240612 - RNA, 19 nt, Homo sapiens
  misc_RNA (1)...(19): siRNA sense strand
gaacuacuucuccugcaaa

SEQ ID NO: 1240613 - RNA, 19 nt, Homo sapiens
  misc_RNA (1)...(19): siRNA sense strand
agaucacacugcauaauaa

SEQ ID NO: 1240614 - RNA, 19 nt, Homo sapiens
  misc_RNA (1)...(19): siRNA sense strand
ggaaggaauugcuauuuug

SEQ ID NO: 1240615 - RNA, 19 nt, Homo sapiens
  misc_RNA (1)...(19): siRNA sense strand
ggaaggagccauggagaug

SEQ ID NO: 1240616 - RNA, 19 nt, Homo sapiens
  misc_RNA (1)...(19): siRNA sense strand
gaaugugacuguggaccuu

SEQ ID NO: 1240617 - RNA, 19 nt, Homo sapiens
  misc_RNA (1)...(19): siRNA sense strand
ucacagaugccaaagaguu

SEQ ID NO: 1240618 - RNA, 19 nt, Homo sapiens
  misc_RNA (1)...(19): siRNA sense strand
ucagucagaugaugcaugu

SEQ ID NO: 1240619 - RNA, 19 nt, Homo sapiens
  misc_RNA (1)...(19): siRNA sense strand
acgaagccaucgacgaaua

SEQ ID NO: 1240620 - RNA, 19 nt, Homo sapiens
  misc_RNA (1)...(19): siRNA sense strand
cagagaaauucaacaguag

SEQ ID NO: 1240621 - RNA, 19 nt, Homo sapiens
  misc_RNA (1)...(19): siRNA sense strand
ugacaacgauuccacuucu

SEQ ID NO: 1240622 - RNA, 19 nt, Homo sapiens
  misc_RNA (1)...(19): siRNA sense strand
uuaacaaaccugccuauug

SEQ ID NO: 1240623 - RNA, 19 nt, Homo sapiens
  misc_RNA (1)...(19): siRNA sense strand
aaaauaacgugaaggauga

SEQ ID NO: 1240624 - RNA, 19 nt, Homo sapiens
  misc_RNA (1)...(19): siRNA sense strand
aaacagcacagaaaucaug

SEQ ID NO: 1240625 - RNA, 19 nt, Homo sapiens
  misc_RNA (1)...(19): siRNA sense strand
gaucacacugcauaauaaa

SEQ ID NO: 1240626 - RNA, 19 nt, Homo sapiens
  misc_RNA (1)...(19): siRNA sense strand
gaagaauuccaugguaaug

SEQ ID NO: 1240627 - RNA, 19 nt, Homo sapiens
  misc_RNA (1)...(19): siRNA sense strand
aaaugugcuucucaucuaa

SEQ ID NO: 1240628 - RNA, 19 nt, Homo sapiens
  misc_RNA (1)...(19): siRNA sense strand
aaggaacacugaugucaug

SEQ ID NO: 1240629 - RNA, 19 nt, Homo sapiens
  misc_RNA (1)...(19): siRNA sense strand
ggucugagaaugaauaaag

SEQ ID NO: 1240630 - RNA, 19 nt, Homo sapiens
  misc_RNA (1)...(19): siRNA sense strand
gagaaauucaacaguagaa

SEQ ID NO: 1240631 - RNA, 19 nt, Homo sapiens
  misc_RNA (1)...(19): siRNA sense strand
gaaaacagcacagaaauca

SEQ ID NO: 1240632 - RNA, 19 nt, Homo sapiens
  misc_RNA (1)...(19): siRNA sense strand
ugucagaucacacugcaua

SEQ ID NO: 1240633 - RNA, 19 nt, Homo sapiens
  misc_RNA (1)...(19): siRNA sense strand
ugacuaugaucaugaugga

SEQ ID NO: 1240634 - RNA, 19 nt, Homo sapiens
  misc_RNA (1)...(19): siRNA sense strand
gauggaagaaauugacuau

SEQ ID NO: 1240635 - RNA, 19 nt, Homo sapiens
  misc_RNA (1)...(19): siRNA sense strand
uugaagaauuccaugguaa

SEQ ID NO: 1240636 - RNA, 19 nt, Homo sapiens
  misc_RNA (1)...(19): siRNA sense strand
gaagaaauugacuaugauc

SEQ ID NO: 1240637 - RNA, 19 nt, Homo sapiens
  misc_RNA (1)...(19): siRNA sense strand
agaaauagaaugugaugga

SEQ ID NO: 1240638 - RNA, 19 nt, Homo sapiens
  misc_RNA (1)...(19): siRNA sense strand
gaguuuggcacaucugaaa

SEQ ID NO: 1240639 - RNA, 19 nt, Homo sapiens
  misc_RNA (1)...(19): siRNA sense strand
caaaagugguggaaaacaa

SEQ ID NO: 1240640 - RNA, 19 nt, Homo sapiens
  misc_RNA (1)...(19): siRNA sense strand
gcugaguauucuacaaaga

SEQ ID NO: 1240641 - RNA, 19 nt, Homo sapiens
  misc_RNA (1)...(19): siRNA sense strand
aacaaucuguccaguggua

SEQ ID NO: 1240642 - RNA, 19 nt, Homo sapiens
  misc_RNA (1)...(19): siRNA sense strand
caaguuuccucauucuagu

SEQ ID NO: 1240643 - RNA, 19 nt, Homo sapiens
  misc_RNA (1)...(19): siRNA sense strand
acaguagaaugaagaacaa

SEQ ID NO: 1240644 - RNA, 19 nt, Homo sapiens
  misc_RNA (1)...(19): siRNA sense strand
gugagaaucugaugaaaau

SEQ ID NO: 1240645 - RNA, 19 nt, Homo sapiens
  misc_RNA (1)...(19): siRNA sense strand
gaaggugagaaucugauga

SEQ ID NO: 1240646 - RNA, 19 nt, Homo sapiens
  misc_RNA (1)...(19): siRNA sense strand
cuugaagaauuccauggua

SEQ ID NO: 1240647 - RNA, 19 nt, Homo sapiens
  misc_RNA (1)...(19): siRNA sense strand
gaccugaggauaagcuuga

SEQ ID NO: 1240648 - RNA, 19 nt, Homo sapiens
  misc_RNA (1)...(19): siRNA sense strand
gaaguuugcaagucaagau

SEQ ID NO: 1240649 - RNA, 19 nt, Homo sapiens
  misc_RNA (1)...(19): siRNA sense strand
ggaguacagauagauuuaa

SEQ ID NO: 1240650 - RNA, 19 nt, Homo sapiens
  misc_RNA (1)...(19): siRNA sense strand
cgucagguuuacagucuuu

SEQ ID NO: 1240651 - RNA, 19 nt, Homo sapiens
  misc_RNA (1)...(19): siRNA sense strand
ccaacucuguuacuguaga

SEQ ID NO: 1240652 - RNA, 19 nt, Homo sapiens
  misc_RNA (1)...(19): siRNA sense strand
cagcacguguggcgacuga

SEQ ID NO: 1240653 - RNA, 19 nt, Homo sapiens
  misc_RNA (1)...(19): siRNA sense strand
uaagccugcucuccuauca

SEQ ID NO: 1240654 - RNA, 19 nt, Homo sapiens
  misc_RNA (1)...(19): siRNA sense strand
cgucacagaugccaaagag

SEQ ID NO: 1240655 - RNA, 19 nt, Homo sapiens
  misc_RNA (1)...(19): siRNA sense strand
agacgaagccaucgacgaa

SEQ ID NO: 1240656 - RNA, 19 nt, Homo sapiens
  misc_RNA (1)...(19): siRNA sense strand
guagaaauagaaugugaug

SEQ ID NO: 1240657 - RNA, 19 nt, Homo sapiens
  misc_RNA (1)...(19): siRNA sense strand
ggaccaaugccaggguuaa

SEQ ID NO: 1240658 - RNA, 19 nt, Homo sapiens
  misc_RNA (1)...(19): siRNA sense strand
ucacacugcauaauaaaug

SEQ ID NO: 1240659 - RNA, 19 nt, Homo sapiens
  misc_RNA (1)...(19): siRNA sense strand
cugaugucaugcaccauua

SEQ ID NO: 1240660 - RNA, 19 nt, Homo sapiens
  misc_RNA (1)...(19): siRNA sense strand
uuaauccaauccuccauga

SEQ ID NO: 1240661 - RNA, 19 nt, Homo sapiens
  misc_RNA (1)...(19): siRNA sense strand
cgaacuacuucuccugcaa

SEQ ID NO: 1240662 - RNA, 19 nt, Homo sapiens
  misc_RNA (1)...(19): siRNA sense strand
gaauauaccaagcaugcau

SEQ ID NO: 1240663 - RNA, 19 nt, Homo sapiens
  misc_RNA (1)...(19): siRNA sense strand
agccaacucuguuacugua

SEQ ID NO: 1240664 - RNA, 19 nt, Homo sapiens
  misc_RNA (1)...(19): siRNA sense strand
gaagggaaacaagacauuc

SEQ ID NO: 1240665 - RNA, 19 nt, Homo sapiens
  misc_RNA (1)...(19): siRNA sense strand
gacugaagcacuuuaacaa

SEQ ID NO: 1240666 - RNA, 19 nt, Homo sapiens
  misc_RNA (1)...(19): siRNA sense strand
gcaucaagaccuaugugaa

SEQ ID NO: 1240667 - RNA, 19 nt, Homo sapiens
  misc_RNA (1)...(19): siRNA sense strand
uggcaaugaucuagcaaga

SEQ ID NO: 1240668 - RNA, 19 nt, Homo sapiens
  misc_RNA (1)...(19): siRNA sense strand
caaccaagugugauaagug

SEQ ID NO: 1240669 - RNA, 19 nt, Homo sapiens
  misc_RNA (1)...(19): siRNA sense strand
agaccuaugugaaguccaa

SEQ ID NO: 1240670 - RNA, 19 nt, Homo sapiens
  misc_RNA (1)...(19): siRNA sense strand
caagucaagaucucaguga

SEQ ID NO: 1240671 - RNA, 19 nt, Homo sapiens
  misc_RNA (1)...(19): siRNA sense strand
ggaagaggcucacggaauu

SEQ ID NO: 1240672 - RNA, 19 nt, Homo sapiens
  misc_RNA (1)...(19): siRNA sense strand
ugaaggaggucaucagugu

SEQ ID NO: 1240673 - RNA, 19 nt, Homo sapiens
  misc_RNA (1)...(19): siRNA sense strand
ggucaucaguguggucaaa

SEQ ID NO: 1240674 - RNA, 19 nt, Homo sapiens
  misc_RNA (1)...(19): siRNA sense strand
gaagaggcucacggaauuu

SEQ ID NO: 1240675 - RNA, 19 nt, Homo sapiens
  misc_RNA (1)...(19): siRNA sense strand
ggaugaagcgggacuggau

SEQ ID NO: 1240676 - RNA, 19 nt, Homo sapiens
  misc_RNA (1)...(19): siRNA sense strand
gcccugaggcuccuacaga

SEQ ID NO: 1240677 - RNA, 19 nt, Homo sapiens
  misc_RNA (1)...(19): siRNA sense strand
uugcgcaccugcuggaauu

SEQ ID NO: 1240678 - RNA, 19 nt, Homo sapiens
  misc_RNA (1)...(19): siRNA sense strand
gacccgugccuguauauuc

SEQ ID NO: 1240679 - RNA, 19 nt, Homo sapiens
  misc_RNA (1)...(19): siRNA sense strand
cggaagaggcucacggaau

SEQ ID NO: 1240680 - RNA, 19 nt, Homo sapiens
  misc_RNA (1)...(19): siRNA sense strand
cagccagaaugcaugacuu

SEQ ID NO: 1240681 - RNA, 19 nt, Homo sapiens
  misc_RNA (1)...(19): siRNA sense strand
ucaggaggacugugaagga

SEQ ID NO: 1240682 - RNA, 19 nt, Homo sapiens
  misc_RNA (1)...(19): siRNA sense strand
gaggcucacggaauuugaa

SEQ ID NO: 1240683 - RNA, 19 nt, Homo sapiens
  misc_RNA (1)...(19): siRNA sense strand
guugaccauugaugaguuc

SEQ ID NO: 1240684 - RNA, 19 nt, Homo sapiens
  misc_RNA (1)...(19): siRNA sense strand
ucaucaguguggucaaagu

SEQ ID NO: 1240685 - RNA, 19 nt, Homo sapiens
  misc_RNA (1)...(19): siRNA sense strand
ggaagaggcucacggaauu

SEQ ID NO: 1240686 - RNA, 19 nt, Homo sapiens
  misc_RNA (1)...(19): siRNA sense strand
ugaaggaggucaucagugu

SEQ ID NO: 1240687 - RNA, 19 nt, Homo sapiens
  misc_RNA (1)...(19): siRNA sense strand
ggucaucaguguggucaaa

SEQ ID NO: 1240688 - RNA, 19 nt, Homo sapiens
  misc_RNA (1)...(19): siRNA sense strand
gaagaggcucacggaauuu

SEQ ID NO: 1240689 - RNA, 19 nt, Homo sapiens
  misc_RNA (1)...(19): siRNA sense strand
ggaugaagcgggacuggau

SEQ ID NO: 1240690 - RNA, 19 nt, Homo sapiens
  misc_RNA (1)...(19): siRNA sense strand
gcccugaggcuccuacaga

SEQ ID NO: 1240691 - RNA, 19 nt, Homo sapiens
  misc_RNA (1)...(19): siRNA sense strand
cggaagaggcucacggaau

SEQ ID NO: 1240692 - RNA, 19 nt, Homo sapiens
  misc_RNA (1)...(19): siRNA sense strand
cagccagaaugcaugacuu

SEQ ID NO: 1240693 - RNA, 19 nt, Homo sapiens
  misc_RNA (1)...(19): siRNA sense strand
ucaggaggacugugaagga

SEQ ID NO: 1240694 - RNA, 19 nt, Homo sapiens
  misc_RNA (1)...(19): siRNA sense strand
gaggcucacggaauuugaa

SEQ ID NO: 1240695 - RNA, 19 nt, Homo sapiens
  misc_RNA (1)...(19): siRNA sense strand
guugaccauugaugaguuc

SEQ ID NO: 1240696 - RNA, 19 nt, Homo sapiens
  misc_RNA (1)...(19): siRNA sense strand
ucaucaguguggucaaagu

SEQ ID NO: 1240697 - RNA, 19 nt, Homo sapiens
  misc_RNA (1)...(19): siRNA sense strand
ggaagaggcucacggaauu

SEQ ID NO: 1240698 - RNA, 19 nt, Homo sapiens
  misc_RNA (1)...(19): siRNA sense strand
ugaaggaggucaucagugu

SEQ ID NO: 1240699 - RNA, 19 nt, Homo sapiens
  misc_RNA (1)...(19): siRNA sense strand
ggucaucaguguggucaaa

SEQ ID NO: 1240700 - RNA, 19 nt, Homo sapiens
  misc_RNA (1)...(19): siRNA sense strand
gaagaggcucacggaauuu

SEQ ID NO: 1240701 - RNA, 19 nt, Homo sapiens
  misc_RNA (1)...(19): siRNA sense strand
ggaugaagcgggacuggau

SEQ ID NO: 1240702 - RNA, 19 nt, Homo sapiens
  misc_RNA (1)...(19): siRNA sense strand
gcuucacccuguguccuua

SEQ ID NO: 1240703 - RNA, 19 nt, Homo sapiens
  misc_RNA (1)...(19): siRNA sense strand
gcccugaggcuccuacaga

SEQ ID NO: 1240704 - RNA, 19 nt, Homo sapiens
  misc_RNA (1)...(19): siRNA sense strand
cggaagaggcucacggaau

SEQ ID NO: 1240705 - RNA, 19 nt, Homo sapiens
  misc_RNA (1)...(19): siRNA sense strand
cagccagaaugcaugacuu

SEQ ID NO: 1240706 - RNA, 19 nt, Homo sapiens
  misc_RNA (1)...(19): siRNA sense strand
ucaggaggacugugaagga

SEQ ID NO: 1240707 - RNA, 19 nt, Homo sapiens
  misc_RNA (1)...(19): siRNA sense strand
gaggcucacggaauuugaa

SEQ ID NO: 1240708 - RNA, 19 nt, Homo sapiens
  misc_RNA (1)...(19): siRNA sense strand
guugaccauugaugaguuc

SEQ ID NO: 1240709 - RNA, 19 nt, Homo sapiens
  misc_RNA (1)...(19): siRNA sense strand
ucaucaguguggucaaagu

SEQ ID NO: 1240710 - RNA, 19 nt, Homo sapiens
  misc_RNA (1)...(19): siRNA sense strand
ccaaggagcugcuauguuc

SEQ ID NO: 1240711 - RNA, 19 nt, Homo sapiens
  misc_RNA (1)...(19): siRNA sense strand
gagcugcuauguucuauga

SEQ ID NO: 1240712 - RNA, 19 nt, Homo sapiens
  misc_RNA (1)...(19): siRNA sense strand
gaagagcucccagaagaua

SEQ ID NO: 1240713 - RNA, 19 nt, Homo sapiens
  misc_RNA (1)...(19): siRNA sense strand
uggaagagcucccagaaga

SEQ ID NO: 1240714 - RNA, 19 nt, Homo sapiens
  misc_RNA (1)...(19): siRNA sense strand
caacagacaagauggaaga

SEQ ID NO: 1240715 - RNA, 19 nt, Homo sapiens
  misc_RNA (1)...(19): siRNA sense strand
cccaggaugugaccuauuu

SEQ ID NO: 1240716 - RNA, 19 nt, Homo sapiens
  misc_RNA (1)...(19): siRNA sense strand
cacuggaucugaaguauga

SEQ ID NO: 1240717 - RNA, 19 nt, Homo sapiens
  misc_RNA (1)...(19): siRNA sense strand
ccagaaccaucuacacguu

SEQ ID NO: 1240718 - RNA, 19 nt, Homo sapiens
  misc_RNA (1)...(19): siRNA sense strand
gcgagggaaucagaaauug

SEQ ID NO: 1240719 - RNA, 19 nt, Homo sapiens
  misc_RNA (1)...(19): siRNA sense strand
gaaccaaggagcugcuaug

SEQ ID NO: 1240720 - RNA, 19 nt, Homo sapiens
  misc_RNA (1)...(19): siRNA sense strand
gcugcuauguucuaugaug

SEQ ID NO: 1240721 - RNA, 19 nt, Homo sapiens
  misc_RNA (1)...(19): siRNA sense strand
ucuaugaugugccugaaga

SEQ ID NO: 1240722 - RNA, 19 nt, Homo sapiens
  misc_RNA (1)...(19): siRNA sense strand
ugaugugccugaagaaaca

SEQ ID NO: 1240723 - RNA, 19 nt, Homo sapiens
  misc_RNA (1)...(19): siRNA sense strand
ugacgcugcucucccagaa

SEQ ID NO: 1240724 - RNA, 19 nt, Homo sapiens
  misc_RNA (1)...(19): siRNA sense strand
ccgaauaccuggauuaccu

SEQ ID NO: 1240725 - RNA, 19 nt, Homo sapiens
  misc_RNA (1)...(19): siRNA sense strand
caccugaauucuccaagga

SEQ ID NO: 1240726 - RNA, 19 nt, Homo sapiens
  misc_RNA (1)...(19): siRNA sense strand
acauugaaccaccuucuuu

SEQ ID NO: 1240727 - RNA, 19 nt, Homo sapiens
  misc_RNA (1)...(19): siRNA sense strand
ggcgagggaaucagaaauu

SEQ ID NO: 1240728 - RNA, 19 nt, Homo sapiens
  misc_RNA (1)...(19): siRNA sense strand
gaagaggaggcgagggaau

SEQ ID NO: 1240729 - RNA, 19 nt, Homo sapiens
  misc_RNA (1)...(19): siRNA sense strand
ggaagagcucccagaagau

SEQ ID NO: 1240730 - RNA, 19 nt, Homo sapiens
  misc_RNA (1)...(19): siRNA sense strand
gaauaccuggauuaccuuu

SEQ ID NO: 1240731 - RNA, 19 nt, Homo sapiens
  misc_RNA (1)...(19): siRNA sense strand
aaacaagacccuauuucca

SEQ ID NO: 1240732 - RNA, 19 nt, Homo sapiens
  misc_RNA (1)...(19): siRNA sense strand
ugaaguaugagguggcauu

SEQ ID NO: 1240733 - RNA, 19 nt, Homo sapiens
  misc_RNA (1)...(19): siRNA sense strand
cguucagugucccgaaaua

SEQ ID NO: 1240734 - RNA, 19 nt, Homo sapiens
  misc_RNA (1)...(19): siRNA sense strand
aagcagcccugaggaggaa

SEQ ID NO: 1240735 - RNA, 19 nt, Homo sapiens
  misc_RNA (1)...(19): siRNA sense strand
ggaugaggaggacacagaa

SEQ ID NO: 1240736 - RNA, 19 nt, Homo sapiens
  misc_RNA (1)...(19): siRNA sense strand
ggacgaagaggaggaggau

SEQ ID NO: 1240737 - RNA, 19 nt, Homo sapiens
  misc_RNA (1)...(19): siRNA sense strand
ggaccuguacaacaaguuc

SEQ ID NO: 1240738 - RNA, 19 nt, Homo sapiens
  misc_RNA (1)...(19): siRNA sense strand
gagggaaucagaaauugag

SEQ ID NO: 1240739 - RNA, 19 nt, Homo sapiens
  misc_RNA (1)...(19): siRNA sense strand
gggaugggcaccaagaauc

SEQ ID NO: 1240740 - RNA, 19 nt, Homo sapiens
  misc_RNA (1)...(19): siRNA sense strand
cggaaacaagacccuauuu

SEQ ID NO: 1240741 - RNA, 19 nt, Homo sapiens
  misc_RNA (1)...(19): siRNA sense strand
aguaugagguggcauucug

SEQ ID NO: 1240742 - RNA, 19 nt, Homo sapiens
  misc_RNA (1)...(19): siRNA sense strand
cgagggaaucagaaauuga

SEQ ID NO: 1240743 - RNA, 19 nt, Homo sapiens
  misc_RNA (1)...(19): siRNA sense strand
gcuuccagcccuacauuga

SEQ ID NO: 1240744 - RNA, 19 nt, Homo sapiens
  misc_RNA (1)...(19): siRNA sense strand
gaaauacagcaaguucucu

SEQ ID NO: 1240745 - RNA, 19 nt, Homo sapiens
  misc_RNA (1)...(19): siRNA sense strand
cgaaauacagcaaguucuc

SEQ ID NO: 1240746 - RNA, 19 nt, Homo sapiens
  misc_RNA (1)...(19): siRNA sense strand
gaggcgagggaaucagaaa

SEQ ID NO: 1240747 - RNA, 19 nt, Homo sapiens
  misc_RNA (1)...(19): siRNA sense strand
acgaagaggaggaggauga

SEQ ID NO: 1240748 - RNA, 19 nt, Homo sapiens
  misc_RNA (1)...(19): siRNA sense strand
aaauacagcaaguucucua

SEQ ID NO: 1240749 - RNA, 19 nt, Homo sapiens
  misc_RNA (1)...(19): siRNA sense strand
gaaguaugagguggcauuc

SEQ ID NO: 1240750 - RNA, 19 nt, Homo sapiens
  misc_RNA (1)...(19): siRNA sense strand
gcgcgaaguggaagagugu

SEQ ID NO: 1240751 - RNA, 19 nt, Homo sapiens
  misc_RNA (1)...(19): siRNA sense strand
uggguccucuggcuauuug

SEQ ID NO: 1240752 - RNA, 19 nt, Homo sapiens
  misc_RNA (1)...(19): siRNA sense strand
cagaagauggcgucagcuu

SEQ ID NO: 1240753 - RNA, 19 nt, Homo sapiens
  misc_RNA (1)...(19): siRNA sense strand
gaggaggacacagaagaug

SEQ ID NO: 1240754 - RNA, 19 nt, Homo sapiens
  misc_RNA (1)...(19): siRNA sense strand
cacguucagugucccgaaa

SEQ ID NO: 1240755 - RNA, 19 nt, Homo sapiens
  misc_RNA (1)...(19): siRNA sense strand
ccacccaacagacaagaug

SEQ ID NO: 1240756 - RNA, 19 nt, Homo sapiens
  misc_RNA (1)...(19): siRNA sense strand
ggaugggcaccaagaaucu

SEQ ID NO: 1240757 - RNA, 19 nt, Homo sapiens
  misc_RNA (1)...(19): siRNA sense strand
gacccuauuuccagucacu

SEQ ID NO: 1240758 - RNA, 19 nt, Homo sapiens
  misc_RNA (1)...(19): siRNA sense strand
caguuucucuucagacacu

SEQ ID NO: 1240759 - RNA, 19 nt, Homo sapiens
  misc_RNA (1)...(19): siRNA sense strand
gcuggguccucuggcuauu

SEQ ID NO: 1240760 - RNA, 19 nt, Homo sapiens
  misc_RNA (1)...(19): siRNA sense strand
ggaccuugcagaggacgaa

SEQ ID NO: 1240761 - RNA, 19 nt, Homo sapiens
  misc_RNA (1)...(19): siRNA sense strand
agcgaaggcuccucugcuu

SEQ ID NO: 1240762 - RNA, 19 nt, Homo sapiens
  misc_RNA (1)...(19): siRNA sense strand
guucuaugaugugccugaa

SEQ ID NO: 1240763 - RNA, 19 nt, Homo sapiens
  misc_RNA (1)...(19): siRNA sense strand
cagcuuccagcccuacauu

SEQ ID NO: 1240764 - RNA, 19 nt, Homo sapiens
  misc_RNA (1)...(19): siRNA sense strand
ggaguccgaauaccuggau

SEQ ID NO: 1240765 - RNA, 19 nt, Homo sapiens
  misc_RNA (1)...(19): siRNA sense strand
ggaggcgagggaaucagaa

SEQ ID NO: 1240766 - RNA, 19 nt, Homo sapiens
  misc_RNA (1)...(19): siRNA sense strand
ccacuggaucugaaguaug

SEQ ID NO: 1240767 - RNA, 19 nt, Homo sapiens
  misc_RNA (1)...(19): siRNA sense strand
ugagugccaaugccacgua

SEQ ID NO: 1240768 - RNA, 19 nt, Homo sapiens
  misc_RNA (1)...(19): siRNA sense strand
aaggagcugcuauguucua

SEQ ID NO: 1240769 - RNA, 19 nt, Homo sapiens
  misc_RNA (1)...(19): siRNA sense strand
ccaaggagcugcuauguuc

SEQ ID NO: 1240770 - RNA, 19 nt, Homo sapiens
  misc_RNA (1)...(19): siRNA sense strand
gagcugcuauguucuauga

SEQ ID NO: 1240771 - RNA, 19 nt, Homo sapiens
  misc_RNA (1)...(19): siRNA sense strand
gaagagcucccagaagaua

SEQ ID NO: 1240772 - RNA, 19 nt, Homo sapiens
  misc_RNA (1)...(19): siRNA sense strand
uggaagagcucccagaaga

SEQ ID NO: 1240773 - RNA, 19 nt, Homo sapiens
  misc_RNA (1)...(19): siRNA sense strand
caacagacaagauggaaga

SEQ ID NO: 1240774 - RNA, 19 nt, Homo sapiens
  misc_RNA (1)...(19): siRNA sense strand
cccaggaugugaccuauuu

SEQ ID NO: 1240775 - RNA, 19 nt, Homo sapiens
  misc_RNA (1)...(19): siRNA sense strand
cacuggaucugaaguauga

SEQ ID NO: 1240776 - RNA, 19 nt, Homo sapiens
  misc_RNA (1)...(19): siRNA sense strand
ccagaaccaucuacacguu

SEQ ID NO: 1240777 - RNA, 19 nt, Homo sapiens
  misc_RNA (1)...(19): siRNA sense strand
gcgagggaaucagaaauug

SEQ ID NO: 1240778 - RNA, 19 nt, Homo sapiens
  misc_RNA (1)...(19): siRNA sense strand
gaaccaaggagcugcuaug

SEQ ID NO: 1240779 - RNA, 19 nt, Homo sapiens
  misc_RNA (1)...(19): siRNA sense strand
gcugcuauguucuaugaug

SEQ ID NO: 1240780 - RNA, 19 nt, Homo sapiens
  misc_RNA (1)...(19): siRNA sense strand
ucuaugaugugccugaaga

SEQ ID NO: 1240781 - RNA, 19 nt, Homo sapiens
  misc_RNA (1)...(19): siRNA sense strand
ugaugugccugaagaaaca

SEQ ID NO: 1240782 - RNA, 19 nt, Homo sapiens
  misc_RNA (1)...(19): siRNA sense strand
ugacgcugcucucccagaa

SEQ ID NO: 1240783 - RNA, 19 nt, Homo sapiens
  misc_RNA (1)...(19): siRNA sense strand
ccgaauaccuggauuaccu

SEQ ID NO: 1240784 - RNA, 19 nt, Homo sapiens
  misc_RNA (1)...(19): siRNA sense strand
caccugaauucuccaagga

SEQ ID NO: 1240785 - RNA, 19 nt, Homo sapiens
  misc_RNA (1)...(19): siRNA sense strand
acauugaaccaccuucuuu

SEQ ID NO: 1240786 - RNA, 19 nt, Homo sapiens
  misc_RNA (1)...(19): siRNA sense strand
ggcgagggaaucagaaauu

SEQ ID NO: 1240787 - RNA, 19 nt, Homo sapiens
  misc_RNA (1)...(19): siRNA sense strand
gaagaggaggcgagggaau

SEQ ID NO: 1240788 - RNA, 19 nt, Homo sapiens
  misc_RNA (1)...(19): siRNA sense strand
ggaagagcucccagaagau

SEQ ID NO: 1240789 - RNA, 19 nt, Homo sapiens
  misc_RNA (1)...(19): siRNA sense strand
gaauaccuggauuaccuuu

SEQ ID NO: 1240790 - RNA, 19 nt, Homo sapiens
  misc_RNA (1)...(19): siRNA sense strand
aaacaagacccuauuucca

SEQ ID NO: 1240791 - RNA, 19 nt, Homo sapiens
  misc_RNA (1)...(19): siRNA sense strand
ugaaguaugagguggcauu

SEQ ID NO: 1240792 - RNA, 19 nt, Homo sapiens
  misc_RNA (1)...(19): siRNA sense strand
cguucagugucccgaaaua

SEQ ID NO: 1240793 - RNA, 19 nt, Homo sapiens
  misc_RNA (1)...(19): siRNA sense strand
aagcagcccugaggaggaa

SEQ ID NO: 1240794 - RNA, 19 nt, Homo sapiens
  misc_RNA (1)...(19): siRNA sense strand
ggaugaggaggacacagaa

SEQ ID NO: 1240795 - RNA, 19 nt, Homo sapiens
  misc_RNA (1)...(19): siRNA sense strand
ggacgaagaggaggaggau

SEQ ID NO: 1240796 - RNA, 19 nt, Homo sapiens
  misc_RNA (1)...(19): siRNA sense strand
ggaccuguacaacaaguuc

SEQ ID NO: 1240797 - RNA, 19 nt, Homo sapiens
  misc_RNA (1)...(19): siRNA sense strand
gagggaaucagaaauugag

SEQ ID NO: 1240798 - RNA, 19 nt, Homo sapiens
  misc_RNA (1)...(19): siRNA sense strand
gggaugggcaccaagaauc

SEQ ID NO: 1240799 - RNA, 19 nt, Homo sapiens
  misc_RNA (1)...(19): siRNA sense strand
cggaaacaagacccuauuu

SEQ ID NO: 1240800 - RNA, 19 nt, Homo sapiens
  misc_RNA (1)...(19): siRNA sense strand
aguaugagguggcauucug

SEQ ID NO: 1240801 - RNA, 19 nt, Homo sapiens
  misc_RNA (1)...(19): siRNA sense strand
cgagggaaucagaaauuga

SEQ ID NO: 1240802 - RNA, 19 nt, Homo sapiens
  misc_RNA (1)...(19): siRNA sense strand
gcuuccagcccuacauuga

SEQ ID NO: 1240803 - RNA, 19 nt, Homo sapiens
  misc_RNA (1)...(19): siRNA sense strand
gaaauacagcaaguucucu

SEQ ID NO: 1240804 - RNA, 19 nt, Homo sapiens
  misc_RNA (1)...(19): siRNA sense strand
cgaaauacagcaaguucuc

SEQ ID NO: 1240805 - RNA, 19 nt, Homo sapiens
  misc_RNA (1)...(19): siRNA sense strand
gaggcgagggaaucagaaa

SEQ ID NO: 1240806 - RNA, 19 nt, Homo sapiens
  misc_RNA (1)...(19): siRNA sense strand
acgaagaggaggaggauga

SEQ ID NO: 1240807 - RNA, 19 nt, Homo sapiens
  misc_RNA (1)...(19): siRNA sense strand
aaauacagcaaguucucua

SEQ ID NO: 1240808 - RNA, 19 nt, Homo sapiens
  misc_RNA (1)...(19): siRNA sense strand
gaaguaugagguggcauuc

SEQ ID NO: 1240809 - RNA, 19 nt, Homo sapiens
  misc_RNA (1)...(19): siRNA sense strand
gcgcgaaguggaagagugu

SEQ ID NO: 1240810 - RNA, 19 nt, Homo sapiens
  misc_RNA (1)...(19): siRNA sense strand
uggguccucuggcuauuug

SEQ ID NO: 1240811 - RNA, 19 nt, Homo sapiens
  misc_RNA (1)...(19): siRNA sense strand
cagaagauggcgucagcuu

SEQ ID NO: 1240812 - RNA, 19 nt, Homo sapiens
  misc_RNA (1)...(19): siRNA sense strand
gaggaggacacagaagaug

SEQ ID NO: 1240813 - RNA, 19 nt, Homo sapiens
  misc_RNA (1)...(19): siRNA sense strand
cacguucagugucccgaaa

SEQ ID NO: 1240814 - RNA, 19 nt, Homo sapiens
  misc_RNA (1)...(19): siRNA sense strand
ccacccaacagacaagaug

SEQ ID NO: 1240815 - RNA, 19 nt, Homo sapiens
  misc_RNA (1)...(19): siRNA sense strand
ggaugggcaccaagaaucu

SEQ ID NO: 1240816 - RNA, 19 nt, Homo sapiens
  misc_RNA (1)...(19): siRNA sense strand
gacccuauuuccagucacu

SEQ ID NO: 1240817 - RNA, 19 nt, Homo sapiens
  misc_RNA (1)...(19): siRNA sense strand
caguuucucuucagacacu

SEQ ID NO: 1240818 - RNA, 19 nt, Homo sapiens
  misc_RNA (1)...(19): siRNA sense strand
gcuggguccucuggcuauu

SEQ ID NO: 1240819 - RNA, 19 nt, Homo sapiens
  misc_RNA (1)...(19): siRNA sense strand
ggaccuugcagaggacgaa

SEQ ID NO: 1240820 - RNA, 19 nt, Homo sapiens
  misc_RNA (1)...(19): siRNA sense strand
agcgaaggcuccucugcuu

SEQ ID NO: 1240821 - RNA, 19 nt, Homo sapiens
  misc_RNA (1)...(19): siRNA sense strand
guucuaugaugugccugaa

SEQ ID NO: 1240822 - RNA, 19 nt, Homo sapiens
  misc_RNA (1)...(19): siRNA sense strand
cagcuuccagcccuacauu

SEQ ID NO: 1240823 - RNA, 19 nt, Homo sapiens
  misc_RNA (1)...(19): siRNA sense strand
ggaguccgaauaccuggau

SEQ ID NO: 1240824 - RNA, 19 nt, Homo sapiens
  misc_RNA (1)...(19): siRNA sense strand
ggaggcgagggaaucagaa

SEQ ID NO: 1240825 - RNA, 19 nt, Homo sapiens
  misc_RNA (1)...(19): siRNA sense strand
ccacuggaucugaaguaug

SEQ ID NO: 1240826 - RNA, 19 nt, Homo sapiens
  misc_RNA (1)...(19): siRNA sense strand
ugagugccaaugccacgua

SEQ ID NO: 1240827 - RNA, 19 nt, Homo sapiens
  misc_RNA (1)...(19): siRNA sense strand
aaggagcugcuauguucua

SEQ ID NO: 1240828 - RNA, 19 nt, Homo sapiens
  misc_RNA (1)...(19): siRNA sense strand
ccaaggagcugcuauguuc

SEQ ID NO: 1240829 - RNA, 19 nt, Homo sapiens
  misc_RNA (1)...(19): siRNA sense strand
gagcugcuauguucuauga

SEQ ID NO: 1240830 - RNA, 19 nt, Homo sapiens
  misc_RNA (1)...(19): siRNA sense strand
cccaggaugugaccuauuu

SEQ ID NO: 1240831 - RNA, 19 nt, Homo sapiens
  misc_RNA (1)...(19): siRNA sense strand
cacuggaucugaaguauga

SEQ ID NO: 1240832 - RNA, 19 nt, Homo sapiens
  misc_RNA (1)...(19): siRNA sense strand
ccagaaccaucuacacguu

SEQ ID NO: 1240833 - RNA, 19 nt, Homo sapiens
  misc_RNA (1)...(19): siRNA sense strand
gaaccaaggagcugcuaug

SEQ ID NO: 1240834 - RNA, 19 nt, Homo sapiens
  misc_RNA (1)...(19): siRNA sense strand
gcugcuauguucuaugaug

SEQ ID NO: 1240835 - RNA, 19 nt, Homo sapiens
  misc_RNA (1)...(19): siRNA sense strand
ucuaugaugugccugaaga

SEQ ID NO: 1240836 - RNA, 19 nt, Homo sapiens
  misc_RNA (1)...(19): siRNA sense strand
ugaugugccugaagaaaca

SEQ ID NO: 1240837 - RNA, 19 nt, Homo sapiens
  misc_RNA (1)...(19): siRNA sense strand
ugacgcugcucucccagaa

SEQ ID NO: 1240838 - RNA, 19 nt, Homo sapiens
  misc_RNA (1)...(19): siRNA sense strand
ccgaauaccuggauuaccu

SEQ ID NO: 1240839 - RNA, 19 nt, Homo sapiens
  misc_RNA (1)...(19): siRNA sense strand
gaauaccuggauuaccuuu

SEQ ID NO: 1240840 - RNA, 19 nt, Homo sapiens
  misc_RNA (1)...(19): siRNA sense strand
aaacaagacccuauuucca

SEQ ID NO: 1240841 - RNA, 19 nt, Homo sapiens
  misc_RNA (1)...(19): siRNA sense strand
ugaaguaugagguggcauu

SEQ ID NO: 1240842 - RNA, 19 nt, Homo sapiens
  misc_RNA (1)...(19): siRNA sense strand
cguucagugucccgaaaua

SEQ ID NO: 1240843 - RNA, 19 nt, Homo sapiens
  misc_RNA (1)...(19): siRNA sense strand
ggaccuguacaacaaguuc

SEQ ID NO: 1240844 - RNA, 19 nt, Homo sapiens
  misc_RNA (1)...(19): siRNA sense strand
cggaaacaagacccuauuu

SEQ ID NO: 1240845 - RNA, 19 nt, Homo sapiens
  misc_RNA (1)...(19): siRNA sense strand
aguaugagguggcauucug

SEQ ID NO: 1240846 - RNA, 19 nt, Homo sapiens
  misc_RNA (1)...(19): siRNA sense strand
gaaauacagcaaguucucu

SEQ ID NO: 1240847 - RNA, 19 nt, Homo sapiens
  misc_RNA (1)...(19): siRNA sense strand
cgaaauacagcaaguucuc

SEQ ID NO: 1240848 - RNA, 19 nt, Homo sapiens
  misc_RNA (1)...(19): siRNA sense strand
aaauacagcaaguucucua

SEQ ID NO: 1240849 - RNA, 19 nt, Homo sapiens
  misc_RNA (1)...(19): siRNA sense strand
gcgcgaaguggaagagugu

SEQ ID NO: 1240850 - RNA, 19 nt, Homo sapiens
  misc_RNA (1)...(19): siRNA sense strand
gaaguaugagguggcauuc

SEQ ID NO: 1240851 - RNA, 19 nt, Homo sapiens
  misc_RNA (1)...(19): siRNA sense strand
cacguucagugucccgaaa

SEQ ID NO: 1240852 - RNA, 19 nt, Homo sapiens
  misc_RNA (1)...(19): siRNA sense strand
gacccuauuuccagucacu

SEQ ID NO: 1240853 - RNA, 19 nt, Homo sapiens
  misc_RNA (1)...(19): siRNA sense strand
guucuaugaugugccugaa

SEQ ID NO: 1240854 - RNA, 19 nt, Homo sapiens
  misc_RNA (1)...(19): siRNA sense strand
ggaguccgaauaccuggau

SEQ ID NO: 1240855 - RNA, 19 nt, Homo sapiens
  misc_RNA (1)...(19): siRNA sense strand
ccacuggaucugaaguaug

SEQ ID NO: 1240856 - RNA, 19 nt, Homo sapiens
  misc_RNA (1)...(19): siRNA sense strand
ugagugccaaugccacgua

SEQ ID NO: 1240857 - RNA, 19 nt, Homo sapiens
  misc_RNA (1)...(19): siRNA sense strand
aaggagcugcuauguucua

SEQ ID NO: 1240858 - RNA, 19 nt, Homo sapiens
  misc_RNA (1)...(19): siRNA sense strand
ccaaggagcugcuauguuc

SEQ ID NO: 1240859 - RNA, 19 nt, Homo sapiens
  misc_RNA (1)...(19): siRNA sense strand
gagcugcuauguucuauga

SEQ ID NO: 1240860 - RNA, 19 nt, Homo sapiens
  misc_RNA (1)...(19): siRNA sense strand
gaagagcucccagaagaua

SEQ ID NO: 1240861 - RNA, 19 nt, Homo sapiens
  misc_RNA (1)...(19): siRNA sense strand
uggaagagcucccagaaga

SEQ ID NO: 1240862 - RNA, 19 nt, Homo sapiens
  misc_RNA (1)...(19): siRNA sense strand
caacagacaagauggaaga

SEQ ID NO: 1240863 - RNA, 19 nt, Homo sapiens
  misc_RNA (1)...(19): siRNA sense strand
cccaggaugugaccuauuu

SEQ ID NO: 1240864 - RNA, 19 nt, Homo sapiens
  misc_RNA (1)...(19): siRNA sense strand
cacuggaucugaaguauga

SEQ ID NO: 1240865 - RNA, 19 nt, Homo sapiens
  misc_RNA (1)...(19): siRNA sense strand
ccagaaccaucuacacguu

SEQ ID NO: 1240866 - RNA, 19 nt, Homo sapiens
  misc_RNA (1)...(19): siRNA sense strand
gcgagggaaucagaaauug

SEQ ID NO: 1240867 - RNA, 19 nt, Homo sapiens
  misc_RNA (1)...(19): siRNA sense strand
gaaccaaggagcugcuaug

SEQ ID NO: 1240868 - RNA, 19 nt, Homo sapiens
  misc_RNA (1)...(19): siRNA sense strand
gcugcuauguucuaugaug

SEQ ID NO: 1240869 - RNA, 19 nt, Homo sapiens
  misc_RNA (1)...(19): siRNA sense strand
ucuaugaugugccugaaga

SEQ ID NO: 1240870 - RNA, 19 nt, Homo sapiens
  misc_RNA (1)...(19): siRNA sense strand
ugaugugccugaagaaaca

SEQ ID NO: 1240871 - RNA, 19 nt, Homo sapiens
  misc_RNA (1)...(19): siRNA sense strand
ugacgcugcucucccagaa

SEQ ID NO: 1240872 - RNA, 19 nt, Homo sapiens
  misc_RNA (1)...(19): siRNA sense strand
ccgaauaccuggauuaccu

SEQ ID NO: 1240873 - RNA, 19 nt, Homo sapiens
  misc_RNA (1)...(19): siRNA sense strand
caccugaauucuccaagga

SEQ ID NO: 1240874 - RNA, 19 nt, Homo sapiens
  misc_RNA (1)...(19): siRNA sense strand
acauugaaccaccuucuuu

SEQ ID NO: 1240875 - RNA, 19 nt, Homo sapiens
  misc_RNA (1)...(19): siRNA sense strand
ggcgagggaaucagaaauu

SEQ ID NO: 1240876 - RNA, 19 nt, Homo sapiens
  misc_RNA (1)...(19): siRNA sense strand
gaagaggaggcgagggaau

SEQ ID NO: 1240877 - RNA, 19 nt, Homo sapiens
  misc_RNA (1)...(19): siRNA sense strand
ggaagagcucccagaagau

SEQ ID NO: 1240878 - RNA, 19 nt, Homo sapiens
  misc_RNA (1)...(19): siRNA sense strand
gaauaccuggauuaccuuu

SEQ ID NO: 1240879 - RNA, 19 nt, Homo sapiens
  misc_RNA (1)...(19): siRNA sense strand
aaacaagacccuauuucca

SEQ ID NO: 1240880 - RNA, 19 nt, Homo sapiens
  misc_RNA (1)...(19): siRNA sense strand
ugaaguaugagguggcauu

SEQ ID NO: 1240881 - RNA, 19 nt, Homo sapiens
  misc_RNA (1)...(19): siRNA sense strand
cguucagugucccgaaaua

SEQ ID NO: 1240882 - RNA, 19 nt, Homo sapiens
  misc_RNA (1)...(19): siRNA sense strand
aagcagcccugaggaggaa

SEQ ID NO: 1240883 - RNA, 19 nt, Homo sapiens
  misc_RNA (1)...(19): siRNA sense strand
ggaugaggaggacacagaa

SEQ ID NO: 1240884 - RNA, 19 nt, Homo sapiens
  misc_RNA (1)...(19): siRNA sense strand
ggacgaagaggaggaggau

SEQ ID NO: 1240885 - RNA, 19 nt, Homo sapiens
  misc_RNA (1)...(19): siRNA sense strand
ggaccuguacaacaaguuc

SEQ ID NO: 1240886 - RNA, 19 nt, Homo sapiens
  misc_RNA (1)...(19): siRNA sense strand
gagggaaucagaaauugag

SEQ ID NO: 1240887 - RNA, 19 nt, Homo sapiens
  misc_RNA (1)...(19): siRNA sense strand
gggaugggcaccaagaauc

SEQ ID NO: 1240888 - RNA, 19 nt, Homo sapiens
  misc_RNA (1)...(19): siRNA sense strand
cggaaacaagacccuauuu

SEQ ID NO: 1240889 - RNA, 19 nt, Homo sapiens
  misc_RNA (1)...(19): siRNA sense strand
aguaugagguggcauucug

SEQ ID NO: 1240890 - RNA, 19 nt, Homo sapiens
  misc_RNA (1)...(19): siRNA sense strand
cgagggaaucagaaauuga

SEQ ID NO: 1240891 - RNA, 19 nt, Homo sapiens
  misc_RNA (1)...(19): siRNA sense strand
gcuuccagcccuacauuga

SEQ ID NO: 1240892 - RNA, 19 nt, Homo sapiens
  misc_RNA (1)...(19): siRNA sense strand
gaaauacagcaaguucucu

SEQ ID NO: 1240893 - RNA, 19 nt, Homo sapiens
  misc_RNA (1)...(19): siRNA sense strand
cgaaauacagcaaguucuc

SEQ ID NO: 1240894 - RNA, 19 nt, Homo sapiens
  misc_RNA (1)...(19): siRNA sense strand
gaggcgagggaaucagaaa

SEQ ID NO: 1240895 - RNA, 19 nt, Homo sapiens
  misc_RNA (1)...(19): siRNA sense strand
acgaagaggaggaggauga

SEQ ID NO: 1240896 - RNA, 19 nt, Homo sapiens
  misc_RNA (1)...(19): siRNA sense strand
aaauacagcaaguucucua

SEQ ID NO: 1240897 - RNA, 19 nt, Homo sapiens
  misc_RNA (1)...(19): siRNA sense strand
gaaguaugagguggcauuc

SEQ ID NO: 1240898 - RNA, 19 nt, Homo sapiens
  misc_RNA (1)...(19): siRNA sense strand
gcgcgaaguggaagagugu

SEQ ID NO: 1240899 - RNA, 19 nt, Homo sapiens
  misc_RNA (1)...(19): siRNA sense strand
uggguccucuggcuauuug

SEQ ID NO: 1240900 - RNA, 19 nt, Homo sapiens
  misc_RNA (1)...(19): siRNA sense strand
cagaagauggcgucagcuu

SEQ ID NO: 1240901 - RNA, 19 nt, Homo sapiens
  misc_RNA (1)...(19): siRNA sense strand
gaggaggacacagaagaug

SEQ ID NO: 1240902 - RNA, 19 nt, Homo sapiens
  misc_RNA (1)...(19): siRNA sense strand
cacguucagugucccgaaa

SEQ ID NO: 1240903 - RNA, 19 nt, Homo sapiens
  misc_RNA (1)...(19): siRNA sense strand
ccacccaacagacaagaug

SEQ ID NO: 1240904 - RNA, 19 nt, Homo sapiens
  misc_RNA (1)...(19): siRNA sense strand
ggaugggcaccaagaaucu

SEQ ID NO: 1240905 - RNA, 19 nt, Homo sapiens
  misc_RNA (1)...(19): siRNA sense strand
gacccuauuuccagucacu

SEQ ID NO: 1240906 - RNA, 19 nt, Homo sapiens
  misc_RNA (1)...(19): siRNA sense strand
caguuucucuucagacacu

SEQ ID NO: 1240907 - RNA, 19 nt, Homo sapiens
  misc_RNA (1)...(19): siRNA sense strand
gcuggguccucuggcuauu

SEQ ID NO: 1240908 - RNA, 19 nt, Homo sapiens
  misc_RNA (1)...(19): siRNA sense strand
ggaccuugcagaggacgaa

SEQ ID NO: 1240909 - RNA, 19 nt, Homo sapiens
  misc_RNA (1)...(19): siRNA sense strand
agcgaaggcuccucugcuu

SEQ ID NO: 1240910 - RNA, 19 nt, Homo sapiens
  misc_RNA (1)...(19): siRNA sense strand
guucuaugaugugccugaa

SEQ ID NO: 1240911 - RNA, 19 nt, Homo sapiens
  misc_RNA (1)...(19): siRNA sense strand
cagcuuccagcccuacauu

SEQ ID NO: 1240912 - RNA, 19 nt, Homo sapiens
  misc_RNA (1)...(19): siRNA sense strand
ggaguccgaauaccuggau

SEQ ID NO: 1240913 - RNA, 19 nt, Homo sapiens
  misc_RNA (1)...(19): siRNA sense strand
ggaggcgagggaaucagaa

SEQ ID NO: 1240914 - RNA, 19 nt, Homo sapiens
  misc_RNA (1)...(19): siRNA sense strand
ccacuggaucugaaguaug

SEQ ID NO: 1240915 - RNA, 19 nt, Homo sapiens
  misc_RNA (1)...(19): siRNA sense strand
ugagugccaaugccacgua

SEQ ID NO: 1240916 - RNA, 19 nt, Homo sapiens
  misc_RNA (1)...(19): siRNA sense strand
aaggagcugcuauguucua

SEQ ID NO: 1240917 - RNA, 19 nt, Homo sapiens
  misc_RNA (1)...(19): siRNA sense strand
ccaaggagcugcuauguuc

SEQ ID NO: 1240918 - RNA, 19 nt, Homo sapiens
  misc_RNA (1)...(19): siRNA sense strand
gagcugcuauguucuauga

SEQ ID NO: 1240919 - RNA, 19 nt, Homo sapiens
  misc_RNA (1)...(19): siRNA sense strand
gaagagcucccagaagaua

SEQ ID NO: 1240920 - RNA, 19 nt, Homo sapiens
  misc_RNA (1)...(19): siRNA sense strand
uggaagagcucccagaaga

SEQ ID NO: 1240921 - RNA, 19 nt, Homo sapiens
  misc_RNA (1)...(19): siRNA sense strand
caacagacaagauggaaga

SEQ ID NO: 1240922 - RNA, 19 nt, Homo sapiens
  misc_RNA (1)...(19): siRNA sense strand
cccaggaugugaccuauuu

SEQ ID NO: 1240923 - RNA, 19 nt, Homo sapiens
  misc_RNA (1)...(19): siRNA sense strand
cacuggaucugaaguauga

SEQ ID NO: 1240924 - RNA, 19 nt, Homo sapiens
  misc_RNA (1)...(19): siRNA sense strand
ccagaaccaucuacacguu

SEQ ID NO: 1240925 - RNA, 19 nt, Homo sapiens
  misc_RNA (1)...(19): siRNA sense strand
gcgagggaaucagaaauug

SEQ ID NO: 1240926 - RNA, 19 nt, Homo sapiens
  misc_RNA (1)...(19): siRNA sense strand
gaaccaaggagcugcuaug

SEQ ID NO: 1240927 - RNA, 19 nt, Homo sapiens
  misc_RNA (1)...(19): siRNA sense strand
gcugcuauguucuaugaug

SEQ ID NO: 1240928 - RNA, 19 nt, Homo sapiens
  misc_RNA (1)...(19): siRNA sense strand
ucuaugaugugccugaaga

SEQ ID NO: 1240929 - RNA, 19 nt, Homo sapiens
  misc_RNA (1)...(19): siRNA sense strand
ugaugugccugaagaaaca

SEQ ID NO: 1240930 - RNA, 19 nt, Homo sapiens
  misc_RNA (1)...(19): siRNA sense strand
ugacgcugcucucccagaa

SEQ ID NO: 1240931 - RNA, 19 nt, Homo sapiens
  misc_RNA (1)...(19): siRNA sense strand
ccgaauaccuggauuaccu

SEQ ID NO: 1240932 - RNA, 19 nt, Homo sapiens
  misc_RNA (1)...(19): siRNA sense strand
caccugaauucuccaagga

SEQ ID NO: 1240933 - RNA, 19 nt, Homo sapiens
  misc_RNA (1)...(19): siRNA sense strand
acauugaaccaccuucuuu

SEQ ID NO: 1240934 - RNA, 19 nt, Homo sapiens
  misc_RNA (1)...(19): siRNA sense strand
ggcgagggaaucagaaauu

SEQ ID NO: 1240935 - RNA, 19 nt, Homo sapiens
  misc_RNA (1)...(19): siRNA sense strand
gaagaggaggcgagggaau

SEQ ID NO: 1240936 - RNA, 19 nt, Homo sapiens
  misc_RNA (1)...(19): siRNA sense strand
ggaagagcucccagaagau

SEQ ID NO: 1240937 - RNA, 19 nt, Homo sapiens
  misc_RNA (1)...(19): siRNA sense strand
gaauaccuggauuaccuuu

SEQ ID NO: 1240938 - RNA, 19 nt, Homo sapiens
  misc_RNA (1)...(19): siRNA sense strand
aaacaagacccuauuucca

SEQ ID NO: 1240939 - RNA, 19 nt, Homo sapiens
  misc_RNA (1)...(19): siRNA sense strand
ugaaguaugagguggcauu

SEQ ID NO: 1240940 - RNA, 19 nt, Homo sapiens
  misc_RNA (1)...(19): siRNA sense strand
cguucagugucccgaaaua

SEQ ID NO: 1240941 - RNA, 19 nt, Homo sapiens
  misc_RNA (1)...(19): siRNA sense strand
aagcagcccugaggaggaa

SEQ ID NO: 1240942 - RNA, 19 nt, Homo sapiens
  misc_RNA (1)...(19): siRNA sense strand
ggaugaggaggacacagaa

SEQ ID NO: 1240943 - RNA, 19 nt, Homo sapiens
  misc_RNA (1)...(19): siRNA sense strand
ggacgaagaggaggaggau

SEQ ID NO: 1240944 - RNA, 19 nt, Homo sapiens
  misc_RNA (1)...(19): siRNA sense strand
ggaccuguacaacaaguuc

SEQ ID NO: 1240945 - RNA, 19 nt, Homo sapiens
  misc_RNA (1)...(19): siRNA sense strand
gagggaaucagaaauugag

SEQ ID NO: 1240946 - RNA, 19 nt, Homo sapiens
  misc_RNA (1)...(19): siRNA sense strand
gggaugggcaccaagaauc

SEQ ID NO: 1240947 - RNA, 19 nt, Homo sapiens
  misc_RNA (1)...(19): siRNA sense strand
cggaaacaagacccuauuu

SEQ ID NO: 1240948 - RNA, 19 nt, Homo sapiens
  misc_RNA (1)...(19): siRNA sense strand
aguaugagguggcauucug

SEQ ID NO: 1240949 - RNA, 19 nt, Homo sapiens
  misc_RNA (1)...(19): siRNA sense strand
cgagggaaucagaaauuga

SEQ ID NO: 1240950 - RNA, 19 nt, Homo sapiens
  misc_RNA (1)...(19): siRNA sense strand
gcuuccagcccuacauuga

SEQ ID NO: 1240951 - RNA, 19 nt, Homo sapiens
  misc_RNA (1)...(19): siRNA sense strand
gaaauacagcaaguucucu

SEQ ID NO: 1240952 - RNA, 19 nt, Homo sapiens
  misc_RNA (1)...(19): siRNA sense strand
cgaaauacagcaaguucuc

SEQ ID NO: 1240953 - RNA, 19 nt, Homo sapiens
  misc_RNA (1)...(19): siRNA sense strand
gaggcgagggaaucagaaa

SEQ ID NO: 1240954 - RNA, 19 nt, Homo sapiens
  misc_RNA (1)...(19): siRNA sense strand
acgaagaggaggaggauga

SEQ ID NO: 1240955 - RNA, 19 nt, Homo sapiens
  misc_RNA (1)...(19): siRNA sense strand
aaauacagcaaguucucua

SEQ ID NO: 1240956 - RNA, 19 nt, Homo sapiens
  misc_RNA (1)...(19): siRNA sense strand
gaaguaugagguggcauuc

SEQ ID NO: 1240957 - RNA, 19 nt, Homo sapiens
  misc_RNA (1)...(19): siRNA sense strand
gcgcgaaguggaagagugu

SEQ ID NO: 1240958 - RNA, 19 nt, Homo sapiens
  misc_RNA (1)...(19): siRNA sense strand
uggguccucuggcuauuug

SEQ ID NO: 1240959 - RNA, 19 nt, Homo sapiens
  misc_RNA (1)...(19): siRNA sense strand
cagaagauggcgucagcuu

SEQ ID NO: 1240960 - RNA, 19 nt, Homo sapiens
  misc_RNA (1)...(19): siRNA sense strand
gaggaggacacagaagaug

SEQ ID NO: 1240961 - RNA, 19 nt, Homo sapiens
  misc_RNA (1)...(19): siRNA sense strand
cacguucagugucccgaaa

SEQ ID NO: 1240962 - RNA, 19 nt, Homo sapiens
  misc_RNA (1)...(19): siRNA sense strand
ccacccaacagacaagaug

SEQ ID NO: 1240963 - RNA, 19 nt, Homo sapiens
  misc_RNA (1)...(19): siRNA sense strand
ggaugggcaccaagaaucu

SEQ ID NO: 1240964 - RNA, 19 nt, Homo sapiens
  misc_RNA (1)...(19): siRNA sense strand
gacccuauuuccagucacu

SEQ ID NO: 1240965 - RNA, 19 nt, Homo sapiens
  misc_RNA (1)...(19): siRNA sense strand
caguuucucuucagacacu

SEQ ID NO: 1240966 - RNA, 19 nt, Homo sapiens
  misc_RNA (1)...(19): siRNA sense strand
gcuggguccucuggcuauu

SEQ ID NO: 1240967 - RNA, 19 nt, Homo sapiens
  misc_RNA (1)...(19): siRNA sense strand
ggaccuugcagaggacgaa

SEQ ID NO: 1240968 - RNA, 19 nt, Homo sapiens
  misc_RNA (1)...(19): siRNA sense strand
agcgaaggcuccucugcuu

SEQ ID NO: 1240969 - RNA, 19 nt, Homo sapiens
  misc_RNA (1)...(19): siRNA sense strand
guucuaugaugugccugaa

SEQ ID NO: 1240970 - RNA, 19 nt, Homo sapiens
  misc_RNA (1)...(19): siRNA sense strand
cagcuuccagcccuacauu

SEQ ID NO: 1240971 - RNA, 19 nt, Homo sapiens
  misc_RNA (1)...(19): siRNA sense strand
ggaguccgaauaccuggau

SEQ ID NO: 1240972 - RNA, 19 nt, Homo sapiens
  misc_RNA (1)...(19): siRNA sense strand
ggaggcgagggaaucagaa

SEQ ID NO: 1240973 - RNA, 19 nt, Homo sapiens
  misc_RNA (1)...(19): siRNA sense strand
ccacuggaucugaaguaug

SEQ ID NO: 1240974 - RNA, 19 nt, Homo sapiens
  misc_RNA (1)...(19): siRNA sense strand
ugagugccaaugccacgua

SEQ ID NO: 1240975 - RNA, 19 nt, Homo sapiens
  misc_RNA (1)...(19): siRNA sense strand
aaggagcugcuauguucua

SEQ ID NO: 1240976 - RNA, 19 nt, Homo sapiens
  misc_RNA (1)...(19): siRNA sense strand
ccaaggagcugcuauguuc

SEQ ID NO: 1240977 - RNA, 19 nt, Homo sapiens
  misc_RNA (1)...(19): siRNA sense strand
gagcugcuauguucuauga

SEQ ID NO: 1240978 - RNA, 19 nt, Homo sapiens
  misc_RNA (1)...(19): siRNA sense strand
cccaggaugugaccuauuu

SEQ ID NO: 1240979 - RNA, 19 nt, Homo sapiens
  misc_RNA (1)...(19): siRNA sense strand
cacuggaucugaaguauga

SEQ ID NO: 1240980 - RNA, 19 nt, Homo sapiens
  misc_RNA (1)...(19): siRNA sense strand
ccagaaccaucuacacguu

SEQ ID NO: 1240981 - RNA, 19 nt, Homo sapiens
  misc_RNA (1)...(19): siRNA sense strand
gaaccaaggagcugcuaug

SEQ ID NO: 1240982 - RNA, 19 nt, Homo sapiens
  misc_RNA (1)...(19): siRNA sense strand
gcugcuauguucuaugaug

SEQ ID NO: 1240983 - RNA, 19 nt, Homo sapiens
  misc_RNA (1)...(19): siRNA sense strand
ucuaugaugugccugaaga

SEQ ID NO: 1240984 - RNA, 19 nt, Homo sapiens
  misc_RNA (1)...(19): siRNA sense strand
ugaugugccugaagaaaca

SEQ ID NO: 1240985 - RNA, 19 nt, Homo sapiens
  misc_RNA (1)...(19): siRNA sense strand
ugacgcugcucucccagaa

SEQ ID NO: 1240986 - RNA, 19 nt, Homo sapiens
  misc_RNA (1)...(19): siRNA sense strand
ccgaauaccuggauuaccu

SEQ ID NO: 1240987 - RNA, 19 nt, Homo sapiens
  misc_RNA (1)...(19): siRNA sense strand
gaauaccuggauuaccuuu

SEQ ID NO: 1240988 - RNA, 19 nt, Homo sapiens
  misc_RNA (1)...(19): siRNA sense strand
aaacaagacccuauuucca

SEQ ID NO: 1240989 - RNA, 19 nt, Homo sapiens
  misc_RNA (1)...(19): siRNA sense strand
ugaaguaugagguggcauu

SEQ ID NO: 1240990 - RNA, 19 nt, Homo sapiens
  misc_RNA (1)...(19): siRNA sense strand
cguucagugucccgaaaua

SEQ ID NO: 1240991 - RNA, 19 nt, Homo sapiens
  misc_RNA (1)...(19): siRNA sense strand
ggaccuguacaacaaguuc

SEQ ID NO: 1240992 - RNA, 19 nt, Homo sapiens
  misc_RNA (1)...(19): siRNA sense strand
cggaaacaagacccuauuu

SEQ ID NO: 1240993 - RNA, 19 nt, Homo sapiens
  misc_RNA (1)...(19): siRNA sense strand
aguaugagguggcauucug

SEQ ID NO: 1240994 - RNA, 19 nt, Homo sapiens
  misc_RNA (1)...(19): siRNA sense strand
gaaauacagcaaguucucu

SEQ ID NO: 1240995 - RNA, 19 nt, Homo sapiens
  misc_RNA (1)...(19): siRNA sense strand
cgaaauacagcaaguucuc

SEQ ID NO: 1240996 - RNA, 19 nt, Homo sapiens
  misc_RNA (1)...(19): siRNA sense strand
aaauacagcaaguucucua

SEQ ID NO: 1240997 - RNA, 19 nt, Homo sapiens
  misc_RNA (1)...(19): siRNA sense strand
gcgcgaaguggaagagugu

SEQ ID NO: 1240998 - RNA, 19 nt, Homo sapiens
  misc_RNA (1)...(19): siRNA sense strand
gaaguaugagguggcauuc

SEQ ID NO: 1240999 - RNA, 19 nt, Homo sapiens
  misc_RNA (1)...(19): siRNA sense strand
cacguucagugucccgaaa

SEQ ID NO: 1241000 - RNA, 19 nt, Homo sapiens
  misc_RNA (1)...(19): siRNA sense strand
gacccuauuuccagucacu

SEQ ID NO: 1241001 - RNA, 19 nt, Homo sapiens
  misc_RNA (1)...(19): siRNA sense strand
guucuaugaugugccugaa

SEQ ID NO: 1241002 - RNA, 19 nt, Homo sapiens
  misc_RNA (1)...(19): siRNA sense strand
ggaguccgaauaccuggau

SEQ ID NO: 1241003 - RNA, 19 nt, Homo sapiens
  misc_RNA (1)...(19): siRNA sense strand
ccacuggaucugaaguaug

SEQ ID NO: 1241004 - RNA, 19 nt, Homo sapiens
  misc_RNA (1)...(19): siRNA sense strand
ugagugccaaugccacgua

SEQ ID NO: 1241005 - RNA, 19 nt, Homo sapiens
  misc_RNA (1)...(19): siRNA sense strand
aaggagcugcuauguucua

SEQ ID NO: 1241006 - RNA, 19 nt, Homo sapiens
  misc_RNA (1)...(19): siRNA sense strand
gaaagcaacuuacauacaa

SEQ ID NO: 1241007 - RNA, 19 nt, Homo sapiens
  misc_RNA (1)...(19): siRNA sense strand
gaaaugcuguaucuacuuu

SEQ ID NO: 1241008 - RNA, 19 nt, Homo sapiens
  misc_RNA (1)...(19): siRNA sense strand
gagcaccacugauagaguu

SEQ ID NO: 1241009 - RNA, 19 nt, Homo sapiens
  misc_RNA (1)...(19): siRNA sense strand
gaaacacacuugacauggu

SEQ ID NO: 1241010 - RNA, 19 nt, Homo sapiens
  misc_RNA (1)...(19): siRNA sense strand
ccaaauacauccucuaaaa

SEQ ID NO: 1241011 - RNA, 19 nt, Homo sapiens
  misc_RNA (1)...(19): siRNA sense strand
caacuuacauacaagaaca

SEQ ID NO: 1241012 - RNA, 19 nt, Homo sapiens
  misc_RNA (1)...(19): siRNA sense strand
gaacuucucaauauuggaa

SEQ ID NO: 1241013 - RNA, 19 nt, Homo sapiens
  misc_RNA (1)...(19): siRNA sense strand
guauggagcaccacugaua

SEQ ID NO: 1241014 - RNA, 19 nt, Homo sapiens
  misc_RNA (1)...(19): siRNA sense strand
cuaagaguguucaguagaa

SEQ ID NO: 1241015 - RNA, 19 nt, Homo sapiens
  misc_RNA (1)...(19): siRNA sense strand
cuacguggcuggccuuguu

SEQ ID NO: 1241016 - RNA, 19 nt, Homo sapiens
  misc_RNA (1)...(19): siRNA sense strand
aaacacacuugacaugguu

SEQ ID NO: 1241017 - RNA, 19 nt, Homo sapiens
  misc_RNA (1)...(19): siRNA sense strand
gaaguucauuaucacacaa

SEQ ID NO: 1241018 - RNA, 19 nt, Homo sapiens
  misc_RNA (1)...(19): siRNA sense strand
uauccuaagugucuucauu

SEQ ID NO: 1241019 - RNA, 19 nt, Homo sapiens
  misc_RNA (1)...(19): siRNA sense strand
uggaauagaaagcaacuua

SEQ ID NO: 1241020 - RNA, 19 nt, Homo sapiens
  misc_RNA (1)...(19): siRNA sense strand
ucaagagacuacuguauac

SEQ ID NO: 1241021 - RNA, 19 nt, Homo sapiens
  misc_RNA (1)...(19): siRNA sense strand
gaauagaaagcaacuuaca

SEQ ID NO: 1241022 - RNA, 19 nt, Homo sapiens
  misc_RNA (1)...(19): siRNA sense strand
ucacuacaauuucuagcuu

SEQ ID NO: 1241023 - RNA, 19 nt, Homo sapiens
  misc_RNA (1)...(19): siRNA sense strand
ggauauacuggaauagaaa

SEQ ID NO: 1241024 - RNA, 19 nt, Homo sapiens
  misc_RNA (1)...(19): siRNA sense strand
ccagaucacuacaauuucu

SEQ ID NO: 1241025 - RNA, 19 nt, Homo sapiens
  misc_RNA (1)...(19): siRNA sense strand
ucaauuauccuaagugucu

SEQ ID NO: 1241026 - RNA, 19 nt, Homo sapiens
  misc_RNA (1)...(19): siRNA sense strand
ugcuguaucuacuuucuua

SEQ ID NO: 1241027 - RNA, 19 nt, Homo sapiens
  misc_RNA (1)...(19): siRNA sense strand
uaagaguguucaguagaaa

SEQ ID NO: 1241028 - RNA, 19 nt, Homo sapiens
  misc_RNA (1)...(19): siRNA sense strand
uguaacugcugucaaucua

SEQ ID NO: 1241029 - RNA, 19 nt, Homo sapiens
  misc_RNA (1)...(19): siRNA sense strand
uggauauacuggaauagaa

SEQ ID NO: 1241030 - RNA, 19 nt, Homo sapiens
  misc_RNA (1)...(19): siRNA sense strand
ggaccaaaccucaaagcau

SEQ ID NO: 1241031 - RNA, 19 nt, Homo sapiens
  misc_RNA (1)...(19): siRNA sense strand
uaacugcugucaaucuagu

SEQ ID NO: 1241032 - RNA, 19 nt, Homo sapiens
  misc_RNA (1)...(19): siRNA sense strand
cuaagugucuucauuccau

SEQ ID NO: 1241033 - RNA, 19 nt, Homo sapiens
  misc_RNA (1)...(19): siRNA sense strand
caguagaaauggaguuaca

SEQ ID NO: 1241034 - RNA, 19 nt, Homo sapiens
  misc_RNA (1)...(19): siRNA sense strand
cuccagaucacuacaauuu

SEQ ID NO: 1241035 - RNA, 19 nt, Homo sapiens
  misc_RNA (1)...(19): siRNA sense strand
gcaguuauuuugucuacuu

SEQ ID NO: 1241036 - RNA, 19 nt, Homo sapiens
  misc_RNA (1)...(19): siRNA sense strand
guagugaaaccaaauacau

SEQ ID NO: 1241037 - RNA, 19 nt, Homo sapiens
  misc_RNA (1)...(19): siRNA sense strand
uggcuggccuuguuauuuc

SEQ ID NO: 1241038 - RNA, 19 nt, Homo sapiens
  misc_RNA (1)...(19): siRNA sense strand
gcuaagaguguucaguaga

SEQ ID NO: 1241039 - RNA, 19 nt, Homo sapiens
  misc_RNA (1)...(19): siRNA sense strand
ccucaaagcauggcuaaga

SEQ ID NO: 1241040 - RNA, 19 nt, Homo sapiens
  misc_RNA (1)...(19): siRNA sense strand
gugccuugcuuauguuugu

SEQ ID NO: 1241041 - RNA, 19 nt, Homo sapiens
  misc_RNA (1)...(19): siRNA sense strand
cacacaagguaacuggauu

SEQ ID NO: 1241042 - RNA, 19 nt, Homo sapiens
  misc_RNA (1)...(19): siRNA sense strand
uggcuaagaguguucagua

SEQ ID NO: 1241043 - RNA, 19 nt, Homo sapiens
  misc_RNA (1)...(19): siRNA sense strand
uuucaccacucuggauaua

SEQ ID NO: 1241044 - RNA, 19 nt, Homo sapiens
  misc_RNA (1)...(19): siRNA sense strand
ucuacuuucuuaugucuug

SEQ ID NO: 1241045 - RNA, 19 nt, Homo sapiens
  misc_RNA (1)...(19): siRNA sense strand
gauaucaagagacuacugu

SEQ ID NO: 1241046 - RNA, 19 nt, Homo sapiens
  misc_RNA (1)...(19): siRNA sense strand
gcuuggagcacuuccuauu

SEQ ID NO: 1241047 - RNA, 19 nt, Homo sapiens
  misc_RNA (1)...(19): siRNA sense strand
aaccaaauacauccucuaa

SEQ ID NO: 1241048 - RNA, 19 nt, Homo sapiens
  misc_RNA (1)...(19): siRNA sense strand
guuaggaccaaaccucaaa

SEQ ID NO: 1241049 - RNA, 19 nt, Homo sapiens
  misc_RNA (1)...(19): siRNA sense strand
uuacuacugugccuugcuu

SEQ ID NO: 1241050 - RNA, 19 nt, Homo sapiens
  misc_RNA (1)...(19): siRNA sense strand
aagcauggcuaagaguguu

SEQ ID NO: 1241051 - RNA, 19 nt, Homo sapiens
  misc_RNA (1)...(19): siRNA sense strand
ucaccacucuggauauacu

SEQ ID NO: 1241052 - RNA, 19 nt, Homo sapiens
  misc_RNA (1)...(19): siRNA sense strand
cacuacaauuucuagcuuu

SEQ ID NO: 1241053 - RNA, 19 nt, Homo sapiens
  misc_RNA (1)...(19): siRNA sense strand
agaaguucauuaucacaca

SEQ ID NO: 1241054 - RNA, 19 nt, Homo sapiens
  misc_RNA (1)...(19): siRNA sense strand
agaaagcaacuuacauaca

SEQ ID NO: 1241055 - RNA, 19 nt, Homo sapiens
  misc_RNA (1)...(19): siRNA sense strand
ggaauagaaagcaacuuac

SEQ ID NO: 1241056 - RNA, 19 nt, Homo sapiens
  misc_RNA (1)...(19): siRNA sense strand
guagaaauggaguuacauc

SEQ ID NO: 1241057 - RNA, 19 nt, Homo sapiens
  misc_RNA (1)...(19): siRNA sense strand
acacaagguaacuggauuu

SEQ ID NO: 1241058 - RNA, 19 nt, Homo sapiens
  misc_RNA (1)...(19): siRNA sense strand
caucuguucugguuuugua

SEQ ID NO: 1241059 - RNA, 19 nt, Homo sapiens
  misc_RNA (1)...(19): siRNA sense strand
aucaagagacuacuguaua

SEQ ID NO: 1241060 - RNA, 19 nt, Homo sapiens
  misc_RNA (1)...(19): siRNA sense strand
uaucaagagacuacuguau

SEQ ID NO: 1241061 - RNA, 19 nt, Homo sapiens
  misc_RNA (1)...(19): siRNA sense strand
ggcuaagaguguucaguag

SEQ ID NO: 1241062 - RNA, 19 nt, Homo sapiens
  misc_RNA (1)...(19): siRNA sense strand
guggcuggccuuguuauuu

SEQ ID NO: 1241063 - RNA, 19 nt, Homo sapiens
  misc_RNA (1)...(19): siRNA sense strand
ugacaugguugugcaucug

SEQ ID NO: 1241064 - RNA, 19 nt, Homo sapiens
  misc_RNA (1)...(19): siRNA sense strand
uuacauccauaugggagaa

SEQ ID NO: 1241065 - RNA, 19 nt, Homo sapiens
  misc_RNA (1)...(19): siRNA sense strand
ugaaaugcuguaucuacuu

SEQ ID NO: 1241066 - RNA, 19 nt, Homo sapiens
  misc_RNA (1)...(19): siRNA sense strand
cugucaaucuaguacuaua

SEQ ID NO: 1241067 - RNA, 19 nt, Homo sapiens
  misc_RNA (1)...(19): siRNA sense strand
gugcaucuguucugguuuu

SEQ ID NO: 1241068 - RNA, 19 nt, Homo sapiens
  misc_RNA (1)...(19): siRNA sense strand
guaucuacuuucuuauguc

SEQ ID NO: 1241069 - RNA, 19 nt, Homo sapiens
  misc_RNA (1)...(19): siRNA sense strand
uacugugccuugcuuaugu

SEQ ID NO: 1241070 - RNA, 19 nt, Homo sapiens
  misc_RNA (1)...(19): siRNA sense strand
ugucuuguuucuccuuuca

SEQ ID NO: 1241071 - RNA, 19 nt, Homo sapiens
  misc_RNA (1)...(19): siRNA sense strand
agaauagucuccagaucac

SEQ ID NO: 1241072 - RNA, 19 nt, Homo sapiens
  misc_RNA (1)...(19): siRNA sense strand
uugcuuauguuuguuagga

SEQ ID NO: 1241073 - RNA, 19 nt, Homo sapiens
  misc_RNA (1)...(19): siRNA sense strand
uaugucuuguuucuccuuu

SEQ ID NO: 1241074 - RNA, 19 nt, Homo sapiens
  misc_RNA (1)...(19): siRNA sense strand
auacuggaauagaaagcaa

SEQ ID NO: 1241075 - RNA, 19 nt, Homo sapiens
  misc_RNA (1)...(19): siRNA sense strand
uggaaacacacuugacaug

SEQ ID NO: 1241076 - RNA, 19 nt, Homo sapiens
  misc_RNA (1)...(19): siRNA sense strand
acuacaauuucuagcuuug

SEQ ID NO: 1241077 - RNA, 19 nt, Homo sapiens
  misc_RNA (1)...(19): siRNA sense strand
uguuucuccuuucauguaa

SEQ ID NO: 1241078 - RNA, 19 nt, Homo sapiens
  misc_RNA (1)...(19): siRNA sense strand
acauccauaugggagaaua

SEQ ID NO: 1241079 - RNA, 19 nt, Homo sapiens
  misc_RNA (1)...(19): siRNA sense strand
uucauuaucacacaaggua

SEQ ID NO: 1241080 - RNA, 19 nt, Homo sapiens
  misc_RNA (1)...(19): siRNA sense strand
aaagcaacuuacauacaag

SEQ ID NO: 1241081 - RNA, 19 nt, Homo sapiens
  misc_RNA (1)...(19): siRNA sense strand
gauauacuggaauagaaag

SEQ ID NO: 1241082 - RNA, 19 nt, Homo sapiens
  misc_RNA (1)...(19): siRNA sense strand
ucacacaagguaacuggau

SEQ ID NO: 1241083 - RNA, 19 nt, Homo sapiens
  misc_RNA (1)...(19): siRNA sense strand
cucuggauauacuggaaua

SEQ ID NO: 1241084 - RNA, 19 nt, Homo sapiens
  misc_RNA (1)...(19): siRNA sense strand
auaacgauaucaagagacu

SEQ ID NO: 1241085 - RNA, 19 nt, Homo sapiens
  misc_RNA (1)...(19): siRNA sense strand
ggagcaccacugauagagu

SEQ ID NO: 1241086 - RNA, 19 nt, Homo sapiens
  misc_RNA (1)...(19): siRNA sense strand
gcaacuuacauacaagaac

SEQ ID NO: 1241087 - RNA, 19 nt, Homo sapiens
  misc_RNA (1)...(19): siRNA sense strand
uauuucaccacucuggaua

SEQ ID NO: 1241088 - RNA, 19 nt, Homo sapiens
  misc_RNA (1)...(19): siRNA sense strand
cagaucacuacaauuucua

SEQ ID NO: 1241089 - RNA, 19 nt, Homo sapiens
  misc_RNA (1)...(19): siRNA sense strand
aaaccaaauacauccucua

SEQ ID NO: 1241090 - RNA, 19 nt, Homo sapiens
  misc_RNA (1)...(19): siRNA sense strand
aauauuggaaacacacuug

SEQ ID NO: 1241091 - RNA, 19 nt, Homo sapiens
  misc_RNA (1)...(19): siRNA sense strand
gaaaugcuguaucuacuuu

SEQ ID NO: 1241092 - RNA, 19 nt, Homo sapiens
  misc_RNA (1)...(19): siRNA sense strand
gagcaccacugauagaguu

SEQ ID NO: 1241093 - RNA, 19 nt, Homo sapiens
  misc_RNA (1)...(19): siRNA sense strand
gaaacacacuugacauggu

SEQ ID NO: 1241094 - RNA, 19 nt, Homo sapiens
  misc_RNA (1)...(19): siRNA sense strand
ccaaauacauccucuaaaa

SEQ ID NO: 1241095 - RNA, 19 nt, Homo sapiens
  misc_RNA (1)...(19): siRNA sense strand
gaacuucucaauauuggaa

SEQ ID NO: 1241096 - RNA, 19 nt, Homo sapiens
  misc_RNA (1)...(19): siRNA sense strand
guauggagcaccacugaua

SEQ ID NO: 1241097 - RNA, 19 nt, Homo sapiens
  misc_RNA (1)...(19): siRNA sense strand
cuaagaguguucaguagaa

SEQ ID NO: 1241098 - RNA, 19 nt, Homo sapiens
  misc_RNA (1)...(19): siRNA sense strand
aaacacacuugacaugguu

SEQ ID NO: 1241099 - RNA, 19 nt, Homo sapiens
  misc_RNA (1)...(19): siRNA sense strand
gaaguucauuaucacacaa

SEQ ID NO: 1241100 - RNA, 19 nt, Homo sapiens
  misc_RNA (1)...(19): siRNA sense strand
uauccuaagugucuucauu

SEQ ID NO: 1241101 - RNA, 19 nt, Homo sapiens
  misc_RNA (1)...(19): siRNA sense strand
ucaagagacuacuguauac

SEQ ID NO: 1241102 - RNA, 19 nt, Homo sapiens
  misc_RNA (1)...(19): siRNA sense strand
ucacuacaauuucuagcuu

SEQ ID NO: 1241103 - RNA, 19 nt, Homo sapiens
  misc_RNA (1)...(19): siRNA sense strand
ccagaucacuacaauuucu

SEQ ID NO: 1241104 - RNA, 19 nt, Homo sapiens
  misc_RNA (1)...(19): siRNA sense strand
ucaauuauccuaagugucu

SEQ ID NO: 1241105 - RNA, 19 nt, Homo sapiens
  misc_RNA (1)...(19): siRNA sense strand
ugcuguaucuacuuucuua

SEQ ID NO: 1241106 - RNA, 19 nt, Homo sapiens
  misc_RNA (1)...(19): siRNA sense strand
uaagaguguucaguagaaa

SEQ ID NO: 1241107 - RNA, 19 nt, Homo sapiens
  misc_RNA (1)...(19): siRNA sense strand
uguaacugcugucaaucua

SEQ ID NO: 1241108 - RNA, 19 nt, Homo sapiens
  misc_RNA (1)...(19): siRNA sense strand
ggaccaaaccucaaagcau

SEQ ID NO: 1241109 - RNA, 19 nt, Homo sapiens
  misc_RNA (1)...(19): siRNA sense strand
uaacugcugucaaucuagu

SEQ ID NO: 1241110 - RNA, 19 nt, Homo sapiens
  misc_RNA (1)...(19): siRNA sense strand
cuaagugucuucauuccau

SEQ ID NO: 1241111 - RNA, 19 nt, Homo sapiens
  misc_RNA (1)...(19): siRNA sense strand
caguagaaauggaguuaca

SEQ ID NO: 1241112 - RNA, 19 nt, Homo sapiens
  misc_RNA (1)...(19): siRNA sense strand
cuccagaucacuacaauuu

SEQ ID NO: 1241113 - RNA, 19 nt, Homo sapiens
  misc_RNA (1)...(19): siRNA sense strand
gcaguuauuuugucuacuu

SEQ ID NO: 1241114 - RNA, 19 nt, Homo sapiens
  misc_RNA (1)...(19): siRNA sense strand
guagugaaaccaaauacau

SEQ ID NO: 1241115 - RNA, 19 nt, Homo sapiens
  misc_RNA (1)...(19): siRNA sense strand
gcuaagaguguucaguaga

SEQ ID NO: 1241116 - RNA, 19 nt, Homo sapiens
  misc_RNA (1)...(19): siRNA sense strand
ccucaaagcauggcuaaga

SEQ ID NO: 1241117 - RNA, 19 nt, Homo sapiens
  misc_RNA (1)...(19): siRNA sense strand
gugccuugcuuauguuugu

SEQ ID NO: 1241118 - RNA, 19 nt, Homo sapiens
  misc_RNA (1)...(19): siRNA sense strand
cacacaagguaacuggauu

SEQ ID NO: 1241119 - RNA, 19 nt, Homo sapiens
  misc_RNA (1)...(19): siRNA sense strand
uggcuaagaguguucagua

SEQ ID NO: 1241120 - RNA, 19 nt, Homo sapiens
  misc_RNA (1)...(19): siRNA sense strand
ucuacuuucuuaugucuug

SEQ ID NO: 1241121 - RNA, 19 nt, Homo sapiens
  misc_RNA (1)...(19): siRNA sense strand
gcuuggagcacuuccuauu

SEQ ID NO: 1241122 - RNA, 19 nt, Homo sapiens
  misc_RNA (1)...(19): siRNA sense strand
gauaucaagagacuacugu

SEQ ID NO: 1241123 - RNA, 19 nt, Homo sapiens
  misc_RNA (1)...(19): siRNA sense strand
aaccaaauacauccucuaa

SEQ ID NO: 1241124 - RNA, 19 nt, Homo sapiens
  misc_RNA (1)...(19): siRNA sense strand
guuaggaccaaaccucaaa

SEQ ID NO: 1241125 - RNA, 19 nt, Homo sapiens
  misc_RNA (1)...(19): siRNA sense strand
uuacuacugugccuugcuu

SEQ ID NO: 1241126 - RNA, 19 nt, Homo sapiens
  misc_RNA (1)...(19): siRNA sense strand
aagcauggcuaagaguguu

SEQ ID NO: 1241127 - RNA, 19 nt, Homo sapiens
  misc_RNA (1)...(19): siRNA sense strand
cacuacaauuucuagcuuu

SEQ ID NO: 1241128 - RNA, 19 nt, Homo sapiens
  misc_RNA (1)...(19): siRNA sense strand
agaaguucauuaucacaca

SEQ ID NO: 1241129 - RNA, 19 nt, Homo sapiens
  misc_RNA (1)...(19): siRNA sense strand
guagaaauggaguuacauc

SEQ ID NO: 1241130 - RNA, 19 nt, Homo sapiens
  misc_RNA (1)...(19): siRNA sense strand
acacaagguaacuggauuu

SEQ ID NO: 1241131 - RNA, 19 nt, Homo sapiens
  misc_RNA (1)...(19): siRNA sense strand
uaucaagagacuacuguau

SEQ ID NO: 1241132 - RNA, 19 nt, Homo sapiens
  misc_RNA (1)...(19): siRNA sense strand
aucaagagacuacuguaua

SEQ ID NO: 1241133 - RNA, 19 nt, Homo sapiens
  misc_RNA (1)...(19): siRNA sense strand
caucuguucugguuuugua

SEQ ID NO: 1241134 - RNA, 19 nt, Homo sapiens
  misc_RNA (1)...(19): siRNA sense strand
ggcuaagaguguucaguag

SEQ ID NO: 1241135 - RNA, 19 nt, Homo sapiens
  misc_RNA (1)...(19): siRNA sense strand
ugacaugguugugcaucug

SEQ ID NO: 1241136 - RNA, 19 nt, Homo sapiens
  misc_RNA (1)...(19): siRNA sense strand
uuacauccauaugggagaa

SEQ ID NO: 1241137 - RNA, 19 nt, Homo sapiens
  misc_RNA (1)...(19): siRNA sense strand
ugaaaugcuguaucuacuu

SEQ ID NO: 1241138 - RNA, 19 nt, Homo sapiens
  misc_RNA (1)...(19): siRNA sense strand
cugucaaucuaguacuaua

SEQ ID NO: 1241139 - RNA, 19 nt, Homo sapiens
  misc_RNA (1)...(19): siRNA sense strand
gugcaucuguucugguuuu

SEQ ID NO: 1241140 - RNA, 19 nt, Homo sapiens
  misc_RNA (1)...(19): siRNA sense strand
guaucuacuuucuuauguc

SEQ ID NO: 1241141 - RNA, 19 nt, Homo sapiens
  misc_RNA (1)...(19): siRNA sense strand
uacugugccuugcuuaugu

SEQ ID NO: 1241142 - RNA, 19 nt, Homo sapiens
  misc_RNA (1)...(19): siRNA sense strand
ugucuuguuucuccuuuca

SEQ ID NO: 1241143 - RNA, 19 nt, Homo sapiens
  misc_RNA (1)...(19): siRNA sense strand
agaauagucuccagaucac

SEQ ID NO: 1241144 - RNA, 19 nt, Homo sapiens
  misc_RNA (1)...(19): siRNA sense strand
uugcuuauguuuguuagga

SEQ ID NO: 1241145 - RNA, 19 nt, Homo sapiens
  misc_RNA (1)...(19): siRNA sense strand
uaugucuuguuucuccuuu

SEQ ID NO: 1241146 - RNA, 19 nt, Homo sapiens
  misc_RNA (1)...(19): siRNA sense strand
acuacaauuucuagcuuug

SEQ ID NO: 1241147 - RNA, 19 nt, Homo sapiens
  misc_RNA (1)...(19): siRNA sense strand
uguuucuccuuucauguaa

SEQ ID NO: 1241148 - RNA, 19 nt, Homo sapiens
  misc_RNA (1)...(19): siRNA sense strand
uggaaacacacuugacaug

SEQ ID NO: 1241149 - RNA, 19 nt, Homo sapiens
  misc_RNA (1)...(19): siRNA sense strand
acauccauaugggagaaua

SEQ ID NO: 1241150 - RNA, 19 nt, Homo sapiens
  misc_RNA (1)...(19): siRNA sense strand
uucauuaucacacaaggua

SEQ ID NO: 1241151 - RNA, 19 nt, Homo sapiens
  misc_RNA (1)...(19): siRNA sense strand
ucacacaagguaacuggau

SEQ ID NO: 1241152 - RNA, 19 nt, Homo sapiens
  misc_RNA (1)...(19): siRNA sense strand
auaacgauaucaagagacu

SEQ ID NO: 1241153 - RNA, 19 nt, Homo sapiens
  misc_RNA (1)...(19): siRNA sense strand
ggagcaccacugauagagu

SEQ ID NO: 1241154 - RNA, 19 nt, Homo sapiens
  misc_RNA (1)...(19): siRNA sense strand
cagaucacuacaauuucua

SEQ ID NO: 1241155 - RNA, 19 nt, Homo sapiens
  misc_RNA (1)...(19): siRNA sense strand
aaaccaaauacauccucua

SEQ ID NO: 1241156 - RNA, 19 nt, Homo sapiens
  misc_RNA (1)...(19): siRNA sense strand
aauauuggaaacacacuug

SEQ ID NO: 1241157 - RNA, 19 nt, Homo sapiens
  misc_RNA (1)...(19): siRNA sense strand
gaucaaagcugugguguuu

SEQ ID NO: 1241158 - RNA, 19 nt, Homo sapiens
  misc_RNA (1)...(19): siRNA sense strand
ucagagaucuucaggcaaa

SEQ ID NO: 1241159 - RNA, 19 nt, Homo sapiens
  misc_RNA (1)...(19): siRNA sense strand
gaggaggucucuauucaug

SEQ ID NO: 1241160 - RNA, 19 nt, Homo sapiens
  misc_RNA (1)...(19): siRNA sense strand
ccagguaccuuugccguua

SEQ ID NO: 1241161 - RNA, 19 nt, Homo sapiens
  misc_RNA (1)...(19): siRNA sense strand
gcacgucuuucccagcaua

SEQ ID NO: 1241162 - RNA, 19 nt, Homo sapiens
  misc_RNA (1)...(19): siRNA sense strand
ggaggucucuauucaugaa

SEQ ID NO: 1241163 - RNA, 19 nt, Homo sapiens
  misc_RNA (1)...(19): siRNA sense strand
gcaccagcguguccuauau

SEQ ID NO: 1241164 - RNA, 19 nt, Homo sapiens
  misc_RNA (1)...(19): siRNA sense strand
gcucaaugcucgcuacaug

SEQ ID NO: 1241165 - RNA, 19 nt, Homo sapiens
  misc_RNA (1)...(19): siRNA sense strand
ggagagaaacuucgcaaug

SEQ ID NO: 1241166 - RNA, 19 nt, Homo sapiens
  misc_RNA (1)...(19): siRNA sense strand
ugauuucggugcucaagua

SEQ ID NO: 1241167 - RNA, 19 nt, Homo sapiens
  misc_RNA (1)...(19): siRNA sense strand
agagcaagcuggacuguug

SEQ ID NO: 1241168 - RNA, 19 nt, Homo sapiens
  misc_RNA (1)...(19): siRNA sense strand
gagagaaacuucgcaaugc

SEQ ID NO: 1241169 - RNA, 19 nt, Homo sapiens
  misc_RNA (1)...(19): siRNA sense strand
ggauggagcuggaggaaaa

SEQ ID NO: 1241170 - RNA, 19 nt, Homo sapiens
  misc_RNA (1)...(19): siRNA sense strand
cauggacacugacauuuau

SEQ ID NO: 1241171 - RNA, 19 nt, Homo sapiens
  misc_RNA (1)...(19): siRNA sense strand
ccaaguacaagauuaaaga

SEQ ID NO: 1241172 - RNA, 19 nt, Homo sapiens
  misc_RNA (1)...(19): siRNA sense strand
augcugagcucuccuugua

SEQ ID NO: 1241173 - RNA, 19 nt, Homo sapiens
  misc_RNA (1)...(19): siRNA sense strand
uauaauagggcccaggaua

SEQ ID NO: 1241174 - RNA, 19 nt, Homo sapiens
  misc_RNA (1)...(19): siRNA sense strand
gcuacgacguggauucgaa

SEQ ID NO: 1241175 - RNA, 19 nt, Homo sapiens
  misc_RNA (1)...(19): siRNA sense strand
cagcaggacuuugagaaug

SEQ ID NO: 1241176 - RNA, 19 nt, Homo sapiens
  misc_RNA (1)...(19): siRNA sense strand
gaaugaggcccacacaaca

SEQ ID NO: 1241177 - RNA, 19 nt, Homo sapiens
  misc_RNA (1)...(19): siRNA sense strand
ucauggacacugacauuua

SEQ ID NO: 1241178 - RNA, 19 nt, Homo sapiens
  misc_RNA (1)...(19): siRNA sense strand
caagaacucccucaagcaa

SEQ ID NO: 1241179 - RNA, 19 nt, Homo sapiens
  misc_RNA (1)...(19): siRNA sense strand
caaccuuccugcagucaau

SEQ ID NO: 1241180 - RNA, 19 nt, Homo sapiens
  misc_RNA (1)...(19): siRNA sense strand
gcaaugccuucagauguuc

SEQ ID NO: 1241181 - RNA, 19 nt, Homo sapiens
  misc_RNA (1)...(19): siRNA sense strand
caggagaagcggagaauga

SEQ ID NO: 1241182 - RNA, 19 nt, Homo sapiens
  misc_RNA (1)...(19): siRNA sense strand
acgaugaguuugagaagaa

SEQ ID NO: 1241183 - RNA, 19 nt, Homo sapiens
  misc_RNA (1)...(19): siRNA sense strand
guacaagauuaaagacuac

SEQ ID NO: 1241184 - RNA, 19 nt, Homo sapiens
  misc_RNA (1)...(19): siRNA sense strand
ucaacaaugccaccaauga

SEQ ID NO: 1241185 - RNA, 19 nt, Homo sapiens
  misc_RNA (1)...(19): siRNA sense strand
cgcaaugccuucagauguu

SEQ ID NO: 1241186 - RNA, 19 nt, Homo sapiens
  misc_RNA (1)...(19): siRNA sense strand
ggacuuagagcaggagaug

SEQ ID NO: 1241187 - RNA, 19 nt, Homo sapiens
  misc_RNA (1)...(19): siRNA sense strand
caacaucgccucgcucauc

SEQ ID NO: 1241188 - RNA, 19 nt, Homo sapiens
  misc_RNA (1)...(19): siRNA sense strand
ccacaaggcauggcauuug

SEQ ID NO: 1241189 - RNA, 19 nt, Homo sapiens
  misc_RNA (1)...(19): siRNA sense strand
cagacucaguuucgaaaug

SEQ ID NO: 1241190 - RNA, 19 nt, Homo sapiens
  misc_RNA (1)...(19): siRNA sense strand
gaagaaggaccggacauac

SEQ ID NO: 1241191 - RNA, 19 nt, Homo sapiens
  misc_RNA (1)...(19): siRNA sense strand
ccucuucgacgaugaguuu

SEQ ID NO: 1241192 - RNA, 19 nt, Homo sapiens
  misc_RNA (1)...(19): siRNA sense strand
gacgaugaguuugagaaga

SEQ ID NO: 1241193 - RNA, 19 nt, Homo sapiens
  misc_RNA (1)...(19): siRNA sense strand
gauggugccagguaccuuu

SEQ ID NO: 1241194 - RNA, 19 nt, Homo sapiens
  misc_RNA (1)...(19): siRNA sense strand
ggaugggagucuagaaugc

SEQ ID NO: 1241195 - RNA, 19 nt, Homo sapiens
  misc_RNA (1)...(19): siRNA sense strand
gcagaucgugggagaaauc

SEQ ID NO: 1241196 - RNA, 19 nt, Homo sapiens
  misc_RNA (1)...(19): siRNA sense strand
caucgucuuuaccuucauu

SEQ ID NO: 1241197 - RNA, 19 nt, Homo sapiens
  misc_RNA (1)...(19): siRNA sense strand
gcagcaggacuuugagaau

SEQ ID NO: 1241198 - RNA, 19 nt, Homo sapiens
  misc_RNA (1)...(19): siRNA sense strand
gaaauuccaggucuucaac

SEQ ID NO: 1241199 - RNA, 19 nt, Homo sapiens
  misc_RNA (1)...(19): siRNA sense strand
gauguucgggagcauguuu

SEQ ID NO: 1241200 - RNA, 19 nt, Homo sapiens
  misc_RNA (1)...(19): siRNA sense strand
gaggaugggagucuagaau

SEQ ID NO: 1241201 - RNA, 19 nt, Homo sapiens
  misc_RNA (1)...(19): siRNA sense strand
agaagaaggaccggacaua

SEQ ID NO: 1241202 - RNA, 19 nt, Homo sapiens
  misc_RNA (1)...(19): siRNA sense strand
ugaaucccaagaccuauaa

SEQ ID NO: 1241203 - RNA, 19 nt, Homo sapiens
  misc_RNA (1)...(19): siRNA sense strand
gaucgugggagaaauccaa

SEQ ID NO: 1241204 - RNA, 19 nt, Homo sapiens
  misc_RNA (1)...(19): siRNA sense strand
gugaaucccaagaccuaua

SEQ ID NO: 1241205 - RNA, 19 nt, Homo sapiens
  misc_RNA (1)...(19): siRNA sense strand
ucagcauccugguggguaa

SEQ ID NO: 1241206 - RNA, 19 nt, Homo sapiens
  misc_RNA (1)...(19): siRNA sense strand
uucuuuggcuccuucuuua

SEQ ID NO: 1241207 - RNA, 19 nt, Homo sapiens
  misc_RNA (1)...(19): siRNA sense strand
gcucucggcugcagcaacu

SEQ ID NO: 1241208 - RNA, 19 nt, Homo sapiens
  misc_RNA (1)...(19): siRNA sense strand
caacaaugccaccaaugag

SEQ ID NO: 1241209 - RNA, 19 nt, Homo sapiens
  misc_RNA (1)...(19): siRNA sense strand
ccugaucgcugucaaucuc

SEQ ID NO: 1241210 - RNA, 19 nt, Homo sapiens
  misc_RNA (1)...(19): siRNA sense strand
gucuuuaccuucauugaca

SEQ ID NO: 1241211 - RNA, 19 nt, Homo sapiens
  misc_RNA (1)...(19): siRNA sense strand
gagaaugaggcccacacaa

SEQ ID NO: 1241212 - RNA, 19 nt, Homo sapiens
  misc_RNA (1)...(19): siRNA sense strand
ccuacuaccuguggaggaa

SEQ ID NO: 1241213 - RNA, 19 nt, Homo sapiens
  misc_RNA (1)...(19): siRNA sense strand
gucauuugcugugcgcuuu

SEQ ID NO: 1241214 - RNA, 19 nt, Homo sapiens
  misc_RNA (1)...(19): siRNA sense strand
cauacucccuuacccucuu

SEQ ID NO: 1241215 - RNA, 19 nt, Homo sapiens
  misc_RNA (1)...(19): siRNA sense strand
uuccaggucuucaacaaug

SEQ ID NO: 1241216 - RNA, 19 nt, Homo sapiens
  misc_RNA (1)...(19): siRNA sense strand
agaaugcaagcacgucuuu

SEQ ID NO: 1241217 - RNA, 19 nt, Homo sapiens
  misc_RNA (1)...(19): siRNA sense strand
gcaucuggguagugagcuu

SEQ ID NO: 1241218 - RNA, 19 nt, Homo sapiens
  misc_RNA (1)...(19): siRNA sense strand
aagcuggacuguugcaucu

SEQ ID NO: 1241219 - RNA, 19 nt, Homo sapiens
  misc_RNA (1)...(19): siRNA sense strand
gaagagcaagcuggacugu

SEQ ID NO: 1241220 - RNA, 19 nt, Homo sapiens
  misc_RNA (1)...(19): siRNA sense strand
cgaaauuccaggucuucaa

SEQ ID NO: 1241221 - RNA, 19 nt, Homo sapiens
  misc_RNA (1)...(19): siRNA sense strand
uuaccuucauugacauuug

SEQ ID NO: 1241222 - RNA, 19 nt, Homo sapiens
  misc_RNA (1)...(19): siRNA sense strand
aaguacaucuucggacuga

SEQ ID NO: 1241223 - RNA, 19 nt, Homo sapiens
  misc_RNA (1)...(19): siRNA sense strand
gccugcagauccugauuuc

SEQ ID NO: 1241224 - RNA, 19 nt, Homo sapiens
  misc_RNA (1)...(19): siRNA sense strand
acaugacgcaguccucuuu

SEQ ID NO: 1241225 - RNA, 19 nt, Homo sapiens
  misc_RNA (1)...(19): siRNA sense strand
gcccagguguacaaugaca

SEQ ID NO: 1241226 - RNA, 19 nt, Homo sapiens
  misc_RNA (1)...(19): siRNA sense strand
ggcaccagcguguccuaua

SEQ ID NO: 1241227 - RNA, 19 nt, Homo sapiens
  misc_RNA (1)...(19): siRNA sense strand
agacucaguuucgaaaugg

SEQ ID NO: 1241228 - RNA, 19 nt, Homo sapiens
  misc_RNA (1)...(19): siRNA sense strand
cuucaacaaugccaccaau

SEQ ID NO: 1241229 - RNA, 19 nt, Homo sapiens
  misc_RNA (1)...(19): siRNA sense strand
auaauagggcccaggauau

SEQ ID NO: 1241230 - RNA, 19 nt, Homo sapiens
  misc_RNA (1)...(19): siRNA sense strand
acaguggaaggacaugaua

SEQ ID NO: 1241231 - RNA, 19 nt, Homo sapiens
  misc_RNA (1)...(19): siRNA sense strand
ccucuacuccuccuucuuc

SEQ ID NO: 1241232 - RNA, 19 nt, Homo sapiens
  misc_RNA (1)...(19): siRNA sense strand
gagauguucgggagcaugu

SEQ ID NO: 1241233 - RNA, 19 nt, Homo sapiens
  misc_RNA (1)...(19): siRNA sense strand
ucgcagcuacugggacuua

SEQ ID NO: 1241234 - RNA, 19 nt, Homo sapiens
  misc_RNA (1)...(19): siRNA sense strand
cgacucagaggaggacauu

SEQ ID NO: 1241235 - RNA, 19 nt, Homo sapiens
  misc_RNA (1)...(19): siRNA sense strand
augcccagguguacaauga

SEQ ID NO: 1241236 - RNA, 19 nt, Homo sapiens
  misc_RNA (1)...(19): siRNA sense strand
ggagaaugaggcccacaca

SEQ ID NO: 1241237 - RNA, 19 nt, Homo sapiens
  misc_RNA (1)...(19): siRNA sense strand
aaucccaagaccuauaaua

SEQ ID NO: 1241238 - RNA, 19 nt, Homo sapiens
  misc_RNA (1)...(19): siRNA sense strand
ucaccgccaucauccagau

SEQ ID NO: 1241239 - RNA, 19 nt, Homo sapiens
  misc_RNA (1)...(19): siRNA sense strand
uaauagggcccaggauauc

SEQ ID NO: 1241240 - RNA, 19 nt, Homo sapiens
  misc_RNA (1)...(19): siRNA sense strand
caagauuaaagacuacauc

SEQ ID NO: 1241241 - RNA, 19 nt, Homo sapiens
  misc_RNA (1)...(19): siRNA sense strand
cagguaccuuugccguuau

SEQ ID NO: 1241242 - RNA, 19 nt, Homo sapiens
  misc_RNA (1)...(19): siRNA sense strand
ucgcaaugccuucagaugu

SEQ ID NO: 1241243 - RNA, 19 nt, Homo sapiens
  misc_RNA (1)...(19): siRNA sense strand
agaacucccucaagcaacu

SEQ ID NO: 1241244 - RNA, 19 nt, Homo sapiens
  misc_RNA (1)...(19): siRNA sense strand
uguauccucucccuaaguc

SEQ ID NO: 1241245 - RNA, 19 nt, Homo sapiens
  misc_RNA (1)...(19): siRNA sense strand
ggccugcagauccugauuu

SEQ ID NO: 1241246 - RNA, 19 nt, Homo sapiens
  misc_RNA (1)...(19): siRNA sense strand
caggguccaucgucuuuac

SEQ ID NO: 1241247 - RNA, 19 nt, Homo sapiens
  misc_RNA (1)...(19): siRNA sense strand
gcagcuacugggacuuaga

SEQ ID NO: 1241248 - RNA, 19 nt, Homo sapiens
  misc_RNA (1)...(19): siRNA sense strand
ucucuacuuugccaacuca

SEQ ID NO: 1241249 - RNA, 19 nt, Homo sapiens
  misc_RNA (1)...(19): siRNA sense strand
cacaaggcauggcauuugc

SEQ ID NO: 1241250 - RNA, 19 nt, Homo sapiens
  misc_RNA (1)...(19): siRNA sense strand
ucgcucaucuucgcucuca

SEQ ID NO: 1241251 - RNA, 19 nt, Homo sapiens
  misc_RNA (1)...(19): siRNA sense strand
gguccaucgucuuuaccuu

SEQ ID NO: 1241252 - RNA, 19 nt, Homo sapiens
  misc_RNA (1)...(19): siRNA sense strand
ccugguggguaacaucugu

SEQ ID NO: 1241253 - RNA, 19 nt, Homo sapiens
  misc_RNA (1)...(19): siRNA sense strand
agaaugaggcccacacaac

SEQ ID NO: 1241254 - RNA, 19 nt, Homo sapiens
  misc_RNA (1)...(19): siRNA sense strand
ucaagaacucccucaagca

SEQ ID NO: 1241255 - RNA, 19 nt, Homo sapiens
  misc_RNA (1)...(19): siRNA sense strand
gcucaucuucgcucucauc

SEQ ID NO: 1241256 - RNA, 19 nt, Homo sapiens
  misc_RNA (1)...(19): siRNA sense strand
gagaagaaggaccggacau

SEQ ID NO: 1241257 - RNA, 19 nt, Homo sapiens
  misc_RNA (1)...(19): siRNA sense strand
gaucaaagcugugguguuu

SEQ ID NO: 1241258 - RNA, 19 nt, Homo sapiens
  misc_RNA (1)...(19): siRNA sense strand
ucagagaucuucaggcaaa

SEQ ID NO: 1241259 - RNA, 19 nt, Homo sapiens
  misc_RNA (1)...(19): siRNA sense strand
gaggaggucucuauucaug

SEQ ID NO: 1241260 - RNA, 19 nt, Homo sapiens
  misc_RNA (1)...(19): siRNA sense strand
ccagguaccuuugccguua

SEQ ID NO: 1241261 - RNA, 19 nt, Homo sapiens
  misc_RNA (1)...(19): siRNA sense strand
gcacgucuuucccagcaua

SEQ ID NO: 1241262 - RNA, 19 nt, Homo sapiens
  misc_RNA (1)...(19): siRNA sense strand
ggaggucucuauucaugaa

SEQ ID NO: 1241263 - RNA, 19 nt, Homo sapiens
  misc_RNA (1)...(19): siRNA sense strand
gcaccagcguguccuauau

SEQ ID NO: 1241264 - RNA, 19 nt, Homo sapiens
  misc_RNA (1)...(19): siRNA sense strand
gcucaaugcucgcuacaug

SEQ ID NO: 1241265 - RNA, 19 nt, Homo sapiens
  misc_RNA (1)...(19): siRNA sense strand
ggagagaaacuucgcaaug

SEQ ID NO: 1241266 - RNA, 19 nt, Homo sapiens
  misc_RNA (1)...(19): siRNA sense strand
ugauuucggugcucaagua

SEQ ID NO: 1241267 - RNA, 19 nt, Homo sapiens
  misc_RNA (1)...(19): siRNA sense strand
agagcaagcuggacuguug

SEQ ID NO: 1241268 - RNA, 19 nt, Homo sapiens
  misc_RNA (1)...(19): siRNA sense strand
gagagaaacuucgcaaugc

SEQ ID NO: 1241269 - RNA, 19 nt, Homo sapiens
  misc_RNA (1)...(19): siRNA sense strand
ggauggagcuggaggaaaa

SEQ ID NO: 1241270 - RNA, 19 nt, Homo sapiens
  misc_RNA (1)...(19): siRNA sense strand
cauggacacugacauuuau

SEQ ID NO: 1241271 - RNA, 19 nt, Homo sapiens
  misc_RNA (1)...(19): siRNA sense strand
ccaaguacaagauuaaaga

SEQ ID NO: 1241272 - RNA, 19 nt, Homo sapiens
  misc_RNA (1)...(19): siRNA sense strand
caccuugacuuccagcuuu

SEQ ID NO: 1241273 - RNA, 19 nt, Homo sapiens
  misc_RNA (1)...(19): siRNA sense strand
augcugagcucuccuugua

SEQ ID NO: 1241274 - RNA, 19 nt, Homo sapiens
  misc_RNA (1)...(19): siRNA sense strand
uauaauagggcccaggaua

SEQ ID NO: 1241275 - RNA, 19 nt, Homo sapiens
  misc_RNA (1)...(19): siRNA sense strand
gcuacgacguggauucgaa

SEQ ID NO: 1241276 - RNA, 19 nt, Homo sapiens
  misc_RNA (1)...(19): siRNA sense strand
cagcaggacuuugagaaug

SEQ ID NO: 1241277 - RNA, 19 nt, Homo sapiens
  misc_RNA (1)...(19): siRNA sense strand
gaaugaggcccacacaaca

SEQ ID NO: 1241278 - RNA, 19 nt, Homo sapiens
  misc_RNA (1)...(19): siRNA sense strand
ucauggacacugacauuua

SEQ ID NO: 1241279 - RNA, 19 nt, Homo sapiens
  misc_RNA (1)...(19): siRNA sense strand
caagaacucccucaagcaa

SEQ ID NO: 1241280 - RNA, 19 nt, Homo sapiens
  misc_RNA (1)...(19): siRNA sense strand
caaccuuccugcagucaau

SEQ ID NO: 1241281 - RNA, 19 nt, Homo sapiens
  misc_RNA (1)...(19): siRNA sense strand
gcaaugccuucagauguuc

SEQ ID NO: 1241282 - RNA, 19 nt, Homo sapiens
  misc_RNA (1)...(19): siRNA sense strand
caggagaagcggagaauga

SEQ ID NO: 1241283 - RNA, 19 nt, Homo sapiens
  misc_RNA (1)...(19): siRNA sense strand
acgaugaguuugagaagaa

SEQ ID NO: 1241284 - RNA, 19 nt, Homo sapiens
  misc_RNA (1)...(19): siRNA sense strand
guacaagauuaaagacuac

SEQ ID NO: 1241285 - RNA, 19 nt, Homo sapiens
  misc_RNA (1)...(19): siRNA sense strand
ucaacaaugccaccaauga

SEQ ID NO: 1241286 - RNA, 19 nt, Homo sapiens
  misc_RNA (1)...(19): siRNA sense strand
gugcuggccugcuguacaa

SEQ ID NO: 1241287 - RNA, 19 nt, Homo sapiens
  misc_RNA (1)...(19): siRNA sense strand
cgcaaugccuucagauguu

SEQ ID NO: 1241288 - RNA, 19 nt, Homo sapiens
  misc_RNA (1)...(19): siRNA sense strand
ggacuuagagcaggagaug

SEQ ID NO: 1241289 - RNA, 19 nt, Homo sapiens
  misc_RNA (1)...(19): siRNA sense strand
caacaucgccucgcucauc

SEQ ID NO: 1241290 - RNA, 19 nt, Homo sapiens
  misc_RNA (1)...(19): siRNA sense strand
ccacaaggcauggcauuug

SEQ ID NO: 1241291 - RNA, 19 nt, Homo sapiens
  misc_RNA (1)...(19): siRNA sense strand
cagacucaguuucgaaaug

SEQ ID NO: 1241292 - RNA, 19 nt, Homo sapiens
  misc_RNA (1)...(19): siRNA sense strand
gaaggacaaguacaacugu

SEQ ID NO: 1241293 - RNA, 19 nt, Homo sapiens
  misc_RNA (1)...(19): siRNA sense strand
gaagaaggaccggacauac

SEQ ID NO: 1241294 - RNA, 19 nt, Homo sapiens
  misc_RNA (1)...(19): siRNA sense strand
gacgaugaguuugagaaga

SEQ ID NO: 1241295 - RNA, 19 nt, Homo sapiens
  misc_RNA (1)...(19): siRNA sense strand
ccucuucgacgaugaguuu

SEQ ID NO: 1241296 - RNA, 19 nt, Homo sapiens
  misc_RNA (1)...(19): siRNA sense strand
gauggugccagguaccuuu

SEQ ID NO: 1241297 - RNA, 19 nt, Homo sapiens
  misc_RNA (1)...(19): siRNA sense strand
ggaugggagucuagaaugc

SEQ ID NO: 1241298 - RNA, 19 nt, Homo sapiens
  misc_RNA (1)...(19): siRNA sense strand
gcagaucgugggagaaauc

SEQ ID NO: 1241299 - RNA, 19 nt, Homo sapiens
  misc_RNA (1)...(19): siRNA sense strand
caucgucuuuaccuucauu

SEQ ID NO: 1241300 - RNA, 19 nt, Homo sapiens
  misc_RNA (1)...(19): siRNA sense strand
gcagcaggacuuugagaau

SEQ ID NO: 1241301 - RNA, 19 nt, Homo sapiens
  misc_RNA (1)...(19): siRNA sense strand
gaaauuccaggucuucaac

SEQ ID NO: 1241302 - RNA, 19 nt, Homo sapiens
  misc_RNA (1)...(19): siRNA sense strand
gauguucgggagcauguuu

SEQ ID NO: 1241303 - RNA, 19 nt, Homo sapiens
  misc_RNA (1)...(19): siRNA sense strand
gaggaugggagucuagaau

SEQ ID NO: 1241304 - RNA, 19 nt, Homo sapiens
  misc_RNA (1)...(19): siRNA sense strand
agaagaaggaccggacaua

SEQ ID NO: 1241305 - RNA, 19 nt, Homo sapiens
  misc_RNA (1)...(19): siRNA sense strand
ugaaucccaagaccuauaa

SEQ ID NO: 1241306 - RNA, 19 nt, Homo sapiens
  misc_RNA (1)...(19): siRNA sense strand
gaucgugggagaaauccaa

SEQ ID NO: 1241307 - RNA, 19 nt, Homo sapiens
  misc_RNA (1)...(19): siRNA sense strand
gugaaucccaagaccuaua

SEQ ID NO: 1241308 - RNA, 19 nt, Homo sapiens
  misc_RNA (1)...(19): siRNA sense strand
ucagcauccugguggguaa

SEQ ID NO: 1241309 - RNA, 19 nt, Homo sapiens
  misc_RNA (1)...(19): siRNA sense strand
uucuuuggcuccuucuuua

SEQ ID NO: 1241310 - RNA, 19 nt, Homo sapiens
  misc_RNA (1)...(19): siRNA sense strand
gcucucggcugcagcaacu

SEQ ID NO: 1241311 - RNA, 19 nt, Homo sapiens
  misc_RNA (1)...(19): siRNA sense strand
caacaaugccaccaaugag

SEQ ID NO: 1241312 - RNA, 19 nt, Homo sapiens
  misc_RNA (1)...(19): siRNA sense strand
ccugaucgcugucaaucuc

SEQ ID NO: 1241313 - RNA, 19 nt, Homo sapiens
  misc_RNA (1)...(19): siRNA sense strand
gucuuuaccuucauugaca

SEQ ID NO: 1241314 - RNA, 19 nt, Homo sapiens
  misc_RNA (1)...(19): siRNA sense strand
gagaaugaggcccacacaa

SEQ ID NO: 1241315 - RNA, 19 nt, Homo sapiens
  misc_RNA (1)...(19): siRNA sense strand
ccuacuaccuguggaggaa

SEQ ID NO: 1241316 - RNA, 19 nt, Homo sapiens
  misc_RNA (1)...(19): siRNA sense strand
gucauuugcugugcgcuuu

SEQ ID NO: 1241317 - RNA, 19 nt, Homo sapiens
  misc_RNA (1)...(19): siRNA sense strand
cauacucccuuacccucuu

SEQ ID NO: 1241318 - RNA, 19 nt, Homo sapiens
  misc_RNA (1)...(19): siRNA sense strand
uuccaggucuucaacaaug

SEQ ID NO: 1241319 - RNA, 19 nt, Homo sapiens
  misc_RNA (1)...(19): siRNA sense strand
ccacaucugcccuguccuu

SEQ ID NO: 1241320 - RNA, 19 nt, Homo sapiens
  misc_RNA (1)...(19): siRNA sense strand
agaaugcaagcacgucuuu

SEQ ID NO: 1241321 - RNA, 19 nt, Homo sapiens
  misc_RNA (1)...(19): siRNA sense strand
gcaucuggguagugagcuu

SEQ ID NO: 1241322 - RNA, 19 nt, Homo sapiens
  misc_RNA (1)...(19): siRNA sense strand
aagcuggacuguugcaucu

SEQ ID NO: 1241323 - RNA, 19 nt, Homo sapiens
  misc_RNA (1)...(19): siRNA sense strand
gaagagcaagcuggacugu

SEQ ID NO: 1241324 - RNA, 19 nt, Homo sapiens
  misc_RNA (1)...(19): siRNA sense strand
cgaaauuccaggucuucaa

SEQ ID NO: 1241325 - RNA, 19 nt, Homo sapiens
  misc_RNA (1)...(19): siRNA sense strand
uuaccuucauugacauuug

SEQ ID NO: 1241326 - RNA, 19 nt, Homo sapiens
  misc_RNA (1)...(19): siRNA sense strand
aaguacaucuucggacuga

SEQ ID NO: 1241327 - RNA, 19 nt, Homo sapiens
  misc_RNA (1)...(19): siRNA sense strand
gccugcagauccugauuuc

SEQ ID NO: 1241328 - RNA, 19 nt, Homo sapiens
  misc_RNA (1)...(19): siRNA sense strand
acaugacgcaguccucuuu

SEQ ID NO: 1241329 - RNA, 19 nt, Homo sapiens
  misc_RNA (1)...(19): siRNA sense strand
gcccagguguacaaugaca

SEQ ID NO: 1241330 - RNA, 19 nt, Homo sapiens
  misc_RNA (1)...(19): siRNA sense strand
ggcaccagcguguccuaua

SEQ ID NO: 1241331 - RNA, 19 nt, Homo sapiens
  misc_RNA (1)...(19): siRNA sense strand
agacucaguuucgaaaugg

SEQ ID NO: 1241332 - RNA, 19 nt, Homo sapiens
  misc_RNA (1)...(19): siRNA sense strand
cuucaacaaugccaccaau

SEQ ID NO: 1241333 - RNA, 19 nt, Homo sapiens
  misc_RNA (1)...(19): siRNA sense strand
auaauagggcccaggauau

SEQ ID NO: 1241334 - RNA, 19 nt, Homo sapiens
  misc_RNA (1)...(19): siRNA sense strand
acaguggaaggacaugaua

SEQ ID NO: 1241335 - RNA, 19 nt, Homo sapiens
  misc_RNA (1)...(19): siRNA sense strand
ccucuacuccuccuucuuc

SEQ ID NO: 1241336 - RNA, 19 nt, Homo sapiens
  misc_RNA (1)...(19): siRNA sense strand
gagauguucgggagcaugu

SEQ ID NO: 1241337 - RNA, 19 nt, Homo sapiens
  misc_RNA (1)...(19): siRNA sense strand
ucgcagcuacugggacuua

SEQ ID NO: 1241338 - RNA, 19 nt, Homo sapiens
  misc_RNA (1)...(19): siRNA sense strand
cgacucagaggaggacauu

SEQ ID NO: 1241339 - RNA, 19 nt, Homo sapiens
  misc_RNA (1)...(19): siRNA sense strand
augcccagguguacaauga

SEQ ID NO: 1241340 - RNA, 19 nt, Homo sapiens
  misc_RNA (1)...(19): siRNA sense strand
ggagaaugaggcccacaca

SEQ ID NO: 1241341 - RNA, 19 nt, Homo sapiens
  misc_RNA (1)...(19): siRNA sense strand
aaucccaagaccuauaaua

SEQ ID NO: 1241342 - RNA, 19 nt, Homo sapiens
  misc_RNA (1)...(19): siRNA sense strand
ucaccgccaucauccagau

SEQ ID NO: 1241343 - RNA, 19 nt, Homo sapiens
  misc_RNA (1)...(19): siRNA sense strand
caagauuaaagacuacauc

SEQ ID NO: 1241344 - RNA, 19 nt, Homo sapiens
  misc_RNA (1)...(19): siRNA sense strand
uaauagggcccaggauauc

SEQ ID NO: 1241345 - RNA, 19 nt, Homo sapiens
  misc_RNA (1)...(19): siRNA sense strand
cagguaccuuugccguuau

SEQ ID NO: 1241346 - RNA, 19 nt, Homo sapiens
  misc_RNA (1)...(19): siRNA sense strand
ucgcaaugccuucagaugu

SEQ ID NO: 1241347 - RNA, 19 nt, Homo sapiens
  misc_RNA (1)...(19): siRNA sense strand
agaacucccucaagcaacu

SEQ ID NO: 1241348 - RNA, 19 nt, Homo sapiens
  misc_RNA (1)...(19): siRNA sense strand
uguauccucucccuaaguc

SEQ ID NO: 1241349 - RNA, 19 nt, Homo sapiens
  misc_RNA (1)...(19): siRNA sense strand
ggccugcagauccugauuu

SEQ ID NO: 1241350 - RNA, 19 nt, Homo sapiens
  misc_RNA (1)...(19): siRNA sense strand
caggguccaucgucuuuac

SEQ ID NO: 1241351 - RNA, 19 nt, Homo sapiens
  misc_RNA (1)...(19): siRNA sense strand
gcagcuacugggacuuaga

SEQ ID NO: 1241352 - RNA, 19 nt, Homo sapiens
  misc_RNA (1)...(19): siRNA sense strand
cacaaggcauggcauuugc

SEQ ID NO: 1241353 - RNA, 19 nt, Homo sapiens
  misc_RNA (1)...(19): siRNA sense strand
ucucuacuuugccaacuca

SEQ ID NO: 1241354 - RNA, 19 nt, Homo sapiens
  misc_RNA (1)...(19): siRNA sense strand
ucgcucaucuucgcucuca

SEQ ID NO: 1241355 - RNA, 19 nt, Homo sapiens
  misc_RNA (1)...(19): siRNA sense strand
gguccaucgucuuuaccuu

SEQ ID NO: 1241356 - RNA, 19 nt, Homo sapiens
  misc_RNA (1)...(19): siRNA sense strand
aaacagaaggacaaguaca

SEQ ID NO: 1241357 - RNA, 19 nt, Homo sapiens
  misc_RNA (1)...(19): siRNA sense strand
gaucuacgccaacuucuuu

SEQ ID NO: 1241358 - RNA, 19 nt, Homo sapiens
  misc_RNA (1)...(19): siRNA sense strand
gagaaaaucuuccgccaaa

SEQ ID NO: 1241359 - RNA, 19 nt, Homo sapiens
  misc_RNA (1)...(19): siRNA sense strand
gggaggagaugcuggagau

SEQ ID NO: 1241360 - RNA, 19 nt, Homo sapiens
  misc_RNA (1)...(19): siRNA sense strand
ggugacgccuccaaguuug

SEQ ID NO: 1241361 - RNA, 19 nt, Homo sapiens
  misc_RNA (1)...(19): siRNA sense strand
gaaaagaggacugagaaaa

SEQ ID NO: 1241362 - RNA, 19 nt, Homo sapiens
  misc_RNA (1)...(19): siRNA sense strand
guggaugaguucaagaaga

SEQ ID NO: 1241363 - RNA, 19 nt, Homo sapiens
  misc_RNA (1)...(19): siRNA sense strand
guacaagggcuuccucaag

SEQ ID NO: 1241364 - RNA, 19 nt, Homo sapiens
  misc_RNA (1)...(19): siRNA sense strand
gcacgucuuccgcaccuuu

SEQ ID NO: 1241365 - RNA, 19 nt, Homo sapiens
  misc_RNA (1)...(19): siRNA sense strand
gcaggccauuuacaagaug

SEQ ID NO: 1241366 - RNA, 19 nt, Homo sapiens
  misc_RNA (1)...(19): siRNA sense strand
uggaugaguucaagaagau

SEQ ID NO: 1241367 - RNA, 19 nt, Homo sapiens
  misc_RNA (1)...(19): siRNA sense strand
caacuucuuucccuauggu

SEQ ID NO: 1241368 - RNA, 19 nt, Homo sapiens
  misc_RNA (1)...(19): siRNA sense strand
gaaaaucuuccgccaaaug

SEQ ID NO: 1241369 - RNA, 19 nt, Homo sapiens
  misc_RNA (1)...(19): siRNA sense strand
ggacggcaacggcuacauc

SEQ ID NO: 1241370 - RNA, 19 nt, Homo sapiens
  misc_RNA (1)...(19): siRNA sense strand
caauguggaugaguucaag

SEQ ID NO: 1241371 - RNA, 19 nt, Homo sapiens
  misc_RNA (1)...(19): siRNA sense strand
gugcaggccauuuacaaga

SEQ ID NO: 1241372 - RNA, 19 nt, Homo sapiens
  misc_RNA (1)...(19): siRNA sense strand
gccaacuucuuucccuaug

SEQ ID NO: 1241373 - RNA, 19 nt, Homo sapiens
  misc_RNA (1)...(19): siRNA sense strand
ccauagacuuucgggaguu

SEQ ID NO: 1241374 - RNA, 19 nt, Homo sapiens
  misc_RNA (1)...(19): siRNA sense strand
uuucgggaguucaucauug

SEQ ID NO: 1241375 - RNA, 19 nt, Homo sapiens
  misc_RNA (1)...(19): siRNA sense strand
ccaaauggacacaaacaac

SEQ ID NO: 1241376 - RNA, 19 nt, Homo sapiens
  misc_RNA (1)...(19): siRNA sense strand
uggugacgccuccaaguuu

SEQ ID NO: 1241377 - RNA, 19 nt, Homo sapiens
  misc_RNA (1)...(19): siRNA sense strand
ggagaucgugcaggccauu

SEQ ID NO: 1241378 - RNA, 19 nt, Homo sapiens
  misc_RNA (1)...(19): siRNA sense strand
cauagacuuucgggaguuc

SEQ ID NO: 1241379 - RNA, 19 nt, Homo sapiens
  misc_RNA (1)...(19): siRNA sense strand
gccaaauggacacaaacaa

SEQ ID NO: 1241380 - RNA, 19 nt, Homo sapiens
  misc_RNA (1)...(19): siRNA sense strand
aaagaggacugagaaaauc

SEQ ID NO: 1241381 - RNA, 19 nt, Homo sapiens
  misc_RNA (1)...(19): siRNA sense strand
aagaagaucuacgccaacu

SEQ ID NO: 1241382 - RNA, 19 nt, Homo sapiens
  misc_RNA (1)...(19): siRNA sense strand
aaaagaggacugagaaaau

SEQ ID NO: 1241383 - RNA, 19 nt, Homo sapiens
  misc_RNA (1)...(19): siRNA sense strand
ggaaaagaggacugagaaa

SEQ ID NO: 1241384 - RNA, 19 nt, Homo sapiens
  misc_RNA (1)...(19): siRNA sense strand
gaugguuucguccgugaug

SEQ ID NO: 1241385 - RNA, 19 nt, Homo sapiens
  misc_RNA (1)...(19): siRNA sense strand
ccaacuucuuucccuaugg

SEQ ID NO: 1241386 - RNA, 19 nt, Homo sapiens
  misc_RNA (1)...(19): siRNA sense strand
gacggcaacggcuacauca

SEQ ID NO: 1241387 - RNA, 19 nt, Homo sapiens
  misc_RNA (1)...(19): siRNA sense strand
ugcaggccauuuacaagau

SEQ ID NO: 1241388 - RNA, 19 nt, Homo sapiens
  misc_RNA (1)...(19): siRNA sense strand
gaucgugcaggccauuuac

SEQ ID NO: 1241389 - RNA, 19 nt, Homo sapiens
  misc_RNA (1)...(19): siRNA sense strand
gaugaccacuucuccauug

SEQ ID NO: 1241390 - RNA, 19 nt, Homo sapiens
  misc_RNA (1)...(19): siRNA sense strand
gaaauucaguaggagagaa

SEQ ID NO: 1241391 - RNA, 19 nt, Homo sapiens
  misc_RNA (1)...(19): siRNA sense strand
ucagcuaccuggauauuga

SEQ ID NO: 1241392 - RNA, 19 nt, Homo sapiens
  misc_RNA (1)...(19): siRNA sense strand
ggaagacgccuguguacga

SEQ ID NO: 1241393 - RNA, 19 nt, Homo sapiens
  misc_RNA (1)...(19): siRNA sense strand
gcaaagaauucaccaugac

SEQ ID NO: 1241394 - RNA, 19 nt, Homo sapiens
  misc_RNA (1)...(19): siRNA sense strand
gaguggagcguuucauuga

SEQ ID NO: 1241395 - RNA, 19 nt, Homo sapiens
  misc_RNA (1)...(19): siRNA sense strand
gggauucucuacgaaauuc

SEQ ID NO: 1241396 - RNA, 19 nt, Homo sapiens
  misc_RNA (1)...(19): siRNA sense strand
gcaagaaggcagccaagca

SEQ ID NO: 1241397 - RNA, 19 nt, Homo sapiens
  misc_RNA (1)...(19): siRNA sense strand
cgcaaagaauucaccauga

SEQ ID NO: 1241398 - RNA, 19 nt, Homo sapiens
  misc_RNA (1)...(19): siRNA sense strand
cacgucagcuaccuggaua

SEQ ID NO: 1241399 - RNA, 19 nt, Homo sapiens
  misc_RNA (1)...(19): siRNA sense strand
guggagcguuucauugaga

SEQ ID NO: 1241400 - RNA, 19 nt, Homo sapiens
  misc_RNA (1)...(19): siRNA sense strand
ggaguaugggaccagaaua

SEQ ID NO: 1241401 - RNA, 19 nt, Homo sapiens
  misc_RNA (1)...(19): siRNA sense strand
caccugggauucucuacga

SEQ ID NO: 1241402 - RNA, 19 nt, Homo sapiens
  misc_RNA (1)...(19): siRNA sense strand
gaguaugggaccagaauag

SEQ ID NO: 1241403 - RNA, 19 nt, Homo sapiens
  misc_RNA (1)...(19): siRNA sense strand
gccaagcccaccagccuaa

SEQ ID NO: 1241404 - RNA, 19 nt, Homo sapiens
  misc_RNA (1)...(19): siRNA sense strand
cgaguggagcguuucauug

SEQ ID NO: 1241405 - RNA, 19 nt, Homo sapiens
  misc_RNA (1)...(19): siRNA sense strand
uagggaagacgccugugua

SEQ ID NO: 1241406 - RNA, 19 nt, Homo sapiens
  misc_RNA (1)...(19): siRNA sense strand
gaaggcagccaagcacaag

SEQ ID NO: 1241407 - RNA, 19 nt, Homo sapiens
  misc_RNA (1)...(19): siRNA sense strand
ucagccuucugcaggagua

SEQ ID NO: 1241408 - RNA, 19 nt, Homo sapiens
  misc_RNA (1)...(19): siRNA sense strand
gcccugcaguaccucaaga

SEQ ID NO: 1241409 - RNA, 19 nt, Homo sapiens
  misc_RNA (1)...(19): siRNA sense strand
gagcguuucauugagauug

SEQ ID NO: 1241410 - RNA, 19 nt, Homo sapiens
  misc_RNA (1)...(19): siRNA sense strand
caagcccaccagccuaauu

SEQ ID NO: 1241411 - RNA, 19 nt, Homo sapiens
  misc_RNA (1)...(19): siRNA sense strand
ugcaguaccucaagaucau

SEQ ID NO: 1241412 - RNA, 19 nt, Homo sapiens
  misc_RNA (1)...(19): siRNA sense strand
ugucauggcucugcaacca

SEQ ID NO: 1241413 - RNA, 19 nt, Homo sapiens
  misc_RNA (1)...(19): siRNA sense strand
gguggagccugaugaugac

SEQ ID NO: 1241414 - RNA, 19 nt, Homo sapiens
  misc_RNA (1)...(19): siRNA sense strand
uguacgaccuucucaaagc

SEQ ID NO: 1241415 - RNA, 19 nt, Homo sapiens
  misc_RNA (1)...(19): siRNA sense strand
ccugaggacauuccgguuu

SEQ ID NO: 1241416 - RNA, 19 nt, Homo sapiens
  misc_RNA (1)...(19): siRNA sense strand
aagcccaccagccuaauuu

SEQ ID NO: 1241417 - RNA, 19 nt, Homo sapiens
  misc_RNA (1)...(19): siRNA sense strand
gcugccguguccucaguga

SEQ ID NO: 1241418 - RNA, 19 nt, Homo sapiens
  misc_RNA (1)...(19): siRNA sense strand
agguggagccugaugauga

SEQ ID NO: 1241419 - RNA, 19 nt, Homo sapiens
  misc_RNA (1)...(19): siRNA sense strand
uguguacgaccuucucaaa

SEQ ID NO: 1241420 - RNA, 19 nt, Homo sapiens
  misc_RNA (1)...(19): siRNA sense strand
ccugucgaguggagcguuu

SEQ ID NO: 1241421 - RNA, 19 nt, Homo sapiens
  misc_RNA (1)...(19): siRNA sense strand
cugaggagcaggccuuuca

SEQ ID NO: 1241422 - RNA, 19 nt, Homo sapiens
  misc_RNA (1)...(19): siRNA sense strand
cauggcaggcagcaaguga

SEQ ID NO: 1241423 - RNA, 19 nt, Homo sapiens
  misc_RNA (1)...(19): siRNA sense strand
gaugaccacuucuccauug

SEQ ID NO: 1241424 - RNA, 19 nt, Homo sapiens
  misc_RNA (1)...(19): siRNA sense strand
gaaauucaguaggagagaa

SEQ ID NO: 1241425 - RNA, 19 nt, Homo sapiens
  misc_RNA (1)...(19): siRNA sense strand
ucagcuaccuggauauuga

SEQ ID NO: 1241426 - RNA, 19 nt, Homo sapiens
  misc_RNA (1)...(19): siRNA sense strand
ggaagacgccuguguacga

SEQ ID NO: 1241427 - RNA, 19 nt, Homo sapiens
  misc_RNA (1)...(19): siRNA sense strand
gcaaagaauucaccaugac

SEQ ID NO: 1241428 - RNA, 19 nt, Homo sapiens
  misc_RNA (1)...(19): siRNA sense strand
gaguggagcguuucauuga

SEQ ID NO: 1241429 - RNA, 19 nt, Homo sapiens
  misc_RNA (1)...(19): siRNA sense strand
gggauucucuacgaaauuc

SEQ ID NO: 1241430 - RNA, 19 nt, Homo sapiens
  misc_RNA (1)...(19): siRNA sense strand
gcaagaaggcagccaagca

SEQ ID NO: 1241431 - RNA, 19 nt, Homo sapiens
  misc_RNA (1)...(19): siRNA sense strand
cgcaaagaauucaccauga

SEQ ID NO: 1241432 - RNA, 19 nt, Homo sapiens
  misc_RNA (1)...(19): siRNA sense strand
cacgucagcuaccuggaua

SEQ ID NO: 1241433 - RNA, 19 nt, Homo sapiens
  misc_RNA (1)...(19): siRNA sense strand
guggagcguuucauugaga

SEQ ID NO: 1241434 - RNA, 19 nt, Homo sapiens
  misc_RNA (1)...(19): siRNA sense strand
ggaguaugggaccagaaua

SEQ ID NO: 1241435 - RNA, 19 nt, Homo sapiens
  misc_RNA (1)...(19): siRNA sense strand
caccugggauucucuacga

SEQ ID NO: 1241436 - RNA, 19 nt, Homo sapiens
  misc_RNA (1)...(19): siRNA sense strand
gaguaugggaccagaauag

SEQ ID NO: 1241437 - RNA, 19 nt, Homo sapiens
  misc_RNA (1)...(19): siRNA sense strand
gccaagcccaccagccuaa

SEQ ID NO: 1241438 - RNA, 19 nt, Homo sapiens
  misc_RNA (1)...(19): siRNA sense strand
cgaguggagcguuucauug

SEQ ID NO: 1241439 - RNA, 19 nt, Homo sapiens
  misc_RNA (1)...(19): siRNA sense strand
uagggaagacgccugugua

SEQ ID NO: 1241440 - RNA, 19 nt, Homo sapiens
  misc_RNA (1)...(19): siRNA sense strand
gaaggcagccaagcacaag

SEQ ID NO: 1241441 - RNA, 19 nt, Homo sapiens
  misc_RNA (1)...(19): siRNA sense strand
ucagccuucugcaggagua

SEQ ID NO: 1241442 - RNA, 19 nt, Homo sapiens
  misc_RNA (1)...(19): siRNA sense strand
gcccugcaguaccucaaga

SEQ ID NO: 1241443 - RNA, 19 nt, Homo sapiens
  misc_RNA (1)...(19): siRNA sense strand
gagcguuucauugagauug

SEQ ID NO: 1241444 - RNA, 19 nt, Homo sapiens
  misc_RNA (1)...(19): siRNA sense strand
caagcccaccagccuaauu

SEQ ID NO: 1241445 - RNA, 19 nt, Homo sapiens
  misc_RNA (1)...(19): siRNA sense strand
ugcaguaccucaagaucau

SEQ ID NO: 1241446 - RNA, 19 nt, Homo sapiens
  misc_RNA (1)...(19): siRNA sense strand
ugucauggcucugcaacca

SEQ ID NO: 1241447 - RNA, 19 nt, Homo sapiens
  misc_RNA (1)...(19): siRNA sense strand
gguggagccugaugaugac

SEQ ID NO: 1241448 - RNA, 19 nt, Homo sapiens
  misc_RNA (1)...(19): siRNA sense strand
uguacgaccuucucaaagc

SEQ ID NO: 1241449 - RNA, 19 nt, Homo sapiens
  misc_RNA (1)...(19): siRNA sense strand
ccugaggacauuccgguuu

SEQ ID NO: 1241450 - RNA, 19 nt, Homo sapiens
  misc_RNA (1)...(19): siRNA sense strand
aagcccaccagccuaauuu

SEQ ID NO: 1241451 - RNA, 19 nt, Homo sapiens
  misc_RNA (1)...(19): siRNA sense strand
gcugccguguccucaguga

SEQ ID NO: 1241452 - RNA, 19 nt, Homo sapiens
  misc_RNA (1)...(19): siRNA sense strand
agguggagccugaugauga

SEQ ID NO: 1241453 - RNA, 19 nt, Homo sapiens
  misc_RNA (1)...(19): siRNA sense strand
uguguacgaccuucucaaa

SEQ ID NO: 1241454 - RNA, 19 nt, Homo sapiens
  misc_RNA (1)...(19): siRNA sense strand
ccugucgaguggagcguuu

SEQ ID NO: 1241455 - RNA, 19 nt, Homo sapiens
  misc_RNA (1)...(19): siRNA sense strand
cugaggagcaggccuuuca

SEQ ID NO: 1241456 - RNA, 19 nt, Homo sapiens
  misc_RNA (1)...(19): siRNA sense strand
cauggcaggcagcaaguga

SEQ ID NO: 1241457 - RNA, 19 nt, Homo sapiens
  misc_RNA (1)...(19): siRNA sense strand
ggaagacgccuguguacga

SEQ ID NO: 1241458 - RNA, 19 nt, Homo sapiens
  misc_RNA (1)...(19): siRNA sense strand
gcaagaaggcagccaagca

SEQ ID NO: 1241459 - RNA, 19 nt, Homo sapiens
  misc_RNA (1)...(19): siRNA sense strand
ggaguaugggaccagaaua

SEQ ID NO: 1241460 - RNA, 19 nt, Homo sapiens
  misc_RNA (1)...(19): siRNA sense strand
gaguaugggaccagaauag

SEQ ID NO: 1241461 - RNA, 19 nt, Homo sapiens
  misc_RNA (1)...(19): siRNA sense strand
gccaagcccaccagccuaa

SEQ ID NO: 1241462 - RNA, 19 nt, Homo sapiens
  misc_RNA (1)...(19): siRNA sense strand
uagggaagacgccugugua

SEQ ID NO: 1241463 - RNA, 19 nt, Homo sapiens
  misc_RNA (1)...(19): siRNA sense strand
gaaggcagccaagcacaag

SEQ ID NO: 1241464 - RNA, 19 nt, Homo sapiens
  misc_RNA (1)...(19): siRNA sense strand
ucagccuucugcaggagua

SEQ ID NO: 1241465 - RNA, 19 nt, Homo sapiens
  misc_RNA (1)...(19): siRNA sense strand
caagcccaccagccuaauu

SEQ ID NO: 1241466 - RNA, 19 nt, Homo sapiens
  misc_RNA (1)...(19): siRNA sense strand
uguacgaccuucucaaagc

SEQ ID NO: 1241467 - RNA, 19 nt, Homo sapiens
  misc_RNA (1)...(19): siRNA sense strand
aagcccaccagccuaauuu

SEQ ID NO: 1241468 - RNA, 19 nt, Homo sapiens
  misc_RNA (1)...(19): siRNA sense strand
uguguacgaccuucucaaa

SEQ ID NO: 1241469 - RNA, 19 nt, Homo sapiens
  misc_RNA (1)...(19): siRNA sense strand
guccguaucuggagaauga

SEQ ID NO: 1241470 - RNA, 19 nt, Homo sapiens
  misc_RNA (1)...(19): siRNA sense strand
acucagcgcugccaugaua

SEQ ID NO: 1241471 - RNA, 19 nt, Homo sapiens
  misc_RNA (1)...(19): siRNA sense strand
ggacaucacugccuuugac

SEQ ID NO: 1241472 - RNA, 19 nt, Homo sapiens
  misc_RNA (1)...(19): siRNA sense strand
gaucagagcguccguaucu

SEQ ID NO: 1241473 - RNA, 19 nt, Homo sapiens
  misc_RNA (1)...(19): siRNA sense strand
gugaagcucuggaccauca

SEQ ID NO: 1241474 - RNA, 19 nt, Homo sapiens
  misc_RNA (1)...(19): siRNA sense strand
gacuucagcugucucaaga

SEQ ID NO: 1241475 - RNA, 19 nt, Homo sapiens
  misc_RNA (1)...(19): siRNA sense strand
aaauugagccuuucuacaa

SEQ ID NO: 1241476 - RNA, 19 nt, Homo sapiens
  misc_RNA (1)...(19): siRNA sense strand
ggaccgugccuguguuuga

SEQ ID NO: 1241477 - RNA, 19 nt, Homo sapiens
  misc_RNA (1)...(19): siRNA sense strand
gcaccagagucaacauucu

SEQ ID NO: 1241478 - RNA, 19 nt, Homo sapiens
  misc_RNA (1)...(19): siRNA sense strand
uggacaaccugcugcauga

SEQ ID NO: 1241479 - RNA, 19 nt, Homo sapiens
  misc_RNA (1)...(19): siRNA sense strand
ggaggcugcugugcuguug

SEQ ID NO: 1241480 - RNA, 19 nt, Homo sapiens
  misc_RNA (1)...(19): siRNA sense strand
ccagggcuguacuuucuga

SEQ ID NO: 1241481 - RNA, 19 nt, Homo sapiens
  misc_RNA (1)...(19): siRNA sense strand
acaguucgcuggcuacagu

SEQ ID NO: 1241482 - RNA, 19 nt, Homo sapiens
  misc_RNA (1)...(19): siRNA sense strand
acacugagcggcacuuuca

SEQ ID NO: 1241483 - RNA, 19 nt, Homo sapiens
  misc_RNA (1)...(19): siRNA sense strand
ucugacagcuggcgaccaa

SEQ ID NO: 1241484 - RNA, 19 nt, Homo sapiens
  misc_RNA (1)...(19): siRNA sense strand
ggacuucagcugucucaag

SEQ ID NO: 1241485 - RNA, 19 nt, Homo sapiens
  misc_RNA (1)...(19): siRNA sense strand
gcugcugggugucuucuca

SEQ ID NO: 1241486 - RNA, 19 nt, Homo sapiens
  misc_RNA (1)...(19): siRNA sense strand
gagucaacauucuggaagu

SEQ ID NO: 1241487 - RNA, 19 nt, Homo sapiens
  misc_RNA (1)...(19): siRNA sense strand
agccaggacugcacuguga

SEQ ID NO: 1241488 - RNA, 19 nt, Homo sapiens
  misc_RNA (1)...(19): siRNA sense strand
gaacacagccccagacaac

SEQ ID NO: 1241489 - RNA, 19 nt, Homo sapiens
  misc_RNA (1)...(19): siRNA sense strand
cuacacgccugcugcucuu

SEQ ID NO: 1241490 - RNA, 19 nt, Homo sapiens
  misc_RNA (1)...(19): siRNA sense strand
ccacucagcgcugccauga

SEQ ID NO: 1241491 - RNA, 19 nt, Homo sapiens
  misc_RNA (1)...(19): siRNA sense strand
cgaggaccgugccuguguu

SEQ ID NO: 1241492 - RNA, 19 nt, Homo sapiens
  misc_RNA (1)...(19): siRNA sense strand
acaaccugcugcaugagaa

SEQ ID NO: 1241493 - RNA, 19 nt, Homo sapiens
  misc_RNA (1)...(19): siRNA sense strand
gaggaccgugccuguguuu

SEQ ID NO: 1241494 - RNA, 19 nt, Homo sapiens
  misc_RNA (1)...(19): siRNA sense strand
ucaagaacaacgagugugu

SEQ ID NO: 1241495 - RNA, 19 nt, Homo sapiens
  misc_RNA (1)...(19): siRNA sense strand
gcucaggguuccggucaca

SEQ ID NO: 1241496 - RNA, 19 nt, Homo sapiens
  misc_RNA (1)...(19): siRNA sense strand
ggaggacaucacugccuuu

SEQ ID NO: 1241497 - RNA, 19 nt, Homo sapiens
  misc_RNA (1)...(19): siRNA sense strand
caauagccccugccuaaaa

SEQ ID NO: 1241498 - RNA, 19 nt, Homo sapiens
  misc_RNA (1)...(19): siRNA sense strand
gugaggagguuuuggaugu

SEQ ID NO: 1241499 - RNA, 19 nt, Homo sapiens
  misc_RNA (1)...(19): siRNA sense strand
gacaaccugcugcaugaga

SEQ ID NO: 1241500 - RNA, 19 nt, Homo sapiens
  misc_RNA (1)...(19): siRNA sense strand
gacgucagccugccagauc

SEQ ID NO: 1241501 - RNA, 19 nt, Homo sapiens
  misc_RNA (1)...(19): siRNA sense strand
gaggacaucacugccuuug

SEQ ID NO: 1241502 - RNA, 19 nt, Homo sapiens
  misc_RNA (1)...(19): siRNA sense strand
ggccgugacaagauaugua

SEQ ID NO: 1241503 - RNA, 19 nt, Homo sapiens
  misc_RNA (1)...(19): siRNA sense strand
ucuggaccaucaagaacaa

SEQ ID NO: 1241504 - RNA, 19 nt, Homo sapiens
  misc_RNA (1)...(19): siRNA sense strand
gacagccagucgggcauug

SEQ ID NO: 1241505 - RNA, 19 nt, Homo sapiens
  misc_RNA (1)...(19): siRNA sense strand
caucaagaacaacgagugu

SEQ ID NO: 1241506 - RNA, 19 nt, Homo sapiens
  misc_RNA (1)...(19): siRNA sense strand
gaccgugccuguguuugag

SEQ ID NO: 1241507 - RNA, 19 nt, Homo sapiens
  misc_RNA (1)...(19): siRNA sense strand
gcaccucuucugcgucugu

SEQ ID NO: 1241508 - RNA, 19 nt, Homo sapiens
  misc_RNA (1)...(19): siRNA sense strand
agcaagagcuggacaaccu

SEQ ID NO: 1241509 - RNA, 19 nt, Homo sapiens
  misc_RNA (1)...(19): siRNA sense strand
uggcaagagggcagcguua

SEQ ID NO: 1241510 - RNA, 19 nt, Homo sapiens
  misc_RNA (1)...(19): siRNA sense strand
gccgugacaagauauguau

SEQ ID NO: 1241511 - RNA, 19 nt, Homo sapiens
  misc_RNA (1)...(19): siRNA sense strand
cuacgggacacaccacuuc

SEQ ID NO: 1241512 - RNA, 19 nt, Homo sapiens
  misc_RNA (1)...(19): siRNA sense strand
aauugagccuuucuacaag

SEQ ID NO: 1241513 - RNA, 19 nt, Homo sapiens
  misc_RNA (1)...(19): siRNA sense strand
ggcaccgucugcugcucua

SEQ ID NO: 1241514 - RNA, 19 nt, Homo sapiens
  misc_RNA (1)...(19): siRNA sense strand
gguuuuggauguccgguuu

SEQ ID NO: 1241515 - RNA, 19 nt, Homo sapiens
  misc_RNA (1)...(19): siRNA sense strand
cggauggccucgugaagcu

SEQ ID NO: 1241516 - RNA, 19 nt, Homo sapiens
  misc_RNA (1)...(19): siRNA sense strand
ucaccucacuggccuucag

SEQ ID NO: 1241517 - RNA, 19 nt, Homo sapiens
  misc_RNA (1)...(19): siRNA sense strand
gcuucugcgucacguggaa

SEQ ID NO: 1241518 - RNA, 19 nt, Homo sapiens
  misc_RNA (1)...(19): siRNA sense strand
caucaacagcguggcuauu

SEQ ID NO: 1241519 - RNA, 19 nt, Homo sapiens
  misc_RNA (1)...(19): siRNA sense strand
gaagacagcugaacugaag

SEQ ID NO: 1241520 - RNA, 19 nt, Homo sapiens
  misc_RNA (1)...(19): siRNA sense strand
gaagugcaguuauaucaaa

SEQ ID NO: 1241521 - RNA, 19 nt, Homo sapiens
  misc_RNA (1)...(19): siRNA sense strand
gaacgaguaaccacaauua

SEQ ID NO: 1241522 - RNA, 19 nt, Homo sapiens
  misc_RNA (1)...(19): siRNA sense strand
caugagagccuuacaaaua

SEQ ID NO: 1241523 - RNA, 19 nt, Homo sapiens
  misc_RNA (1)...(19): siRNA sense strand
gaauucgacuggaacauuu

SEQ ID NO: 1241524 - RNA, 19 nt, Homo sapiens
  misc_RNA (1)...(19): siRNA sense strand
ggacuccuaugcuaagaua

SEQ ID NO: 1241525 - RNA, 19 nt, Homo sapiens
  misc_RNA (1)...(19): siRNA sense strand
ccagagaaguuaaagaauu

SEQ ID NO: 1241526 - RNA, 19 nt, Homo sapiens
  misc_RNA (1)...(19): siRNA sense strand
gcacaguaauugaggauug

SEQ ID NO: 1241527 - RNA, 19 nt, Homo sapiens
  misc_RNA (1)...(19): siRNA sense strand
aaacugcuuuggagaaaua

SEQ ID NO: 1241528 - RNA, 19 nt, Homo sapiens
  misc_RNA (1)...(19): siRNA sense strand
gcaugaagauguuaagcaa

SEQ ID NO: 1241529 - RNA, 19 nt, Homo sapiens
  misc_RNA (1)...(19): siRNA sense strand
gacaagaagugguggagaa

SEQ ID NO: 1241530 - RNA, 19 nt, Homo sapiens
  misc_RNA (1)...(19): siRNA sense strand
uacaggaccuuucagauaa

SEQ ID NO: 1241531 - RNA, 19 nt, Homo sapiens
  misc_RNA (1)...(19): siRNA sense strand
ggagagacuugauucuguu

SEQ ID NO: 1241532 - RNA, 19 nt, Homo sapiens
  misc_RNA (1)...(19): siRNA sense strand
cagcugaacugaagaggaa

SEQ ID NO: 1241533 - RNA, 19 nt, Homo sapiens
  misc_RNA (1)...(19): siRNA sense strand
aagaagugguggagaaaua

SEQ ID NO: 1241534 - RNA, 19 nt, Homo sapiens
  misc_RNA (1)...(19): siRNA sense strand
ugaagaaauugaagacuga

SEQ ID NO: 1241535 - RNA, 19 nt, Homo sapiens
  misc_RNA (1)...(19): siRNA sense strand
uaagaagcaugaagauguu

SEQ ID NO: 1241536 - RNA, 19 nt, Homo sapiens
  misc_RNA (1)...(19): siRNA sense strand
aaacugaagucccaggaaa

SEQ ID NO: 1241537 - RNA, 19 nt, Homo sapiens
  misc_RNA (1)...(19): siRNA sense strand
uaagauagaugagaagaca

SEQ ID NO: 1241538 - RNA, 19 nt, Homo sapiens
  misc_RNA (1)...(19): siRNA sense strand
uagcugagauugugauuca

SEQ ID NO: 1241539 - RNA, 19 nt, Homo sapiens
  misc_RNA (1)...(19): siRNA sense strand
ugaaaucuauggagacuca

SEQ ID NO: 1241540 - RNA, 19 nt, Homo sapiens
  misc_RNA (1)...(19): siRNA sense strand
uuacucaucuggacucauu

SEQ ID NO: 1241541 - RNA, 19 nt, Homo sapiens
  misc_RNA (1)...(19): siRNA sense strand
gaacugaagaggaagaugu

SEQ ID NO: 1241542 - RNA, 19 nt, Homo sapiens
  misc_RNA (1)...(19): siRNA sense strand
gaacugaagaaauugaaga

SEQ ID NO: 1241543 - RNA, 19 nt, Homo sapiens
  misc_RNA (1)...(19): siRNA sense strand
cuacaacaaucacuaaauc

SEQ ID NO: 1241544 - RNA, 19 nt, Homo sapiens
  misc_RNA (1)...(19): siRNA sense strand
gauauaauguagcugagau

SEQ ID NO: 1241545 - RNA, 19 nt, Homo sapiens
  misc_RNA (1)...(19): siRNA sense strand
gaagucccaggaaauauuu

SEQ ID NO: 1241546 - RNA, 19 nt, Homo sapiens
  misc_RNA (1)...(19): siRNA sense strand
gaaauacaagagaguuuga

SEQ ID NO: 1241547 - RNA, 19 nt, Homo sapiens
  misc_RNA (1)...(19): siRNA sense strand
gaaauugaagacugaagaa

SEQ ID NO: 1241548 - RNA, 19 nt, Homo sapiens
  misc_RNA (1)...(19): siRNA sense strand
uaacaggagcugaugguaa

SEQ ID NO: 1241549 - RNA, 19 nt, Homo sapiens
  misc_RNA (1)...(19): siRNA sense strand
gcaauacaaacgcacagua

SEQ ID NO: 1241550 - RNA, 19 nt, Homo sapiens
  misc_RNA (1)...(19): siRNA sense strand
ccugaagucuugcacauga

SEQ ID NO: 1241551 - RNA, 19 nt, Homo sapiens
  misc_RNA (1)...(19): siRNA sense strand
ggaauucgacuggaacauu

SEQ ID NO: 1241552 - RNA, 19 nt, Homo sapiens
  misc_RNA (1)...(19): siRNA sense strand
ugagacugcugauauucua

SEQ ID NO: 1241553 - RNA, 19 nt, Homo sapiens
  misc_RNA (1)...(19): siRNA sense strand
aacaggagcugaugguaaa

SEQ ID NO: 1241554 - RNA, 19 nt, Homo sapiens
  misc_RNA (1)...(19): siRNA sense strand
gcaauuuaguuacucaucu

SEQ ID NO: 1241555 - RNA, 19 nt, Homo sapiens
  misc_RNA (1)...(19): siRNA sense strand
auacaggaccuuucagaua

SEQ ID NO: 1241556 - RNA, 19 nt, Homo sapiens
  misc_RNA (1)...(19): siRNA sense strand
caauacaaacgcacaguaa

SEQ ID NO: 1241557 - RNA, 19 nt, Homo sapiens
  misc_RNA (1)...(19): siRNA sense strand
ccagugaacucugaaguca

SEQ ID NO: 1241558 - RNA, 19 nt, Homo sapiens
  misc_RNA (1)...(19): siRNA sense strand
gaaaacugcuuuggagaaa

SEQ ID NO: 1241559 - RNA, 19 nt, Homo sapiens
  misc_RNA (1)...(19): siRNA sense strand
uaauguagcugagauugug

SEQ ID NO: 1241560 - RNA, 19 nt, Homo sapiens
  misc_RNA (1)...(19): siRNA sense strand
uaaauccucugcggacaaa

SEQ ID NO: 1241561 - RNA, 19 nt, Homo sapiens
  misc_RNA (1)...(19): siRNA sense strand
ggaauuucuuuggcaauau

SEQ ID NO: 1241562 - RNA, 19 nt, Homo sapiens
  misc_RNA (1)...(19): siRNA sense strand
ccauucagcaauuuaguua

SEQ ID NO: 1241563 - RNA, 19 nt, Homo sapiens
  misc_RNA (1)...(19): siRNA sense strand
ggacaaaaugcaacaguua

SEQ ID NO: 1241564 - RNA, 19 nt, Homo sapiens
  misc_RNA (1)...(19): siRNA sense strand
caacuuuauucacuucaga

SEQ ID NO: 1241565 - RNA, 19 nt, Homo sapiens
  misc_RNA (1)...(19): siRNA sense strand
gagcuacaacaaucacuaa

SEQ ID NO: 1241566 - RNA, 19 nt, Homo sapiens
  misc_RNA (1)...(19): siRNA sense strand
ugaaagauacgguccagaa

SEQ ID NO: 1241567 - RNA, 19 nt, Homo sapiens
  misc_RNA (1)...(19): siRNA sense strand
gaaagaaauacaagagagu

SEQ ID NO: 1241568 - RNA, 19 nt, Homo sapiens
  misc_RNA (1)...(19): siRNA sense strand
uaaaggagagccugaacuu

SEQ ID NO: 1241569 - RNA, 19 nt, Homo sapiens
  misc_RNA (1)...(19): siRNA sense strand
gauacgguccagaagcuua

SEQ ID NO: 1241570 - RNA, 19 nt, Homo sapiens
  misc_RNA (1)...(19): siRNA sense strand
agagaagcaugccgugaaa

SEQ ID NO: 1241571 - RNA, 19 nt, Homo sapiens
  misc_RNA (1)...(19): siRNA sense strand
gcugagauugugauucaua

SEQ ID NO: 1241572 - RNA, 19 nt, Homo sapiens
  misc_RNA (1)...(19): siRNA sense strand
ccaggaggcauuaaugaaa

SEQ ID NO: 1241573 - RNA, 19 nt, Homo sapiens
  misc_RNA (1)...(19): siRNA sense strand
uggaauuucuuuggcaaua

SEQ ID NO: 1241574 - RNA, 19 nt, Homo sapiens
  misc_RNA (1)...(19): siRNA sense strand
aaagaggugcugucuauga

SEQ ID NO: 1241575 - RNA, 19 nt, Homo sapiens
  misc_RNA (1)...(19): siRNA sense strand
gagauugugauucauauuc

SEQ ID NO: 1241576 - RNA, 19 nt, Homo sapiens
  misc_RNA (1)...(19): siRNA sense strand
gaacucugaagucauguau

SEQ ID NO: 1241577 - RNA, 19 nt, Homo sapiens
  misc_RNA (1)...(19): siRNA sense strand
uccaaagccugaagucuug

SEQ ID NO: 1241578 - RNA, 19 nt, Homo sapiens
  misc_RNA (1)...(19): siRNA sense strand
uaaugaaacuggagagacu

SEQ ID NO: 1241579 - RNA, 19 nt, Homo sapiens
  misc_RNA (1)...(19): siRNA sense strand
cgaguaaccacaauuaauc

SEQ ID NO: 1241580 - RNA, 19 nt, Homo sapiens
  misc_RNA (1)...(19): siRNA sense strand
gagaagacagcugaacuga

SEQ ID NO: 1241581 - RNA, 19 nt, Homo sapiens
  misc_RNA (1)...(19): siRNA sense strand
ggauugcaauaaaguucaa

SEQ ID NO: 1241582 - RNA, 19 nt, Homo sapiens
  misc_RNA (1)...(19): siRNA sense strand
aagaggugcugucuaugaa

SEQ ID NO: 1241583 - RNA, 19 nt, Homo sapiens
  misc_RNA (1)...(19): siRNA sense strand
aaacgauagugcugcaaga

SEQ ID NO: 1241584 - RNA, 19 nt, Homo sapiens
  misc_RNA (1)...(19): siRNA sense strand
ugaagucccaggaaauauu

SEQ ID NO: 1241585 - RNA, 19 nt, Homo sapiens
  misc_RNA (1)...(19): siRNA sense strand
gaaacugaagucccaggaa

SEQ ID NO: 1241586 - RNA, 19 nt, Homo sapiens
  misc_RNA (1)...(19): siRNA sense strand
gcugaaagggagaaacuga

SEQ ID NO: 1241587 - RNA, 19 nt, Homo sapiens
  misc_RNA (1)...(19): siRNA sense strand
gacugaugauugugaagaa

SEQ ID NO: 1241588 - RNA, 19 nt, Homo sapiens
  misc_RNA (1)...(19): siRNA sense strand
ucaaaagacugaugauugu

SEQ ID NO: 1241589 - RNA, 19 nt, Homo sapiens
  misc_RNA (1)...(19): siRNA sense strand
ggaagugcaguuauaucaa

SEQ ID NO: 1241590 - RNA, 19 nt, Homo sapiens
  misc_RNA (1)...(19): siRNA sense strand
uggagagacuugauucugu

SEQ ID NO: 1241591 - RNA, 19 nt, Homo sapiens
  misc_RNA (1)...(19): siRNA sense strand
auacaaacgcacaguaauu

SEQ ID NO: 1241592 - RNA, 19 nt, Homo sapiens
  misc_RNA (1)...(19): siRNA sense strand
caggaccuuucagauaaua

SEQ ID NO: 1241593 - RNA, 19 nt, Homo sapiens
  misc_RNA (1)...(19): siRNA sense strand
ggagcuacaacaaucacua

SEQ ID NO: 1241594 - RNA, 19 nt, Homo sapiens
  misc_RNA (1)...(19): siRNA sense strand
caauuuaguuacucaucug

SEQ ID NO: 1241595 - RNA, 19 nt, Homo sapiens
  misc_RNA (1)...(19): siRNA sense strand
gaagaggaagauguucaaa

SEQ ID NO: 1241596 - RNA, 19 nt, Homo sapiens
  misc_RNA (1)...(19): siRNA sense strand
aaagacugaugauugugaa

SEQ ID NO: 1241597 - RNA, 19 nt, Homo sapiens
  misc_RNA (1)...(19): siRNA sense strand
gaaagauacgguccagaag

SEQ ID NO: 1241598 - RNA, 19 nt, Homo sapiens
  misc_RNA (1)...(19): siRNA sense strand
ggcauuaucaacuuuauuc

SEQ ID NO: 1241599 - RNA, 19 nt, Homo sapiens
  misc_RNA (1)...(19): siRNA sense strand
gaucuuaacaggagcugau

SEQ ID NO: 1241600 - RNA, 19 nt, Homo sapiens
  misc_RNA (1)...(19): siRNA sense strand
auaagaagcaugaagaugu

SEQ ID NO: 1241601 - RNA, 19 nt, Homo sapiens
  misc_RNA (1)...(19): siRNA sense strand
agugaacucugaagucaug

SEQ ID NO: 1241602 - RNA, 19 nt, Homo sapiens
  misc_RNA (1)...(19): siRNA sense strand
aguuggaagugcaguuaua

SEQ ID NO: 1241603 - RNA, 19 nt, Homo sapiens
  misc_RNA (1)...(19): siRNA sense strand
cagagaagcaugccgugaa

SEQ ID NO: 1241604 - RNA, 19 nt, Homo sapiens
  misc_RNA (1)...(19): siRNA sense strand
gugaaacguauauggaauu

SEQ ID NO: 1241605 - RNA, 19 nt, Homo sapiens
  misc_RNA (1)...(19): siRNA sense strand
gaggauugcaauaaaguuc

SEQ ID NO: 1241606 - RNA, 19 nt, Homo sapiens
  misc_RNA (1)...(19): siRNA sense strand
gaaaauucguucaaaagac

SEQ ID NO: 1241607 - RNA, 19 nt, Homo sapiens
  misc_RNA (1)...(19): siRNA sense strand
gauauucuauguccaaaag

SEQ ID NO: 1241608 - RNA, 19 nt, Homo sapiens
  misc_RNA (1)...(19): siRNA sense strand
gaguaaccacaauuaauca

SEQ ID NO: 1241609 - RNA, 19 nt, Homo sapiens
  misc_RNA (1)...(19): siRNA sense strand
ugagagugaugagucagaa

SEQ ID NO: 1241610 - RNA, 19 nt, Homo sapiens
  misc_RNA (1)...(19): siRNA sense strand
gaucuacaugagagccuua

SEQ ID NO: 1241611 - RNA, 19 nt, Homo sapiens
  misc_RNA (1)...(19): siRNA sense strand
uagccaguaucuuaaagga

SEQ ID NO: 1241612 - RNA, 19 nt, Homo sapiens
  misc_RNA (1)...(19): siRNA sense strand
gaagugguggagaaauaug

SEQ ID NO: 1241613 - RNA, 19 nt, Homo sapiens
  misc_RNA (1)...(19): siRNA sense strand
gcuacaacaaucacuaaau

SEQ ID NO: 1241614 - RNA, 19 nt, Homo sapiens
  misc_RNA (1)...(19): siRNA sense strand
aagcaugccgugaaacgua

SEQ ID NO: 1241615 - RNA, 19 nt, Homo sapiens
  misc_RNA (1)...(19): siRNA sense strand
gcugauauucuauguccaa

SEQ ID NO: 1241616 - RNA, 19 nt, Homo sapiens
  misc_RNA (1)...(19): siRNA sense strand
agaggaagauguucaaaau

SEQ ID NO: 1241617 - RNA, 19 nt, Homo sapiens
  misc_RNA (1)...(19): siRNA sense strand
ucaguuggaagugcaguua

SEQ ID NO: 1241618 - RNA, 19 nt, Homo sapiens
  misc_RNA (1)...(19): siRNA sense strand
aaacuggagagacuugauu

SEQ ID NO: 1241619 - RNA, 19 nt, Homo sapiens
  misc_RNA (1)...(19): siRNA sense strand
gaagacagcugaacugaag

SEQ ID NO: 1241620 - RNA, 19 nt, Homo sapiens
  misc_RNA (1)...(19): siRNA sense strand
gaagugcaguuauaucaaa

SEQ ID NO: 1241621 - RNA, 19 nt, Homo sapiens
  misc_RNA (1)...(19): siRNA sense strand
gaacgaguaaccacaauua

SEQ ID NO: 1241622 - RNA, 19 nt, Homo sapiens
  misc_RNA (1)...(19): siRNA sense strand
caugagagccuuacaaaua

SEQ ID NO: 1241623 - RNA, 19 nt, Homo sapiens
  misc_RNA (1)...(19): siRNA sense strand
gaauucgacuggaacauuu

SEQ ID NO: 1241624 - RNA, 19 nt, Homo sapiens
  misc_RNA (1)...(19): siRNA sense strand
ggacuccuaugcuaagaua

SEQ ID NO: 1241625 - RNA, 19 nt, Homo sapiens
  misc_RNA (1)...(19): siRNA sense strand
ccagagaaguuaaagaauu

SEQ ID NO: 1241626 - RNA, 19 nt, Homo sapiens
  misc_RNA (1)...(19): siRNA sense strand
gcacaguaauugaggauug

SEQ ID NO: 1241627 - RNA, 19 nt, Homo sapiens
  misc_RNA (1)...(19): siRNA sense strand
aaacugcuuuggagaaaua

SEQ ID NO: 1241628 - RNA, 19 nt, Homo sapiens
  misc_RNA (1)...(19): siRNA sense strand
gcaugaagauguuaagcaa

SEQ ID NO: 1241629 - RNA, 19 nt, Homo sapiens
  misc_RNA (1)...(19): siRNA sense strand
gacaagaagugguggagaa

SEQ ID NO: 1241630 - RNA, 19 nt, Homo sapiens
  misc_RNA (1)...(19): siRNA sense strand
uacaggaccuuucagauaa

SEQ ID NO: 1241631 - RNA, 19 nt, Homo sapiens
  misc_RNA (1)...(19): siRNA sense strand
ggagagacuugauucuguu

SEQ ID NO: 1241632 - RNA, 19 nt, Homo sapiens
  misc_RNA (1)...(19): siRNA sense strand
cagcugaacugaagaggaa

SEQ ID NO: 1241633 - RNA, 19 nt, Homo sapiens
  misc_RNA (1)...(19): siRNA sense strand
aagaagugguggagaaaua

SEQ ID NO: 1241634 - RNA, 19 nt, Homo sapiens
  misc_RNA (1)...(19): siRNA sense strand
ugaagaaauugaagacuga

SEQ ID NO: 1241635 - RNA, 19 nt, Homo sapiens
  misc_RNA (1)...(19): siRNA sense strand
uaagaagcaugaagauguu

SEQ ID NO: 1241636 - RNA, 19 nt, Homo sapiens
  misc_RNA (1)...(19): siRNA sense strand
aaacugaagucccaggaaa

SEQ ID NO: 1241637 - RNA, 19 nt, Homo sapiens
  misc_RNA (1)...(19): siRNA sense strand
uaagauagaugagaagaca

SEQ ID NO: 1241638 - RNA, 19 nt, Homo sapiens
  misc_RNA (1)...(19): siRNA sense strand
uagcugagauugugauuca

SEQ ID NO: 1241639 - RNA, 19 nt, Homo sapiens
  misc_RNA (1)...(19): siRNA sense strand
ugaaaucuauggagacuca

SEQ ID NO: 1241640 - RNA, 19 nt, Homo sapiens
  misc_RNA (1)...(19): siRNA sense strand
uuacucaucuggacucauu

SEQ ID NO: 1241641 - RNA, 19 nt, Homo sapiens
  misc_RNA (1)...(19): siRNA sense strand
gaacugaagaggaagaugu

SEQ ID NO: 1241642 - RNA, 19 nt, Homo sapiens
  misc_RNA (1)...(19): siRNA sense strand
gaacugaagaaauugaaga

SEQ ID NO: 1241643 - RNA, 19 nt, Homo sapiens
  misc_RNA (1)...(19): siRNA sense strand
cuacaacaaucacuaaauc

SEQ ID NO: 1241644 - RNA, 19 nt, Homo sapiens
  misc_RNA (1)...(19): siRNA sense strand
gauauaauguagcugagau

SEQ ID NO: 1241645 - RNA, 19 nt, Homo sapiens
  misc_RNA (1)...(19): siRNA sense strand
gaagucccaggaaauauuu

SEQ ID NO: 1241646 - RNA, 19 nt, Homo sapiens
  misc_RNA (1)...(19): siRNA sense strand
gaaauacaagagaguuuga

SEQ ID NO: 1241647 - RNA, 19 nt, Homo sapiens
  misc_RNA (1)...(19): siRNA sense strand
gaaauugaagacugaagaa

SEQ ID NO: 1241648 - RNA, 19 nt, Homo sapiens
  misc_RNA (1)...(19): siRNA sense strand
uaacaggagcugaugguaa

SEQ ID NO: 1241649 - RNA, 19 nt, Homo sapiens
  misc_RNA (1)...(19): siRNA sense strand
gcaauacaaacgcacagua

SEQ ID NO: 1241650 - RNA, 19 nt, Homo sapiens
  misc_RNA (1)...(19): siRNA sense strand
ccugaagucuugcacauga

SEQ ID NO: 1241651 - RNA, 19 nt, Homo sapiens
  misc_RNA (1)...(19): siRNA sense strand
ggaauucgacuggaacauu

SEQ ID NO: 1241652 - RNA, 19 nt, Homo sapiens
  misc_RNA (1)...(19): siRNA sense strand
ugagacugcugauauucua

SEQ ID NO: 1241653 - RNA, 19 nt, Homo sapiens
  misc_RNA (1)...(19): siRNA sense strand
aacaggagcugaugguaaa

SEQ ID NO: 1241654 - RNA, 19 nt, Homo sapiens
  misc_RNA (1)...(19): siRNA sense strand
gcaauuuaguuacucaucu

SEQ ID NO: 1241655 - RNA, 19 nt, Homo sapiens
  misc_RNA (1)...(19): siRNA sense strand
auacaggaccuuucagaua

SEQ ID NO: 1241656 - RNA, 19 nt, Homo sapiens
  misc_RNA (1)...(19): siRNA sense strand
caauacaaacgcacaguaa

SEQ ID NO: 1241657 - RNA, 19 nt, Homo sapiens
  misc_RNA (1)...(19): siRNA sense strand
ccagugaacucugaaguca

SEQ ID NO: 1241658 - RNA, 19 nt, Homo sapiens
  misc_RNA (1)...(19): siRNA sense strand
gaaaacugcuuuggagaaa

SEQ ID NO: 1241659 - RNA, 19 nt, Homo sapiens
  misc_RNA (1)...(19): siRNA sense strand
uaauguagcugagauugug

SEQ ID NO: 1241660 - RNA, 19 nt, Homo sapiens
  misc_RNA (1)...(19): siRNA sense strand
uaaauccucugcggacaaa

SEQ ID NO: 1241661 - RNA, 19 nt, Homo sapiens
  misc_RNA (1)...(19): siRNA sense strand
ggaauuucuuuggcaauau

SEQ ID NO: 1241662 - RNA, 19 nt, Homo sapiens
  misc_RNA (1)...(19): siRNA sense strand
ccauucagcaauuuaguua

SEQ ID NO: 1241663 - RNA, 19 nt, Homo sapiens
  misc_RNA (1)...(19): siRNA sense strand
ggacaaaaugcaacaguua

SEQ ID NO: 1241664 - RNA, 19 nt, Homo sapiens
  misc_RNA (1)...(19): siRNA sense strand
caacuuuauucacuucaga

SEQ ID NO: 1241665 - RNA, 19 nt, Homo sapiens
  misc_RNA (1)...(19): siRNA sense strand
gagcuacaacaaucacuaa

SEQ ID NO: 1241666 - RNA, 19 nt, Homo sapiens
  misc_RNA (1)...(19): siRNA sense strand
ugaaagauacgguccagaa

SEQ ID NO: 1241667 - RNA, 19 nt, Homo sapiens
  misc_RNA (1)...(19): siRNA sense strand
gaaagaaauacaagagagu

SEQ ID NO: 1241668 - RNA, 19 nt, Homo sapiens
  misc_RNA (1)...(19): siRNA sense strand
uaaaggagagccugaacuu

SEQ ID NO: 1241669 - RNA, 19 nt, Homo sapiens
  misc_RNA (1)...(19): siRNA sense strand
gauacgguccagaagcuua

SEQ ID NO: 1241670 - RNA, 19 nt, Homo sapiens
  misc_RNA (1)...(19): siRNA sense strand
agagaagcaugccgugaaa

SEQ ID NO: 1241671 - RNA, 19 nt, Homo sapiens
  misc_RNA (1)...(19): siRNA sense strand
gcugagauugugauucaua

SEQ ID NO: 1241672 - RNA, 19 nt, Homo sapiens
  misc_RNA (1)...(19): siRNA sense strand
ccaggaggcauuaaugaaa

SEQ ID NO: 1241673 - RNA, 19 nt, Homo sapiens
  misc_RNA (1)...(19): siRNA sense strand
uggaauuucuuuggcaaua

SEQ ID NO: 1241674 - RNA, 19 nt, Homo sapiens
  misc_RNA (1)...(19): siRNA sense strand
aaagaggugcugucuauga

SEQ ID NO: 1241675 - RNA, 19 nt, Homo sapiens
  misc_RNA (1)...(19): siRNA sense strand
gagauugugauucauauuc

SEQ ID NO: 1241676 - RNA, 19 nt, Homo sapiens
  misc_RNA (1)...(19): siRNA sense strand
gaacucugaagucauguau

SEQ ID NO: 1241677 - RNA, 19 nt, Homo sapiens
  misc_RNA (1)...(19): siRNA sense strand
uccaaagccugaagucuug

SEQ ID NO: 1241678 - RNA, 19 nt, Homo sapiens
  misc_RNA (1)...(19): siRNA sense strand
uaaugaaacuggagagacu

SEQ ID NO: 1241679 - RNA, 19 nt, Homo sapiens
  misc_RNA (1)...(19): siRNA sense strand
cgaguaaccacaauuaauc

SEQ ID NO: 1241680 - RNA, 19 nt, Homo sapiens
  misc_RNA (1)...(19): siRNA sense strand
gagaagacagcugaacuga

SEQ ID NO: 1241681 - RNA, 19 nt, Homo sapiens
  misc_RNA (1)...(19): siRNA sense strand
ggauugcaauaaaguucaa

SEQ ID NO: 1241682 - RNA, 19 nt, Homo sapiens
  misc_RNA (1)...(19): siRNA sense strand
aagaggugcugucuaugaa

SEQ ID NO: 1241683 - RNA, 19 nt, Homo sapiens
  misc_RNA (1)...(19): siRNA sense strand
aaacgauagugcugcaaga

SEQ ID NO: 1241684 - RNA, 19 nt, Homo sapiens
  misc_RNA (1)...(19): siRNA sense strand
ugaagucccaggaaauauu

SEQ ID NO: 1241685 - RNA, 19 nt, Homo sapiens
  misc_RNA (1)...(19): siRNA sense strand
gaaacugaagucccaggaa

SEQ ID NO: 1241686 - RNA, 19 nt, Homo sapiens
  misc_RNA (1)...(19): siRNA sense strand
gcugaaagggagaaacuga

SEQ ID NO: 1241687 - RNA, 19 nt, Homo sapiens
  misc_RNA (1)...(19): siRNA sense strand
gacugaugauugugaagaa

SEQ ID NO: 1241688 - RNA, 19 nt, Homo sapiens
  misc_RNA (1)...(19): siRNA sense strand
ucaaaagacugaugauugu

SEQ ID NO: 1241689 - RNA, 19 nt, Homo sapiens
  misc_RNA (1)...(19): siRNA sense strand
ggaagugcaguuauaucaa

SEQ ID NO: 1241690 - RNA, 19 nt, Homo sapiens
  misc_RNA (1)...(19): siRNA sense strand
uggagagacuugauucugu

SEQ ID NO: 1241691 - RNA, 19 nt, Homo sapiens
  misc_RNA (1)...(19): siRNA sense strand
auacaaacgcacaguaauu

SEQ ID NO: 1241692 - RNA, 19 nt, Homo sapiens
  misc_RNA (1)...(19): siRNA sense strand
caggaccuuucagauaaua

SEQ ID NO: 1241693 - RNA, 19 nt, Homo sapiens
  misc_RNA (1)...(19): siRNA sense strand
ggagcuacaacaaucacua

SEQ ID NO: 1241694 - RNA, 19 nt, Homo sapiens
  misc_RNA (1)...(19): siRNA sense strand
caauuuaguuacucaucug

SEQ ID NO: 1241695 - RNA, 19 nt, Homo sapiens
  misc_RNA (1)...(19): siRNA sense strand
gaagaggaagauguucaaa

SEQ ID NO: 1241696 - RNA, 19 nt, Homo sapiens
  misc_RNA (1)...(19): siRNA sense strand
aaagacugaugauugugaa

SEQ ID NO: 1241697 - RNA, 19 nt, Homo sapiens
  misc_RNA (1)...(19): siRNA sense strand
gaaagauacgguccagaag

SEQ ID NO: 1241698 - RNA, 19 nt, Homo sapiens
  misc_RNA (1)...(19): siRNA sense strand
ggcauuaucaacuuuauuc

SEQ ID NO: 1241699 - RNA, 19 nt, Homo sapiens
  misc_RNA (1)...(19): siRNA sense strand
gaucuuaacaggagcugau

SEQ ID NO: 1241700 - RNA, 19 nt, Homo sapiens
  misc_RNA (1)...(19): siRNA sense strand
auaagaagcaugaagaugu

SEQ ID NO: 1241701 - RNA, 19 nt, Homo sapiens
  misc_RNA (1)...(19): siRNA sense strand
agugaacucugaagucaug

SEQ ID NO: 1241702 - RNA, 19 nt, Homo sapiens
  misc_RNA (1)...(19): siRNA sense strand
aguuggaagugcaguuaua

SEQ ID NO: 1241703 - RNA, 19 nt, Homo sapiens
  misc_RNA (1)...(19): siRNA sense strand
cagagaagcaugccgugaa

SEQ ID NO: 1241704 - RNA, 19 nt, Homo sapiens
  misc_RNA (1)...(19): siRNA sense strand
gugaaacguauauggaauu

SEQ ID NO: 1241705 - RNA, 19 nt, Homo sapiens
  misc_RNA (1)...(19): siRNA sense strand
gaggauugcaauaaaguuc

SEQ ID NO: 1241706 - RNA, 19 nt, Homo sapiens
  misc_RNA (1)...(19): siRNA sense strand
gaaaauucguucaaaagac

SEQ ID NO: 1241707 - RNA, 19 nt, Homo sapiens
  misc_RNA (1)...(19): siRNA sense strand
gauauucuauguccaaaag

SEQ ID NO: 1241708 - RNA, 19 nt, Homo sapiens
  misc_RNA (1)...(19): siRNA sense strand
gaguaaccacaauuaauca

SEQ ID NO: 1241709 - RNA, 19 nt, Homo sapiens
  misc_RNA (1)...(19): siRNA sense strand
ugagagugaugagucagaa

SEQ ID NO: 1241710 - RNA, 19 nt, Homo sapiens
  misc_RNA (1)...(19): siRNA sense strand
gaucuacaugagagccuua

SEQ ID NO: 1241711 - RNA, 19 nt, Homo sapiens
  misc_RNA (1)...(19): siRNA sense strand
uagccaguaucuuaaagga

SEQ ID NO: 1241712 - RNA, 19 nt, Homo sapiens
  misc_RNA (1)...(19): siRNA sense strand
gaagugguggagaaauaug

SEQ ID NO: 1241713 - RNA, 19 nt, Homo sapiens
  misc_RNA (1)...(19): siRNA sense strand
gcuacaacaaucacuaaau

SEQ ID NO: 1241714 - RNA, 19 nt, Homo sapiens
  misc_RNA (1)...(19): siRNA sense strand
aagcaugccgugaaacgua

SEQ ID NO: 1241715 - RNA, 19 nt, Homo sapiens
  misc_RNA (1)...(19): siRNA sense strand
gcugauauucuauguccaa

SEQ ID NO: 1241716 - RNA, 19 nt, Homo sapiens
  misc_RNA (1)...(19): siRNA sense strand
agaggaagauguucaaaau

SEQ ID NO: 1241717 - RNA, 19 nt, Homo sapiens
  misc_RNA (1)...(19): siRNA sense strand
ucaguuggaagugcaguua

SEQ ID NO: 1241718 - RNA, 19 nt, Homo sapiens
  misc_RNA (1)...(19): siRNA sense strand
aaacuggagagacuugauu

SEQ ID NO: 1241719 - RNA, 19 nt, Homo sapiens
  misc_RNA (1)...(19): siRNA sense strand
cauauucacuuccaacuuu

SEQ ID NO: 1241720 - RNA, 19 nt, Homo sapiens
  misc_RNA (1)...(19): siRNA sense strand
gcccaagucuccaucauga

SEQ ID NO: 1241721 - RNA, 19 nt, Homo sapiens
  misc_RNA (1)...(19): siRNA sense strand
gcaccucggucaagaugga

SEQ ID NO: 1241722 - RNA, 19 nt, Homo sapiens
  misc_RNA (1)...(19): siRNA sense strand
ggaccugguuccuucuuug

SEQ ID NO: 1241723 - RNA, 19 nt, Homo sapiens
  misc_RNA (1)...(19): siRNA sense strand
cuugauggauccacacaua

SEQ ID NO: 1241724 - RNA, 19 nt, Homo sapiens
  misc_RNA (1)...(19): siRNA sense strand
gaccuacgaugaauuuaag

SEQ ID NO: 1241725 - RNA, 19 nt, Homo sapiens
  misc_RNA (1)...(19): siRNA sense strand
ggagaacacacacgugaga

SEQ ID NO: 1241726 - RNA, 19 nt, Homo sapiens
  misc_RNA (1)...(19): siRNA sense strand
ccacacauauucacuucca

SEQ ID NO: 1241727 - RNA, 19 nt, Homo sapiens
  misc_RNA (1)...(19): siRNA sense strand
ugaccuacgaugaauuuaa

SEQ ID NO: 1241728 - RNA, 19 nt, Homo sapiens
  misc_RNA (1)...(19): siRNA sense strand
caugaccuacgaugaauuu

SEQ ID NO: 1241729 - RNA, 19 nt, Homo sapiens
  misc_RNA (1)...(19): siRNA sense strand
gcccugggauggacuagau

SEQ ID NO: 1241730 - RNA, 19 nt, Homo sapiens
  misc_RNA (1)...(19): siRNA sense strand
ugauggauccacacauauu

SEQ ID NO: 1241731 - RNA, 19 nt, Homo sapiens
  misc_RNA (1)...(19): siRNA sense strand
gauccacacauauucacuu

SEQ ID NO: 1241732 - RNA, 19 nt, Homo sapiens
  misc_RNA (1)...(19): siRNA sense strand
gauggauccacacauauuc

SEQ ID NO: 1241733 - RNA, 19 nt, Homo sapiens
  misc_RNA (1)...(19): siRNA sense strand
gcacagccaagcccugagu

SEQ ID NO: 1241734 - RNA, 19 nt, Homo sapiens
  misc_RNA (1)...(19): siRNA sense strand
ggcauuggaaggcauaaga

SEQ ID NO: 1241735 - RNA, 19 nt, Homo sapiens
  misc_RNA (1)...(19): siRNA sense strand
uaaggaggcgcugcaaaug

SEQ ID NO: 1241736 - RNA, 19 nt, Homo sapiens
  misc_RNA (1)...(19): siRNA sense strand
cugcccgcaucuaugauua

SEQ ID NO: 1241737 - RNA, 19 nt, Homo sapiens
  misc_RNA (1)...(19): siRNA sense strand
agaccuaccugugcuacga

SEQ ID NO: 1241738 - RNA, 19 nt, Homo sapiens
  misc_RNA (1)...(19): siRNA sense strand
ucacuuccaacuuuaacaa

SEQ ID NO: 1241739 - RNA, 19 nt, Homo sapiens
  misc_RNA (1)...(19): siRNA sense strand
ucuacagggucacuugguu

SEQ ID NO: 1241740 - RNA, 19 nt, Homo sapiens
  misc_RNA (1)...(19): siRNA sense strand
cuacacaaccaggcuaaga

SEQ ID NO: 1241741 - RNA, 19 nt, Homo sapiens
  misc_RNA (1)...(19): siRNA sense strand
auaaggaggcgcugcaaau

SEQ ID NO: 1241742 - RNA, 19 nt, Homo sapiens
  misc_RNA (1)...(19): siRNA sense strand
cagggucacuugguucauc

SEQ ID NO: 1241743 - RNA, 19 nt, Homo sapiens
  misc_RNA (1)...(19): siRNA sense strand
acacaaccaggcuaagaau

SEQ ID NO: 1241744 - RNA, 19 nt, Homo sapiens
  misc_RNA (1)...(19): siRNA sense strand
ucgcugcccgcaucuauga

SEQ ID NO: 1241745 - RNA, 19 nt, Homo sapiens
  misc_RNA (1)...(19): siRNA sense strand
uacacaaccaggcuaagaa

SEQ ID NO: 1241746 - RNA, 19 nt, Homo sapiens
  misc_RNA (1)...(19): siRNA sense strand
gaaucuucucuguggcuuu

SEQ ID NO: 1241747 - RNA, 19 nt, Homo sapiens
  misc_RNA (1)...(19): siRNA sense strand
uauaaggaggcgcugcaaa

SEQ ID NO: 1241748 - RNA, 19 nt, Homo sapiens
  misc_RNA (1)...(19): siRNA sense strand
cuuccaacuuuaacaaugg

SEQ ID NO: 1241749 - RNA, 19 nt, Homo sapiens
  misc_RNA (1)...(19): siRNA sense strand
uggaccugguuccuucuuu

SEQ ID NO: 1241750 - RNA, 19 nt, Homo sapiens
  misc_RNA (1)...(19): siRNA sense strand
guggagcgccuggacaaug

SEQ ID NO: 1241751 - RNA, 19 nt, Homo sapiens
  misc_RNA (1)...(19): siRNA sense strand
gcugcccgcaucuaugauu

SEQ ID NO: 1241752 - RNA, 19 nt, Homo sapiens
  misc_RNA (1)...(19): siRNA sense strand
acaaccaggcuaagaaucu

SEQ ID NO: 1241753 - RNA, 19 nt, Homo sapiens
  misc_RNA (1)...(19): siRNA sense strand
aauggcaccucggucaaga

SEQ ID NO: 1241754 - RNA, 19 nt, Homo sapiens
  misc_RNA (1)...(19): siRNA sense strand
uggagcgccuggacaaugg

SEQ ID NO: 1241755 - RNA, 19 nt, Homo sapiens
  misc_RNA (1)...(19): siRNA sense strand
uggaagagcuguucucaga

SEQ ID NO: 1241756 - RNA, 19 nt, Homo sapiens
  misc_RNA (1)...(19): siRNA sense strand
uugaaacgcuggagacuaa

SEQ ID NO: 1241757 - RNA, 19 nt, Homo sapiens
  misc_RNA (1)...(19): siRNA sense strand
ggacaugucucuggugaag

SEQ ID NO: 1241758 - RNA, 19 nt, Homo sapiens
  misc_RNA (1)...(19): siRNA sense strand
agaggaagcuuucacaagu

SEQ ID NO: 1241759 - RNA, 19 nt, Homo sapiens
  misc_RNA (1)...(19): siRNA sense strand
ggacugaagaggaaaugug

SEQ ID NO: 1241760 - RNA, 19 nt, Homo sapiens
  misc_RNA (1)...(19): siRNA sense strand
acaugucucuggugaaguu

SEQ ID NO: 1241761 - RNA, 19 nt, Homo sapiens
  misc_RNA (1)...(19): siRNA sense strand
gaggaagcuuucacaaguc

SEQ ID NO: 1241762 - RNA, 19 nt, Homo sapiens
  misc_RNA (1)...(19): siRNA sense strand
cacgaggacugaagaggaa

SEQ ID NO: 1241763 - RNA, 19 nt, Homo sapiens
  misc_RNA (1)...(19): siRNA sense strand
ggcagucgcuccuggacau

SEQ ID NO: 1241764 - RNA, 19 nt, Homo sapiens
  misc_RNA (1)...(19): siRNA sense strand
cuggugaaguugcagcuuu

SEQ ID NO: 1241765 - RNA, 19 nt, Homo sapiens
  misc_RNA (1)...(19): siRNA sense strand
gucacuugaucagauauuu

SEQ ID NO: 1241766 - RNA, 19 nt, Homo sapiens
  misc_RNA (1)...(19): siRNA sense strand
ccacacacaggguccaguu

SEQ ID NO: 1241767 - RNA, 19 nt, Homo sapiens
  misc_RNA (1)...(19): siRNA sense strand
cagaggaagcuuucacaag

SEQ ID NO: 1241768 - RNA, 19 nt, Homo sapiens
  misc_RNA (1)...(19): siRNA sense strand
cacuugaucagauauuuga

SEQ ID NO: 1241769 - RNA, 19 nt, Homo sapiens
  misc_RNA (1)...(19): siRNA sense strand
gcagauccaagaggagaug

SEQ ID NO: 1241770 - RNA, 19 nt, Homo sapiens
  misc_RNA (1)...(19): siRNA sense strand
ucacuugaucagauauuug

SEQ ID NO: 1241771 - RNA, 19 nt, Homo sapiens
  misc_RNA (1)...(19): siRNA sense strand
aggaagcuuucacaaguca

SEQ ID NO: 1241772 - RNA, 19 nt, Homo sapiens
  misc_RNA (1)...(19): siRNA sense strand
gauggauggcccucgagaa

SEQ ID NO: 1241773 - RNA, 19 nt, Homo sapiens
  misc_RNA (1)...(19): siRNA sense strand
cugaagaggaaauguguug

SEQ ID NO: 1241774 - RNA, 19 nt, Homo sapiens
  misc_RNA (1)...(19): siRNA sense strand
gacugaagaggaaaugugu

SEQ ID NO: 1241775 - RNA, 19 nt, Homo sapiens
  misc_RNA (1)...(19): siRNA sense strand
gaccuggacacaguacuga

SEQ ID NO: 1241776 - RNA, 19 nt, Homo sapiens
  misc_RNA (1)...(19): siRNA sense strand
uggugaaguugcagcuuug

SEQ ID NO: 1241777 - RNA, 19 nt, Homo sapiens
  misc_RNA (1)...(19): siRNA sense strand
acuacgaccuggacacagu

SEQ ID NO: 1241778 - RNA, 19 nt, Homo sapiens
  misc_RNA (1)...(19): siRNA sense strand
cacaggguccaguuucuga

SEQ ID NO: 1241779 - RNA, 19 nt, Homo sapiens
  misc_RNA (1)...(19): siRNA sense strand
acacacaggguccaguuuc

SEQ ID NO: 1241780 - RNA, 19 nt, Homo sapiens
  misc_RNA (1)...(19): siRNA sense strand
ccaacacgguccggcagau

SEQ ID NO: 1241781 - RNA, 19 nt, Homo sapiens
  misc_RNA (1)...(19): siRNA sense strand
uggaagagcuguucucaga

SEQ ID NO: 1241782 - RNA, 19 nt, Homo sapiens
  misc_RNA (1)...(19): siRNA sense strand
uugaaacgcuggagacuaa

SEQ ID NO: 1241783 - RNA, 19 nt, Homo sapiens
  misc_RNA (1)...(19): siRNA sense strand
ggacaugucucuggugaag

SEQ ID NO: 1241784 - RNA, 19 nt, Homo sapiens
  misc_RNA (1)...(19): siRNA sense strand
agaggaagcuuucacaagu

SEQ ID NO: 1241785 - RNA, 19 nt, Homo sapiens
  misc_RNA (1)...(19): siRNA sense strand
ggacugaagaggaaaugug

SEQ ID NO: 1241786 - RNA, 19 nt, Homo sapiens
  misc_RNA (1)...(19): siRNA sense strand
acaugucucuggugaaguu

SEQ ID NO: 1241787 - RNA, 19 nt, Homo sapiens
  misc_RNA (1)...(19): siRNA sense strand
gaggaagcuuucacaaguc

SEQ ID NO: 1241788 - RNA, 19 nt, Homo sapiens
  misc_RNA (1)...(19): siRNA sense strand
cacgaggacugaagaggaa

SEQ ID NO: 1241789 - RNA, 19 nt, Homo sapiens
  misc_RNA (1)...(19): siRNA sense strand
ggcagucgcuccuggacau

SEQ ID NO: 1241790 - RNA, 19 nt, Homo sapiens
  misc_RNA (1)...(19): siRNA sense strand
cuggugaaguugcagcuuu

SEQ ID NO: 1241791 - RNA, 19 nt, Homo sapiens
  misc_RNA (1)...(19): siRNA sense strand
gucacuugaucagauauuu

SEQ ID NO: 1241792 - RNA, 19 nt, Homo sapiens
  misc_RNA (1)...(19): siRNA sense strand
ccacacacaggguccaguu

SEQ ID NO: 1241793 - RNA, 19 nt, Homo sapiens
  misc_RNA (1)...(19): siRNA sense strand
cagaggaagcuuucacaag

SEQ ID NO: 1241794 - RNA, 19 nt, Homo sapiens
  misc_RNA (1)...(19): siRNA sense strand
cacuugaucagauauuuga

SEQ ID NO: 1241795 - RNA, 19 nt, Homo sapiens
  misc_RNA (1)...(19): siRNA sense strand
gcagauccaagaggagaug

SEQ ID NO: 1241796 - RNA, 19 nt, Homo sapiens
  misc_RNA (1)...(19): siRNA sense strand
ucacuugaucagauauuug

SEQ ID NO: 1241797 - RNA, 19 nt, Homo sapiens
  misc_RNA (1)...(19): siRNA sense strand
aggaagcuuucacaaguca

SEQ ID NO: 1241798 - RNA, 19 nt, Homo sapiens
  misc_RNA (1)...(19): siRNA sense strand
gauggauggcccucgagaa

SEQ ID NO: 1241799 - RNA, 19 nt, Homo sapiens
  misc_RNA (1)...(19): siRNA sense strand
cugaagaggaaauguguug

SEQ ID NO: 1241800 - RNA, 19 nt, Homo sapiens
  misc_RNA (1)...(19): siRNA sense strand
gacugaagaggaaaugugu

SEQ ID NO: 1241801 - RNA, 19 nt, Homo sapiens
  misc_RNA (1)...(19): siRNA sense strand
gaccuggacacaguacuga

SEQ ID NO: 1241802 - RNA, 19 nt, Homo sapiens
  misc_RNA (1)...(19): siRNA sense strand
uggugaaguugcagcuuug

SEQ ID NO: 1241803 - RNA, 19 nt, Homo sapiens
  misc_RNA (1)...(19): siRNA sense strand
acuacgaccuggacacagu

SEQ ID NO: 1241804 - RNA, 19 nt, Homo sapiens
  misc_RNA (1)...(19): siRNA sense strand
cacaggguccaguuucuga

SEQ ID NO: 1241805 - RNA, 19 nt, Homo sapiens
  misc_RNA (1)...(19): siRNA sense strand
acacacaggguccaguuuc

SEQ ID NO: 1241806 - RNA, 19 nt, Homo sapiens
  misc_RNA (1)...(19): siRNA sense strand
ccaacacgguccggcagau

SEQ ID NO: 1241807 - RNA, 19 nt, Homo sapiens
  misc_RNA (1)...(19): siRNA sense strand
uggaagagcuguucucaga

SEQ ID NO: 1241808 - RNA, 19 nt, Homo sapiens
  misc_RNA (1)...(19): siRNA sense strand
uugaaacgcuggagacuaa

SEQ ID NO: 1241809 - RNA, 19 nt, Homo sapiens
  misc_RNA (1)...(19): siRNA sense strand
ggacaugucucuggugaag

SEQ ID NO: 1241810 - RNA, 19 nt, Homo sapiens
  misc_RNA (1)...(19): siRNA sense strand
agaggaagcuuucacaagu

SEQ ID NO: 1241811 - RNA, 19 nt, Homo sapiens
  misc_RNA (1)...(19): siRNA sense strand
ggacugaagaggaaaugug

SEQ ID NO: 1241812 - RNA, 19 nt, Homo sapiens
  misc_RNA (1)...(19): siRNA sense strand
acaugucucuggugaaguu

SEQ ID NO: 1241813 - RNA, 19 nt, Homo sapiens
  misc_RNA (1)...(19): siRNA sense strand
gaggaagcuuucacaaguc

SEQ ID NO: 1241814 - RNA, 19 nt, Homo sapiens
  misc_RNA (1)...(19): siRNA sense strand
cacgaggacugaagaggaa

SEQ ID NO: 1241815 - RNA, 19 nt, Homo sapiens
  misc_RNA (1)...(19): siRNA sense strand
ggcagucgcuccuggacau

SEQ ID NO: 1241816 - RNA, 19 nt, Homo sapiens
  misc_RNA (1)...(19): siRNA sense strand
cuggugaaguugcagcuuu

SEQ ID NO: 1241817 - RNA, 19 nt, Homo sapiens
  misc_RNA (1)...(19): siRNA sense strand
gucacuugaucagauauuu

SEQ ID NO: 1241818 - RNA, 19 nt, Homo sapiens
  misc_RNA (1)...(19): siRNA sense strand
ccacacacaggguccaguu

SEQ ID NO: 1241819 - RNA, 19 nt, Homo sapiens
  misc_RNA (1)...(19): siRNA sense strand
cagaggaagcuuucacaag

SEQ ID NO: 1241820 - RNA, 19 nt, Homo sapiens
  misc_RNA (1)...(19): siRNA sense strand
cacuugaucagauauuuga

SEQ ID NO: 1241821 - RNA, 19 nt, Homo sapiens
  misc_RNA (1)...(19): siRNA sense strand
gcagauccaagaggagaug

SEQ ID NO: 1241822 - RNA, 19 nt, Homo sapiens
  misc_RNA (1)...(19): siRNA sense strand
ucacuugaucagauauuug

SEQ ID NO: 1241823 - RNA, 19 nt, Homo sapiens
  misc_RNA (1)...(19): siRNA sense strand
aggaagcuuucacaaguca

SEQ ID NO: 1241824 - RNA, 19 nt, Homo sapiens
  misc_RNA (1)...(19): siRNA sense strand
gauggauggcccucgagaa

SEQ ID NO: 1241825 - RNA, 19 nt, Homo sapiens
  misc_RNA (1)...(19): siRNA sense strand
cugaagaggaaauguguug

SEQ ID NO: 1241826 - RNA, 19 nt, Homo sapiens
  misc_RNA (1)...(19): siRNA sense strand
gacugaagaggaaaugugu

SEQ ID NO: 1241827 - RNA, 19 nt, Homo sapiens
  misc_RNA (1)...(19): siRNA sense strand
gaccuggacacaguacuga

SEQ ID NO: 1241828 - RNA, 19 nt, Homo sapiens
  misc_RNA (1)...(19): siRNA sense strand
uggugaaguugcagcuuug

SEQ ID NO: 1241829 - RNA, 19 nt, Homo sapiens
  misc_RNA (1)...(19): siRNA sense strand
acuacgaccuggacacagu

SEQ ID NO: 1241830 - RNA, 19 nt, Homo sapiens
  misc_RNA (1)...(19): siRNA sense strand
cacaggguccaguuucuga

SEQ ID NO: 1241831 - RNA, 19 nt, Homo sapiens
  misc_RNA (1)...(19): siRNA sense strand
acacacaggguccaguuuc

SEQ ID NO: 1241832 - RNA, 19 nt, Homo sapiens
  misc_RNA (1)...(19): siRNA sense strand
ccaacacgguccggcagau

SEQ ID NO: 1241833 - RNA, 19 nt, Homo sapiens
  misc_RNA (1)...(19): siRNA sense strand
uggaagagcuguucucaga

SEQ ID NO: 1241834 - RNA, 19 nt, Homo sapiens
  misc_RNA (1)...(19): siRNA sense strand
uugaaacgcuggagacuaa

SEQ ID NO: 1241835 - RNA, 19 nt, Homo sapiens
  misc_RNA (1)...(19): siRNA sense strand
ggacaugucucuggugaag

SEQ ID NO: 1241836 - RNA, 19 nt, Homo sapiens
  misc_RNA (1)...(19): siRNA sense strand
agaggaagcuuucacaagu

SEQ ID NO: 1241837 - RNA, 19 nt, Homo sapiens
  misc_RNA (1)...(19): siRNA sense strand
ggacugaagaggaaaugug

SEQ ID NO: 1241838 - RNA, 19 nt, Homo sapiens
  misc_RNA (1)...(19): siRNA sense strand
acaugucucuggugaaguu

SEQ ID NO: 1241839 - RNA, 19 nt, Homo sapiens
  misc_RNA (1)...(19): siRNA sense strand
gaggaagcuuucacaaguc

SEQ ID NO: 1241840 - RNA, 19 nt, Homo sapiens
  misc_RNA (1)...(19): siRNA sense strand
cacgaggacugaagaggaa

SEQ ID NO: 1241841 - RNA, 19 nt, Homo sapiens
  misc_RNA (1)...(19): siRNA sense strand
ggcagucgcuccuggacau

SEQ ID NO: 1241842 - RNA, 19 nt, Homo sapiens
  misc_RNA (1)...(19): siRNA sense strand
cuggugaaguugcagcuuu

SEQ ID NO: 1241843 - RNA, 19 nt, Homo sapiens
  misc_RNA (1)...(19): siRNA sense strand
gucacuugaucagauauuu

SEQ ID NO: 1241844 - RNA, 19 nt, Homo sapiens
  misc_RNA (1)...(19): siRNA sense strand
ccacacacaggguccaguu

SEQ ID NO: 1241845 - RNA, 19 nt, Homo sapiens
  misc_RNA (1)...(19): siRNA sense strand
cagaggaagcuuucacaag

SEQ ID NO: 1241846 - RNA, 19 nt, Homo sapiens
  misc_RNA (1)...(19): siRNA sense strand
cacuugaucagauauuuga

SEQ ID NO: 1241847 - RNA, 19 nt, Homo sapiens
  misc_RNA (1)...(19): siRNA sense strand
gcagauccaagaggagaug

SEQ ID NO: 1241848 - RNA, 19 nt, Homo sapiens
  misc_RNA (1)...(19): siRNA sense strand
ucacuugaucagauauuug

SEQ ID NO: 1241849 - RNA, 19 nt, Homo sapiens
  misc_RNA (1)...(19): siRNA sense strand
aggaagcuuucacaaguca

SEQ ID NO: 1241850 - RNA, 19 nt, Homo sapiens
  misc_RNA (1)...(19): siRNA sense strand
gauggauggcccucgagaa

SEQ ID NO: 1241851 - RNA, 19 nt, Homo sapiens
  misc_RNA (1)...(19): siRNA sense strand
cugaagaggaaauguguug

SEQ ID NO: 1241852 - RNA, 19 nt, Homo sapiens
  misc_RNA (1)...(19): siRNA sense strand
gacugaagaggaaaugugu

SEQ ID NO: 1241853 - RNA, 19 nt, Homo sapiens
  misc_RNA (1)...(19): siRNA sense strand
gaccuggacacaguacuga

SEQ ID NO: 1241854 - RNA, 19 nt, Homo sapiens
  misc_RNA (1)...(19): siRNA sense strand
uggugaaguugcagcuuug

SEQ ID NO: 1241855 - RNA, 19 nt, Homo sapiens
  misc_RNA (1)...(19): siRNA sense strand
acuacgaccuggacacagu

SEQ ID NO: 1241856 - RNA, 19 nt, Homo sapiens
  misc_RNA (1)...(19): siRNA sense strand
cacaggguccaguuucuga

SEQ ID NO: 1241857 - RNA, 19 nt, Homo sapiens
  misc_RNA (1)...(19): siRNA sense strand
acacacaggguccaguuuc

SEQ ID NO: 1241858 - RNA, 19 nt, Homo sapiens
  misc_RNA (1)...(19): siRNA sense strand
ccaacacgguccggcagau

SEQ ID NO: 1241859 - RNA, 19 nt, Homo sapiens
  misc_RNA (1)...(19): siRNA sense strand
uagaagaggucaaggauaa

SEQ ID NO: 1241860 - RNA, 19 nt, Homo sapiens
  misc_RNA (1)...(19): siRNA sense strand
gaaagccacuccugccaaa

SEQ ID NO: 1241861 - RNA, 19 nt, Homo sapiens
  misc_RNA (1)...(19): siRNA sense strand
caaagaaaccugcagauga

SEQ ID NO: 1241862 - RNA, 19 nt, Homo sapiens
  misc_RNA (1)...(19): siRNA sense strand
ggaagcagauccagaagau

SEQ ID NO: 1241863 - RNA, 19 nt, Homo sapiens
  misc_RNA (1)...(19): siRNA sense strand
guaaagagaaaccaucuaa

SEQ ID NO: 1241864 - RNA, 19 nt, Homo sapiens
  misc_RNA (1)...(19): siRNA sense strand
gaagccaccuacaaagaaa

SEQ ID NO: 1241865 - RNA, 19 nt, Homo sapiens
  misc_RNA (1)...(19): siRNA sense strand
aaacaauuccuccugauua

SEQ ID NO: 1241866 - RNA, 19 nt, Homo sapiens
  misc_RNA (1)...(19): siRNA sense strand
ggagaaggccaaagaagaa

SEQ ID NO: 1241867 - RNA, 19 nt, Homo sapiens
  misc_RNA (1)...(19): siRNA sense strand
gaaaaccugugauggauaa

SEQ ID NO: 1241868 - RNA, 19 nt, Homo sapiens
  misc_RNA (1)...(19): siRNA sense strand
caaaaugcuucaucucuua

SEQ ID NO: 1241869 - RNA, 19 nt, Homo sapiens
  misc_RNA (1)...(19): siRNA sense strand
gaaacaaucccaucugagu

SEQ ID NO: 1241870 - RNA, 19 nt, Homo sapiens
  misc_RNA (1)...(19): siRNA sense strand
acaaaccaauggaagauaa

SEQ ID NO: 1241871 - RNA, 19 nt, Homo sapiens
  misc_RNA (1)...(19): siRNA sense strand
gaacagcuuccacccauga

SEQ ID NO: 1241872 - RNA, 19 nt, Homo sapiens
  misc_RNA (1)...(19): siRNA sense strand
gaaacaauuccuccugauu

SEQ ID NO: 1241873 - RNA, 19 nt, Homo sapiens
  misc_RNA (1)...(19): siRNA sense strand
agaaagagaugacacuauc

SEQ ID NO: 1241874 - RNA, 19 nt, Homo sapiens
  misc_RNA (1)...(19): siRNA sense strand
uaaacucucugacagucua

SEQ ID NO: 1241875 - RNA, 19 nt, Homo sapiens
  misc_RNA (1)...(19): siRNA sense strand
acagaaaccucacagaaca

SEQ ID NO: 1241876 - RNA, 19 nt, Homo sapiens
  misc_RNA (1)...(19): siRNA sense strand
gaacaaaccaauggaagau

SEQ ID NO: 1241877 - RNA, 19 nt, Homo sapiens
  misc_RNA (1)...(19): siRNA sense strand
ggucaaggauaaagaugga

SEQ ID NO: 1241878 - RNA, 19 nt, Homo sapiens
  misc_RNA (1)...(19): siRNA sense strand
ggacaggacaaaccaguga

SEQ ID NO: 1241879 - RNA, 19 nt, Homo sapiens
  misc_RNA (1)...(19): siRNA sense strand
gagacaagcuuggagaaag

SEQ ID NO: 1241880 - RNA, 19 nt, Homo sapiens
  misc_RNA (1)...(19): siRNA sense strand
ugaccggucugaauguaaa

SEQ ID NO: 1241881 - RNA, 19 nt, Homo sapiens
  misc_RNA (1)...(19): siRNA sense strand
ccaaagcaccuaagaaugg

SEQ ID NO: 1241882 - RNA, 19 nt, Homo sapiens
  misc_RNA (1)...(19): siRNA sense strand
ugucggaccuccaugugua

SEQ ID NO: 1241883 - RNA, 19 nt, Homo sapiens
  misc_RNA (1)...(19): siRNA sense strand
caaagaagaagaccgugaa

SEQ ID NO: 1241884 - RNA, 19 nt, Homo sapiens
  misc_RNA (1)...(19): siRNA sense strand
agacaagcuuggagaaaga

SEQ ID NO: 1241885 - RNA, 19 nt, Homo sapiens
  misc_RNA (1)...(19): siRNA sense strand
aaagaaaccugcagaugac

SEQ ID NO: 1241886 - RNA, 19 nt, Homo sapiens
  misc_RNA (1)...(19): siRNA sense strand
gcaaagacaacagaggaaa

SEQ ID NO: 1241887 - RNA, 19 nt, Homo sapiens
  misc_RNA (1)...(19): siRNA sense strand
ggaccuccauguguaguau

SEQ ID NO: 1241888 - RNA, 19 nt, Homo sapiens
  misc_RNA (1)...(19): siRNA sense strand
gagaaagagaugacacuau

SEQ ID NO: 1241889 - RNA, 19 nt, Homo sapiens
  misc_RNA (1)...(19): siRNA sense strand
gaugaugccuuggauaaac

SEQ ID NO: 1241890 - RNA, 19 nt, Homo sapiens
  misc_RNA (1)...(19): siRNA sense strand
aaaggaagcagauccagaa

SEQ ID NO: 1241891 - RNA, 19 nt, Homo sapiens
  misc_RNA (1)...(19): siRNA sense strand
ugacaaagaccucgaugau

SEQ ID NO: 1241892 - RNA, 19 nt, Homo sapiens
  misc_RNA (1)...(19): siRNA sense strand
gugaaaagcuuggugaaaa

SEQ ID NO: 1241893 - RNA, 19 nt, Homo sapiens
  misc_RNA (1)...(19): siRNA sense strand
uggauaaagucaaggagaa

SEQ ID NO: 1241894 - RNA, 19 nt, Homo sapiens
  misc_RNA (1)...(19): siRNA sense strand
caaagcaccuaagaaugga

SEQ ID NO: 1241895 - RNA, 19 nt, Homo sapiens
  misc_RNA (1)...(19): siRNA sense strand
cuacagaaaccucacagaa

SEQ ID NO: 1241896 - RNA, 19 nt, Homo sapiens
  misc_RNA (1)...(19): siRNA sense strand
gaccuccgcucaauuaagg

SEQ ID NO: 1241897 - RNA, 19 nt, Homo sapiens
  misc_RNA (1)...(19): siRNA sense strand
gccagaugaugcuguagaa

SEQ ID NO: 1241898 - RNA, 19 nt, Homo sapiens
  misc_RNA (1)...(19): siRNA sense strand
gaacacagcaaaggauaag

SEQ ID NO: 1241899 - RNA, 19 nt, Homo sapiens
  misc_RNA (1)...(19): siRNA sense strand
ucaaggagaaggccaaaga

SEQ ID NO: 1241900 - RNA, 19 nt, Homo sapiens
  misc_RNA (1)...(19): siRNA sense strand
ggagaaagagaugacacua

SEQ ID NO: 1241901 - RNA, 19 nt, Homo sapiens
  misc_RNA (1)...(19): siRNA sense strand
ggagguaaagcgaaggauu

SEQ ID NO: 1241902 - RNA, 19 nt, Homo sapiens
  misc_RNA (1)...(19): siRNA sense strand
aaacaaucccaucugagua

SEQ ID NO: 1241903 - RNA, 19 nt, Homo sapiens
  misc_RNA (1)...(19): siRNA sense strand
caaaggauaagugcaagaa

SEQ ID NO: 1241904 - RNA, 19 nt, Homo sapiens
  misc_RNA (1)...(19): siRNA sense strand
gcgaaggauucagcaaaga

SEQ ID NO: 1241905 - RNA, 19 nt, Homo sapiens
  misc_RNA (1)...(19): siRNA sense strand
ugacccagaugagaacaaa

SEQ ID NO: 1241906 - RNA, 19 nt, Homo sapiens
  misc_RNA (1)...(19): siRNA sense strand
gagguaaagcgaaggauuc

SEQ ID NO: 1241907 - RNA, 19 nt, Homo sapiens
  misc_RNA (1)...(19): siRNA sense strand
uaucccaccugaauacaga

SEQ ID NO: 1241908 - RNA, 19 nt, Homo sapiens
  misc_RNA (1)...(19): siRNA sense strand
gaugagaacaaaccaaugg

SEQ ID NO: 1241909 - RNA, 19 nt, Homo sapiens
  misc_RNA (1)...(19): siRNA sense strand
auacagacaucuccuggau

SEQ ID NO: 1241910 - RNA, 19 nt, Homo sapiens
  misc_RNA (1)...(19): siRNA sense strand
gaaguguggugaggaugau

SEQ ID NO: 1241911 - RNA, 19 nt, Homo sapiens
  misc_RNA (1)...(19): siRNA sense strand
ccaauggaagauaaaguaa

SEQ ID NO: 1241912 - RNA, 19 nt, Homo sapiens
  misc_RNA (1)...(19): siRNA sense strand
cagcaaaggauaagugcaa

SEQ ID NO: 1241913 - RNA, 19 nt, Homo sapiens
  misc_RNA (1)...(19): siRNA sense strand
aacaauuccuccugauuau

SEQ ID NO: 1241914 - RNA, 19 nt, Homo sapiens
  misc_RNA (1)...(19): siRNA sense strand
cagaacacagcaaaggaua

SEQ ID NO: 1241915 - RNA, 19 nt, Homo sapiens
  misc_RNA (1)...(19): siRNA sense strand
ugaagccaccuacaaagaa

SEQ ID NO: 1241916 - RNA, 19 nt, Homo sapiens
  misc_RNA (1)...(19): siRNA sense strand
ggauaaagauggaaaacca

SEQ ID NO: 1241917 - RNA, 19 nt, Homo sapiens
  misc_RNA (1)...(19): siRNA sense strand
ggaagauaaaguaaaggaa

SEQ ID NO: 1241918 - RNA, 19 nt, Homo sapiens
  misc_RNA (1)...(19): siRNA sense strand
caauuaaggaagucgauga

SEQ ID NO: 1241919 - RNA, 19 nt, Homo sapiens
  misc_RNA (1)...(19): siRNA sense strand
gaaaccaucuaagccaacu

SEQ ID NO: 1241920 - RNA, 19 nt, Homo sapiens
  misc_RNA (1)...(19): siRNA sense strand
ugccaucucugaagugguu

SEQ ID NO: 1241921 - RNA, 19 nt, Homo sapiens
  misc_RNA (1)...(19): siRNA sense strand
ucgaugaugccuuggauaa

SEQ ID NO: 1241922 - RNA, 19 nt, Homo sapiens
  misc_RNA (1)...(19): siRNA sense strand
gacacuaucccaccugaau

SEQ ID NO: 1241923 - RNA, 19 nt, Homo sapiens
  misc_RNA (1)...(19): siRNA sense strand
gugaagccaccuacaaaga

SEQ ID NO: 1241924 - RNA, 19 nt, Homo sapiens
  misc_RNA (1)...(19): siRNA sense strand
ugaggaugaugaaacaauc

SEQ ID NO: 1241925 - RNA, 19 nt, Homo sapiens
  misc_RNA (1)...(19): siRNA sense strand
gaaggauucagcaaagaca

SEQ ID NO: 1241926 - RNA, 19 nt, Homo sapiens
  misc_RNA (1)...(19): siRNA sense strand
ucaaagaaaccugcagaug

SEQ ID NO: 1241927 - RNA, 19 nt, Homo sapiens
  misc_RNA (1)...(19): siRNA sense strand
gacaaagaccucgaugaug

SEQ ID NO: 1241928 - RNA, 19 nt, Homo sapiens
  misc_RNA (1)...(19): siRNA sense strand
gaagaggucaaggauaaag

SEQ ID NO: 1241929 - RNA, 19 nt, Homo sapiens
  misc_RNA (1)...(19): siRNA sense strand
gauuagaagaggucaagga

SEQ ID NO: 1241930 - RNA, 19 nt, Homo sapiens
  misc_RNA (1)...(19): siRNA sense strand
caauuccuccugauuauag

SEQ ID NO: 1241931 - RNA, 19 nt, Homo sapiens
  misc_RNA (1)...(19): siRNA sense strand
caaggagaaggccaaagaa

SEQ ID NO: 1241932 - RNA, 19 nt, Homo sapiens
  misc_RNA (1)...(19): siRNA sense strand
augaaacaaucccaucuga

SEQ ID NO: 1241933 - RNA, 19 nt, Homo sapiens
  misc_RNA (1)...(19): siRNA sense strand
gcaaaggauaagugcaaga

SEQ ID NO: 1241934 - RNA, 19 nt, Homo sapiens
  misc_RNA (1)...(19): siRNA sense strand
cagugaagccaccuacaaa

SEQ ID NO: 1241935 - RNA, 19 nt, Homo sapiens
  misc_RNA (1)...(19): siRNA sense strand
ccagugaagccaccuacaa

SEQ ID NO: 1241936 - RNA, 19 nt, Homo sapiens
  misc_RNA (1)...(19): siRNA sense strand
ggauaaacucucugacagu

SEQ ID NO: 1241937 - RNA, 19 nt, Homo sapiens
  misc_RNA (1)...(19): siRNA sense strand
ggucugaauguaaagagaa

SEQ ID NO: 1241938 - RNA, 19 nt, Homo sapiens
  misc_RNA (1)...(19): siRNA sense strand
cagaugagaacaaaccaau

SEQ ID NO: 1241939 - RNA, 19 nt, Homo sapiens
  misc_RNA (1)...(19): siRNA sense strand
gaaaccugcagaugaccaa

SEQ ID NO: 1241940 - RNA, 19 nt, Homo sapiens
  misc_RNA (1)...(19): siRNA sense strand
acacuaucccaccugaaua

SEQ ID NO: 1241941 - RNA, 19 nt, Homo sapiens
  misc_RNA (1)...(19): siRNA sense strand
agagaaguguggugaggau

SEQ ID NO: 1241942 - RNA, 19 nt, Homo sapiens
  misc_RNA (1)...(19): siRNA sense strand
caaaccaauggaagauaaa

SEQ ID NO: 1241943 - RNA, 19 nt, Homo sapiens
  misc_RNA (1)...(19): siRNA sense strand
agaacaaaccaauggaaga

SEQ ID NO: 1241944 - RNA, 19 nt, Homo sapiens
  misc_RNA (1)...(19): siRNA sense strand
ccacggauaaagauggaaa

SEQ ID NO: 1241945 - RNA, 19 nt, Homo sapiens
  misc_RNA (1)...(19): siRNA sense strand
aaagagaaaccaucuaagc

SEQ ID NO: 1241946 - RNA, 19 nt, Homo sapiens
  misc_RNA (1)...(19): siRNA sense strand
gcuccaaagcaccuaagaa

SEQ ID NO: 1241947 - RNA, 19 nt, Homo sapiens
  misc_RNA (1)...(19): siRNA sense strand
caaaagagucuaaggaaca

SEQ ID NO: 1241948 - RNA, 19 nt, Homo sapiens
  misc_RNA (1)...(19): siRNA sense strand
ucaaggauaaagauggaaa

SEQ ID NO: 1241949 - RNA, 19 nt, Homo sapiens
  misc_RNA (1)...(19): siRNA sense strand
agaaacaauuccuccugau

SEQ ID NO: 1241950 - RNA, 19 nt, Homo sapiens
  misc_RNA (1)...(19): siRNA sense strand
gaagauggaaaaccuguga

SEQ ID NO: 1241951 - RNA, 19 nt, Homo sapiens
  misc_RNA (1)...(19): siRNA sense strand
caucuaagccaacugaaaa

SEQ ID NO: 1241952 - RNA, 19 nt, Homo sapiens
  misc_RNA (1)...(19): siRNA sense strand
gucugaauguaaagagaaa

SEQ ID NO: 1241953 - RNA, 19 nt, Homo sapiens
  misc_RNA (1)...(19): siRNA sense strand
accaauggaagauaaagua

SEQ ID NO: 1241954 - RNA, 19 nt, Homo sapiens
  misc_RNA (1)...(19): siRNA sense strand
ccaucuaagccaacugaaa

SEQ ID NO: 1241955 - RNA, 19 nt, Homo sapiens
  misc_RNA (1)...(19): siRNA sense strand
ucagaggauucaaagaaac

SEQ ID NO: 1241956 - RNA, 19 nt, Homo sapiens
  misc_RNA (1)...(19): siRNA sense strand
aucagaggauucaaagaaa

SEQ ID NO: 1241957 - RNA, 19 nt, Homo sapiens
  misc_RNA (1)...(19): siRNA sense strand
ccaccugaauacagacauc

SEQ ID NO: 1241958 - RNA, 19 nt, Homo sapiens
  misc_RNA (1)...(19): siRNA sense strand
aagcgaaggauucagcaaa

SEQ ID NO: 1241959 - RNA, 19 nt, Homo sapiens
  misc_RNA (1)...(19): siRNA sense strand
uagaagaggucaaggauaa

SEQ ID NO: 1241960 - RNA, 19 nt, Homo sapiens
  misc_RNA (1)...(19): siRNA sense strand
gaaagccacuccugccaaa

SEQ ID NO: 1241961 - RNA, 19 nt, Homo sapiens
  misc_RNA (1)...(19): siRNA sense strand
caaagaaaccugcagauga

SEQ ID NO: 1241962 - RNA, 19 nt, Homo sapiens
  misc_RNA (1)...(19): siRNA sense strand
ggaagcagauccagaagau

SEQ ID NO: 1241963 - RNA, 19 nt, Homo sapiens
  misc_RNA (1)...(19): siRNA sense strand
guaaagagaaaccaucuaa

SEQ ID NO: 1241964 - RNA, 19 nt, Homo sapiens
  misc_RNA (1)...(19): siRNA sense strand
gaagccaccuacaaagaaa

SEQ ID NO: 1241965 - RNA, 19 nt, Homo sapiens
  misc_RNA (1)...(19): siRNA sense strand
aaacaauuccuccugauua

SEQ ID NO: 1241966 - RNA, 19 nt, Homo sapiens
  misc_RNA (1)...(19): siRNA sense strand
ggagaaggccaaagaagaa

SEQ ID NO: 1241967 - RNA, 19 nt, Homo sapiens
  misc_RNA (1)...(19): siRNA sense strand
gaaaaccugugauggauaa

SEQ ID NO: 1241968 - RNA, 19 nt, Homo sapiens
  misc_RNA (1)...(19): siRNA sense strand
caaaaugcuucaucucuua

SEQ ID NO: 1241969 - RNA, 19 nt, Homo sapiens
  misc_RNA (1)...(19): siRNA sense strand
gaaacaaucccaucugagu

SEQ ID NO: 1241970 - RNA, 19 nt, Homo sapiens
  misc_RNA (1)...(19): siRNA sense strand
acaaaccaauggaagauaa

SEQ ID NO: 1241971 - RNA, 19 nt, Homo sapiens
  misc_RNA (1)...(19): siRNA sense strand
gaacagcuuccacccauga

SEQ ID NO: 1241972 - RNA, 19 nt, Homo sapiens
  misc_RNA (1)...(19): siRNA sense strand
gaaacaauuccuccugauu

SEQ ID NO: 1241973 - RNA, 19 nt, Homo sapiens
  misc_RNA (1)...(19): siRNA sense strand
agaaagagaugacacuauc

SEQ ID NO: 1241974 - RNA, 19 nt, Homo sapiens
  misc_RNA (1)...(19): siRNA sense strand
uaaacucucugacagucua

SEQ ID NO: 1241975 - RNA, 19 nt, Homo sapiens
  misc_RNA (1)...(19): siRNA sense strand
acagaaaccucacagaaca

SEQ ID NO: 1241976 - RNA, 19 nt, Homo sapiens
  misc_RNA (1)...(19): siRNA sense strand
gaacaaaccaauggaagau

SEQ ID NO: 1241977 - RNA, 19 nt, Homo sapiens
  misc_RNA (1)...(19): siRNA sense strand
ggucaaggauaaagaugga

SEQ ID NO: 1241978 - RNA, 19 nt, Homo sapiens
  misc_RNA (1)...(19): siRNA sense strand
ggacaggacaaaccaguga

SEQ ID NO: 1241979 - RNA, 19 nt, Homo sapiens
  misc_RNA (1)...(19): siRNA sense strand
gagacaagcuuggagaaag

SEQ ID NO: 1241980 - RNA, 19 nt, Homo sapiens
  misc_RNA (1)...(19): siRNA sense strand
ugaccggucugaauguaaa

SEQ ID NO: 1241981 - RNA, 19 nt, Homo sapiens
  misc_RNA (1)...(19): siRNA sense strand
ccaaagcaccuaagaaugg

SEQ ID NO: 1241982 - RNA, 19 nt, Homo sapiens
  misc_RNA (1)...(19): siRNA sense strand
ugucggaccuccaugugua

SEQ ID NO: 1241983 - RNA, 19 nt, Homo sapiens
  misc_RNA (1)...(19): siRNA sense strand
caaagaagaagaccgugaa

SEQ ID NO: 1241984 - RNA, 19 nt, Homo sapiens
  misc_RNA (1)...(19): siRNA sense strand
agacaagcuuggagaaaga

SEQ ID NO: 1241985 - RNA, 19 nt, Homo sapiens
  misc_RNA (1)...(19): siRNA sense strand
aaagaaaccugcagaugac

SEQ ID NO: 1241986 - RNA, 19 nt, Homo sapiens
  misc_RNA (1)...(19): siRNA sense strand
gcaaagacaacagaggaaa

SEQ ID NO: 1241987 - RNA, 19 nt, Homo sapiens
  misc_RNA (1)...(19): siRNA sense strand
ggaccuccauguguaguau

SEQ ID NO: 1241988 - RNA, 19 nt, Homo sapiens
  misc_RNA (1)...(19): siRNA sense strand
gagaaagagaugacacuau

SEQ ID NO: 1241989 - RNA, 19 nt, Homo sapiens
  misc_RNA (1)...(19): siRNA sense strand
gaugaugccuuggauaaac

SEQ ID NO: 1241990 - RNA, 19 nt, Homo sapiens
  misc_RNA (1)...(19): siRNA sense strand
aaaggaagcagauccagaa

SEQ ID NO: 1241991 - RNA, 19 nt, Homo sapiens
  misc_RNA (1)...(19): siRNA sense strand
ugacaaagaccucgaugau

SEQ ID NO: 1241992 - RNA, 19 nt, Homo sapiens
  misc_RNA (1)...(19): siRNA sense strand
gugaaaagcuuggugaaaa

SEQ ID NO: 1241993 - RNA, 19 nt, Homo sapiens
  misc_RNA (1)...(19): siRNA sense strand
uggauaaagucaaggagaa

SEQ ID NO: 1241994 - RNA, 19 nt, Homo sapiens
  misc_RNA (1)...(19): siRNA sense strand
caaagcaccuaagaaugga

SEQ ID NO: 1241995 - RNA, 19 nt, Homo sapiens
  misc_RNA (1)...(19): siRNA sense strand
cuacagaaaccucacagaa

SEQ ID NO: 1241996 - RNA, 19 nt, Homo sapiens
  misc_RNA (1)...(19): siRNA sense strand
gaccuccgcucaauuaagg

SEQ ID NO: 1241997 - RNA, 19 nt, Homo sapiens
  misc_RNA (1)...(19): siRNA sense strand
gccagaugaugcuguagaa

SEQ ID NO: 1241998 - RNA, 19 nt, Homo sapiens
  misc_RNA (1)...(19): siRNA sense strand
gaacacagcaaaggauaag

SEQ ID NO: 1241999 - RNA, 19 nt, Homo sapiens
  misc_RNA (1)...(19): siRNA sense strand
ucaaggagaaggccaaaga

SEQ ID NO: 1242000 - RNA, 19 nt, Homo sapiens
  misc_RNA (1)...(19): siRNA sense strand
ggagaaagagaugacacua

SEQ ID NO: 1242001 - RNA, 19 nt, Homo sapiens
  misc_RNA (1)...(19): siRNA sense strand
ggagguaaagcgaaggauu

SEQ ID NO: 1242002 - RNA, 19 nt, Homo sapiens
  misc_RNA (1)...(19): siRNA sense strand
aaacaaucccaucugagua

SEQ ID NO: 1242003 - RNA, 19 nt, Homo sapiens
  misc_RNA (1)...(19): siRNA sense strand
caaaggauaagugcaagaa

SEQ ID NO: 1242004 - RNA, 19 nt, Homo sapiens
  misc_RNA (1)...(19): siRNA sense strand
gcgaaggauucagcaaaga

SEQ ID NO: 1242005 - RNA, 19 nt, Homo sapiens
  misc_RNA (1)...(19): siRNA sense strand
ugacccagaugagaacaaa

SEQ ID NO: 1242006 - RNA, 19 nt, Homo sapiens
  misc_RNA (1)...(19): siRNA sense strand
gagguaaagcgaaggauuc

SEQ ID NO: 1242007 - RNA, 19 nt, Homo sapiens
  misc_RNA (1)...(19): siRNA sense strand
uaucccaccugaauacaga

SEQ ID NO: 1242008 - RNA, 19 nt, Homo sapiens
  misc_RNA (1)...(19): siRNA sense strand
gaugagaacaaaccaaugg

SEQ ID NO: 1242009 - RNA, 19 nt, Homo sapiens
  misc_RNA (1)...(19): siRNA sense strand
auacagacaucuccuggau

SEQ ID NO: 1242010 - RNA, 19 nt, Homo sapiens
  misc_RNA (1)...(19): siRNA sense strand
gaaguguggugaggaugau

SEQ ID NO: 1242011 - RNA, 19 nt, Homo sapiens
  misc_RNA (1)...(19): siRNA sense strand
ccaauggaagauaaaguaa

SEQ ID NO: 1242012 - RNA, 19 nt, Homo sapiens
  misc_RNA (1)...(19): siRNA sense strand
cagcaaaggauaagugcaa

SEQ ID NO: 1242013 - RNA, 19 nt, Homo sapiens
  misc_RNA (1)...(19): siRNA sense strand
aacaauuccuccugauuau

SEQ ID NO: 1242014 - RNA, 19 nt, Homo sapiens
  misc_RNA (1)...(19): siRNA sense strand
cagaacacagcaaaggaua

SEQ ID NO: 1242015 - RNA, 19 nt, Homo sapiens
  misc_RNA (1)...(19): siRNA sense strand
ugaagccaccuacaaagaa

SEQ ID NO: 1242016 - RNA, 19 nt, Homo sapiens
  misc_RNA (1)...(19): siRNA sense strand
ggauaaagauggaaaacca

SEQ ID NO: 1242017 - RNA, 19 nt, Homo sapiens
  misc_RNA (1)...(19): siRNA sense strand
ggaagauaaaguaaaggaa

SEQ ID NO: 1242018 - RNA, 19 nt, Homo sapiens
  misc_RNA (1)...(19): siRNA sense strand
caauuaaggaagucgauga

SEQ ID NO: 1242019 - RNA, 19 nt, Homo sapiens
  misc_RNA (1)...(19): siRNA sense strand
gaaaccaucuaagccaacu

SEQ ID NO: 1242020 - RNA, 19 nt, Homo sapiens
  misc_RNA (1)...(19): siRNA sense strand
ugccaucucugaagugguu

SEQ ID NO: 1242021 - RNA, 19 nt, Homo sapiens
  misc_RNA (1)...(19): siRNA sense strand
ucgaugaugccuuggauaa

SEQ ID NO: 1242022 - RNA, 19 nt, Homo sapiens
  misc_RNA (1)...(19): siRNA sense strand
gacacuaucccaccugaau

SEQ ID NO: 1242023 - RNA, 19 nt, Homo sapiens
  misc_RNA (1)...(19): siRNA sense strand
gugaagccaccuacaaaga

SEQ ID NO: 1242024 - RNA, 19 nt, Homo sapiens
  misc_RNA (1)...(19): siRNA sense strand
ugaggaugaugaaacaauc

SEQ ID NO: 1242025 - RNA, 19 nt, Homo sapiens
  misc_RNA (1)...(19): siRNA sense strand
gaaggauucagcaaagaca

SEQ ID NO: 1242026 - RNA, 19 nt, Homo sapiens
  misc_RNA (1)...(19): siRNA sense strand
ucaaagaaaccugcagaug

SEQ ID NO: 1242027 - RNA, 19 nt, Homo sapiens
  misc_RNA (1)...(19): siRNA sense strand
gacaaagaccucgaugaug

SEQ ID NO: 1242028 - RNA, 19 nt, Homo sapiens
  misc_RNA (1)...(19): siRNA sense strand
gaagaggucaaggauaaag

SEQ ID NO: 1242029 - RNA, 19 nt, Homo sapiens
  misc_RNA (1)...(19): siRNA sense strand
gauuagaagaggucaagga

SEQ ID NO: 1242030 - RNA, 19 nt, Homo sapiens
  misc_RNA (1)...(19): siRNA sense strand
caauuccuccugauuauag

SEQ ID NO: 1242031 - RNA, 19 nt, Homo sapiens
  misc_RNA (1)...(19): siRNA sense strand
caaggagaaggccaaagaa

SEQ ID NO: 1242032 - RNA, 19 nt, Homo sapiens
  misc_RNA (1)...(19): siRNA sense strand
augaaacaaucccaucuga

SEQ ID NO: 1242033 - RNA, 19 nt, Homo sapiens
  misc_RNA (1)...(19): siRNA sense strand
gcaaaggauaagugcaaga

SEQ ID NO: 1242034 - RNA, 19 nt, Homo sapiens
  misc_RNA (1)...(19): siRNA sense strand
cagugaagccaccuacaaa

SEQ ID NO: 1242035 - RNA, 19 nt, Homo sapiens
  misc_RNA (1)...(19): siRNA sense strand
ccagugaagccaccuacaa

SEQ ID NO: 1242036 - RNA, 19 nt, Homo sapiens
  misc_RNA (1)...(19): siRNA sense strand
ggauaaacucucugacagu

SEQ ID NO: 1242037 - RNA, 19 nt, Homo sapiens
  misc_RNA (1)...(19): siRNA sense strand
ggucugaauguaaagagaa

SEQ ID NO: 1242038 - RNA, 19 nt, Homo sapiens
  misc_RNA (1)...(19): siRNA sense strand
cagaugagaacaaaccaau

SEQ ID NO: 1242039 - RNA, 19 nt, Homo sapiens
  misc_RNA (1)...(19): siRNA sense strand
gaaaccugcagaugaccaa

SEQ ID NO: 1242040 - RNA, 19 nt, Homo sapiens
  misc_RNA (1)...(19): siRNA sense strand
acacuaucccaccugaaua

SEQ ID NO: 1242041 - RNA, 19 nt, Homo sapiens
  misc_RNA (1)...(19): siRNA sense strand
agagaaguguggugaggau

SEQ ID NO: 1242042 - RNA, 19 nt, Homo sapiens
  misc_RNA (1)...(19): siRNA sense strand
caaaccaauggaagauaaa

SEQ ID NO: 1242043 - RNA, 19 nt, Homo sapiens
  misc_RNA (1)...(19): siRNA sense strand
agaacaaaccaauggaaga

SEQ ID NO: 1242044 - RNA, 19 nt, Homo sapiens
  misc_RNA (1)...(19): siRNA sense strand
ccacggauaaagauggaaa

SEQ ID NO: 1242045 - RNA, 19 nt, Homo sapiens
  misc_RNA (1)...(19): siRNA sense strand
aaagagaaaccaucuaagc

SEQ ID NO: 1242046 - RNA, 19 nt, Homo sapiens
  misc_RNA (1)...(19): siRNA sense strand
gcuccaaagcaccuaagaa

SEQ ID NO: 1242047 - RNA, 19 nt, Homo sapiens
  misc_RNA (1)...(19): siRNA sense strand
caaaagagucuaaggaaca

SEQ ID NO: 1242048 - RNA, 19 nt, Homo sapiens
  misc_RNA (1)...(19): siRNA sense strand
ucaaggauaaagauggaaa

SEQ ID NO: 1242049 - RNA, 19 nt, Homo sapiens
  misc_RNA (1)...(19): siRNA sense strand
agaaacaauuccuccugau

SEQ ID NO: 1242050 - RNA, 19 nt, Homo sapiens
  misc_RNA (1)...(19): siRNA sense strand
gaagauggaaaaccuguga

SEQ ID NO: 1242051 - RNA, 19 nt, Homo sapiens
  misc_RNA (1)...(19): siRNA sense strand
caucuaagccaacugaaaa

SEQ ID NO: 1242052 - RNA, 19 nt, Homo sapiens
  misc_RNA (1)...(19): siRNA sense strand
gucugaauguaaagagaaa

SEQ ID NO: 1242053 - RNA, 19 nt, Homo sapiens
  misc_RNA (1)...(19): siRNA sense strand
accaauggaagauaaagua

SEQ ID NO: 1242054 - RNA, 19 nt, Homo sapiens
  misc_RNA (1)...(19): siRNA sense strand
ccaucuaagccaacugaaa

SEQ ID NO: 1242055 - RNA, 19 nt, Homo sapiens
  misc_RNA (1)...(19): siRNA sense strand
ucagaggauucaaagaaac

SEQ ID NO: 1242056 - RNA, 19 nt, Homo sapiens
  misc_RNA (1)...(19): siRNA sense strand
aucagaggauucaaagaaa

SEQ ID NO: 1242057 - RNA, 19 nt, Homo sapiens
  misc_RNA (1)...(19): siRNA sense strand
ccaccugaauacagacauc

SEQ ID NO: 1242058 - RNA, 19 nt, Homo sapiens
  misc_RNA (1)...(19): siRNA sense strand
aagcgaaggauucagcaaa

SEQ ID NO: 1242059 - RNA, 19 nt, Homo sapiens
  misc_RNA (1)...(19): siRNA sense strand
uagaagaggucaaggauaa

SEQ ID NO: 1242060 - RNA, 19 nt, Homo sapiens
  misc_RNA (1)...(19): siRNA sense strand
gaaagccacuccugccaaa

SEQ ID NO: 1242061 - RNA, 19 nt, Homo sapiens
  misc_RNA (1)...(19): siRNA sense strand
caaagaaaccugcagauga

SEQ ID NO: 1242062 - RNA, 19 nt, Homo sapiens
  misc_RNA (1)...(19): siRNA sense strand
ggaagcagauccagaagau

SEQ ID NO: 1242063 - RNA, 19 nt, Homo sapiens
  misc_RNA (1)...(19): siRNA sense strand
guaaagagaaaccaucuaa

SEQ ID NO: 1242064 - RNA, 19 nt, Homo sapiens
  misc_RNA (1)...(19): siRNA sense strand
gaagccaccuacaaagaaa

SEQ ID NO: 1242065 - RNA, 19 nt, Homo sapiens
  misc_RNA (1)...(19): siRNA sense strand
aaacaauuccuccugauua

SEQ ID NO: 1242066 - RNA, 19 nt, Homo sapiens
  misc_RNA (1)...(19): siRNA sense strand
ggagaaggccaaagaagaa

SEQ ID NO: 1242067 - RNA, 19 nt, Homo sapiens
  misc_RNA (1)...(19): siRNA sense strand
gaaaaccugugauggauaa

SEQ ID NO: 1242068 - RNA, 19 nt, Homo sapiens
  misc_RNA (1)...(19): siRNA sense strand
caaaaugcuucaucucuua

SEQ ID NO: 1242069 - RNA, 19 nt, Homo sapiens
  misc_RNA (1)...(19): siRNA sense strand
gaaacaaucccaucugagu

SEQ ID NO: 1242070 - RNA, 19 nt, Homo sapiens
  misc_RNA (1)...(19): siRNA sense strand
acaaaccaauggaagauaa

SEQ ID NO: 1242071 - RNA, 19 nt, Homo sapiens
  misc_RNA (1)...(19): siRNA sense strand
gaacagcuuccacccauga

SEQ ID NO: 1242072 - RNA, 19 nt, Homo sapiens
  misc_RNA (1)...(19): siRNA sense strand
gaaacaauuccuccugauu

SEQ ID NO: 1242073 - RNA, 19 nt, Homo sapiens
  misc_RNA (1)...(19): siRNA sense strand
agaaagagaugacacuauc

SEQ ID NO: 1242074 - RNA, 19 nt, Homo sapiens
  misc_RNA (1)...(19): siRNA sense strand
uaaacucucugacagucua

SEQ ID NO: 1242075 - RNA, 19 nt, Homo sapiens
  misc_RNA (1)...(19): siRNA sense strand
acagaaaccucacagaaca

SEQ ID NO: 1242076 - RNA, 19 nt, Homo sapiens
  misc_RNA (1)...(19): siRNA sense strand
gaacaaaccaauggaagau

SEQ ID NO: 1242077 - RNA, 19 nt, Homo sapiens
  misc_RNA (1)...(19): siRNA sense strand
ggucaaggauaaagaugga

SEQ ID NO: 1242078 - RNA, 19 nt, Homo sapiens
  misc_RNA (1)...(19): siRNA sense strand
ggacaggacaaaccaguga

SEQ ID NO: 1242079 - RNA, 19 nt, Homo sapiens
  misc_RNA (1)...(19): siRNA sense strand
gagacaagcuuggagaaag

SEQ ID NO: 1242080 - RNA, 19 nt, Homo sapiens
  misc_RNA (1)...(19): siRNA sense strand
ugaccggucugaauguaaa

SEQ ID NO: 1242081 - RNA, 19 nt, Homo sapiens
  misc_RNA (1)...(19): siRNA sense strand
ccaaagcaccuaagaaugg

SEQ ID NO: 1242082 - RNA, 19 nt, Homo sapiens
  misc_RNA (1)...(19): siRNA sense strand
ugucggaccuccaugugua

SEQ ID NO: 1242083 - RNA, 19 nt, Homo sapiens
  misc_RNA (1)...(19): siRNA sense strand
caaagaagaagaccgugaa

SEQ ID NO: 1242084 - RNA, 19 nt, Homo sapiens
  misc_RNA (1)...(19): siRNA sense strand
agacaagcuuggagaaaga

SEQ ID NO: 1242085 - RNA, 19 nt, Homo sapiens
  misc_RNA (1)...(19): siRNA sense strand
aaagaaaccugcagaugac

SEQ ID NO: 1242086 - RNA, 19 nt, Homo sapiens
  misc_RNA (1)...(19): siRNA sense strand
gcaaagacaacagaggaaa

SEQ ID NO: 1242087 - RNA, 19 nt, Homo sapiens
  misc_RNA (1)...(19): siRNA sense strand
ggaccuccauguguaguau

SEQ ID NO: 1242088 - RNA, 19 nt, Homo sapiens
  misc_RNA (1)...(19): siRNA sense strand
gagaaagagaugacacuau

SEQ ID NO: 1242089 - RNA, 19 nt, Homo sapiens
  misc_RNA (1)...(19): siRNA sense strand
gaugaugccuuggauaaac

SEQ ID NO: 1242090 - RNA, 19 nt, Homo sapiens
  misc_RNA (1)...(19): siRNA sense strand
aaaggaagcagauccagaa

SEQ ID NO: 1242091 - RNA, 19 nt, Homo sapiens
  misc_RNA (1)...(19): siRNA sense strand
ugacaaagaccucgaugau

SEQ ID NO: 1242092 - RNA, 19 nt, Homo sapiens
  misc_RNA (1)...(19): siRNA sense strand
gugaaaagcuuggugaaaa

SEQ ID NO: 1242093 - RNA, 19 nt, Homo sapiens
  misc_RNA (1)...(19): siRNA sense strand
uggauaaagucaaggagaa

SEQ ID NO: 1242094 - RNA, 19 nt, Homo sapiens
  misc_RNA (1)...(19): siRNA sense strand
caaagcaccuaagaaugga

SEQ ID NO: 1242095 - RNA, 19 nt, Homo sapiens
  misc_RNA (1)...(19): siRNA sense strand
cuacagaaaccucacagaa

SEQ ID NO: 1242096 - RNA, 19 nt, Homo sapiens
  misc_RNA (1)...(19): siRNA sense strand
gccagaugaugcuguagaa

SEQ ID NO: 1242097 - RNA, 19 nt, Homo sapiens
  misc_RNA (1)...(19): siRNA sense strand
gaacacagcaaaggauaag

SEQ ID NO: 1242098 - RNA, 19 nt, Homo sapiens
  misc_RNA (1)...(19): siRNA sense strand
ucaaggagaaggccaaaga

SEQ ID NO: 1242099 - RNA, 19 nt, Homo sapiens
  misc_RNA (1)...(19): siRNA sense strand
aaacaaucccaucugagua

SEQ ID NO: 1242100 - RNA, 19 nt, Homo sapiens
  misc_RNA (1)...(19): siRNA sense strand
ggagguaaagcgaaggauu

SEQ ID NO: 1242101 - RNA, 19 nt, Homo sapiens
  misc_RNA (1)...(19): siRNA sense strand
ggagaaagagaugacacua

SEQ ID NO: 1242102 - RNA, 19 nt, Homo sapiens
  misc_RNA (1)...(19): siRNA sense strand
caaaggauaagugcaagaa

SEQ ID NO: 1242103 - RNA, 19 nt, Homo sapiens
  misc_RNA (1)...(19): siRNA sense strand
gcgaaggauucagcaaaga

SEQ ID NO: 1242104 - RNA, 19 nt, Homo sapiens
  misc_RNA (1)...(19): siRNA sense strand
ugacccagaugagaacaaa

SEQ ID NO: 1242105 - RNA, 19 nt, Homo sapiens
  misc_RNA (1)...(19): siRNA sense strand
gagguaaagcgaaggauuc

SEQ ID NO: 1242106 - RNA, 19 nt, Homo sapiens
  misc_RNA (1)...(19): siRNA sense strand
uaucccaccugaauacaga

SEQ ID NO: 1242107 - RNA, 19 nt, Homo sapiens
  misc_RNA (1)...(19): siRNA sense strand
gaugagaacaaaccaaugg

SEQ ID NO: 1242108 - RNA, 19 nt, Homo sapiens
  misc_RNA (1)...(19): siRNA sense strand
gaaguguggugaggaugau

SEQ ID NO: 1242109 - RNA, 19 nt, Homo sapiens
  misc_RNA (1)...(19): siRNA sense strand
auacagacaucuccuggau

SEQ ID NO: 1242110 - RNA, 19 nt, Homo sapiens
  misc_RNA (1)...(19): siRNA sense strand
ccaauggaagauaaaguaa

SEQ ID NO: 1242111 - RNA, 19 nt, Homo sapiens
  misc_RNA (1)...(19): siRNA sense strand
cagcaaaggauaagugcaa

SEQ ID NO: 1242112 - RNA, 19 nt, Homo sapiens
  misc_RNA (1)...(19): siRNA sense strand
aacaauuccuccugauuau

SEQ ID NO: 1242113 - RNA, 19 nt, Homo sapiens
  misc_RNA (1)...(19): siRNA sense strand
ggauaaagauggaaaacca

SEQ ID NO: 1242114 - RNA, 19 nt, Homo sapiens
  misc_RNA (1)...(19): siRNA sense strand
cagaacacagcaaaggaua

SEQ ID NO: 1242115 - RNA, 19 nt, Homo sapiens
  misc_RNA (1)...(19): siRNA sense strand
ugaagccaccuacaaagaa

SEQ ID NO: 1242116 - RNA, 19 nt, Homo sapiens
  misc_RNA (1)...(19): siRNA sense strand
ggaagauaaaguaaaggaa

SEQ ID NO: 1242117 - RNA, 19 nt, Homo sapiens
  misc_RNA (1)...(19): siRNA sense strand
gaaaccaucuaagccaacu

SEQ ID NO: 1242118 - RNA, 19 nt, Homo sapiens
  misc_RNA (1)...(19): siRNA sense strand
ugccaucucugaagugguu

SEQ ID NO: 1242119 - RNA, 19 nt, Homo sapiens
  misc_RNA (1)...(19): siRNA sense strand
ucgaugaugccuuggauaa

SEQ ID NO: 1242120 - RNA, 19 nt, Homo sapiens
  misc_RNA (1)...(19): siRNA sense strand
gacacuaucccaccugaau

SEQ ID NO: 1242121 - RNA, 19 nt, Homo sapiens
  misc_RNA (1)...(19): siRNA sense strand
gugaagccaccuacaaaga

SEQ ID NO: 1242122 - RNA, 19 nt, Homo sapiens
  misc_RNA (1)...(19): siRNA sense strand
caauuccuccugauuauag

SEQ ID NO: 1242123 - RNA, 19 nt, Homo sapiens
  misc_RNA (1)...(19): siRNA sense strand
gaaggauucagcaaagaca

SEQ ID NO: 1242124 - RNA, 19 nt, Homo sapiens
  misc_RNA (1)...(19): siRNA sense strand
ucaaagaaaccugcagaug

SEQ ID NO: 1242125 - RNA, 19 nt, Homo sapiens
  misc_RNA (1)...(19): siRNA sense strand
ugaggaugaugaaacaauc

SEQ ID NO: 1242126 - RNA, 19 nt, Homo sapiens
  misc_RNA (1)...(19): siRNA sense strand
gacaaagaccucgaugaug

SEQ ID NO: 1242127 - RNA, 19 nt, Homo sapiens
  misc_RNA (1)...(19): siRNA sense strand
gaagaggucaaggauaaag

SEQ ID NO: 1242128 - RNA, 19 nt, Homo sapiens
  misc_RNA (1)...(19): siRNA sense strand
gauuagaagaggucaagga

SEQ ID NO: 1242129 - RNA, 19 nt, Homo sapiens
  misc_RNA (1)...(19): siRNA sense strand
caaggagaaggccaaagaa

SEQ ID NO: 1242130 - RNA, 19 nt, Homo sapiens
  misc_RNA (1)...(19): siRNA sense strand
gcaaaggauaagugcaaga

SEQ ID NO: 1242131 - RNA, 19 nt, Homo sapiens
  misc_RNA (1)...(19): siRNA sense strand
cagugaagccaccuacaaa

SEQ ID NO: 1242132 - RNA, 19 nt, Homo sapiens
  misc_RNA (1)...(19): siRNA sense strand
ccagugaagccaccuacaa

SEQ ID NO: 1242133 - RNA, 19 nt, Homo sapiens
  misc_RNA (1)...(19): siRNA sense strand
ggauaaacucucugacagu

SEQ ID NO: 1242134 - RNA, 19 nt, Homo sapiens
  misc_RNA (1)...(19): siRNA sense strand
augaaacaaucccaucuga

SEQ ID NO: 1242135 - RNA, 19 nt, Homo sapiens
  misc_RNA (1)...(19): siRNA sense strand
ggucugaauguaaagagaa

SEQ ID NO: 1242136 - RNA, 19 nt, Homo sapiens
  misc_RNA (1)...(19): siRNA sense strand
agagaaguguggugaggau

SEQ ID NO: 1242137 - RNA, 19 nt, Homo sapiens
  misc_RNA (1)...(19): siRNA sense strand
gaaaccugcagaugaccaa

SEQ ID NO: 1242138 - RNA, 19 nt, Homo sapiens
  misc_RNA (1)...(19): siRNA sense strand
acacuaucccaccugaaua

SEQ ID NO: 1242139 - RNA, 19 nt, Homo sapiens
  misc_RNA (1)...(19): siRNA sense strand
caaaccaauggaagauaaa

SEQ ID NO: 1242140 - RNA, 19 nt, Homo sapiens
  misc_RNA (1)...(19): siRNA sense strand
cagaugagaacaaaccaau

SEQ ID NO: 1242141 - RNA, 19 nt, Homo sapiens
  misc_RNA (1)...(19): siRNA sense strand
ccacggauaaagauggaaa

SEQ ID NO: 1242142 - RNA, 19 nt, Homo sapiens
  misc_RNA (1)...(19): siRNA sense strand
agaacaaaccaauggaaga

SEQ ID NO: 1242143 - RNA, 19 nt, Homo sapiens
  misc_RNA (1)...(19): siRNA sense strand
gaagauggaaaaccuguga

SEQ ID NO: 1242144 - RNA, 19 nt, Homo sapiens
  misc_RNA (1)...(19): siRNA sense strand
gcuccaaagcaccuaagaa

SEQ ID NO: 1242145 - RNA, 19 nt, Homo sapiens
  misc_RNA (1)...(19): siRNA sense strand
aaagagaaaccaucuaagc

SEQ ID NO: 1242146 - RNA, 19 nt, Homo sapiens
  misc_RNA (1)...(19): siRNA sense strand
caaaagagucuaaggaaca

SEQ ID NO: 1242147 - RNA, 19 nt, Homo sapiens
  misc_RNA (1)...(19): siRNA sense strand
ucaaggauaaagauggaaa

SEQ ID NO: 1242148 - RNA, 19 nt, Homo sapiens
  misc_RNA (1)...(19): siRNA sense strand
agaaacaauuccuccugau

SEQ ID NO: 1242149 - RNA, 19 nt, Homo sapiens
  misc_RNA (1)...(19): siRNA sense strand
caucuaagccaacugaaaa

SEQ ID NO: 1242150 - RNA, 19 nt, Homo sapiens
  misc_RNA (1)...(19): siRNA sense strand
accaauggaagauaaagua

SEQ ID NO: 1242151 - RNA, 19 nt, Homo sapiens
  misc_RNA (1)...(19): siRNA sense strand
gucugaauguaaagagaaa

SEQ ID NO: 1242152 - RNA, 19 nt, Homo sapiens
  misc_RNA (1)...(19): siRNA sense strand
ccaucuaagccaacugaaa

SEQ ID NO: 1242153 - RNA, 19 nt, Homo sapiens
  misc_RNA (1)...(19): siRNA sense strand
ucagaggauucaaagaaac

SEQ ID NO: 1242154 - RNA, 19 nt, Homo sapiens
  misc_RNA (1)...(19): siRNA sense strand
aucagaggauucaaagaaa

SEQ ID NO: 1242155 - RNA, 19 nt, Homo sapiens
  misc_RNA (1)...(19): siRNA sense strand
ccaccugaauacagacauc

SEQ ID NO: 1242156 - RNA, 19 nt, Homo sapiens
  misc_RNA (1)...(19): siRNA sense strand
ugagaacaaaccaauggaa

SEQ ID NO: 1242157 - RNA, 19 nt, Homo sapiens
  misc_RNA (1)...(19): siRNA sense strand
aagcgaaggauucagcaaa

SEQ ID NO: 1242158 - RNA, 19 nt, Homo sapiens
  misc_RNA (1)...(19): siRNA sense strand
ccucacagaacacagcaaa

SEQ ID NO: 1242159 - RNA, 19 nt, Homo sapiens
  misc_RNA (1)...(19): siRNA sense strand
uagaagaggucaaggauaa

SEQ ID NO: 1242160 - RNA, 19 nt, Homo sapiens
  misc_RNA (1)...(19): siRNA sense strand
gaaagccacuccugccaaa

SEQ ID NO: 1242161 - RNA, 19 nt, Homo sapiens
  misc_RNA (1)...(19): siRNA sense strand
caaagaaaccugcagauga

SEQ ID NO: 1242162 - RNA, 19 nt, Homo sapiens
  misc_RNA (1)...(19): siRNA sense strand
ggaagcagauccagaagau

SEQ ID NO: 1242163 - RNA, 19 nt, Homo sapiens
  misc_RNA (1)...(19): siRNA sense strand
guaaagagaaaccaucuaa

SEQ ID NO: 1242164 - RNA, 19 nt, Homo sapiens
  misc_RNA (1)...(19): siRNA sense strand
gaagccaccuacaaagaaa

SEQ ID NO: 1242165 - RNA, 19 nt, Homo sapiens
  misc_RNA (1)...(19): siRNA sense strand
aaacaauuccuccugauua

SEQ ID NO: 1242166 - RNA, 19 nt, Homo sapiens
  misc_RNA (1)...(19): siRNA sense strand
ggagaaggccaaagaagaa

SEQ ID NO: 1242167 - RNA, 19 nt, Homo sapiens
  misc_RNA (1)...(19): siRNA sense strand
gaaaaccugugauggauaa

SEQ ID NO: 1242168 - RNA, 19 nt, Homo sapiens
  misc_RNA (1)...(19): siRNA sense strand
caaaaugcuucaucucuua

SEQ ID NO: 1242169 - RNA, 19 nt, Homo sapiens
  misc_RNA (1)...(19): siRNA sense strand
gaaacaaucccaucugagu

SEQ ID NO: 1242170 - RNA, 19 nt, Homo sapiens
  misc_RNA (1)...(19): siRNA sense strand
acaaaccaauggaagauaa

SEQ ID NO: 1242171 - RNA, 19 nt, Homo sapiens
  misc_RNA (1)...(19): siRNA sense strand
gaacagcuuccacccauga

SEQ ID NO: 1242172 - RNA, 19 nt, Homo sapiens
  misc_RNA (1)...(19): siRNA sense strand
gaaacaauuccuccugauu

SEQ ID NO: 1242173 - RNA, 19 nt, Homo sapiens
  misc_RNA (1)...(19): siRNA sense strand
agaaagagaugacacuauc

SEQ ID NO: 1242174 - RNA, 19 nt, Homo sapiens
  misc_RNA (1)...(19): siRNA sense strand
uaaacucucugacagucua

SEQ ID NO: 1242175 - RNA, 19 nt, Homo sapiens
  misc_RNA (1)...(19): siRNA sense strand
acagaaaccucacagaaca

SEQ ID NO: 1242176 - RNA, 19 nt, Homo sapiens
  misc_RNA (1)...(19): siRNA sense strand
gaacaaaccaauggaagau

SEQ ID NO: 1242177 - RNA, 19 nt, Homo sapiens
  misc_RNA (1)...(19): siRNA sense strand
ggucaaggauaaagaugga

SEQ ID NO: 1242178 - RNA, 19 nt, Homo sapiens
  misc_RNA (1)...(19): siRNA sense strand
ggacaggacaaaccaguga

SEQ ID NO: 1242179 - RNA, 19 nt, Homo sapiens
  misc_RNA (1)...(19): siRNA sense strand
gagacaagcuuggagaaag

SEQ ID NO: 1242180 - RNA, 19 nt, Homo sapiens
  misc_RNA (1)...(19): siRNA sense strand
ugaccggucugaauguaaa

SEQ ID NO: 1242181 - RNA, 19 nt, Homo sapiens
  misc_RNA (1)...(19): siRNA sense strand
ccaaagcaccuaagaaugg

SEQ ID NO: 1242182 - RNA, 19 nt, Homo sapiens
  misc_RNA (1)...(19): siRNA sense strand
ugucggaccuccaugugua

SEQ ID NO: 1242183 - RNA, 19 nt, Homo sapiens
  misc_RNA (1)...(19): siRNA sense strand
caaagaagaagaccgugaa

SEQ ID NO: 1242184 - RNA, 19 nt, Homo sapiens
  misc_RNA (1)...(19): siRNA sense strand
agacaagcuuggagaaaga

SEQ ID NO: 1242185 - RNA, 19 nt, Homo sapiens
  misc_RNA (1)...(19): siRNA sense strand
aaagaaaccugcagaugac

SEQ ID NO: 1242186 - RNA, 19 nt, Homo sapiens
  misc_RNA (1)...(19): siRNA sense strand
gcaaagacaacagaggaaa

SEQ ID NO: 1242187 - RNA, 19 nt, Homo sapiens
  misc_RNA (1)...(19): siRNA sense strand
ggaccuccauguguaguau

SEQ ID NO: 1242188 - RNA, 19 nt, Homo sapiens
  misc_RNA (1)...(19): siRNA sense strand
gagaaagagaugacacuau

SEQ ID NO: 1242189 - RNA, 19 nt, Homo sapiens
  misc_RNA (1)...(19): siRNA sense strand
gaugaugccuuggauaaac

SEQ ID NO: 1242190 - RNA, 19 nt, Homo sapiens
  misc_RNA (1)...(19): siRNA sense strand
aaaggaagcagauccagaa

SEQ ID NO: 1242191 - RNA, 19 nt, Homo sapiens
  misc_RNA (1)...(19): siRNA sense strand
ugacaaagaccucgaugau

SEQ ID NO: 1242192 - RNA, 19 nt, Homo sapiens
  misc_RNA (1)...(19): siRNA sense strand
gugaaaagcuuggugaaaa

SEQ ID NO: 1242193 - RNA, 19 nt, Homo sapiens
  misc_RNA (1)...(19): siRNA sense strand
uggauaaagucaaggagaa

SEQ ID NO: 1242194 - RNA, 19 nt, Homo sapiens
  misc_RNA (1)...(19): siRNA sense strand
caaagcaccuaagaaugga

SEQ ID NO: 1242195 - RNA, 19 nt, Homo sapiens
  misc_RNA (1)...(19): siRNA sense strand
cuacagaaaccucacagaa

SEQ ID NO: 1242196 - RNA, 19 nt, Homo sapiens
  misc_RNA (1)...(19): siRNA sense strand
gaccuccgcucaauuaagg

SEQ ID NO: 1242197 - RNA, 19 nt, Homo sapiens
  misc_RNA (1)...(19): siRNA sense strand
gccagaugaugcuguagaa

SEQ ID NO: 1242198 - RNA, 19 nt, Homo sapiens
  misc_RNA (1)...(19): siRNA sense strand
gaacacagcaaaggauaag

SEQ ID NO: 1242199 - RNA, 19 nt, Homo sapiens
  misc_RNA (1)...(19): siRNA sense strand
ucaaggagaaggccaaaga

SEQ ID NO: 1242200 - RNA, 19 nt, Homo sapiens
  misc_RNA (1)...(19): siRNA sense strand
ggagaaagagaugacacua

SEQ ID NO: 1242201 - RNA, 19 nt, Homo sapiens
  misc_RNA (1)...(19): siRNA sense strand
ggagguaaagcgaaggauu

SEQ ID NO: 1242202 - RNA, 19 nt, Homo sapiens
  misc_RNA (1)...(19): siRNA sense strand
aaacaaucccaucugagua

SEQ ID NO: 1242203 - RNA, 19 nt, Homo sapiens
  misc_RNA (1)...(19): siRNA sense strand
caaaggauaagugcaagaa

SEQ ID NO: 1242204 - RNA, 19 nt, Homo sapiens
  misc_RNA (1)...(19): siRNA sense strand
gcgaaggauucagcaaaga

SEQ ID NO: 1242205 - RNA, 19 nt, Homo sapiens
  misc_RNA (1)...(19): siRNA sense strand
ugacccagaugagaacaaa

SEQ ID NO: 1242206 - RNA, 19 nt, Homo sapiens
  misc_RNA (1)...(19): siRNA sense strand
gagguaaagcgaaggauuc

SEQ ID NO: 1242207 - RNA, 19 nt, Homo sapiens
  misc_RNA (1)...(19): siRNA sense strand
uaucccaccugaauacaga

SEQ ID NO: 1242208 - RNA, 19 nt, Homo sapiens
  misc_RNA (1)...(19): siRNA sense strand
gaugagaacaaaccaaugg

SEQ ID NO: 1242209 - RNA, 19 nt, Homo sapiens
  misc_RNA (1)...(19): siRNA sense strand
auacagacaucuccuggau

SEQ ID NO: 1242210 - RNA, 19 nt, Homo sapiens
  misc_RNA (1)...(19): siRNA sense strand
gaaguguggugaggaugau

SEQ ID NO: 1242211 - RNA, 19 nt, Homo sapiens
  misc_RNA (1)...(19): siRNA sense strand
ccaauggaagauaaaguaa

SEQ ID NO: 1242212 - RNA, 19 nt, Homo sapiens
  misc_RNA (1)...(19): siRNA sense strand
cagcaaaggauaagugcaa

SEQ ID NO: 1242213 - RNA, 19 nt, Homo sapiens
  misc_RNA (1)...(19): siRNA sense strand
aacaauuccuccugauuau

SEQ ID NO: 1242214 - RNA, 19 nt, Homo sapiens
  misc_RNA (1)...(19): siRNA sense strand
cagaacacagcaaaggaua

SEQ ID NO: 1242215 - RNA, 19 nt, Homo sapiens
  misc_RNA (1)...(19): siRNA sense strand
ugaagccaccuacaaagaa

SEQ ID NO: 1242216 - RNA, 19 nt, Homo sapiens
  misc_RNA (1)...(19): siRNA sense strand
ggauaaagauggaaaacca

SEQ ID NO: 1242217 - RNA, 19 nt, Homo sapiens
  misc_RNA (1)...(19): siRNA sense strand
ggaagauaaaguaaaggaa

SEQ ID NO: 1242218 - RNA, 19 nt, Homo sapiens
  misc_RNA (1)...(19): siRNA sense strand
caauuaaggaagucgauga

SEQ ID NO: 1242219 - RNA, 19 nt, Homo sapiens
  misc_RNA (1)...(19): siRNA sense strand
gaaaccaucuaagccaacu

SEQ ID NO: 1242220 - RNA, 19 nt, Homo sapiens
  misc_RNA (1)...(19): siRNA sense strand
ugccaucucugaagugguu

SEQ ID NO: 1242221 - RNA, 19 nt, Homo sapiens
  misc_RNA (1)...(19): siRNA sense strand
ucgaugaugccuuggauaa

SEQ ID NO: 1242222 - RNA, 19 nt, Homo sapiens
  misc_RNA (1)...(19): siRNA sense strand
gacacuaucccaccugaau

SEQ ID NO: 1242223 - RNA, 19 nt, Homo sapiens
  misc_RNA (1)...(19): siRNA sense strand
gugaagccaccuacaaaga

SEQ ID NO: 1242224 - RNA, 19 nt, Homo sapiens
  misc_RNA (1)...(19): siRNA sense strand
ugaggaugaugaaacaauc

SEQ ID NO: 1242225 - RNA, 19 nt, Homo sapiens
  misc_RNA (1)...(19): siRNA sense strand
gaaggauucagcaaagaca

SEQ ID NO: 1242226 - RNA, 19 nt, Homo sapiens
  misc_RNA (1)...(19): siRNA sense strand
ucaaagaaaccugcagaug

SEQ ID NO: 1242227 - RNA, 19 nt, Homo sapiens
  misc_RNA (1)...(19): siRNA sense strand
gacaaagaccucgaugaug

SEQ ID NO: 1242228 - RNA, 19 nt, Homo sapiens
  misc_RNA (1)...(19): siRNA sense strand
gaagaggucaaggauaaag

SEQ ID NO: 1242229 - RNA, 19 nt, Homo sapiens
  misc_RNA (1)...(19): siRNA sense strand
gauuagaagaggucaagga

SEQ ID NO: 1242230 - RNA, 19 nt, Homo sapiens
  misc_RNA (1)...(19): siRNA sense strand
caauuccuccugauuauag

SEQ ID NO: 1242231 - RNA, 19 nt, Homo sapiens
  misc_RNA (1)...(19): siRNA sense strand
caaggagaaggccaaagaa

SEQ ID NO: 1242232 - RNA, 19 nt, Homo sapiens
  misc_RNA (1)...(19): siRNA sense strand
augaaacaaucccaucuga

SEQ ID NO: 1242233 - RNA, 19 nt, Homo sapiens
  misc_RNA (1)...(19): siRNA sense strand
gcaaaggauaagugcaaga

SEQ ID NO: 1242234 - RNA, 19 nt, Homo sapiens
  misc_RNA (1)...(19): siRNA sense strand
cagugaagccaccuacaaa

SEQ ID NO: 1242235 - RNA, 19 nt, Homo sapiens
  misc_RNA (1)...(19): siRNA sense strand
ccagugaagccaccuacaa

SEQ ID NO: 1242236 - RNA, 19 nt, Homo sapiens
  misc_RNA (1)...(19): siRNA sense strand
ggauaaacucucugacagu

SEQ ID NO: 1242237 - RNA, 19 nt, Homo sapiens
  misc_RNA (1)...(19): siRNA sense strand
ggucugaauguaaagagaa

SEQ ID NO: 1242238 - RNA, 19 nt, Homo sapiens
  misc_RNA (1)...(19): siRNA sense strand
cagaugagaacaaaccaau

SEQ ID NO: 1242239 - RNA, 19 nt, Homo sapiens
  misc_RNA (1)...(19): siRNA sense strand
gaaaccugcagaugaccaa

SEQ ID NO: 1242240 - RNA, 19 nt, Homo sapiens
  misc_RNA (1)...(19): siRNA sense strand
acacuaucccaccugaaua

SEQ ID NO: 1242241 - RNA, 19 nt, Homo sapiens
  misc_RNA (1)...(19): siRNA sense strand
agagaaguguggugaggau

SEQ ID NO: 1242242 - RNA, 19 nt, Homo sapiens
  misc_RNA (1)...(19): siRNA sense strand
caaaccaauggaagauaaa

SEQ ID NO: 1242243 - RNA, 19 nt, Homo sapiens
  misc_RNA (1)...(19): siRNA sense strand
agaacaaaccaauggaaga

SEQ ID NO: 1242244 - RNA, 19 nt, Homo sapiens
  misc_RNA (1)...(19): siRNA sense strand
ccacggauaaagauggaaa

SEQ ID NO: 1242245 - RNA, 19 nt, Homo sapiens
  misc_RNA (1)...(19): siRNA sense strand
aaagagaaaccaucuaagc

SEQ ID NO: 1242246 - RNA, 19 nt, Homo sapiens
  misc_RNA (1)...(19): siRNA sense strand
gcuccaaagcaccuaagaa

SEQ ID NO: 1242247 - RNA, 19 nt, Homo sapiens
  misc_RNA (1)...(19): siRNA sense strand
caaaagagucuaaggaaca

SEQ ID NO: 1242248 - RNA, 19 nt, Homo sapiens
  misc_RNA (1)...(19): siRNA sense strand
ucaaggauaaagauggaaa

SEQ ID NO: 1242249 - RNA, 19 nt, Homo sapiens
  misc_RNA (1)...(19): siRNA sense strand
agaaacaauuccuccugau

SEQ ID NO: 1242250 - RNA, 19 nt, Homo sapiens
  misc_RNA (1)...(19): siRNA sense strand
gaagauggaaaaccuguga

SEQ ID NO: 1242251 - RNA, 19 nt, Homo sapiens
  misc_RNA (1)...(19): siRNA sense strand
caucuaagccaacugaaaa

SEQ ID NO: 1242252 - RNA, 19 nt, Homo sapiens
  misc_RNA (1)...(19): siRNA sense strand
gucugaauguaaagagaaa

SEQ ID NO: 1242253 - RNA, 19 nt, Homo sapiens
  misc_RNA (1)...(19): siRNA sense strand
accaauggaagauaaagua

SEQ ID NO: 1242254 - RNA, 19 nt, Homo sapiens
  misc_RNA (1)...(19): siRNA sense strand
ccaucuaagccaacugaaa

SEQ ID NO: 1242255 - RNA, 19 nt, Homo sapiens
  misc_RNA (1)...(19): siRNA sense strand
ucagaggauucaaagaaac

SEQ ID NO: 1242256 - RNA, 19 nt, Homo sapiens
  misc_RNA (1)...(19): siRNA sense strand
aucagaggauucaaagaaa

SEQ ID NO: 1242257 - RNA, 19 nt, Homo sapiens
  misc_RNA (1)...(19): siRNA sense strand
ccaccugaauacagacauc

SEQ ID NO: 1242258 - RNA, 19 nt, Homo sapiens
  misc_RNA (1)...(19): siRNA sense strand
aagcgaaggauucagcaaa

SEQ ID NO: 1242259 - RNA, 19 nt, Homo sapiens
  misc_RNA (1)...(19): siRNA sense strand
gaacuucaaugaugaggaa

SEQ ID NO: 1242260 - RNA, 19 nt, Homo sapiens
  misc_RNA (1)...(19): siRNA sense strand
gaaacacacucucuucuca

SEQ ID NO: 1242261 - RNA, 19 nt, Homo sapiens
  misc_RNA (1)...(19): siRNA sense strand
gugcagcccuccacauuua

SEQ ID NO: 1242262 - RNA, 19 nt, Homo sapiens
  misc_RNA (1)...(19): siRNA sense strand
gaacugugcgaucuuaaua

SEQ ID NO: 1242263 - RNA, 19 nt, Homo sapiens
  misc_RNA (1)...(19): siRNA sense strand
gaacaaugcucagucuaug

SEQ ID NO: 1242264 - RNA, 19 nt, Homo sapiens
  misc_RNA (1)...(19): siRNA sense strand
gaucaagacuguggacgua

SEQ ID NO: 1242265 - RNA, 19 nt, Homo sapiens
  misc_RNA (1)...(19): siRNA sense strand
ugacgggaaucaucucuua

SEQ ID NO: 1242266 - RNA, 19 nt, Homo sapiens
  misc_RNA (1)...(19): siRNA sense strand
ggaaagauaaggacauuga

SEQ ID NO: 1242267 - RNA, 19 nt, Homo sapiens
  misc_RNA (1)...(19): siRNA sense strand
caacagcaauugugucuca

SEQ ID NO: 1242268 - RNA, 19 nt, Homo sapiens
  misc_RNA (1)...(19): siRNA sense strand
gugaacaguuggaaagaua

SEQ ID NO: 1242269 - RNA, 19 nt, Homo sapiens
  misc_RNA (1)...(19): siRNA sense strand
ccagaaagccagcaucuaa

SEQ ID NO: 1242270 - RNA, 19 nt, Homo sapiens
  misc_RNA (1)...(19): siRNA sense strand
caacagcccaugcagcuua

SEQ ID NO: 1242271 - RNA, 19 nt, Homo sapiens
  misc_RNA (1)...(19): siRNA sense strand
gaagaggacgaacuaauga

SEQ ID NO: 1242272 - RNA, 19 nt, Homo sapiens
  misc_RNA (1)...(19): siRNA sense strand
gcaauugcuucuacaacaa

SEQ ID NO: 1242273 - RNA, 19 nt, Homo sapiens
  misc_RNA (1)...(19): siRNA sense strand
gcagacgccuggaacaaga

SEQ ID NO: 1242274 - RNA, 19 nt, Homo sapiens
  misc_RNA (1)...(19): siRNA sense strand
ggaagaggacgaacuaaug

SEQ ID NO: 1242275 - RNA, 19 nt, Homo sapiens
  misc_RNA (1)...(19): siRNA sense strand
ggaaaggucugcggcaugu

SEQ ID NO: 1242276 - RNA, 19 nt, Homo sapiens
  misc_RNA (1)...(19): siRNA sense strand
gaaagcaacaacagaauuc

SEQ ID NO: 1242277 - RNA, 19 nt, Homo sapiens
  misc_RNA (1)...(19): siRNA sense strand
caaguggacucagaagaaa

SEQ ID NO: 1242278 - RNA, 19 nt, Homo sapiens
  misc_RNA (1)...(19): siRNA sense strand
ccaacaggaugguaucuau

SEQ ID NO: 1242279 - RNA, 19 nt, Homo sapiens
  misc_RNA (1)...(19): siRNA sense strand
gacaagaaccgcaagaaug

SEQ ID NO: 1242280 - RNA, 19 nt, Homo sapiens
  misc_RNA (1)...(19): siRNA sense strand
gcacacacauguccaccau

SEQ ID NO: 1242281 - RNA, 19 nt, Homo sapiens
  misc_RNA (1)...(19): siRNA sense strand
gaacgaggaggaagagaga

SEQ ID NO: 1242282 - RNA, 19 nt, Homo sapiens
  misc_RNA (1)...(19): siRNA sense strand
gcgaugaaguagcaaauag

SEQ ID NO: 1242283 - RNA, 19 nt, Homo sapiens
  misc_RNA (1)...(19): siRNA sense strand
gcuguaaggucaugcugaa

SEQ ID NO: 1242284 - RNA, 19 nt, Homo sapiens
  misc_RNA (1)...(19): siRNA sense strand
gcaaacacccucugugagu

SEQ ID NO: 1242285 - RNA, 19 nt, Homo sapiens
  misc_RNA (1)...(19): siRNA sense strand
ccacccggcugauguuuga

SEQ ID NO: 1242286 - RNA, 19 nt, Homo sapiens
  misc_RNA (1)...(19): siRNA sense strand
caagacagcuauuuuguug

SEQ ID NO: 1242287 - RNA, 19 nt, Homo sapiens
  misc_RNA (1)...(19): siRNA sense strand
gcuauggguuucaucuuga

SEQ ID NO: 1242288 - RNA, 19 nt, Homo sapiens
  misc_RNA (1)...(19): siRNA sense strand
caacacggccucugugguu

SEQ ID NO: 1242289 - RNA, 19 nt, Homo sapiens
  misc_RNA (1)...(19): siRNA sense strand
gaaaccaccaccucuguug

SEQ ID NO: 1242290 - RNA, 19 nt, Homo sapiens
  misc_RNA (1)...(19): siRNA sense strand
ucagaaaggccacaucuug

SEQ ID NO: 1242291 - RNA, 19 nt, Homo sapiens
  misc_RNA (1)...(19): siRNA sense strand
gcacuuugcccaccacaug

SEQ ID NO: 1242292 - RNA, 19 nt, Homo sapiens
  misc_RNA (1)...(19): siRNA sense strand
acaagaaccgcaagaauga

SEQ ID NO: 1242293 - RNA, 19 nt, Homo sapiens
  misc_RNA (1)...(19): siRNA sense strand
gcaaauagugacagugaau

SEQ ID NO: 1242294 - RNA, 19 nt, Homo sapiens
  misc_RNA (1)...(19): siRNA sense strand
aagaaagggucaucaggaa

SEQ ID NO: 1242295 - RNA, 19 nt, Homo sapiens
  misc_RNA (1)...(19): siRNA sense strand
ccaaguggacucagaagaa

SEQ ID NO: 1242296 - RNA, 19 nt, Homo sapiens
  misc_RNA (1)...(19): siRNA sense strand
gcugagggcugcauuuguc

SEQ ID NO: 1242297 - RNA, 19 nt, Homo sapiens
  misc_RNA (1)...(19): siRNA sense strand
gauacaguuugccguggua

SEQ ID NO: 1242298 - RNA, 19 nt, Homo sapiens
  misc_RNA (1)...(19): siRNA sense strand
gaaagggucaucaggaaag

SEQ ID NO: 1242299 - RNA, 19 nt, Homo sapiens
  misc_RNA (1)...(19): siRNA sense strand
gcugagagcugugaauguc

SEQ ID NO: 1242300 - RNA, 19 nt, Homo sapiens
  misc_RNA (1)...(19): siRNA sense strand
ggaguucgcauaccacaug

SEQ ID NO: 1242301 - RNA, 19 nt, Homo sapiens
  misc_RNA (1)...(19): siRNA sense strand
uacgugagcuuugauggua

SEQ ID NO: 1242302 - RNA, 19 nt, Homo sapiens
  misc_RNA (1)...(19): siRNA sense strand
caaacacccucugugaguu

SEQ ID NO: 1242303 - RNA, 19 nt, Homo sapiens
  misc_RNA (1)...(19): siRNA sense strand
gugaauuugugaacaguug

SEQ ID NO: 1242304 - RNA, 19 nt, Homo sapiens
  misc_RNA (1)...(19): siRNA sense strand
ccuacaaucuccaccaaga

SEQ ID NO: 1242305 - RNA, 19 nt, Homo sapiens
  misc_RNA (1)...(19): siRNA sense strand
gacaacagcaacagcaauu

SEQ ID NO: 1242306 - RNA, 19 nt, Homo sapiens
  misc_RNA (1)...(19): siRNA sense strand
uguaaucgcgucuguauga

SEQ ID NO: 1242307 - RNA, 19 nt, Homo sapiens
  misc_RNA (1)...(19): siRNA sense strand
ggaaggacgcaacaagaug

SEQ ID NO: 1242308 - RNA, 19 nt, Homo sapiens
  misc_RNA (1)...(19): siRNA sense strand
gcuuaagaauggccaguau

SEQ ID NO: 1242309 - RNA, 19 nt, Homo sapiens
  misc_RNA (1)...(19): siRNA sense strand
acuaucaucuccacagaaa

SEQ ID NO: 1242310 - RNA, 19 nt, Homo sapiens
  misc_RNA (1)...(19): siRNA sense strand
cauuuaugcuucagucuug

SEQ ID NO: 1242311 - RNA, 19 nt, Homo sapiens
  misc_RNA (1)...(19): siRNA sense strand
acagagcgcugcccuccaa

SEQ ID NO: 1242312 - RNA, 19 nt, Homo sapiens
  misc_RNA (1)...(19): siRNA sense strand
ugaccuauguucugaucaa

SEQ ID NO: 1242313 - RNA, 19 nt, Homo sapiens
  misc_RNA (1)...(19): siRNA sense strand
cccguuaccucacauuuga

SEQ ID NO: 1242314 - RNA, 19 nt, Homo sapiens
  misc_RNA (1)...(19): siRNA sense strand
gcuaugugcugagugaaga

SEQ ID NO: 1242315 - RNA, 19 nt, Homo sapiens
  misc_RNA (1)...(19): siRNA sense strand
caacaacgacuacuaugag

SEQ ID NO: 1242316 - RNA, 19 nt, Homo sapiens
  misc_RNA (1)...(19): siRNA sense strand
ugaaaccacuggccucaca

SEQ ID NO: 1242317 - RNA, 19 nt, Homo sapiens
  misc_RNA (1)...(19): siRNA sense strand
gagagugcauuuacagaac

SEQ ID NO: 1242318 - RNA, 19 nt, Homo sapiens
  misc_RNA (1)...(19): siRNA sense strand
ggacauugacccaaguugu

SEQ ID NO: 1242319 - RNA, 19 nt, Homo sapiens
  misc_RNA (1)...(19): siRNA sense strand
ugugggaacuucaaugaug

SEQ ID NO: 1242320 - RNA, 19 nt, Homo sapiens
  misc_RNA (1)...(19): siRNA sense strand
gaagggccaccgugugcua

SEQ ID NO: 1242321 - RNA, 19 nt, Homo sapiens
  misc_RNA (1)...(19): siRNA sense strand
caagaucagugccaagcau

SEQ ID NO: 1242322 - RNA, 19 nt, Homo sapiens
  misc_RNA (1)...(19): siRNA sense strand
gaacuaugacggcaacagu

SEQ ID NO: 1242323 - RNA, 19 nt, Homo sapiens
  misc_RNA (1)...(19): siRNA sense strand
caacucaacagacccauuc

SEQ ID NO: 1242324 - RNA, 19 nt, Homo sapiens
  misc_RNA (1)...(19): siRNA sense strand
cuacggagacccucauuau

SEQ ID NO: 1242325 - RNA, 19 nt, Homo sapiens
  misc_RNA (1)...(19): siRNA sense strand
agacuaccaucucuacaga

SEQ ID NO: 1242326 - RNA, 19 nt, Homo sapiens
  misc_RNA (1)...(19): siRNA sense strand
gaccaggagugucagaagu

SEQ ID NO: 1242327 - RNA, 19 nt, Homo sapiens
  misc_RNA (1)...(19): siRNA sense strand
ccgcaagaaugacaugaug

SEQ ID NO: 1242328 - RNA, 19 nt, Homo sapiens
  misc_RNA (1)...(19): siRNA sense strand
gugcaaacacccucuguga

SEQ ID NO: 1242329 - RNA, 19 nt, Homo sapiens
  misc_RNA (1)...(19): siRNA sense strand
gcccagcgaugaaguagca

SEQ ID NO: 1242330 - RNA, 19 nt, Homo sapiens
  misc_RNA (1)...(19): siRNA sense strand
gugggaacuucaaugauga

SEQ ID NO: 1242331 - RNA, 19 nt, Homo sapiens
  misc_RNA (1)...(19): siRNA sense strand
cagaaaggccacaucuuga

SEQ ID NO: 1242332 - RNA, 19 nt, Homo sapiens
  misc_RNA (1)...(19): siRNA sense strand
caacgcccaucccuucugu

SEQ ID NO: 1242333 - RNA, 19 nt, Homo sapiens
  misc_RNA (1)...(19): siRNA sense strand
gaugugcucuggaaacacu

SEQ ID NO: 1242334 - RNA, 19 nt, Homo sapiens
  misc_RNA (1)...(19): siRNA sense strand
guaaggucaugcugaaugg

SEQ ID NO: 1242335 - RNA, 19 nt, Homo sapiens
  misc_RNA (1)...(19): siRNA sense strand
acaaugaccaccugaaguu

SEQ ID NO: 1242336 - RNA, 19 nt, Homo sapiens
  misc_RNA (1)...(19): siRNA sense strand
gguuucaucuugaucaauc

SEQ ID NO: 1242337 - RNA, 19 nt, Homo sapiens
  misc_RNA (1)...(19): siRNA sense strand
gggaguauccggaaacaca

SEQ ID NO: 1242338 - RNA, 19 nt, Homo sapiens
  misc_RNA (1)...(19): siRNA sense strand
cagcuuugguggaaggaaa

SEQ ID NO: 1242339 - RNA, 19 nt, Homo sapiens
  misc_RNA (1)...(19): siRNA sense strand
uagcaaauagugacaguga

SEQ ID NO: 1242340 - RNA, 19 nt, Homo sapiens
  misc_RNA (1)...(19): siRNA sense strand
cugcaaacccaaccagaua

SEQ ID NO: 1242341 - RNA, 19 nt, Homo sapiens
  misc_RNA (1)...(19): siRNA sense strand
gcgaagccaugcccugaca

SEQ ID NO: 1242342 - RNA, 19 nt, Homo sapiens
  misc_RNA (1)...(19): siRNA sense strand
agacuaccaucuccacaga

SEQ ID NO: 1242343 - RNA, 19 nt, Homo sapiens
  misc_RNA (1)...(19): siRNA sense strand
agacuaccaucuccacaga

SEQ ID NO: 1242344 - RNA, 19 nt, Homo sapiens
  misc_RNA (1)...(19): siRNA sense strand
gaucaauccugggacuugu

SEQ ID NO: 1242345 - RNA, 19 nt, Homo sapiens
  misc_RNA (1)...(19): siRNA sense strand
gaagcaacacggccucugu

SEQ ID NO: 1242346 - RNA, 19 nt, Homo sapiens
  misc_RNA (1)...(19): siRNA sense strand
uaacggagagggcagcuau

SEQ ID NO: 1242347 - RNA, 19 nt, Homo sapiens
  misc_RNA (1)...(19): siRNA sense strand
caggagaacccgaguggaa

SEQ ID NO: 1242348 - RNA, 19 nt, Homo sapiens
  misc_RNA (1)...(19): siRNA sense strand
ugaggaagaggacgaacua

SEQ ID NO: 1242349 - RNA, 19 nt, Homo sapiens
  misc_RNA (1)...(19): siRNA sense strand
cuacagcauuguuaacauc

SEQ ID NO: 1242350 - RNA, 19 nt, Homo sapiens
  misc_RNA (1)...(19): siRNA sense strand
ccauaaggcucagcagcaa

SEQ ID NO: 1242351 - RNA, 19 nt, Homo sapiens
  misc_RNA (1)...(19): siRNA sense strand
ugaaagcaacaacagaauu

SEQ ID NO: 1242352 - RNA, 19 nt, Homo sapiens
  misc_RNA (1)...(19): siRNA sense strand
cuacaacaacgacuacuau

SEQ ID NO: 1242353 - RNA, 19 nt, Homo sapiens
  misc_RNA (1)...(19): siRNA sense strand
ccaaaugcccgcuacgaau

SEQ ID NO: 1242354 - RNA, 19 nt, Homo sapiens
  misc_RNA (1)...(19): siRNA sense strand
uucaugaggucuacauuga

SEQ ID NO: 1242355 - RNA, 19 nt, Homo sapiens
  misc_RNA (1)...(19): siRNA sense strand
caacagcaacagcaauugu

SEQ ID NO: 1242356 - RNA, 19 nt, Homo sapiens
  misc_RNA (1)...(19): siRNA sense strand
caugaggucuacauugaca

SEQ ID NO: 1242357 - RNA, 19 nt, Homo sapiens
  misc_RNA (1)...(19): siRNA sense strand
acugugcgaucuuaauaaa

SEQ ID NO: 1242358 - RNA, 19 nt, Homo sapiens
  misc_RNA (1)...(19): siRNA sense strand
cgacaagaaccgcaagaau

SEQ ID NO: 1242359 - RNA, 19 nt, Homo sapiens
  misc_RNA (1)...(19): siRNA sense strand
gaacuucaaugaugaggaa

SEQ ID NO: 1242360 - RNA, 19 nt, Homo sapiens
  misc_RNA (1)...(19): siRNA sense strand
gaaacacacucucuucuca

SEQ ID NO: 1242361 - RNA, 19 nt, Homo sapiens
  misc_RNA (1)...(19): siRNA sense strand
gugcagcccuccacauuua

SEQ ID NO: 1242362 - RNA, 19 nt, Homo sapiens
  misc_RNA (1)...(19): siRNA sense strand
gaacugugcgaucuuaaua

SEQ ID NO: 1242363 - RNA, 19 nt, Homo sapiens
  misc_RNA (1)...(19): siRNA sense strand
gaacaaugcucagucuaug

SEQ ID NO: 1242364 - RNA, 19 nt, Homo sapiens
  misc_RNA (1)...(19): siRNA sense strand
gaucaagacuguggacgua

SEQ ID NO: 1242365 - RNA, 19 nt, Homo sapiens
  misc_RNA (1)...(19): siRNA sense strand
ugacgggaaucaucucuua

SEQ ID NO: 1242366 - RNA, 19 nt, Homo sapiens
  misc_RNA (1)...(19): siRNA sense strand
ggaaagauaaggacauuga

SEQ ID NO: 1242367 - RNA, 19 nt, Homo sapiens
  misc_RNA (1)...(19): siRNA sense strand
caacagcaauugugucuca

SEQ ID NO: 1242368 - RNA, 19 nt, Homo sapiens
  misc_RNA (1)...(19): siRNA sense strand
gugaacaguuggaaagaua

SEQ ID NO: 1242369 - RNA, 19 nt, Homo sapiens
  misc_RNA (1)...(19): siRNA sense strand
caacagcccaugcagcuua

SEQ ID NO: 1242370 - RNA, 19 nt, Homo sapiens
  misc_RNA (1)...(19): siRNA sense strand
gaagaggacgaacuaauga

SEQ ID NO: 1242371 - RNA, 19 nt, Homo sapiens
  misc_RNA (1)...(19): siRNA sense strand
gcaauugcuucuacaacaa

SEQ ID NO: 1242372 - RNA, 19 nt, Homo sapiens
  misc_RNA (1)...(19): siRNA sense strand
gcagacgccuggaacaaga

SEQ ID NO: 1242373 - RNA, 19 nt, Homo sapiens
  misc_RNA (1)...(19): siRNA sense strand
ggaagaggacgaacuaaug

SEQ ID NO: 1242374 - RNA, 19 nt, Homo sapiens
  misc_RNA (1)...(19): siRNA sense strand
ggaaaggucugcggcaugu

SEQ ID NO: 1242375 - RNA, 19 nt, Homo sapiens
  misc_RNA (1)...(19): siRNA sense strand
gaaagcaacaacagaauuc

SEQ ID NO: 1242376 - RNA, 19 nt, Homo sapiens
  misc_RNA (1)...(19): siRNA sense strand
caaguggacucagaagaaa

SEQ ID NO: 1242377 - RNA, 19 nt, Homo sapiens
  misc_RNA (1)...(19): siRNA sense strand
ccaacaggaugguaucuau

SEQ ID NO: 1242378 - RNA, 19 nt, Homo sapiens
  misc_RNA (1)...(19): siRNA sense strand
gacaagaaccgcaagaaug

SEQ ID NO: 1242379 - RNA, 19 nt, Homo sapiens
  misc_RNA (1)...(19): siRNA sense strand
gcacacacauguccaccau

SEQ ID NO: 1242380 - RNA, 19 nt, Homo sapiens
  misc_RNA (1)...(19): siRNA sense strand
gcgaugaaguagcaaauag

SEQ ID NO: 1242381 - RNA, 19 nt, Homo sapiens
  misc_RNA (1)...(19): siRNA sense strand
gcuguaaggucaugcugaa

SEQ ID NO: 1242382 - RNA, 19 nt, Homo sapiens
  misc_RNA (1)...(19): siRNA sense strand
gcaaacacccucugugagu

SEQ ID NO: 1242383 - RNA, 19 nt, Homo sapiens
  misc_RNA (1)...(19): siRNA sense strand
ccacccggcugauguuuga

SEQ ID NO: 1242384 - RNA, 19 nt, Homo sapiens
  misc_RNA (1)...(19): siRNA sense strand
caagacagcuauuuuguug

SEQ ID NO: 1242385 - RNA, 19 nt, Homo sapiens
  misc_RNA (1)...(19): siRNA sense strand
gcuauggguuucaucuuga

SEQ ID NO: 1242386 - RNA, 19 nt, Homo sapiens
  misc_RNA (1)...(19): siRNA sense strand
caacacggccucugugguu

SEQ ID NO: 1242387 - RNA, 19 nt, Homo sapiens
  misc_RNA (1)...(19): siRNA sense strand
gaaaccaccaccucuguug

SEQ ID NO: 1242388 - RNA, 19 nt, Homo sapiens
  misc_RNA (1)...(19): siRNA sense strand
ucagaaaggccacaucuug

SEQ ID NO: 1242389 - RNA, 19 nt, Homo sapiens
  misc_RNA (1)...(19): siRNA sense strand
gcacuuugcccaccacaug

SEQ ID NO: 1242390 - RNA, 19 nt, Homo sapiens
  misc_RNA (1)...(19): siRNA sense strand
acaagaaccgcaagaauga

SEQ ID NO: 1242391 - RNA, 19 nt, Homo sapiens
  misc_RNA (1)...(19): siRNA sense strand
gcaaauagugacagugaau

SEQ ID NO: 1242392 - RNA, 19 nt, Homo sapiens
  misc_RNA (1)...(19): siRNA sense strand
aagaaagggucaucaggaa

SEQ ID NO: 1242393 - RNA, 19 nt, Homo sapiens
  misc_RNA (1)...(19): siRNA sense strand
ccaaguggacucagaagaa

SEQ ID NO: 1242394 - RNA, 19 nt, Homo sapiens
  misc_RNA (1)...(19): siRNA sense strand
gcugagggcugcauuuguc

SEQ ID NO: 1242395 - RNA, 19 nt, Homo sapiens
  misc_RNA (1)...(19): siRNA sense strand
gauacaguuugccguggua

SEQ ID NO: 1242396 - RNA, 19 nt, Homo sapiens
  misc_RNA (1)...(19): siRNA sense strand
gaaagggucaucaggaaag

SEQ ID NO: 1242397 - RNA, 19 nt, Homo sapiens
  misc_RNA (1)...(19): siRNA sense strand
gcugagagcugugaauguc

SEQ ID NO: 1242398 - RNA, 19 nt, Homo sapiens
  misc_RNA (1)...(19): siRNA sense strand
ggaguucgcauaccacaug

SEQ ID NO: 1242399 - RNA, 19 nt, Homo sapiens
  misc_RNA (1)...(19): siRNA sense strand
uacgugagcuuugauggua

SEQ ID NO: 1242400 - RNA, 19 nt, Homo sapiens
  misc_RNA (1)...(19): siRNA sense strand
caaacacccucugugaguu

SEQ ID NO: 1242401 - RNA, 19 nt, Homo sapiens
  misc_RNA (1)...(19): siRNA sense strand
gugaauuugugaacaguug

SEQ ID NO: 1242402 - RNA, 19 nt, Homo sapiens
  misc_RNA (1)...(19): siRNA sense strand
ccuacaaucuccaccaaga

SEQ ID NO: 1242403 - RNA, 19 nt, Homo sapiens
  misc_RNA (1)...(19): siRNA sense strand
gacaacagcaacagcaauu

SEQ ID NO: 1242404 - RNA, 19 nt, Homo sapiens
  misc_RNA (1)...(19): siRNA sense strand
uguaaucgcgucuguauga

SEQ ID NO: 1242405 - RNA, 19 nt, Homo sapiens
  misc_RNA (1)...(19): siRNA sense strand
ggaaggacgcaacaagaug

SEQ ID NO: 1242406 - RNA, 19 nt, Homo sapiens
  misc_RNA (1)...(19): siRNA sense strand
gcuuaagaauggccaguau

SEQ ID NO: 1242407 - RNA, 19 nt, Homo sapiens
  misc_RNA (1)...(19): siRNA sense strand
acuaucaucuccacagaaa

SEQ ID NO: 1242408 - RNA, 19 nt, Homo sapiens
  misc_RNA (1)...(19): siRNA sense strand
cauuuaugcuucagucuug

SEQ ID NO: 1242409 - RNA, 19 nt, Homo sapiens
  misc_RNA (1)...(19): siRNA sense strand
acagagcgcugcccuccaa

SEQ ID NO: 1242410 - RNA, 19 nt, Homo sapiens
  misc_RNA (1)...(19): siRNA sense strand
ugaccuauguucugaucaa

SEQ ID NO: 1242411 - RNA, 19 nt, Homo sapiens
  misc_RNA (1)...(19): siRNA sense strand
cccguuaccucacauuuga

SEQ ID NO: 1242412 - RNA, 19 nt, Homo sapiens
  misc_RNA (1)...(19): siRNA sense strand
gcuaugugcugagugaaga

SEQ ID NO: 1242413 - RNA, 19 nt, Homo sapiens
  misc_RNA (1)...(19): siRNA sense strand
caacaacgacuacuaugag

SEQ ID NO: 1242414 - RNA, 19 nt, Homo sapiens
  misc_RNA (1)...(19): siRNA sense strand
ugaaaccacuggccucaca

SEQ ID NO: 1242415 - RNA, 19 nt, Homo sapiens
  misc_RNA (1)...(19): siRNA sense strand
ggacauugacccaaguugu

SEQ ID NO: 1242416 - RNA, 19 nt, Homo sapiens
  misc_RNA (1)...(19): siRNA sense strand
ugugggaacuucaaugaug

SEQ ID NO: 1242417 - RNA, 19 nt, Homo sapiens
  misc_RNA (1)...(19): siRNA sense strand
gaagggccaccgugugcua

SEQ ID NO: 1242418 - RNA, 19 nt, Homo sapiens
  misc_RNA (1)...(19): siRNA sense strand
caagaucagugccaagcau

SEQ ID NO: 1242419 - RNA, 19 nt, Homo sapiens
  misc_RNA (1)...(19): siRNA sense strand
gaacuaugacggcaacagu

SEQ ID NO: 1242420 - RNA, 19 nt, Homo sapiens
  misc_RNA (1)...(19): siRNA sense strand
caacucaacagacccauuc

SEQ ID NO: 1242421 - RNA, 19 nt, Homo sapiens
  misc_RNA (1)...(19): siRNA sense strand
cuacggagacccucauuau

SEQ ID NO: 1242422 - RNA, 19 nt, Homo sapiens
  misc_RNA (1)...(19): siRNA sense strand
agacuaccaucucuacaga

SEQ ID NO: 1242423 - RNA, 19 nt, Homo sapiens
  misc_RNA (1)...(19): siRNA sense strand
gaccaggagugucagaagu

SEQ ID NO: 1242424 - RNA, 19 nt, Homo sapiens
  misc_RNA (1)...(19): siRNA sense strand
ccgcaagaaugacaugaug

SEQ ID NO: 1242425 - RNA, 19 nt, Homo sapiens
  misc_RNA (1)...(19): siRNA sense strand
gugcaaacacccucuguga

SEQ ID NO: 1242426 - RNA, 19 nt, Homo sapiens
  misc_RNA (1)...(19): siRNA sense strand
gcccagcgaugaaguagca

SEQ ID NO: 1242427 - RNA, 19 nt, Homo sapiens
  misc_RNA (1)...(19): siRNA sense strand
gugggaacuucaaugauga

SEQ ID NO: 1242428 - RNA, 19 nt, Homo sapiens
  misc_RNA (1)...(19): siRNA sense strand
cagaaaggccacaucuuga

SEQ ID NO: 1242429 - RNA, 19 nt, Homo sapiens
  misc_RNA (1)...(19): siRNA sense strand
caacgcccaucccuucugu

SEQ ID NO: 1242430 - RNA, 19 nt, Homo sapiens
  misc_RNA (1)...(19): siRNA sense strand
guaaggucaugcugaaugg

SEQ ID NO: 1242431 - RNA, 19 nt, Homo sapiens
  misc_RNA (1)...(19): siRNA sense strand
gaugugcucuggaaacacu

SEQ ID NO: 1242432 - RNA, 19 nt, Homo sapiens
  misc_RNA (1)...(19): siRNA sense strand
acaaugaccaccugaaguu

SEQ ID NO: 1242433 - RNA, 19 nt, Homo sapiens
  misc_RNA (1)...(19): siRNA sense strand
gguuucaucuugaucaauc

SEQ ID NO: 1242434 - RNA, 19 nt, Homo sapiens
  misc_RNA (1)...(19): siRNA sense strand
gggaguauccggaaacaca

SEQ ID NO: 1242435 - RNA, 19 nt, Homo sapiens
  misc_RNA (1)...(19): siRNA sense strand
cagcuuugguggaaggaaa

SEQ ID NO: 1242436 - RNA, 19 nt, Homo sapiens
  misc_RNA (1)...(19): siRNA sense strand
uagcaaauagugacaguga

SEQ ID NO: 1242437 - RNA, 19 nt, Homo sapiens
  misc_RNA (1)...(19): siRNA sense strand
cugcaaacccaaccagaua

SEQ ID NO: 1242438 - RNA, 19 nt, Homo sapiens
  misc_RNA (1)...(19): siRNA sense strand
gcgaagccaugcccugaca

SEQ ID NO: 1242439 - RNA, 19 nt, Homo sapiens
  misc_RNA (1)...(19): siRNA sense strand
agacuaccaucuccacaga

SEQ ID NO: 1242440 - RNA, 19 nt, Homo sapiens
  misc_RNA (1)...(19): siRNA sense strand
agacuaccaucuccacaga

SEQ ID NO: 1242441 - RNA, 19 nt, Homo sapiens
  misc_RNA (1)...(19): siRNA sense strand
gaucaauccugggacuugu

SEQ ID NO: 1242442 - RNA, 19 nt, Homo sapiens
  misc_RNA (1)...(19): siRNA sense strand
uaacggagagggcagcuau

SEQ ID NO: 1242443 - RNA, 19 nt, Homo sapiens
  misc_RNA (1)...(19): siRNA sense strand
caggagaacccgaguggaa

SEQ ID NO: 1242444 - RNA, 19 nt, Homo sapiens
  misc_RNA (1)...(19): siRNA sense strand
ugaggaagaggacgaacua

SEQ ID NO: 1242445 - RNA, 19 nt, Homo sapiens
  misc_RNA (1)...(19): siRNA sense strand
cuacagcauuguuaacauc

SEQ ID NO: 1242446 - RNA, 19 nt, Homo sapiens
  misc_RNA (1)...(19): siRNA sense strand
ccauaaggcucagcagcaa

SEQ ID NO: 1242447 - RNA, 19 nt, Homo sapiens
  misc_RNA (1)...(19): siRNA sense strand
ugaaagcaacaacagaauu

SEQ ID NO: 1242448 - RNA, 19 nt, Homo sapiens
  misc_RNA (1)...(19): siRNA sense strand
cuacaacaacgacuacuau

SEQ ID NO: 1242449 - RNA, 19 nt, Homo sapiens
  misc_RNA (1)...(19): siRNA sense strand
ccaaaugcccgcuacgaau

SEQ ID NO: 1242450 - RNA, 19 nt, Homo sapiens
  misc_RNA (1)...(19): siRNA sense strand
gaagcaacacggccucugu

SEQ ID NO: 1242451 - RNA, 19 nt, Homo sapiens
  misc_RNA (1)...(19): siRNA sense strand
uucaugaggucuacauuga

SEQ ID NO: 1242452 - RNA, 19 nt, Homo sapiens
  misc_RNA (1)...(19): siRNA sense strand
caacagcaacagcaauugu

SEQ ID NO: 1242453 - RNA, 19 nt, Homo sapiens
  misc_RNA (1)...(19): siRNA sense strand
caugaggucuacauugaca

SEQ ID NO: 1242454 - RNA, 19 nt, Homo sapiens
  misc_RNA (1)...(19): siRNA sense strand
ccacuggccucacagaaaa

SEQ ID NO: 1242455 - RNA, 19 nt, Homo sapiens
  misc_RNA (1)...(19): siRNA sense strand
cgacaagaaccgcaagaau

SEQ ID NO: 1242456 - RNA, 19 nt, Homo sapiens
  misc_RNA (1)...(19): siRNA sense strand
acugugcgaucuuaauaaa

SEQ ID NO: 1242457 - RNA, 19 nt, Homo sapiens
  misc_RNA (1)...(19): siRNA sense strand
gcacucuuguccuggugaa

SEQ ID NO: 1242458 - RNA, 19 nt, Homo sapiens
  misc_RNA (1)...(19): siRNA sense strand
gaugaaguagcaaauagug

SEQ ID NO: 1242459 - RNA, 19 nt, Homo sapiens
  misc_RNA (1)...(19): siRNA sense strand
gaacuucaaugaugaggaa

SEQ ID NO: 1242460 - RNA, 19 nt, Homo sapiens
  misc_RNA (1)...(19): siRNA sense strand
gaaacacacucucuucuca

SEQ ID NO: 1242461 - RNA, 19 nt, Homo sapiens
  misc_RNA (1)...(19): siRNA sense strand
gugcagcccuccacauuua

SEQ ID NO: 1242462 - RNA, 19 nt, Homo sapiens
  misc_RNA (1)...(19): siRNA sense strand
gaacugugcgaucuuaaua

SEQ ID NO: 1242463 - RNA, 19 nt, Homo sapiens
  misc_RNA (1)...(19): siRNA sense strand
gaacaaugcucagucuaug

SEQ ID NO: 1242464 - RNA, 19 nt, Homo sapiens
  misc_RNA (1)...(19): siRNA sense strand
gaucaagacuguggacgua

SEQ ID NO: 1242465 - RNA, 19 nt, Homo sapiens
  misc_RNA (1)...(19): siRNA sense strand
ugacgggaaucaucucuua

SEQ ID NO: 1242466 - RNA, 19 nt, Homo sapiens
  misc_RNA (1)...(19): siRNA sense strand
ggaaagauaaggacauuga

SEQ ID NO: 1242467 - RNA, 19 nt, Homo sapiens
  misc_RNA (1)...(19): siRNA sense strand
caacagcaauugugucuca

SEQ ID NO: 1242468 - RNA, 19 nt, Homo sapiens
  misc_RNA (1)...(19): siRNA sense strand
gugaacaguuggaaagaua

SEQ ID NO: 1242469 - RNA, 19 nt, Homo sapiens
  misc_RNA (1)...(19): siRNA sense strand
caacagcccaugcagcuua

SEQ ID NO: 1242470 - RNA, 19 nt, Homo sapiens
  misc_RNA (1)...(19): siRNA sense strand
gaagaggacgaacuaauga

SEQ ID NO: 1242471 - RNA, 19 nt, Homo sapiens
  misc_RNA (1)...(19): siRNA sense strand
gcaauugcuucuacaacaa

SEQ ID NO: 1242472 - RNA, 19 nt, Homo sapiens
  misc_RNA (1)...(19): siRNA sense strand
gcagacgccuggaacaaga

SEQ ID NO: 1242473 - RNA, 19 nt, Homo sapiens
  misc_RNA (1)...(19): siRNA sense strand
ggaagaggacgaacuaaug

SEQ ID NO: 1242474 - RNA, 19 nt, Homo sapiens
  misc_RNA (1)...(19): siRNA sense strand
ggaaaggucugcggcaugu

SEQ ID NO: 1242475 - RNA, 19 nt, Homo sapiens
  misc_RNA (1)...(19): siRNA sense strand
gaaagcaacaacagaauuc

SEQ ID NO: 1242476 - RNA, 19 nt, Homo sapiens
  misc_RNA (1)...(19): siRNA sense strand
caaguggacucagaagaaa

SEQ ID NO: 1242477 - RNA, 19 nt, Homo sapiens
  misc_RNA (1)...(19): siRNA sense strand
ccaacaggaugguaucuau

SEQ ID NO: 1242478 - RNA, 19 nt, Homo sapiens
  misc_RNA (1)...(19): siRNA sense strand
gacaagaaccgcaagaaug

SEQ ID NO: 1242479 - RNA, 19 nt, Homo sapiens
  misc_RNA (1)...(19): siRNA sense strand
gcacacacauguccaccau

SEQ ID NO: 1242480 - RNA, 19 nt, Homo sapiens
  misc_RNA (1)...(19): siRNA sense strand
gcgaugaaguagcaaauag

SEQ ID NO: 1242481 - RNA, 19 nt, Homo sapiens
  misc_RNA (1)...(19): siRNA sense strand
gcuguaaggucaugcugaa

SEQ ID NO: 1242482 - RNA, 19 nt, Homo sapiens
  misc_RNA (1)...(19): siRNA sense strand
gcaaacacccucugugagu

SEQ ID NO: 1242483 - RNA, 19 nt, Homo sapiens
  misc_RNA (1)...(19): siRNA sense strand
ccacccggcugauguuuga

SEQ ID NO: 1242484 - RNA, 19 nt, Homo sapiens
  misc_RNA (1)...(19): siRNA sense strand
caagacagcuauuuuguug

SEQ ID NO: 1242485 - RNA, 19 nt, Homo sapiens
  misc_RNA (1)...(19): siRNA sense strand
gcuauggguuucaucuuga

SEQ ID NO: 1242486 - RNA, 19 nt, Homo sapiens
  misc_RNA (1)...(19): siRNA sense strand
caacacggccucugugguu

SEQ ID NO: 1242487 - RNA, 19 nt, Homo sapiens
  misc_RNA (1)...(19): siRNA sense strand
gaaaccaccaccucuguug

SEQ ID NO: 1242488 - RNA, 19 nt, Homo sapiens
  misc_RNA (1)...(19): siRNA sense strand
ucagaaaggccacaucuug

SEQ ID NO: 1242489 - RNA, 19 nt, Homo sapiens
  misc_RNA (1)...(19): siRNA sense strand
gcacuuugcccaccacaug

SEQ ID NO: 1242490 - RNA, 19 nt, Homo sapiens
  misc_RNA (1)...(19): siRNA sense strand
acaagaaccgcaagaauga

SEQ ID NO: 1242491 - RNA, 19 nt, Homo sapiens
  misc_RNA (1)...(19): siRNA sense strand
gcaaauagugacagugaau

SEQ ID NO: 1242492 - RNA, 19 nt, Homo sapiens
  misc_RNA (1)...(19): siRNA sense strand
aagaaagggucaucaggaa

SEQ ID NO: 1242493 - RNA, 19 nt, Homo sapiens
  misc_RNA (1)...(19): siRNA sense strand
ccaaguggacucagaagaa

SEQ ID NO: 1242494 - RNA, 19 nt, Homo sapiens
  misc_RNA (1)...(19): siRNA sense strand
gcugagggcugcauuuguc

SEQ ID NO: 1242495 - RNA, 19 nt, Homo sapiens
  misc_RNA (1)...(19): siRNA sense strand
gauacaguuugccguggua

SEQ ID NO: 1242496 - RNA, 19 nt, Homo sapiens
  misc_RNA (1)...(19): siRNA sense strand
gaaagggucaucaggaaag

SEQ ID NO: 1242497 - RNA, 19 nt, Homo sapiens
  misc_RNA (1)...(19): siRNA sense strand
gcugagagcugugaauguc

SEQ ID NO: 1242498 - RNA, 19 nt, Homo sapiens
  misc_RNA (1)...(19): siRNA sense strand
ggaguucgcauaccacaug

SEQ ID NO: 1242499 - RNA, 19 nt, Homo sapiens
  misc_RNA (1)...(19): siRNA sense strand
uacgugagcuuugauggua

SEQ ID NO: 1242500 - RNA, 19 nt, Homo sapiens
  misc_RNA (1)...(19): siRNA sense strand
caaacacccucugugaguu

SEQ ID NO: 1242501 - RNA, 19 nt, Homo sapiens
  misc_RNA (1)...(19): siRNA sense strand
gugaauuugugaacaguug

SEQ ID NO: 1242502 - RNA, 19 nt, Homo sapiens
  misc_RNA (1)...(19): siRNA sense strand
ccuacaaucuccaccaaga

SEQ ID NO: 1242503 - RNA, 19 nt, Homo sapiens
  misc_RNA (1)...(19): siRNA sense strand
gacaacagcaacagcaauu

SEQ ID NO: 1242504 - RNA, 19 nt, Homo sapiens
  misc_RNA (1)...(19): siRNA sense strand
uguaaucgcgucuguauga

SEQ ID NO: 1242505 - RNA, 19 nt, Homo sapiens
  misc_RNA (1)...(19): siRNA sense strand
ggaaggacgcaacaagaug

SEQ ID NO: 1242506 - RNA, 19 nt, Homo sapiens
  misc_RNA (1)...(19): siRNA sense strand
gcuuaagaauggccaguau

SEQ ID NO: 1242507 - RNA, 19 nt, Homo sapiens
  misc_RNA (1)...(19): siRNA sense strand
acuaucaucuccacagaaa

SEQ ID NO: 1242508 - RNA, 19 nt, Homo sapiens
  misc_RNA (1)...(19): siRNA sense strand
cauuuaugcuucagucuug

SEQ ID NO: 1242509 - RNA, 19 nt, Homo sapiens
  misc_RNA (1)...(19): siRNA sense strand
acagagcgcugcccuccaa

SEQ ID NO: 1242510 - RNA, 19 nt, Homo sapiens
  misc_RNA (1)...(19): siRNA sense strand
ugaccuauguucugaucaa

SEQ ID NO: 1242511 - RNA, 19 nt, Homo sapiens
  misc_RNA (1)...(19): siRNA sense strand
cccguuaccucacauuuga

SEQ ID NO: 1242512 - RNA, 19 nt, Homo sapiens
  misc_RNA (1)...(19): siRNA sense strand
gcuaugugcugagugaaga

SEQ ID NO: 1242513 - RNA, 19 nt, Homo sapiens
  misc_RNA (1)...(19): siRNA sense strand
caacaacgacuacuaugag

SEQ ID NO: 1242514 - RNA, 19 nt, Homo sapiens
  misc_RNA (1)...(19): siRNA sense strand
ugaaaccacuggccucaca

SEQ ID NO: 1242515 - RNA, 19 nt, Homo sapiens
  misc_RNA (1)...(19): siRNA sense strand
ggacauugacccaaguugu

SEQ ID NO: 1242516 - RNA, 19 nt, Homo sapiens
  misc_RNA (1)...(19): siRNA sense strand
ugugggaacuucaaugaug

SEQ ID NO: 1242517 - RNA, 19 nt, Homo sapiens
  misc_RNA (1)...(19): siRNA sense strand
gaagggccaccgugugcua

SEQ ID NO: 1242518 - RNA, 19 nt, Homo sapiens
  misc_RNA (1)...(19): siRNA sense strand
caagaucagugccaagcau

SEQ ID NO: 1242519 - RNA, 19 nt, Homo sapiens
  misc_RNA (1)...(19): siRNA sense strand
gaacuaugacggcaacagu

SEQ ID NO: 1242520 - RNA, 19 nt, Homo sapiens
  misc_RNA (1)...(19): siRNA sense strand
caacucaacagacccauuc

SEQ ID NO: 1242521 - RNA, 19 nt, Homo sapiens
  misc_RNA (1)...(19): siRNA sense strand
cuacggagacccucauuau

SEQ ID NO: 1242522 - RNA, 19 nt, Homo sapiens
  misc_RNA (1)...(19): siRNA sense strand
agacuaccaucucuacaga

SEQ ID NO: 1242523 - RNA, 19 nt, Homo sapiens
  misc_RNA (1)...(19): siRNA sense strand
gaccaggagugucagaagu

SEQ ID NO: 1242524 - RNA, 19 nt, Homo sapiens
  misc_RNA (1)...(19): siRNA sense strand
ccgcaagaaugacaugaug

SEQ ID NO: 1242525 - RNA, 19 nt, Homo sapiens
  misc_RNA (1)...(19): siRNA sense strand
gugcaaacacccucuguga

SEQ ID NO: 1242526 - RNA, 19 nt, Homo sapiens
  misc_RNA (1)...(19): siRNA sense strand
gcccagcgaugaaguagca

SEQ ID NO: 1242527 - RNA, 19 nt, Homo sapiens
  misc_RNA (1)...(19): siRNA sense strand
gugggaacuucaaugauga

SEQ ID NO: 1242528 - RNA, 19 nt, Homo sapiens
  misc_RNA (1)...(19): siRNA sense strand
cagaaaggccacaucuuga

SEQ ID NO: 1242529 - RNA, 19 nt, Homo sapiens
  misc_RNA (1)...(19): siRNA sense strand
caacgcccaucccuucugu

SEQ ID NO: 1242530 - RNA, 19 nt, Homo sapiens
  misc_RNA (1)...(19): siRNA sense strand
guaaggucaugcugaaugg

SEQ ID NO: 1242531 - RNA, 19 nt, Homo sapiens
  misc_RNA (1)...(19): siRNA sense strand
gaugugcucuggaaacacu

SEQ ID NO: 1242532 - RNA, 19 nt, Homo sapiens
  misc_RNA (1)...(19): siRNA sense strand
acaaugaccaccugaaguu

SEQ ID NO: 1242533 - RNA, 19 nt, Homo sapiens
  misc_RNA (1)...(19): siRNA sense strand
gguuucaucuugaucaauc

SEQ ID NO: 1242534 - RNA, 19 nt, Homo sapiens
  misc_RNA (1)...(19): siRNA sense strand
gggaguauccggaaacaca

SEQ ID NO: 1242535 - RNA, 19 nt, Homo sapiens
  misc_RNA (1)...(19): siRNA sense strand
cagcuuugguggaaggaaa

SEQ ID NO: 1242536 - RNA, 19 nt, Homo sapiens
  misc_RNA (1)...(19): siRNA sense strand
uagcaaauagugacaguga

SEQ ID NO: 1242537 - RNA, 19 nt, Homo sapiens
  misc_RNA (1)...(19): siRNA sense strand
cugcaaacccaaccagaua

SEQ ID NO: 1242538 - RNA, 19 nt, Homo sapiens
  misc_RNA (1)...(19): siRNA sense strand
gcgaagccaugcccugaca

SEQ ID NO: 1242539 - RNA, 19 nt, Homo sapiens
  misc_RNA (1)...(19): siRNA sense strand
agacuaccaucuccacaga

SEQ ID NO: 1242540 - RNA, 19 nt, Homo sapiens
  misc_RNA (1)...(19): siRNA sense strand
agacuaccaucuccacaga

SEQ ID NO: 1242541 - RNA, 19 nt, Homo sapiens
  misc_RNA (1)...(19): siRNA sense strand
gaucaauccugggacuugu

SEQ ID NO: 1242542 - RNA, 19 nt, Homo sapiens
  misc_RNA (1)...(19): siRNA sense strand
uaacggagagggcagcuau

SEQ ID NO: 1242543 - RNA, 19 nt, Homo sapiens
  misc_RNA (1)...(19): siRNA sense strand
caggagaacccgaguggaa

SEQ ID NO: 1242544 - RNA, 19 nt, Homo sapiens
  misc_RNA (1)...(19): siRNA sense strand
ugaggaagaggacgaacua

SEQ ID NO: 1242545 - RNA, 19 nt, Homo sapiens
  misc_RNA (1)...(19): siRNA sense strand
cuacagcauuguuaacauc

SEQ ID NO: 1242546 - RNA, 19 nt, Homo sapiens
  misc_RNA (1)...(19): siRNA sense strand
ccauaaggcucagcagcaa

SEQ ID NO: 1242547 - RNA, 19 nt, Homo sapiens
  misc_RNA (1)...(19): siRNA sense strand
ugaaagcaacaacagaauu

SEQ ID NO: 1242548 - RNA, 19 nt, Homo sapiens
  misc_RNA (1)...(19): siRNA sense strand
cuacaacaacgacuacuau

SEQ ID NO: 1242549 - RNA, 19 nt, Homo sapiens
  misc_RNA (1)...(19): siRNA sense strand
ccaaaugcccgcuacgaau

SEQ ID NO: 1242550 - RNA, 19 nt, Homo sapiens
  misc_RNA (1)...(19): siRNA sense strand
gaagcaacacggccucugu

SEQ ID NO: 1242551 - RNA, 19 nt, Homo sapiens
  misc_RNA (1)...(19): siRNA sense strand
uucaugaggucuacauuga

SEQ ID NO: 1242552 - RNA, 19 nt, Homo sapiens
  misc_RNA (1)...(19): siRNA sense strand
caacagcaacagcaauugu

SEQ ID NO: 1242553 - RNA, 19 nt, Homo sapiens
  misc_RNA (1)...(19): siRNA sense strand
caugaggucuacauugaca

SEQ ID NO: 1242554 - RNA, 19 nt, Homo sapiens
  misc_RNA (1)...(19): siRNA sense strand
ccacuggccucacagaaaa

SEQ ID NO: 1242555 - RNA, 19 nt, Homo sapiens
  misc_RNA (1)...(19): siRNA sense strand
cgacaagaaccgcaagaau

SEQ ID NO: 1242556 - RNA, 19 nt, Homo sapiens
  misc_RNA (1)...(19): siRNA sense strand
acugugcgaucuuaauaaa

SEQ ID NO: 1242557 - RNA, 19 nt, Homo sapiens
  misc_RNA (1)...(19): siRNA sense strand
gcacucuuguccuggugaa

SEQ ID NO: 1242558 - RNA, 19 nt, Homo sapiens
  misc_RNA (1)...(19): siRNA sense strand
gaugaaguagcaaauagug

SEQ ID NO: 1242559 - RNA, 19 nt, Homo sapiens
  misc_RNA (1)...(19): siRNA sense strand
gaacuucaaugaugaggaa

SEQ ID NO: 1242560 - RNA, 19 nt, Homo sapiens
  misc_RNA (1)...(19): siRNA sense strand
gaaacacacucucuucuca

SEQ ID NO: 1242561 - RNA, 19 nt, Homo sapiens
  misc_RNA (1)...(19): siRNA sense strand
gugcagcccuccacauuua

SEQ ID NO: 1242562 - RNA, 19 nt, Homo sapiens
  misc_RNA (1)...(19): siRNA sense strand
gaacugugcgaucuuaaua

SEQ ID NO: 1242563 - RNA, 19 nt, Homo sapiens
  misc_RNA (1)...(19): siRNA sense strand
gaacaaugcucagucuaug

SEQ ID NO: 1242564 - RNA, 19 nt, Homo sapiens
  misc_RNA (1)...(19): siRNA sense strand
gaucaagacuguggacgua

SEQ ID NO: 1242565 - RNA, 19 nt, Homo sapiens
  misc_RNA (1)...(19): siRNA sense strand
ugacgggaaucaucucuua

SEQ ID NO: 1242566 - RNA, 19 nt, Homo sapiens
  misc_RNA (1)...(19): siRNA sense strand
ggaaagauaaggacauuga

SEQ ID NO: 1242567 - RNA, 19 nt, Homo sapiens
  misc_RNA (1)...(19): siRNA sense strand
caacagcaauugugucuca

SEQ ID NO: 1242568 - RNA, 19 nt, Homo sapiens
  misc_RNA (1)...(19): siRNA sense strand
gugaacaguuggaaagaua

SEQ ID NO: 1242569 - RNA, 19 nt, Homo sapiens
  misc_RNA (1)...(19): siRNA sense strand
caacagcccaugcagcuua

SEQ ID NO: 1242570 - RNA, 19 nt, Homo sapiens
  misc_RNA (1)...(19): siRNA sense strand
gaagaggacgaacuaauga

SEQ ID NO: 1242571 - RNA, 19 nt, Homo sapiens
  misc_RNA (1)...(19): siRNA sense strand
gcaauugcuucuacaacaa

SEQ ID NO: 1242572 - RNA, 19 nt, Homo sapiens
  misc_RNA (1)...(19): siRNA sense strand
gcagacgccuggaacaaga

SEQ ID NO: 1242573 - RNA, 19 nt, Homo sapiens
  misc_RNA (1)...(19): siRNA sense strand
ggaagaggacgaacuaaug

SEQ ID NO: 1242574 - RNA, 19 nt, Homo sapiens
  misc_RNA (1)...(19): siRNA sense strand
ggaaaggucugcggcaugu

SEQ ID NO: 1242575 - RNA, 19 nt, Homo sapiens
  misc_RNA (1)...(19): siRNA sense strand
gaaagcaacaacagaauuc

SEQ ID NO: 1242576 - RNA, 19 nt, Homo sapiens
  misc_RNA (1)...(19): siRNA sense strand
caaguggacucagaagaaa

SEQ ID NO: 1242577 - RNA, 19 nt, Homo sapiens
  misc_RNA (1)...(19): siRNA sense strand
ccaacaggaugguaucuau

SEQ ID NO: 1242578 - RNA, 19 nt, Homo sapiens
  misc_RNA (1)...(19): siRNA sense strand
gacaagaaccgcaagaaug

SEQ ID NO: 1242579 - RNA, 19 nt, Homo sapiens
  misc_RNA (1)...(19): siRNA sense strand
gcacacacauguccaccau

SEQ ID NO: 1242580 - RNA, 19 nt, Homo sapiens
  misc_RNA (1)...(19): siRNA sense strand
gcgaugaaguagcaaauag

SEQ ID NO: 1242581 - RNA, 19 nt, Homo sapiens
  misc_RNA (1)...(19): siRNA sense strand
gcuguaaggucaugcugaa

SEQ ID NO: 1242582 - RNA, 19 nt, Homo sapiens
  misc_RNA (1)...(19): siRNA sense strand
gcaaacacccucugugagu

SEQ ID NO: 1242583 - RNA, 19 nt, Homo sapiens
  misc_RNA (1)...(19): siRNA sense strand
ccacccggcugauguuuga

SEQ ID NO: 1242584 - RNA, 19 nt, Homo sapiens
  misc_RNA (1)...(19): siRNA sense strand
caagacagcuauuuuguug

SEQ ID NO: 1242585 - RNA, 19 nt, Homo sapiens
  misc_RNA (1)...(19): siRNA sense strand
gcuauggguuucaucuuga

SEQ ID NO: 1242586 - RNA, 19 nt, Homo sapiens
  misc_RNA (1)...(19): siRNA sense strand
caacacggccucugugguu

SEQ ID NO: 1242587 - RNA, 19 nt, Homo sapiens
  misc_RNA (1)...(19): siRNA sense strand
gaaaccaccaccucuguug

SEQ ID NO: 1242588 - RNA, 19 nt, Homo sapiens
  misc_RNA (1)...(19): siRNA sense strand
ucagaaaggccacaucuug

SEQ ID NO: 1242589 - RNA, 19 nt, Homo sapiens
  misc_RNA (1)...(19): siRNA sense strand
gcacuuugcccaccacaug

SEQ ID NO: 1242590 - RNA, 19 nt, Homo sapiens
  misc_RNA (1)...(19): siRNA sense strand
acaagaaccgcaagaauga

SEQ ID NO: 1242591 - RNA, 19 nt, Homo sapiens
  misc_RNA (1)...(19): siRNA sense strand
gcaaauagugacagugaau

SEQ ID NO: 1242592 - RNA, 19 nt, Homo sapiens
  misc_RNA (1)...(19): siRNA sense strand
aagaaagggucaucaggaa

SEQ ID NO: 1242593 - RNA, 19 nt, Homo sapiens
  misc_RNA (1)...(19): siRNA sense strand
ccaaguggacucagaagaa

SEQ ID NO: 1242594 - RNA, 19 nt, Homo sapiens
  misc_RNA (1)...(19): siRNA sense strand
gcugagggcugcauuuguc

SEQ ID NO: 1242595 - RNA, 19 nt, Homo sapiens
  misc_RNA (1)...(19): siRNA sense strand
gauacaguuugccguggua

SEQ ID NO: 1242596 - RNA, 19 nt, Homo sapiens
  misc_RNA (1)...(19): siRNA sense strand
gaaagggucaucaggaaag

SEQ ID NO: 1242597 - RNA, 19 nt, Homo sapiens
  misc_RNA (1)...(19): siRNA sense strand
gcugagagcugugaauguc

SEQ ID NO: 1242598 - RNA, 19 nt, Homo sapiens
  misc_RNA (1)...(19): siRNA sense strand
ggaguucgcauaccacaug

SEQ ID NO: 1242599 - RNA, 19 nt, Homo sapiens
  misc_RNA (1)...(19): siRNA sense strand
uacgugagcuuugauggua

SEQ ID NO: 1242600 - RNA, 19 nt, Homo sapiens
  misc_RNA (1)...(19): siRNA sense strand
caaacacccucugugaguu

SEQ ID NO: 1242601 - RNA, 19 nt, Homo sapiens
  misc_RNA (1)...(19): siRNA sense strand
gugaauuugugaacaguug

SEQ ID NO: 1242602 - RNA, 19 nt, Homo sapiens
  misc_RNA (1)...(19): siRNA sense strand
ccuacaaucuccaccaaga

SEQ ID NO: 1242603 - RNA, 19 nt, Homo sapiens
  misc_RNA (1)...(19): siRNA sense strand
gacaacagcaacagcaauu

SEQ ID NO: 1242604 - RNA, 19 nt, Homo sapiens
  misc_RNA (1)...(19): siRNA sense strand
uguaaucgcgucuguauga

SEQ ID NO: 1242605 - RNA, 19 nt, Homo sapiens
  misc_RNA (1)...(19): siRNA sense strand
ggaaggacgcaacaagaug

SEQ ID NO: 1242606 - RNA, 19 nt, Homo sapiens
  misc_RNA (1)...(19): siRNA sense strand
gcuuaagaauggccaguau

SEQ ID NO: 1242607 - RNA, 19 nt, Homo sapiens
  misc_RNA (1)...(19): siRNA sense strand
acuaucaucuccacagaaa

SEQ ID NO: 1242608 - RNA, 19 nt, Homo sapiens
  misc_RNA (1)...(19): siRNA sense strand
cauuuaugcuucagucuug

SEQ ID NO: 1242609 - RNA, 19 nt, Homo sapiens
  misc_RNA (1)...(19): siRNA sense strand
acagagcgcugcccuccaa

SEQ ID NO: 1242610 - RNA, 19 nt, Homo sapiens
  misc_RNA (1)...(19): siRNA sense strand
ugaccuauguucugaucaa

SEQ ID NO: 1242611 - RNA, 19 nt, Homo sapiens
  misc_RNA (1)...(19): siRNA sense strand
cccguuaccucacauuuga

SEQ ID NO: 1242612 - RNA, 19 nt, Homo sapiens
  misc_RNA (1)...(19): siRNA sense strand
gcuaugugcugagugaaga

SEQ ID NO: 1242613 - RNA, 19 nt, Homo sapiens
  misc_RNA (1)...(19): siRNA sense strand
caacaacgacuacuaugag

SEQ ID NO: 1242614 - RNA, 19 nt, Homo sapiens
  misc_RNA (1)...(19): siRNA sense strand
ugaaaccacuggccucaca

SEQ ID NO: 1242615 - RNA, 19 nt, Homo sapiens
  misc_RNA (1)...(19): siRNA sense strand
ggacauugacccaaguugu

SEQ ID NO: 1242616 - RNA, 19 nt, Homo sapiens
  misc_RNA (1)...(19): siRNA sense strand
ugugggaacuucaaugaug

SEQ ID NO: 1242617 - RNA, 19 nt, Homo sapiens
  misc_RNA (1)...(19): siRNA sense strand
gaagggccaccgugugcua

SEQ ID NO: 1242618 - RNA, 19 nt, Homo sapiens
  misc_RNA (1)...(19): siRNA sense strand
caagaucagugccaagcau

SEQ ID NO: 1242619 - RNA, 19 nt, Homo sapiens
  misc_RNA (1)...(19): siRNA sense strand
gaacuaugacggcaacagu

SEQ ID NO: 1242620 - RNA, 19 nt, Homo sapiens
  misc_RNA (1)...(19): siRNA sense strand
caacucaacagacccauuc

SEQ ID NO: 1242621 - RNA, 19 nt, Homo sapiens
  misc_RNA (1)...(19): siRNA sense strand
cuacggagacccucauuau

SEQ ID NO: 1242622 - RNA, 19 nt, Homo sapiens
  misc_RNA (1)...(19): siRNA sense strand
agacuaccaucucuacaga

SEQ ID NO: 1242623 - RNA, 19 nt, Homo sapiens
  misc_RNA (1)...(19): siRNA sense strand
gaccaggagugucagaagu

SEQ ID NO: 1242624 - RNA, 19 nt, Homo sapiens
  misc_RNA (1)...(19): siRNA sense strand
ccgcaagaaugacaugaug

SEQ ID NO: 1242625 - RNA, 19 nt, Homo sapiens
  misc_RNA (1)...(19): siRNA sense strand
gugcaaacacccucuguga

SEQ ID NO: 1242626 - RNA, 19 nt, Homo sapiens
  misc_RNA (1)...(19): siRNA sense strand
gcccagcgaugaaguagca

SEQ ID NO: 1242627 - RNA, 19 nt, Homo sapiens
  misc_RNA (1)...(19): siRNA sense strand
gugggaacuucaaugauga

SEQ ID NO: 1242628 - RNA, 19 nt, Homo sapiens
  misc_RNA (1)...(19): siRNA sense strand
cagaaaggccacaucuuga

SEQ ID NO: 1242629 - RNA, 19 nt, Homo sapiens
  misc_RNA (1)...(19): siRNA sense strand
caacgcccaucccuucugu

SEQ ID NO: 1242630 - RNA, 19 nt, Homo sapiens
  misc_RNA (1)...(19): siRNA sense strand
guaaggucaugcugaaugg

SEQ ID NO: 1242631 - RNA, 19 nt, Homo sapiens
  misc_RNA (1)...(19): siRNA sense strand
gaugugcucuggaaacacu

SEQ ID NO: 1242632 - RNA, 19 nt, Homo sapiens
  misc_RNA (1)...(19): siRNA sense strand
acaaugaccaccugaaguu

SEQ ID NO: 1242633 - RNA, 19 nt, Homo sapiens
  misc_RNA (1)...(19): siRNA sense strand
gguuucaucuugaucaauc

SEQ ID NO: 1242634 - RNA, 19 nt, Homo sapiens
  misc_RNA (1)...(19): siRNA sense strand
gggaguauccggaaacaca

SEQ ID NO: 1242635 - RNA, 19 nt, Homo sapiens
  misc_RNA (1)...(19): siRNA sense strand
cagcuuugguggaaggaaa

SEQ ID NO: 1242636 - RNA, 19 nt, Homo sapiens
  misc_RNA (1)...(19): siRNA sense strand
uagcaaauagugacaguga

SEQ ID NO: 1242637 - RNA, 19 nt, Homo sapiens
  misc_RNA (1)...(19): siRNA sense strand
cugcaaacccaaccagaua

SEQ ID NO: 1242638 - RNA, 19 nt, Homo sapiens
  misc_RNA (1)...(19): siRNA sense strand
gcgaagccaugcccugaca

SEQ ID NO: 1242639 - RNA, 19 nt, Homo sapiens
  misc_RNA (1)...(19): siRNA sense strand
agacuaccaucuccacaga

SEQ ID NO: 1242640 - RNA, 19 nt, Homo sapiens
  misc_RNA (1)...(19): siRNA sense strand
agacuaccaucuccacaga

SEQ ID NO: 1242641 - RNA, 19 nt, Homo sapiens
  misc_RNA (1)...(19): siRNA sense strand
gaucaauccugggacuugu

SEQ ID NO: 1242642 - RNA, 19 nt, Homo sapiens
  misc_RNA (1)...(19): siRNA sense strand
uaacggagagggcagcuau

SEQ ID NO: 1242643 - RNA, 19 nt, Homo sapiens
  misc_RNA (1)...(19): siRNA sense strand
caggagaacccgaguggaa

SEQ ID NO: 1242644 - RNA, 19 nt, Homo sapiens
  misc_RNA (1)...(19): siRNA sense strand
ugaggaagaggacgaacua

SEQ ID NO: 1242645 - RNA, 19 nt, Homo sapiens
  misc_RNA (1)...(19): siRNA sense strand
cuacagcauuguuaacauc

SEQ ID NO: 1242646 - RNA, 19 nt, Homo sapiens
  misc_RNA (1)...(19): siRNA sense strand
ccauaaggcucagcagcaa

SEQ ID NO: 1242647 - RNA, 19 nt, Homo sapiens
  misc_RNA (1)...(19): siRNA sense strand
ugaaagcaacaacagaauu

SEQ ID NO: 1242648 - RNA, 19 nt, Homo sapiens
  misc_RNA (1)...(19): siRNA sense strand
cuacaacaacgacuacuau

SEQ ID NO: 1242649 - RNA, 19 nt, Homo sapiens
  misc_RNA (1)...(19): siRNA sense strand
ccaaaugcccgcuacgaau

SEQ ID NO: 1242650 - RNA, 19 nt, Homo sapiens
  misc_RNA (1)...(19): siRNA sense strand
gaagcaacacggccucugu

SEQ ID NO: 1242651 - RNA, 19 nt, Homo sapiens
  misc_RNA (1)...(19): siRNA sense strand
uucaugaggucuacauuga

SEQ ID NO: 1242652 - RNA, 19 nt, Homo sapiens
  misc_RNA (1)...(19): siRNA sense strand
caacagcaacagcaauugu

SEQ ID NO: 1242653 - RNA, 19 nt, Homo sapiens
  misc_RNA (1)...(19): siRNA sense strand
caugaggucuacauugaca

SEQ ID NO: 1242654 - RNA, 19 nt, Homo sapiens
  misc_RNA (1)...(19): siRNA sense strand
ccacuggccucacagaaaa

SEQ ID NO: 1242655 - RNA, 19 nt, Homo sapiens
  misc_RNA (1)...(19): siRNA sense strand
cgacaagaaccgcaagaau

SEQ ID NO: 1242656 - RNA, 19 nt, Homo sapiens
  misc_RNA (1)...(19): siRNA sense strand
acugugcgaucuuaauaaa

SEQ ID NO: 1242657 - RNA, 19 nt, Homo sapiens
  misc_RNA (1)...(19): siRNA sense strand
gcacucuuguccuggugaa

SEQ ID NO: 1242658 - RNA, 19 nt, Homo sapiens
  misc_RNA (1)...(19): siRNA sense strand
gaugaaguagcaaauagug

SEQ ID NO: 1242659 - RNA, 19 nt, Homo sapiens
  misc_RNA (1)...(19): siRNA sense strand
gaacuucaaugaugaggaa

SEQ ID NO: 1242660 - RNA, 19 nt, Homo sapiens
  misc_RNA (1)...(19): siRNA sense strand
gaaacacacucucuucuca

SEQ ID NO: 1242661 - RNA, 19 nt, Homo sapiens
  misc_RNA (1)...(19): siRNA sense strand
gugcagcccuccacauuua

SEQ ID NO: 1242662 - RNA, 19 nt, Homo sapiens
  misc_RNA (1)...(19): siRNA sense strand
gaacugugcgaucuuaaua

SEQ ID NO: 1242663 - RNA, 19 nt, Homo sapiens
  misc_RNA (1)...(19): siRNA sense strand
gaacaaugcucagucuaug

SEQ ID NO: 1242664 - RNA, 19 nt, Homo sapiens
  misc_RNA (1)...(19): siRNA sense strand
gaucaagacuguggacgua

SEQ ID NO: 1242665 - RNA, 19 nt, Homo sapiens
  misc_RNA (1)...(19): siRNA sense strand
ugacgggaaucaucucuua

SEQ ID NO: 1242666 - RNA, 19 nt, Homo sapiens
  misc_RNA (1)...(19): siRNA sense strand
ggaaagauaaggacauuga

SEQ ID NO: 1242667 - RNA, 19 nt, Homo sapiens
  misc_RNA (1)...(19): siRNA sense strand
caacagcaauugugucuca

SEQ ID NO: 1242668 - RNA, 19 nt, Homo sapiens
  misc_RNA (1)...(19): siRNA sense strand
gugaacaguuggaaagaua

SEQ ID NO: 1242669 - RNA, 19 nt, Homo sapiens
  misc_RNA (1)...(19): siRNA sense strand
caacagcccaugcagcuua

SEQ ID NO: 1242670 - RNA, 19 nt, Homo sapiens
  misc_RNA (1)...(19): siRNA sense strand
gaagaggacgaacuaauga

SEQ ID NO: 1242671 - RNA, 19 nt, Homo sapiens
  misc_RNA (1)...(19): siRNA sense strand
gcaauugcuucuacaacaa

SEQ ID NO: 1242672 - RNA, 19 nt, Homo sapiens
  misc_RNA (1)...(19): siRNA sense strand
gcagacgccuggaacaaga

SEQ ID NO: 1242673 - RNA, 19 nt, Homo sapiens
  misc_RNA (1)...(19): siRNA sense strand
ggaagaggacgaacuaaug

SEQ ID NO: 1242674 - RNA, 19 nt, Homo sapiens
  misc_RNA (1)...(19): siRNA sense strand
ggaaaggucugcggcaugu

SEQ ID NO: 1242675 - RNA, 19 nt, Homo sapiens
  misc_RNA (1)...(19): siRNA sense strand
gaaagcaacaacagaauuc

SEQ ID NO: 1242676 - RNA, 19 nt, Homo sapiens
  misc_RNA (1)...(19): siRNA sense strand
caaguggacucagaagaaa

SEQ ID NO: 1242677 - RNA, 19 nt, Homo sapiens
  misc_RNA (1)...(19): siRNA sense strand
ccaacaggaugguaucuau

SEQ ID NO: 1242678 - RNA, 19 nt, Homo sapiens
  misc_RNA (1)...(19): siRNA sense strand
gacaagaaccgcaagaaug

SEQ ID NO: 1242679 - RNA, 19 nt, Homo sapiens
  misc_RNA (1)...(19): siRNA sense strand
gcacacacauguccaccau

SEQ ID NO: 1242680 - RNA, 19 nt, Homo sapiens
  misc_RNA (1)...(19): siRNA sense strand
gcgaugaaguagcaaauag

SEQ ID NO: 1242681 - RNA, 19 nt, Homo sapiens
  misc_RNA (1)...(19): siRNA sense strand
gcuguaaggucaugcugaa

SEQ ID NO: 1242682 - RNA, 19 nt, Homo sapiens
  misc_RNA (1)...(19): siRNA sense strand
gcaaacacccucugugagu

SEQ ID NO: 1242683 - RNA, 19 nt, Homo sapiens
  misc_RNA (1)...(19): siRNA sense strand
ccacccggcugauguuuga

SEQ ID NO: 1242684 - RNA, 19 nt, Homo sapiens
  misc_RNA (1)...(19): siRNA sense strand
caagacagcuauuuuguug

SEQ ID NO: 1242685 - RNA, 19 nt, Homo sapiens
  misc_RNA (1)...(19): siRNA sense strand
gcuauggguuucaucuuga

SEQ ID NO: 1242686 - RNA, 19 nt, Homo sapiens
  misc_RNA (1)...(19): siRNA sense strand
caacacggccucugugguu

SEQ ID NO: 1242687 - RNA, 19 nt, Homo sapiens
  misc_RNA (1)...(19): siRNA sense strand
gaaaccaccaccucuguug

SEQ ID NO: 1242688 - RNA, 19 nt, Homo sapiens
  misc_RNA (1)...(19): siRNA sense strand
ucagaaaggccacaucuug

SEQ ID NO: 1242689 - RNA, 19 nt, Homo sapiens
  misc_RNA (1)...(19): siRNA sense strand
gcacuuugcccaccacaug

SEQ ID NO: 1242690 - RNA, 19 nt, Homo sapiens
  misc_RNA (1)...(19): siRNA sense strand
acaagaaccgcaagaauga

SEQ ID NO: 1242691 - RNA, 19 nt, Homo sapiens
  misc_RNA (1)...(19): siRNA sense strand
gcaaauagugacagugaau

SEQ ID NO: 1242692 - RNA, 19 nt, Homo sapiens
  misc_RNA (1)...(19): siRNA sense strand
aagaaagggucaucaggaa

SEQ ID NO: 1242693 - RNA, 19 nt, Homo sapiens
  misc_RNA (1)...(19): siRNA sense strand
ccaaguggacucagaagaa

SEQ ID NO: 1242694 - RNA, 19 nt, Homo sapiens
  misc_RNA (1)...(19): siRNA sense strand
gcugagggcugcauuuguc

SEQ ID NO: 1242695 - RNA, 19 nt, Homo sapiens
  misc_RNA (1)...(19): siRNA sense strand
gauacaguuugccguggua

SEQ ID NO: 1242696 - RNA, 19 nt, Homo sapiens
  misc_RNA (1)...(19): siRNA sense strand
gaaagggucaucaggaaag

SEQ ID NO: 1242697 - RNA, 19 nt, Homo sapiens
  misc_RNA (1)...(19): siRNA sense strand
gcugagagcugugaauguc

SEQ ID NO: 1242698 - RNA, 19 nt, Homo sapiens
  misc_RNA (1)...(19): siRNA sense strand
ggaguucgcauaccacaug

SEQ ID NO: 1242699 - RNA, 19 nt, Homo sapiens
  misc_RNA (1)...(19): siRNA sense strand
uacgugagcuuugauggua

SEQ ID NO: 1242700 - RNA, 19 nt, Homo sapiens
  misc_RNA (1)...(19): siRNA sense strand
caaacacccucugugaguu

SEQ ID NO: 1242701 - RNA, 19 nt, Homo sapiens
  misc_RNA (1)...(19): siRNA sense strand
gugaauuugugaacaguug

SEQ ID NO: 1242702 - RNA, 19 nt, Homo sapiens
  misc_RNA (1)...(19): siRNA sense strand
ccuacaaucuccaccaaga

SEQ ID NO: 1242703 - RNA, 19 nt, Homo sapiens
  misc_RNA (1)...(19): siRNA sense strand
gacaacagcaacagcaauu

SEQ ID NO: 1242704 - RNA, 19 nt, Homo sapiens
  misc_RNA (1)...(19): siRNA sense strand
uguaaucgcgucuguauga

SEQ ID NO: 1242705 - RNA, 19 nt, Homo sapiens
  misc_RNA (1)...(19): siRNA sense strand
ggaaggacgcaacaagaug

SEQ ID NO: 1242706 - RNA, 19 nt, Homo sapiens
  misc_RNA (1)...(19): siRNA sense strand
gcuuaagaauggccaguau

SEQ ID NO: 1242707 - RNA, 19 nt, Homo sapiens
  misc_RNA (1)...(19): siRNA sense strand
acuaucaucuccacagaaa

SEQ ID NO: 1242708 - RNA, 19 nt, Homo sapiens
  misc_RNA (1)...(19): siRNA sense strand
cauuuaugcuucagucuug

SEQ ID NO: 1242709 - RNA, 19 nt, Homo sapiens
  misc_RNA (1)...(19): siRNA sense strand
acagagcgcugcccuccaa

SEQ ID NO: 1242710 - RNA, 19 nt, Homo sapiens
  misc_RNA (1)...(19): siRNA sense strand
ugaccuauguucugaucaa

SEQ ID NO: 1242711 - RNA, 19 nt, Homo sapiens
  misc_RNA (1)...(19): siRNA sense strand
cccguuaccucacauuuga

SEQ ID NO: 1242712 - RNA, 19 nt, Homo sapiens
  misc_RNA (1)...(19): siRNA sense strand
gcuaugugcugagugaaga

SEQ ID NO: 1242713 - RNA, 19 nt, Homo sapiens
  misc_RNA (1)...(19): siRNA sense strand
caacaacgacuacuaugag

SEQ ID NO: 1242714 - RNA, 19 nt, Homo sapiens
  misc_RNA (1)...(19): siRNA sense strand
ugaaaccacuggccucaca

SEQ ID NO: 1242715 - RNA, 19 nt, Homo sapiens
  misc_RNA (1)...(19): siRNA sense strand
ggacauugacccaaguugu

SEQ ID NO: 1242716 - RNA, 19 nt, Homo sapiens
  misc_RNA (1)...(19): siRNA sense strand
ugugggaacuucaaugaug

SEQ ID NO: 1242717 - RNA, 19 nt, Homo sapiens
  misc_RNA (1)...(19): siRNA sense strand
gaagggccaccgugugcua

SEQ ID NO: 1242718 - RNA, 19 nt, Homo sapiens
  misc_RNA (1)...(19): siRNA sense strand
caagaucagugccaagcau

SEQ ID NO: 1242719 - RNA, 19 nt, Homo sapiens
  misc_RNA (1)...(19): siRNA sense strand
gaacuaugacggcaacagu

SEQ ID NO: 1242720 - RNA, 19 nt, Homo sapiens
  misc_RNA (1)...(19): siRNA sense strand
caacucaacagacccauuc

SEQ ID NO: 1242721 - RNA, 19 nt, Homo sapiens
  misc_RNA (1)...(19): siRNA sense strand
cuacggagacccucauuau

SEQ ID NO: 1242722 - RNA, 19 nt, Homo sapiens
  misc_RNA (1)...(19): siRNA sense strand
agacuaccaucucuacaga

SEQ ID NO: 1242723 - RNA, 19 nt, Homo sapiens
  misc_RNA (1)...(19): siRNA sense strand
gaccaggagugucagaagu

SEQ ID NO: 1242724 - RNA, 19 nt, Homo sapiens
  misc_RNA (1)...(19): siRNA sense strand
ccgcaagaaugacaugaug

SEQ ID NO: 1242725 - RNA, 19 nt, Homo sapiens
  misc_RNA (1)...(19): siRNA sense strand
gugcaaacacccucuguga

SEQ ID NO: 1242726 - RNA, 19 nt, Homo sapiens
  misc_RNA (1)...(19): siRNA sense strand
gcccagcgaugaaguagca

SEQ ID NO: 1242727 - RNA, 19 nt, Homo sapiens
  misc_RNA (1)...(19): siRNA sense strand
gugggaacuucaaugauga

SEQ ID NO: 1242728 - RNA, 19 nt, Homo sapiens
  misc_RNA (1)...(19): siRNA sense strand
cagaaaggccacaucuuga

SEQ ID NO: 1242729 - RNA, 19 nt, Homo sapiens
  misc_RNA (1)...(19): siRNA sense strand
caacgcccaucccuucugu

SEQ ID NO: 1242730 - RNA, 19 nt, Homo sapiens
  misc_RNA (1)...(19): siRNA sense strand
guaaggucaugcugaaugg

SEQ ID NO: 1242731 - RNA, 19 nt, Homo sapiens
  misc_RNA (1)...(19): siRNA sense strand
gaugugcucuggaaacacu

SEQ ID NO: 1242732 - RNA, 19 nt, Homo sapiens
  misc_RNA (1)...(19): siRNA sense strand
acaaugaccaccugaaguu

SEQ ID NO: 1242733 - RNA, 19 nt, Homo sapiens
  misc_RNA (1)...(19): siRNA sense strand
gguuucaucuugaucaauc

SEQ ID NO: 1242734 - RNA, 19 nt, Homo sapiens
  misc_RNA (1)...(19): siRNA sense strand
gggaguauccggaaacaca

SEQ ID NO: 1242735 - RNA, 19 nt, Homo sapiens
  misc_RNA (1)...(19): siRNA sense strand
cagcuuugguggaaggaaa

SEQ ID NO: 1242736 - RNA, 19 nt, Homo sapiens
  misc_RNA (1)...(19): siRNA sense strand
uagcaaauagugacaguga

SEQ ID NO: 1242737 - RNA, 19 nt, Homo sapiens
  misc_RNA (1)...(19): siRNA sense strand
cugcaaacccaaccagaua

SEQ ID NO: 1242738 - RNA, 19 nt, Homo sapiens
  misc_RNA (1)...(19): siRNA sense strand
gcgaagccaugcccugaca

SEQ ID NO: 1242739 - RNA, 19 nt, Homo sapiens
  misc_RNA (1)...(19): siRNA sense strand
agacuaccaucuccacaga

SEQ ID NO: 1242740 - RNA, 19 nt, Homo sapiens
  misc_RNA (1)...(19): siRNA sense strand
agacuaccaucuccacaga

SEQ ID NO: 1242741 - RNA, 19 nt, Homo sapiens
  misc_RNA (1)...(19): siRNA sense strand
gaucaauccugggacuugu

SEQ ID NO: 1242742 - RNA, 19 nt, Homo sapiens
  misc_RNA (1)...(19): siRNA sense strand
uaacggagagggcagcuau

SEQ ID NO: 1242743 - RNA, 19 nt, Homo sapiens
  misc_RNA (1)...(19): siRNA sense strand
caggagaacccgaguggaa

SEQ ID NO: 1242744 - RNA, 19 nt, Homo sapiens
  misc_RNA (1)...(19): siRNA sense strand
ugaggaagaggacgaacua

SEQ ID NO: 1242745 - RNA, 19 nt, Homo sapiens
  misc_RNA (1)...(19): siRNA sense strand
cuacagcauuguuaacauc

SEQ ID NO: 1242746 - RNA, 19 nt, Homo sapiens
  misc_RNA (1)...(19): siRNA sense strand
ccauaaggcucagcagcaa

SEQ ID NO: 1242747 - RNA, 19 nt, Homo sapiens
  misc_RNA (1)...(19): siRNA sense strand
ugaaagcaacaacagaauu

SEQ ID NO: 1242748 - RNA, 19 nt, Homo sapiens
  misc_RNA (1)...(19): siRNA sense strand
cuacaacaacgacuacuau

SEQ ID NO: 1242749 - RNA, 19 nt, Homo sapiens
  misc_RNA (1)...(19): siRNA sense strand
ccaaaugcccgcuacgaau

SEQ ID NO: 1242750 - RNA, 19 nt, Homo sapiens
  misc_RNA (1)...(19): siRNA sense strand
gaagcaacacggccucugu

SEQ ID NO: 1242751 - RNA, 19 nt, Homo sapiens
  misc_RNA (1)...(19): siRNA sense strand
uucaugaggucuacauuga

SEQ ID NO: 1242752 - RNA, 19 nt, Homo sapiens
  misc_RNA (1)...(19): siRNA sense strand
caacagcaacagcaauugu

SEQ ID NO: 1242753 - RNA, 19 nt, Homo sapiens
  misc_RNA (1)...(19): siRNA sense strand
caugaggucuacauugaca

SEQ ID NO: 1242754 - RNA, 19 nt, Homo sapiens
  misc_RNA (1)...(19): siRNA sense strand
ccacuggccucacagaaaa

SEQ ID NO: 1242755 - RNA, 19 nt, Homo sapiens
  misc_RNA (1)...(19): siRNA sense strand
cgacaagaaccgcaagaau

SEQ ID NO: 1242756 - RNA, 19 nt, Homo sapiens
  misc_RNA (1)...(19): siRNA sense strand
acugugcgaucuuaauaaa

SEQ ID NO: 1242757 - RNA, 19 nt, Homo sapiens
  misc_RNA (1)...(19): siRNA sense strand
gcacucuuguccuggugaa

SEQ ID NO: 1242758 - RNA, 19 nt, Homo sapiens
  misc_RNA (1)...(19): siRNA sense strand
gaugaaguagcaaauagug

SEQ ID NO: 1242759 - RNA, 19 nt, Homo sapiens
  misc_RNA (1)...(19): siRNA sense strand
gaacuucaaugaugaggaa

SEQ ID NO: 1242760 - RNA, 19 nt, Homo sapiens
  misc_RNA (1)...(19): siRNA sense strand
gaaacacacucucuucuca

SEQ ID NO: 1242761 - RNA, 19 nt, Homo sapiens
  misc_RNA (1)...(19): siRNA sense strand
gugcagcccuccacauuua

SEQ ID NO: 1242762 - RNA, 19 nt, Homo sapiens
  misc_RNA (1)...(19): siRNA sense strand
gaacugugcgaucuuaaua

SEQ ID NO: 1242763 - RNA, 19 nt, Homo sapiens
  misc_RNA (1)...(19): siRNA sense strand
gaacaaugcucagucuaug

SEQ ID NO: 1242764 - RNA, 19 nt, Homo sapiens
  misc_RNA (1)...(19): siRNA sense strand
gaucaagacuguggacgua

SEQ ID NO: 1242765 - RNA, 19 nt, Homo sapiens
  misc_RNA (1)...(19): siRNA sense strand
ugacgggaaucaucucuua

SEQ ID NO: 1242766 - RNA, 19 nt, Homo sapiens
  misc_RNA (1)...(19): siRNA sense strand
ggaaagauaaggacauuga

SEQ ID NO: 1242767 - RNA, 19 nt, Homo sapiens
  misc_RNA (1)...(19): siRNA sense strand
caacagcaauugugucuca

SEQ ID NO: 1242768 - RNA, 19 nt, Homo sapiens
  misc_RNA (1)...(19): siRNA sense strand
gugaacaguuggaaagaua

SEQ ID NO: 1242769 - RNA, 19 nt, Homo sapiens
  misc_RNA (1)...(19): siRNA sense strand
ccagaaagccagcaucuaa

SEQ ID NO: 1242770 - RNA, 19 nt, Homo sapiens
  misc_RNA (1)...(19): siRNA sense strand
caacagcccaugcagcuua

SEQ ID NO: 1242771 - RNA, 19 nt, Homo sapiens
  misc_RNA (1)...(19): siRNA sense strand
gaagaggacgaacuaauga

SEQ ID NO: 1242772 - RNA, 19 nt, Homo sapiens
  misc_RNA (1)...(19): siRNA sense strand
gcaauugcuucuacaacaa

SEQ ID NO: 1242773 - RNA, 19 nt, Homo sapiens
  misc_RNA (1)...(19): siRNA sense strand
gcagacgccuggaacaaga

SEQ ID NO: 1242774 - RNA, 19 nt, Homo sapiens
  misc_RNA (1)...(19): siRNA sense strand
ggaagaggacgaacuaaug

SEQ ID NO: 1242775 - RNA, 19 nt, Homo sapiens
  misc_RNA (1)...(19): siRNA sense strand
ggaaaggucugcggcaugu

SEQ ID NO: 1242776 - RNA, 19 nt, Homo sapiens
  misc_RNA (1)...(19): siRNA sense strand
gaaagcaacaacagaauuc

SEQ ID NO: 1242777 - RNA, 19 nt, Homo sapiens
  misc_RNA (1)...(19): siRNA sense strand
caaguggacucagaagaaa

SEQ ID NO: 1242778 - RNA, 19 nt, Homo sapiens
  misc_RNA (1)...(19): siRNA sense strand
ccaacaggaugguaucuau

SEQ ID NO: 1242779 - RNA, 19 nt, Homo sapiens
  misc_RNA (1)...(19): siRNA sense strand
gacaagaaccgcaagaaug

SEQ ID NO: 1242780 - RNA, 19 nt, Homo sapiens
  misc_RNA (1)...(19): siRNA sense strand
gcacacacauguccaccau

SEQ ID NO: 1242781 - RNA, 19 nt, Homo sapiens
  misc_RNA (1)...(19): siRNA sense strand
gaacgaggaggaagagaga

SEQ ID NO: 1242782 - RNA, 19 nt, Homo sapiens
  misc_RNA (1)...(19): siRNA sense strand
gcgaugaaguagcaaauag

SEQ ID NO: 1242783 - RNA, 19 nt, Homo sapiens
  misc_RNA (1)...(19): siRNA sense strand
gcuguaaggucaugcugaa

SEQ ID NO: 1242784 - RNA, 19 nt, Homo sapiens
  misc_RNA (1)...(19): siRNA sense strand
gcaaacacccucugugagu

SEQ ID NO: 1242785 - RNA, 19 nt, Homo sapiens
  misc_RNA (1)...(19): siRNA sense strand
ccacccggcugauguuuga

SEQ ID NO: 1242786 - RNA, 19 nt, Homo sapiens
  misc_RNA (1)...(19): siRNA sense strand
caagacagcuauuuuguug

SEQ ID NO: 1242787 - RNA, 19 nt, Homo sapiens
  misc_RNA (1)...(19): siRNA sense strand
gcuauggguuucaucuuga

SEQ ID NO: 1242788 - RNA, 19 nt, Homo sapiens
  misc_RNA (1)...(19): siRNA sense strand
caacacggccucugugguu

SEQ ID NO: 1242789 - RNA, 19 nt, Homo sapiens
  misc_RNA (1)...(19): siRNA sense strand
gaaaccaccaccucuguug

SEQ ID NO: 1242790 - RNA, 19 nt, Homo sapiens
  misc_RNA (1)...(19): siRNA sense strand
ucagaaaggccacaucuug

SEQ ID NO: 1242791 - RNA, 19 nt, Homo sapiens
  misc_RNA (1)...(19): siRNA sense strand
gcacuuugcccaccacaug

SEQ ID NO: 1242792 - RNA, 19 nt, Homo sapiens
  misc_RNA (1)...(19): siRNA sense strand
acaagaaccgcaagaauga

SEQ ID NO: 1242793 - RNA, 19 nt, Homo sapiens
  misc_RNA (1)...(19): siRNA sense strand
gcaaauagugacagugaau

SEQ ID NO: 1242794 - RNA, 19 nt, Homo sapiens
  misc_RNA (1)...(19): siRNA sense strand
aagaaagggucaucaggaa

SEQ ID NO: 1242795 - RNA, 19 nt, Homo sapiens
  misc_RNA (1)...(19): siRNA sense strand
ccaaguggacucagaagaa

SEQ ID NO: 1242796 - RNA, 19 nt, Homo sapiens
  misc_RNA (1)...(19): siRNA sense strand
gcugagggcugcauuuguc

SEQ ID NO: 1242797 - RNA, 19 nt, Homo sapiens
  misc_RNA (1)...(19): siRNA sense strand
gauacaguuugccguggua

SEQ ID NO: 1242798 - RNA, 19 nt, Homo sapiens
  misc_RNA (1)...(19): siRNA sense strand
gaaagggucaucaggaaag

SEQ ID NO: 1242799 - RNA, 19 nt, Homo sapiens
  misc_RNA (1)...(19): siRNA sense strand
gcugagagcugugaauguc

SEQ ID NO: 1242800 - RNA, 19 nt, Homo sapiens
  misc_RNA (1)...(19): siRNA sense strand
ggaguucgcauaccacaug

SEQ ID NO: 1242801 - RNA, 19 nt, Homo sapiens
  misc_RNA (1)...(19): siRNA sense strand
uacgugagcuuugauggua

SEQ ID NO: 1242802 - RNA, 19 nt, Homo sapiens
  misc_RNA (1)...(19): siRNA sense strand
caaacacccucugugaguu

SEQ ID NO: 1242803 - RNA, 19 nt, Homo sapiens
  misc_RNA (1)...(19): siRNA sense strand
gugaauuugugaacaguug

SEQ ID NO: 1242804 - RNA, 19 nt, Homo sapiens
  misc_RNA (1)...(19): siRNA sense strand
ccuacaaucuccaccaaga

SEQ ID NO: 1242805 - RNA, 19 nt, Homo sapiens
  misc_RNA (1)...(19): siRNA sense strand
gacaacagcaacagcaauu

SEQ ID NO: 1242806 - RNA, 19 nt, Homo sapiens
  misc_RNA (1)...(19): siRNA sense strand
uguaaucgcgucuguauga

SEQ ID NO: 1242807 - RNA, 19 nt, Homo sapiens
  misc_RNA (1)...(19): siRNA sense strand
ggaaggacgcaacaagaug

SEQ ID NO: 1242808 - RNA, 19 nt, Homo sapiens
  misc_RNA (1)...(19): siRNA sense strand
gcuuaagaauggccaguau

SEQ ID NO: 1242809 - RNA, 19 nt, Homo sapiens
  misc_RNA (1)...(19): siRNA sense strand
acuaucaucuccacagaaa

SEQ ID NO: 1242810 - RNA, 19 nt, Homo sapiens
  misc_RNA (1)...(19): siRNA sense strand
cauuuaugcuucagucuug

SEQ ID NO: 1242811 - RNA, 19 nt, Homo sapiens
  misc_RNA (1)...(19): siRNA sense strand
acagagcgcugcccuccaa

SEQ ID NO: 1242812 - RNA, 19 nt, Homo sapiens
  misc_RNA (1)...(19): siRNA sense strand
ugaccuauguucugaucaa

SEQ ID NO: 1242813 - RNA, 19 nt, Homo sapiens
  misc_RNA (1)...(19): siRNA sense strand
cccguuaccucacauuuga

SEQ ID NO: 1242814 - RNA, 19 nt, Homo sapiens
  misc_RNA (1)...(19): siRNA sense strand
gcuaugugcugagugaaga

SEQ ID NO: 1242815 - RNA, 19 nt, Homo sapiens
  misc_RNA (1)...(19): siRNA sense strand
caacaacgacuacuaugag

SEQ ID NO: 1242816 - RNA, 19 nt, Homo sapiens
  misc_RNA (1)...(19): siRNA sense strand
ugaaaccacuggccucaca

SEQ ID NO: 1242817 - RNA, 19 nt, Homo sapiens
  misc_RNA (1)...(19): siRNA sense strand
gagagugcauuuacagaac

SEQ ID NO: 1242818 - RNA, 19 nt, Homo sapiens
  misc_RNA (1)...(19): siRNA sense strand
ggacauugacccaaguugu

SEQ ID NO: 1242819 - RNA, 19 nt, Homo sapiens
  misc_RNA (1)...(19): siRNA sense strand
ugugggaacuucaaugaug

SEQ ID NO: 1242820 - RNA, 19 nt, Homo sapiens
  misc_RNA (1)...(19): siRNA sense strand
gaagggccaccgugugcua

SEQ ID NO: 1242821 - RNA, 19 nt, Homo sapiens
  misc_RNA (1)...(19): siRNA sense strand
caagaucagugccaagcau

SEQ ID NO: 1242822 - RNA, 19 nt, Homo sapiens
  misc_RNA (1)...(19): siRNA sense strand
gaacuaugacggcaacagu

SEQ ID NO: 1242823 - RNA, 19 nt, Homo sapiens
  misc_RNA (1)...(19): siRNA sense strand
caacucaacagacccauuc

SEQ ID NO: 1242824 - RNA, 19 nt, Homo sapiens
  misc_RNA (1)...(19): siRNA sense strand
cuacggagacccucauuau

SEQ ID NO: 1242825 - RNA, 19 nt, Homo sapiens
  misc_RNA (1)...(19): siRNA sense strand
agacuaccaucucuacaga

SEQ ID NO: 1242826 - RNA, 19 nt, Homo sapiens
  misc_RNA (1)...(19): siRNA sense strand
gaccaggagugucagaagu

SEQ ID NO: 1242827 - RNA, 19 nt, Homo sapiens
  misc_RNA (1)...(19): siRNA sense strand
ccgcaagaaugacaugaug

SEQ ID NO: 1242828 - RNA, 19 nt, Homo sapiens
  misc_RNA (1)...(19): siRNA sense strand
gugcaaacacccucuguga

SEQ ID NO: 1242829 - RNA, 19 nt, Homo sapiens
  misc_RNA (1)...(19): siRNA sense strand
gcccagcgaugaaguagca

SEQ ID NO: 1242830 - RNA, 19 nt, Homo sapiens
  misc_RNA (1)...(19): siRNA sense strand
gugggaacuucaaugauga

SEQ ID NO: 1242831 - RNA, 19 nt, Homo sapiens
  misc_RNA (1)...(19): siRNA sense strand
cagaaaggccacaucuuga

SEQ ID NO: 1242832 - RNA, 19 nt, Homo sapiens
  misc_RNA (1)...(19): siRNA sense strand
caacgcccaucccuucugu

SEQ ID NO: 1242833 - RNA, 19 nt, Homo sapiens
  misc_RNA (1)...(19): siRNA sense strand
gaugugcucuggaaacacu

SEQ ID NO: 1242834 - RNA, 19 nt, Homo sapiens
  misc_RNA (1)...(19): siRNA sense strand
guaaggucaugcugaaugg

SEQ ID NO: 1242835 - RNA, 19 nt, Homo sapiens
  misc_RNA (1)...(19): siRNA sense strand
acaaugaccaccugaaguu

SEQ ID NO: 1242836 - RNA, 19 nt, Homo sapiens
  misc_RNA (1)...(19): siRNA sense strand
gguuucaucuugaucaauc

SEQ ID NO: 1242837 - RNA, 19 nt, Homo sapiens
  misc_RNA (1)...(19): siRNA sense strand
gggaguauccggaaacaca

SEQ ID NO: 1242838 - RNA, 19 nt, Homo sapiens
  misc_RNA (1)...(19): siRNA sense strand
cagcuuugguggaaggaaa

SEQ ID NO: 1242839 - RNA, 19 nt, Homo sapiens
  misc_RNA (1)...(19): siRNA sense strand
uagcaaauagugacaguga

SEQ ID NO: 1242840 - RNA, 19 nt, Homo sapiens
  misc_RNA (1)...(19): siRNA sense strand
cugcaaacccaaccagaua

SEQ ID NO: 1242841 - RNA, 19 nt, Homo sapiens
  misc_RNA (1)...(19): siRNA sense strand
gcgaagccaugcccugaca

SEQ ID NO: 1242842 - RNA, 19 nt, Homo sapiens
  misc_RNA (1)...(19): siRNA sense strand
agacuaccaucuccacaga

SEQ ID NO: 1242843 - RNA, 19 nt, Homo sapiens
  misc_RNA (1)...(19): siRNA sense strand
agacuaccaucuccacaga

SEQ ID NO: 1242844 - RNA, 19 nt, Homo sapiens
  misc_RNA (1)...(19): siRNA sense strand
gaucaauccugggacuugu

SEQ ID NO: 1242845 - RNA, 19 nt, Homo sapiens
  misc_RNA (1)...(19): siRNA sense strand
gaagcaacacggccucugu

SEQ ID NO: 1242846 - RNA, 19 nt, Homo sapiens
  misc_RNA (1)...(19): siRNA sense strand
uaacggagagggcagcuau

SEQ ID NO: 1242847 - RNA, 19 nt, Homo sapiens
  misc_RNA (1)...(19): siRNA sense strand
caggagaacccgaguggaa

SEQ ID NO: 1242848 - RNA, 19 nt, Homo sapiens
  misc_RNA (1)...(19): siRNA sense strand
ugaggaagaggacgaacua

SEQ ID NO: 1242849 - RNA, 19 nt, Homo sapiens
  misc_RNA (1)...(19): siRNA sense strand
cuacagcauuguuaacauc

SEQ ID NO: 1242850 - RNA, 19 nt, Homo sapiens
  misc_RNA (1)...(19): siRNA sense strand
ccauaaggcucagcagcaa

SEQ ID NO: 1242851 - RNA, 19 nt, Homo sapiens
  misc_RNA (1)...(19): siRNA sense strand
ugaaagcaacaacagaauu

SEQ ID NO: 1242852 - RNA, 19 nt, Homo sapiens
  misc_RNA (1)...(19): siRNA sense strand
cuacaacaacgacuacuau

SEQ ID NO: 1242853 - RNA, 19 nt, Homo sapiens
  misc_RNA (1)...(19): siRNA sense strand
ccaaaugcccgcuacgaau

SEQ ID NO: 1242854 - RNA, 19 nt, Homo sapiens
  misc_RNA (1)...(19): siRNA sense strand
uucaugaggucuacauuga

SEQ ID NO: 1242855 - RNA, 19 nt, Homo sapiens
  misc_RNA (1)...(19): siRNA sense strand
caacagcaacagcaauugu

SEQ ID NO: 1242856 - RNA, 19 nt, Homo sapiens
  misc_RNA (1)...(19): siRNA sense strand
caugaggucuacauugaca

SEQ ID NO: 1242857 - RNA, 19 nt, Homo sapiens
  misc_RNA (1)...(19): siRNA sense strand
acugugcgaucuuaauaaa

SEQ ID NO: 1242858 - RNA, 19 nt, Homo sapiens
  misc_RNA (1)...(19): siRNA sense strand
cgacaagaaccgcaagaau

SEQ ID NO: 1242859 - RNA, 19 nt, Homo sapiens
  misc_RNA (1)...(19): siRNA sense strand
gaacuucaaugaugaggaa

SEQ ID NO: 1242860 - RNA, 19 nt, Homo sapiens
  misc_RNA (1)...(19): siRNA sense strand
gaaacacacucucuucuca

SEQ ID NO: 1242861 - RNA, 19 nt, Homo sapiens
  misc_RNA (1)...(19): siRNA sense strand
gugcagcccuccacauuua

SEQ ID NO: 1242862 - RNA, 19 nt, Homo sapiens
  misc_RNA (1)...(19): siRNA sense strand
gaacugugcgaucuuaaua

SEQ ID NO: 1242863 - RNA, 19 nt, Homo sapiens
  misc_RNA (1)...(19): siRNA sense strand
gaacaaugcucagucuaug

SEQ ID NO: 1242864 - RNA, 19 nt, Homo sapiens
  misc_RNA (1)...(19): siRNA sense strand
gaucaagacuguggacgua

SEQ ID NO: 1242865 - RNA, 19 nt, Homo sapiens
  misc_RNA (1)...(19): siRNA sense strand
ugacgggaaucaucucuua

SEQ ID NO: 1242866 - RNA, 19 nt, Homo sapiens
  misc_RNA (1)...(19): siRNA sense strand
ggaaagauaaggacauuga

SEQ ID NO: 1242867 - RNA, 19 nt, Homo sapiens
  misc_RNA (1)...(19): siRNA sense strand
caacagcaauugugucuca

SEQ ID NO: 1242868 - RNA, 19 nt, Homo sapiens
  misc_RNA (1)...(19): siRNA sense strand
gugaacaguuggaaagaua

SEQ ID NO: 1242869 - RNA, 19 nt, Homo sapiens
  misc_RNA (1)...(19): siRNA sense strand
ccagaaagccagcaucuaa

SEQ ID NO: 1242870 - RNA, 19 nt, Homo sapiens
  misc_RNA (1)...(19): siRNA sense strand
caacagcccaugcagcuua

SEQ ID NO: 1242871 - RNA, 19 nt, Homo sapiens
  misc_RNA (1)...(19): siRNA sense strand
gaagaggacgaacuaauga

SEQ ID NO: 1242872 - RNA, 19 nt, Homo sapiens
  misc_RNA (1)...(19): siRNA sense strand
gcaauugcuucuacaacaa

SEQ ID NO: 1242873 - RNA, 19 nt, Homo sapiens
  misc_RNA (1)...(19): siRNA sense strand
gcagacgccuggaacaaga

SEQ ID NO: 1242874 - RNA, 19 nt, Homo sapiens
  misc_RNA (1)...(19): siRNA sense strand
ggaagaggacgaacuaaug

SEQ ID NO: 1242875 - RNA, 19 nt, Homo sapiens
  misc_RNA (1)...(19): siRNA sense strand
ggaaaggucugcggcaugu

SEQ ID NO: 1242876 - RNA, 19 nt, Homo sapiens
  misc_RNA (1)...(19): siRNA sense strand
gaaagcaacaacagaauuc

SEQ ID NO: 1242877 - RNA, 19 nt, Homo sapiens
  misc_RNA (1)...(19): siRNA sense strand
caaguggacucagaagaaa

SEQ ID NO: 1242878 - RNA, 19 nt, Homo sapiens
  misc_RNA (1)...(19): siRNA sense strand
ccaacaggaugguaucuau

SEQ ID NO: 1242879 - RNA, 19 nt, Homo sapiens
  misc_RNA (1)...(19): siRNA sense strand
gacaagaaccgcaagaaug

SEQ ID NO: 1242880 - RNA, 19 nt, Homo sapiens
  misc_RNA (1)...(19): siRNA sense strand
gcacacacauguccaccau

SEQ ID NO: 1242881 - RNA, 19 nt, Homo sapiens
  misc_RNA (1)...(19): siRNA sense strand
gaacgaggaggaagagaga

SEQ ID NO: 1242882 - RNA, 19 nt, Homo sapiens
  misc_RNA (1)...(19): siRNA sense strand
gcgaugaaguagcaaauag

SEQ ID NO: 1242883 - RNA, 19 nt, Homo sapiens
  misc_RNA (1)...(19): siRNA sense strand
gcuguaaggucaugcugaa

SEQ ID NO: 1242884 - RNA, 19 nt, Homo sapiens
  misc_RNA (1)...(19): siRNA sense strand
gcaaacacccucugugagu

SEQ ID NO: 1242885 - RNA, 19 nt, Homo sapiens
  misc_RNA (1)...(19): siRNA sense strand
ccacccggcugauguuuga

SEQ ID NO: 1242886 - RNA, 19 nt, Homo sapiens
  misc_RNA (1)...(19): siRNA sense strand
caagacagcuauuuuguug

SEQ ID NO: 1242887 - RNA, 19 nt, Homo sapiens
  misc_RNA (1)...(19): siRNA sense strand
gcuauggguuucaucuuga

SEQ ID NO: 1242888 - RNA, 19 nt, Homo sapiens
  misc_RNA (1)...(19): siRNA sense strand
caacacggccucugugguu

SEQ ID NO: 1242889 - RNA, 19 nt, Homo sapiens
  misc_RNA (1)...(19): siRNA sense strand
gaaaccaccaccucuguug

SEQ ID NO: 1242890 - RNA, 19 nt, Homo sapiens
  misc_RNA (1)...(19): siRNA sense strand
ucagaaaggccacaucuug

SEQ ID NO: 1242891 - RNA, 19 nt, Homo sapiens
  misc_RNA (1)...(19): siRNA sense strand
gcacuuugcccaccacaug

SEQ ID NO: 1242892 - RNA, 19 nt, Homo sapiens
  misc_RNA (1)...(19): siRNA sense strand
acaagaaccgcaagaauga

SEQ ID NO: 1242893 - RNA, 19 nt, Homo sapiens
  misc_RNA (1)...(19): siRNA sense strand
gcaaauagugacagugaau

SEQ ID NO: 1242894 - RNA, 19 nt, Homo sapiens
  misc_RNA (1)...(19): siRNA sense strand
aagaaagggucaucaggaa

SEQ ID NO: 1242895 - RNA, 19 nt, Homo sapiens
  misc_RNA (1)...(19): siRNA sense strand
ccaaguggacucagaagaa

SEQ ID NO: 1242896 - RNA, 19 nt, Homo sapiens
  misc_RNA (1)...(19): siRNA sense strand
gcugagggcugcauuuguc

SEQ ID NO: 1242897 - RNA, 19 nt, Homo sapiens
  misc_RNA (1)...(19): siRNA sense strand
gauacaguuugccguggua

SEQ ID NO: 1242898 - RNA, 19 nt, Homo sapiens
  misc_RNA (1)...(19): siRNA sense strand
gaaagggucaucaggaaag

SEQ ID NO: 1242899 - RNA, 19 nt, Homo sapiens
  misc_RNA (1)...(19): siRNA sense strand
gcugagagcugugaauguc

SEQ ID NO: 1242900 - RNA, 19 nt, Homo sapiens
  misc_RNA (1)...(19): siRNA sense strand
ggaguucgcauaccacaug

SEQ ID NO: 1242901 - RNA, 19 nt, Homo sapiens
  misc_RNA (1)...(19): siRNA sense strand
uacgugagcuuugauggua

SEQ ID NO: 1242902 - RNA, 19 nt, Homo sapiens
  misc_RNA (1)...(19): siRNA sense strand
caaacacccucugugaguu

SEQ ID NO: 1242903 - RNA, 19 nt, Homo sapiens
  misc_RNA (1)...(19): siRNA sense strand
gugaauuugugaacaguug

SEQ ID NO: 1242904 - RNA, 19 nt, Homo sapiens
  misc_RNA (1)...(19): siRNA sense strand
ccuacaaucuccaccaaga

SEQ ID NO: 1242905 - RNA, 19 nt, Homo sapiens
  misc_RNA (1)...(19): siRNA sense strand
gacaacagcaacagcaauu

SEQ ID NO: 1242906 - RNA, 19 nt, Homo sapiens
  misc_RNA (1)...(19): siRNA sense strand
uguaaucgcgucuguauga

SEQ ID NO: 1242907 - RNA, 19 nt, Homo sapiens
  misc_RNA (1)...(19): siRNA sense strand
ggaaggacgcaacaagaug

SEQ ID NO: 1242908 - RNA, 19 nt, Homo sapiens
  misc_RNA (1)...(19): siRNA sense strand
gcuuaagaauggccaguau

SEQ ID NO: 1242909 - RNA, 19 nt, Homo sapiens
  misc_RNA (1)...(19): siRNA sense strand
acuaucaucuccacagaaa

SEQ ID NO: 1242910 - RNA, 19 nt, Homo sapiens
  misc_RNA (1)...(19): siRNA sense strand
cauuuaugcuucagucuug

SEQ ID NO: 1242911 - RNA, 19 nt, Homo sapiens
  misc_RNA (1)...(19): siRNA sense strand
acagagcgcugcccuccaa

SEQ ID NO: 1242912 - RNA, 19 nt, Homo sapiens
  misc_RNA (1)...(19): siRNA sense strand
ugaccuauguucugaucaa

SEQ ID NO: 1242913 - RNA, 19 nt, Homo sapiens
  misc_RNA (1)...(19): siRNA sense strand
cccguuaccucacauuuga

SEQ ID NO: 1242914 - RNA, 19 nt, Homo sapiens
  misc_RNA (1)...(19): siRNA sense strand
gcuaugugcugagugaaga

SEQ ID NO: 1242915 - RNA, 19 nt, Homo sapiens
  misc_RNA (1)...(19): siRNA sense strand
caacaacgacuacuaugag

SEQ ID NO: 1242916 - RNA, 19 nt, Homo sapiens
  misc_RNA (1)...(19): siRNA sense strand
ugaaaccacuggccucaca

SEQ ID NO: 1242917 - RNA, 19 nt, Homo sapiens
  misc_RNA (1)...(19): siRNA sense strand
gagagugcauuuacagaac

SEQ ID NO: 1242918 - RNA, 19 nt, Homo sapiens
  misc_RNA (1)...(19): siRNA sense strand
ggacauugacccaaguugu

SEQ ID NO: 1242919 - RNA, 19 nt, Homo sapiens
  misc_RNA (1)...(19): siRNA sense strand
ugugggaacuucaaugaug

SEQ ID NO: 1242920 - RNA, 19 nt, Homo sapiens
  misc_RNA (1)...(19): siRNA sense strand
gaagggccaccgugugcua

SEQ ID NO: 1242921 - RNA, 19 nt, Homo sapiens
  misc_RNA (1)...(19): siRNA sense strand
caagaucagugccaagcau

SEQ ID NO: 1242922 - RNA, 19 nt, Homo sapiens
  misc_RNA (1)...(19): siRNA sense strand
gaacuaugacggcaacagu

SEQ ID NO: 1242923 - RNA, 19 nt, Homo sapiens
  misc_RNA (1)...(19): siRNA sense strand
caacucaacagacccauuc

SEQ ID NO: 1242924 - RNA, 19 nt, Homo sapiens
  misc_RNA (1)...(19): siRNA sense strand
cuacggagacccucauuau

SEQ ID NO: 1242925 - RNA, 19 nt, Homo sapiens
  misc_RNA (1)...(19): siRNA sense strand
agacuaccaucucuacaga

SEQ ID NO: 1242926 - RNA, 19 nt, Homo sapiens
  misc_RNA (1)...(19): siRNA sense strand
gaccaggagugucagaagu

SEQ ID NO: 1242927 - RNA, 19 nt, Homo sapiens
  misc_RNA (1)...(19): siRNA sense strand
ccgcaagaaugacaugaug

SEQ ID NO: 1242928 - RNA, 19 nt, Homo sapiens
  misc_RNA (1)...(19): siRNA sense strand
gugcaaacacccucuguga

SEQ ID NO: 1242929 - RNA, 19 nt, Homo sapiens
  misc_RNA (1)...(19): siRNA sense strand
gcccagcgaugaaguagca

SEQ ID NO: 1242930 - RNA, 19 nt, Homo sapiens
  misc_RNA (1)...(19): siRNA sense strand
gugggaacuucaaugauga

SEQ ID NO: 1242931 - RNA, 19 nt, Homo sapiens
  misc_RNA (1)...(19): siRNA sense strand
cagaaaggccacaucuuga

SEQ ID NO: 1242932 - RNA, 19 nt, Homo sapiens
  misc_RNA (1)...(19): siRNA sense strand
caacgcccaucccuucugu

SEQ ID NO: 1242933 - RNA, 19 nt, Homo sapiens
  misc_RNA (1)...(19): siRNA sense strand
gaugugcucuggaaacacu

SEQ ID NO: 1242934 - RNA, 19 nt, Homo sapiens
  misc_RNA (1)...(19): siRNA sense strand
guaaggucaugcugaaugg

SEQ ID NO: 1242935 - RNA, 19 nt, Homo sapiens
  misc_RNA (1)...(19): siRNA sense strand
acaaugaccaccugaaguu

SEQ ID NO: 1242936 - RNA, 19 nt, Homo sapiens
  misc_RNA (1)...(19): siRNA sense strand
gguuucaucuugaucaauc

SEQ ID NO: 1242937 - RNA, 19 nt, Homo sapiens
  misc_RNA (1)...(19): siRNA sense strand
gggaguauccggaaacaca

SEQ ID NO: 1242938 - RNA, 19 nt, Homo sapiens
  misc_RNA (1)...(19): siRNA sense strand
cagcuuugguggaaggaaa

SEQ ID NO: 1242939 - RNA, 19 nt, Homo sapiens
  misc_RNA (1)...(19): siRNA sense strand
uagcaaauagugacaguga

SEQ ID NO: 1242940 - RNA, 19 nt, Homo sapiens
  misc_RNA (1)...(19): siRNA sense strand
cugcaaacccaaccagaua

SEQ ID NO: 1242941 - RNA, 19 nt, Homo sapiens
  misc_RNA (1)...(19): siRNA sense strand
gcgaagccaugcccugaca

SEQ ID NO: 1242942 - RNA, 19 nt, Homo sapiens
  misc_RNA (1)...(19): siRNA sense strand
agacuaccaucuccacaga

SEQ ID NO: 1242943 - RNA, 19 nt, Homo sapiens
  misc_RNA (1)...(19): siRNA sense strand
agacuaccaucuccacaga

SEQ ID NO: 1242944 - RNA, 19 nt, Homo sapiens
  misc_RNA (1)...(19): siRNA sense strand
gaucaauccugggacuugu

SEQ ID NO: 1242945 - RNA, 19 nt, Homo sapiens
  misc_RNA (1)...(19): siRNA sense strand
gaagcaacacggccucugu

SEQ ID NO: 1242946 - RNA, 19 nt, Homo sapiens
  misc_RNA (1)...(19): siRNA sense strand
uaacggagagggcagcuau

SEQ ID NO: 1242947 - RNA, 19 nt, Homo sapiens
  misc_RNA (1)...(19): siRNA sense strand
caggagaacccgaguggaa

SEQ ID NO: 1242948 - RNA, 19 nt, Homo sapiens
  misc_RNA (1)...(19): siRNA sense strand
ugaggaagaggacgaacua

SEQ ID NO: 1242949 - RNA, 19 nt, Homo sapiens
  misc_RNA (1)...(19): siRNA sense strand
cuacagcauuguuaacauc

SEQ ID NO: 1242950 - RNA, 19 nt, Homo sapiens
  misc_RNA (1)...(19): siRNA sense strand
ccauaaggcucagcagcaa

SEQ ID NO: 1242951 - RNA, 19 nt, Homo sapiens
  misc_RNA (1)...(19): siRNA sense strand
ugaaagcaacaacagaauu

SEQ ID NO: 1242952 - RNA, 19 nt, Homo sapiens
  misc_RNA (1)...(19): siRNA sense strand
cuacaacaacgacuacuau

SEQ ID NO: 1242953 - RNA, 19 nt, Homo sapiens
  misc_RNA (1)...(19): siRNA sense strand
ccaaaugcccgcuacgaau

SEQ ID NO: 1242954 - RNA, 19 nt, Homo sapiens
  misc_RNA (1)...(19): siRNA sense strand
uucaugaggucuacauuga

SEQ ID NO: 1242955 - RNA, 19 nt, Homo sapiens
  misc_RNA (1)...(19): siRNA sense strand
caacagcaacagcaauugu

SEQ ID NO: 1242956 - RNA, 19 nt, Homo sapiens
  misc_RNA (1)...(19): siRNA sense strand
caugaggucuacauugaca

SEQ ID NO: 1242957 - RNA, 19 nt, Homo sapiens
  misc_RNA (1)...(19): siRNA sense strand
acugugcgaucuuaauaaa

SEQ ID NO: 1242958 - RNA, 19 nt, Homo sapiens
  misc_RNA (1)...(19): siRNA sense strand
cgacaagaaccgcaagaau

SEQ ID NO: 1242959 - RNA, 19 nt, Homo sapiens
  misc_RNA (1)...(19): siRNA sense strand
gaacuucaaugaugaggaa

SEQ ID NO: 1242960 - RNA, 19 nt, Homo sapiens
  misc_RNA (1)...(19): siRNA sense strand
gaaacacacucucuucuca

SEQ ID NO: 1242961 - RNA, 19 nt, Homo sapiens
  misc_RNA (1)...(19): siRNA sense strand
gugcagcccuccacauuua

SEQ ID NO: 1242962 - RNA, 19 nt, Homo sapiens
  misc_RNA (1)...(19): siRNA sense strand
gaacugugcgaucuuaaua

SEQ ID NO: 1242963 - RNA, 19 nt, Homo sapiens
  misc_RNA (1)...(19): siRNA sense strand
gaacaaugcucagucuaug

SEQ ID NO: 1242964 - RNA, 19 nt, Homo sapiens
  misc_RNA (1)...(19): siRNA sense strand
gaucaagacuguggacgua

SEQ ID NO: 1242965 - RNA, 19 nt, Homo sapiens
  misc_RNA (1)...(19): siRNA sense strand
ugacgggaaucaucucuua

SEQ ID NO: 1242966 - RNA, 19 nt, Homo sapiens
  misc_RNA (1)...(19): siRNA sense strand
ggaaagauaaggacauuga

SEQ ID NO: 1242967 - RNA, 19 nt, Homo sapiens
  misc_RNA (1)...(19): siRNA sense strand
caacagcaauugugucuca

SEQ ID NO: 1242968 - RNA, 19 nt, Homo sapiens
  misc_RNA (1)...(19): siRNA sense strand
gugaacaguuggaaagaua

SEQ ID NO: 1242969 - RNA, 19 nt, Homo sapiens
  misc_RNA (1)...(19): siRNA sense strand
caacagcccaugcagcuua

SEQ ID NO: 1242970 - RNA, 19 nt, Homo sapiens
  misc_RNA (1)...(19): siRNA sense strand
gaagaggacgaacuaauga

SEQ ID NO: 1242971 - RNA, 19 nt, Homo sapiens
  misc_RNA (1)...(19): siRNA sense strand
gcaauugcuucuacaacaa

SEQ ID NO: 1242972 - RNA, 19 nt, Homo sapiens
  misc_RNA (1)...(19): siRNA sense strand
gcagacgccuggaacaaga

SEQ ID NO: 1242973 - RNA, 19 nt, Homo sapiens
  misc_RNA (1)...(19): siRNA sense strand
ggaagaggacgaacuaaug

SEQ ID NO: 1242974 - RNA, 19 nt, Homo sapiens
  misc_RNA (1)...(19): siRNA sense strand
ggaaaggucugcggcaugu

SEQ ID NO: 1242975 - RNA, 19 nt, Homo sapiens
  misc_RNA (1)...(19): siRNA sense strand
gaaagcaacaacagaauuc

SEQ ID NO: 1242976 - RNA, 19 nt, Homo sapiens
  misc_RNA (1)...(19): siRNA sense strand
caaguggacucagaagaaa

SEQ ID NO: 1242977 - RNA, 19 nt, Homo sapiens
  misc_RNA (1)...(19): siRNA sense strand
ccaacaggaugguaucuau

SEQ ID NO: 1242978 - RNA, 19 nt, Homo sapiens
  misc_RNA (1)...(19): siRNA sense strand
gacaagaaccgcaagaaug

SEQ ID NO: 1242979 - RNA, 19 nt, Homo sapiens
  misc_RNA (1)...(19): siRNA sense strand
gcacacacauguccaccau

SEQ ID NO: 1242980 - RNA, 19 nt, Homo sapiens
  misc_RNA (1)...(19): siRNA sense strand
gcgaugaaguagcaaauag

SEQ ID NO: 1242981 - RNA, 19 nt, Homo sapiens
  misc_RNA (1)...(19): siRNA sense strand
gcuguaaggucaugcugaa

SEQ ID NO: 1242982 - RNA, 19 nt, Homo sapiens
  misc_RNA (1)...(19): siRNA sense strand
gcaaacacccucugugagu

SEQ ID NO: 1242983 - RNA, 19 nt, Homo sapiens
  misc_RNA (1)...(19): siRNA sense strand
ccacccggcugauguuuga

SEQ ID NO: 1242984 - RNA, 19 nt, Homo sapiens
  misc_RNA (1)...(19): siRNA sense strand
caagacagcuauuuuguug

SEQ ID NO: 1242985 - RNA, 19 nt, Homo sapiens
  misc_RNA (1)...(19): siRNA sense strand
gcuauggguuucaucuuga

SEQ ID NO: 1242986 - RNA, 19 nt, Homo sapiens
  misc_RNA (1)...(19): siRNA sense strand
caacacggccucugugguu

SEQ ID NO: 1242987 - RNA, 19 nt, Homo sapiens
  misc_RNA (1)...(19): siRNA sense strand
gaaaccaccaccucuguug

SEQ ID NO: 1242988 - RNA, 19 nt, Homo sapiens
  misc_RNA (1)...(19): siRNA sense strand
ucagaaaggccacaucuug

SEQ ID NO: 1242989 - RNA, 19 nt, Homo sapiens
  misc_RNA (1)...(19): siRNA sense strand
gcacuuugcccaccacaug

SEQ ID NO: 1242990 - RNA, 19 nt, Homo sapiens
  misc_RNA (1)...(19): siRNA sense strand
acaagaaccgcaagaauga

SEQ ID NO: 1242991 - RNA, 19 nt, Homo sapiens
  misc_RNA (1)...(19): siRNA sense strand
gcaaauagugacagugaau

SEQ ID NO: 1242992 - RNA, 19 nt, Homo sapiens
  misc_RNA (1)...(19): siRNA sense strand
aagaaagggucaucaggaa

SEQ ID NO: 1242993 - RNA, 19 nt, Homo sapiens
  misc_RNA (1)...(19): siRNA sense strand
ccaaguggacucagaagaa

SEQ ID NO: 1242994 - RNA, 19 nt, Homo sapiens
  misc_RNA (1)...(19): siRNA sense strand
gcugagggcugcauuuguc

SEQ ID NO: 1242995 - RNA, 19 nt, Homo sapiens
  misc_RNA (1)...(19): siRNA sense strand
gauacaguuugccguggua

SEQ ID NO: 1242996 - RNA, 19 nt, Homo sapiens
  misc_RNA (1)...(19): siRNA sense strand
gaaagggucaucaggaaag

SEQ ID NO: 1242997 - RNA, 19 nt, Homo sapiens
  misc_RNA (1)...(19): siRNA sense strand
gcugagagcugugaauguc

SEQ ID NO: 1242998 - RNA, 19 nt, Homo sapiens
  misc_RNA (1)...(19): siRNA sense strand
ggaguucgcauaccacaug

SEQ ID NO: 1242999 - RNA, 19 nt, Homo sapiens
  misc_RNA (1)...(19): siRNA sense strand
uacgugagcuuugauggua

SEQ ID NO: 1243000 - RNA, 19 nt, Homo sapiens
  misc_RNA (1)...(19): siRNA sense strand
caaacacccucugugaguu

SEQ ID NO: 1243001 - RNA, 19 nt, Homo sapiens
  misc_RNA (1)...(19): siRNA sense strand
gugaauuugugaacaguug

SEQ ID NO: 1243002 - RNA, 19 nt, Homo sapiens
  misc_RNA (1)...(19): siRNA sense strand
ccuacaaucuccaccaaga

SEQ ID NO: 1243003 - RNA, 19 nt, Homo sapiens
  misc_RNA (1)...(19): siRNA sense strand
gacaacagcaacagcaauu

SEQ ID NO: 1243004 - RNA, 19 nt, Homo sapiens
  misc_RNA (1)...(19): siRNA sense strand
uguaaucgcgucuguauga

SEQ ID NO: 1243005 - RNA, 19 nt, Homo sapiens
  misc_RNA (1)...(19): siRNA sense strand
ggaaggacgcaacaagaug

SEQ ID NO: 1243006 - RNA, 19 nt, Homo sapiens
  misc_RNA (1)...(19): siRNA sense strand
gcuuaagaauggccaguau

SEQ ID NO: 1243007 - RNA, 19 nt, Homo sapiens
  misc_RNA (1)...(19): siRNA sense strand
acuaucaucuccacagaaa

SEQ ID NO: 1243008 - RNA, 19 nt, Homo sapiens
  misc_RNA (1)...(19): siRNA sense strand
cauuuaugcuucagucuug

SEQ ID NO: 1243009 - RNA, 19 nt, Homo sapiens
  misc_RNA (1)...(19): siRNA sense strand
acagagcgcugcccuccaa

SEQ ID NO: 1243010 - RNA, 19 nt, Homo sapiens
  misc_RNA (1)...(19): siRNA sense strand
ugaccuauguucugaucaa

SEQ ID NO: 1243011 - RNA, 19 nt, Homo sapiens
  misc_RNA (1)...(19): siRNA sense strand
cccguuaccucacauuuga

SEQ ID NO: 1243012 - RNA, 19 nt, Homo sapiens
  misc_RNA (1)...(19): siRNA sense strand
gcuaugugcugagugaaga

SEQ ID NO: 1243013 - RNA, 19 nt, Homo sapiens
  misc_RNA (1)...(19): siRNA sense strand
caacaacgacuacuaugag

SEQ ID NO: 1243014 - RNA, 19 nt, Homo sapiens
  misc_RNA (1)...(19): siRNA sense strand
ugaaaccacuggccucaca

SEQ ID NO: 1243015 - RNA, 19 nt, Homo sapiens
  misc_RNA (1)...(19): siRNA sense strand
ggacauugacccaaguugu

SEQ ID NO: 1243016 - RNA, 19 nt, Homo sapiens
  misc_RNA (1)...(19): siRNA sense strand
ugugggaacuucaaugaug

SEQ ID NO: 1243017 - RNA, 19 nt, Homo sapiens
  misc_RNA (1)...(19): siRNA sense strand
gaagggccaccgugugcua

SEQ ID NO: 1243018 - RNA, 19 nt, Homo sapiens
  misc_RNA (1)...(19): siRNA sense strand
caagaucagugccaagcau

SEQ ID NO: 1243019 - RNA, 19 nt, Homo sapiens
  misc_RNA (1)...(19): siRNA sense strand
gaacuaugacggcaacagu

SEQ ID NO: 1243020 - RNA, 19 nt, Homo sapiens
  misc_RNA (1)...(19): siRNA sense strand
caacucaacagacccauuc

SEQ ID NO: 1243021 - RNA, 19 nt, Homo sapiens
  misc_RNA (1)...(19): siRNA sense strand
cuacggagacccucauuau

SEQ ID NO: 1243022 - RNA, 19 nt, Homo sapiens
  misc_RNA (1)...(19): siRNA sense strand
agacuaccaucucuacaga

SEQ ID NO: 1243023 - RNA, 19 nt, Homo sapiens
  misc_RNA (1)...(19): siRNA sense strand
gaccaggagugucagaagu

SEQ ID NO: 1243024 - RNA, 19 nt, Homo sapiens
  misc_RNA (1)...(19): siRNA sense strand
ccgcaagaaugacaugaug

SEQ ID NO: 1243025 - RNA, 19 nt, Homo sapiens
  misc_RNA (1)...(19): siRNA sense strand
gugcaaacacccucuguga

SEQ ID NO: 1243026 - RNA, 19 nt, Homo sapiens
  misc_RNA (1)...(19): siRNA sense strand
gcccagcgaugaaguagca

SEQ ID NO: 1243027 - RNA, 19 nt, Homo sapiens
  misc_RNA (1)...(19): siRNA sense strand
gugggaacuucaaugauga

SEQ ID NO: 1243028 - RNA, 19 nt, Homo sapiens
  misc_RNA (1)...(19): siRNA sense strand
cagaaaggccacaucuuga

SEQ ID NO: 1243029 - RNA, 19 nt, Homo sapiens
  misc_RNA (1)...(19): siRNA sense strand
caacgcccaucccuucugu

SEQ ID NO: 1243030 - RNA, 19 nt, Homo sapiens
  misc_RNA (1)...(19): siRNA sense strand
guaaggucaugcugaaugg

SEQ ID NO: 1243031 - RNA, 19 nt, Homo sapiens
  misc_RNA (1)...(19): siRNA sense strand
gaugugcucuggaaacacu

SEQ ID NO: 1243032 - RNA, 19 nt, Homo sapiens
  misc_RNA (1)...(19): siRNA sense strand
acaaugaccaccugaaguu

SEQ ID NO: 1243033 - RNA, 19 nt, Homo sapiens
  misc_RNA (1)...(19): siRNA sense strand
gguuucaucuugaucaauc

SEQ ID NO: 1243034 - RNA, 19 nt, Homo sapiens
  misc_RNA (1)...(19): siRNA sense strand
gggaguauccggaaacaca

SEQ ID NO: 1243035 - RNA, 19 nt, Homo sapiens
  misc_RNA (1)...(19): siRNA sense strand
cagcuuugguggaaggaaa

SEQ ID NO: 1243036 - RNA, 19 nt, Homo sapiens
  misc_RNA (1)...(19): siRNA sense strand
uagcaaauagugacaguga

SEQ ID NO: 1243037 - RNA, 19 nt, Homo sapiens
  misc_RNA (1)...(19): siRNA sense strand
cugcaaacccaaccagaua

SEQ ID NO: 1243038 - RNA, 19 nt, Homo sapiens
  misc_RNA (1)...(19): siRNA sense strand
gcgaagccaugcccugaca

SEQ ID NO: 1243039 - RNA, 19 nt, Homo sapiens
  misc_RNA (1)...(19): siRNA sense strand
agacuaccaucuccacaga

SEQ ID NO: 1243040 - RNA, 19 nt, Homo sapiens
  misc_RNA (1)...(19): siRNA sense strand
agacuaccaucuccacaga

SEQ ID NO: 1243041 - RNA, 19 nt, Homo sapiens
  misc_RNA (1)...(19): siRNA sense strand
gaucaauccugggacuugu

SEQ ID NO: 1243042 - RNA, 19 nt, Homo sapiens
  misc_RNA (1)...(19): siRNA sense strand
uaacggagagggcagcuau

SEQ ID NO: 1243043 - RNA, 19 nt, Homo sapiens
  misc_RNA (1)...(19): siRNA sense strand
caggagaacccgaguggaa

SEQ ID NO: 1243044 - RNA, 19 nt, Homo sapiens
  misc_RNA (1)...(19): siRNA sense strand
ugaggaagaggacgaacua

SEQ ID NO: 1243045 - RNA, 19 nt, Homo sapiens
  misc_RNA (1)...(19): siRNA sense strand
cuacagcauuguuaacauc

SEQ ID NO: 1243046 - RNA, 19 nt, Homo sapiens
  misc_RNA (1)...(19): siRNA sense strand
ccauaaggcucagcagcaa

SEQ ID NO: 1243047 - RNA, 19 nt, Homo sapiens
  misc_RNA (1)...(19): siRNA sense strand
ugaaagcaacaacagaauu

SEQ ID NO: 1243048 - RNA, 19 nt, Homo sapiens
  misc_RNA (1)...(19): siRNA sense strand
cuacaacaacgacuacuau

SEQ ID NO: 1243049 - RNA, 19 nt, Homo sapiens
  misc_RNA (1)...(19): siRNA sense strand
ccaaaugcccgcuacgaau

SEQ ID NO: 1243050 - RNA, 19 nt, Homo sapiens
  misc_RNA (1)...(19): siRNA sense strand
gaagcaacacggccucugu

SEQ ID NO: 1243051 - RNA, 19 nt, Homo sapiens
  misc_RNA (1)...(19): siRNA sense strand
uucaugaggucuacauuga

SEQ ID NO: 1243052 - RNA, 19 nt, Homo sapiens
  misc_RNA (1)...(19): siRNA sense strand
caacagcaacagcaauugu

SEQ ID NO: 1243053 - RNA, 19 nt, Homo sapiens
  misc_RNA (1)...(19): siRNA sense strand
caugaggucuacauugaca

SEQ ID NO: 1243054 - RNA, 19 nt, Homo sapiens
  misc_RNA (1)...(19): siRNA sense strand
ccacuggccucacagaaaa

SEQ ID NO: 1243055 - RNA, 19 nt, Homo sapiens
  misc_RNA (1)...(19): siRNA sense strand
cgacaagaaccgcaagaau

SEQ ID NO: 1243056 - RNA, 19 nt, Homo sapiens
  misc_RNA (1)...(19): siRNA sense strand
acugugcgaucuuaauaaa

SEQ ID NO: 1243057 - RNA, 19 nt, Homo sapiens
  misc_RNA (1)...(19): siRNA sense strand
gcacucuuguccuggugaa

SEQ ID NO: 1243058 - RNA, 19 nt, Homo sapiens
  misc_RNA (1)...(19): siRNA sense strand
gaugaaguagcaaauagug

SEQ ID NO: 1243059 - RNA, 19 nt, Homo sapiens
  misc_RNA (1)...(19): siRNA sense strand
gaacuucaaugaugaggaa

SEQ ID NO: 1243060 - RNA, 19 nt, Homo sapiens
  misc_RNA (1)...(19): siRNA sense strand
gaaacacacucucuucuca

SEQ ID NO: 1243061 - RNA, 19 nt, Homo sapiens
  misc_RNA (1)...(19): siRNA sense strand
gugcagcccuccacauuua

SEQ ID NO: 1243062 - RNA, 19 nt, Homo sapiens
  misc_RNA (1)...(19): siRNA sense strand
gaacugugcgaucuuaaua

SEQ ID NO: 1243063 - RNA, 19 nt, Homo sapiens
  misc_RNA (1)...(19): siRNA sense strand
gaacaaugcucagucuaug

SEQ ID NO: 1243064 - RNA, 19 nt, Homo sapiens
  misc_RNA (1)...(19): siRNA sense strand
gaucaagacuguggacgua

SEQ ID NO: 1243065 - RNA, 19 nt, Homo sapiens
  misc_RNA (1)...(19): siRNA sense strand
ugacgggaaucaucucuua

SEQ ID NO: 1243066 - RNA, 19 nt, Homo sapiens
  misc_RNA (1)...(19): siRNA sense strand
ggaaagauaaggacauuga

SEQ ID NO: 1243067 - RNA, 19 nt, Homo sapiens
  misc_RNA (1)...(19): siRNA sense strand
caacagcaauugugucuca

SEQ ID NO: 1243068 - RNA, 19 nt, Homo sapiens
  misc_RNA (1)...(19): siRNA sense strand
gugaacaguuggaaagaua

SEQ ID NO: 1243069 - RNA, 19 nt, Homo sapiens
  misc_RNA (1)...(19): siRNA sense strand
caacagcccaugcagcuua

SEQ ID NO: 1243070 - RNA, 19 nt, Homo sapiens
  misc_RNA (1)...(19): siRNA sense strand
gaagaggacgaacuaauga

SEQ ID NO: 1243071 - RNA, 19 nt, Homo sapiens
  misc_RNA (1)...(19): siRNA sense strand
gcaauugcuucuacaacaa

SEQ ID NO: 1243072 - RNA, 19 nt, Homo sapiens
  misc_RNA (1)...(19): siRNA sense strand
gcagacgccuggaacaaga

SEQ ID NO: 1243073 - RNA, 19 nt, Homo sapiens
  misc_RNA (1)...(19): siRNA sense strand
ggaagaggacgaacuaaug

SEQ ID NO: 1243074 - RNA, 19 nt, Homo sapiens
  misc_RNA (1)...(19): siRNA sense strand
ggaaaggucugcggcaugu

SEQ ID NO: 1243075 - RNA, 19 nt, Homo sapiens
  misc_RNA (1)...(19): siRNA sense strand
gaaagcaacaacagaauuc

SEQ ID NO: 1243076 - RNA, 19 nt, Homo sapiens
  misc_RNA (1)...(19): siRNA sense strand
caaguggacucagaagaaa

SEQ ID NO: 1243077 - RNA, 19 nt, Homo sapiens
  misc_RNA (1)...(19): siRNA sense strand
ccaacaggaugguaucuau

SEQ ID NO: 1243078 - RNA, 19 nt, Homo sapiens
  misc_RNA (1)...(19): siRNA sense strand
gacaagaaccgcaagaaug

SEQ ID NO: 1243079 - RNA, 19 nt, Homo sapiens
  misc_RNA (1)...(19): siRNA sense strand
gcacacacauguccaccau

SEQ ID NO: 1243080 - RNA, 19 nt, Homo sapiens
  misc_RNA (1)...(19): siRNA sense strand
gcgaugaaguagcaaauag

SEQ ID NO: 1243081 - RNA, 19 nt, Homo sapiens
  misc_RNA (1)...(19): siRNA sense strand
gcuguaaggucaugcugaa

SEQ ID NO: 1243082 - RNA, 19 nt, Homo sapiens
  misc_RNA (1)...(19): siRNA sense strand
gcaaacacccucugugagu

SEQ ID NO: 1243083 - RNA, 19 nt, Homo sapiens
  misc_RNA (1)...(19): siRNA sense strand
ccacccggcugauguuuga

SEQ ID NO: 1243084 - RNA, 19 nt, Homo sapiens
  misc_RNA (1)...(19): siRNA sense strand
caagacagcuauuuuguug

SEQ ID NO: 1243085 - RNA, 19 nt, Homo sapiens
  misc_RNA (1)...(19): siRNA sense strand
gcuauggguuucaucuuga

SEQ ID NO: 1243086 - RNA, 19 nt, Homo sapiens
  misc_RNA (1)...(19): siRNA sense strand
caacacggccucugugguu

SEQ ID NO: 1243087 - RNA, 19 nt, Homo sapiens
  misc_RNA (1)...(19): siRNA sense strand
gaaaccaccaccucuguug

SEQ ID NO: 1243088 - RNA, 19 nt, Homo sapiens
  misc_RNA (1)...(19): siRNA sense strand
ucagaaaggccacaucuug

SEQ ID NO: 1243089 - RNA, 19 nt, Homo sapiens
  misc_RNA (1)...(19): siRNA sense strand
gcacuuugcccaccacaug

SEQ ID NO: 1243090 - RNA, 19 nt, Homo sapiens
  misc_RNA (1)...(19): siRNA sense strand
acaagaaccgcaagaauga

SEQ ID NO: 1243091 - RNA, 19 nt, Homo sapiens
  misc_RNA (1)...(19): siRNA sense strand
gcaaauagugacagugaau

SEQ ID NO: 1243092 - RNA, 19 nt, Homo sapiens
  misc_RNA (1)...(19): siRNA sense strand
aagaaagggucaucaggaa

SEQ ID NO: 1243093 - RNA, 19 nt, Homo sapiens
  misc_RNA (1)...(19): siRNA sense strand
ccaaguggacucagaagaa

SEQ ID NO: 1243094 - RNA, 19 nt, Homo sapiens
  misc_RNA (1)...(19): siRNA sense strand
gcugagggcugcauuuguc

SEQ ID NO: 1243095 - RNA, 19 nt, Homo sapiens
  misc_RNA (1)...(19): siRNA sense strand
gauacaguuugccguggua

SEQ ID NO: 1243096 - RNA, 19 nt, Homo sapiens
  misc_RNA (1)...(19): siRNA sense strand
gaaagggucaucaggaaag

SEQ ID NO: 1243097 - RNA, 19 nt, Homo sapiens
  misc_RNA (1)...(19): siRNA sense strand
gcugagagcugugaauguc

SEQ ID NO: 1243098 - RNA, 19 nt, Homo sapiens
  misc_RNA (1)...(19): siRNA sense strand
ggaguucgcauaccacaug

SEQ ID NO: 1243099 - RNA, 19 nt, Homo sapiens
  misc_RNA (1)...(19): siRNA sense strand
uacgugagcuuugauggua

SEQ ID NO: 1243100 - RNA, 19 nt, Homo sapiens
  misc_RNA (1)...(19): siRNA sense strand
caaacacccucugugaguu

SEQ ID NO: 1243101 - RNA, 19 nt, Homo sapiens
  misc_RNA (1)...(19): siRNA sense strand
gugaauuugugaacaguug

SEQ ID NO: 1243102 - RNA, 19 nt, Homo sapiens
  misc_RNA (1)...(19): siRNA sense strand
ccuacaaucuccaccaaga

SEQ ID NO: 1243103 - RNA, 19 nt, Homo sapiens
  misc_RNA (1)...(19): siRNA sense strand
gacaacagcaacagcaauu

SEQ ID NO: 1243104 - RNA, 19 nt, Homo sapiens
  misc_RNA (1)...(19): siRNA sense strand
uguaaucgcgucuguauga

SEQ ID NO: 1243105 - RNA, 19 nt, Homo sapiens
  misc_RNA (1)...(19): siRNA sense strand
ggaaggacgcaacaagaug

SEQ ID NO: 1243106 - RNA, 19 nt, Homo sapiens
  misc_RNA (1)...(19): siRNA sense strand
gcuuaagaauggccaguau

SEQ ID NO: 1243107 - RNA, 19 nt, Homo sapiens
  misc_RNA (1)...(19): siRNA sense strand
acuaucaucuccacagaaa

SEQ ID NO: 1243108 - RNA, 19 nt, Homo sapiens
  misc_RNA (1)...(19): siRNA sense strand
cauuuaugcuucagucuug

SEQ ID NO: 1243109 - RNA, 19 nt, Homo sapiens
  misc_RNA (1)...(19): siRNA sense strand
acagagcgcugcccuccaa

SEQ ID NO: 1243110 - RNA, 19 nt, Homo sapiens
  misc_RNA (1)...(19): siRNA sense strand
ugaccuauguucugaucaa

SEQ ID NO: 1243111 - RNA, 19 nt, Homo sapiens
  misc_RNA (1)...(19): siRNA sense strand
cccguuaccucacauuuga

SEQ ID NO: 1243112 - RNA, 19 nt, Homo sapiens
  misc_RNA (1)...(19): siRNA sense strand
gcuaugugcugagugaaga

SEQ ID NO: 1243113 - RNA, 19 nt, Homo sapiens
  misc_RNA (1)...(19): siRNA sense strand
caacaacgacuacuaugag

SEQ ID NO: 1243114 - RNA, 19 nt, Homo sapiens
  misc_RNA (1)...(19): siRNA sense strand
ugaaaccacuggccucaca

SEQ ID NO: 1243115 - RNA, 19 nt, Homo sapiens
  misc_RNA (1)...(19): siRNA sense strand
ggacauugacccaaguugu

SEQ ID NO: 1243116 - RNA, 19 nt, Homo sapiens
  misc_RNA (1)...(19): siRNA sense strand
ugugggaacuucaaugaug

SEQ ID NO: 1243117 - RNA, 19 nt, Homo sapiens
  misc_RNA (1)...(19): siRNA sense strand
gaagggccaccgugugcua

SEQ ID NO: 1243118 - RNA, 19 nt, Homo sapiens
  misc_RNA (1)...(19): siRNA sense strand
caagaucagugccaagcau

SEQ ID NO: 1243119 - RNA, 19 nt, Homo sapiens
  misc_RNA (1)...(19): siRNA sense strand
gaacuaugacggcaacagu

SEQ ID NO: 1243120 - RNA, 19 nt, Homo sapiens
  misc_RNA (1)...(19): siRNA sense strand
caacucaacagacccauuc

SEQ ID NO: 1243121 - RNA, 19 nt, Homo sapiens
  misc_RNA (1)...(19): siRNA sense strand
cuacggagacccucauuau

SEQ ID NO: 1243122 - RNA, 19 nt, Homo sapiens
  misc_RNA (1)...(19): siRNA sense strand
agacuaccaucucuacaga

SEQ ID NO: 1243123 - RNA, 19 nt, Homo sapiens
  misc_RNA (1)...(19): siRNA sense strand
gaccaggagugucagaagu

SEQ ID NO: 1243124 - RNA, 19 nt, Homo sapiens
  misc_RNA (1)...(19): siRNA sense strand
ccgcaagaaugacaugaug

SEQ ID NO: 1243125 - RNA, 19 nt, Homo sapiens
  misc_RNA (1)...(19): siRNA sense strand
gugcaaacacccucuguga

SEQ ID NO: 1243126 - RNA, 19 nt, Homo sapiens
  misc_RNA (1)...(19): siRNA sense strand
gcccagcgaugaaguagca

SEQ ID NO: 1243127 - RNA, 19 nt, Homo sapiens
  misc_RNA (1)...(19): siRNA sense strand
gugggaacuucaaugauga

SEQ ID NO: 1243128 - RNA, 19 nt, Homo sapiens
  misc_RNA (1)...(19): siRNA sense strand
cagaaaggccacaucuuga

SEQ ID NO: 1243129 - RNA, 19 nt, Homo sapiens
  misc_RNA (1)...(19): siRNA sense strand
caacgcccaucccuucugu

SEQ ID NO: 1243130 - RNA, 19 nt, Homo sapiens
  misc_RNA (1)...(19): siRNA sense strand
guaaggucaugcugaaugg

SEQ ID NO: 1243131 - RNA, 19 nt, Homo sapiens
  misc_RNA (1)...(19): siRNA sense strand
gaugugcucuggaaacacu

SEQ ID NO: 1243132 - RNA, 19 nt, Homo sapiens
  misc_RNA (1)...(19): siRNA sense strand
acaaugaccaccugaaguu

SEQ ID NO: 1243133 - RNA, 19 nt, Homo sapiens
  misc_RNA (1)...(19): siRNA sense strand
gguuucaucuugaucaauc

SEQ ID NO: 1243134 - RNA, 19 nt, Homo sapiens
  misc_RNA (1)...(19): siRNA sense strand
gggaguauccggaaacaca

SEQ ID NO: 1243135 - RNA, 19 nt, Homo sapiens
  misc_RNA (1)...(19): siRNA sense strand
cagcuuugguggaaggaaa

SEQ ID NO: 1243136 - RNA, 19 nt, Homo sapiens
  misc_RNA (1)...(19): siRNA sense strand
uagcaaauagugacaguga

SEQ ID NO: 1243137 - RNA, 19 nt, Homo sapiens
  misc_RNA (1)...(19): siRNA sense strand
cugcaaacccaaccagaua

SEQ ID NO: 1243138 - RNA, 19 nt, Homo sapiens
  misc_RNA (1)...(19): siRNA sense strand
gcgaagccaugcccugaca

SEQ ID NO: 1243139 - RNA, 19 nt, Homo sapiens
  misc_RNA (1)...(19): siRNA sense strand
agacuaccaucuccacaga

SEQ ID NO: 1243140 - RNA, 19 nt, Homo sapiens
  misc_RNA (1)...(19): siRNA sense strand
agacuaccaucuccacaga

SEQ ID NO: 1243141 - RNA, 19 nt, Homo sapiens
  misc_RNA (1)...(19): siRNA sense strand
gaucaauccugggacuugu

SEQ ID NO: 1243142 - RNA, 19 nt, Homo sapiens
  misc_RNA (1)...(19): siRNA sense strand
uaacggagagggcagcuau

SEQ ID NO: 1243143 - RNA, 19 nt, Homo sapiens
  misc_RNA (1)...(19): siRNA sense strand
caggagaacccgaguggaa

SEQ ID NO: 1243144 - RNA, 19 nt, Homo sapiens
  misc_RNA (1)...(19): siRNA sense strand
ugaggaagaggacgaacua

SEQ ID NO: 1243145 - RNA, 19 nt, Homo sapiens
  misc_RNA (1)...(19): siRNA sense strand
cuacagcauuguuaacauc

SEQ ID NO: 1243146 - RNA, 19 nt, Homo sapiens
  misc_RNA (1)...(19): siRNA sense strand
ccauaaggcucagcagcaa

SEQ ID NO: 1243147 - RNA, 19 nt, Homo sapiens
  misc_RNA (1)...(19): siRNA sense strand
ugaaagcaacaacagaauu

SEQ ID NO: 1243148 - RNA, 19 nt, Homo sapiens
  misc_RNA (1)...(19): siRNA sense strand
cuacaacaacgacuacuau

SEQ ID NO: 1243149 - RNA, 19 nt, Homo sapiens
  misc_RNA (1)...(19): siRNA sense strand
ccaaaugcccgcuacgaau

SEQ ID NO: 1243150 - RNA, 19 nt, Homo sapiens
  misc_RNA (1)...(19): siRNA sense strand
gaagcaacacggccucugu

SEQ ID NO: 1243151 - RNA, 19 nt, Homo sapiens
  misc_RNA (1)...(19): siRNA sense strand
uucaugaggucuacauuga

SEQ ID NO: 1243152 - RNA, 19 nt, Homo sapiens
  misc_RNA (1)...(19): siRNA sense strand
caacagcaacagcaauugu

SEQ ID NO: 1243153 - RNA, 19 nt, Homo sapiens
  misc_RNA (1)...(19): siRNA sense strand
caugaggucuacauugaca

SEQ ID NO: 1243154 - RNA, 19 nt, Homo sapiens
  misc_RNA (1)...(19): siRNA sense strand
ccacuggccucacagaaaa

SEQ ID NO: 1243155 - RNA, 19 nt, Homo sapiens
  misc_RNA (1)...(19): siRNA sense strand
cgacaagaaccgcaagaau

SEQ ID NO: 1243156 - RNA, 19 nt, Homo sapiens
  misc_RNA (1)...(19): siRNA sense strand
acugugcgaucuuaauaaa

SEQ ID NO: 1243157 - RNA, 19 nt, Homo sapiens
  misc_RNA (1)...(19): siRNA sense strand
gcacucuuguccuggugaa

SEQ ID NO: 1243158 - RNA, 19 nt, Homo sapiens
  misc_RNA (1)...(19): siRNA sense strand
gaugaaguagcaaauagug

SEQ ID NO: 1243159 - RNA, 19 nt, Homo sapiens
  misc_RNA (1)...(19): siRNA sense strand
gaacuucaaugaugaggaa

SEQ ID NO: 1243160 - RNA, 19 nt, Homo sapiens
  misc_RNA (1)...(19): siRNA sense strand
gaaacacacucucuucuca

SEQ ID NO: 1243161 - RNA, 19 nt, Homo sapiens
  misc_RNA (1)...(19): siRNA sense strand
gugcagcccuccacauuua

SEQ ID NO: 1243162 - RNA, 19 nt, Homo sapiens
  misc_RNA (1)...(19): siRNA sense strand
gaacugugcgaucuuaaua

SEQ ID NO: 1243163 - RNA, 19 nt, Homo sapiens
  misc_RNA (1)...(19): siRNA sense strand
gaacaaugcucagucuaug

SEQ ID NO: 1243164 - RNA, 19 nt, Homo sapiens
  misc_RNA (1)...(19): siRNA sense strand
gaucaagacuguggacgua

SEQ ID NO: 1243165 - RNA, 19 nt, Homo sapiens
  misc_RNA (1)...(19): siRNA sense strand
ugacgggaaucaucucuua

SEQ ID NO: 1243166 - RNA, 19 nt, Homo sapiens
  misc_RNA (1)...(19): siRNA sense strand
ggaaagauaaggacauuga

SEQ ID NO: 1243167 - RNA, 19 nt, Homo sapiens
  misc_RNA (1)...(19): siRNA sense strand
caacagcaauugugucuca

SEQ ID NO: 1243168 - RNA, 19 nt, Homo sapiens
  misc_RNA (1)...(19): siRNA sense strand
gugaacaguuggaaagaua

SEQ ID NO: 1243169 - RNA, 19 nt, Homo sapiens
  misc_RNA (1)...(19): siRNA sense strand
caacagcccaugcagcuua

SEQ ID NO: 1243170 - RNA, 19 nt, Homo sapiens
  misc_RNA (1)...(19): siRNA sense strand
gaagaggacgaacuaauga

SEQ ID NO: 1243171 - RNA, 19 nt, Homo sapiens
  misc_RNA (1)...(19): siRNA sense strand
gcaauugcuucuacaacaa

SEQ ID NO: 1243172 - RNA, 19 nt, Homo sapiens
  misc_RNA (1)...(19): siRNA sense strand
gcagacgccuggaacaaga

SEQ ID NO: 1243173 - RNA, 19 nt, Homo sapiens
  misc_RNA (1)...(19): siRNA sense strand
ggaagaggacgaacuaaug

SEQ ID NO: 1243174 - RNA, 19 nt, Homo sapiens
  misc_RNA (1)...(19): siRNA sense strand
ggaaaggucugcggcaugu

SEQ ID NO: 1243175 - RNA, 19 nt, Homo sapiens
  misc_RNA (1)...(19): siRNA sense strand
gaaagcaacaacagaauuc

SEQ ID NO: 1243176 - RNA, 19 nt, Homo sapiens
  misc_RNA (1)...(19): siRNA sense strand
caaguggacucagaagaaa

SEQ ID NO: 1243177 - RNA, 19 nt, Homo sapiens
  misc_RNA (1)...(19): siRNA sense strand
ccaacaggaugguaucuau

SEQ ID NO: 1243178 - RNA, 19 nt, Homo sapiens
  misc_RNA (1)...(19): siRNA sense strand
gacaagaaccgcaagaaug

SEQ ID NO: 1243179 - RNA, 19 nt, Homo sapiens
  misc_RNA (1)...(19): siRNA sense strand
gcacacacauguccaccau

SEQ ID NO: 1243180 - RNA, 19 nt, Homo sapiens
  misc_RNA (1)...(19): siRNA sense strand
gcgaugaaguagcaaauag

SEQ ID NO: 1243181 - RNA, 19 nt, Homo sapiens
  misc_RNA (1)...(19): siRNA sense strand
gcuguaaggucaugcugaa

SEQ ID NO: 1243182 - RNA, 19 nt, Homo sapiens
  misc_RNA (1)...(19): siRNA sense strand
gcaaacacccucugugagu

SEQ ID NO: 1243183 - RNA, 19 nt, Homo sapiens
  misc_RNA (1)...(19): siRNA sense strand
ccacccggcugauguuuga

SEQ ID NO: 1243184 - RNA, 19 nt, Homo sapiens
  misc_RNA (1)...(19): siRNA sense strand
caagacagcuauuuuguug

SEQ ID NO: 1243185 - RNA, 19 nt, Homo sapiens
  misc_RNA (1)...(19): siRNA sense strand
gcuauggguuucaucuuga

SEQ ID NO: 1243186 - RNA, 19 nt, Homo sapiens
  misc_RNA (1)...(19): siRNA sense strand
caacacggccucugugguu

SEQ ID NO: 1243187 - RNA, 19 nt, Homo sapiens
  misc_RNA (1)...(19): siRNA sense strand
gaaaccaccaccucuguug

SEQ ID NO: 1243188 - RNA, 19 nt, Homo sapiens
  misc_RNA (1)...(19): siRNA sense strand
ucagaaaggccacaucuug

SEQ ID NO: 1243189 - RNA, 19 nt, Homo sapiens
  misc_RNA (1)...(19): siRNA sense strand
gcacuuugcccaccacaug

SEQ ID NO: 1243190 - RNA, 19 nt, Homo sapiens
  misc_RNA (1)...(19): siRNA sense strand
acaagaaccgcaagaauga

SEQ ID NO: 1243191 - RNA, 19 nt, Homo sapiens
  misc_RNA (1)...(19): siRNA sense strand
gcaaauagugacagugaau

SEQ ID NO: 1243192 - RNA, 19 nt, Homo sapiens
  misc_RNA (1)...(19): siRNA sense strand
aagaaagggucaucaggaa

SEQ ID NO: 1243193 - RNA, 19 nt, Homo sapiens
  misc_RNA (1)...(19): siRNA sense strand
ccaaguggacucagaagaa

SEQ ID NO: 1243194 - RNA, 19 nt, Homo sapiens
  misc_RNA (1)...(19): siRNA sense strand
gcugagggcugcauuuguc

SEQ ID NO: 1243195 - RNA, 19 nt, Homo sapiens
  misc_RNA (1)...(19): siRNA sense strand
gauacaguuugccguggua

SEQ ID NO: 1243196 - RNA, 19 nt, Homo sapiens
  misc_RNA (1)...(19): siRNA sense strand
gaaagggucaucaggaaag

SEQ ID NO: 1243197 - RNA, 19 nt, Homo sapiens
  misc_RNA (1)...(19): siRNA sense strand
gcugagagcugugaauguc

SEQ ID NO: 1243198 - RNA, 19 nt, Homo sapiens
  misc_RNA (1)...(19): siRNA sense strand
ggaguucgcauaccacaug

SEQ ID NO: 1243199 - RNA, 19 nt, Homo sapiens
  misc_RNA (1)...(19): siRNA sense strand
uacgugagcuuugauggua

SEQ ID NO: 1243200 - RNA, 19 nt, Homo sapiens
  misc_RNA (1)...(19): siRNA sense strand
caaacacccucugugaguu

SEQ ID NO: 1243201 - RNA, 19 nt, Homo sapiens
  misc_RNA (1)...(19): siRNA sense strand
gugaauuugugaacaguug

SEQ ID NO: 1243202 - RNA, 19 nt, Homo sapiens
  misc_RNA (1)...(19): siRNA sense strand
ccuacaaucuccaccaaga

SEQ ID NO: 1243203 - RNA, 19 nt, Homo sapiens
  misc_RNA (1)...(19): siRNA sense strand
gacaacagcaacagcaauu

SEQ ID NO: 1243204 - RNA, 19 nt, Homo sapiens
  misc_RNA (1)...(19): siRNA sense strand
uguaaucgcgucuguauga

SEQ ID NO: 1243205 - RNA, 19 nt, Homo sapiens
  misc_RNA (1)...(19): siRNA sense strand
ggaaggacgcaacaagaug

SEQ ID NO: 1243206 - RNA, 19 nt, Homo sapiens
  misc_RNA (1)...(19): siRNA sense strand
gcuuaagaauggccaguau

SEQ ID NO: 1243207 - RNA, 19 nt, Homo sapiens
  misc_RNA (1)...(19): siRNA sense strand
acuaucaucuccacagaaa

SEQ ID NO: 1243208 - RNA, 19 nt, Homo sapiens
  misc_RNA (1)...(19): siRNA sense strand
cauuuaugcuucagucuug

SEQ ID NO: 1243209 - RNA, 19 nt, Homo sapiens
  misc_RNA (1)...(19): siRNA sense strand
acagagcgcugcccuccaa

SEQ ID NO: 1243210 - RNA, 19 nt, Homo sapiens
  misc_RNA (1)...(19): siRNA sense strand
ugaccuauguucugaucaa

SEQ ID NO: 1243211 - RNA, 19 nt, Homo sapiens
  misc_RNA (1)...(19): siRNA sense strand
cccguuaccucacauuuga

SEQ ID NO: 1243212 - RNA, 19 nt, Homo sapiens
  misc_RNA (1)...(19): siRNA sense strand
gcuaugugcugagugaaga

SEQ ID NO: 1243213 - RNA, 19 nt, Homo sapiens
  misc_RNA (1)...(19): siRNA sense strand
caacaacgacuacuaugag

SEQ ID NO: 1243214 - RNA, 19 nt, Homo sapiens
  misc_RNA (1)...(19): siRNA sense strand
ugaaaccacuggccucaca

SEQ ID NO: 1243215 - RNA, 19 nt, Homo sapiens
  misc_RNA (1)...(19): siRNA sense strand
ggacauugacccaaguugu

SEQ ID NO: 1243216 - RNA, 19 nt, Homo sapiens
  misc_RNA (1)...(19): siRNA sense strand
ugugggaacuucaaugaug

SEQ ID NO: 1243217 - RNA, 19 nt, Homo sapiens
  misc_RNA (1)...(19): siRNA sense strand
gaagggccaccgugugcua

SEQ ID NO: 1243218 - RNA, 19 nt, Homo sapiens
  misc_RNA (1)...(19): siRNA sense strand
caagaucagugccaagcau

SEQ ID NO: 1243219 - RNA, 19 nt, Homo sapiens
  misc_RNA (1)...(19): siRNA sense strand
gaacuaugacggcaacagu

SEQ ID NO: 1243220 - RNA, 19 nt, Homo sapiens
  misc_RNA (1)...(19): siRNA sense strand
caacucaacagacccauuc

SEQ ID NO: 1243221 - RNA, 19 nt, Homo sapiens
  misc_RNA (1)...(19): siRNA sense strand
cuacggagacccucauuau

SEQ ID NO: 1243222 - RNA, 19 nt, Homo sapiens
  misc_RNA (1)...(19): siRNA sense strand
agacuaccaucucuacaga

SEQ ID NO: 1243223 - RNA, 19 nt, Homo sapiens
  misc_RNA (1)...(19): siRNA sense strand
gaccaggagugucagaagu

SEQ ID NO: 1243224 - RNA, 19 nt, Homo sapiens
  misc_RNA (1)...(19): siRNA sense strand
ccgcaagaaugacaugaug

SEQ ID NO: 1243225 - RNA, 19 nt, Homo sapiens
  misc_RNA (1)...(19): siRNA sense strand
gugcaaacacccucuguga

SEQ ID NO: 1243226 - RNA, 19 nt, Homo sapiens
  misc_RNA (1)...(19): siRNA sense strand
gcccagcgaugaaguagca

SEQ ID NO: 1243227 - RNA, 19 nt, Homo sapiens
  misc_RNA (1)...(19): siRNA sense strand
gugggaacuucaaugauga

SEQ ID NO: 1243228 - RNA, 19 nt, Homo sapiens
  misc_RNA (1)...(19): siRNA sense strand
cagaaaggccacaucuuga

SEQ ID NO: 1243229 - RNA, 19 nt, Homo sapiens
  misc_RNA (1)...(19): siRNA sense strand
caacgcccaucccuucugu

SEQ ID NO: 1243230 - RNA, 19 nt, Homo sapiens
  misc_RNA (1)...(19): siRNA sense strand
guaaggucaugcugaaugg

SEQ ID NO: 1243231 - RNA, 19 nt, Homo sapiens
  misc_RNA (1)...(19): siRNA sense strand
gaugugcucuggaaacacu

SEQ ID NO: 1243232 - RNA, 19 nt, Homo sapiens
  misc_RNA (1)...(19): siRNA sense strand
acaaugaccaccugaaguu

SEQ ID NO: 1243233 - RNA, 19 nt, Homo sapiens
  misc_RNA (1)...(19): siRNA sense strand
gguuucaucuugaucaauc

SEQ ID NO: 1243234 - RNA, 19 nt, Homo sapiens
  misc_RNA (1)...(19): siRNA sense strand
gggaguauccggaaacaca

SEQ ID NO: 1243235 - RNA, 19 nt, Homo sapiens
  misc_RNA (1)...(19): siRNA sense strand
cagcuuugguggaaggaaa

SEQ ID NO: 1243236 - RNA, 19 nt, Homo sapiens
  misc_RNA (1)...(19): siRNA sense strand
uagcaaauagugacaguga

SEQ ID NO: 1243237 - RNA, 19 nt, Homo sapiens
  misc_RNA (1)...(19): siRNA sense strand
cugcaaacccaaccagaua

SEQ ID NO: 1243238 - RNA, 19 nt, Homo sapiens
  misc_RNA (1)...(19): siRNA sense strand
gcgaagccaugcccugaca

SEQ ID NO: 1243239 - RNA, 19 nt, Homo sapiens
  misc_RNA (1)...(19): siRNA sense strand
agacuaccaucuccacaga

SEQ ID NO: 1243240 - RNA, 19 nt, Homo sapiens
  misc_RNA (1)...(19): siRNA sense strand
agacuaccaucuccacaga

SEQ ID NO: 1243241 - RNA, 19 nt, Homo sapiens
  misc_RNA (1)...(19): siRNA sense strand
gaucaauccugggacuugu

SEQ ID NO: 1243242 - RNA, 19 nt, Homo sapiens
  misc_RNA (1)...(19): siRNA sense strand
uaacggagagggcagcuau

SEQ ID NO: 1243243 - RNA, 19 nt, Homo sapiens
  misc_RNA (1)...(19): siRNA sense strand
caggagaacccgaguggaa

SEQ ID NO: 1243244 - RNA, 19 nt, Homo sapiens
  misc_RNA (1)...(19): siRNA sense strand
ugaggaagaggacgaacua

SEQ ID NO: 1243245 - RNA, 19 nt, Homo sapiens
  misc_RNA (1)...(19): siRNA sense strand
cuacagcauuguuaacauc

SEQ ID NO: 1243246 - RNA, 19 nt, Homo sapiens
  misc_RNA (1)...(19): siRNA sense strand
ccauaaggcucagcagcaa

SEQ ID NO: 1243247 - RNA, 19 nt, Homo sapiens
  misc_RNA (1)...(19): siRNA sense strand
ugaaagcaacaacagaauu

SEQ ID NO: 1243248 - RNA, 19 nt, Homo sapiens
  misc_RNA (1)...(19): siRNA sense strand
cuacaacaacgacuacuau

SEQ ID NO: 1243249 - RNA, 19 nt, Homo sapiens
  misc_RNA (1)...(19): siRNA sense strand
ccaaaugcccgcuacgaau

SEQ ID NO: 1243250 - RNA, 19 nt, Homo sapiens
  misc_RNA (1)...(19): siRNA sense strand
gaagcaacacggccucugu

SEQ ID NO: 1243251 - RNA, 19 nt, Homo sapiens
  misc_RNA (1)...(19): siRNA sense strand
uucaugaggucuacauuga

SEQ ID NO: 1243252 - RNA, 19 nt, Homo sapiens
  misc_RNA (1)...(19): siRNA sense strand
caacagcaacagcaauugu

SEQ ID NO: 1243253 - RNA, 19 nt, Homo sapiens
  misc_RNA (1)...(19): siRNA sense strand
caugaggucuacauugaca

SEQ ID NO: 1243254 - RNA, 19 nt, Homo sapiens
  misc_RNA (1)...(19): siRNA sense strand
ccacuggccucacagaaaa

SEQ ID NO: 1243255 - RNA, 19 nt, Homo sapiens
  misc_RNA (1)...(19): siRNA sense strand
cgacaagaaccgcaagaau

SEQ ID NO: 1243256 - RNA, 19 nt, Homo sapiens
  misc_RNA (1)...(19): siRNA sense strand
acugugcgaucuuaauaaa

SEQ ID NO: 1243257 - RNA, 19 nt, Homo sapiens
  misc_RNA (1)...(19): siRNA sense strand
gcacucuuguccuggugaa

SEQ ID NO: 1243258 - RNA, 19 nt, Homo sapiens
  misc_RNA (1)...(19): siRNA sense strand
gaugaaguagcaaauagug

SEQ ID NO: 1243259 - RNA, 19 nt, Homo sapiens
  misc_RNA (1)...(19): siRNA sense strand
gaacuucaaugaugaggaa

SEQ ID NO: 1243260 - RNA, 19 nt, Homo sapiens
  misc_RNA (1)...(19): siRNA sense strand
gaaacacacucucuucuca

SEQ ID NO: 1243261 - RNA, 19 nt, Homo sapiens
  misc_RNA (1)...(19): siRNA sense strand
gugcagcccuccacauuua

SEQ ID NO: 1243262 - RNA, 19 nt, Homo sapiens
  misc_RNA (1)...(19): siRNA sense strand
gaacugugcgaucuuaaua

SEQ ID NO: 1243263 - RNA, 19 nt, Homo sapiens
  misc_RNA (1)...(19): siRNA sense strand
gaacaaugcucagucuaug

SEQ ID NO: 1243264 - RNA, 19 nt, Homo sapiens
  misc_RNA (1)...(19): siRNA sense strand
gaucaagacuguggacgua

SEQ ID NO: 1243265 - RNA, 19 nt, Homo sapiens
  misc_RNA (1)...(19): siRNA sense strand
ugacgggaaucaucucuua

SEQ ID NO: 1243266 - RNA, 19 nt, Homo sapiens
  misc_RNA (1)...(19): siRNA sense strand
ggaaagauaaggacauuga

SEQ ID NO: 1243267 - RNA, 19 nt, Homo sapiens
  misc_RNA (1)...(19): siRNA sense strand
caacagcaauugugucuca

SEQ ID NO: 1243268 - RNA, 19 nt, Homo sapiens
  misc_RNA (1)...(19): siRNA sense strand
gugaacaguuggaaagaua

SEQ ID NO: 1243269 - RNA, 19 nt, Homo sapiens
  misc_RNA (1)...(19): siRNA sense strand
caacagcccaugcagcuua

SEQ ID NO: 1243270 - RNA, 19 nt, Homo sapiens
  misc_RNA (1)...(19): siRNA sense strand
gaagaggacgaacuaauga

SEQ ID NO: 1243271 - RNA, 19 nt, Homo sapiens
  misc_RNA (1)...(19): siRNA sense strand
gcaauugcuucuacaacaa

SEQ ID NO: 1243272 - RNA, 19 nt, Homo sapiens
  misc_RNA (1)...(19): siRNA sense strand
gcagacgccuggaacaaga

SEQ ID NO: 1243273 - RNA, 19 nt, Homo sapiens
  misc_RNA (1)...(19): siRNA sense strand
ggaagaggacgaacuaaug

SEQ ID NO: 1243274 - RNA, 19 nt, Homo sapiens
  misc_RNA (1)...(19): siRNA sense strand
ggaaaggucugcggcaugu

SEQ ID NO: 1243275 - RNA, 19 nt, Homo sapiens
  misc_RNA (1)...(19): siRNA sense strand
gaaagcaacaacagaauuc

SEQ ID NO: 1243276 - RNA, 19 nt, Homo sapiens
  misc_RNA (1)...(19): siRNA sense strand
caaguggacucagaagaaa

SEQ ID NO: 1243277 - RNA, 19 nt, Homo sapiens
  misc_RNA (1)...(19): siRNA sense strand
ccaacaggaugguaucuau

SEQ ID NO: 1243278 - RNA, 19 nt, Homo sapiens
  misc_RNA (1)...(19): siRNA sense strand
gacaagaaccgcaagaaug

SEQ ID NO: 1243279 - RNA, 19 nt, Homo sapiens
  misc_RNA (1)...(19): siRNA sense strand
gcacacacauguccaccau

SEQ ID NO: 1243280 - RNA, 19 nt, Homo sapiens
  misc_RNA (1)...(19): siRNA sense strand
gcgaugaaguagcaaauag

SEQ ID NO: 1243281 - RNA, 19 nt, Homo sapiens
  misc_RNA (1)...(19): siRNA sense strand
gcuguaaggucaugcugaa

SEQ ID NO: 1243282 - RNA, 19 nt, Homo sapiens
  misc_RNA (1)...(19): siRNA sense strand
gcaaacacccucugugagu

SEQ ID NO: 1243283 - RNA, 19 nt, Homo sapiens
  misc_RNA (1)...(19): siRNA sense strand
ccacccggcugauguuuga

SEQ ID NO: 1243284 - RNA, 19 nt, Homo sapiens
  misc_RNA (1)...(19): siRNA sense strand
caagacagcuauuuuguug

SEQ ID NO: 1243285 - RNA, 19 nt, Homo sapiens
  misc_RNA (1)...(19): siRNA sense strand
gcuauggguuucaucuuga

SEQ ID NO: 1243286 - RNA, 19 nt, Homo sapiens
  misc_RNA (1)...(19): siRNA sense strand
caacacggccucugugguu

SEQ ID NO: 1243287 - RNA, 19 nt, Homo sapiens
  misc_RNA (1)...(19): siRNA sense strand
gaaaccaccaccucuguug

SEQ ID NO: 1243288 - RNA, 19 nt, Homo sapiens
  misc_RNA (1)...(19): siRNA sense strand
ucagaaaggccacaucuug

SEQ ID NO: 1243289 - RNA, 19 nt, Homo sapiens
  misc_RNA (1)...(19): siRNA sense strand
gcacuuugcccaccacaug

SEQ ID NO: 1243290 - RNA, 19 nt, Homo sapiens
  misc_RNA (1)...(19): siRNA sense strand
acaagaaccgcaagaauga

SEQ ID NO: 1243291 - RNA, 19 nt, Homo sapiens
  misc_RNA (1)...(19): siRNA sense strand
gcaaauagugacagugaau

SEQ ID NO: 1243292 - RNA, 19 nt, Homo sapiens
  misc_RNA (1)...(19): siRNA sense strand
aagaaagggucaucaggaa

SEQ ID NO: 1243293 - RNA, 19 nt, Homo sapiens
  misc_RNA (1)...(19): siRNA sense strand
ccaaguggacucagaagaa

SEQ ID NO: 1243294 - RNA, 19 nt, Homo sapiens
  misc_RNA (1)...(19): siRNA sense strand
gcugagggcugcauuuguc

SEQ ID NO: 1243295 - RNA, 19 nt, Homo sapiens
  misc_RNA (1)...(19): siRNA sense strand
gauacaguuugccguggua

SEQ ID NO: 1243296 - RNA, 19 nt, Homo sapiens
  misc_RNA (1)...(19): siRNA sense strand
gaaagggucaucaggaaag

SEQ ID NO: 1243297 - RNA, 19 nt, Homo sapiens
  misc_RNA (1)...(19): siRNA sense strand
gcugagagcugugaauguc

SEQ ID NO: 1243298 - RNA, 19 nt, Homo sapiens
  misc_RNA (1)...(19): siRNA sense strand
ggaguucgcauaccacaug

SEQ ID NO: 1243299 - RNA, 19 nt, Homo sapiens
  misc_RNA (1)...(19): siRNA sense strand
uacgugagcuuugauggua

SEQ ID NO: 1243300 - RNA, 19 nt, Homo sapiens
  misc_RNA (1)...(19): siRNA sense strand
caaacacccucugugaguu

SEQ ID NO: 1243301 - RNA, 19 nt, Homo sapiens
  misc_RNA (1)...(19): siRNA sense strand
gugaauuugugaacaguug

SEQ ID NO: 1243302 - RNA, 19 nt, Homo sapiens
  misc_RNA (1)...(19): siRNA sense strand
ccuacaaucuccaccaaga

SEQ ID NO: 1243303 - RNA, 19 nt, Homo sapiens
  misc_RNA (1)...(19): siRNA sense strand
gacaacagcaacagcaauu

SEQ ID NO: 1243304 - RNA, 19 nt, Homo sapiens
  misc_RNA (1)...(19): siRNA sense strand
uguaaucgcgucuguauga

SEQ ID NO: 1243305 - RNA, 19 nt, Homo sapiens
  misc_RNA (1)...(19): siRNA sense strand
ggaaggacgcaacaagaug

SEQ ID NO: 1243306 - RNA, 19 nt, Homo sapiens
  misc_RNA (1)...(19): siRNA sense strand
gcuuaagaauggccaguau

SEQ ID NO: 1243307 - RNA, 19 nt, Homo sapiens
  misc_RNA (1)...(19): siRNA sense strand
acuaucaucuccacagaaa

SEQ ID NO: 1243308 - RNA, 19 nt, Homo sapiens
  misc_RNA (1)...(19): siRNA sense strand
cauuuaugcuucagucuug

SEQ ID NO: 1243309 - RNA, 19 nt, Homo sapiens
  misc_RNA (1)...(19): siRNA sense strand
acagagcgcugcccuccaa

SEQ ID NO: 1243310 - RNA, 19 nt, Homo sapiens
  misc_RNA (1)...(19): siRNA sense strand
ugaccuauguucugaucaa

SEQ ID NO: 1243311 - RNA, 19 nt, Homo sapiens
  misc_RNA (1)...(19): siRNA sense strand
cccguuaccucacauuuga

SEQ ID NO: 1243312 - RNA, 19 nt, Homo sapiens
  misc_RNA (1)...(19): siRNA sense strand
gcuaugugcugagugaaga

SEQ ID NO: 1243313 - RNA, 19 nt, Homo sapiens
  misc_RNA (1)...(19): siRNA sense strand
caacaacgacuacuaugag

SEQ ID NO: 1243314 - RNA, 19 nt, Homo sapiens
  misc_RNA (1)...(19): siRNA sense strand
ugaaaccacuggccucaca

SEQ ID NO: 1243315 - RNA, 19 nt, Homo sapiens
  misc_RNA (1)...(19): siRNA sense strand
ggacauugacccaaguugu

SEQ ID NO: 1243316 - RNA, 19 nt, Homo sapiens
  misc_RNA (1)...(19): siRNA sense strand
ugugggaacuucaaugaug

SEQ ID NO: 1243317 - RNA, 19 nt, Homo sapiens
  misc_RNA (1)...(19): siRNA sense strand
gaagggccaccgugugcua

SEQ ID NO: 1243318 - RNA, 19 nt, Homo sapiens
  misc_RNA (1)...(19): siRNA sense strand
caagaucagugccaagcau

SEQ ID NO: 1243319 - RNA, 19 nt, Homo sapiens
  misc_RNA (1)...(19): siRNA sense strand
gaacuaugacggcaacagu

SEQ ID NO: 1243320 - RNA, 19 nt, Homo sapiens
  misc_RNA (1)...(19): siRNA sense strand
caacucaacagacccauuc

SEQ ID NO: 1243321 - RNA, 19 nt, Homo sapiens
  misc_RNA (1)...(19): siRNA sense strand
cuacggagacccucauuau

SEQ ID NO: 1243322 - RNA, 19 nt, Homo sapiens
  misc_RNA (1)...(19): siRNA sense strand
agacuaccaucucuacaga

SEQ ID NO: 1243323 - RNA, 19 nt, Homo sapiens
  misc_RNA (1)...(19): siRNA sense strand
gaccaggagugucagaagu

SEQ ID NO: 1243324 - RNA, 19 nt, Homo sapiens
  misc_RNA (1)...(19): siRNA sense strand
ccgcaagaaugacaugaug

SEQ ID NO: 1243325 - RNA, 19 nt, Homo sapiens
  misc_RNA (1)...(19): siRNA sense strand
gugcaaacacccucuguga

SEQ ID NO: 1243326 - RNA, 19 nt, Homo sapiens
  misc_RNA (1)...(19): siRNA sense strand
gcccagcgaugaaguagca

SEQ ID NO: 1243327 - RNA, 19 nt, Homo sapiens
  misc_RNA (1)...(19): siRNA sense strand
gugggaacuucaaugauga

SEQ ID NO: 1243328 - RNA, 19 nt, Homo sapiens
  misc_RNA (1)...(19): siRNA sense strand
cagaaaggccacaucuuga

SEQ ID NO: 1243329 - RNA, 19 nt, Homo sapiens
  misc_RNA (1)...(19): siRNA sense strand
caacgcccaucccuucugu

SEQ ID NO: 1243330 - RNA, 19 nt, Homo sapiens
  misc_RNA (1)...(19): siRNA sense strand
guaaggucaugcugaaugg

SEQ ID NO: 1243331 - RNA, 19 nt, Homo sapiens
  misc_RNA (1)...(19): siRNA sense strand
gaugugcucuggaaacacu

SEQ ID NO: 1243332 - RNA, 19 nt, Homo sapiens
  misc_RNA (1)...(19): siRNA sense strand
acaaugaccaccugaaguu

SEQ ID NO: 1243333 - RNA, 19 nt, Homo sapiens
  misc_RNA (1)...(19): siRNA sense strand
gguuucaucuugaucaauc

SEQ ID NO: 1243334 - RNA, 19 nt, Homo sapiens
  misc_RNA (1)...(19): siRNA sense strand
gggaguauccggaaacaca

SEQ ID NO: 1243335 - RNA, 19 nt, Homo sapiens
  misc_RNA (1)...(19): siRNA sense strand
cagcuuugguggaaggaaa

SEQ ID NO: 1243336 - RNA, 19 nt, Homo sapiens
  misc_RNA (1)...(19): siRNA sense strand
uagcaaauagugacaguga

SEQ ID NO: 1243337 - RNA, 19 nt, Homo sapiens
  misc_RNA (1)...(19): siRNA sense strand
cugcaaacccaaccagaua

SEQ ID NO: 1243338 - RNA, 19 nt, Homo sapiens
  misc_RNA (1)...(19): siRNA sense strand
gcgaagccaugcccugaca

SEQ ID NO: 1243339 - RNA, 19 nt, Homo sapiens
  misc_RNA (1)...(19): siRNA sense strand
agacuaccaucuccacaga

SEQ ID NO: 1243340 - RNA, 19 nt, Homo sapiens
  misc_RNA (1)...(19): siRNA sense strand
agacuaccaucuccacaga

SEQ ID NO: 1243341 - RNA, 19 nt, Homo sapiens
  misc_RNA (1)...(19): siRNA sense strand
gaucaauccugggacuugu

SEQ ID NO: 1243342 - RNA, 19 nt, Homo sapiens
  misc_RNA (1)...(19): siRNA sense strand
uaacggagagggcagcuau

SEQ ID NO: 1243343 - RNA, 19 nt, Homo sapiens
  misc_RNA (1)...(19): siRNA sense strand
caggagaacccgaguggaa

SEQ ID NO: 1243344 - RNA, 19 nt, Homo sapiens
  misc_RNA (1)...(19): siRNA sense strand
ugaggaagaggacgaacua

SEQ ID NO: 1243345 - RNA, 19 nt, Homo sapiens
  misc_RNA (1)...(19): siRNA sense strand
cuacagcauuguuaacauc

SEQ ID NO: 1243346 - RNA, 19 nt, Homo sapiens
  misc_RNA (1)...(19): siRNA sense strand
ccauaaggcucagcagcaa

SEQ ID NO: 1243347 - RNA, 19 nt, Homo sapiens
  misc_RNA (1)...(19): siRNA sense strand
ugaaagcaacaacagaauu

SEQ ID NO: 1243348 - RNA, 19 nt, Homo sapiens
  misc_RNA (1)...(19): siRNA sense strand
cuacaacaacgacuacuau

SEQ ID NO: 1243349 - RNA, 19 nt, Homo sapiens
  misc_RNA (1)...(19): siRNA sense strand
ccaaaugcccgcuacgaau

SEQ ID NO: 1243350 - RNA, 19 nt, Homo sapiens
  misc_RNA (1)...(19): siRNA sense strand
gaagcaacacggccucugu

SEQ ID NO: 1243351 - RNA, 19 nt, Homo sapiens
  misc_RNA (1)...(19): siRNA sense strand
uucaugaggucuacauuga

SEQ ID NO: 1243352 - RNA, 19 nt, Homo sapiens
  misc_RNA (1)...(19): siRNA sense strand
caacagcaacagcaauugu

SEQ ID NO: 1243353 - RNA, 19 nt, Homo sapiens
  misc_RNA (1)...(19): siRNA sense strand
caugaggucuacauugaca

SEQ ID NO: 1243354 - RNA, 19 nt, Homo sapiens
  misc_RNA (1)...(19): siRNA sense strand
ccacuggccucacagaaaa

SEQ ID NO: 1243355 - RNA, 19 nt, Homo sapiens
  misc_RNA (1)...(19): siRNA sense strand
cgacaagaaccgcaagaau

SEQ ID NO: 1243356 - RNA, 19 nt, Homo sapiens
  misc_RNA (1)...(19): siRNA sense strand
acugugcgaucuuaauaaa

SEQ ID NO: 1243357 - RNA, 19 nt, Homo sapiens
  misc_RNA (1)...(19): siRNA sense strand
gcacucuuguccuggugaa

SEQ ID NO: 1243358 - RNA, 19 nt, Homo sapiens
  misc_RNA (1)...(19): siRNA sense strand
gaugaaguagcaaauagug

SEQ ID NO: 1243359 - RNA, 19 nt, Homo sapiens
  misc_RNA (1)...(19): siRNA sense strand
gaacuucaaugaugaggaa

SEQ ID NO: 1243360 - RNA, 19 nt, Homo sapiens
  misc_RNA (1)...(19): siRNA sense strand
gaaacacacucucuucuca

SEQ ID NO: 1243361 - RNA, 19 nt, Homo sapiens
  misc_RNA (1)...(19): siRNA sense strand
gugcagcccuccacauuua

SEQ ID NO: 1243362 - RNA, 19 nt, Homo sapiens
  misc_RNA (1)...(19): siRNA sense strand
gaacugugcgaucuuaaua

SEQ ID NO: 1243363 - RNA, 19 nt, Homo sapiens
  misc_RNA (1)...(19): siRNA sense strand
gaacaaugcucagucuaug

SEQ ID NO: 1243364 - RNA, 19 nt, Homo sapiens
  misc_RNA (1)...(19): siRNA sense strand
gaucaagacuguggacgua

SEQ ID NO: 1243365 - RNA, 19 nt, Homo sapiens
  misc_RNA (1)...(19): siRNA sense strand
ugacgggaaucaucucuua

SEQ ID NO: 1243366 - RNA, 19 nt, Homo sapiens
  misc_RNA (1)...(19): siRNA sense strand
ggaaagauaaggacauuga

SEQ ID NO: 1243367 - RNA, 19 nt, Homo sapiens
  misc_RNA (1)...(19): siRNA sense strand
caacagcaauugugucuca

SEQ ID NO: 1243368 - RNA, 19 nt, Homo sapiens
  misc_RNA (1)...(19): siRNA sense strand
gugaacaguuggaaagaua

SEQ ID NO: 1243369 - RNA, 19 nt, Homo sapiens
  misc_RNA (1)...(19): siRNA sense strand
ccagaaagccagcaucuaa

SEQ ID NO: 1243370 - RNA, 19 nt, Homo sapiens
  misc_RNA (1)...(19): siRNA sense strand
caacagcccaugcagcuua

SEQ ID NO: 1243371 - RNA, 19 nt, Homo sapiens
  misc_RNA (1)...(19): siRNA sense strand
gaagaggacgaacuaauga

SEQ ID NO: 1243372 - RNA, 19 nt, Homo sapiens
  misc_RNA (1)...(19): siRNA sense strand
gcaauugcuucuacaacaa

SEQ ID NO: 1243373 - RNA, 19 nt, Homo sapiens
  misc_RNA (1)...(19): siRNA sense strand
gcagacgccuggaacaaga

SEQ ID NO: 1243374 - RNA, 19 nt, Homo sapiens
  misc_RNA (1)...(19): siRNA sense strand
ggaagaggacgaacuaaug

SEQ ID NO: 1243375 - RNA, 19 nt, Homo sapiens
  misc_RNA (1)...(19): siRNA sense strand
ggaaaggucugcggcaugu

SEQ ID NO: 1243376 - RNA, 19 nt, Homo sapiens
  misc_RNA (1)...(19): siRNA sense strand
gaaagcaacaacagaauuc

SEQ ID NO: 1243377 - RNA, 19 nt, Homo sapiens
  misc_RNA (1)...(19): siRNA sense strand
caaguggacucagaagaaa

SEQ ID NO: 1243378 - RNA, 19 nt, Homo sapiens
  misc_RNA (1)...(19): siRNA sense strand
ccaacaggaugguaucuau

SEQ ID NO: 1243379 - RNA, 19 nt, Homo sapiens
  misc_RNA (1)...(19): siRNA sense strand
gacaagaaccgcaagaaug

SEQ ID NO: 1243380 - RNA, 19 nt, Homo sapiens
  misc_RNA (1)...(19): siRNA sense strand
gcacacacauguccaccau

SEQ ID NO: 1243381 - RNA, 19 nt, Homo sapiens
  misc_RNA (1)...(19): siRNA sense strand
gaacgaggaggaagagaga

SEQ ID NO: 1243382 - RNA, 19 nt, Homo sapiens
  misc_RNA (1)...(19): siRNA sense strand
gcgaugaaguagcaaauag

SEQ ID NO: 1243383 - RNA, 19 nt, Homo sapiens
  misc_RNA (1)...(19): siRNA sense strand
gcuguaaggucaugcugaa

SEQ ID NO: 1243384 - RNA, 19 nt, Homo sapiens
  misc_RNA (1)...(19): siRNA sense strand
gcaaacacccucugugagu

SEQ ID NO: 1243385 - RNA, 19 nt, Homo sapiens
  misc_RNA (1)...(19): siRNA sense strand
ccacccggcugauguuuga

SEQ ID NO: 1243386 - RNA, 19 nt, Homo sapiens
  misc_RNA (1)...(19): siRNA sense strand
caagacagcuauuuuguug

SEQ ID NO: 1243387 - RNA, 19 nt, Homo sapiens
  misc_RNA (1)...(19): siRNA sense strand
gcuauggguuucaucuuga

SEQ ID NO: 1243388 - RNA, 19 nt, Homo sapiens
  misc_RNA (1)...(19): siRNA sense strand
caacacggccucugugguu

SEQ ID NO: 1243389 - RNA, 19 nt, Homo sapiens
  misc_RNA (1)...(19): siRNA sense strand
gaaaccaccaccucuguug

SEQ ID NO: 1243390 - RNA, 19 nt, Homo sapiens
  misc_RNA (1)...(19): siRNA sense strand
ucagaaaggccacaucuug

SEQ ID NO: 1243391 - RNA, 19 nt, Homo sapiens
  misc_RNA (1)...(19): siRNA sense strand
gcacuuugcccaccacaug

SEQ ID NO: 1243392 - RNA, 19 nt, Homo sapiens
  misc_RNA (1)...(19): siRNA sense strand
acaagaaccgcaagaauga

SEQ ID NO: 1243393 - RNA, 19 nt, Homo sapiens
  misc_RNA (1)...(19): siRNA sense strand
gcaaauagugacagugaau

SEQ ID NO: 1243394 - RNA, 19 nt, Homo sapiens
  misc_RNA (1)...(19): siRNA sense strand
aagaaagggucaucaggaa

SEQ ID NO: 1243395 - RNA, 19 nt, Homo sapiens
  misc_RNA (1)...(19): siRNA sense strand
ccaaguggacucagaagaa

SEQ ID NO: 1243396 - RNA, 19 nt, Homo sapiens
  misc_RNA (1)...(19): siRNA sense strand
gcugagggcugcauuuguc

SEQ ID NO: 1243397 - RNA, 19 nt, Homo sapiens
  misc_RNA (1)...(19): siRNA sense strand
gauacaguuugccguggua

SEQ ID NO: 1243398 - RNA, 19 nt, Homo sapiens
  misc_RNA (1)...(19): siRNA sense strand
gaaagggucaucaggaaag

SEQ ID NO: 1243399 - RNA, 19 nt, Homo sapiens
  misc_RNA (1)...(19): siRNA sense strand
gcugagagcugugaauguc

SEQ ID NO: 1243400 - RNA, 19 nt, Homo sapiens
  misc_RNA (1)...(19): siRNA sense strand
ggaguucgcauaccacaug

SEQ ID NO: 1243401 - RNA, 19 nt, Homo sapiens
  misc_RNA (1)...(19): siRNA sense strand
uacgugagcuuugauggua

SEQ ID NO: 1243402 - RNA, 19 nt, Homo sapiens
  misc_RNA (1)...(19): siRNA sense strand
caaacacccucugugaguu

SEQ ID NO: 1243403 - RNA, 19 nt, Homo sapiens
  misc_RNA (1)...(19): siRNA sense strand
gugaauuugugaacaguug

SEQ ID NO: 1243404 - RNA, 19 nt, Homo sapiens
  misc_RNA (1)...(19): siRNA sense strand
ccuacaaucuccaccaaga

SEQ ID NO: 1243405 - RNA, 19 nt, Homo sapiens
  misc_RNA (1)...(19): siRNA sense strand
gacaacagcaacagcaauu

SEQ ID NO: 1243406 - RNA, 19 nt, Homo sapiens
  misc_RNA (1)...(19): siRNA sense strand
uguaaucgcgucuguauga

SEQ ID NO: 1243407 - RNA, 19 nt, Homo sapiens
  misc_RNA (1)...(19): siRNA sense strand
ggaaggacgcaacaagaug

SEQ ID NO: 1243408 - RNA, 19 nt, Homo sapiens
  misc_RNA (1)...(19): siRNA sense strand
gcuuaagaauggccaguau

SEQ ID NO: 1243409 - RNA, 19 nt, Homo sapiens
  misc_RNA (1)...(19): siRNA sense strand
acuaucaucuccacagaaa

SEQ ID NO: 1243410 - RNA, 19 nt, Homo sapiens
  misc_RNA (1)...(19): siRNA sense strand
cauuuaugcuucagucuug

SEQ ID NO: 1243411 - RNA, 19 nt, Homo sapiens
  misc_RNA (1)...(19): siRNA sense strand
acagagcgcugcccuccaa

SEQ ID NO: 1243412 - RNA, 19 nt, Homo sapiens
  misc_RNA (1)...(19): siRNA sense strand
ugaccuauguucugaucaa

SEQ ID NO: 1243413 - RNA, 19 nt, Homo sapiens
  misc_RNA (1)...(19): siRNA sense strand
cccguuaccucacauuuga

SEQ ID NO: 1243414 - RNA, 19 nt, Homo sapiens
  misc_RNA (1)...(19): siRNA sense strand
gcuaugugcugagugaaga

SEQ ID NO: 1243415 - RNA, 19 nt, Homo sapiens
  misc_RNA (1)...(19): siRNA sense strand
caacaacgacuacuaugag

SEQ ID NO: 1243416 - RNA, 19 nt, Homo sapiens
  misc_RNA (1)...(19): siRNA sense strand
ugaaaccacuggccucaca

SEQ ID NO: 1243417 - RNA, 19 nt, Homo sapiens
  misc_RNA (1)...(19): siRNA sense strand
gagagugcauuuacagaac

SEQ ID NO: 1243418 - RNA, 19 nt, Homo sapiens
  misc_RNA (1)...(19): siRNA sense strand
ggacauugacccaaguugu

SEQ ID NO: 1243419 - RNA, 19 nt, Homo sapiens
  misc_RNA (1)...(19): siRNA sense strand
ugugggaacuucaaugaug

SEQ ID NO: 1243420 - RNA, 19 nt, Homo sapiens
  misc_RNA (1)...(19): siRNA sense strand
gaagggccaccgugugcua

SEQ ID NO: 1243421 - RNA, 19 nt, Homo sapiens
  misc_RNA (1)...(19): siRNA sense strand
caagaucagugccaagcau

SEQ ID NO: 1243422 - RNA, 19 nt, Homo sapiens
  misc_RNA (1)...(19): siRNA sense strand
gaacuaugacggcaacagu

SEQ ID NO: 1243423 - RNA, 19 nt, Homo sapiens
  misc_RNA (1)...(19): siRNA sense strand
caacucaacagacccauuc

SEQ ID NO: 1243424 - RNA, 19 nt, Homo sapiens
  misc_RNA (1)...(19): siRNA sense strand
cuacggagacccucauuau

SEQ ID NO: 1243425 - RNA, 19 nt, Homo sapiens
  misc_RNA (1)...(19): siRNA sense strand
agacuaccaucucuacaga

SEQ ID NO: 1243426 - RNA, 19 nt, Homo sapiens
  misc_RNA (1)...(19): siRNA sense strand
gaccaggagugucagaagu

SEQ ID NO: 1243427 - RNA, 19 nt, Homo sapiens
  misc_RNA (1)...(19): siRNA sense strand
ccgcaagaaugacaugaug

SEQ ID NO: 1243428 - RNA, 19 nt, Homo sapiens
  misc_RNA (1)...(19): siRNA sense strand
gugcaaacacccucuguga

SEQ ID NO: 1243429 - RNA, 19 nt, Homo sapiens
  misc_RNA (1)...(19): siRNA sense strand
gcccagcgaugaaguagca

SEQ ID NO: 1243430 - RNA, 19 nt, Homo sapiens
  misc_RNA (1)...(19): siRNA sense strand
gugggaacuucaaugauga

SEQ ID NO: 1243431 - RNA, 19 nt, Homo sapiens
  misc_RNA (1)...(19): siRNA sense strand
cagaaaggccacaucuuga

SEQ ID NO: 1243432 - RNA, 19 nt, Homo sapiens
  misc_RNA (1)...(19): siRNA sense strand
caacgcccaucccuucugu

SEQ ID NO: 1243433 - RNA, 19 nt, Homo sapiens
  misc_RNA (1)...(19): siRNA sense strand
gaugugcucuggaaacacu

SEQ ID NO: 1243434 - RNA, 19 nt, Homo sapiens
  misc_RNA (1)...(19): siRNA sense strand
guaaggucaugcugaaugg

SEQ ID NO: 1243435 - RNA, 19 nt, Homo sapiens
  misc_RNA (1)...(19): siRNA sense strand
acaaugaccaccugaaguu

SEQ ID NO: 1243436 - RNA, 19 nt, Homo sapiens
  misc_RNA (1)...(19): siRNA sense strand
gguuucaucuugaucaauc

SEQ ID NO: 1243437 - RNA, 19 nt, Homo sapiens
  misc_RNA (1)...(19): siRNA sense strand
gggaguauccggaaacaca

SEQ ID NO: 1243438 - RNA, 19 nt, Homo sapiens
  misc_RNA (1)...(19): siRNA sense strand
cagcuuugguggaaggaaa

SEQ ID NO: 1243439 - RNA, 19 nt, Homo sapiens
  misc_RNA (1)...(19): siRNA sense strand
uagcaaauagugacaguga

SEQ ID NO: 1243440 - RNA, 19 nt, Homo sapiens
  misc_RNA (1)...(19): siRNA sense strand
cugcaaacccaaccagaua

SEQ ID NO: 1243441 - RNA, 19 nt, Homo sapiens
  misc_RNA (1)...(19): siRNA sense strand
gcgaagccaugcccugaca

SEQ ID NO: 1243442 - RNA, 19 nt, Homo sapiens
  misc_RNA (1)...(19): siRNA sense strand
agacuaccaucuccacaga

SEQ ID NO: 1243443 - RNA, 19 nt, Homo sapiens
  misc_RNA (1)...(19): siRNA sense strand
agacuaccaucuccacaga

SEQ ID NO: 1243444 - RNA, 19 nt, Homo sapiens
  misc_RNA (1)...(19): siRNA sense strand
gaucaauccugggacuugu

SEQ ID NO: 1243445 - RNA, 19 nt, Homo sapiens
  misc_RNA (1)...(19): siRNA sense strand
gaagcaacacggccucugu

SEQ ID NO: 1243446 - RNA, 19 nt, Homo sapiens
  misc_RNA (1)...(19): siRNA sense strand
uaacggagagggcagcuau

SEQ ID NO: 1243447 - RNA, 19 nt, Homo sapiens
  misc_RNA (1)...(19): siRNA sense strand
caggagaacccgaguggaa

SEQ ID NO: 1243448 - RNA, 19 nt, Homo sapiens
  misc_RNA (1)...(19): siRNA sense strand
ugaggaagaggacgaacua

SEQ ID NO: 1243449 - RNA, 19 nt, Homo sapiens
  misc_RNA (1)...(19): siRNA sense strand
cuacagcauuguuaacauc

SEQ ID NO: 1243450 - RNA, 19 nt, Homo sapiens
  misc_RNA (1)...(19): siRNA sense strand
ccauaaggcucagcagcaa

SEQ ID NO: 1243451 - RNA, 19 nt, Homo sapiens
  misc_RNA (1)...(19): siRNA sense strand
ugaaagcaacaacagaauu

SEQ ID NO: 1243452 - RNA, 19 nt, Homo sapiens
  misc_RNA (1)...(19): siRNA sense strand
cuacaacaacgacuacuau

SEQ ID NO: 1243453 - RNA, 19 nt, Homo sapiens
  misc_RNA (1)...(19): siRNA sense strand
ccaaaugcccgcuacgaau

SEQ ID NO: 1243454 - RNA, 19 nt, Homo sapiens
  misc_RNA (1)...(19): siRNA sense strand
uucaugaggucuacauuga

SEQ ID NO: 1243455 - RNA, 19 nt, Homo sapiens
  misc_RNA (1)...(19): siRNA sense strand
caacagcaacagcaauugu

SEQ ID NO: 1243456 - RNA, 19 nt, Homo sapiens
  misc_RNA (1)...(19): siRNA sense strand
caugaggucuacauugaca

SEQ ID NO: 1243457 - RNA, 19 nt, Homo sapiens
  misc_RNA (1)...(19): siRNA sense strand
acugugcgaucuuaauaaa

SEQ ID NO: 1243458 - RNA, 19 nt, Homo sapiens
  misc_RNA (1)...(19): siRNA sense strand
cgacaagaaccgcaagaau

SEQ ID NO: 1243459 - RNA, 19 nt, Homo sapiens
  misc_RNA (1)...(19): siRNA sense strand
gaacuucaaugaugaggaa

SEQ ID NO: 1243460 - RNA, 19 nt, Homo sapiens
  misc_RNA (1)...(19): siRNA sense strand
gaaacacacucucuucuca

SEQ ID NO: 1243461 - RNA, 19 nt, Homo sapiens
  misc_RNA (1)...(19): siRNA sense strand
gugcagcccuccacauuua

SEQ ID NO: 1243462 - RNA, 19 nt, Homo sapiens
  misc_RNA (1)...(19): siRNA sense strand
gaacugugcgaucuuaaua

SEQ ID NO: 1243463 - RNA, 19 nt, Homo sapiens
  misc_RNA (1)...(19): siRNA sense strand
gaacaaugcucagucuaug

SEQ ID NO: 1243464 - RNA, 19 nt, Homo sapiens
  misc_RNA (1)...(19): siRNA sense strand
gaucaagacuguggacgua

SEQ ID NO: 1243465 - RNA, 19 nt, Homo sapiens
  misc_RNA (1)...(19): siRNA sense strand
ugacgggaaucaucucuua

SEQ ID NO: 1243466 - RNA, 19 nt, Homo sapiens
  misc_RNA (1)...(19): siRNA sense strand
ggaaagauaaggacauuga

SEQ ID NO: 1243467 - RNA, 19 nt, Homo sapiens
  misc_RNA (1)...(19): siRNA sense strand
caacagcaauugugucuca

SEQ ID NO: 1243468 - RNA, 19 nt, Homo sapiens
  misc_RNA (1)...(19): siRNA sense strand
gugaacaguuggaaagaua

SEQ ID NO: 1243469 - RNA, 19 nt, Homo sapiens
  misc_RNA (1)...(19): siRNA sense strand
ccagaaagccagcaucuaa

SEQ ID NO: 1243470 - RNA, 19 nt, Homo sapiens
  misc_RNA (1)...(19): siRNA sense strand
caacagcccaugcagcuua

SEQ ID NO: 1243471 - RNA, 19 nt, Homo sapiens
  misc_RNA (1)...(19): siRNA sense strand
gaagaggacgaacuaauga

SEQ ID NO: 1243472 - RNA, 19 nt, Homo sapiens
  misc_RNA (1)...(19): siRNA sense strand
gcaauugcuucuacaacaa

SEQ ID NO: 1243473 - RNA, 19 nt, Homo sapiens
  misc_RNA (1)...(19): siRNA sense strand
gcagacgccuggaacaaga

SEQ ID NO: 1243474 - RNA, 19 nt, Homo sapiens
  misc_RNA (1)...(19): siRNA sense strand
ggaagaggacgaacuaaug

SEQ ID NO: 1243475 - RNA, 19 nt, Homo sapiens
  misc_RNA (1)...(19): siRNA sense strand
ggaaaggucugcggcaugu

SEQ ID NO: 1243476 - RNA, 19 nt, Homo sapiens
  misc_RNA (1)...(19): siRNA sense strand
gaaagcaacaacagaauuc

SEQ ID NO: 1243477 - RNA, 19 nt, Homo sapiens
  misc_RNA (1)...(19): siRNA sense strand
caaguggacucagaagaaa

SEQ ID NO: 1243478 - RNA, 19 nt, Homo sapiens
  misc_RNA (1)...(19): siRNA sense strand
ccaacaggaugguaucuau

SEQ ID NO: 1243479 - RNA, 19 nt, Homo sapiens
  misc_RNA (1)...(19): siRNA sense strand
gacaagaaccgcaagaaug

SEQ ID NO: 1243480 - RNA, 19 nt, Homo sapiens
  misc_RNA (1)...(19): siRNA sense strand
gcacacacauguccaccau

SEQ ID NO: 1243481 - RNA, 19 nt, Homo sapiens
  misc_RNA (1)...(19): siRNA sense strand
gaacgaggaggaagagaga

SEQ ID NO: 1243482 - RNA, 19 nt, Homo sapiens
  misc_RNA (1)...(19): siRNA sense strand
gcgaugaaguagcaaauag

SEQ ID NO: 1243483 - RNA, 19 nt, Homo sapiens
  misc_RNA (1)...(19): siRNA sense strand
gcuguaaggucaugcugaa

SEQ ID NO: 1243484 - RNA, 19 nt, Homo sapiens
  misc_RNA (1)...(19): siRNA sense strand
gcaaacacccucugugagu

SEQ ID NO: 1243485 - RNA, 19 nt, Homo sapiens
  misc_RNA (1)...(19): siRNA sense strand
ccacccggcugauguuuga

SEQ ID NO: 1243486 - RNA, 19 nt, Homo sapiens
  misc_RNA (1)...(19): siRNA sense strand
caagacagcuauuuuguug

SEQ ID NO: 1243487 - RNA, 19 nt, Homo sapiens
  misc_RNA (1)...(19): siRNA sense strand
gcuauggguuucaucuuga

SEQ ID NO: 1243488 - RNA, 19 nt, Homo sapiens
  misc_RNA (1)...(19): siRNA sense strand
caacacggccucugugguu

SEQ ID NO: 1243489 - RNA, 19 nt, Homo sapiens
  misc_RNA (1)...(19): siRNA sense strand
gaaaccaccaccucuguug

SEQ ID NO: 1243490 - RNA, 19 nt, Homo sapiens
  misc_RNA (1)...(19): siRNA sense strand
ucagaaaggccacaucuug

SEQ ID NO: 1243491 - RNA, 19 nt, Homo sapiens
  misc_RNA (1)...(19): siRNA sense strand
gcacuuugcccaccacaug

SEQ ID NO: 1243492 - RNA, 19 nt, Homo sapiens
  misc_RNA (1)...(19): siRNA sense strand
acaagaaccgcaagaauga

SEQ ID NO: 1243493 - RNA, 19 nt, Homo sapiens
  misc_RNA (1)...(19): siRNA sense strand
gcaaauagugacagugaau

SEQ ID NO: 1243494 - RNA, 19 nt, Homo sapiens
  misc_RNA (1)...(19): siRNA sense strand
aagaaagggucaucaggaa

SEQ ID NO: 1243495 - RNA, 19 nt, Homo sapiens
  misc_RNA (1)...(19): siRNA sense strand
ccaaguggacucagaagaa

SEQ ID NO: 1243496 - RNA, 19 nt, Homo sapiens
  misc_RNA (1)...(19): siRNA sense strand
gcugagggcugcauuuguc

SEQ ID NO: 1243497 - RNA, 19 nt, Homo sapiens
  misc_RNA (1)...(19): siRNA sense strand
gauacaguuugccguggua

SEQ ID NO: 1243498 - RNA, 19 nt, Homo sapiens
  misc_RNA (1)...(19): siRNA sense strand
gaaagggucaucaggaaag

SEQ ID NO: 1243499 - RNA, 19 nt, Homo sapiens
  misc_RNA (1)...(19): siRNA sense strand
gcugagagcugugaauguc

SEQ ID NO: 1243500 - RNA, 19 nt, Homo sapiens
  misc_RNA (1)...(19): siRNA sense strand
ggaguucgcauaccacaug

SEQ ID NO: 1243501 - RNA, 19 nt, Homo sapiens
  misc_RNA (1)...(19): siRNA sense strand
uacgugagcuuugauggua

SEQ ID NO: 1243502 - RNA, 19 nt, Homo sapiens
  misc_RNA (1)...(19): siRNA sense strand
caaacacccucugugaguu

SEQ ID NO: 1243503 - RNA, 19 nt, Homo sapiens
  misc_RNA (1)...(19): siRNA sense strand
gugaauuugugaacaguug

SEQ ID NO: 1243504 - RNA, 19 nt, Homo sapiens
  misc_RNA (1)...(19): siRNA sense strand
ccuacaaucuccaccaaga

SEQ ID NO: 1243505 - RNA, 19 nt, Homo sapiens
  misc_RNA (1)...(19): siRNA sense strand
gacaacagcaacagcaauu

SEQ ID NO: 1243506 - RNA, 19 nt, Homo sapiens
  misc_RNA (1)...(19): siRNA sense strand
uguaaucgcgucuguauga

SEQ ID NO: 1243507 - RNA, 19 nt, Homo sapiens
  misc_RNA (1)...(19): siRNA sense strand
ggaaggacgcaacaagaug

SEQ ID NO: 1243508 - RNA, 19 nt, Homo sapiens
  misc_RNA (1)...(19): siRNA sense strand
gcuuaagaauggccaguau

SEQ ID NO: 1243509 - RNA, 19 nt, Homo sapiens
  misc_RNA (1)...(19): siRNA sense strand
acuaucaucuccacagaaa

SEQ ID NO: 1243510 - RNA, 19 nt, Homo sapiens
  misc_RNA (1)...(19): siRNA sense strand
cauuuaugcuucagucuug

SEQ ID NO: 1243511 - RNA, 19 nt, Homo sapiens
  misc_RNA (1)...(19): siRNA sense strand
acagagcgcugcccuccaa

SEQ ID NO: 1243512 - RNA, 19 nt, Homo sapiens
  misc_RNA (1)...(19): siRNA sense strand
ugaccuauguucugaucaa

SEQ ID NO: 1243513 - RNA, 19 nt, Homo sapiens
  misc_RNA (1)...(19): siRNA sense strand
cccguuaccucacauuuga

SEQ ID NO: 1243514 - RNA, 19 nt, Homo sapiens
  misc_RNA (1)...(19): siRNA sense strand
gcuaugugcugagugaaga

SEQ ID NO: 1243515 - RNA, 19 nt, Homo sapiens
  misc_RNA (1)...(19): siRNA sense strand
caacaacgacuacuaugag

SEQ ID NO: 1243516 - RNA, 19 nt, Homo sapiens
  misc_RNA (1)...(19): siRNA sense strand
ugaaaccacuggccucaca

SEQ ID NO: 1243517 - RNA, 19 nt, Homo sapiens
  misc_RNA (1)...(19): siRNA sense strand
gagagugcauuuacagaac

SEQ ID NO: 1243518 - RNA, 19 nt, Homo sapiens
  misc_RNA (1)...(19): siRNA sense strand
ggacauugacccaaguugu

SEQ ID NO: 1243519 - RNA, 19 nt, Homo sapiens
  misc_RNA (1)...(19): siRNA sense strand
ugugggaacuucaaugaug

SEQ ID NO: 1243520 - RNA, 19 nt, Homo sapiens
  misc_RNA (1)...(19): siRNA sense strand
gaagggccaccgugugcua

SEQ ID NO: 1243521 - RNA, 19 nt, Homo sapiens
  misc_RNA (1)...(19): siRNA sense strand
caagaucagugccaagcau

SEQ ID NO: 1243522 - RNA, 19 nt, Homo sapiens
  misc_RNA (1)...(19): siRNA sense strand
gaacuaugacggcaacagu

SEQ ID NO: 1243523 - RNA, 19 nt, Homo sapiens
  misc_RNA (1)...(19): siRNA sense strand
caacucaacagacccauuc

SEQ ID NO: 1243524 - RNA, 19 nt, Homo sapiens
  misc_RNA (1)...(19): siRNA sense strand
cuacggagacccucauuau

SEQ ID NO: 1243525 - RNA, 19 nt, Homo sapiens
  misc_RNA (1)...(19): siRNA sense strand
agacuaccaucucuacaga

SEQ ID NO: 1243526 - RNA, 19 nt, Homo sapiens
  misc_RNA (1)...(19): siRNA sense strand
gaccaggagugucagaagu

SEQ ID NO: 1243527 - RNA, 19 nt, Homo sapiens
  misc_RNA (1)...(19): siRNA sense strand
ccgcaagaaugacaugaug

SEQ ID NO: 1243528 - RNA, 19 nt, Homo sapiens
  misc_RNA (1)...(19): siRNA sense strand
gugcaaacacccucuguga

SEQ ID NO: 1243529 - RNA, 19 nt, Homo sapiens
  misc_RNA (1)...(19): siRNA sense strand
gcccagcgaugaaguagca

SEQ ID NO: 1243530 - RNA, 19 nt, Homo sapiens
  misc_RNA (1)...(19): siRNA sense strand
gugggaacuucaaugauga

SEQ ID NO: 1243531 - RNA, 19 nt, Homo sapiens
  misc_RNA (1)...(19): siRNA sense strand
cagaaaggccacaucuuga

SEQ ID NO: 1243532 - RNA, 19 nt, Homo sapiens
  misc_RNA (1)...(19): siRNA sense strand
caacgcccaucccuucugu

SEQ ID NO: 1243533 - RNA, 19 nt, Homo sapiens
  misc_RNA (1)...(19): siRNA sense strand
gaugugcucuggaaacacu

SEQ ID NO: 1243534 - RNA, 19 nt, Homo sapiens
  misc_RNA (1)...(19): siRNA sense strand
guaaggucaugcugaaugg

SEQ ID NO: 1243535 - RNA, 19 nt, Homo sapiens
  misc_RNA (1)...(19): siRNA sense strand
acaaugaccaccugaaguu

SEQ ID NO: 1243536 - RNA, 19 nt, Homo sapiens
  misc_RNA (1)...(19): siRNA sense strand
gguuucaucuugaucaauc

SEQ ID NO: 1243537 - RNA, 19 nt, Homo sapiens
  misc_RNA (1)...(19): siRNA sense strand
gggaguauccggaaacaca

SEQ ID NO: 1243538 - RNA, 19 nt, Homo sapiens
  misc_RNA (1)...(19): siRNA sense strand
cagcuuugguggaaggaaa

SEQ ID NO: 1243539 - RNA, 19 nt, Homo sapiens
  misc_RNA (1)...(19): siRNA sense strand
uagcaaauagugacaguga

SEQ ID NO: 1243540 - RNA, 19 nt, Homo sapiens
  misc_RNA (1)...(19): siRNA sense strand
cugcaaacccaaccagaua

SEQ ID NO: 1243541 - RNA, 19 nt, Homo sapiens
  misc_RNA (1)...(19): siRNA sense strand
gcgaagccaugcccugaca

SEQ ID NO: 1243542 - RNA, 19 nt, Homo sapiens
  misc_RNA (1)...(19): siRNA sense strand
agacuaccaucuccacaga

SEQ ID NO: 1243543 - RNA, 19 nt, Homo sapiens
  misc_RNA (1)...(19): siRNA sense strand
agacuaccaucuccacaga

SEQ ID NO: 1243544 - RNA, 19 nt, Homo sapiens
  misc_RNA (1)...(19): siRNA sense strand
gaucaauccugggacuugu

SEQ ID NO: 1243545 - RNA, 19 nt, Homo sapiens
  misc_RNA (1)...(19): siRNA sense strand
gaagcaacacggccucugu

SEQ ID NO: 1243546 - RNA, 19 nt, Homo sapiens
  misc_RNA (1)...(19): siRNA sense strand
uaacggagagggcagcuau

SEQ ID NO: 1243547 - RNA, 19 nt, Homo sapiens
  misc_RNA (1)...(19): siRNA sense strand
caggagaacccgaguggaa

SEQ ID NO: 1243548 - RNA, 19 nt, Homo sapiens
  misc_RNA (1)...(19): siRNA sense strand
ugaggaagaggacgaacua

SEQ ID NO: 1243549 - RNA, 19 nt, Homo sapiens
  misc_RNA (1)...(19): siRNA sense strand
cuacagcauuguuaacauc

SEQ ID NO: 1243550 - RNA, 19 nt, Homo sapiens
  misc_RNA (1)...(19): siRNA sense strand
ccauaaggcucagcagcaa

SEQ ID NO: 1243551 - RNA, 19 nt, Homo sapiens
  misc_RNA (1)...(19): siRNA sense strand
ugaaagcaacaacagaauu

SEQ ID NO: 1243552 - RNA, 19 nt, Homo sapiens
  misc_RNA (1)...(19): siRNA sense strand
cuacaacaacgacuacuau

SEQ ID NO: 1243553 - RNA, 19 nt, Homo sapiens
  misc_RNA (1)...(19): siRNA sense strand
ccaaaugcccgcuacgaau

SEQ ID NO: 1243554 - RNA, 19 nt, Homo sapiens
  misc_RNA (1)...(19): siRNA sense strand
uucaugaggucuacauuga

SEQ ID NO: 1243555 - RNA, 19 nt, Homo sapiens
  misc_RNA (1)...(19): siRNA sense strand
caacagcaacagcaauugu

SEQ ID NO: 1243556 - RNA, 19 nt, Homo sapiens
  misc_RNA (1)...(19): siRNA sense strand
caugaggucuacauugaca

SEQ ID NO: 1243557 - RNA, 19 nt, Homo sapiens
  misc_RNA (1)...(19): siRNA sense strand
acugugcgaucuuaauaaa

SEQ ID NO: 1243558 - RNA, 19 nt, Homo sapiens
  misc_RNA (1)...(19): siRNA sense strand
cgacaagaaccgcaagaau

SEQ ID NO: 1243559 - RNA, 19 nt, Homo sapiens
  misc_RNA (1)...(19): siRNA sense strand
gaacuucaaugaugaggaa

SEQ ID NO: 1243560 - RNA, 19 nt, Homo sapiens
  misc_RNA (1)...(19): siRNA sense strand
gaaacacacucucuucuca

SEQ ID NO: 1243561 - RNA, 19 nt, Homo sapiens
  misc_RNA (1)...(19): siRNA sense strand
gugcagcccuccacauuua

SEQ ID NO: 1243562 - RNA, 19 nt, Homo sapiens
  misc_RNA (1)...(19): siRNA sense strand
gaacugugcgaucuuaaua

SEQ ID NO: 1243563 - RNA, 19 nt, Homo sapiens
  misc_RNA (1)...(19): siRNA sense strand
gaacaaugcucagucuaug

SEQ ID NO: 1243564 - RNA, 19 nt, Homo sapiens
  misc_RNA (1)...(19): siRNA sense strand
gaucaagacuguggacgua

SEQ ID NO: 1243565 - RNA, 19 nt, Homo sapiens
  misc_RNA (1)...(19): siRNA sense strand
ugacgggaaucaucucuua

SEQ ID NO: 1243566 - RNA, 19 nt, Homo sapiens
  misc_RNA (1)...(19): siRNA sense strand
ggaaagauaaggacauuga

SEQ ID NO: 1243567 - RNA, 19 nt, Homo sapiens
  misc_RNA (1)...(19): siRNA sense strand
caacagcaauugugucuca

SEQ ID NO: 1243568 - RNA, 19 nt, Homo sapiens
  misc_RNA (1)...(19): siRNA sense strand
gugaacaguuggaaagaua

SEQ ID NO: 1243569 - RNA, 19 nt, Homo sapiens
  misc_RNA (1)...(19): siRNA sense strand
caacagcccaugcagcuua

SEQ ID NO: 1243570 - RNA, 19 nt, Homo sapiens
  misc_RNA (1)...(19): siRNA sense strand
gaagaggacgaacuaauga

SEQ ID NO: 1243571 - RNA, 19 nt, Homo sapiens
  misc_RNA (1)...(19): siRNA sense strand
gcaauugcuucuacaacaa

SEQ ID NO: 1243572 - RNA, 19 nt, Homo sapiens
  misc_RNA (1)...(19): siRNA sense strand
gcagacgccuggaacaaga

SEQ ID NO: 1243573 - RNA, 19 nt, Homo sapiens
  misc_RNA (1)...(19): siRNA sense strand
ggaagaggacgaacuaaug

SEQ ID NO: 1243574 - RNA, 19 nt, Homo sapiens
  misc_RNA (1)...(19): siRNA sense strand
ggaaaggucugcggcaugu

SEQ ID NO: 1243575 - RNA, 19 nt, Homo sapiens
  misc_RNA (1)...(19): siRNA sense strand
gaaagcaacaacagaauuc

SEQ ID NO: 1243576 - RNA, 19 nt, Homo sapiens
  misc_RNA (1)...(19): siRNA sense strand
caaguggacucagaagaaa

SEQ ID NO: 1243577 - RNA, 19 nt, Homo sapiens
  misc_RNA (1)...(19): siRNA sense strand
ccaacaggaugguaucuau

SEQ ID NO: 1243578 - RNA, 19 nt, Homo sapiens
  misc_RNA (1)...(19): siRNA sense strand
gacaagaaccgcaagaaug

SEQ ID NO: 1243579 - RNA, 19 nt, Homo sapiens
  misc_RNA (1)...(19): siRNA sense strand
gcacacacauguccaccau

SEQ ID NO: 1243580 - RNA, 19 nt, Homo sapiens
  misc_RNA (1)...(19): siRNA sense strand
gcgaugaaguagcaaauag

SEQ ID NO: 1243581 - RNA, 19 nt, Homo sapiens
  misc_RNA (1)...(19): siRNA sense strand
gcuguaaggucaugcugaa

SEQ ID NO: 1243582 - RNA, 19 nt, Homo sapiens
  misc_RNA (1)...(19): siRNA sense strand
gcaaacacccucugugagu

SEQ ID NO: 1243583 - RNA, 19 nt, Homo sapiens
  misc_RNA (1)...(19): siRNA sense strand
ccacccggcugauguuuga

SEQ ID NO: 1243584 - RNA, 19 nt, Homo sapiens
  misc_RNA (1)...(19): siRNA sense strand
caagacagcuauuuuguug

SEQ ID NO: 1243585 - RNA, 19 nt, Homo sapiens
  misc_RNA (1)...(19): siRNA sense strand
gcuauggguuucaucuuga

SEQ ID NO: 1243586 - RNA, 19 nt, Homo sapiens
  misc_RNA (1)...(19): siRNA sense strand
caacacggccucugugguu

SEQ ID NO: 1243587 - RNA, 19 nt, Homo sapiens
  misc_RNA (1)...(19): siRNA sense strand
gaaaccaccaccucuguug

SEQ ID NO: 1243588 - RNA, 19 nt, Homo sapiens
  misc_RNA (1)...(19): siRNA sense strand
ucagaaaggccacaucuug

SEQ ID NO: 1243589 - RNA, 19 nt, Homo sapiens
  misc_RNA (1)...(19): siRNA sense strand
gcacuuugcccaccacaug

SEQ ID NO: 1243590 - RNA, 19 nt, Homo sapiens
  misc_RNA (1)...(19): siRNA sense strand
acaagaaccgcaagaauga

SEQ ID NO: 1243591 - RNA, 19 nt, Homo sapiens
  misc_RNA (1)...(19): siRNA sense strand
gcaaauagugacagugaau

SEQ ID NO: 1243592 - RNA, 19 nt, Homo sapiens
  misc_RNA (1)...(19): siRNA sense strand
aagaaagggucaucaggaa

SEQ ID NO: 1243593 - RNA, 19 nt, Homo sapiens
  misc_RNA (1)...(19): siRNA sense strand
ccaaguggacucagaagaa

SEQ ID NO: 1243594 - RNA, 19 nt, Homo sapiens
  misc_RNA (1)...(19): siRNA sense strand
gcugagggcugcauuuguc

SEQ ID NO: 1243595 - RNA, 19 nt, Homo sapiens
  misc_RNA (1)...(19): siRNA sense strand
gauacaguuugccguggua

SEQ ID NO: 1243596 - RNA, 19 nt, Homo sapiens
  misc_RNA (1)...(19): siRNA sense strand
gaaagggucaucaggaaag

SEQ ID NO: 1243597 - RNA, 19 nt, Homo sapiens
  misc_RNA (1)...(19): siRNA sense strand
gcugagagcugugaauguc

SEQ ID NO: 1243598 - RNA, 19 nt, Homo sapiens
  misc_RNA (1)...(19): siRNA sense strand
ggaguucgcauaccacaug

SEQ ID NO: 1243599 - RNA, 19 nt, Homo sapiens
  misc_RNA (1)...(19): siRNA sense strand
uacgugagcuuugauggua

SEQ ID NO: 1243600 - RNA, 19 nt, Homo sapiens
  misc_RNA (1)...(19): siRNA sense strand
caaacacccucugugaguu

SEQ ID NO: 1243601 - RNA, 19 nt, Homo sapiens
  misc_RNA (1)...(19): siRNA sense strand
gugaauuugugaacaguug

SEQ ID NO: 1243602 - RNA, 19 nt, Homo sapiens
  misc_RNA (1)...(19): siRNA sense strand
ccuacaaucuccaccaaga

SEQ ID NO: 1243603 - RNA, 19 nt, Homo sapiens
  misc_RNA (1)...(19): siRNA sense strand
gacaacagcaacagcaauu

SEQ ID NO: 1243604 - RNA, 19 nt, Homo sapiens
  misc_RNA (1)...(19): siRNA sense strand
uguaaucgcgucuguauga

SEQ ID NO: 1243605 - RNA, 19 nt, Homo sapiens
  misc_RNA (1)...(19): siRNA sense strand
ggaaggacgcaacaagaug

SEQ ID NO: 1243606 - RNA, 19 nt, Homo sapiens
  misc_RNA (1)...(19): siRNA sense strand
gcuuaagaauggccaguau

SEQ ID NO: 1243607 - RNA, 19 nt, Homo sapiens
  misc_RNA (1)...(19): siRNA sense strand
acuaucaucuccacagaaa

SEQ ID NO: 1243608 - RNA, 19 nt, Homo sapiens
  misc_RNA (1)...(19): siRNA sense strand
cauuuaugcuucagucuug

SEQ ID NO: 1243609 - RNA, 19 nt, Homo sapiens
  misc_RNA (1)...(19): siRNA sense strand
acagagcgcugcccuccaa

SEQ ID NO: 1243610 - RNA, 19 nt, Homo sapiens
  misc_RNA (1)...(19): siRNA sense strand
ugaccuauguucugaucaa

SEQ ID NO: 1243611 - RNA, 19 nt, Homo sapiens
  misc_RNA (1)...(19): siRNA sense strand
cccguuaccucacauuuga

SEQ ID NO: 1243612 - RNA, 19 nt, Homo sapiens
  misc_RNA (1)...(19): siRNA sense strand
gcuaugugcugagugaaga

SEQ ID NO: 1243613 - RNA, 19 nt, Homo sapiens
  misc_RNA (1)...(19): siRNA sense strand
caacaacgacuacuaugag

SEQ ID NO: 1243614 - RNA, 19 nt, Homo sapiens
  misc_RNA (1)...(19): siRNA sense strand
ugaaaccacuggccucaca

SEQ ID NO: 1243615 - RNA, 19 nt, Homo sapiens
  misc_RNA (1)...(19): siRNA sense strand
ggacauugacccaaguugu

SEQ ID NO: 1243616 - RNA, 19 nt, Homo sapiens
  misc_RNA (1)...(19): siRNA sense strand
ugugggaacuucaaugaug

SEQ ID NO: 1243617 - RNA, 19 nt, Homo sapiens
  misc_RNA (1)...(19): siRNA sense strand
gaagggccaccgugugcua

SEQ ID NO: 1243618 - RNA, 19 nt, Homo sapiens
  misc_RNA (1)...(19): siRNA sense strand
caagaucagugccaagcau

SEQ ID NO: 1243619 - RNA, 19 nt, Homo sapiens
  misc_RNA (1)...(19): siRNA sense strand
gaacuaugacggcaacagu

SEQ ID NO: 1243620 - RNA, 19 nt, Homo sapiens
  misc_RNA (1)...(19): siRNA sense strand
caacucaacagacccauuc

SEQ ID NO: 1243621 - RNA, 19 nt, Homo sapiens
  misc_RNA (1)...(19): siRNA sense strand
cuacggagacccucauuau

SEQ ID NO: 1243622 - RNA, 19 nt, Homo sapiens
  misc_RNA (1)...(19): siRNA sense strand
agacuaccaucucuacaga

SEQ ID NO: 1243623 - RNA, 19 nt, Homo sapiens
  misc_RNA (1)...(19): siRNA sense strand
gaccaggagugucagaagu

SEQ ID NO: 1243624 - RNA, 19 nt, Homo sapiens
  misc_RNA (1)...(19): siRNA sense strand
ccgcaagaaugacaugaug

SEQ ID NO: 1243625 - RNA, 19 nt, Homo sapiens
  misc_RNA (1)...(19): siRNA sense strand
gugcaaacacccucuguga

SEQ ID NO: 1243626 - RNA, 19 nt, Homo sapiens
  misc_RNA (1)...(19): siRNA sense strand
gcccagcgaugaaguagca

SEQ ID NO: 1243627 - RNA, 19 nt, Homo sapiens
  misc_RNA (1)...(19): siRNA sense strand
gugggaacuucaaugauga

SEQ ID NO: 1243628 - RNA, 19 nt, Homo sapiens
  misc_RNA (1)...(19): siRNA sense strand
cagaaaggccacaucuuga

SEQ ID NO: 1243629 - RNA, 19 nt, Homo sapiens
  misc_RNA (1)...(19): siRNA sense strand
caacgcccaucccuucugu

SEQ ID NO: 1243630 - RNA, 19 nt, Homo sapiens
  misc_RNA (1)...(19): siRNA sense strand
guaaggucaugcugaaugg

SEQ ID NO: 1243631 - RNA, 19 nt, Homo sapiens
  misc_RNA (1)...(19): siRNA sense strand
gaugugcucuggaaacacu

SEQ ID NO: 1243632 - RNA, 19 nt, Homo sapiens
  misc_RNA (1)...(19): siRNA sense strand
acaaugaccaccugaaguu

SEQ ID NO: 1243633 - RNA, 19 nt, Homo sapiens
  misc_RNA (1)...(19): siRNA sense strand
gguuucaucuugaucaauc

SEQ ID NO: 1243634 - RNA, 19 nt, Homo sapiens
  misc_RNA (1)...(19): siRNA sense strand
gggaguauccggaaacaca

SEQ ID NO: 1243635 - RNA, 19 nt, Homo sapiens
  misc_RNA (1)...(19): siRNA sense strand
cagcuuugguggaaggaaa

SEQ ID NO: 1243636 - RNA, 19 nt, Homo sapiens
  misc_RNA (1)...(19): siRNA sense strand
uagcaaauagugacaguga

SEQ ID NO: 1243637 - RNA, 19 nt, Homo sapiens
  misc_RNA (1)...(19): siRNA sense strand
cugcaaacccaaccagaua

SEQ ID NO: 1243638 - RNA, 19 nt, Homo sapiens
  misc_RNA (1)...(19): siRNA sense strand
gcgaagccaugcccugaca

SEQ ID NO: 1243639 - RNA, 19 nt, Homo sapiens
  misc_RNA (1)...(19): siRNA sense strand
agacuaccaucuccacaga

SEQ ID NO: 1243640 - RNA, 19 nt, Homo sapiens
  misc_RNA (1)...(19): siRNA sense strand
agacuaccaucuccacaga

SEQ ID NO: 1243641 - RNA, 19 nt, Homo sapiens
  misc_RNA (1)...(19): siRNA sense strand
gaucaauccugggacuugu

SEQ ID NO: 1243642 - RNA, 19 nt, Homo sapiens
  misc_RNA (1)...(19): siRNA sense strand
uaacggagagggcagcuau

SEQ ID NO: 1243643 - RNA, 19 nt, Homo sapiens
  misc_RNA (1)...(19): siRNA sense strand
caggagaacccgaguggaa

SEQ ID NO: 1243644 - RNA, 19 nt, Homo sapiens
  misc_RNA (1)...(19): siRNA sense strand
ugaggaagaggacgaacua

SEQ ID NO: 1243645 - RNA, 19 nt, Homo sapiens
  misc_RNA (1)...(19): siRNA sense strand
cuacagcauuguuaacauc

SEQ ID NO: 1243646 - RNA, 19 nt, Homo sapiens
  misc_RNA (1)...(19): siRNA sense strand
ccauaaggcucagcagcaa

SEQ ID NO: 1243647 - RNA, 19 nt, Homo sapiens
  misc_RNA (1)...(19): siRNA sense strand
ugaaagcaacaacagaauu

SEQ ID NO: 1243648 - RNA, 19 nt, Homo sapiens
  misc_RNA (1)...(19): siRNA sense strand
cuacaacaacgacuacuau

SEQ ID NO: 1243649 - RNA, 19 nt, Homo sapiens
  misc_RNA (1)...(19): siRNA sense strand
ccaaaugcccgcuacgaau

SEQ ID NO: 1243650 - RNA, 19 nt, Homo sapiens
  misc_RNA (1)...(19): siRNA sense strand
gaagcaacacggccucugu

SEQ ID NO: 1243651 - RNA, 19 nt, Homo sapiens
  misc_RNA (1)...(19): siRNA sense strand
uucaugaggucuacauuga

SEQ ID NO: 1243652 - RNA, 19 nt, Homo sapiens
  misc_RNA (1)...(19): siRNA sense strand
caacagcaacagcaauugu

SEQ ID NO: 1243653 - RNA, 19 nt, Homo sapiens
  misc_RNA (1)...(19): siRNA sense strand
caugaggucuacauugaca

SEQ ID NO: 1243654 - RNA, 19 nt, Homo sapiens
  misc_RNA (1)...(19): siRNA sense strand
ccacuggccucacagaaaa

SEQ ID NO: 1243655 - RNA, 19 nt, Homo sapiens
  misc_RNA (1)...(19): siRNA sense strand
cgacaagaaccgcaagaau

SEQ ID NO: 1243656 - RNA, 19 nt, Homo sapiens
  misc_RNA (1)...(19): siRNA sense strand
acugugcgaucuuaauaaa

SEQ ID NO: 1243657 - RNA, 19 nt, Homo sapiens
  misc_RNA (1)...(19): siRNA sense strand
gcacucuuguccuggugaa

SEQ ID NO: 1243658 - RNA, 19 nt, Homo sapiens
  misc_RNA (1)...(19): siRNA sense strand
gaugaaguagcaaauagug

SEQ ID NO: 1243659 - RNA, 19 nt, Homo sapiens
  misc_RNA (1)...(19): siRNA sense strand
gaacuucaaugaugaggaa

SEQ ID NO: 1243660 - RNA, 19 nt, Homo sapiens
  misc_RNA (1)...(19): siRNA sense strand
gaaacacacucucuucuca

SEQ ID NO: 1243661 - RNA, 19 nt, Homo sapiens
  misc_RNA (1)...(19): siRNA sense strand
gugcagcccuccacauuua

SEQ ID NO: 1243662 - RNA, 19 nt, Homo sapiens
  misc_RNA (1)...(19): siRNA sense strand
gaacugugcgaucuuaaua

SEQ ID NO: 1243663 - RNA, 19 nt, Homo sapiens
  misc_RNA (1)...(19): siRNA sense strand
gaacaaugcucagucuaug

SEQ ID NO: 1243664 - RNA, 19 nt, Homo sapiens
  misc_RNA (1)...(19): siRNA sense strand
gaucaagacuguggacgua

SEQ ID NO: 1243665 - RNA, 19 nt, Homo sapiens
  misc_RNA (1)...(19): siRNA sense strand
ugacgggaaucaucucuua

SEQ ID NO: 1243666 - RNA, 19 nt, Homo sapiens
  misc_RNA (1)...(19): siRNA sense strand
ggaaagauaaggacauuga

SEQ ID NO: 1243667 - RNA, 19 nt, Homo sapiens
  misc_RNA (1)...(19): siRNA sense strand
caacagcaauugugucuca

SEQ ID NO: 1243668 - RNA, 19 nt, Homo sapiens
  misc_RNA (1)...(19): siRNA sense strand
gugaacaguuggaaagaua

SEQ ID NO: 1243669 - RNA, 19 nt, Homo sapiens
  misc_RNA (1)...(19): siRNA sense strand
caacagcccaugcagcuua

SEQ ID NO: 1243670 - RNA, 19 nt, Homo sapiens
  misc_RNA (1)...(19): siRNA sense strand
gaagaggacgaacuaauga

SEQ ID NO: 1243671 - RNA, 19 nt, Homo sapiens
  misc_RNA (1)...(19): siRNA sense strand
gcaauugcuucuacaacaa

SEQ ID NO: 1243672 - RNA, 19 nt, Homo sapiens
  misc_RNA (1)...(19): siRNA sense strand
gcagacgccuggaacaaga

SEQ ID NO: 1243673 - RNA, 19 nt, Homo sapiens
  misc_RNA (1)...(19): siRNA sense strand
ggaagaggacgaacuaaug

SEQ ID NO: 1243674 - RNA, 19 nt, Homo sapiens
  misc_RNA (1)...(19): siRNA sense strand
ggaaaggucugcggcaugu

SEQ ID NO: 1243675 - RNA, 19 nt, Homo sapiens
  misc_RNA (1)...(19): siRNA sense strand
gaaagcaacaacagaauuc

SEQ ID NO: 1243676 - RNA, 19 nt, Homo sapiens
  misc_RNA (1)...(19): siRNA sense strand
caaguggacucagaagaaa

SEQ ID NO: 1243677 - RNA, 19 nt, Homo sapiens
  misc_RNA (1)...(19): siRNA sense strand
ccaacaggaugguaucuau

SEQ ID NO: 1243678 - RNA, 19 nt, Homo sapiens
  misc_RNA (1)...(19): siRNA sense strand
gacaagaaccgcaagaaug

SEQ ID NO: 1243679 - RNA, 19 nt, Homo sapiens
  misc_RNA (1)...(19): siRNA sense strand
gcacacacauguccaccau

SEQ ID NO: 1243680 - RNA, 19 nt, Homo sapiens
  misc_RNA (1)...(19): siRNA sense strand
gcgaugaaguagcaaauag

SEQ ID NO: 1243681 - RNA, 19 nt, Homo sapiens
  misc_RNA (1)...(19): siRNA sense strand
gcuguaaggucaugcugaa

SEQ ID NO: 1243682 - RNA, 19 nt, Homo sapiens
  misc_RNA (1)...(19): siRNA sense strand
gcaaacacccucugugagu

SEQ ID NO: 1243683 - RNA, 19 nt, Homo sapiens
  misc_RNA (1)...(19): siRNA sense strand
ccacccggcugauguuuga

SEQ ID NO: 1243684 - RNA, 19 nt, Homo sapiens
  misc_RNA (1)...(19): siRNA sense strand
caagacagcuauuuuguug

SEQ ID NO: 1243685 - RNA, 19 nt, Homo sapiens
  misc_RNA (1)...(19): siRNA sense strand
gcuauggguuucaucuuga

SEQ ID NO: 1243686 - RNA, 19 nt, Homo sapiens
  misc_RNA (1)...(19): siRNA sense strand
caacacggccucugugguu

SEQ ID NO: 1243687 - RNA, 19 nt, Homo sapiens
  misc_RNA (1)...(19): siRNA sense strand
gaaaccaccaccucuguug

SEQ ID NO: 1243688 - RNA, 19 nt, Homo sapiens
  misc_RNA (1)...(19): siRNA sense strand
ucagaaaggccacaucuug

SEQ ID NO: 1243689 - RNA, 19 nt, Homo sapiens
  misc_RNA (1)...(19): siRNA sense strand
gcacuuugcccaccacaug

SEQ ID NO: 1243690 - RNA, 19 nt, Homo sapiens
  misc_RNA (1)...(19): siRNA sense strand
acaagaaccgcaagaauga

SEQ ID NO: 1243691 - RNA, 19 nt, Homo sapiens
  misc_RNA (1)...(19): siRNA sense strand
gcaaauagugacagugaau

SEQ ID NO: 1243692 - RNA, 19 nt, Homo sapiens
  misc_RNA (1)...(19): siRNA sense strand
aagaaagggucaucaggaa

SEQ ID NO: 1243693 - RNA, 19 nt, Homo sapiens
  misc_RNA (1)...(19): siRNA sense strand
ccaaguggacucagaagaa

SEQ ID NO: 1243694 - RNA, 19 nt, Homo sapiens
  misc_RNA (1)...(19): siRNA sense strand
gcugagggcugcauuuguc

SEQ ID NO: 1243695 - RNA, 19 nt, Homo sapiens
  misc_RNA (1)...(19): siRNA sense strand
gauacaguuugccguggua

SEQ ID NO: 1243696 - RNA, 19 nt, Homo sapiens
  misc_RNA (1)...(19): siRNA sense strand
gaaagggucaucaggaaag

SEQ ID NO: 1243697 - RNA, 19 nt, Homo sapiens
  misc_RNA (1)...(19): siRNA sense strand
gcugagagcugugaauguc

SEQ ID NO: 1243698 - RNA, 19 nt, Homo sapiens
  misc_RNA (1)...(19): siRNA sense strand
ggaguucgcauaccacaug

SEQ ID NO: 1243699 - RNA, 19 nt, Homo sapiens
  misc_RNA (1)...(19): siRNA sense strand
uacgugagcuuugauggua

SEQ ID NO: 1243700 - RNA, 19 nt, Homo sapiens
  misc_RNA (1)...(19): siRNA sense strand
caaacacccucugugaguu

SEQ ID NO: 1243701 - RNA, 19 nt, Homo sapiens
  misc_RNA (1)...(19): siRNA sense strand
gugaauuugugaacaguug

SEQ ID NO: 1243702 - RNA, 19 nt, Homo sapiens
  misc_RNA (1)...(19): siRNA sense strand
ccuacaaucuccaccaaga

SEQ ID NO: 1243703 - RNA, 19 nt, Homo sapiens
  misc_RNA (1)...(19): siRNA sense strand
gacaacagcaacagcaauu

SEQ ID NO: 1243704 - RNA, 19 nt, Homo sapiens
  misc_RNA (1)...(19): siRNA sense strand
uguaaucgcgucuguauga

SEQ ID NO: 1243705 - RNA, 19 nt, Homo sapiens
  misc_RNA (1)...(19): siRNA sense strand
ggaaggacgcaacaagaug

SEQ ID NO: 1243706 - RNA, 19 nt, Homo sapiens
  misc_RNA (1)...(19): siRNA sense strand
gcuuaagaauggccaguau

SEQ ID NO: 1243707 - RNA, 19 nt, Homo sapiens
  misc_RNA (1)...(19): siRNA sense strand
acuaucaucuccacagaaa

SEQ ID NO: 1243708 - RNA, 19 nt, Homo sapiens
  misc_RNA (1)...(19): siRNA sense strand
cauuuaugcuucagucuug

SEQ ID NO: 1243709 - RNA, 19 nt, Homo sapiens
  misc_RNA (1)...(19): siRNA sense strand
acagagcgcugcccuccaa

SEQ ID NO: 1243710 - RNA, 19 nt, Homo sapiens
  misc_RNA (1)...(19): siRNA sense strand
ugaccuauguucugaucaa

SEQ ID NO: 1243711 - RNA, 19 nt, Homo sapiens
  misc_RNA (1)...(19): siRNA sense strand
cccguuaccucacauuuga

SEQ ID NO: 1243712 - RNA, 19 nt, Homo sapiens
  misc_RNA (1)...(19): siRNA sense strand
gcuaugugcugagugaaga

SEQ ID NO: 1243713 - RNA, 19 nt, Homo sapiens
  misc_RNA (1)...(19): siRNA sense strand
caacaacgacuacuaugag

SEQ ID NO: 1243714 - RNA, 19 nt, Homo sapiens
  misc_RNA (1)...(19): siRNA sense strand
ugaaaccacuggccucaca

SEQ ID NO: 1243715 - RNA, 19 nt, Homo sapiens
  misc_RNA (1)...(19): siRNA sense strand
ggacauugacccaaguugu

SEQ ID NO: 1243716 - RNA, 19 nt, Homo sapiens
  misc_RNA (1)...(19): siRNA sense strand
ugugggaacuucaaugaug

SEQ ID NO: 1243717 - RNA, 19 nt, Homo sapiens
  misc_RNA (1)...(19): siRNA sense strand
gaagggccaccgugugcua

SEQ ID NO: 1243718 - RNA, 19 nt, Homo sapiens
  misc_RNA (1)...(19): siRNA sense strand
caagaucagugccaagcau

SEQ ID NO: 1243719 - RNA, 19 nt, Homo sapiens
  misc_RNA (1)...(19): siRNA sense strand
gaacuaugacggcaacagu

SEQ ID NO: 1243720 - RNA, 19 nt, Homo sapiens
  misc_RNA (1)...(19): siRNA sense strand
caacucaacagacccauuc

SEQ ID NO: 1243721 - RNA, 19 nt, Homo sapiens
  misc_RNA (1)...(19): siRNA sense strand
cuacggagacccucauuau

SEQ ID NO: 1243722 - RNA, 19 nt, Homo sapiens
  misc_RNA (1)...(19): siRNA sense strand
agacuaccaucucuacaga

SEQ ID NO: 1243723 - RNA, 19 nt, Homo sapiens
  misc_RNA (1)...(19): siRNA sense strand
gaccaggagugucagaagu

SEQ ID NO: 1243724 - RNA, 19 nt, Homo sapiens
  misc_RNA (1)...(19): siRNA sense strand
ccgcaagaaugacaugaug

SEQ ID NO: 1243725 - RNA, 19 nt, Homo sapiens
  misc_RNA (1)...(19): siRNA sense strand
gugcaaacacccucuguga

SEQ ID NO: 1243726 - RNA, 19 nt, Homo sapiens
  misc_RNA (1)...(19): siRNA sense strand
gcccagcgaugaaguagca

SEQ ID NO: 1243727 - RNA, 19 nt, Homo sapiens
  misc_RNA (1)...(19): siRNA sense strand
gugggaacuucaaugauga

SEQ ID NO: 1243728 - RNA, 19 nt, Homo sapiens
  misc_RNA (1)...(19): siRNA sense strand
cagaaaggccacaucuuga

SEQ ID NO: 1243729 - RNA, 19 nt, Homo sapiens
  misc_RNA (1)...(19): siRNA sense strand
caacgcccaucccuucugu

SEQ ID NO: 1243730 - RNA, 19 nt, Homo sapiens
  misc_RNA (1)...(19): siRNA sense strand
guaaggucaugcugaaugg

SEQ ID NO: 1243731 - RNA, 19 nt, Homo sapiens
  misc_RNA (1)...(19): siRNA sense strand
gaugugcucuggaaacacu

SEQ ID NO: 1243732 - RNA, 19 nt, Homo sapiens
  misc_RNA (1)...(19): siRNA sense strand
acaaugaccaccugaaguu

SEQ ID NO: 1243733 - RNA, 19 nt, Homo sapiens
  misc_RNA (1)...(19): siRNA sense strand
gguuucaucuugaucaauc

SEQ ID NO: 1243734 - RNA, 19 nt, Homo sapiens
  misc_RNA (1)...(19): siRNA sense strand
gggaguauccggaaacaca

SEQ ID NO: 1243735 - RNA, 19 nt, Homo sapiens
  misc_RNA (1)...(19): siRNA sense strand
cagcuuugguggaaggaaa

SEQ ID NO: 1243736 - RNA, 19 nt, Homo sapiens
  misc_RNA (1)...(19): siRNA sense strand
uagcaaauagugacaguga

SEQ ID NO: 1243737 - RNA, 19 nt, Homo sapiens
  misc_RNA (1)...(19): siRNA sense strand
cugcaaacccaaccagaua

SEQ ID NO: 1243738 - RNA, 19 nt, Homo sapiens
  misc_RNA (1)...(19): siRNA sense strand
gcgaagccaugcccugaca

SEQ ID NO: 1243739 - RNA, 19 nt, Homo sapiens
  misc_RNA (1)...(19): siRNA sense strand
agacuaccaucuccacaga

SEQ ID NO: 1243740 - RNA, 19 nt, Homo sapiens
  misc_RNA (1)...(19): siRNA sense strand
agacuaccaucuccacaga

SEQ ID NO: 1243741 - RNA, 19 nt, Homo sapiens
  misc_RNA (1)...(19): siRNA sense strand
gaucaauccugggacuugu

SEQ ID NO: 1243742 - RNA, 19 nt, Homo sapiens
  misc_RNA (1)...(19): siRNA sense strand
uaacggagagggcagcuau

SEQ ID NO: 1243743 - RNA, 19 nt, Homo sapiens
  misc_RNA (1)...(19): siRNA sense strand
caggagaacccgaguggaa

SEQ ID NO: 1243744 - RNA, 19 nt, Homo sapiens
  misc_RNA (1)...(19): siRNA sense strand
ugaggaagaggacgaacua

SEQ ID NO: 1243745 - RNA, 19 nt, Homo sapiens
  misc_RNA (1)...(19): siRNA sense strand
cuacagcauuguuaacauc

SEQ ID NO: 1243746 - RNA, 19 nt, Homo sapiens
  misc_RNA (1)...(19): siRNA sense strand
ccauaaggcucagcagcaa

SEQ ID NO: 1243747 - RNA, 19 nt, Homo sapiens
  misc_RNA (1)...(19): siRNA sense strand
ugaaagcaacaacagaauu

SEQ ID NO: 1243748 - RNA, 19 nt, Homo sapiens
  misc_RNA (1)...(19): siRNA sense strand
cuacaacaacgacuacuau

SEQ ID NO: 1243749 - RNA, 19 nt, Homo sapiens
  misc_RNA (1)...(19): siRNA sense strand
ccaaaugcccgcuacgaau

SEQ ID NO: 1243750 - RNA, 19 nt, Homo sapiens
  misc_RNA (1)...(19): siRNA sense strand
gaagcaacacggccucugu

SEQ ID NO: 1243751 - RNA, 19 nt, Homo sapiens
  misc_RNA (1)...(19): siRNA sense strand
uucaugaggucuacauuga

SEQ ID NO: 1243752 - RNA, 19 nt, Homo sapiens
  misc_RNA (1)...(19): siRNA sense strand
caacagcaacagcaauugu

SEQ ID NO: 1243753 - RNA, 19 nt, Homo sapiens
  misc_RNA (1)...(19): siRNA sense strand
caugaggucuacauugaca

SEQ ID NO: 1243754 - RNA, 19 nt, Homo sapiens
  misc_RNA (1)...(19): siRNA sense strand
ccacuggccucacagaaaa

SEQ ID NO: 1243755 - RNA, 19 nt, Homo sapiens
  misc_RNA (1)...(19): siRNA sense strand
cgacaagaaccgcaagaau

SEQ ID NO: 1243756 - RNA, 19 nt, Homo sapiens
  misc_RNA (1)...(19): siRNA sense strand
acugugcgaucuuaauaaa

SEQ ID NO: 1243757 - RNA, 19 nt, Homo sapiens
  misc_RNA (1)...(19): siRNA sense strand
gcacucuuguccuggugaa

SEQ ID NO: 1243758 - RNA, 19 nt, Homo sapiens
  misc_RNA (1)...(19): siRNA sense strand
gaugaaguagcaaauagug

SEQ ID NO: 1243759 - RNA, 19 nt, Homo sapiens
  misc_RNA (1)...(19): siRNA sense strand
gaacuucaaugaugaggaa

SEQ ID NO: 1243760 - RNA, 19 nt, Homo sapiens
  misc_RNA (1)...(19): siRNA sense strand
gaaacacacucucuucuca

SEQ ID NO: 1243761 - RNA, 19 nt, Homo sapiens
  misc_RNA (1)...(19): siRNA sense strand
gugcagcccuccacauuua

SEQ ID NO: 1243762 - RNA, 19 nt, Homo sapiens
  misc_RNA (1)...(19): siRNA sense strand
gaacugugcgaucuuaaua

SEQ ID NO: 1243763 - RNA, 19 nt, Homo sapiens
  misc_RNA (1)...(19): siRNA sense strand
gaacaaugcucagucuaug

SEQ ID NO: 1243764 - RNA, 19 nt, Homo sapiens
  misc_RNA (1)...(19): siRNA sense strand
gaucaagacuguggacgua

SEQ ID NO: 1243765 - RNA, 19 nt, Homo sapiens
  misc_RNA (1)...(19): siRNA sense strand
ugacgggaaucaucucuua

SEQ ID NO: 1243766 - RNA, 19 nt, Homo sapiens
  misc_RNA (1)...(19): siRNA sense strand
ggaaagauaaggacauuga

SEQ ID NO: 1243767 - RNA, 19 nt, Homo sapiens
  misc_RNA (1)...(19): siRNA sense strand
caacagcaauugugucuca

SEQ ID NO: 1243768 - RNA, 19 nt, Homo sapiens
  misc_RNA (1)...(19): siRNA sense strand
gugaacaguuggaaagaua

SEQ ID NO: 1243769 - RNA, 19 nt, Homo sapiens
  misc_RNA (1)...(19): siRNA sense strand
caacagcccaugcagcuua

SEQ ID NO: 1243770 - RNA, 19 nt, Homo sapiens
  misc_RNA (1)...(19): siRNA sense strand
gaagaggacgaacuaauga

SEQ ID NO: 1243771 - RNA, 19 nt, Homo sapiens
  misc_RNA (1)...(19): siRNA sense strand
gcaauugcuucuacaacaa

SEQ ID NO: 1243772 - RNA, 19 nt, Homo sapiens
  misc_RNA (1)...(19): siRNA sense strand
gcagacgccuggaacaaga

SEQ ID NO: 1243773 - RNA, 19 nt, Homo sapiens
  misc_RNA (1)...(19): siRNA sense strand
ggaagaggacgaacuaaug

SEQ ID NO: 1243774 - RNA, 19 nt, Homo sapiens
  misc_RNA (1)...(19): siRNA sense strand
ggaaaggucugcggcaugu

SEQ ID NO: 1243775 - RNA, 19 nt, Homo sapiens
  misc_RNA (1)...(19): siRNA sense strand
gaaagcaacaacagaauuc

SEQ ID NO: 1243776 - RNA, 19 nt, Homo sapiens
  misc_RNA (1)...(19): siRNA sense strand
caaguggacucagaagaaa

SEQ ID NO: 1243777 - RNA, 19 nt, Homo sapiens
  misc_RNA (1)...(19): siRNA sense strand
ccaacaggaugguaucuau

SEQ ID NO: 1243778 - RNA, 19 nt, Homo sapiens
  misc_RNA (1)...(19): siRNA sense strand
gacaagaaccgcaagaaug

SEQ ID NO: 1243779 - RNA, 19 nt, Homo sapiens
  misc_RNA (1)...(19): siRNA sense strand
gcacacacauguccaccau

SEQ ID NO: 1243780 - RNA, 19 nt, Homo sapiens
  misc_RNA (1)...(19): siRNA sense strand
gcgaugaaguagcaaauag

SEQ ID NO: 1243781 - RNA, 19 nt, Homo sapiens
  misc_RNA (1)...(19): siRNA sense strand
gcuguaaggucaugcugaa

SEQ ID NO: 1243782 - RNA, 19 nt, Homo sapiens
  misc_RNA (1)...(19): siRNA sense strand
gcaaacacccucugugagu

SEQ ID NO: 1243783 - RNA, 19 nt, Homo sapiens
  misc_RNA (1)...(19): siRNA sense strand
ccacccggcugauguuuga

SEQ ID NO: 1243784 - RNA, 19 nt, Homo sapiens
  misc_RNA (1)...(19): siRNA sense strand
caagacagcuauuuuguug

SEQ ID NO: 1243785 - RNA, 19 nt, Homo sapiens
  misc_RNA (1)...(19): siRNA sense strand
gcuauggguuucaucuuga

SEQ ID NO: 1243786 - RNA, 19 nt, Homo sapiens
  misc_RNA (1)...(19): siRNA sense strand
caacacggccucugugguu

SEQ ID NO: 1243787 - RNA, 19 nt, Homo sapiens
  misc_RNA (1)...(19): siRNA sense strand
gaaaccaccaccucuguug

SEQ ID NO: 1243788 - RNA, 19 nt, Homo sapiens
  misc_RNA (1)...(19): siRNA sense strand
ucagaaaggccacaucuug

SEQ ID NO: 1243789 - RNA, 19 nt, Homo sapiens
  misc_RNA (1)...(19): siRNA sense strand
gcacuuugcccaccacaug

SEQ ID NO: 1243790 - RNA, 19 nt, Homo sapiens
  misc_RNA (1)...(19): siRNA sense strand
acaagaaccgcaagaauga

SEQ ID NO: 1243791 - RNA, 19 nt, Homo sapiens
  misc_RNA (1)...(19): siRNA sense strand
gcaaauagugacagugaau

SEQ ID NO: 1243792 - RNA, 19 nt, Homo sapiens
  misc_RNA (1)...(19): siRNA sense strand
aagaaagggucaucaggaa

SEQ ID NO: 1243793 - RNA, 19 nt, Homo sapiens
  misc_RNA (1)...(19): siRNA sense strand
ccaaguggacucagaagaa

SEQ ID NO: 1243794 - RNA, 19 nt, Homo sapiens
  misc_RNA (1)...(19): siRNA sense strand
gcugagggcugcauuuguc

SEQ ID NO: 1243795 - RNA, 19 nt, Homo sapiens
  misc_RNA (1)...(19): siRNA sense strand
gauacaguuugccguggua

SEQ ID NO: 1243796 - RNA, 19 nt, Homo sapiens
  misc_RNA (1)...(19): siRNA sense strand
gaaagggucaucaggaaag

SEQ ID NO: 1243797 - RNA, 19 nt, Homo sapiens
  misc_RNA (1)...(19): siRNA sense strand
gcugagagcugugaauguc

SEQ ID NO: 1243798 - RNA, 19 nt, Homo sapiens
  misc_RNA (1)...(19): siRNA sense strand
ggaguucgcauaccacaug

SEQ ID NO: 1243799 - RNA, 19 nt, Homo sapiens
  misc_RNA (1)...(19): siRNA sense strand
uacgugagcuuugauggua

SEQ ID NO: 1243800 - RNA, 19 nt, Homo sapiens
  misc_RNA (1)...(19): siRNA sense strand
caaacacccucugugaguu

SEQ ID NO: 1243801 - RNA, 19 nt, Homo sapiens
  misc_RNA (1)...(19): siRNA sense strand
gugaauuugugaacaguug

SEQ ID NO: 1243802 - RNA, 19 nt, Homo sapiens
  misc_RNA (1)...(19): siRNA sense strand
ccuacaaucuccaccaaga

SEQ ID NO: 1243803 - RNA, 19 nt, Homo sapiens
  misc_RNA (1)...(19): siRNA sense strand
gacaacagcaacagcaauu

SEQ ID NO: 1243804 - RNA, 19 nt, Homo sapiens
  misc_RNA (1)...(19): siRNA sense strand
uguaaucgcgucuguauga

SEQ ID NO: 1243805 - RNA, 19 nt, Homo sapiens
  misc_RNA (1)...(19): siRNA sense strand
ggaaggacgcaacaagaug

SEQ ID NO: 1243806 - RNA, 19 nt, Homo sapiens
  misc_RNA (1)...(19): siRNA sense strand
gcuuaagaauggccaguau

SEQ ID NO: 1243807 - RNA, 19 nt, Homo sapiens
  misc_RNA (1)...(19): siRNA sense strand
acuaucaucuccacagaaa

SEQ ID NO: 1243808 - RNA, 19 nt, Homo sapiens
  misc_RNA (1)...(19): siRNA sense strand
cauuuaugcuucagucuug

SEQ ID NO: 1243809 - RNA, 19 nt, Homo sapiens
  misc_RNA (1)...(19): siRNA sense strand
acagagcgcugcccuccaa

SEQ ID NO: 1243810 - RNA, 19 nt, Homo sapiens
  misc_RNA (1)...(19): siRNA sense strand
ugaccuauguucugaucaa

SEQ ID NO: 1243811 - RNA, 19 nt, Homo sapiens
  misc_RNA (1)...(19): siRNA sense strand
cccguuaccucacauuuga

SEQ ID NO: 1243812 - RNA, 19 nt, Homo sapiens
  misc_RNA (1)...(19): siRNA sense strand
gcuaugugcugagugaaga

SEQ ID NO: 1243813 - RNA, 19 nt, Homo sapiens
  misc_RNA (1)...(19): siRNA sense strand
caacaacgacuacuaugag

SEQ ID NO: 1243814 - RNA, 19 nt, Homo sapiens
  misc_RNA (1)...(19): siRNA sense strand
ugaaaccacuggccucaca

SEQ ID NO: 1243815 - RNA, 19 nt, Homo sapiens
  misc_RNA (1)...(19): siRNA sense strand
ggacauugacccaaguugu

SEQ ID NO: 1243816 - RNA, 19 nt, Homo sapiens
  misc_RNA (1)...(19): siRNA sense strand
ugugggaacuucaaugaug

SEQ ID NO: 1243817 - RNA, 19 nt, Homo sapiens
  misc_RNA (1)...(19): siRNA sense strand
gaagggccaccgugugcua

SEQ ID NO: 1243818 - RNA, 19 nt, Homo sapiens
  misc_RNA (1)...(19): siRNA sense strand
caagaucagugccaagcau

SEQ ID NO: 1243819 - RNA, 19 nt, Homo sapiens
  misc_RNA (1)...(19): siRNA sense strand
gaacuaugacggcaacagu

SEQ ID NO: 1243820 - RNA, 19 nt, Homo sapiens
  misc_RNA (1)...(19): siRNA sense strand
caacucaacagacccauuc

SEQ ID NO: 1243821 - RNA, 19 nt, Homo sapiens
  misc_RNA (1)...(19): siRNA sense strand
cuacggagacccucauuau

SEQ ID NO: 1243822 - RNA, 19 nt, Homo sapiens
  misc_RNA (1)...(19): siRNA sense strand
agacuaccaucucuacaga

SEQ ID NO: 1243823 - RNA, 19 nt, Homo sapiens
  misc_RNA (1)...(19): siRNA sense strand
gaccaggagugucagaagu

SEQ ID NO: 1243824 - RNA, 19 nt, Homo sapiens
  misc_RNA (1)...(19): siRNA sense strand
ccgcaagaaugacaugaug

SEQ ID NO: 1243825 - RNA, 19 nt, Homo sapiens
  misc_RNA (1)...(19): siRNA sense strand
gugcaaacacccucuguga

SEQ ID NO: 1243826 - RNA, 19 nt, Homo sapiens
  misc_RNA (1)...(19): siRNA sense strand
gcccagcgaugaaguagca

SEQ ID NO: 1243827 - RNA, 19 nt, Homo sapiens
  misc_RNA (1)...(19): siRNA sense strand
gugggaacuucaaugauga

SEQ ID NO: 1243828 - RNA, 19 nt, Homo sapiens
  misc_RNA (1)...(19): siRNA sense strand
cagaaaggccacaucuuga

SEQ ID NO: 1243829 - RNA, 19 nt, Homo sapiens
  misc_RNA (1)...(19): siRNA sense strand
caacgcccaucccuucugu

SEQ ID NO: 1243830 - RNA, 19 nt, Homo sapiens
  misc_RNA (1)...(19): siRNA sense strand
guaaggucaugcugaaugg

SEQ ID NO: 1243831 - RNA, 19 nt, Homo sapiens
  misc_RNA (1)...(19): siRNA sense strand
gaugugcucuggaaacacu

SEQ ID NO: 1243832 - RNA, 19 nt, Homo sapiens
  misc_RNA (1)...(19): siRNA sense strand
acaaugaccaccugaaguu

SEQ ID NO: 1243833 - RNA, 19 nt, Homo sapiens
  misc_RNA (1)...(19): siRNA sense strand
gguuucaucuugaucaauc

SEQ ID NO: 1243834 - RNA, 19 nt, Homo sapiens
  misc_RNA (1)...(19): siRNA sense strand
gggaguauccggaaacaca

SEQ ID NO: 1243835 - RNA, 19 nt, Homo sapiens
  misc_RNA (1)...(19): siRNA sense strand
cagcuuugguggaaggaaa

SEQ ID NO: 1243836 - RNA, 19 nt, Homo sapiens
  misc_RNA (1)...(19): siRNA sense strand
uagcaaauagugacaguga

SEQ ID NO: 1243837 - RNA, 19 nt, Homo sapiens
  misc_RNA (1)...(19): siRNA sense strand
cugcaaacccaaccagaua

SEQ ID NO: 1243838 - RNA, 19 nt, Homo sapiens
  misc_RNA (1)...(19): siRNA sense strand
gcgaagccaugcccugaca

SEQ ID NO: 1243839 - RNA, 19 nt, Homo sapiens
  misc_RNA (1)...(19): siRNA sense strand
agacuaccaucuccacaga

SEQ ID NO: 1243840 - RNA, 19 nt, Homo sapiens
  misc_RNA (1)...(19): siRNA sense strand
agacuaccaucuccacaga

SEQ ID NO: 1243841 - RNA, 19 nt, Homo sapiens
  misc_RNA (1)...(19): siRNA sense strand
gaucaauccugggacuugu

SEQ ID NO: 1243842 - RNA, 19 nt, Homo sapiens
  misc_RNA (1)...(19): siRNA sense strand
uaacggagagggcagcuau

SEQ ID NO: 1243843 - RNA, 19 nt, Homo sapiens
  misc_RNA (1)...(19): siRNA sense strand
caggagaacccgaguggaa

SEQ ID NO: 1243844 - RNA, 19 nt, Homo sapiens
  misc_RNA (1)...(19): siRNA sense strand
ugaggaagaggacgaacua

SEQ ID NO: 1243845 - RNA, 19 nt, Homo sapiens
  misc_RNA (1)...(19): siRNA sense strand
cuacagcauuguuaacauc

SEQ ID NO: 1243846 - RNA, 19 nt, Homo sapiens
  misc_RNA (1)...(19): siRNA sense strand
ccauaaggcucagcagcaa

SEQ ID NO: 1243847 - RNA, 19 nt, Homo sapiens
  misc_RNA (1)...(19): siRNA sense strand
ugaaagcaacaacagaauu

SEQ ID NO: 1243848 - RNA, 19 nt, Homo sapiens
  misc_RNA (1)...(19): siRNA sense strand
cuacaacaacgacuacuau

SEQ ID NO: 1243849 - RNA, 19 nt, Homo sapiens
  misc_RNA (1)...(19): siRNA sense strand
ccaaaugcccgcuacgaau

SEQ ID NO: 1243850 - RNA, 19 nt, Homo sapiens
  misc_RNA (1)...(19): siRNA sense strand
gaagcaacacggccucugu

SEQ ID NO: 1243851 - RNA, 19 nt, Homo sapiens
  misc_RNA (1)...(19): siRNA sense strand
uucaugaggucuacauuga

SEQ ID NO: 1243852 - RNA, 19 nt, Homo sapiens
  misc_RNA (1)...(19): siRNA sense strand
caacagcaacagcaauugu

SEQ ID NO: 1243853 - RNA, 19 nt, Homo sapiens
  misc_RNA (1)...(19): siRNA sense strand
caugaggucuacauugaca

SEQ ID NO: 1243854 - RNA, 19 nt, Homo sapiens
  misc_RNA (1)...(19): siRNA sense strand
ccacuggccucacagaaaa

SEQ ID NO: 1243855 - RNA, 19 nt, Homo sapiens
  misc_RNA (1)...(19): siRNA sense strand
cgacaagaaccgcaagaau

SEQ ID NO: 1243856 - RNA, 19 nt, Homo sapiens
  misc_RNA (1)...(19): siRNA sense strand
acugugcgaucuuaauaaa

SEQ ID NO: 1243857 - RNA, 19 nt, Homo sapiens
  misc_RNA (1)...(19): siRNA sense strand
gcacucuuguccuggugaa

SEQ ID NO: 1243858 - RNA, 19 nt, Homo sapiens
  misc_RNA (1)...(19): siRNA sense strand
gaugaaguagcaaauagug

SEQ ID NO: 1243859 - RNA, 19 nt, Homo sapiens
  misc_RNA (1)...(19): siRNA sense strand
gaacuucaaugaugaggaa

SEQ ID NO: 1243860 - RNA, 19 nt, Homo sapiens
  misc_RNA (1)...(19): siRNA sense strand
gaaacacacucucuucuca

SEQ ID NO: 1243861 - RNA, 19 nt, Homo sapiens
  misc_RNA (1)...(19): siRNA sense strand
gugcagcccuccacauuua

SEQ ID NO: 1243862 - RNA, 19 nt, Homo sapiens
  misc_RNA (1)...(19): siRNA sense strand
gaacugugcgaucuuaaua

SEQ ID NO: 1243863 - RNA, 19 nt, Homo sapiens
  misc_RNA (1)...(19): siRNA sense strand
gaacaaugcucagucuaug

SEQ ID NO: 1243864 - RNA, 19 nt, Homo sapiens
  misc_RNA (1)...(19): siRNA sense strand
gaucaagacuguggacgua

SEQ ID NO: 1243865 - RNA, 19 nt, Homo sapiens
  misc_RNA (1)...(19): siRNA sense strand
ugacgggaaucaucucuua

SEQ ID NO: 1243866 - RNA, 19 nt, Homo sapiens
  misc_RNA (1)...(19): siRNA sense strand
ggaaagauaaggacauuga

SEQ ID NO: 1243867 - RNA, 19 nt, Homo sapiens
  misc_RNA (1)...(19): siRNA sense strand
caacagcaauugugucuca

SEQ ID NO: 1243868 - RNA, 19 nt, Homo sapiens
  misc_RNA (1)...(19): siRNA sense strand
gugaacaguuggaaagaua

SEQ ID NO: 1243869 - RNA, 19 nt, Homo sapiens
  misc_RNA (1)...(19): siRNA sense strand
caacagcccaugcagcuua

SEQ ID NO: 1243870 - RNA, 19 nt, Homo sapiens
  misc_RNA (1)...(19): siRNA sense strand
gaagaggacgaacuaauga

SEQ ID NO: 1243871 - RNA, 19 nt, Homo sapiens
  misc_RNA (1)...(19): siRNA sense strand
gcaauugcuucuacaacaa

SEQ ID NO: 1243872 - RNA, 19 nt, Homo sapiens
  misc_RNA (1)...(19): siRNA sense strand
gcagacgccuggaacaaga

SEQ ID NO: 1243873 - RNA, 19 nt, Homo sapiens
  misc_RNA (1)...(19): siRNA sense strand
ggaagaggacgaacuaaug

SEQ ID NO: 1243874 - RNA, 19 nt, Homo sapiens
  misc_RNA (1)...(19): siRNA sense strand
ggaaaggucugcggcaugu

SEQ ID NO: 1243875 - RNA, 19 nt, Homo sapiens
  misc_RNA (1)...(19): siRNA sense strand
gaaagcaacaacagaauuc

SEQ ID NO: 1243876 - RNA, 19 nt, Homo sapiens
  misc_RNA (1)...(19): siRNA sense strand
caaguggacucagaagaaa

SEQ ID NO: 1243877 - RNA, 19 nt, Homo sapiens
  misc_RNA (1)...(19): siRNA sense strand
ccaacaggaugguaucuau

SEQ ID NO: 1243878 - RNA, 19 nt, Homo sapiens
  misc_RNA (1)...(19): siRNA sense strand
gacaagaaccgcaagaaug

SEQ ID NO: 1243879 - RNA, 19 nt, Homo sapiens
  misc_RNA (1)...(19): siRNA sense strand
gcacacacauguccaccau

SEQ ID NO: 1243880 - RNA, 19 nt, Homo sapiens
  misc_RNA (1)...(19): siRNA sense strand
gcgaugaaguagcaaauag

SEQ ID NO: 1243881 - RNA, 19 nt, Homo sapiens
  misc_RNA (1)...(19): siRNA sense strand
gcuguaaggucaugcugaa

SEQ ID NO: 1243882 - RNA, 19 nt, Homo sapiens
  misc_RNA (1)...(19): siRNA sense strand
gcaaacacccucugugagu

SEQ ID NO: 1243883 - RNA, 19 nt, Homo sapiens
  misc_RNA (1)...(19): siRNA sense strand
ccacccggcugauguuuga

SEQ ID NO: 1243884 - RNA, 19 nt, Homo sapiens
  misc_RNA (1)...(19): siRNA sense strand
caagacagcuauuuuguug

SEQ ID NO: 1243885 - RNA, 19 nt, Homo sapiens
  misc_RNA (1)...(19): siRNA sense strand
gcuauggguuucaucuuga

SEQ ID NO: 1243886 - RNA, 19 nt, Homo sapiens
  misc_RNA (1)...(19): siRNA sense strand
caacacggccucugugguu

SEQ ID NO: 1243887 - RNA, 19 nt, Homo sapiens
  misc_RNA (1)...(19): siRNA sense strand
gaaaccaccaccucuguug

SEQ ID NO: 1243888 - RNA, 19 nt, Homo sapiens
  misc_RNA (1)...(19): siRNA sense strand
ucagaaaggccacaucuug

SEQ ID NO: 1243889 - RNA, 19 nt, Homo sapiens
  misc_RNA (1)...(19): siRNA sense strand
gcacuuugcccaccacaug

SEQ ID NO: 1243890 - RNA, 19 nt, Homo sapiens
  misc_RNA (1)...(19): siRNA sense strand
acaagaaccgcaagaauga

SEQ ID NO: 1243891 - RNA, 19 nt, Homo sapiens
  misc_RNA (1)...(19): siRNA sense strand
gcaaauagugacagugaau

SEQ ID NO: 1243892 - RNA, 19 nt, Homo sapiens
  misc_RNA (1)...(19): siRNA sense strand
aagaaagggucaucaggaa

SEQ ID NO: 1243893 - RNA, 19 nt, Homo sapiens
  misc_RNA (1)...(19): siRNA sense strand
ccaaguggacucagaagaa

SEQ ID NO: 1243894 - RNA, 19 nt, Homo sapiens
  misc_RNA (1)...(19): siRNA sense strand
gcugagggcugcauuuguc

SEQ ID NO: 1243895 - RNA, 19 nt, Homo sapiens
  misc_RNA (1)...(19): siRNA sense strand
gauacaguuugccguggua

SEQ ID NO: 1243896 - RNA, 19 nt, Homo sapiens
  misc_RNA (1)...(19): siRNA sense strand
gaaagggucaucaggaaag

SEQ ID NO: 1243897 - RNA, 19 nt, Homo sapiens
  misc_RNA (1)...(19): siRNA sense strand
gcugagagcugugaauguc

SEQ ID NO: 1243898 - RNA, 19 nt, Homo sapiens
  misc_RNA (1)...(19): siRNA sense strand
ggaguucgcauaccacaug

SEQ ID NO: 1243899 - RNA, 19 nt, Homo sapiens
  misc_RNA (1)...(19): siRNA sense strand
uacgugagcuuugauggua

SEQ ID NO: 1243900 - RNA, 19 nt, Homo sapiens
  misc_RNA (1)...(19): siRNA sense strand
caaacacccucugugaguu

SEQ ID NO: 1243901 - RNA, 19 nt, Homo sapiens
  misc_RNA (1)...(19): siRNA sense strand
gugaauuugugaacaguug

SEQ ID NO: 1243902 - RNA, 19 nt, Homo sapiens
  misc_RNA (1)...(19): siRNA sense strand
ccuacaaucuccaccaaga

SEQ ID NO: 1243903 - RNA, 19 nt, Homo sapiens
  misc_RNA (1)...(19): siRNA sense strand
gacaacagcaacagcaauu

SEQ ID NO: 1243904 - RNA, 19 nt, Homo sapiens
  misc_RNA (1)...(19): siRNA sense strand
uguaaucgcgucuguauga

SEQ ID NO: 1243905 - RNA, 19 nt, Homo sapiens
  misc_RNA (1)...(19): siRNA sense strand
ggaaggacgcaacaagaug

SEQ ID NO: 1243906 - RNA, 19 nt, Homo sapiens
  misc_RNA (1)...(19): siRNA sense strand
gcuuaagaauggccaguau

SEQ ID NO: 1243907 - RNA, 19 nt, Homo sapiens
  misc_RNA (1)...(19): siRNA sense strand
acuaucaucuccacagaaa

SEQ ID NO: 1243908 - RNA, 19 nt, Homo sapiens
  misc_RNA (1)...(19): siRNA sense strand
cauuuaugcuucagucuug

SEQ ID NO: 1243909 - RNA, 19 nt, Homo sapiens
  misc_RNA (1)...(19): siRNA sense strand
acagagcgcugcccuccaa

SEQ ID NO: 1243910 - RNA, 19 nt, Homo sapiens
  misc_RNA (1)...(19): siRNA sense strand
ugaccuauguucugaucaa

SEQ ID NO: 1243911 - RNA, 19 nt, Homo sapiens
  misc_RNA (1)...(19): siRNA sense strand
cccguuaccucacauuuga

SEQ ID NO: 1243912 - RNA, 19 nt, Homo sapiens
  misc_RNA (1)...(19): siRNA sense strand
gcuaugugcugagugaaga

SEQ ID NO: 1243913 - RNA, 19 nt, Homo sapiens
  misc_RNA (1)...(19): siRNA sense strand
caacaacgacuacuaugag

SEQ ID NO: 1243914 - RNA, 19 nt, Homo sapiens
  misc_RNA (1)...(19): siRNA sense strand
ugaaaccacuggccucaca

SEQ ID NO: 1243915 - RNA, 19 nt, Homo sapiens
  misc_RNA (1)...(19): siRNA sense strand
ggacauugacccaaguugu

SEQ ID NO: 1243916 - RNA, 19 nt, Homo sapiens
  misc_RNA (1)...(19): siRNA sense strand
ugugggaacuucaaugaug

SEQ ID NO: 1243917 - RNA, 19 nt, Homo sapiens
  misc_RNA (1)...(19): siRNA sense strand
gaagggccaccgugugcua

SEQ ID NO: 1243918 - RNA, 19 nt, Homo sapiens
  misc_RNA (1)...(19): siRNA sense strand
caagaucagugccaagcau

SEQ ID NO: 1243919 - RNA, 19 nt, Homo sapiens
  misc_RNA (1)...(19): siRNA sense strand
gaacuaugacggcaacagu

SEQ ID NO: 1243920 - RNA, 19 nt, Homo sapiens
  misc_RNA (1)...(19): siRNA sense strand
caacucaacagacccauuc

SEQ ID NO: 1243921 - RNA, 19 nt, Homo sapiens
  misc_RNA (1)...(19): siRNA sense strand
cuacggagacccucauuau

SEQ ID NO: 1243922 - RNA, 19 nt, Homo sapiens
  misc_RNA (1)...(19): siRNA sense strand
agacuaccaucucuacaga

SEQ ID NO: 1243923 - RNA, 19 nt, Homo sapiens
  misc_RNA (1)...(19): siRNA sense strand
gaccaggagugucagaagu

SEQ ID NO: 1243924 - RNA, 19 nt, Homo sapiens
  misc_RNA (1)...(19): siRNA sense strand
ccgcaagaaugacaugaug

SEQ ID NO: 1243925 - RNA, 19 nt, Homo sapiens
  misc_RNA (1)...(19): siRNA sense strand
gugcaaacacccucuguga

SEQ ID NO: 1243926 - RNA, 19 nt, Homo sapiens
  misc_RNA (1)...(19): siRNA sense strand
gcccagcgaugaaguagca

SEQ ID NO: 1243927 - RNA, 19 nt, Homo sapiens
  misc_RNA (1)...(19): siRNA sense strand
gugggaacuucaaugauga

SEQ ID NO: 1243928 - RNA, 19 nt, Homo sapiens
  misc_RNA (1)...(19): siRNA sense strand
cagaaaggccacaucuuga

SEQ ID NO: 1243929 - RNA, 19 nt, Homo sapiens
  misc_RNA (1)...(19): siRNA sense strand
caacgcccaucccuucugu

SEQ ID NO: 1243930 - RNA, 19 nt, Homo sapiens
  misc_RNA (1)...(19): siRNA sense strand
guaaggucaugcugaaugg

SEQ ID NO: 1243931 - RNA, 19 nt, Homo sapiens
  misc_RNA (1)...(19): siRNA sense strand
gaugugcucuggaaacacu

SEQ ID NO: 1243932 - RNA, 19 nt, Homo sapiens
  misc_RNA (1)...(19): siRNA sense strand
acaaugaccaccugaaguu

SEQ ID NO: 1243933 - RNA, 19 nt, Homo sapiens
  misc_RNA (1)...(19): siRNA sense strand
gguuucaucuugaucaauc

SEQ ID NO: 1243934 - RNA, 19 nt, Homo sapiens
  misc_RNA (1)...(19): siRNA sense strand
gggaguauccggaaacaca

SEQ ID NO: 1243935 - RNA, 19 nt, Homo sapiens
  misc_RNA (1)...(19): siRNA sense strand
cagcuuugguggaaggaaa

SEQ ID NO: 1243936 - RNA, 19 nt, Homo sapiens
  misc_RNA (1)...(19): siRNA sense strand
uagcaaauagugacaguga

SEQ ID NO: 1243937 - RNA, 19 nt, Homo sapiens
  misc_RNA (1)...(19): siRNA sense strand
cugcaaacccaaccagaua

SEQ ID NO: 1243938 - RNA, 19 nt, Homo sapiens
  misc_RNA (1)...(19): siRNA sense strand
gcgaagccaugcccugaca

SEQ ID NO: 1243939 - RNA, 19 nt, Homo sapiens
  misc_RNA (1)...(19): siRNA sense strand
agacuaccaucuccacaga

SEQ ID NO: 1243940 - RNA, 19 nt, Homo sapiens
  misc_RNA (1)...(19): siRNA sense strand
agacuaccaucuccacaga

SEQ ID NO: 1243941 - RNA, 19 nt, Homo sapiens
  misc_RNA (1)...(19): siRNA sense strand
gaucaauccugggacuugu

SEQ ID NO: 1243942 - RNA, 19 nt, Homo sapiens
  misc_RNA (1)...(19): siRNA sense strand
uaacggagagggcagcuau

SEQ ID NO: 1243943 - RNA, 19 nt, Homo sapiens
  misc_RNA (1)...(19): siRNA sense strand
caggagaacccgaguggaa

SEQ ID NO: 1243944 - RNA, 19 nt, Homo sapiens
  misc_RNA (1)...(19): siRNA sense strand
ugaggaagaggacgaacua

SEQ ID NO: 1243945 - RNA, 19 nt, Homo sapiens
  misc_RNA (1)...(19): siRNA sense strand
cuacagcauuguuaacauc

SEQ ID NO: 1243946 - RNA, 19 nt, Homo sapiens
  misc_RNA (1)...(19): siRNA sense strand
ccauaaggcucagcagcaa

SEQ ID NO: 1243947 - RNA, 19 nt, Homo sapiens
  misc_RNA (1)...(19): siRNA sense strand
ugaaagcaacaacagaauu

SEQ ID NO: 1243948 - RNA, 19 nt, Homo sapiens
  misc_RNA (1)...(19): siRNA sense strand
cuacaacaacgacuacuau

SEQ ID NO: 1243949 - RNA, 19 nt, Homo sapiens
  misc_RNA (1)...(19): siRNA sense strand
ccaaaugcccgcuacgaau

SEQ ID NO: 1243950 - RNA, 19 nt, Homo sapiens
  misc_RNA (1)...(19): siRNA sense strand
gaagcaacacggccucugu

SEQ ID NO: 1243951 - RNA, 19 nt, Homo sapiens
  misc_RNA (1)...(19): siRNA sense strand
uucaugaggucuacauuga

SEQ ID NO: 1243952 - RNA, 19 nt, Homo sapiens
  misc_RNA (1)...(19): siRNA sense strand
caacagcaacagcaauugu

SEQ ID NO: 1243953 - RNA, 19 nt, Homo sapiens
  misc_RNA (1)...(19): siRNA sense strand
caugaggucuacauugaca

SEQ ID NO: 1243954 - RNA, 19 nt, Homo sapiens
  misc_RNA (1)...(19): siRNA sense strand
ccacuggccucacagaaaa

SEQ ID NO: 1243955 - RNA, 19 nt, Homo sapiens
  misc_RNA (1)...(19): siRNA sense strand
cgacaagaaccgcaagaau

SEQ ID NO: 1243956 - RNA, 19 nt, Homo sapiens
  misc_RNA (1)...(19): siRNA sense strand
acugugcgaucuuaauaaa

SEQ ID NO: 1243957 - RNA, 19 nt, Homo sapiens
  misc_RNA (1)...(19): siRNA sense strand
gcacucuuguccuggugaa

SEQ ID NO: 1243958 - RNA, 19 nt, Homo sapiens
  misc_RNA (1)...(19): siRNA sense strand
gaugaaguagcaaauagug

SEQ ID NO: 1243959 - RNA, 19 nt, Homo sapiens
  misc_RNA (1)...(19): siRNA sense strand
gaacuucaaugaugaggaa

SEQ ID NO: 1243960 - RNA, 19 nt, Homo sapiens
  misc_RNA (1)...(19): siRNA sense strand
gaaacacacucucuucuca

SEQ ID NO: 1243961 - RNA, 19 nt, Homo sapiens
  misc_RNA (1)...(19): siRNA sense strand
gugcagcccuccacauuua

SEQ ID NO: 1243962 - RNA, 19 nt, Homo sapiens
  misc_RNA (1)...(19): siRNA sense strand
gaacugugcgaucuuaaua

SEQ ID NO: 1243963 - RNA, 19 nt, Homo sapiens
  misc_RNA (1)...(19): siRNA sense strand
gaacaaugcucagucuaug

SEQ ID NO: 1243964 - RNA, 19 nt, Homo sapiens
  misc_RNA (1)...(19): siRNA sense strand
gaucaagacuguggacgua

SEQ ID NO: 1243965 - RNA, 19 nt, Homo sapiens
  misc_RNA (1)...(19): siRNA sense strand
ugacgggaaucaucucuua

SEQ ID NO: 1243966 - RNA, 19 nt, Homo sapiens
  misc_RNA (1)...(19): siRNA sense strand
ggaaagauaaggacauuga

SEQ ID NO: 1243967 - RNA, 19 nt, Homo sapiens
  misc_RNA (1)...(19): siRNA sense strand
caacagcaauugugucuca

SEQ ID NO: 1243968 - RNA, 19 nt, Homo sapiens
  misc_RNA (1)...(19): siRNA sense strand
gugaacaguuggaaagaua

SEQ ID NO: 1243969 - RNA, 19 nt, Homo sapiens
  misc_RNA (1)...(19): siRNA sense strand
ccagaaagccagcaucuaa

SEQ ID NO: 1243970 - RNA, 19 nt, Homo sapiens
  misc_RNA (1)...(19): siRNA sense strand
caacagcccaugcagcuua

SEQ ID NO: 1243971 - RNA, 19 nt, Homo sapiens
  misc_RNA (1)...(19): siRNA sense strand
gaagaggacgaacuaauga

SEQ ID NO: 1243972 - RNA, 19 nt, Homo sapiens
  misc_RNA (1)...(19): siRNA sense strand
gcaauugcuucuacaacaa

SEQ ID NO: 1243973 - RNA, 19 nt, Homo sapiens
  misc_RNA (1)...(19): siRNA sense strand
gcagacgccuggaacaaga

SEQ ID NO: 1243974 - RNA, 19 nt, Homo sapiens
  misc_RNA (1)...(19): siRNA sense strand
ggaagaggacgaacuaaug

SEQ ID NO: 1243975 - RNA, 19 nt, Homo sapiens
  misc_RNA (1)...(19): siRNA sense strand
ggaaaggucugcggcaugu

SEQ ID NO: 1243976 - RNA, 19 nt, Homo sapiens
  misc_RNA (1)...(19): siRNA sense strand
gaaagcaacaacagaauuc

SEQ ID NO: 1243977 - RNA, 19 nt, Homo sapiens
  misc_RNA (1)...(19): siRNA sense strand
caaguggacucagaagaaa

SEQ ID NO: 1243978 - RNA, 19 nt, Homo sapiens
  misc_RNA (1)...(19): siRNA sense strand
ccaacaggaugguaucuau

SEQ ID NO: 1243979 - RNA, 19 nt, Homo sapiens
  misc_RNA (1)...(19): siRNA sense strand
gacaagaaccgcaagaaug

SEQ ID NO: 1243980 - RNA, 19 nt, Homo sapiens
  misc_RNA (1)...(19): siRNA sense strand
gcacacacauguccaccau

SEQ ID NO: 1243981 - RNA, 19 nt, Homo sapiens
  misc_RNA (1)...(19): siRNA sense strand
gaacgaggaggaagagaga

SEQ ID NO: 1243982 - RNA, 19 nt, Homo sapiens
  misc_RNA (1)...(19): siRNA sense strand
gcgaugaaguagcaaauag

SEQ ID NO: 1243983 - RNA, 19 nt, Homo sapiens
  misc_RNA (1)...(19): siRNA sense strand
gcuguaaggucaugcugaa

SEQ ID NO: 1243984 - RNA, 19 nt, Homo sapiens
  misc_RNA (1)...(19): siRNA sense strand
gcaaacacccucugugagu

SEQ ID NO: 1243985 - RNA, 19 nt, Homo sapiens
  misc_RNA (1)...(19): siRNA sense strand
ccacccggcugauguuuga

SEQ ID NO: 1243986 - RNA, 19 nt, Homo sapiens
  misc_RNA (1)...(19): siRNA sense strand
caagacagcuauuuuguug

SEQ ID NO: 1243987 - RNA, 19 nt, Homo sapiens
  misc_RNA (1)...(19): siRNA sense strand
gcuauggguuucaucuuga

SEQ ID NO: 1243988 - RNA, 19 nt, Homo sapiens
  misc_RNA (1)...(19): siRNA sense strand
caacacggccucugugguu

SEQ ID NO: 1243989 - RNA, 19 nt, Homo sapiens
  misc_RNA (1)...(19): siRNA sense strand
gaaaccaccaccucuguug

SEQ ID NO: 1243990 - RNA, 19 nt, Homo sapiens
  misc_RNA (1)...(19): siRNA sense strand
ucagaaaggccacaucuug

SEQ ID NO: 1243991 - RNA, 19 nt, Homo sapiens
  misc_RNA (1)...(19): siRNA sense strand
gcacuuugcccaccacaug

SEQ ID NO: 1243992 - RNA, 19 nt, Homo sapiens
  misc_RNA (1)...(19): siRNA sense strand
acaagaaccgcaagaauga

SEQ ID NO: 1243993 - RNA, 19 nt, Homo sapiens
  misc_RNA (1)...(19): siRNA sense strand
gcaaauagugacagugaau

SEQ ID NO: 1243994 - RNA, 19 nt, Homo sapiens
  misc_RNA (1)...(19): siRNA sense strand
aagaaagggucaucaggaa

SEQ ID NO: 1243995 - RNA, 19 nt, Homo sapiens
  misc_RNA (1)...(19): siRNA sense strand
ccaaguggacucagaagaa

SEQ ID NO: 1243996 - RNA, 19 nt, Homo sapiens
  misc_RNA (1)...(19): siRNA sense strand
gcugagggcugcauuuguc

SEQ ID NO: 1243997 - RNA, 19 nt, Homo sapiens
  misc_RNA (1)...(19): siRNA sense strand
gauacaguuugccguggua

SEQ ID NO: 1243998 - RNA, 19 nt, Homo sapiens
  misc_RNA (1)...(19): siRNA sense strand
gaaagggucaucaggaaag

SEQ ID NO: 1243999 - RNA, 19 nt, Homo sapiens
  misc_RNA (1)...(19): siRNA sense strand
gcugagagcugugaauguc

SEQ ID NO: 1244000 - RNA, 19 nt, Homo sapiens
  misc_RNA (1)...(19): siRNA sense strand
ggaguucgcauaccacaug

SEQ ID NO: 1244001 - RNA, 19 nt, Homo sapiens
  misc_RNA (1)...(19): siRNA sense strand
uacgugagcuuugauggua

SEQ ID NO: 1244002 - RNA, 19 nt, Homo sapiens
  misc_RNA (1)...(19): siRNA sense strand
caaacacccucugugaguu

SEQ ID NO: 1244003 - RNA, 19 nt, Homo sapiens
  misc_RNA (1)...(19): siRNA sense strand
gugaauuugugaacaguug

SEQ ID NO: 1244004 - RNA, 19 nt, Homo sapiens
  misc_RNA (1)...(19): siRNA sense strand
ccuacaaucuccaccaaga

SEQ ID NO: 1244005 - RNA, 19 nt, Homo sapiens
  misc_RNA (1)...(19): siRNA sense strand
gacaacagcaacagcaauu

SEQ ID NO: 1244006 - RNA, 19 nt, Homo sapiens
  misc_RNA (1)...(19): siRNA sense strand
uguaaucgcgucuguauga

SEQ ID NO: 1244007 - RNA, 19 nt, Homo sapiens
  misc_RNA (1)...(19): siRNA sense strand
ggaaggacgcaacaagaug

SEQ ID NO: 1244008 - RNA, 19 nt, Homo sapiens
  misc_RNA (1)...(19): siRNA sense strand
gcuuaagaauggccaguau

SEQ ID NO: 1244009 - RNA, 19 nt, Homo sapiens
  misc_RNA (1)...(19): siRNA sense strand
acuaucaucuccacagaaa

SEQ ID NO: 1244010 - RNA, 19 nt, Homo sapiens
  misc_RNA (1)...(19): siRNA sense strand
cauuuaugcuucagucuug

SEQ ID NO: 1244011 - RNA, 19 nt, Homo sapiens
  misc_RNA (1)...(19): siRNA sense strand
acagagcgcugcccuccaa

SEQ ID NO: 1244012 - RNA, 19 nt, Homo sapiens
  misc_RNA (1)...(19): siRNA sense strand
ugaccuauguucugaucaa

SEQ ID NO: 1244013 - RNA, 19 nt, Homo sapiens
  misc_RNA (1)...(19): siRNA sense strand
cccguuaccucacauuuga

SEQ ID NO: 1244014 - RNA, 19 nt, Homo sapiens
  misc_RNA (1)...(19): siRNA sense strand
gcuaugugcugagugaaga

SEQ ID NO: 1244015 - RNA, 19 nt, Homo sapiens
  misc_RNA (1)...(19): siRNA sense strand
caacaacgacuacuaugag

SEQ ID NO: 1244016 - RNA, 19 nt, Homo sapiens
  misc_RNA (1)...(19): siRNA sense strand
ugaaaccacuggccucaca

SEQ ID NO: 1244017 - RNA, 19 nt, Homo sapiens
  misc_RNA (1)...(19): siRNA sense strand
gagagugcauuuacagaac

SEQ ID NO: 1244018 - RNA, 19 nt, Homo sapiens
  misc_RNA (1)...(19): siRNA sense strand
ggacauugacccaaguugu

SEQ ID NO: 1244019 - RNA, 19 nt, Homo sapiens
  misc_RNA (1)...(19): siRNA sense strand
ugugggaacuucaaugaug

SEQ ID NO: 1244020 - RNA, 19 nt, Homo sapiens
  misc_RNA (1)...(19): siRNA sense strand
gaagggccaccgugugcua

SEQ ID NO: 1244021 - RNA, 19 nt, Homo sapiens
  misc_RNA (1)...(19): siRNA sense strand
caagaucagugccaagcau

SEQ ID NO: 1244022 - RNA, 19 nt, Homo sapiens
  misc_RNA (1)...(19): siRNA sense strand
gaacuaugacggcaacagu

SEQ ID NO: 1244023 - RNA, 19 nt, Homo sapiens
  misc_RNA (1)...(19): siRNA sense strand
caacucaacagacccauuc

SEQ ID NO: 1244024 - RNA, 19 nt, Homo sapiens
  misc_RNA (1)...(19): siRNA sense strand
cuacggagacccucauuau

SEQ ID NO: 1244025 - RNA, 19 nt, Homo sapiens
  misc_RNA (1)...(19): siRNA sense strand
agacuaccaucucuacaga

SEQ ID NO: 1244026 - RNA, 19 nt, Homo sapiens
  misc_RNA (1)...(19): siRNA sense strand
gaccaggagugucagaagu

SEQ ID NO: 1244027 - RNA, 19 nt, Homo sapiens
  misc_RNA (1)...(19): siRNA sense strand
ccgcaagaaugacaugaug

SEQ ID NO: 1244028 - RNA, 19 nt, Homo sapiens
  misc_RNA (1)...(19): siRNA sense strand
gugcaaacacccucuguga

SEQ ID NO: 1244029 - RNA, 19 nt, Homo sapiens
  misc_RNA (1)...(19): siRNA sense strand
gcccagcgaugaaguagca

SEQ ID NO: 1244030 - RNA, 19 nt, Homo sapiens
  misc_RNA (1)...(19): siRNA sense strand
gugggaacuucaaugauga

SEQ ID NO: 1244031 - RNA, 19 nt, Homo sapiens
  misc_RNA (1)...(19): siRNA sense strand
cagaaaggccacaucuuga

SEQ ID NO: 1244032 - RNA, 19 nt, Homo sapiens
  misc_RNA (1)...(19): siRNA sense strand
caacgcccaucccuucugu

SEQ ID NO: 1244033 - RNA, 19 nt, Homo sapiens
  misc_RNA (1)...(19): siRNA sense strand
gaugugcucuggaaacacu

SEQ ID NO: 1244034 - RNA, 19 nt, Homo sapiens
  misc_RNA (1)...(19): siRNA sense strand
guaaggucaugcugaaugg

SEQ ID NO: 1244035 - RNA, 19 nt, Homo sapiens
  misc_RNA (1)...(19): siRNA sense strand
acaaugaccaccugaaguu

SEQ ID NO: 1244036 - RNA, 19 nt, Homo sapiens
  misc_RNA (1)...(19): siRNA sense strand
gguuucaucuugaucaauc

SEQ ID NO: 1244037 - RNA, 19 nt, Homo sapiens
  misc_RNA (1)...(19): siRNA sense strand
gggaguauccggaaacaca

SEQ ID NO: 1244038 - RNA, 19 nt, Homo sapiens
  misc_RNA (1)...(19): siRNA sense strand
cagcuuugguggaaggaaa

SEQ ID NO: 1244039 - RNA, 19 nt, Homo sapiens
  misc_RNA (1)...(19): siRNA sense strand
uagcaaauagugacaguga

SEQ ID NO: 1244040 - RNA, 19 nt, Homo sapiens
  misc_RNA (1)...(19): siRNA sense strand
cugcaaacccaaccagaua

SEQ ID NO: 1244041 - RNA, 19 nt, Homo sapiens
  misc_RNA (1)...(19): siRNA sense strand
gcgaagccaugcccugaca

SEQ ID NO: 1244042 - RNA, 19 nt, Homo sapiens
  misc_RNA (1)...(19): siRNA sense strand
agacuaccaucuccacaga

SEQ ID NO: 1244043 - RNA, 19 nt, Homo sapiens
  misc_RNA (1)...(19): siRNA sense strand
agacuaccaucuccacaga

SEQ ID NO: 1244044 - RNA, 19 nt, Homo sapiens
  misc_RNA (1)...(19): siRNA sense strand
gaucaauccugggacuugu

SEQ ID NO: 1244045 - RNA, 19 nt, Homo sapiens
  misc_RNA (1)...(19): siRNA sense strand
gaagcaacacggccucugu

SEQ ID NO: 1244046 - RNA, 19 nt, Homo sapiens
  misc_RNA (1)...(19): siRNA sense strand
uaacggagagggcagcuau

SEQ ID NO: 1244047 - RNA, 19 nt, Homo sapiens
  misc_RNA (1)...(19): siRNA sense strand
caggagaacccgaguggaa

SEQ ID NO: 1244048 - RNA, 19 nt, Homo sapiens
  misc_RNA (1)...(19): siRNA sense strand
ugaggaagaggacgaacua

SEQ ID NO: 1244049 - RNA, 19 nt, Homo sapiens
  misc_RNA (1)...(19): siRNA sense strand
cuacagcauuguuaacauc

SEQ ID NO: 1244050 - RNA, 19 nt, Homo sapiens
  misc_RNA (1)...(19): siRNA sense strand
ccauaaggcucagcagcaa

SEQ ID NO: 1244051 - RNA, 19 nt, Homo sapiens
  misc_RNA (1)...(19): siRNA sense strand
ugaaagcaacaacagaauu

SEQ ID NO: 1244052 - RNA, 19 nt, Homo sapiens
  misc_RNA (1)...(19): siRNA sense strand
cuacaacaacgacuacuau

SEQ ID NO: 1244053 - RNA, 19 nt, Homo sapiens
  misc_RNA (1)...(19): siRNA sense strand
ccaaaugcccgcuacgaau

SEQ ID NO: 1244054 - RNA, 19 nt, Homo sapiens
  misc_RNA (1)...(19): siRNA sense strand
uucaugaggucuacauuga

SEQ ID NO: 1244055 - RNA, 19 nt, Homo sapiens
  misc_RNA (1)...(19): siRNA sense strand
caacagcaacagcaauugu

SEQ ID NO: 1244056 - RNA, 19 nt, Homo sapiens
  misc_RNA (1)...(19): siRNA sense strand
caugaggucuacauugaca

SEQ ID NO: 1244057 - RNA, 19 nt, Homo sapiens
  misc_RNA (1)...(19): siRNA sense strand
acugugcgaucuuaauaaa

SEQ ID NO: 1244058 - RNA, 19 nt, Homo sapiens
  misc_RNA (1)...(19): siRNA sense strand
cgacaagaaccgcaagaau

SEQ ID NO: 1244059 - RNA, 19 nt, Homo sapiens
  misc_RNA (1)...(19): siRNA sense strand
gaacuucaaugaugaggaa

SEQ ID NO: 1244060 - RNA, 19 nt, Homo sapiens
  misc_RNA (1)...(19): siRNA sense strand
gaaacacacucucuucuca

SEQ ID NO: 1244061 - RNA, 19 nt, Homo sapiens
  misc_RNA (1)...(19): siRNA sense strand
gugcagcccuccacauuua

SEQ ID NO: 1244062 - RNA, 19 nt, Homo sapiens
  misc_RNA (1)...(19): siRNA sense strand
gaacugugcgaucuuaaua

SEQ ID NO: 1244063 - RNA, 19 nt, Homo sapiens
  misc_RNA (1)...(19): siRNA sense strand
gaacaaugcucagucuaug

SEQ ID NO: 1244064 - RNA, 19 nt, Homo sapiens
  misc_RNA (1)...(19): siRNA sense strand
gaucaagacuguggacgua

SEQ ID NO: 1244065 - RNA, 19 nt, Homo sapiens
  misc_RNA (1)...(19): siRNA sense strand
ugacgggaaucaucucuua

SEQ ID NO: 1244066 - RNA, 19 nt, Homo sapiens
  misc_RNA (1)...(19): siRNA sense strand
ggaaagauaaggacauuga

SEQ ID NO: 1244067 - RNA, 19 nt, Homo sapiens
  misc_RNA (1)...(19): siRNA sense strand
caacagcaauugugucuca

SEQ ID NO: 1244068 - RNA, 19 nt, Homo sapiens
  misc_RNA (1)...(19): siRNA sense strand
gugaacaguuggaaagaua

SEQ ID NO: 1244069 - RNA, 19 nt, Homo sapiens
  misc_RNA (1)...(19): siRNA sense strand
ccagaaagccagcaucuaa

SEQ ID NO: 1244070 - RNA, 19 nt, Homo sapiens
  misc_RNA (1)...(19): siRNA sense strand
caacagcccaugcagcuua

SEQ ID NO: 1244071 - RNA, 19 nt, Homo sapiens
  misc_RNA (1)...(19): siRNA sense strand
gaagaggacgaacuaauga

SEQ ID NO: 1244072 - RNA, 19 nt, Homo sapiens
  misc_RNA (1)...(19): siRNA sense strand
gcaauugcuucuacaacaa

SEQ ID NO: 1244073 - RNA, 19 nt, Homo sapiens
  misc_RNA (1)...(19): siRNA sense strand
gcagacgccuggaacaaga

SEQ ID NO: 1244074 - RNA, 19 nt, Homo sapiens
  misc_RNA (1)...(19): siRNA sense strand
ggaagaggacgaacuaaug

SEQ ID NO: 1244075 - RNA, 19 nt, Homo sapiens
  misc_RNA (1)...(19): siRNA sense strand
ggaaaggucugcggcaugu

SEQ ID NO: 1244076 - RNA, 19 nt, Homo sapiens
  misc_RNA (1)...(19): siRNA sense strand
gaaagcaacaacagaauuc

SEQ ID NO: 1244077 - RNA, 19 nt, Homo sapiens
  misc_RNA (1)...(19): siRNA sense strand
caaguggacucagaagaaa

SEQ ID NO: 1244078 - RNA, 19 nt, Homo sapiens
  misc_RNA (1)...(19): siRNA sense strand
ccaacaggaugguaucuau

SEQ ID NO: 1244079 - RNA, 19 nt, Homo sapiens
  misc_RNA (1)...(19): siRNA sense strand
gacaagaaccgcaagaaug

SEQ ID NO: 1244080 - RNA, 19 nt, Homo sapiens
  misc_RNA (1)...(19): siRNA sense strand
gcacacacauguccaccau

SEQ ID NO: 1244081 - RNA, 19 nt, Homo sapiens
  misc_RNA (1)...(19): siRNA sense strand
gaacgaggaggaagagaga

SEQ ID NO: 1244082 - RNA, 19 nt, Homo sapiens
  misc_RNA (1)...(19): siRNA sense strand
gcgaugaaguagcaaauag

SEQ ID NO: 1244083 - RNA, 19 nt, Homo sapiens
  misc_RNA (1)...(19): siRNA sense strand
gcuguaaggucaugcugaa

SEQ ID NO: 1244084 - RNA, 19 nt, Homo sapiens
  misc_RNA (1)...(19): siRNA sense strand
gcaaacacccucugugagu

SEQ ID NO: 1244085 - RNA, 19 nt, Homo sapiens
  misc_RNA (1)...(19): siRNA sense strand
ccacccggcugauguuuga

SEQ ID NO: 1244086 - RNA, 19 nt, Homo sapiens
  misc_RNA (1)...(19): siRNA sense strand
caagacagcuauuuuguug

SEQ ID NO: 1244087 - RNA, 19 nt, Homo sapiens
  misc_RNA (1)...(19): siRNA sense strand
gcuauggguuucaucuuga

SEQ ID NO: 1244088 - RNA, 19 nt, Homo sapiens
  misc_RNA (1)...(19): siRNA sense strand
caacacggccucugugguu

SEQ ID NO: 1244089 - RNA, 19 nt, Homo sapiens
  misc_RNA (1)...(19): siRNA sense strand
gaaaccaccaccucuguug

SEQ ID NO: 1244090 - RNA, 19 nt, Homo sapiens
  misc_RNA (1)...(19): siRNA sense strand
ucagaaaggccacaucuug

SEQ ID NO: 1244091 - RNA, 19 nt, Homo sapiens
  misc_RNA (1)...(19): siRNA sense strand
gcacuuugcccaccacaug

SEQ ID NO: 1244092 - RNA, 19 nt, Homo sapiens
  misc_RNA (1)...(19): siRNA sense strand
acaagaaccgcaagaauga

SEQ ID NO: 1244093 - RNA, 19 nt, Homo sapiens
  misc_RNA (1)...(19): siRNA sense strand
gcaaauagugacagugaau

SEQ ID NO: 1244094 - RNA, 19 nt, Homo sapiens
  misc_RNA (1)...(19): siRNA sense strand
aagaaagggucaucaggaa

SEQ ID NO: 1244095 - RNA, 19 nt, Homo sapiens
  misc_RNA (1)...(19): siRNA sense strand
ccaaguggacucagaagaa

SEQ ID NO: 1244096 - RNA, 19 nt, Homo sapiens
  misc_RNA (1)...(19): siRNA sense strand
gcugagggcugcauuuguc

SEQ ID NO: 1244097 - RNA, 19 nt, Homo sapiens
  misc_RNA (1)...(19): siRNA sense strand
gauacaguuugccguggua

SEQ ID NO: 1244098 - RNA, 19 nt, Homo sapiens
  misc_RNA (1)...(19): siRNA sense strand
gaaagggucaucaggaaag

SEQ ID NO: 1244099 - RNA, 19 nt, Homo sapiens
  misc_RNA (1)...(19): siRNA sense strand
gcugagagcugugaauguc

SEQ ID NO: 1244100 - RNA, 19 nt, Homo sapiens
  misc_RNA (1)...(19): siRNA sense strand
ggaguucgcauaccacaug

SEQ ID NO: 1244101 - RNA, 19 nt, Homo sapiens
  misc_RNA (1)...(19): siRNA sense strand
uacgugagcuuugauggua

SEQ ID NO: 1244102 - RNA, 19 nt, Homo sapiens
  misc_RNA (1)...(19): siRNA sense strand
caaacacccucugugaguu

SEQ ID NO: 1244103 - RNA, 19 nt, Homo sapiens
  misc_RNA (1)...(19): siRNA sense strand
gugaauuugugaacaguug

SEQ ID NO: 1244104 - RNA, 19 nt, Homo sapiens
  misc_RNA (1)...(19): siRNA sense strand
ccuacaaucuccaccaaga

SEQ ID NO: 1244105 - RNA, 19 nt, Homo sapiens
  misc_RNA (1)...(19): siRNA sense strand
gacaacagcaacagcaauu

SEQ ID NO: 1244106 - RNA, 19 nt, Homo sapiens
  misc_RNA (1)...(19): siRNA sense strand
uguaaucgcgucuguauga

SEQ ID NO: 1244107 - RNA, 19 nt, Homo sapiens
  misc_RNA (1)...(19): siRNA sense strand
ggaaggacgcaacaagaug

SEQ ID NO: 1244108 - RNA, 19 nt, Homo sapiens
  misc_RNA (1)...(19): siRNA sense strand
gcuuaagaauggccaguau

SEQ ID NO: 1244109 - RNA, 19 nt, Homo sapiens
  misc_RNA (1)...(19): siRNA sense strand
acuaucaucuccacagaaa

SEQ ID NO: 1244110 - RNA, 19 nt, Homo sapiens
  misc_RNA (1)...(19): siRNA sense strand
cauuuaugcuucagucuug

SEQ ID NO: 1244111 - RNA, 19 nt, Homo sapiens
  misc_RNA (1)...(19): siRNA sense strand
acagagcgcugcccuccaa

SEQ ID NO: 1244112 - RNA, 19 nt, Homo sapiens
  misc_RNA (1)...(19): siRNA sense strand
ugaccuauguucugaucaa

SEQ ID NO: 1244113 - RNA, 19 nt, Homo sapiens
  misc_RNA (1)...(19): siRNA sense strand
cccguuaccucacauuuga

SEQ ID NO: 1244114 - RNA, 19 nt, Homo sapiens
  misc_RNA (1)...(19): siRNA sense strand
gcuaugugcugagugaaga

SEQ ID NO: 1244115 - RNA, 19 nt, Homo sapiens
  misc_RNA (1)...(19): siRNA sense strand
caacaacgacuacuaugag

SEQ ID NO: 1244116 - RNA, 19 nt, Homo sapiens
  misc_RNA (1)...(19): siRNA sense strand
ugaaaccacuggccucaca

SEQ ID NO: 1244117 - RNA, 19 nt, Homo sapiens
  misc_RNA (1)...(19): siRNA sense strand
gagagugcauuuacagaac

SEQ ID NO: 1244118 - RNA, 19 nt, Homo sapiens
  misc_RNA (1)...(19): siRNA sense strand
ggacauugacccaaguugu

SEQ ID NO: 1244119 - RNA, 19 nt, Homo sapiens
  misc_RNA (1)...(19): siRNA sense strand
ugugggaacuucaaugaug

SEQ ID NO: 1244120 - RNA, 19 nt, Homo sapiens
  misc_RNA (1)...(19): siRNA sense strand
gaagggccaccgugugcua

SEQ ID NO: 1244121 - RNA, 19 nt, Homo sapiens
  misc_RNA (1)...(19): siRNA sense strand
caagaucagugccaagcau

SEQ ID NO: 1244122 - RNA, 19 nt, Homo sapiens
  misc_RNA (1)...(19): siRNA sense strand
gaacuaugacggcaacagu

SEQ ID NO: 1244123 - RNA, 19 nt, Homo sapiens
  misc_RNA (1)...(19): siRNA sense strand
caacucaacagacccauuc

SEQ ID NO: 1244124 - RNA, 19 nt, Homo sapiens
  misc_RNA (1)...(19): siRNA sense strand
cuacggagacccucauuau

SEQ ID NO: 1244125 - RNA, 19 nt, Homo sapiens
  misc_RNA (1)...(19): siRNA sense strand
agacuaccaucucuacaga

SEQ ID NO: 1244126 - RNA, 19 nt, Homo sapiens
  misc_RNA (1)...(19): siRNA sense strand
gaccaggagugucagaagu

SEQ ID NO: 1244127 - RNA, 19 nt, Homo sapiens
  misc_RNA (1)...(19): siRNA sense strand
ccgcaagaaugacaugaug

SEQ ID NO: 1244128 - RNA, 19 nt, Homo sapiens
  misc_RNA (1)...(19): siRNA sense strand
gugcaaacacccucuguga

SEQ ID NO: 1244129 - RNA, 19 nt, Homo sapiens
  misc_RNA (1)...(19): siRNA sense strand
gcccagcgaugaaguagca

SEQ ID NO: 1244130 - RNA, 19 nt, Homo sapiens
  misc_RNA (1)...(19): siRNA sense strand
gugggaacuucaaugauga

SEQ ID NO: 1244131 - RNA, 19 nt, Homo sapiens
  misc_RNA (1)...(19): siRNA sense strand
cagaaaggccacaucuuga

SEQ ID NO: 1244132 - RNA, 19 nt, Homo sapiens
  misc_RNA (1)...(19): siRNA sense strand
caacgcccaucccuucugu

SEQ ID NO: 1244133 - RNA, 19 nt, Homo sapiens
  misc_RNA (1)...(19): siRNA sense strand
gaugugcucuggaaacacu

SEQ ID NO: 1244134 - RNA, 19 nt, Homo sapiens
  misc_RNA (1)...(19): siRNA sense strand
guaaggucaugcugaaugg

SEQ ID NO: 1244135 - RNA, 19 nt, Homo sapiens
  misc_RNA (1)...(19): siRNA sense strand
acaaugaccaccugaaguu

SEQ ID NO: 1244136 - RNA, 19 nt, Homo sapiens
  misc_RNA (1)...(19): siRNA sense strand
gguuucaucuugaucaauc

SEQ ID NO: 1244137 - RNA, 19 nt, Homo sapiens
  misc_RNA (1)...(19): siRNA sense strand
gggaguauccggaaacaca

SEQ ID NO: 1244138 - RNA, 19 nt, Homo sapiens
  misc_RNA (1)...(19): siRNA sense strand
cagcuuugguggaaggaaa

SEQ ID NO: 1244139 - RNA, 19 nt, Homo sapiens
  misc_RNA (1)...(19): siRNA sense strand
uagcaaauagugacaguga

SEQ ID NO: 1244140 - RNA, 19 nt, Homo sapiens
  misc_RNA (1)...(19): siRNA sense strand
cugcaaacccaaccagaua

SEQ ID NO: 1244141 - RNA, 19 nt, Homo sapiens
  misc_RNA (1)...(19): siRNA sense strand
gcgaagccaugcccugaca

SEQ ID NO: 1244142 - RNA, 19 nt, Homo sapiens
  misc_RNA (1)...(19): siRNA sense strand
agacuaccaucuccacaga

SEQ ID NO: 1244143 - RNA, 19 nt, Homo sapiens
  misc_RNA (1)...(19): siRNA sense strand
agacuaccaucuccacaga

SEQ ID NO: 1244144 - RNA, 19 nt, Homo sapiens
  misc_RNA (1)...(19): siRNA sense strand
gaucaauccugggacuugu

SEQ ID NO: 1244145 - RNA, 19 nt, Homo sapiens
  misc_RNA (1)...(19): siRNA sense strand
gaagcaacacggccucugu

SEQ ID NO: 1244146 - RNA, 19 nt, Homo sapiens
  misc_RNA (1)...(19): siRNA sense strand
uaacggagagggcagcuau

SEQ ID NO: 1244147 - RNA, 19 nt, Homo sapiens
  misc_RNA (1)...(19): siRNA sense strand
caggagaacccgaguggaa

SEQ ID NO: 1244148 - RNA, 19 nt, Homo sapiens
  misc_RNA (1)...(19): siRNA sense strand
ugaggaagaggacgaacua

SEQ ID NO: 1244149 - RNA, 19 nt, Homo sapiens
  misc_RNA (1)...(19): siRNA sense strand
cuacagcauuguuaacauc

SEQ ID NO: 1244150 - RNA, 19 nt, Homo sapiens
  misc_RNA (1)...(19): siRNA sense strand
ccauaaggcucagcagcaa

SEQ ID NO: 1244151 - RNA, 19 nt, Homo sapiens
  misc_RNA (1)...(19): siRNA sense strand
ugaaagcaacaacagaauu

SEQ ID NO: 1244152 - RNA, 19 nt, Homo sapiens
  misc_RNA (1)...(19): siRNA sense strand
cuacaacaacgacuacuau

SEQ ID NO: 1244153 - RNA, 19 nt, Homo sapiens
  misc_RNA (1)...(19): siRNA sense strand
ccaaaugcccgcuacgaau

SEQ ID NO: 1244154 - RNA, 19 nt, Homo sapiens
  misc_RNA (1)...(19): siRNA sense strand
uucaugaggucuacauuga

SEQ ID NO: 1244155 - RNA, 19 nt, Homo sapiens
  misc_RNA (1)...(19): siRNA sense strand
caacagcaacagcaauugu

SEQ ID NO: 1244156 - RNA, 19 nt, Homo sapiens
  misc_RNA (1)...(19): siRNA sense strand
caugaggucuacauugaca

SEQ ID NO: 1244157 - RNA, 19 nt, Homo sapiens
  misc_RNA (1)...(19): siRNA sense strand
acugugcgaucuuaauaaa

SEQ ID NO: 1244158 - RNA, 19 nt, Homo sapiens
  misc_RNA (1)...(19): siRNA sense strand
cgacaagaaccgcaagaau

SEQ ID NO: 1244159 - RNA, 19 nt, Homo sapiens
  misc_RNA (1)...(19): siRNA sense strand
gaacuucaaugaugaggaa

SEQ ID NO: 1244160 - RNA, 19 nt, Homo sapiens
  misc_RNA (1)...(19): siRNA sense strand
gaaacacacucucuucuca

SEQ ID NO: 1244161 - RNA, 19 nt, Homo sapiens
  misc_RNA (1)...(19): siRNA sense strand
gugcagcccuccacauuua

SEQ ID NO: 1244162 - RNA, 19 nt, Homo sapiens
  misc_RNA (1)...(19): siRNA sense strand
gaacugugcgaucuuaaua

SEQ ID NO: 1244163 - RNA, 19 nt, Homo sapiens
  misc_RNA (1)...(19): siRNA sense strand
gaacaaugcucagucuaug

SEQ ID NO: 1244164 - RNA, 19 nt, Homo sapiens
  misc_RNA (1)...(19): siRNA sense strand
gaucaagacuguggacgua

SEQ ID NO: 1244165 - RNA, 19 nt, Homo sapiens
  misc_RNA (1)...(19): siRNA sense strand
ugacgggaaucaucucuua

SEQ ID NO: 1244166 - RNA, 19 nt, Homo sapiens
  misc_RNA (1)...(19): siRNA sense strand
ggaaagauaaggacauuga

SEQ ID NO: 1244167 - RNA, 19 nt, Homo sapiens
  misc_RNA (1)...(19): siRNA sense strand
caacagcaauugugucuca

SEQ ID NO: 1244168 - RNA, 19 nt, Homo sapiens
  misc_RNA (1)...(19): siRNA sense strand
gugaacaguuggaaagaua

SEQ ID NO: 1244169 - RNA, 19 nt, Homo sapiens
  misc_RNA (1)...(19): siRNA sense strand
caacagcccaugcagcuua

SEQ ID NO: 1244170 - RNA, 19 nt, Homo sapiens
  misc_RNA (1)...(19): siRNA sense strand
gaagaggacgaacuaauga

SEQ ID NO: 1244171 - RNA, 19 nt, Homo sapiens
  misc_RNA (1)...(19): siRNA sense strand
gcaauugcuucuacaacaa

SEQ ID NO: 1244172 - RNA, 19 nt, Homo sapiens
  misc_RNA (1)...(19): siRNA sense strand
gcagacgccuggaacaaga

SEQ ID NO: 1244173 - RNA, 19 nt, Homo sapiens
  misc_RNA (1)...(19): siRNA sense strand
ggaagaggacgaacuaaug

SEQ ID NO: 1244174 - RNA, 19 nt, Homo sapiens
  misc_RNA (1)...(19): siRNA sense strand
ggaaaggucugcggcaugu

SEQ ID NO: 1244175 - RNA, 19 nt, Homo sapiens
  misc_RNA (1)...(19): siRNA sense strand
gaaagcaacaacagaauuc

SEQ ID NO: 1244176 - RNA, 19 nt, Homo sapiens
  misc_RNA (1)...(19): siRNA sense strand
caaguggacucagaagaaa

SEQ ID NO: 1244177 - RNA, 19 nt, Homo sapiens
  misc_RNA (1)...(19): siRNA sense strand
ccaacaggaugguaucuau

SEQ ID NO: 1244178 - RNA, 19 nt, Homo sapiens
  misc_RNA (1)...(19): siRNA sense strand
gacaagaaccgcaagaaug

SEQ ID NO: 1244179 - RNA, 19 nt, Homo sapiens
  misc_RNA (1)...(19): siRNA sense strand
gcacacacauguccaccau

SEQ ID NO: 1244180 - RNA, 19 nt, Homo sapiens
  misc_RNA (1)...(19): siRNA sense strand
gcgaugaaguagcaaauag

SEQ ID NO: 1244181 - RNA, 19 nt, Homo sapiens
  misc_RNA (1)...(19): siRNA sense strand
gcuguaaggucaugcugaa

SEQ ID NO: 1244182 - RNA, 19 nt, Homo sapiens
  misc_RNA (1)...(19): siRNA sense strand
gcaaacacccucugugagu

SEQ ID NO: 1244183 - RNA, 19 nt, Homo sapiens
  misc_RNA (1)...(19): siRNA sense strand
ccacccggcugauguuuga

SEQ ID NO: 1244184 - RNA, 19 nt, Homo sapiens
  misc_RNA (1)...(19): siRNA sense strand
caagacagcuauuuuguug

SEQ ID NO: 1244185 - RNA, 19 nt, Homo sapiens
  misc_RNA (1)...(19): siRNA sense strand
gcuauggguuucaucuuga

SEQ ID NO: 1244186 - RNA, 19 nt, Homo sapiens
  misc_RNA (1)...(19): siRNA sense strand
caacacggccucugugguu

SEQ ID NO: 1244187 - RNA, 19 nt, Homo sapiens
  misc_RNA (1)...(19): siRNA sense strand
gaaaccaccaccucuguug

SEQ ID NO: 1244188 - RNA, 19 nt, Homo sapiens
  misc_RNA (1)...(19): siRNA sense strand
ucagaaaggccacaucuug

SEQ ID NO: 1244189 - RNA, 19 nt, Homo sapiens
  misc_RNA (1)...(19): siRNA sense strand
gcacuuugcccaccacaug

SEQ ID NO: 1244190 - RNA, 19 nt, Homo sapiens
  misc_RNA (1)...(19): siRNA sense strand
acaagaaccgcaagaauga

SEQ ID NO: 1244191 - RNA, 19 nt, Homo sapiens
  misc_RNA (1)...(19): siRNA sense strand
gcaaauagugacagugaau

SEQ ID NO: 1244192 - RNA, 19 nt, Homo sapiens
  misc_RNA (1)...(19): siRNA sense strand
aagaaagggucaucaggaa

SEQ ID NO: 1244193 - RNA, 19 nt, Homo sapiens
  misc_RNA (1)...(19): siRNA sense strand
ccaaguggacucagaagaa

SEQ ID NO: 1244194 - RNA, 19 nt, Homo sapiens
  misc_RNA (1)...(19): siRNA sense strand
gcugagggcugcauuuguc

SEQ ID NO: 1244195 - RNA, 19 nt, Homo sapiens
  misc_RNA (1)...(19): siRNA sense strand
gauacaguuugccguggua

SEQ ID NO: 1244196 - RNA, 19 nt, Homo sapiens
  misc_RNA (1)...(19): siRNA sense strand
gaaagggucaucaggaaag

SEQ ID NO: 1244197 - RNA, 19 nt, Homo sapiens
  misc_RNA (1)...(19): siRNA sense strand
gcugagagcugugaauguc

SEQ ID NO: 1244198 - RNA, 19 nt, Homo sapiens
  misc_RNA (1)...(19): siRNA sense strand
ggaguucgcauaccacaug

SEQ ID NO: 1244199 - RNA, 19 nt, Homo sapiens
  misc_RNA (1)...(19): siRNA sense strand
uacgugagcuuugauggua

SEQ ID NO: 1244200 - RNA, 19 nt, Homo sapiens
  misc_RNA (1)...(19): siRNA sense strand
caaacacccucugugaguu

SEQ ID NO: 1244201 - RNA, 19 nt, Homo sapiens
  misc_RNA (1)...(19): siRNA sense strand
gugaauuugugaacaguug

SEQ ID NO: 1244202 - RNA, 19 nt, Homo sapiens
  misc_RNA (1)...(19): siRNA sense strand
ccuacaaucuccaccaaga

SEQ ID NO: 1244203 - RNA, 19 nt, Homo sapiens
  misc_RNA (1)...(19): siRNA sense strand
gacaacagcaacagcaauu

SEQ ID NO: 1244204 - RNA, 19 nt, Homo sapiens
  misc_RNA (1)...(19): siRNA sense strand
uguaaucgcgucuguauga

SEQ ID NO: 1244205 - RNA, 19 nt, Homo sapiens
  misc_RNA (1)...(19): siRNA sense strand
ggaaggacgcaacaagaug

SEQ ID NO: 1244206 - RNA, 19 nt, Homo sapiens
  misc_RNA (1)...(19): siRNA sense strand
gcuuaagaauggccaguau

SEQ ID NO: 1244207 - RNA, 19 nt, Homo sapiens
  misc_RNA (1)...(19): siRNA sense strand
acuaucaucuccacagaaa

SEQ ID NO: 1244208 - RNA, 19 nt, Homo sapiens
  misc_RNA (1)...(19): siRNA sense strand
cauuuaugcuucagucuug

SEQ ID NO: 1244209 - RNA, 19 nt, Homo sapiens
  misc_RNA (1)...(19): siRNA sense strand
acagagcgcugcccuccaa

SEQ ID NO: 1244210 - RNA, 19 nt, Homo sapiens
  misc_RNA (1)...(19): siRNA sense strand
ugaccuauguucugaucaa

SEQ ID NO: 1244211 - RNA, 19 nt, Homo sapiens
  misc_RNA (1)...(19): siRNA sense strand
cccguuaccucacauuuga

SEQ ID NO: 1244212 - RNA, 19 nt, Homo sapiens
  misc_RNA (1)...(19): siRNA sense strand
gcuaugugcugagugaaga

SEQ ID NO: 1244213 - RNA, 19 nt, Homo sapiens
  misc_RNA (1)...(19): siRNA sense strand
caacaacgacuacuaugag

SEQ ID NO: 1244214 - RNA, 19 nt, Homo sapiens
  misc_RNA (1)...(19): siRNA sense strand
ugaaaccacuggccucaca

SEQ ID NO: 1244215 - RNA, 19 nt, Homo sapiens
  misc_RNA (1)...(19): siRNA sense strand
ggacauugacccaaguugu

SEQ ID NO: 1244216 - RNA, 19 nt, Homo sapiens
  misc_RNA (1)...(19): siRNA sense strand
ugugggaacuucaaugaug

SEQ ID NO: 1244217 - RNA, 19 nt, Homo sapiens
  misc_RNA (1)...(19): siRNA sense strand
gaagggccaccgugugcua

SEQ ID NO: 1244218 - RNA, 19 nt, Homo sapiens
  misc_RNA (1)...(19): siRNA sense strand
caagaucagugccaagcau

SEQ ID NO: 1244219 - RNA, 19 nt, Homo sapiens
  misc_RNA (1)...(19): siRNA sense strand
gaacuaugacggcaacagu

SEQ ID NO: 1244220 - RNA, 19 nt, Homo sapiens
  misc_RNA (1)...(19): siRNA sense strand
caacucaacagacccauuc

SEQ ID NO: 1244221 - RNA, 19 nt, Homo sapiens
  misc_RNA (1)...(19): siRNA sense strand
cuacggagacccucauuau

SEQ ID NO: 1244222 - RNA, 19 nt, Homo sapiens
  misc_RNA (1)...(19): siRNA sense strand
agacuaccaucucuacaga

SEQ ID NO: 1244223 - RNA, 19 nt, Homo sapiens
  misc_RNA (1)...(19): siRNA sense strand
gaccaggagugucagaagu

SEQ ID NO: 1244224 - RNA, 19 nt, Homo sapiens
  misc_RNA (1)...(19): siRNA sense strand
ccgcaagaaugacaugaug

SEQ ID NO: 1244225 - RNA, 19 nt, Homo sapiens
  misc_RNA (1)...(19): siRNA sense strand
gugcaaacacccucuguga

SEQ ID NO: 1244226 - RNA, 19 nt, Homo sapiens
  misc_RNA (1)...(19): siRNA sense strand
gcccagcgaugaaguagca

SEQ ID NO: 1244227 - RNA, 19 nt, Homo sapiens
  misc_RNA (1)...(19): siRNA sense strand
gugggaacuucaaugauga

SEQ ID NO: 1244228 - RNA, 19 nt, Homo sapiens
  misc_RNA (1)...(19): siRNA sense strand
cagaaaggccacaucuuga

SEQ ID NO: 1244229 - RNA, 19 nt, Homo sapiens
  misc_RNA (1)...(19): siRNA sense strand
caacgcccaucccuucugu

SEQ ID NO: 1244230 - RNA, 19 nt, Homo sapiens
  misc_RNA (1)...(19): siRNA sense strand
guaaggucaugcugaaugg

SEQ ID NO: 1244231 - RNA, 19 nt, Homo sapiens
  misc_RNA (1)...(19): siRNA sense strand
gaugugcucuggaaacacu

SEQ ID NO: 1244232 - RNA, 19 nt, Homo sapiens
  misc_RNA (1)...(19): siRNA sense strand
acaaugaccaccugaaguu

SEQ ID NO: 1244233 - RNA, 19 nt, Homo sapiens
  misc_RNA (1)...(19): siRNA sense strand
gguuucaucuugaucaauc

SEQ ID NO: 1244234 - RNA, 19 nt, Homo sapiens
  misc_RNA (1)...(19): siRNA sense strand
gggaguauccggaaacaca

SEQ ID NO: 1244235 - RNA, 19 nt, Homo sapiens
  misc_RNA (1)...(19): siRNA sense strand
cagcuuugguggaaggaaa

SEQ ID NO: 1244236 - RNA, 19 nt, Homo sapiens
  misc_RNA (1)...(19): siRNA sense strand
uagcaaauagugacaguga

SEQ ID NO: 1244237 - RNA, 19 nt, Homo sapiens
  misc_RNA (1)...(19): siRNA sense strand
cugcaaacccaaccagaua

SEQ ID NO: 1244238 - RNA, 19 nt, Homo sapiens
  misc_RNA (1)...(19): siRNA sense strand
gcgaagccaugcccugaca

SEQ ID NO: 1244239 - RNA, 19 nt, Homo sapiens
  misc_RNA (1)...(19): siRNA sense strand
agacuaccaucuccacaga

SEQ ID NO: 1244240 - RNA, 19 nt, Homo sapiens
  misc_RNA (1)...(19): siRNA sense strand
agacuaccaucuccacaga

SEQ ID NO: 1244241 - RNA, 19 nt, Homo sapiens
  misc_RNA (1)...(19): siRNA sense strand
gaucaauccugggacuugu

SEQ ID NO: 1244242 - RNA, 19 nt, Homo sapiens
  misc_RNA (1)...(19): siRNA sense strand
uaacggagagggcagcuau

SEQ ID NO: 1244243 - RNA, 19 nt, Homo sapiens
  misc_RNA (1)...(19): siRNA sense strand
caggagaacccgaguggaa

SEQ ID NO: 1244244 - RNA, 19 nt, Homo sapiens
  misc_RNA (1)...(19): siRNA sense strand
ugaggaagaggacgaacua

SEQ ID NO: 1244245 - RNA, 19 nt, Homo sapiens
  misc_RNA (1)...(19): siRNA sense strand
cuacagcauuguuaacauc

SEQ ID NO: 1244246 - RNA, 19 nt, Homo sapiens
  misc_RNA (1)...(19): siRNA sense strand
ccauaaggcucagcagcaa

SEQ ID NO: 1244247 - RNA, 19 nt, Homo sapiens
  misc_RNA (1)...(19): siRNA sense strand
ugaaagcaacaacagaauu

SEQ ID NO: 1244248 - RNA, 19 nt, Homo sapiens
  misc_RNA (1)...(19): siRNA sense strand
cuacaacaacgacuacuau

SEQ ID NO: 1244249 - RNA, 19 nt, Homo sapiens
  misc_RNA (1)...(19): siRNA sense strand
ccaaaugcccgcuacgaau

SEQ ID NO: 1244250 - RNA, 19 nt, Homo sapiens
  misc_RNA (1)...(19): siRNA sense strand
gaagcaacacggccucugu

SEQ ID NO: 1244251 - RNA, 19 nt, Homo sapiens
  misc_RNA (1)...(19): siRNA sense strand
uucaugaggucuacauuga

SEQ ID NO: 1244252 - RNA, 19 nt, Homo sapiens
  misc_RNA (1)...(19): siRNA sense strand
caacagcaacagcaauugu

SEQ ID NO: 1244253 - RNA, 19 nt, Homo sapiens
  misc_RNA (1)...(19): siRNA sense strand
caugaggucuacauugaca

SEQ ID NO: 1244254 - RNA, 19 nt, Homo sapiens
  misc_RNA (1)...(19): siRNA sense strand
ccacuggccucacagaaaa

SEQ ID NO: 1244255 - RNA, 19 nt, Homo sapiens
  misc_RNA (1)...(19): siRNA sense strand
cgacaagaaccgcaagaau

SEQ ID NO: 1244256 - RNA, 19 nt, Homo sapiens
  misc_RNA (1)...(19): siRNA sense strand
acugugcgaucuuaauaaa

SEQ ID NO: 1244257 - RNA, 19 nt, Homo sapiens
  misc_RNA (1)...(19): siRNA sense strand
gcacucuuguccuggugaa

SEQ ID NO: 1244258 - RNA, 19 nt, Homo sapiens
  misc_RNA (1)...(19): siRNA sense strand
gaugaaguagcaaauagug

SEQ ID NO: 1244259 - RNA, 19 nt, Homo sapiens
  misc_RNA (1)...(19): siRNA sense strand
gaacuucaaugaugaggaa

SEQ ID NO: 1244260 - RNA, 19 nt, Homo sapiens
  misc_RNA (1)...(19): siRNA sense strand
gaaacacacucucuucuca

SEQ ID NO: 1244261 - RNA, 19 nt, Homo sapiens
  misc_RNA (1)...(19): siRNA sense strand
gugcagcccuccacauuua

SEQ ID NO: 1244262 - RNA, 19 nt, Homo sapiens
  misc_RNA (1)...(19): siRNA sense strand
gaacugugcgaucuuaaua

SEQ ID NO: 1244263 - RNA, 19 nt, Homo sapiens
  misc_RNA (1)...(19): siRNA sense strand
gaacaaugcucagucuaug

SEQ ID NO: 1244264 - RNA, 19 nt, Homo sapiens
  misc_RNA (1)...(19): siRNA sense strand
gaucaagacuguggacgua

SEQ ID NO: 1244265 - RNA, 19 nt, Homo sapiens
  misc_RNA (1)...(19): siRNA sense strand
ugacgggaaucaucucuua

SEQ ID NO: 1244266 - RNA, 19 nt, Homo sapiens
  misc_RNA (1)...(19): siRNA sense strand
ggaaagauaaggacauuga

SEQ ID NO: 1244267 - RNA, 19 nt, Homo sapiens
  misc_RNA (1)...(19): siRNA sense strand
caacagcaauugugucuca

SEQ ID NO: 1244268 - RNA, 19 nt, Homo sapiens
  misc_RNA (1)...(19): siRNA sense strand
gugaacaguuggaaagaua

SEQ ID NO: 1244269 - RNA, 19 nt, Homo sapiens
  misc_RNA (1)...(19): siRNA sense strand
caacagcccaugcagcuua

SEQ ID NO: 1244270 - RNA, 19 nt, Homo sapiens
  misc_RNA (1)...(19): siRNA sense strand
gaagaggacgaacuaauga

SEQ ID NO: 1244271 - RNA, 19 nt, Homo sapiens
  misc_RNA (1)...(19): siRNA sense strand
gcaauugcuucuacaacaa

SEQ ID NO: 1244272 - RNA, 19 nt, Homo sapiens
  misc_RNA (1)...(19): siRNA sense strand
gcagacgccuggaacaaga

SEQ ID NO: 1244273 - RNA, 19 nt, Homo sapiens
  misc_RNA (1)...(19): siRNA sense strand
ggaagaggacgaacuaaug

SEQ ID NO: 1244274 - RNA, 19 nt, Homo sapiens
  misc_RNA (1)...(19): siRNA sense strand
ggaaaggucugcggcaugu

SEQ ID NO: 1244275 - RNA, 19 nt, Homo sapiens
  misc_RNA (1)...(19): siRNA sense strand
gaaagcaacaacagaauuc

SEQ ID NO: 1244276 - RNA, 19 nt, Homo sapiens
  misc_RNA (1)...(19): siRNA sense strand
caaguggacucagaagaaa

SEQ ID NO: 1244277 - RNA, 19 nt, Homo sapiens
  misc_RNA (1)...(19): siRNA sense strand
ccaacaggaugguaucuau

SEQ ID NO: 1244278 - RNA, 19 nt, Homo sapiens
  misc_RNA (1)...(19): siRNA sense strand
gacaagaaccgcaagaaug

SEQ ID NO: 1244279 - RNA, 19 nt, Homo sapiens
  misc_RNA (1)...(19): siRNA sense strand
gcacacacauguccaccau

SEQ ID NO: 1244280 - RNA, 19 nt, Homo sapiens
  misc_RNA (1)...(19): siRNA sense strand
gcgaugaaguagcaaauag

SEQ ID NO: 1244281 - RNA, 19 nt, Homo sapiens
  misc_RNA (1)...(19): siRNA sense strand
gcuguaaggucaugcugaa

SEQ ID NO: 1244282 - RNA, 19 nt, Homo sapiens
  misc_RNA (1)...(19): siRNA sense strand
gcaaacacccucugugagu

SEQ ID NO: 1244283 - RNA, 19 nt, Homo sapiens
  misc_RNA (1)...(19): siRNA sense strand
ccacccggcugauguuuga

SEQ ID NO: 1244284 - RNA, 19 nt, Homo sapiens
  misc_RNA (1)...(19): siRNA sense strand
caagacagcuauuuuguug

SEQ ID NO: 1244285 - RNA, 19 nt, Homo sapiens
  misc_RNA (1)...(19): siRNA sense strand
gcuauggguuucaucuuga

SEQ ID NO: 1244286 - RNA, 19 nt, Homo sapiens
  misc_RNA (1)...(19): siRNA sense strand
caacacggccucugugguu

SEQ ID NO: 1244287 - RNA, 19 nt, Homo sapiens
  misc_RNA (1)...(19): siRNA sense strand
gaaaccaccaccucuguug

SEQ ID NO: 1244288 - RNA, 19 nt, Homo sapiens
  misc_RNA (1)...(19): siRNA sense strand
ucagaaaggccacaucuug

SEQ ID NO: 1244289 - RNA, 19 nt, Homo sapiens
  misc_RNA (1)...(19): siRNA sense strand
gcacuuugcccaccacaug

SEQ ID NO: 1244290 - RNA, 19 nt, Homo sapiens
  misc_RNA (1)...(19): siRNA sense strand
acaagaaccgcaagaauga

SEQ ID NO: 1244291 - RNA, 19 nt, Homo sapiens
  misc_RNA (1)...(19): siRNA sense strand
gcaaauagugacagugaau

SEQ ID NO: 1244292 - RNA, 19 nt, Homo sapiens
  misc_RNA (1)...(19): siRNA sense strand
aagaaagggucaucaggaa

SEQ ID NO: 1244293 - RNA, 19 nt, Homo sapiens
  misc_RNA (1)...(19): siRNA sense strand
ccaaguggacucagaagaa

SEQ ID NO: 1244294 - RNA, 19 nt, Homo sapiens
  misc_RNA (1)...(19): siRNA sense strand
gcugagggcugcauuuguc

SEQ ID NO: 1244295 - RNA, 19 nt, Homo sapiens
  misc_RNA (1)...(19): siRNA sense strand
gauacaguuugccguggua

SEQ ID NO: 1244296 - RNA, 19 nt, Homo sapiens
  misc_RNA (1)...(19): siRNA sense strand
gaaagggucaucaggaaag

SEQ ID NO: 1244297 - RNA, 19 nt, Homo sapiens
  misc_RNA (1)...(19): siRNA sense strand
gcugagagcugugaauguc

SEQ ID NO: 1244298 - RNA, 19 nt, Homo sapiens
  misc_RNA (1)...(19): siRNA sense strand
ggaguucgcauaccacaug

SEQ ID NO: 1244299 - RNA, 19 nt, Homo sapiens
  misc_RNA (1)...(19): siRNA sense strand
uacgugagcuuugauggua

SEQ ID NO: 1244300 - RNA, 19 nt, Homo sapiens
  misc_RNA (1)...(19): siRNA sense strand
caaacacccucugugaguu

SEQ ID NO: 1244301 - RNA, 19 nt, Homo sapiens
  misc_RNA (1)...(19): siRNA sense strand
gugaauuugugaacaguug

SEQ ID NO: 1244302 - RNA, 19 nt, Homo sapiens
  misc_RNA (1)...(19): siRNA sense strand
ccuacaaucuccaccaaga

SEQ ID NO: 1244303 - RNA, 19 nt, Homo sapiens
  misc_RNA (1)...(19): siRNA sense strand
gacaacagcaacagcaauu

SEQ ID NO: 1244304 - RNA, 19 nt, Homo sapiens
  misc_RNA (1)...(19): siRNA sense strand
uguaaucgcgucuguauga

SEQ ID NO: 1244305 - RNA, 19 nt, Homo sapiens
  misc_RNA (1)...(19): siRNA sense strand
ggaaggacgcaacaagaug

SEQ ID NO: 1244306 - RNA, 19 nt, Homo sapiens
  misc_RNA (1)...(19): siRNA sense strand
gcuuaagaauggccaguau

SEQ ID NO: 1244307 - RNA, 19 nt, Homo sapiens
  misc_RNA (1)...(19): siRNA sense strand
acuaucaucuccacagaaa

SEQ ID NO: 1244308 - RNA, 19 nt, Homo sapiens
  misc_RNA (1)...(19): siRNA sense strand
cauuuaugcuucagucuug

SEQ ID NO: 1244309 - RNA, 19 nt, Homo sapiens
  misc_RNA (1)...(19): siRNA sense strand
acagagcgcugcccuccaa

SEQ ID NO: 1244310 - RNA, 19 nt, Homo sapiens
  misc_RNA (1)...(19): siRNA sense strand
ugaccuauguucugaucaa

SEQ ID NO: 1244311 - RNA, 19 nt, Homo sapiens
  misc_RNA (1)...(19): siRNA sense strand
cccguuaccucacauuuga

SEQ ID NO: 1244312 - RNA, 19 nt, Homo sapiens
  misc_RNA (1)...(19): siRNA sense strand
gcuaugugcugagugaaga

SEQ ID NO: 1244313 - RNA, 19 nt, Homo sapiens
  misc_RNA (1)...(19): siRNA sense strand
caacaacgacuacuaugag

SEQ ID NO: 1244314 - RNA, 19 nt, Homo sapiens
  misc_RNA (1)...(19): siRNA sense strand
ugaaaccacuggccucaca

SEQ ID NO: 1244315 - RNA, 19 nt, Homo sapiens
  misc_RNA (1)...(19): siRNA sense strand
ggacauugacccaaguugu

SEQ ID NO: 1244316 - RNA, 19 nt, Homo sapiens
  misc_RNA (1)...(19): siRNA sense strand
ugugggaacuucaaugaug

SEQ ID NO: 1244317 - RNA, 19 nt, Homo sapiens
  misc_RNA (1)...(19): siRNA sense strand
gaagggccaccgugugcua

SEQ ID NO: 1244318 - RNA, 19 nt, Homo sapiens
  misc_RNA (1)...(19): siRNA sense strand
caagaucagugccaagcau

SEQ ID NO: 1244319 - RNA, 19 nt, Homo sapiens
  misc_RNA (1)...(19): siRNA sense strand
gaacuaugacggcaacagu

SEQ ID NO: 1244320 - RNA, 19 nt, Homo sapiens
  misc_RNA (1)...(19): siRNA sense strand
caacucaacagacccauuc

SEQ ID NO: 1244321 - RNA, 19 nt, Homo sapiens
  misc_RNA (1)...(19): siRNA sense strand
cuacggagacccucauuau

SEQ ID NO: 1244322 - RNA, 19 nt, Homo sapiens
  misc_RNA (1)...(19): siRNA sense strand
agacuaccaucucuacaga

SEQ ID NO: 1244323 - RNA, 19 nt, Homo sapiens
  misc_RNA (1)...(19): siRNA sense strand
gaccaggagugucagaagu

SEQ ID NO: 1244324 - RNA, 19 nt, Homo sapiens
  misc_RNA (1)...(19): siRNA sense strand
ccgcaagaaugacaugaug

SEQ ID NO: 1244325 - RNA, 19 nt, Homo sapiens
  misc_RNA (1)...(19): siRNA sense strand
gugcaaacacccucuguga

SEQ ID NO: 1244326 - RNA, 19 nt, Homo sapiens
  misc_RNA (1)...(19): siRNA sense strand
gcccagcgaugaaguagca

SEQ ID NO: 1244327 - RNA, 19 nt, Homo sapiens
  misc_RNA (1)...(19): siRNA sense strand
gugggaacuucaaugauga

SEQ ID NO: 1244328 - RNA, 19 nt, Homo sapiens
  misc_RNA (1)...(19): siRNA sense strand
cagaaaggccacaucuuga

SEQ ID NO: 1244329 - RNA, 19 nt, Homo sapiens
  misc_RNA (1)...(19): siRNA sense strand
caacgcccaucccuucugu

SEQ ID NO: 1244330 - RNA, 19 nt, Homo sapiens
  misc_RNA (1)...(19): siRNA sense strand
guaaggucaugcugaaugg

SEQ ID NO: 1244331 - RNA, 19 nt, Homo sapiens
  misc_RNA (1)...(19): siRNA sense strand
gaugugcucuggaaacacu

SEQ ID NO: 1244332 - RNA, 19 nt, Homo sapiens
  misc_RNA (1)...(19): siRNA sense strand
acaaugaccaccugaaguu

SEQ ID NO: 1244333 - RNA, 19 nt, Homo sapiens
  misc_RNA (1)...(19): siRNA sense strand
gguuucaucuugaucaauc

SEQ ID NO: 1244334 - RNA, 19 nt, Homo sapiens
  misc_RNA (1)...(19): siRNA sense strand
gggaguauccggaaacaca

SEQ ID NO: 1244335 - RNA, 19 nt, Homo sapiens
  misc_RNA (1)...(19): siRNA sense strand
cagcuuugguggaaggaaa

SEQ ID NO: 1244336 - RNA, 19 nt, Homo sapiens
  misc_RNA (1)...(19): siRNA sense strand
uagcaaauagugacaguga

SEQ ID NO: 1244337 - RNA, 19 nt, Homo sapiens
  misc_RNA (1)...(19): siRNA sense strand
cugcaaacccaaccagaua

SEQ ID NO: 1244338 - RNA, 19 nt, Homo sapiens
  misc_RNA (1)...(19): siRNA sense strand
gcgaagccaugcccugaca

SEQ ID NO: 1244339 - RNA, 19 nt, Homo sapiens
  misc_RNA (1)...(19): siRNA sense strand
agacuaccaucuccacaga

SEQ ID NO: 1244340 - RNA, 19 nt, Homo sapiens
  misc_RNA (1)...(19): siRNA sense strand
agacuaccaucuccacaga

SEQ ID NO: 1244341 - RNA, 19 nt, Homo sapiens
  misc_RNA (1)...(19): siRNA sense strand
gaucaauccugggacuugu

SEQ ID NO: 1244342 - RNA, 19 nt, Homo sapiens
  misc_RNA (1)...(19): siRNA sense strand
uaacggagagggcagcuau

SEQ ID NO: 1244343 - RNA, 19 nt, Homo sapiens
  misc_RNA (1)...(19): siRNA sense strand
caggagaacccgaguggaa

SEQ ID NO: 1244344 - RNA, 19 nt, Homo sapiens
  misc_RNA (1)...(19): siRNA sense strand
ugaggaagaggacgaacua

SEQ ID NO: 1244345 - RNA, 19 nt, Homo sapiens
  misc_RNA (1)...(19): siRNA sense strand
cuacagcauuguuaacauc

SEQ ID NO: 1244346 - RNA, 19 nt, Homo sapiens
  misc_RNA (1)...(19): siRNA sense strand
ccauaaggcucagcagcaa

SEQ ID NO: 1244347 - RNA, 19 nt, Homo sapiens
  misc_RNA (1)...(19): siRNA sense strand
ugaaagcaacaacagaauu

SEQ ID NO: 1244348 - RNA, 19 nt, Homo sapiens
  misc_RNA (1)...(19): siRNA sense strand
cuacaacaacgacuacuau

SEQ ID NO: 1244349 - RNA, 19 nt, Homo sapiens
  misc_RNA (1)...(19): siRNA sense strand
ccaaaugcccgcuacgaau

SEQ ID NO: 1244350 - RNA, 19 nt, Homo sapiens
  misc_RNA (1)...(19): siRNA sense strand
gaagcaacacggccucugu

SEQ ID NO: 1244351 - RNA, 19 nt, Homo sapiens
  misc_RNA (1)...(19): siRNA sense strand
uucaugaggucuacauuga

SEQ ID NO: 1244352 - RNA, 19 nt, Homo sapiens
  misc_RNA (1)...(19): siRNA sense strand
caacagcaacagcaauugu

SEQ ID NO: 1244353 - RNA, 19 nt, Homo sapiens
  misc_RNA (1)...(19): siRNA sense strand
caugaggucuacauugaca

SEQ ID NO: 1244354 - RNA, 19 nt, Homo sapiens
  misc_RNA (1)...(19): siRNA sense strand
ccacuggccucacagaaaa

SEQ ID NO: 1244355 - RNA, 19 nt, Homo sapiens
  misc_RNA (1)...(19): siRNA sense strand
cgacaagaaccgcaagaau

SEQ ID NO: 1244356 - RNA, 19 nt, Homo sapiens
  misc_RNA (1)...(19): siRNA sense strand
acugugcgaucuuaauaaa

SEQ ID NO: 1244357 - RNA, 19 nt, Homo sapiens
  misc_RNA (1)...(19): siRNA sense strand
gcacucuuguccuggugaa

SEQ ID NO: 1244358 - RNA, 19 nt, Homo sapiens
  misc_RNA (1)...(19): siRNA sense strand
gaugaaguagcaaauagug

SEQ ID NO: 1244359 - RNA, 19 nt, Homo sapiens
  misc_RNA (1)...(19): siRNA sense strand
gaacuucaaugaugaggaa

SEQ ID NO: 1244360 - RNA, 19 nt, Homo sapiens
  misc_RNA (1)...(19): siRNA sense strand
gaaacacacucucuucuca

SEQ ID NO: 1244361 - RNA, 19 nt, Homo sapiens
  misc_RNA (1)...(19): siRNA sense strand
gugcagcccuccacauuua

SEQ ID NO: 1244362 - RNA, 19 nt, Homo sapiens
  misc_RNA (1)...(19): siRNA sense strand
gaacugugcgaucuuaaua

SEQ ID NO: 1244363 - RNA, 19 nt, Homo sapiens
  misc_RNA (1)...(19): siRNA sense strand
gaacaaugcucagucuaug

SEQ ID NO: 1244364 - RNA, 19 nt, Homo sapiens
  misc_RNA (1)...(19): siRNA sense strand
gaucaagacuguggacgua

SEQ ID NO: 1244365 - RNA, 19 nt, Homo sapiens
  misc_RNA (1)...(19): siRNA sense strand
ugacgggaaucaucucuua

SEQ ID NO: 1244366 - RNA, 19 nt, Homo sapiens
  misc_RNA (1)...(19): siRNA sense strand
ggaaagauaaggacauuga

SEQ ID NO: 1244367 - RNA, 19 nt, Homo sapiens
  misc_RNA (1)...(19): siRNA sense strand
caacagcaauugugucuca

SEQ ID NO: 1244368 - RNA, 19 nt, Homo sapiens
  misc_RNA (1)...(19): siRNA sense strand
gugaacaguuggaaagaua

SEQ ID NO: 1244369 - RNA, 19 nt, Homo sapiens
  misc_RNA (1)...(19): siRNA sense strand
caacagcccaugcagcuua

SEQ ID NO: 1244370 - RNA, 19 nt, Homo sapiens
  misc_RNA (1)...(19): siRNA sense strand
gaagaggacgaacuaauga

SEQ ID NO: 1244371 - RNA, 19 nt, Homo sapiens
  misc_RNA (1)...(19): siRNA sense strand
gcaauugcuucuacaacaa

SEQ ID NO: 1244372 - RNA, 19 nt, Homo sapiens
  misc_RNA (1)...(19): siRNA sense strand
gcagacgccuggaacaaga

SEQ ID NO: 1244373 - RNA, 19 nt, Homo sapiens
  misc_RNA (1)...(19): siRNA sense strand
ggaagaggacgaacuaaug

SEQ ID NO: 1244374 - RNA, 19 nt, Homo sapiens
  misc_RNA (1)...(19): siRNA sense strand
ggaaaggucugcggcaugu

SEQ ID NO: 1244375 - RNA, 19 nt, Homo sapiens
  misc_RNA (1)...(19): siRNA sense strand
gaaagcaacaacagaauuc

SEQ ID NO: 1244376 - RNA, 19 nt, Homo sapiens
  misc_RNA (1)...(19): siRNA sense strand
caaguggacucagaagaaa

SEQ ID NO: 1244377 - RNA, 19 nt, Homo sapiens
  misc_RNA (1)...(19): siRNA sense strand
ccaacaggaugguaucuau

SEQ ID NO: 1244378 - RNA, 19 nt, Homo sapiens
  misc_RNA (1)...(19): siRNA sense strand
gacaagaaccgcaagaaug

SEQ ID NO: 1244379 - RNA, 19 nt, Homo sapiens
  misc_RNA (1)...(19): siRNA sense strand
gcacacacauguccaccau

SEQ ID NO: 1244380 - RNA, 19 nt, Homo sapiens
  misc_RNA (1)...(19): siRNA sense strand
gcgaugaaguagcaaauag

SEQ ID NO: 1244381 - RNA, 19 nt, Homo sapiens
  misc_RNA (1)...(19): siRNA sense strand
gcuguaaggucaugcugaa

SEQ ID NO: 1244382 - RNA, 19 nt, Homo sapiens
  misc_RNA (1)...(19): siRNA sense strand
gcaaacacccucugugagu

SEQ ID NO: 1244383 - RNA, 19 nt, Homo sapiens
  misc_RNA (1)...(19): siRNA sense strand
ccacccggcugauguuuga

SEQ ID NO: 1244384 - RNA, 19 nt, Homo sapiens
  misc_RNA (1)...(19): siRNA sense strand
caagacagcuauuuuguug

SEQ ID NO: 1244385 - RNA, 19 nt, Homo sapiens
  misc_RNA (1)...(19): siRNA sense strand
gcuauggguuucaucuuga

SEQ ID NO: 1244386 - RNA, 19 nt, Homo sapiens
  misc_RNA (1)...(19): siRNA sense strand
caacacggccucugugguu

SEQ ID NO: 1244387 - RNA, 19 nt, Homo sapiens
  misc_RNA (1)...(19): siRNA sense strand
gaaaccaccaccucuguug

SEQ ID NO: 1244388 - RNA, 19 nt, Homo sapiens
  misc_RNA (1)...(19): siRNA sense strand
ucagaaaggccacaucuug

SEQ ID NO: 1244389 - RNA, 19 nt, Homo sapiens
  misc_RNA (1)...(19): siRNA sense strand
gcacuuugcccaccacaug

SEQ ID NO: 1244390 - RNA, 19 nt, Homo sapiens
  misc_RNA (1)...(19): siRNA sense strand
acaagaaccgcaagaauga

SEQ ID NO: 1244391 - RNA, 19 nt, Homo sapiens
  misc_RNA (1)...(19): siRNA sense strand
gcaaauagugacagugaau

SEQ ID NO: 1244392 - RNA, 19 nt, Homo sapiens
  misc_RNA (1)...(19): siRNA sense strand
aagaaagggucaucaggaa

SEQ ID NO: 1244393 - RNA, 19 nt, Homo sapiens
  misc_RNA (1)...(19): siRNA sense strand
ccaaguggacucagaagaa

SEQ ID NO: 1244394 - RNA, 19 nt, Homo sapiens
  misc_RNA (1)...(19): siRNA sense strand
gcugagggcugcauuuguc

SEQ ID NO: 1244395 - RNA, 19 nt, Homo sapiens
  misc_RNA (1)...(19): siRNA sense strand
gauacaguuugccguggua

SEQ ID NO: 1244396 - RNA, 19 nt, Homo sapiens
  misc_RNA (1)...(19): siRNA sense strand
gaaagggucaucaggaaag

SEQ ID NO: 1244397 - RNA, 19 nt, Homo sapiens
  misc_RNA (1)...(19): siRNA sense strand
gcugagagcugugaauguc

SEQ ID NO: 1244398 - RNA, 19 nt, Homo sapiens
  misc_RNA (1)...(19): siRNA sense strand
ggaguucgcauaccacaug

SEQ ID NO: 1244399 - RNA, 19 nt, Homo sapiens
  misc_RNA (1)...(19): siRNA sense strand
uacgugagcuuugauggua

SEQ ID NO: 1244400 - RNA, 19 nt, Homo sapiens
  misc_RNA (1)...(19): siRNA sense strand
caaacacccucugugaguu

SEQ ID NO: 1244401 - RNA, 19 nt, Homo sapiens
  misc_RNA (1)...(19): siRNA sense strand
gugaauuugugaacaguug

SEQ ID NO: 1244402 - RNA, 19 nt, Homo sapiens
  misc_RNA (1)...(19): siRNA sense strand
ccuacaaucuccaccaaga

SEQ ID NO: 1244403 - RNA, 19 nt, Homo sapiens
  misc_RNA (1)...(19): siRNA sense strand
gacaacagcaacagcaauu

SEQ ID NO: 1244404 - RNA, 19 nt, Homo sapiens
  misc_RNA (1)...(19): siRNA sense strand
uguaaucgcgucuguauga

SEQ ID NO: 1244405 - RNA, 19 nt, Homo sapiens
  misc_RNA (1)...(19): siRNA sense strand
ggaaggacgcaacaagaug

SEQ ID NO: 1244406 - RNA, 19 nt, Homo sapiens
  misc_RNA (1)...(19): siRNA sense strand
gcuuaagaauggccaguau

SEQ ID NO: 1244407 - RNA, 19 nt, Homo sapiens
  misc_RNA (1)...(19): siRNA sense strand
acuaucaucuccacagaaa

SEQ ID NO: 1244408 - RNA, 19 nt, Homo sapiens
  misc_RNA (1)...(19): siRNA sense strand
cauuuaugcuucagucuug

SEQ ID NO: 1244409 - RNA, 19 nt, Homo sapiens
  misc_RNA (1)...(19): siRNA sense strand
acagagcgcugcccuccaa

SEQ ID NO: 1244410 - RNA, 19 nt, Homo sapiens
  misc_RNA (1)...(19): siRNA sense strand
ugaccuauguucugaucaa

SEQ ID NO: 1244411 - RNA, 19 nt, Homo sapiens
  misc_RNA (1)...(19): siRNA sense strand
cccguuaccucacauuuga

SEQ ID NO: 1244412 - RNA, 19 nt, Homo sapiens
  misc_RNA (1)...(19): siRNA sense strand
gcuaugugcugagugaaga

SEQ ID NO: 1244413 - RNA, 19 nt, Homo sapiens
  misc_RNA (1)...(19): siRNA sense strand
caacaacgacuacuaugag

SEQ ID NO: 1244414 - RNA, 19 nt, Homo sapiens
  misc_RNA (1)...(19): siRNA sense strand
ugaaaccacuggccucaca

SEQ ID NO: 1244415 - RNA, 19 nt, Homo sapiens
  misc_RNA (1)...(19): siRNA sense strand
ggacauugacccaaguugu

SEQ ID NO: 1244416 - RNA, 19 nt, Homo sapiens
  misc_RNA (1)...(19): siRNA sense strand
ugugggaacuucaaugaug

SEQ ID NO: 1244417 - RNA, 19 nt, Homo sapiens
  misc_RNA (1)...(19): siRNA sense strand
gaagggccaccgugugcua

SEQ ID NO: 1244418 - RNA, 19 nt, Homo sapiens
  misc_RNA (1)...(19): siRNA sense strand
caagaucagugccaagcau

SEQ ID NO: 1244419 - RNA, 19 nt, Homo sapiens
  misc_RNA (1)...(19): siRNA sense strand
gaacuaugacggcaacagu

SEQ ID NO: 1244420 - RNA, 19 nt, Homo sapiens
  misc_RNA (1)...(19): siRNA sense strand
caacucaacagacccauuc

SEQ ID NO: 1244421 - RNA, 19 nt, Homo sapiens
  misc_RNA (1)...(19): siRNA sense strand
cuacggagacccucauuau

SEQ ID NO: 1244422 - RNA, 19 nt, Homo sapiens
  misc_RNA (1)...(19): siRNA sense strand
agacuaccaucucuacaga

SEQ ID NO: 1244423 - RNA, 19 nt, Homo sapiens
  misc_RNA (1)...(19): siRNA sense strand
gaccaggagugucagaagu

SEQ ID NO: 1244424 - RNA, 19 nt, Homo sapiens
  misc_RNA (1)...(19): siRNA sense strand
ccgcaagaaugacaugaug

SEQ ID NO: 1244425 - RNA, 19 nt, Homo sapiens
  misc_RNA (1)...(19): siRNA sense strand
gugcaaacacccucuguga

SEQ ID NO: 1244426 - RNA, 19 nt, Homo sapiens
  misc_RNA (1)...(19): siRNA sense strand
gcccagcgaugaaguagca

SEQ ID NO: 1244427 - RNA, 19 nt, Homo sapiens
  misc_RNA (1)...(19): siRNA sense strand
gugggaacuucaaugauga

SEQ ID NO: 1244428 - RNA, 19 nt, Homo sapiens
  misc_RNA (1)...(19): siRNA sense strand
cagaaaggccacaucuuga

SEQ ID NO: 1244429 - RNA, 19 nt, Homo sapiens
  misc_RNA (1)...(19): siRNA sense strand
caacgcccaucccuucugu

SEQ ID NO: 1244430 - RNA, 19 nt, Homo sapiens
  misc_RNA (1)...(19): siRNA sense strand
guaaggucaugcugaaugg

SEQ ID NO: 1244431 - RNA, 19 nt, Homo sapiens
  misc_RNA (1)...(19): siRNA sense strand
gaugugcucuggaaacacu

SEQ ID NO: 1244432 - RNA, 19 nt, Homo sapiens
  misc_RNA (1)...(19): siRNA sense strand
acaaugaccaccugaaguu

SEQ ID NO: 1244433 - RNA, 19 nt, Homo sapiens
  misc_RNA (1)...(19): siRNA sense strand
gguuucaucuugaucaauc

SEQ ID NO: 1244434 - RNA, 19 nt, Homo sapiens
  misc_RNA (1)...(19): siRNA sense strand
gggaguauccggaaacaca

SEQ ID NO: 1244435 - RNA, 19 nt, Homo sapiens
  misc_RNA (1)...(19): siRNA sense strand
cagcuuugguggaaggaaa

SEQ ID NO: 1244436 - RNA, 19 nt, Homo sapiens
  misc_RNA (1)...(19): siRNA sense strand
uagcaaauagugacaguga

SEQ ID NO: 1244437 - RNA, 19 nt, Homo sapiens
  misc_RNA (1)...(19): siRNA sense strand
cugcaaacccaaccagaua

SEQ ID NO: 1244438 - RNA, 19 nt, Homo sapiens
  misc_RNA (1)...(19): siRNA sense strand
gcgaagccaugcccugaca

SEQ ID NO: 1244439 - RNA, 19 nt, Homo sapiens
  misc_RNA (1)...(19): siRNA sense strand
agacuaccaucuccacaga

SEQ ID NO: 1244440 - RNA, 19 nt, Homo sapiens
  misc_RNA (1)...(19): siRNA sense strand
agacuaccaucuccacaga

SEQ ID NO: 1244441 - RNA, 19 nt, Homo sapiens
  misc_RNA (1)...(19): siRNA sense strand
gaucaauccugggacuugu

SEQ ID NO: 1244442 - RNA, 19 nt, Homo sapiens
  misc_RNA (1)...(19): siRNA sense strand
uaacggagagggcagcuau

SEQ ID NO: 1244443 - RNA, 19 nt, Homo sapiens
  misc_RNA (1)...(19): siRNA sense strand
caggagaacccgaguggaa

SEQ ID NO: 1244444 - RNA, 19 nt, Homo sapiens
  misc_RNA (1)...(19): siRNA sense strand
ugaggaagaggacgaacua

SEQ ID NO: 1244445 - RNA, 19 nt, Homo sapiens
  misc_RNA (1)...(19): siRNA sense strand
cuacagcauuguuaacauc

SEQ ID NO: 1244446 - RNA, 19 nt, Homo sapiens
  misc_RNA (1)...(19): siRNA sense strand
ccauaaggcucagcagcaa

SEQ ID NO: 1244447 - RNA, 19 nt, Homo sapiens
  misc_RNA (1)...(19): siRNA sense strand
ugaaagcaacaacagaauu

SEQ ID NO: 1244448 - RNA, 19 nt, Homo sapiens
  misc_RNA (1)...(19): siRNA sense strand
cuacaacaacgacuacuau

SEQ ID NO: 1244449 - RNA, 19 nt, Homo sapiens
  misc_RNA (1)...(19): siRNA sense strand
ccaaaugcccgcuacgaau

SEQ ID NO: 1244450 - RNA, 19 nt, Homo sapiens
  misc_RNA (1)...(19): siRNA sense strand
gaagcaacacggccucugu

SEQ ID NO: 1244451 - RNA, 19 nt, Homo sapiens
  misc_RNA (1)...(19): siRNA sense strand
uucaugaggucuacauuga

SEQ ID NO: 1244452 - RNA, 19 nt, Homo sapiens
  misc_RNA (1)...(19): siRNA sense strand
caacagcaacagcaauugu

SEQ ID NO: 1244453 - RNA, 19 nt, Homo sapiens
  misc_RNA (1)...(19): siRNA sense strand
caugaggucuacauugaca

SEQ ID NO: 1244454 - RNA, 19 nt, Homo sapiens
  misc_RNA (1)...(19): siRNA sense strand
ccacuggccucacagaaaa

SEQ ID NO: 1244455 - RNA, 19 nt, Homo sapiens
  misc_RNA (1)...(19): siRNA sense strand
cgacaagaaccgcaagaau

SEQ ID NO: 1244456 - RNA, 19 nt, Homo sapiens
  misc_RNA (1)...(19): siRNA sense strand
acugugcgaucuuaauaaa

SEQ ID NO: 1244457 - RNA, 19 nt, Homo sapiens
  misc_RNA (1)...(19): siRNA sense strand
gcacucuuguccuggugaa

SEQ ID NO: 1244458 - RNA, 19 nt, Homo sapiens
  misc_RNA (1)...(19): siRNA sense strand
gaugaaguagcaaauagug

SEQ ID NO: 1244459 - RNA, 19 nt, Homo sapiens
  misc_RNA (1)...(19): siRNA sense strand
gaacuucaaugaugaggaa

SEQ ID NO: 1244460 - RNA, 19 nt, Homo sapiens
  misc_RNA (1)...(19): siRNA sense strand
gaaacacacucucuucuca

SEQ ID NO: 1244461 - RNA, 19 nt, Homo sapiens
  misc_RNA (1)...(19): siRNA sense strand
gugcagcccuccacauuua

SEQ ID NO: 1244462 - RNA, 19 nt, Homo sapiens
  misc_RNA (1)...(19): siRNA sense strand
gaacugugcgaucuuaaua

SEQ ID NO: 1244463 - RNA, 19 nt, Homo sapiens
  misc_RNA (1)...(19): siRNA sense strand
gaacaaugcucagucuaug

SEQ ID NO: 1244464 - RNA, 19 nt, Homo sapiens
  misc_RNA (1)...(19): siRNA sense strand
gaucaagacuguggacgua

SEQ ID NO: 1244465 - RNA, 19 nt, Homo sapiens
  misc_RNA (1)...(19): siRNA sense strand
ugacgggaaucaucucuua

SEQ ID NO: 1244466 - RNA, 19 nt, Homo sapiens
  misc_RNA (1)...(19): siRNA sense strand
ggaaagauaaggacauuga

SEQ ID NO: 1244467 - RNA, 19 nt, Homo sapiens
  misc_RNA (1)...(19): siRNA sense strand
caacagcaauugugucuca

SEQ ID NO: 1244468 - RNA, 19 nt, Homo sapiens
  misc_RNA (1)...(19): siRNA sense strand
gugaacaguuggaaagaua

SEQ ID NO: 1244469 - RNA, 19 nt, Homo sapiens
  misc_RNA (1)...(19): siRNA sense strand
caacagcccaugcagcuua

SEQ ID NO: 1244470 - RNA, 19 nt, Homo sapiens
  misc_RNA (1)...(19): siRNA sense strand
gaagaggacgaacuaauga

SEQ ID NO: 1244471 - RNA, 19 nt, Homo sapiens
  misc_RNA (1)...(19): siRNA sense strand
gcaauugcuucuacaacaa

SEQ ID NO: 1244472 - RNA, 19 nt, Homo sapiens
  misc_RNA (1)...(19): siRNA sense strand
gcagacgccuggaacaaga

SEQ ID NO: 1244473 - RNA, 19 nt, Homo sapiens
  misc_RNA (1)...(19): siRNA sense strand
ggaagaggacgaacuaaug

SEQ ID NO: 1244474 - RNA, 19 nt, Homo sapiens
  misc_RNA (1)...(19): siRNA sense strand
ggaaaggucugcggcaugu

SEQ ID NO: 1244475 - RNA, 19 nt, Homo sapiens
  misc_RNA (1)...(19): siRNA sense strand
gaaagcaacaacagaauuc

SEQ ID NO: 1244476 - RNA, 19 nt, Homo sapiens
  misc_RNA (1)...(19): siRNA sense strand
caaguggacucagaagaaa

SEQ ID NO: 1244477 - RNA, 19 nt, Homo sapiens
  misc_RNA (1)...(19): siRNA sense strand
ccaacaggaugguaucuau

SEQ ID NO: 1244478 - RNA, 19 nt, Homo sapiens
  misc_RNA (1)...(19): siRNA sense strand
gacaagaaccgcaagaaug

SEQ ID NO: 1244479 - RNA, 19 nt, Homo sapiens
  misc_RNA (1)...(19): siRNA sense strand
gcacacacauguccaccau

SEQ ID NO: 1244480 - RNA, 19 nt, Homo sapiens
  misc_RNA (1)...(19): siRNA sense strand
gcgaugaaguagcaaauag

SEQ ID NO: 1244481 - RNA, 19 nt, Homo sapiens
  misc_RNA (1)...(19): siRNA sense strand
gcuguaaggucaugcugaa

SEQ ID NO: 1244482 - RNA, 19 nt, Homo sapiens
  misc_RNA (1)...(19): siRNA sense strand
gcaaacacccucugugagu

SEQ ID NO: 1244483 - RNA, 19 nt, Homo sapiens
  misc_RNA (1)...(19): siRNA sense strand
ccacccggcugauguuuga

SEQ ID NO: 1244484 - RNA, 19 nt, Homo sapiens
  misc_RNA (1)...(19): siRNA sense strand
caagacagcuauuuuguug

SEQ ID NO: 1244485 - RNA, 19 nt, Homo sapiens
  misc_RNA (1)...(19): siRNA sense strand
gcuauggguuucaucuuga

SEQ ID NO: 1244486 - RNA, 19 nt, Homo sapiens
  misc_RNA (1)...(19): siRNA sense strand
caacacggccucugugguu

SEQ ID NO: 1244487 - RNA, 19 nt, Homo sapiens
  misc_RNA (1)...(19): siRNA sense strand
gaaaccaccaccucuguug

SEQ ID NO: 1244488 - RNA, 19 nt, Homo sapiens
  misc_RNA (1)...(19): siRNA sense strand
ucagaaaggccacaucuug

SEQ ID NO: 1244489 - RNA, 19 nt, Homo sapiens
  misc_RNA (1)...(19): siRNA sense strand
gcacuuugcccaccacaug

SEQ ID NO: 1244490 - RNA, 19 nt, Homo sapiens
  misc_RNA (1)...(19): siRNA sense strand
acaagaaccgcaagaauga

SEQ ID NO: 1244491 - RNA, 19 nt, Homo sapiens
  misc_RNA (1)...(19): siRNA sense strand
gcaaauagugacagugaau

SEQ ID NO: 1244492 - RNA, 19 nt, Homo sapiens
  misc_RNA (1)...(19): siRNA sense strand
aagaaagggucaucaggaa

SEQ ID NO: 1244493 - RNA, 19 nt, Homo sapiens
  misc_RNA (1)...(19): siRNA sense strand
ccaaguggacucagaagaa

SEQ ID NO: 1244494 - RNA, 19 nt, Homo sapiens
  misc_RNA (1)...(19): siRNA sense strand
gcugagggcugcauuuguc

SEQ ID NO: 1244495 - RNA, 19 nt, Homo sapiens
  misc_RNA (1)...(19): siRNA sense strand
gauacaguuugccguggua

SEQ ID NO: 1244496 - RNA, 19 nt, Homo sapiens
  misc_RNA (1)...(19): siRNA sense strand
gaaagggucaucaggaaag

SEQ ID NO: 1244497 - RNA, 19 nt, Homo sapiens
  misc_RNA (1)...(19): siRNA sense strand
gcugagagcugugaauguc

SEQ ID NO: 1244498 - RNA, 19 nt, Homo sapiens
  misc_RNA (1)...(19): siRNA sense strand
ggaguucgcauaccacaug

SEQ ID NO: 1244499 - RNA, 19 nt, Homo sapiens
  misc_RNA (1)...(19): siRNA sense strand
uacgugagcuuugauggua

SEQ ID NO: 1244500 - RNA, 19 nt, Homo sapiens
  misc_RNA (1)...(19): siRNA sense strand
caaacacccucugugaguu

SEQ ID NO: 1244501 - RNA, 19 nt, Homo sapiens
  misc_RNA (1)...(19): siRNA sense strand
gugaauuugugaacaguug

SEQ ID NO: 1244502 - RNA, 19 nt, Homo sapiens
  misc_RNA (1)...(19): siRNA sense strand
ccuacaaucuccaccaaga

SEQ ID NO: 1244503 - RNA, 19 nt, Homo sapiens
  misc_RNA (1)...(19): siRNA sense strand
gacaacagcaacagcaauu

SEQ ID NO: 1244504 - RNA, 19 nt, Homo sapiens
  misc_RNA (1)...(19): siRNA sense strand
uguaaucgcgucuguauga

SEQ ID NO: 1244505 - RNA, 19 nt, Homo sapiens
  misc_RNA (1)...(19): siRNA sense strand
ggaaggacgcaacaagaug

SEQ ID NO: 1244506 - RNA, 19 nt, Homo sapiens
  misc_RNA (1)...(19): siRNA sense strand
gcuuaagaauggccaguau

SEQ ID NO: 1244507 - RNA, 19 nt, Homo sapiens
  misc_RNA (1)...(19): siRNA sense strand
acuaucaucuccacagaaa

SEQ ID NO: 1244508 - RNA, 19 nt, Homo sapiens
  misc_RNA (1)...(19): siRNA sense strand
cauuuaugcuucagucuug

SEQ ID NO: 1244509 - RNA, 19 nt, Homo sapiens
  misc_RNA (1)...(19): siRNA sense strand
acagagcgcugcccuccaa

SEQ ID NO: 1244510 - RNA, 19 nt, Homo sapiens
  misc_RNA (1)...(19): siRNA sense strand
ugaccuauguucugaucaa

SEQ ID NO: 1244511 - RNA, 19 nt, Homo sapiens
  misc_RNA (1)...(19): siRNA sense strand
cccguuaccucacauuuga

SEQ ID NO: 1244512 - RNA, 19 nt, Homo sapiens
  misc_RNA (1)...(19): siRNA sense strand
gcuaugugcugagugaaga

SEQ ID NO: 1244513 - RNA, 19 nt, Homo sapiens
  misc_RNA (1)...(19): siRNA sense strand
caacaacgacuacuaugag

SEQ ID NO: 1244514 - RNA, 19 nt, Homo sapiens
  misc_RNA (1)...(19): siRNA sense strand
ugaaaccacuggccucaca

SEQ ID NO: 1244515 - RNA, 19 nt, Homo sapiens
  misc_RNA (1)...(19): siRNA sense strand
ggacauugacccaaguugu

SEQ ID NO: 1244516 - RNA, 19 nt, Homo sapiens
  misc_RNA (1)...(19): siRNA sense strand
ugugggaacuucaaugaug

SEQ ID NO: 1244517 - RNA, 19 nt, Homo sapiens
  misc_RNA (1)...(19): siRNA sense strand
gaagggccaccgugugcua

SEQ ID NO: 1244518 - RNA, 19 nt, Homo sapiens
  misc_RNA (1)...(19): siRNA sense strand
caagaucagugccaagcau

SEQ ID NO: 1244519 - RNA, 19 nt, Homo sapiens
  misc_RNA (1)...(19): siRNA sense strand
gaacuaugacggcaacagu

SEQ ID NO: 1244520 - RNA, 19 nt, Homo sapiens
  misc_RNA (1)...(19): siRNA sense strand
caacucaacagacccauuc

SEQ ID NO: 1244521 - RNA, 19 nt, Homo sapiens
  misc_RNA (1)...(19): siRNA sense strand
cuacggagacccucauuau

SEQ ID NO: 1244522 - RNA, 19 nt, Homo sapiens
  misc_RNA (1)...(19): siRNA sense strand
agacuaccaucucuacaga

SEQ ID NO: 1244523 - RNA, 19 nt, Homo sapiens
  misc_RNA (1)...(19): siRNA sense strand
gaccaggagugucagaagu

SEQ ID NO: 1244524 - RNA, 19 nt, Homo sapiens
  misc_RNA (1)...(19): siRNA sense strand
ccgcaagaaugacaugaug

SEQ ID NO: 1244525 - RNA, 19 nt, Homo sapiens
  misc_RNA (1)...(19): siRNA sense strand
gugcaaacacccucuguga

SEQ ID NO: 1244526 - RNA, 19 nt, Homo sapiens
  misc_RNA (1)...(19): siRNA sense strand
gcccagcgaugaaguagca

SEQ ID NO: 1244527 - RNA, 19 nt, Homo sapiens
  misc_RNA (1)...(19): siRNA sense strand
gugggaacuucaaugauga

SEQ ID NO: 1244528 - RNA, 19 nt, Homo sapiens
  misc_RNA (1)...(19): siRNA sense strand
cagaaaggccacaucuuga

SEQ ID NO: 1244529 - RNA, 19 nt, Homo sapiens
  misc_RNA (1)...(19): siRNA sense strand
caacgcccaucccuucugu

SEQ ID NO: 1244530 - RNA, 19 nt, Homo sapiens
  misc_RNA (1)...(19): siRNA sense strand
guaaggucaugcugaaugg

SEQ ID NO: 1244531 - RNA, 19 nt, Homo sapiens
  misc_RNA (1)...(19): siRNA sense strand
gaugugcucuggaaacacu

SEQ ID NO: 1244532 - RNA, 19 nt, Homo sapiens
  misc_RNA (1)...(19): siRNA sense strand
acaaugaccaccugaaguu

SEQ ID NO: 1244533 - RNA, 19 nt, Homo sapiens
  misc_RNA (1)...(19): siRNA sense strand
gguuucaucuugaucaauc

SEQ ID NO: 1244534 - RNA, 19 nt, Homo sapiens
  misc_RNA (1)...(19): siRNA sense strand
gggaguauccggaaacaca

SEQ ID NO: 1244535 - RNA, 19 nt, Homo sapiens
  misc_RNA (1)...(19): siRNA sense strand
cagcuuugguggaaggaaa

SEQ ID NO: 1244536 - RNA, 19 nt, Homo sapiens
  misc_RNA (1)...(19): siRNA sense strand
uagcaaauagugacaguga

SEQ ID NO: 1244537 - RNA, 19 nt, Homo sapiens
  misc_RNA (1)...(19): siRNA sense strand
cugcaaacccaaccagaua

SEQ ID NO: 1244538 - RNA, 19 nt, Homo sapiens
  misc_RNA (1)...(19): siRNA sense strand
gcgaagccaugcccugaca

SEQ ID NO: 1244539 - RNA, 19 nt, Homo sapiens
  misc_RNA (1)...(19): siRNA sense strand
agacuaccaucuccacaga

SEQ ID NO: 1244540 - RNA, 19 nt, Homo sapiens
  misc_RNA (1)...(19): siRNA sense strand
agacuaccaucuccacaga

SEQ ID NO: 1244541 - RNA, 19 nt, Homo sapiens
  misc_RNA (1)...(19): siRNA sense strand
gaucaauccugggacuugu

SEQ ID NO: 1244542 - RNA, 19 nt, Homo sapiens
  misc_RNA (1)...(19): siRNA sense strand
uaacggagagggcagcuau

SEQ ID NO: 1244543 - RNA, 19 nt, Homo sapiens
  misc_RNA (1)...(19): siRNA sense strand
caggagaacccgaguggaa

SEQ ID NO: 1244544 - RNA, 19 nt, Homo sapiens
  misc_RNA (1)...(19): siRNA sense strand
ugaggaagaggacgaacua

SEQ ID NO: 1244545 - RNA, 19 nt, Homo sapiens
  misc_RNA (1)...(19): siRNA sense strand
cuacagcauuguuaacauc

SEQ ID NO: 1244546 - RNA, 19 nt, Homo sapiens
  misc_RNA (1)...(19): siRNA sense strand
ccauaaggcucagcagcaa

SEQ ID NO: 1244547 - RNA, 19 nt, Homo sapiens
  misc_RNA (1)...(19): siRNA sense strand
ugaaagcaacaacagaauu

SEQ ID NO: 1244548 - RNA, 19 nt, Homo sapiens
  misc_RNA (1)...(19): siRNA sense strand
cuacaacaacgacuacuau

SEQ ID NO: 1244549 - RNA, 19 nt, Homo sapiens
  misc_RNA (1)...(19): siRNA sense strand
ccaaaugcccgcuacgaau

SEQ ID NO: 1244550 - RNA, 19 nt, Homo sapiens
  misc_RNA (1)...(19): siRNA sense strand
gaagcaacacggccucugu

SEQ ID NO: 1244551 - RNA, 19 nt, Homo sapiens
  misc_RNA (1)...(19): siRNA sense strand
uucaugaggucuacauuga

SEQ ID NO: 1244552 - RNA, 19 nt, Homo sapiens
  misc_RNA (1)...(19): siRNA sense strand
caacagcaacagcaauugu

SEQ ID NO: 1244553 - RNA, 19 nt, Homo sapiens
  misc_RNA (1)...(19): siRNA sense strand
caugaggucuacauugaca

SEQ ID NO: 1244554 - RNA, 19 nt, Homo sapiens
  misc_RNA (1)...(19): siRNA sense strand
ccacuggccucacagaaaa

SEQ ID NO: 1244555 - RNA, 19 nt, Homo sapiens
  misc_RNA (1)...(19): siRNA sense strand
cgacaagaaccgcaagaau

SEQ ID NO: 1244556 - RNA, 19 nt, Homo sapiens
  misc_RNA (1)...(19): siRNA sense strand
acugugcgaucuuaauaaa

SEQ ID NO: 1244557 - RNA, 19 nt, Homo sapiens
  misc_RNA (1)...(19): siRNA sense strand
gcacucuuguccuggugaa

SEQ ID NO: 1244558 - RNA, 19 nt, Homo sapiens
  misc_RNA (1)...(19): siRNA sense strand
gaugaaguagcaaauagug

SEQ ID NO: 1244559 - RNA, 19 nt, Homo sapiens
  misc_RNA (1)...(19): siRNA sense strand
gaacuucaaugaugaggaa

SEQ ID NO: 1244560 - RNA, 19 nt, Homo sapiens
  misc_RNA (1)...(19): siRNA sense strand
gaaacacacucucuucuca

SEQ ID NO: 1244561 - RNA, 19 nt, Homo sapiens
  misc_RNA (1)...(19): siRNA sense strand
gugcagcccuccacauuua

SEQ ID NO: 1244562 - RNA, 19 nt, Homo sapiens
  misc_RNA (1)...(19): siRNA sense strand
gaacugugcgaucuuaaua

SEQ ID NO: 1244563 - RNA, 19 nt, Homo sapiens
  misc_RNA (1)...(19): siRNA sense strand
gaacaaugcucagucuaug

SEQ ID NO: 1244564 - RNA, 19 nt, Homo sapiens
  misc_RNA (1)...(19): siRNA sense strand
gaucaagacuguggacgua

SEQ ID NO: 1244565 - RNA, 19 nt, Homo sapiens
  misc_RNA (1)...(19): siRNA sense strand
ugacgggaaucaucucuua

SEQ ID NO: 1244566 - RNA, 19 nt, Homo sapiens
  misc_RNA (1)...(19): siRNA sense strand
ggaaagauaaggacauuga

SEQ ID NO: 1244567 - RNA, 19 nt, Homo sapiens
  misc_RNA (1)...(19): siRNA sense strand
caacagcaauugugucuca

SEQ ID NO: 1244568 - RNA, 19 nt, Homo sapiens
  misc_RNA (1)...(19): siRNA sense strand
gugaacaguuggaaagaua

SEQ ID NO: 1244569 - RNA, 19 nt, Homo sapiens
  misc_RNA (1)...(19): siRNA sense strand
ccagaaagccagcaucuaa

SEQ ID NO: 1244570 - RNA, 19 nt, Homo sapiens
  misc_RNA (1)...(19): siRNA sense strand
caacagcccaugcagcuua

SEQ ID NO: 1244571 - RNA, 19 nt, Homo sapiens
  misc_RNA (1)...(19): siRNA sense strand
gaagaggacgaacuaauga

SEQ ID NO: 1244572 - RNA, 19 nt, Homo sapiens
  misc_RNA (1)...(19): siRNA sense strand
gcaauugcuucuacaacaa

SEQ ID NO: 1244573 - RNA, 19 nt, Homo sapiens
  misc_RNA (1)...(19): siRNA sense strand
gcagacgccuggaacaaga

SEQ ID NO: 1244574 - RNA, 19 nt, Homo sapiens
  misc_RNA (1)...(19): siRNA sense strand
ggaagaggacgaacuaaug

SEQ ID NO: 1244575 - RNA, 19 nt, Homo sapiens
  misc_RNA (1)...(19): siRNA sense strand
ggaaaggucugcggcaugu

SEQ ID NO: 1244576 - RNA, 19 nt, Homo sapiens
  misc_RNA (1)...(19): siRNA sense strand
gaaagcaacaacagaauuc

SEQ ID NO: 1244577 - RNA, 19 nt, Homo sapiens
  misc_RNA (1)...(19): siRNA sense strand
caaguggacucagaagaaa

SEQ ID NO: 1244578 - RNA, 19 nt, Homo sapiens
  misc_RNA (1)...(19): siRNA sense strand
ccaacaggaugguaucuau

SEQ ID NO: 1244579 - RNA, 19 nt, Homo sapiens
  misc_RNA (1)...(19): siRNA sense strand
gacaagaaccgcaagaaug

SEQ ID NO: 1244580 - RNA, 19 nt, Homo sapiens
  misc_RNA (1)...(19): siRNA sense strand
gcacacacauguccaccau

SEQ ID NO: 1244581 - RNA, 19 nt, Homo sapiens
  misc_RNA (1)...(19): siRNA sense strand
gaacgaggaggaagagaga

SEQ ID NO: 1244582 - RNA, 19 nt, Homo sapiens
  misc_RNA (1)...(19): siRNA sense strand
gcgaugaaguagcaaauag

SEQ ID NO: 1244583 - RNA, 19 nt, Homo sapiens
  misc_RNA (1)...(19): siRNA sense strand
gcuguaaggucaugcugaa

SEQ ID NO: 1244584 - RNA, 19 nt, Homo sapiens
  misc_RNA (1)...(19): siRNA sense strand
gcaaacacccucugugagu

SEQ ID NO: 1244585 - RNA, 19 nt, Homo sapiens
  misc_RNA (1)...(19): siRNA sense strand
ccacccggcugauguuuga

SEQ ID NO: 1244586 - RNA, 19 nt, Homo sapiens
  misc_RNA (1)...(19): siRNA sense strand
caagacagcuauuuuguug

SEQ ID NO: 1244587 - RNA, 19 nt, Homo sapiens
  misc_RNA (1)...(19): siRNA sense strand
gcuauggguuucaucuuga

SEQ ID NO: 1244588 - RNA, 19 nt, Homo sapiens
  misc_RNA (1)...(19): siRNA sense strand
caacacggccucugugguu

SEQ ID NO: 1244589 - RNA, 19 nt, Homo sapiens
  misc_RNA (1)...(19): siRNA sense strand
gaaaccaccaccucuguug

SEQ ID NO: 1244590 - RNA, 19 nt, Homo sapiens
  misc_RNA (1)...(19): siRNA sense strand
ucagaaaggccacaucuug

SEQ ID NO: 1244591 - RNA, 19 nt, Homo sapiens
  misc_RNA (1)...(19): siRNA sense strand
gcacuuugcccaccacaug

SEQ ID NO: 1244592 - RNA, 19 nt, Homo sapiens
  misc_RNA (1)...(19): siRNA sense strand
acaagaaccgcaagaauga

SEQ ID NO: 1244593 - RNA, 19 nt, Homo sapiens
  misc_RNA (1)...(19): siRNA sense strand
gcaaauagugacagugaau

SEQ ID NO: 1244594 - RNA, 19 nt, Homo sapiens
  misc_RNA (1)...(19): siRNA sense strand
aagaaagggucaucaggaa

SEQ ID NO: 1244595 - RNA, 19 nt, Homo sapiens
  misc_RNA (1)...(19): siRNA sense strand
ccaaguggacucagaagaa

SEQ ID NO: 1244596 - RNA, 19 nt, Homo sapiens
  misc_RNA (1)...(19): siRNA sense strand
gcugagggcugcauuuguc

SEQ ID NO: 1244597 - RNA, 19 nt, Homo sapiens
  misc_RNA (1)...(19): siRNA sense strand
gauacaguuugccguggua

SEQ ID NO: 1244598 - RNA, 19 nt, Homo sapiens
  misc_RNA (1)...(19): siRNA sense strand
gaaagggucaucaggaaag

SEQ ID NO: 1244599 - RNA, 19 nt, Homo sapiens
  misc_RNA (1)...(19): siRNA sense strand
gcugagagcugugaauguc

SEQ ID NO: 1244600 - RNA, 19 nt, Homo sapiens
  misc_RNA (1)...(19): siRNA sense strand
ggaguucgcauaccacaug

SEQ ID NO: 1244601 - RNA, 19 nt, Homo sapiens
  misc_RNA (1)...(19): siRNA sense strand
uacgugagcuuugauggua

SEQ ID NO: 1244602 - RNA, 19 nt, Homo sapiens
  misc_RNA (1)...(19): siRNA sense strand
caaacacccucugugaguu

SEQ ID NO: 1244603 - RNA, 19 nt, Homo sapiens
  misc_RNA (1)...(19): siRNA sense strand
gugaauuugugaacaguug

SEQ ID NO: 1244604 - RNA, 19 nt, Homo sapiens
  misc_RNA (1)...(19): siRNA sense strand
ccuacaaucuccaccaaga

SEQ ID NO: 1244605 - RNA, 19 nt, Homo sapiens
  misc_RNA (1)...(19): siRNA sense strand
gacaacagcaacagcaauu

SEQ ID NO: 1244606 - RNA, 19 nt, Homo sapiens
  misc_RNA (1)...(19): siRNA sense strand
uguaaucgcgucuguauga

SEQ ID NO: 1244607 - RNA, 19 nt, Homo sapiens
  misc_RNA (1)...(19): siRNA sense strand
ggaaggacgcaacaagaug

SEQ ID NO: 1244608 - RNA, 19 nt, Homo sapiens
  misc_RNA (1)...(19): siRNA sense strand
gcuuaagaauggccaguau

SEQ ID NO: 1244609 - RNA, 19 nt, Homo sapiens
  misc_RNA (1)...(19): siRNA sense strand
acuaucaucuccacagaaa

SEQ ID NO: 1244610 - RNA, 19 nt, Homo sapiens
  misc_RNA (1)...(19): siRNA sense strand
cauuuaugcuucagucuug

SEQ ID NO: 1244611 - RNA, 19 nt, Homo sapiens
  misc_RNA (1)...(19): siRNA sense strand
acagagcgcugcccuccaa

SEQ ID NO: 1244612 - RNA, 19 nt, Homo sapiens
  misc_RNA (1)...(19): siRNA sense strand
ugaccuauguucugaucaa

SEQ ID NO: 1244613 - RNA, 19 nt, Homo sapiens
  misc_RNA (1)...(19): siRNA sense strand
cccguuaccucacauuuga

SEQ ID NO: 1244614 - RNA, 19 nt, Homo sapiens
  misc_RNA (1)...(19): siRNA sense strand
gcuaugugcugagugaaga

SEQ ID NO: 1244615 - RNA, 19 nt, Homo sapiens
  misc_RNA (1)...(19): siRNA sense strand
caacaacgacuacuaugag

SEQ ID NO: 1244616 - RNA, 19 nt, Homo sapiens
  misc_RNA (1)...(19): siRNA sense strand
ugaaaccacuggccucaca

SEQ ID NO: 1244617 - RNA, 19 nt, Homo sapiens
  misc_RNA (1)...(19): siRNA sense strand
gagagugcauuuacagaac

SEQ ID NO: 1244618 - RNA, 19 nt, Homo sapiens
  misc_RNA (1)...(19): siRNA sense strand
ggacauugacccaaguugu

SEQ ID NO: 1244619 - RNA, 19 nt, Homo sapiens
  misc_RNA (1)...(19): siRNA sense strand
ugugggaacuucaaugaug

SEQ ID NO: 1244620 - RNA, 19 nt, Homo sapiens
  misc_RNA (1)...(19): siRNA sense strand
gaagggccaccgugugcua

SEQ ID NO: 1244621 - RNA, 19 nt, Homo sapiens
  misc_RNA (1)...(19): siRNA sense strand
caagaucagugccaagcau

SEQ ID NO: 1244622 - RNA, 19 nt, Homo sapiens
  misc_RNA (1)...(19): siRNA sense strand
gaacuaugacggcaacagu

SEQ ID NO: 1244623 - RNA, 19 nt, Homo sapiens
  misc_RNA (1)...(19): siRNA sense strand
caacucaacagacccauuc

SEQ ID NO: 1244624 - RNA, 19 nt, Homo sapiens
  misc_RNA (1)...(19): siRNA sense strand
cuacggagacccucauuau

SEQ ID NO: 1244625 - RNA, 19 nt, Homo sapiens
  misc_RNA (1)...(19): siRNA sense strand
agacuaccaucucuacaga

SEQ ID NO: 1244626 - RNA, 19 nt, Homo sapiens
  misc_RNA (1)...(19): siRNA sense strand
gaccaggagugucagaagu

SEQ ID NO: 1244627 - RNA, 19 nt, Homo sapiens
  misc_RNA (1)...(19): siRNA sense strand
ccgcaagaaugacaugaug

SEQ ID NO: 1244628 - RNA, 19 nt, Homo sapiens
  misc_RNA (1)...(19): siRNA sense strand
gugcaaacacccucuguga

SEQ ID NO: 1244629 - RNA, 19 nt, Homo sapiens
  misc_RNA (1)...(19): siRNA sense strand
gcccagcgaugaaguagca

SEQ ID NO: 1244630 - RNA, 19 nt, Homo sapiens
  misc_RNA (1)...(19): siRNA sense strand
gugggaacuucaaugauga

SEQ ID NO: 1244631 - RNA, 19 nt, Homo sapiens
  misc_RNA (1)...(19): siRNA sense strand
cagaaaggccacaucuuga

SEQ ID NO: 1244632 - RNA, 19 nt, Homo sapiens
  misc_RNA (1)...(19): siRNA sense strand
caacgcccaucccuucugu

SEQ ID NO: 1244633 - RNA, 19 nt, Homo sapiens
  misc_RNA (1)...(19): siRNA sense strand
gaugugcucuggaaacacu

SEQ ID NO: 1244634 - RNA, 19 nt, Homo sapiens
  misc_RNA (1)...(19): siRNA sense strand
guaaggucaugcugaaugg

SEQ ID NO: 1244635 - RNA, 19 nt, Homo sapiens
  misc_RNA (1)...(19): siRNA sense strand
acaaugaccaccugaaguu

SEQ ID NO: 1244636 - RNA, 19 nt, Homo sapiens
  misc_RNA (1)...(19): siRNA sense strand
gguuucaucuugaucaauc

SEQ ID NO: 1244637 - RNA, 19 nt, Homo sapiens
  misc_RNA (1)...(19): siRNA sense strand
gggaguauccggaaacaca

SEQ ID NO: 1244638 - RNA, 19 nt, Homo sapiens
  misc_RNA (1)...(19): siRNA sense strand
cagcuuugguggaaggaaa

SEQ ID NO: 1244639 - RNA, 19 nt, Homo sapiens
  misc_RNA (1)...(19): siRNA sense strand
uagcaaauagugacaguga

SEQ ID NO: 1244640 - RNA, 19 nt, Homo sapiens
  misc_RNA (1)...(19): siRNA sense strand
cugcaaacccaaccagaua

SEQ ID NO: 1244641 - RNA, 19 nt, Homo sapiens
  misc_RNA (1)...(19): siRNA sense strand
gcgaagccaugcccugaca

SEQ ID NO: 1244642 - RNA, 19 nt, Homo sapiens
  misc_RNA (1)...(19): siRNA sense strand
agacuaccaucuccacaga

SEQ ID NO: 1244643 - RNA, 19 nt, Homo sapiens
  misc_RNA (1)...(19): siRNA sense strand
agacuaccaucuccacaga

SEQ ID NO: 1244644 - RNA, 19 nt, Homo sapiens
  misc_RNA (1)...(19): siRNA sense strand
gaucaauccugggacuugu

SEQ ID NO: 1244645 - RNA, 19 nt, Homo sapiens
  misc_RNA (1)...(19): siRNA sense strand
gaagcaacacggccucugu

SEQ ID NO: 1244646 - RNA, 19 nt, Homo sapiens
  misc_RNA (1)...(19): siRNA sense strand
uaacggagagggcagcuau

SEQ ID NO: 1244647 - RNA, 19 nt, Homo sapiens
  misc_RNA (1)...(19): siRNA sense strand
caggagaacccgaguggaa

SEQ ID NO: 1244648 - RNA, 19 nt, Homo sapiens
  misc_RNA (1)...(19): siRNA sense strand
ugaggaagaggacgaacua

SEQ ID NO: 1244649 - RNA, 19 nt, Homo sapiens
  misc_RNA (1)...(19): siRNA sense strand
cuacagcauuguuaacauc

SEQ ID NO: 1244650 - RNA, 19 nt, Homo sapiens
  misc_RNA (1)...(19): siRNA sense strand
ccauaaggcucagcagcaa

SEQ ID NO: 1244651 - RNA, 19 nt, Homo sapiens
  misc_RNA (1)...(19): siRNA sense strand
ugaaagcaacaacagaauu

SEQ ID NO: 1244652 - RNA, 19 nt, Homo sapiens
  misc_RNA (1)...(19): siRNA sense strand
cuacaacaacgacuacuau

SEQ ID NO: 1244653 - RNA, 19 nt, Homo sapiens
  misc_RNA (1)...(19): siRNA sense strand
ccaaaugcccgcuacgaau

SEQ ID NO: 1244654 - RNA, 19 nt, Homo sapiens
  misc_RNA (1)...(19): siRNA sense strand
uucaugaggucuacauuga

SEQ ID NO: 1244655 - RNA, 19 nt, Homo sapiens
  misc_RNA (1)...(19): siRNA sense strand
caacagcaacagcaauugu

SEQ ID NO: 1244656 - RNA, 19 nt, Homo sapiens
  misc_RNA (1)...(19): siRNA sense strand
caugaggucuacauugaca

SEQ ID NO: 1244657 - RNA, 19 nt, Homo sapiens
  misc_RNA (1)...(19): siRNA sense strand
acugugcgaucuuaauaaa

SEQ ID NO: 1244658 - RNA, 19 nt, Homo sapiens
  misc_RNA (1)...(19): siRNA sense strand
cgacaagaaccgcaagaau

SEQ ID NO: 1244659 - RNA, 19 nt, Homo sapiens
  misc_RNA (1)...(19): siRNA sense strand
gaacuucaaugaugaggaa

SEQ ID NO: 1244660 - RNA, 19 nt, Homo sapiens
  misc_RNA (1)...(19): siRNA sense strand
gaaacacacucucuucuca

SEQ ID NO: 1244661 - RNA, 19 nt, Homo sapiens
  misc_RNA (1)...(19): siRNA sense strand
gugcagcccuccacauuua

SEQ ID NO: 1244662 - RNA, 19 nt, Homo sapiens
  misc_RNA (1)...(19): siRNA sense strand
gaacugugcgaucuuaaua

SEQ ID NO: 1244663 - RNA, 19 nt, Homo sapiens
  misc_RNA (1)...(19): siRNA sense strand
gaacaaugcucagucuaug

SEQ ID NO: 1244664 - RNA, 19 nt, Homo sapiens
  misc_RNA (1)...(19): siRNA sense strand
gaucaagacuguggacgua

SEQ ID NO: 1244665 - RNA, 19 nt, Homo sapiens
  misc_RNA (1)...(19): siRNA sense strand
ugacgggaaucaucucuua

SEQ ID NO: 1244666 - RNA, 19 nt, Homo sapiens
  misc_RNA (1)...(19): siRNA sense strand
ggaaagauaaggacauuga

SEQ ID NO: 1244667 - RNA, 19 nt, Homo sapiens
  misc_RNA (1)...(19): siRNA sense strand
caacagcaauugugucuca

SEQ ID NO: 1244668 - RNA, 19 nt, Homo sapiens
  misc_RNA (1)...(19): siRNA sense strand
gugaacaguuggaaagaua

SEQ ID NO: 1244669 - RNA, 19 nt, Homo sapiens
  misc_RNA (1)...(19): siRNA sense strand
ccagaaagccagcaucuaa

SEQ ID NO: 1244670 - RNA, 19 nt, Homo sapiens
  misc_RNA (1)...(19): siRNA sense strand
caacagcccaugcagcuua

SEQ ID NO: 1244671 - RNA, 19 nt, Homo sapiens
  misc_RNA (1)...(19): siRNA sense strand
gaagaggacgaacuaauga

SEQ ID NO: 1244672 - RNA, 19 nt, Homo sapiens
  misc_RNA (1)...(19): siRNA sense strand
gcaauugcuucuacaacaa

SEQ ID NO: 1244673 - RNA, 19 nt, Homo sapiens
  misc_RNA (1)...(19): siRNA sense strand
gcagacgccuggaacaaga

SEQ ID NO: 1244674 - RNA, 19 nt, Homo sapiens
  misc_RNA (1)...(19): siRNA sense strand
ggaagaggacgaacuaaug

SEQ ID NO: 1244675 - RNA, 19 nt, Homo sapiens
  misc_RNA (1)...(19): siRNA sense strand
ggaaaggucugcggcaugu

SEQ ID NO: 1244676 - RNA, 19 nt, Homo sapiens
  misc_RNA (1)...(19): siRNA sense strand
gaaagcaacaacagaauuc

SEQ ID NO: 1244677 - RNA, 19 nt, Homo sapiens
  misc_RNA (1)...(19): siRNA sense strand
caaguggacucagaagaaa

SEQ ID NO: 1244678 - RNA, 19 nt, Homo sapiens
  misc_RNA (1)...(19): siRNA sense strand
ccaacaggaugguaucuau

SEQ ID NO: 1244679 - RNA, 19 nt, Homo sapiens
  misc_RNA (1)...(19): siRNA sense strand
gacaagaaccgcaagaaug

SEQ ID NO: 1244680 - RNA, 19 nt, Homo sapiens
  misc_RNA (1)...(19): siRNA sense strand
gcacacacauguccaccau

SEQ ID NO: 1244681 - RNA, 19 nt, Homo sapiens
  misc_RNA (1)...(19): siRNA sense strand
gaacgaggaggaagagaga

SEQ ID NO: 1244682 - RNA, 19 nt, Homo sapiens
  misc_RNA (1)...(19): siRNA sense strand
gcgaugaaguagcaaauag

SEQ ID NO: 1244683 - RNA, 19 nt, Homo sapiens
  misc_RNA (1)...(19): siRNA sense strand
gcuguaaggucaugcugaa

SEQ ID NO: 1244684 - RNA, 19 nt, Homo sapiens
  misc_RNA (1)...(19): siRNA sense strand
gcaaacacccucugugagu

SEQ ID NO: 1244685 - RNA, 19 nt, Homo sapiens
  misc_RNA (1)...(19): siRNA sense strand
ccacccggcugauguuuga

SEQ ID NO: 1244686 - RNA, 19 nt, Homo sapiens
  misc_RNA (1)...(19): siRNA sense strand
caagacagcuauuuuguug

SEQ ID NO: 1244687 - RNA, 19 nt, Homo sapiens
  misc_RNA (1)...(19): siRNA sense strand
gcuauggguuucaucuuga

SEQ ID NO: 1244688 - RNA, 19 nt, Homo sapiens
  misc_RNA (1)...(19): siRNA sense strand
caacacggccucugugguu

SEQ ID NO: 1244689 - RNA, 19 nt, Homo sapiens
  misc_RNA (1)...(19): siRNA sense strand
gaaaccaccaccucuguug

SEQ ID NO: 1244690 - RNA, 19 nt, Homo sapiens
  misc_RNA (1)...(19): siRNA sense strand
ucagaaaggccacaucuug

SEQ ID NO: 1244691 - RNA, 19 nt, Homo sapiens
  misc_RNA (1)...(19): siRNA sense strand
gcacuuugcccaccacaug

SEQ ID NO: 1244692 - RNA, 19 nt, Homo sapiens
  misc_RNA (1)...(19): siRNA sense strand
acaagaaccgcaagaauga

SEQ ID NO: 1244693 - RNA, 19 nt, Homo sapiens
  misc_RNA (1)...(19): siRNA sense strand
gcaaauagugacagugaau

SEQ ID NO: 1244694 - RNA, 19 nt, Homo sapiens
  misc_RNA (1)...(19): siRNA sense strand
aagaaagggucaucaggaa

SEQ ID NO: 1244695 - RNA, 19 nt, Homo sapiens
  misc_RNA (1)...(19): siRNA sense strand
ccaaguggacucagaagaa

SEQ ID NO: 1244696 - RNA, 19 nt, Homo sapiens
  misc_RNA (1)...(19): siRNA sense strand
gcugagggcugcauuuguc

SEQ ID NO: 1244697 - RNA, 19 nt, Homo sapiens
  misc_RNA (1)...(19): siRNA sense strand
gauacaguuugccguggua

SEQ ID NO: 1244698 - RNA, 19 nt, Homo sapiens
  misc_RNA (1)...(19): siRNA sense strand
gaaagggucaucaggaaag

SEQ ID NO: 1244699 - RNA, 19 nt, Homo sapiens
  misc_RNA (1)...(19): siRNA sense strand
gcugagagcugugaauguc

SEQ ID NO: 1244700 - RNA, 19 nt, Homo sapiens
  misc_RNA (1)...(19): siRNA sense strand
ggaguucgcauaccacaug

SEQ ID NO: 1244701 - RNA, 19 nt, Homo sapiens
  misc_RNA (1)...(19): siRNA sense strand
uacgugagcuuugauggua

SEQ ID NO: 1244702 - RNA, 19 nt, Homo sapiens
  misc_RNA (1)...(19): siRNA sense strand
caaacacccucugugaguu

SEQ ID NO: 1244703 - RNA, 19 nt, Homo sapiens
  misc_RNA (1)...(19): siRNA sense strand
gugaauuugugaacaguug

SEQ ID NO: 1244704 - RNA, 19 nt, Homo sapiens
  misc_RNA (1)...(19): siRNA sense strand
ccuacaaucuccaccaaga

SEQ ID NO: 1244705 - RNA, 19 nt, Homo sapiens
  misc_RNA (1)...(19): siRNA sense strand
gacaacagcaacagcaauu

SEQ ID NO: 1244706 - RNA, 19 nt, Homo sapiens
  misc_RNA (1)...(19): siRNA sense strand
uguaaucgcgucuguauga

SEQ ID NO: 1244707 - RNA, 19 nt, Homo sapiens
  misc_RNA (1)...(19): siRNA sense strand
ggaaggacgcaacaagaug

SEQ ID NO: 1244708 - RNA, 19 nt, Homo sapiens
  misc_RNA (1)...(19): siRNA sense strand
gcuuaagaauggccaguau

SEQ ID NO: 1244709 - RNA, 19 nt, Homo sapiens
  misc_RNA (1)...(19): siRNA sense strand
acuaucaucuccacagaaa

SEQ ID NO: 1244710 - RNA, 19 nt, Homo sapiens
  misc_RNA (1)...(19): siRNA sense strand
cauuuaugcuucagucuug

SEQ ID NO: 1244711 - RNA, 19 nt, Homo sapiens
  misc_RNA (1)...(19): siRNA sense strand
acagagcgcugcccuccaa

SEQ ID NO: 1244712 - RNA, 19 nt, Homo sapiens
  misc_RNA (1)...(19): siRNA sense strand
ugaccuauguucugaucaa

SEQ ID NO: 1244713 - RNA, 19 nt, Homo sapiens
  misc_RNA (1)...(19): siRNA sense strand
cccguuaccucacauuuga

SEQ ID NO: 1244714 - RNA, 19 nt, Homo sapiens
  misc_RNA (1)...(19): siRNA sense strand
gcuaugugcugagugaaga

SEQ ID NO: 1244715 - RNA, 19 nt, Homo sapiens
  misc_RNA (1)...(19): siRNA sense strand
caacaacgacuacuaugag

SEQ ID NO: 1244716 - RNA, 19 nt, Homo sapiens
  misc_RNA (1)...(19): siRNA sense strand
ugaaaccacuggccucaca

SEQ ID NO: 1244717 - RNA, 19 nt, Homo sapiens
  misc_RNA (1)...(19): siRNA sense strand
gagagugcauuuacagaac

SEQ ID NO: 1244718 - RNA, 19 nt, Homo sapiens
  misc_RNA (1)...(19): siRNA sense strand
ggacauugacccaaguugu

SEQ ID NO: 1244719 - RNA, 19 nt, Homo sapiens
  misc_RNA (1)...(19): siRNA sense strand
ugugggaacuucaaugaug

SEQ ID NO: 1244720 - RNA, 19 nt, Homo sapiens
  misc_RNA (1)...(19): siRNA sense strand
gaagggccaccgugugcua

SEQ ID NO: 1244721 - RNA, 19 nt, Homo sapiens
  misc_RNA (1)...(19): siRNA sense strand
caagaucagugccaagcau

SEQ ID NO: 1244722 - RNA, 19 nt, Homo sapiens
  misc_RNA (1)...(19): siRNA sense strand
gaacuaugacggcaacagu

SEQ ID NO: 1244723 - RNA, 19 nt, Homo sapiens
  misc_RNA (1)...(19): siRNA sense strand
caacucaacagacccauuc

SEQ ID NO: 1244724 - RNA, 19 nt, Homo sapiens
  misc_RNA (1)...(19): siRNA sense strand
cuacggagacccucauuau

SEQ ID NO: 1244725 - RNA, 19 nt, Homo sapiens
  misc_RNA (1)...(19): siRNA sense strand
agacuaccaucucuacaga

SEQ ID NO: 1244726 - RNA, 19 nt, Homo sapiens
  misc_RNA (1)...(19): siRNA sense strand
gaccaggagugucagaagu

SEQ ID NO: 1244727 - RNA, 19 nt, Homo sapiens
  misc_RNA (1)...(19): siRNA sense strand
ccgcaagaaugacaugaug

SEQ ID NO: 1244728 - RNA, 19 nt, Homo sapiens
  misc_RNA (1)...(19): siRNA sense strand
gugcaaacacccucuguga

SEQ ID NO: 1244729 - RNA, 19 nt, Homo sapiens
  misc_RNA (1)...(19): siRNA sense strand
gcccagcgaugaaguagca

SEQ ID NO: 1244730 - RNA, 19 nt, Homo sapiens
  misc_RNA (1)...(19): siRNA sense strand
gugggaacuucaaugauga

SEQ ID NO: 1244731 - RNA, 19 nt, Homo sapiens
  misc_RNA (1)...(19): siRNA sense strand
cagaaaggccacaucuuga

SEQ ID NO: 1244732 - RNA, 19 nt, Homo sapiens
  misc_RNA (1)...(19): siRNA sense strand
caacgcccaucccuucugu

SEQ ID NO: 1244733 - RNA, 19 nt, Homo sapiens
  misc_RNA (1)...(19): siRNA sense strand
gaugugcucuggaaacacu

SEQ ID NO: 1244734 - RNA, 19 nt, Homo sapiens
  misc_RNA (1)...(19): siRNA sense strand
guaaggucaugcugaaugg

SEQ ID NO: 1244735 - RNA, 19 nt, Homo sapiens
  misc_RNA (1)...(19): siRNA sense strand
acaaugaccaccugaaguu

SEQ ID NO: 1244736 - RNA, 19 nt, Homo sapiens
  misc_RNA (1)...(19): siRNA sense strand
gguuucaucuugaucaauc

SEQ ID NO: 1244737 - RNA, 19 nt, Homo sapiens
  misc_RNA (1)...(19): siRNA sense strand
gggaguauccggaaacaca

SEQ ID NO: 1244738 - RNA, 19 nt, Homo sapiens
  misc_RNA (1)...(19): siRNA sense strand
cagcuuugguggaaggaaa

SEQ ID NO: 1244739 - RNA, 19 nt, Homo sapiens
  misc_RNA (1)...(19): siRNA sense strand
uagcaaauagugacaguga

SEQ ID NO: 1244740 - RNA, 19 nt, Homo sapiens
  misc_RNA (1)...(19): siRNA sense strand
cugcaaacccaaccagaua

SEQ ID NO: 1244741 - RNA, 19 nt, Homo sapiens
  misc_RNA (1)...(19): siRNA sense strand
gcgaagccaugcccugaca

SEQ ID NO: 1244742 - RNA, 19 nt, Homo sapiens
  misc_RNA (1)...(19): siRNA sense strand
agacuaccaucuccacaga

SEQ ID NO: 1244743 - RNA, 19 nt, Homo sapiens
  misc_RNA (1)...(19): siRNA sense strand
agacuaccaucuccacaga

SEQ ID NO: 1244744 - RNA, 19 nt, Homo sapiens
  misc_RNA (1)...(19): siRNA sense strand
gaucaauccugggacuugu

SEQ ID NO: 1244745 - RNA, 19 nt, Homo sapiens
  misc_RNA (1)...(19): siRNA sense strand
gaagcaacacggccucugu

SEQ ID NO: 1244746 - RNA, 19 nt, Homo sapiens
  misc_RNA (1)...(19): siRNA sense strand
uaacggagagggcagcuau

SEQ ID NO: 1244747 - RNA, 19 nt, Homo sapiens
  misc_RNA (1)...(19): siRNA sense strand
caggagaacccgaguggaa

SEQ ID NO: 1244748 - RNA, 19 nt, Homo sapiens
  misc_RNA (1)...(19): siRNA sense strand
ugaggaagaggacgaacua

SEQ ID NO: 1244749 - RNA, 19 nt, Homo sapiens
  misc_RNA (1)...(19): siRNA sense strand
cuacagcauuguuaacauc

SEQ ID NO: 1244750 - RNA, 19 nt, Homo sapiens
  misc_RNA (1)...(19): siRNA sense strand
ccauaaggcucagcagcaa

SEQ ID NO: 1244751 - RNA, 19 nt, Homo sapiens
  misc_RNA (1)...(19): siRNA sense strand
ugaaagcaacaacagaauu

SEQ ID NO: 1244752 - RNA, 19 nt, Homo sapiens
  misc_RNA (1)...(19): siRNA sense strand
cuacaacaacgacuacuau

SEQ ID NO: 1244753 - RNA, 19 nt, Homo sapiens
  misc_RNA (1)...(19): siRNA sense strand
ccaaaugcccgcuacgaau

SEQ ID NO: 1244754 - RNA, 19 nt, Homo sapiens
  misc_RNA (1)...(19): siRNA sense strand
uucaugaggucuacauuga

SEQ ID NO: 1244755 - RNA, 19 nt, Homo sapiens
  misc_RNA (1)...(19): siRNA sense strand
caacagcaacagcaauugu

SEQ ID NO: 1244756 - RNA, 19 nt, Homo sapiens
  misc_RNA (1)...(19): siRNA sense strand
caugaggucuacauugaca

SEQ ID NO: 1244757 - RNA, 19 nt, Homo sapiens
  misc_RNA (1)...(19): siRNA sense strand
acugugcgaucuuaauaaa

SEQ ID NO: 1244758 - RNA, 19 nt, Homo sapiens
  misc_RNA (1)...(19): siRNA sense strand
cgacaagaaccgcaagaau

SEQ ID NO: 1244759 - RNA, 19 nt, Homo sapiens
  misc_RNA (1)...(19): siRNA sense strand
gaacuucaaugaugaggaa

SEQ ID NO: 1244760 - RNA, 19 nt, Homo sapiens
  misc_RNA (1)...(19): siRNA sense strand
gaaacacacucucuucuca

SEQ ID NO: 1244761 - RNA, 19 nt, Homo sapiens
  misc_RNA (1)...(19): siRNA sense strand
gugcagcccuccacauuua

SEQ ID NO: 1244762 - RNA, 19 nt, Homo sapiens
  misc_RNA (1)...(19): siRNA sense strand
gaacugugcgaucuuaaua

SEQ ID NO: 1244763 - RNA, 19 nt, Homo sapiens
  misc_RNA (1)...(19): siRNA sense strand
gaacaaugcucagucuaug

SEQ ID NO: 1244764 - RNA, 19 nt, Homo sapiens
  misc_RNA (1)...(19): siRNA sense strand
gaucaagacuguggacgua

SEQ ID NO: 1244765 - RNA, 19 nt, Homo sapiens
  misc_RNA (1)...(19): siRNA sense strand
ugacgggaaucaucucuua

SEQ ID NO: 1244766 - RNA, 19 nt, Homo sapiens
  misc_RNA (1)...(19): siRNA sense strand
ggaaagauaaggacauuga

SEQ ID NO: 1244767 - RNA, 19 nt, Homo sapiens
  misc_RNA (1)...(19): siRNA sense strand
caacagcaauugugucuca

SEQ ID NO: 1244768 - RNA, 19 nt, Homo sapiens
  misc_RNA (1)...(19): siRNA sense strand
gugaacaguuggaaagaua

SEQ ID NO: 1244769 - RNA, 19 nt, Homo sapiens
  misc_RNA (1)...(19): siRNA sense strand
caacagcccaugcagcuua

SEQ ID NO: 1244770 - RNA, 19 nt, Homo sapiens
  misc_RNA (1)...(19): siRNA sense strand
gaagaggacgaacuaauga

SEQ ID NO: 1244771 - RNA, 19 nt, Homo sapiens
  misc_RNA (1)...(19): siRNA sense strand
gcaauugcuucuacaacaa

SEQ ID NO: 1244772 - RNA, 19 nt, Homo sapiens
  misc_RNA (1)...(19): siRNA sense strand
gcagacgccuggaacaaga

SEQ ID NO: 1244773 - RNA, 19 nt, Homo sapiens
  misc_RNA (1)...(19): siRNA sense strand
ggaagaggacgaacuaaug

SEQ ID NO: 1244774 - RNA, 19 nt, Homo sapiens
  misc_RNA (1)...(19): siRNA sense strand
ggaaaggucugcggcaugu

SEQ ID NO: 1244775 - RNA, 19 nt, Homo sapiens
  misc_RNA (1)...(19): siRNA sense strand
gaaagcaacaacagaauuc

SEQ ID NO: 1244776 - RNA, 19 nt, Homo sapiens
  misc_RNA (1)...(19): siRNA sense strand
caaguggacucagaagaaa

SEQ ID NO: 1244777 - RNA, 19 nt, Homo sapiens
  misc_RNA (1)...(19): siRNA sense strand
ccaacaggaugguaucuau

SEQ ID NO: 1244778 - RNA, 19 nt, Homo sapiens
  misc_RNA (1)...(19): siRNA sense strand
gacaagaaccgcaagaaug

SEQ ID NO: 1244779 - RNA, 19 nt, Homo sapiens
  misc_RNA (1)...(19): siRNA sense strand
gcacacacauguccaccau

SEQ ID NO: 1244780 - RNA, 19 nt, Homo sapiens
  misc_RNA (1)...(19): siRNA sense strand
gcgaugaaguagcaaauag

SEQ ID NO: 1244781 - RNA, 19 nt, Homo sapiens
  misc_RNA (1)...(19): siRNA sense strand
gcuguaaggucaugcugaa

SEQ ID NO: 1244782 - RNA, 19 nt, Homo sapiens
  misc_RNA (1)...(19): siRNA sense strand
gcaaacacccucugugagu

SEQ ID NO: 1244783 - RNA, 19 nt, Homo sapiens
  misc_RNA (1)...(19): siRNA sense strand
ccacccggcugauguuuga

SEQ ID NO: 1244784 - RNA, 19 nt, Homo sapiens
  misc_RNA (1)...(19): siRNA sense strand
caagacagcuauuuuguug

SEQ ID NO: 1244785 - RNA, 19 nt, Homo sapiens
  misc_RNA (1)...(19): siRNA sense strand
gcuauggguuucaucuuga

SEQ ID NO: 1244786 - RNA, 19 nt, Homo sapiens
  misc_RNA (1)...(19): siRNA sense strand
caacacggccucugugguu

SEQ ID NO: 1244787 - RNA, 19 nt, Homo sapiens
  misc_RNA (1)...(19): siRNA sense strand
gaaaccaccaccucuguug

SEQ ID NO: 1244788 - RNA, 19 nt, Homo sapiens
  misc_RNA (1)...(19): siRNA sense strand
ucagaaaggccacaucuug

SEQ ID NO: 1244789 - RNA, 19 nt, Homo sapiens
  misc_RNA (1)...(19): siRNA sense strand
gcacuuugcccaccacaug

SEQ ID NO: 1244790 - RNA, 19 nt, Homo sapiens
  misc_RNA (1)...(19): siRNA sense strand
acaagaaccgcaagaauga

SEQ ID NO: 1244791 - RNA, 19 nt, Homo sapiens
  misc_RNA (1)...(19): siRNA sense strand
gcaaauagugacagugaau

SEQ ID NO: 1244792 - RNA, 19 nt, Homo sapiens
  misc_RNA (1)...(19): siRNA sense strand
aagaaagggucaucaggaa

SEQ ID NO: 1244793 - RNA, 19 nt, Homo sapiens
  misc_RNA (1)...(19): siRNA sense strand
ccaaguggacucagaagaa

SEQ ID NO: 1244794 - RNA, 19 nt, Homo sapiens
  misc_RNA (1)...(19): siRNA sense strand
gcugagggcugcauuuguc

SEQ ID NO: 1244795 - RNA, 19 nt, Homo sapiens
  misc_RNA (1)...(19): siRNA sense strand
gauacaguuugccguggua

SEQ ID NO: 1244796 - RNA, 19 nt, Homo sapiens
  misc_RNA (1)...(19): siRNA sense strand
gaaagggucaucaggaaag

SEQ ID NO: 1244797 - RNA, 19 nt, Homo sapiens
  misc_RNA (1)...(19): siRNA sense strand
gcugagagcugugaauguc

SEQ ID NO: 1244798 - RNA, 19 nt, Homo sapiens
  misc_RNA (1)...(19): siRNA sense strand
ggaguucgcauaccacaug

SEQ ID NO: 1244799 - RNA, 19 nt, Homo sapiens
  misc_RNA (1)...(19): siRNA sense strand
uacgugagcuuugauggua

SEQ ID NO: 1244800 - RNA, 19 nt, Homo sapiens
  misc_RNA (1)...(19): siRNA sense strand
caaacacccucugugaguu

SEQ ID NO: 1244801 - RNA, 19 nt, Homo sapiens
  misc_RNA (1)...(19): siRNA sense strand
gugaauuugugaacaguug

SEQ ID NO: 1244802 - RNA, 19 nt, Homo sapiens
  misc_RNA (1)...(19): siRNA sense strand
ccuacaaucuccaccaaga

SEQ ID NO: 1244803 - RNA, 19 nt, Homo sapiens
  misc_RNA (1)...(19): siRNA sense strand
gacaacagcaacagcaauu

SEQ ID NO: 1244804 - RNA, 19 nt, Homo sapiens
  misc_RNA (1)...(19): siRNA sense strand
uguaaucgcgucuguauga

SEQ ID NO: 1244805 - RNA, 19 nt, Homo sapiens
  misc_RNA (1)...(19): siRNA sense strand
ggaaggacgcaacaagaug

SEQ ID NO: 1244806 - RNA, 19 nt, Homo sapiens
  misc_RNA (1)...(19): siRNA sense strand
gcuuaagaauggccaguau

SEQ ID NO: 1244807 - RNA, 19 nt, Homo sapiens
  misc_RNA (1)...(19): siRNA sense strand
acuaucaucuccacagaaa

SEQ ID NO: 1244808 - RNA, 19 nt, Homo sapiens
  misc_RNA (1)...(19): siRNA sense strand
cauuuaugcuucagucuug

SEQ ID NO: 1244809 - RNA, 19 nt, Homo sapiens
  misc_RNA (1)...(19): siRNA sense strand
acagagcgcugcccuccaa

SEQ ID NO: 1244810 - RNA, 19 nt, Homo sapiens
  misc_RNA (1)...(19): siRNA sense strand
ugaccuauguucugaucaa

SEQ ID NO: 1244811 - RNA, 19 nt, Homo sapiens
  misc_RNA (1)...(19): siRNA sense strand
cccguuaccucacauuuga

SEQ ID NO: 1244812 - RNA, 19 nt, Homo sapiens
  misc_RNA (1)...(19): siRNA sense strand
gcuaugugcugagugaaga

SEQ ID NO: 1244813 - RNA, 19 nt, Homo sapiens
  misc_RNA (1)...(19): siRNA sense strand
caacaacgacuacuaugag

SEQ ID NO: 1244814 - RNA, 19 nt, Homo sapiens
  misc_RNA (1)...(19): siRNA sense strand
ugaaaccacuggccucaca

SEQ ID NO: 1244815 - RNA, 19 nt, Homo sapiens
  misc_RNA (1)...(19): siRNA sense strand
ggacauugacccaaguugu

SEQ ID NO: 1244816 - RNA, 19 nt, Homo sapiens
  misc_RNA (1)...(19): siRNA sense strand
ugugggaacuucaaugaug

SEQ ID NO: 1244817 - RNA, 19 nt, Homo sapiens
  misc_RNA (1)...(19): siRNA sense strand
gaagggccaccgugugcua

SEQ ID NO: 1244818 - RNA, 19 nt, Homo sapiens
  misc_RNA (1)...(19): siRNA sense strand
caagaucagugccaagcau

SEQ ID NO: 1244819 - RNA, 19 nt, Homo sapiens
  misc_RNA (1)...(19): siRNA sense strand
gaacuaugacggcaacagu

SEQ ID NO: 1244820 - RNA, 19 nt, Homo sapiens
  misc_RNA (1)...(19): siRNA sense strand
caacucaacagacccauuc

SEQ ID NO: 1244821 - RNA, 19 nt, Homo sapiens
  misc_RNA (1)...(19): siRNA sense strand
cuacggagacccucauuau

SEQ ID NO: 1244822 - RNA, 19 nt, Homo sapiens
  misc_RNA (1)...(19): siRNA sense strand
agacuaccaucucuacaga

SEQ ID NO: 1244823 - RNA, 19 nt, Homo sapiens
  misc_RNA (1)...(19): siRNA sense strand
gaccaggagugucagaagu

SEQ ID NO: 1244824 - RNA, 19 nt, Homo sapiens
  misc_RNA (1)...(19): siRNA sense strand
ccgcaagaaugacaugaug

SEQ ID NO: 1244825 - RNA, 19 nt, Homo sapiens
  misc_RNA (1)...(19): siRNA sense strand
gugcaaacacccucuguga

SEQ ID NO: 1244826 - RNA, 19 nt, Homo sapiens
  misc_RNA (1)...(19): siRNA sense strand
gcccagcgaugaaguagca

SEQ ID NO: 1244827 - RNA, 19 nt, Homo sapiens
  misc_RNA (1)...(19): siRNA sense strand
gugggaacuucaaugauga

SEQ ID NO: 1244828 - RNA, 19 nt, Homo sapiens
  misc_RNA (1)...(19): siRNA sense strand
cagaaaggccacaucuuga

SEQ ID NO: 1244829 - RNA, 19 nt, Homo sapiens
  misc_RNA (1)...(19): siRNA sense strand
caacgcccaucccuucugu

SEQ ID NO: 1244830 - RNA, 19 nt, Homo sapiens
  misc_RNA (1)...(19): siRNA sense strand
guaaggucaugcugaaugg

SEQ ID NO: 1244831 - RNA, 19 nt, Homo sapiens
  misc_RNA (1)...(19): siRNA sense strand
gaugugcucuggaaacacu

SEQ ID NO: 1244832 - RNA, 19 nt, Homo sapiens
  misc_RNA (1)...(19): siRNA sense strand
acaaugaccaccugaaguu

SEQ ID NO: 1244833 - RNA, 19 nt, Homo sapiens
  misc_RNA (1)...(19): siRNA sense strand
gguuucaucuugaucaauc

SEQ ID NO: 1244834 - RNA, 19 nt, Homo sapiens
  misc_RNA (1)...(19): siRNA sense strand
gggaguauccggaaacaca

SEQ ID NO: 1244835 - RNA, 19 nt, Homo sapiens
  misc_RNA (1)...(19): siRNA sense strand
cagcuuugguggaaggaaa

SEQ ID NO: 1244836 - RNA, 19 nt, Homo sapiens
  misc_RNA (1)...(19): siRNA sense strand
uagcaaauagugacaguga

SEQ ID NO: 1244837 - RNA, 19 nt, Homo sapiens
  misc_RNA (1)...(19): siRNA sense strand
cugcaaacccaaccagaua

SEQ ID NO: 1244838 - RNA, 19 nt, Homo sapiens
  misc_RNA (1)...(19): siRNA sense strand
gcgaagccaugcccugaca

SEQ ID NO: 1244839 - RNA, 19 nt, Homo sapiens
  misc_RNA (1)...(19): siRNA sense strand
agacuaccaucuccacaga

SEQ ID NO: 1244840 - RNA, 19 nt, Homo sapiens
  misc_RNA (1)...(19): siRNA sense strand
agacuaccaucuccacaga

SEQ ID NO: 1244841 - RNA, 19 nt, Homo sapiens
  misc_RNA (1)...(19): siRNA sense strand
gaucaauccugggacuugu

SEQ ID NO: 1244842 - RNA, 19 nt, Homo sapiens
  misc_RNA (1)...(19): siRNA sense strand
uaacggagagggcagcuau

SEQ ID NO: 1244843 - RNA, 19 nt, Homo sapiens
  misc_RNA (1)...(19): siRNA sense strand
caggagaacccgaguggaa

SEQ ID NO: 1244844 - RNA, 19 nt, Homo sapiens
  misc_RNA (1)...(19): siRNA sense strand
ugaggaagaggacgaacua

SEQ ID NO: 1244845 - RNA, 19 nt, Homo sapiens
  misc_RNA (1)...(19): siRNA sense strand
cuacagcauuguuaacauc

SEQ ID NO: 1244846 - RNA, 19 nt, Homo sapiens
  misc_RNA (1)...(19): siRNA sense strand
ccauaaggcucagcagcaa

SEQ ID NO: 1244847 - RNA, 19 nt, Homo sapiens
  misc_RNA (1)...(19): siRNA sense strand
ugaaagcaacaacagaauu

SEQ ID NO: 1244848 - RNA, 19 nt, Homo sapiens
  misc_RNA (1)...(19): siRNA sense strand
cuacaacaacgacuacuau

SEQ ID NO: 1244849 - RNA, 19 nt, Homo sapiens
  misc_RNA (1)...(19): siRNA sense strand
ccaaaugcccgcuacgaau

SEQ ID NO: 1244850 - RNA, 19 nt, Homo sapiens
  misc_RNA (1)...(19): siRNA sense strand
gaagcaacacggccucugu

SEQ ID NO: 1244851 - RNA, 19 nt, Homo sapiens
  misc_RNA (1)...(19): siRNA sense strand
uucaugaggucuacauuga

SEQ ID NO: 1244852 - RNA, 19 nt, Homo sapiens
  misc_RNA (1)...(19): siRNA sense strand
caacagcaacagcaauugu

SEQ ID NO: 1244853 - RNA, 19 nt, Homo sapiens
  misc_RNA (1)...(19): siRNA sense strand
caugaggucuacauugaca

SEQ ID NO: 1244854 - RNA, 19 nt, Homo sapiens
  misc_RNA (1)...(19): siRNA sense strand
ccacuggccucacagaaaa

SEQ ID NO: 1244855 - RNA, 19 nt, Homo sapiens
  misc_RNA (1)...(19): siRNA sense strand
cgacaagaaccgcaagaau

SEQ ID NO: 1244856 - RNA, 19 nt, Homo sapiens
  misc_RNA (1)...(19): siRNA sense strand
acugugcgaucuuaauaaa

SEQ ID NO: 1244857 - RNA, 19 nt, Homo sapiens
  misc_RNA (1)...(19): siRNA sense strand
gcacucuuguccuggugaa

SEQ ID NO: 1244858 - RNA, 19 nt, Homo sapiens
  misc_RNA (1)...(19): siRNA sense strand
gaugaaguagcaaauagug

SEQ ID NO: 1244859 - RNA, 19 nt, Homo sapiens
  misc_RNA (1)...(19): siRNA sense strand
gaacuucaaugaugaggaa

SEQ ID NO: 1244860 - RNA, 19 nt, Homo sapiens
  misc_RNA (1)...(19): siRNA sense strand
gaaacacacucucuucuca

SEQ ID NO: 1244861 - RNA, 19 nt, Homo sapiens
  misc_RNA (1)...(19): siRNA sense strand
gugcagcccuccacauuua

SEQ ID NO: 1244862 - RNA, 19 nt, Homo sapiens
  misc_RNA (1)...(19): siRNA sense strand
gaacugugcgaucuuaaua

SEQ ID NO: 1244863 - RNA, 19 nt, Homo sapiens
  misc_RNA (1)...(19): siRNA sense strand
gaacaaugcucagucuaug

SEQ ID NO: 1244864 - RNA, 19 nt, Homo sapiens
  misc_RNA (1)...(19): siRNA sense strand
gaucaagacuguggacgua

SEQ ID NO: 1244865 - RNA, 19 nt, Homo sapiens
  misc_RNA (1)...(19): siRNA sense strand
ugacgggaaucaucucuua

SEQ ID NO: 1244866 - RNA, 19 nt, Homo sapiens
  misc_RNA (1)...(19): siRNA sense strand
ggaaagauaaggacauuga

SEQ ID NO: 1244867 - RNA, 19 nt, Homo sapiens
  misc_RNA (1)...(19): siRNA sense strand
caacagcaauugugucuca

SEQ ID NO: 1244868 - RNA, 19 nt, Homo sapiens
  misc_RNA (1)...(19): siRNA sense strand
gugaacaguuggaaagaua

SEQ ID NO: 1244869 - RNA, 19 nt, Homo sapiens
  misc_RNA (1)...(19): siRNA sense strand
caacagcccaugcagcuua

SEQ ID NO: 1244870 - RNA, 19 nt, Homo sapiens
  misc_RNA (1)...(19): siRNA sense strand
gaagaggacgaacuaauga

SEQ ID NO: 1244871 - RNA, 19 nt, Homo sapiens
  misc_RNA (1)...(19): siRNA sense strand
gcaauugcuucuacaacaa

SEQ ID NO: 1244872 - RNA, 19 nt, Homo sapiens
  misc_RNA (1)...(19): siRNA sense strand
gcagacgccuggaacaaga

SEQ ID NO: 1244873 - RNA, 19 nt, Homo sapiens
  misc_RNA (1)...(19): siRNA sense strand
ggaagaggacgaacuaaug

SEQ ID NO: 1244874 - RNA, 19 nt, Homo sapiens
  misc_RNA (1)...(19): siRNA sense strand
ggaaaggucugcggcaugu

SEQ ID NO: 1244875 - RNA, 19 nt, Homo sapiens
  misc_RNA (1)...(19): siRNA sense strand
gaaagcaacaacagaauuc

SEQ ID NO: 1244876 - RNA, 19 nt, Homo sapiens
  misc_RNA (1)...(19): siRNA sense strand
caaguggacucagaagaaa

SEQ ID NO: 1244877 - RNA, 19 nt, Homo sapiens
  misc_RNA (1)...(19): siRNA sense strand
ccaacaggaugguaucuau

SEQ ID NO: 1244878 - RNA, 19 nt, Homo sapiens
  misc_RNA (1)...(19): siRNA sense strand
gacaagaaccgcaagaaug

SEQ ID NO: 1244879 - RNA, 19 nt, Homo sapiens
  misc_RNA (1)...(19): siRNA sense strand
gcacacacauguccaccau

SEQ ID NO: 1244880 - RNA, 19 nt, Homo sapiens
  misc_RNA (1)...(19): siRNA sense strand
gcgaugaaguagcaaauag

SEQ ID NO: 1244881 - RNA, 19 nt, Homo sapiens
  misc_RNA (1)...(19): siRNA sense strand
gcuguaaggucaugcugaa

SEQ ID NO: 1244882 - RNA, 19 nt, Homo sapiens
  misc_RNA (1)...(19): siRNA sense strand
gcaaacacccucugugagu

SEQ ID NO: 1244883 - RNA, 19 nt, Homo sapiens
  misc_RNA (1)...(19): siRNA sense strand
ccacccggcugauguuuga

SEQ ID NO: 1244884 - RNA, 19 nt, Homo sapiens
  misc_RNA (1)...(19): siRNA sense strand
caagacagcuauuuuguug

SEQ ID NO: 1244885 - RNA, 19 nt, Homo sapiens
  misc_RNA (1)...(19): siRNA sense strand
gcuauggguuucaucuuga

SEQ ID NO: 1244886 - RNA, 19 nt, Homo sapiens
  misc_RNA (1)...(19): siRNA sense strand
caacacggccucugugguu

SEQ ID NO: 1244887 - RNA, 19 nt, Homo sapiens
  misc_RNA (1)...(19): siRNA sense strand
gaaaccaccaccucuguug

SEQ ID NO: 1244888 - RNA, 19 nt, Homo sapiens
  misc_RNA (1)...(19): siRNA sense strand
ucagaaaggccacaucuug

SEQ ID NO: 1244889 - RNA, 19 nt, Homo sapiens
  misc_RNA (1)...(19): siRNA sense strand
gcacuuugcccaccacaug

SEQ ID NO: 1244890 - RNA, 19 nt, Homo sapiens
  misc_RNA (1)...(19): siRNA sense strand
acaagaaccgcaagaauga

SEQ ID NO: 1244891 - RNA, 19 nt, Homo sapiens
  misc_RNA (1)...(19): siRNA sense strand
gcaaauagugacagugaau

SEQ ID NO: 1244892 - RNA, 19 nt, Homo sapiens
  misc_RNA (1)...(19): siRNA sense strand
aagaaagggucaucaggaa

SEQ ID NO: 1244893 - RNA, 19 nt, Homo sapiens
  misc_RNA (1)...(19): siRNA sense strand
ccaaguggacucagaagaa

SEQ ID NO: 1244894 - RNA, 19 nt, Homo sapiens
  misc_RNA (1)...(19): siRNA sense strand
gcugagggcugcauuuguc

SEQ ID NO: 1244895 - RNA, 19 nt, Homo sapiens
  misc_RNA (1)...(19): siRNA sense strand
gauacaguuugccguggua

SEQ ID NO: 1244896 - RNA, 19 nt, Homo sapiens
  misc_RNA (1)...(19): siRNA sense strand
gaaagggucaucaggaaag

SEQ ID NO: 1244897 - RNA, 19 nt, Homo sapiens
  misc_RNA (1)...(19): siRNA sense strand
gcugagagcugugaauguc

SEQ ID NO: 1244898 - RNA, 19 nt, Homo sapiens
  misc_RNA (1)...(19): siRNA sense strand
ggaguucgcauaccacaug

SEQ ID NO: 1244899 - RNA, 19 nt, Homo sapiens
  misc_RNA (1)...(19): siRNA sense strand
uacgugagcuuugauggua

SEQ ID NO: 1244900 - RNA, 19 nt, Homo sapiens
  misc_RNA (1)...(19): siRNA sense strand
caaacacccucugugaguu

SEQ ID NO: 1244901 - RNA, 19 nt, Homo sapiens
  misc_RNA (1)...(19): siRNA sense strand
gugaauuugugaacaguug

SEQ ID NO: 1244902 - RNA, 19 nt, Homo sapiens
  misc_RNA (1)...(19): siRNA sense strand
ccuacaaucuccaccaaga

SEQ ID NO: 1244903 - RNA, 19 nt, Homo sapiens
  misc_RNA (1)...(19): siRNA sense strand
gacaacagcaacagcaauu

SEQ ID NO: 1244904 - RNA, 19 nt, Homo sapiens
  misc_RNA (1)...(19): siRNA sense strand
uguaaucgcgucuguauga

SEQ ID NO: 1244905 - RNA, 19 nt, Homo sapiens
  misc_RNA (1)...(19): siRNA sense strand
ggaaggacgcaacaagaug

SEQ ID NO: 1244906 - RNA, 19 nt, Homo sapiens
  misc_RNA (1)...(19): siRNA sense strand
gcuuaagaauggccaguau

SEQ ID NO: 1244907 - RNA, 19 nt, Homo sapiens
  misc_RNA (1)...(19): siRNA sense strand
acuaucaucuccacagaaa

SEQ ID NO: 1244908 - RNA, 19 nt, Homo sapiens
  misc_RNA (1)...(19): siRNA sense strand
cauuuaugcuucagucuug

SEQ ID NO: 1244909 - RNA, 19 nt, Homo sapiens
  misc_RNA (1)...(19): siRNA sense strand
acagagcgcugcccuccaa

SEQ ID NO: 1244910 - RNA, 19 nt, Homo sapiens
  misc_RNA (1)...(19): siRNA sense strand
ugaccuauguucugaucaa

SEQ ID NO: 1244911 - RNA, 19 nt, Homo sapiens
  misc_RNA (1)...(19): siRNA sense strand
cccguuaccucacauuuga

SEQ ID NO: 1244912 - RNA, 19 nt, Homo sapiens
  misc_RNA (1)...(19): siRNA sense strand
gcuaugugcugagugaaga

SEQ ID NO: 1244913 - RNA, 19 nt, Homo sapiens
  misc_RNA (1)...(19): siRNA sense strand
caacaacgacuacuaugag

SEQ ID NO: 1244914 - RNA, 19 nt, Homo sapiens
  misc_RNA (1)...(19): siRNA sense strand
ugaaaccacuggccucaca

SEQ ID NO: 1244915 - RNA, 19 nt, Homo sapiens
  misc_RNA (1)...(19): siRNA sense strand
ggacauugacccaaguugu

SEQ ID NO: 1244916 - RNA, 19 nt, Homo sapiens
  misc_RNA (1)...(19): siRNA sense strand
ugugggaacuucaaugaug

SEQ ID NO: 1244917 - RNA, 19 nt, Homo sapiens
  misc_RNA (1)...(19): siRNA sense strand
gaagggccaccgugugcua

SEQ ID NO: 1244918 - RNA, 19 nt, Homo sapiens
  misc_RNA (1)...(19): siRNA sense strand
caagaucagugccaagcau

SEQ ID NO: 1244919 - RNA, 19 nt, Homo sapiens
  misc_RNA (1)...(19): siRNA sense strand
gaacuaugacggcaacagu

SEQ ID NO: 1244920 - RNA, 19 nt, Homo sapiens
  misc_RNA (1)...(19): siRNA sense strand
caacucaacagacccauuc

SEQ ID NO: 1244921 - RNA, 19 nt, Homo sapiens
  misc_RNA (1)...(19): siRNA sense strand
cuacggagacccucauuau

SEQ ID NO: 1244922 - RNA, 19 nt, Homo sapiens
  misc_RNA (1)...(19): siRNA sense strand
agacuaccaucucuacaga

SEQ ID NO: 1244923 - RNA, 19 nt, Homo sapiens
  misc_RNA (1)...(19): siRNA sense strand
gaccaggagugucagaagu

SEQ ID NO: 1244924 - RNA, 19 nt, Homo sapiens
  misc_RNA (1)...(19): siRNA sense strand
ccgcaagaaugacaugaug

SEQ ID NO: 1244925 - RNA, 19 nt, Homo sapiens
  misc_RNA (1)...(19): siRNA sense strand
gugcaaacacccucuguga

SEQ ID NO: 1244926 - RNA, 19 nt, Homo sapiens
  misc_RNA (1)...(19): siRNA sense strand
gcccagcgaugaaguagca

SEQ ID NO: 1244927 - RNA, 19 nt, Homo sapiens
  misc_RNA (1)...(19): siRNA sense strand
gugggaacuucaaugauga

SEQ ID NO: 1244928 - RNA, 19 nt, Homo sapiens
  misc_RNA (1)...(19): siRNA sense strand
cagaaaggccacaucuuga

SEQ ID NO: 1244929 - RNA, 19 nt, Homo sapiens
  misc_RNA (1)...(19): siRNA sense strand
caacgcccaucccuucugu

SEQ ID NO: 1244930 - RNA, 19 nt, Homo sapiens
  misc_RNA (1)...(19): siRNA sense strand
guaaggucaugcugaaugg

SEQ ID NO: 1244931 - RNA, 19 nt, Homo sapiens
  misc_RNA (1)...(19): siRNA sense strand
gaugugcucuggaaacacu

SEQ ID NO: 1244932 - RNA, 19 nt, Homo sapiens
  misc_RNA (1)...(19): siRNA sense strand
acaaugaccaccugaaguu

SEQ ID NO: 1244933 - RNA, 19 nt, Homo sapiens
  misc_RNA (1)...(19): siRNA sense strand
gguuucaucuugaucaauc

SEQ ID NO: 1244934 - RNA, 19 nt, Homo sapiens
  misc_RNA (1)...(19): siRNA sense strand
gggaguauccggaaacaca

SEQ ID NO: 1244935 - RNA, 19 nt, Homo sapiens
  misc_RNA (1)...(19): siRNA sense strand
cagcuuugguggaaggaaa

SEQ ID NO: 1244936 - RNA, 19 nt, Homo sapiens
  misc_RNA (1)...(19): siRNA sense strand
uagcaaauagugacaguga

SEQ ID NO: 1244937 - RNA, 19 nt, Homo sapiens
  misc_RNA (1)...(19): siRNA sense strand
cugcaaacccaaccagaua

SEQ ID NO: 1244938 - RNA, 19 nt, Homo sapiens
  misc_RNA (1)...(19): siRNA sense strand
gcgaagccaugcccugaca

SEQ ID NO: 1244939 - RNA, 19 nt, Homo sapiens
  misc_RNA (1)...(19): siRNA sense strand
agacuaccaucuccacaga

SEQ ID NO: 1244940 - RNA, 19 nt, Homo sapiens
  misc_RNA (1)...(19): siRNA sense strand
agacuaccaucuccacaga

SEQ ID NO: 1244941 - RNA, 19 nt, Homo sapiens
  misc_RNA (1)...(19): siRNA sense strand
gaucaauccugggacuugu

SEQ ID NO: 1244942 - RNA, 19 nt, Homo sapiens
  misc_RNA (1)...(19): siRNA sense strand
uaacggagagggcagcuau

SEQ ID NO: 1244943 - RNA, 19 nt, Homo sapiens
  misc_RNA (1)...(19): siRNA sense strand
caggagaacccgaguggaa

SEQ ID NO: 1244944 - RNA, 19 nt, Homo sapiens
  misc_RNA (1)...(19): siRNA sense strand
ugaggaagaggacgaacua

SEQ ID NO: 1244945 - RNA, 19 nt, Homo sapiens
  misc_RNA (1)...(19): siRNA sense strand
cuacagcauuguuaacauc

SEQ ID NO: 1244946 - RNA, 19 nt, Homo sapiens
  misc_RNA (1)...(19): siRNA sense strand
ccauaaggcucagcagcaa

SEQ ID NO: 1244947 - RNA, 19 nt, Homo sapiens
  misc_RNA (1)...(19): siRNA sense strand
ugaaagcaacaacagaauu

SEQ ID NO: 1244948 - RNA, 19 nt, Homo sapiens
  misc_RNA (1)...(19): siRNA sense strand
cuacaacaacgacuacuau

SEQ ID NO: 1244949 - RNA, 19 nt, Homo sapiens
  misc_RNA (1)...(19): siRNA sense strand
ccaaaugcccgcuacgaau

SEQ ID NO: 1244950 - RNA, 19 nt, Homo sapiens
  misc_RNA (1)...(19): siRNA sense strand
gaagcaacacggccucugu

SEQ ID NO: 1244951 - RNA, 19 nt, Homo sapiens
  misc_RNA (1)...(19): siRNA sense strand
uucaugaggucuacauuga

SEQ ID NO: 1244952 - RNA, 19 nt, Homo sapiens
  misc_RNA (1)...(19): siRNA sense strand
caacagcaacagcaauugu

SEQ ID NO: 1244953 - RNA, 19 nt, Homo sapiens
  misc_RNA (1)...(19): siRNA sense strand
caugaggucuacauugaca

SEQ ID NO: 1244954 - RNA, 19 nt, Homo sapiens
  misc_RNA (1)...(19): siRNA sense strand
ccacuggccucacagaaaa

SEQ ID NO: 1244955 - RNA, 19 nt, Homo sapiens
  misc_RNA (1)...(19): siRNA sense strand
cgacaagaaccgcaagaau

SEQ ID NO: 1244956 - RNA, 19 nt, Homo sapiens
  misc_RNA (1)...(19): siRNA sense strand
acugugcgaucuuaauaaa

SEQ ID NO: 1244957 - RNA, 19 nt, Homo sapiens
  misc_RNA (1)...(19): siRNA sense strand
gcacucuuguccuggugaa

SEQ ID NO: 1244958 - RNA, 19 nt, Homo sapiens
  misc_RNA (1)...(19): siRNA sense strand
gaugaaguagcaaauagug

SEQ ID NO: 1244959 - RNA, 19 nt, Homo sapiens
  misc_RNA (1)...(19): siRNA sense strand
gaacuucaaugaugaggaa

SEQ ID NO: 1244960 - RNA, 19 nt, Homo sapiens
  misc_RNA (1)...(19): siRNA sense strand
gaaacacacucucuucuca

SEQ ID NO: 1244961 - RNA, 19 nt, Homo sapiens
  misc_RNA (1)...(19): siRNA sense strand
gugcagcccuccacauuua

SEQ ID NO: 1244962 - RNA, 19 nt, Homo sapiens
  misc_RNA (1)...(19): siRNA sense strand
gaacugugcgaucuuaaua

SEQ ID NO: 1244963 - RNA, 19 nt, Homo sapiens
  misc_RNA (1)...(19): siRNA sense strand
gaacaaugcucagucuaug

SEQ ID NO: 1244964 - RNA, 19 nt, Homo sapiens
  misc_RNA (1)...(19): siRNA sense strand
gaucaagacuguggacgua

SEQ ID NO: 1244965 - RNA, 19 nt, Homo sapiens
  misc_RNA (1)...(19): siRNA sense strand
ugacgggaaucaucucuua

SEQ ID NO: 1244966 - RNA, 19 nt, Homo sapiens
  misc_RNA (1)...(19): siRNA sense strand
ggaaagauaaggacauuga

SEQ ID NO: 1244967 - RNA, 19 nt, Homo sapiens
  misc_RNA (1)...(19): siRNA sense strand
caacagcaauugugucuca

SEQ ID NO: 1244968 - RNA, 19 nt, Homo sapiens
  misc_RNA (1)...(19): siRNA sense strand
gugaacaguuggaaagaua

SEQ ID NO: 1244969 - RNA, 19 nt, Homo sapiens
  misc_RNA (1)...(19): siRNA sense strand
caacagcccaugcagcuua

SEQ ID NO: 1244970 - RNA, 19 nt, Homo sapiens
  misc_RNA (1)...(19): siRNA sense strand
gaagaggacgaacuaauga

SEQ ID NO: 1244971 - RNA, 19 nt, Homo sapiens
  misc_RNA (1)...(19): siRNA sense strand
gcaauugcuucuacaacaa

SEQ ID NO: 1244972 - RNA, 19 nt, Homo sapiens
  misc_RNA (1)...(19): siRNA sense strand
gcagacgccuggaacaaga

SEQ ID NO: 1244973 - RNA, 19 nt, Homo sapiens
  misc_RNA (1)...(19): siRNA sense strand
ggaagaggacgaacuaaug

SEQ ID NO: 1244974 - RNA, 19 nt, Homo sapiens
  misc_RNA (1)...(19): siRNA sense strand
ggaaaggucugcggcaugu

SEQ ID NO: 1244975 - RNA, 19 nt, Homo sapiens
  misc_RNA (1)...(19): siRNA sense strand
gaaagcaacaacagaauuc

SEQ ID NO: 1244976 - RNA, 19 nt, Homo sapiens
  misc_RNA (1)...(19): siRNA sense strand
caaguggacucagaagaaa

SEQ ID NO: 1244977 - RNA, 19 nt, Homo sapiens
  misc_RNA (1)...(19): siRNA sense strand
ccaacaggaugguaucuau

SEQ ID NO: 1244978 - RNA, 19 nt, Homo sapiens
  misc_RNA (1)...(19): siRNA sense strand
gacaagaaccgcaagaaug

SEQ ID NO: 1244979 - RNA, 19 nt, Homo sapiens
  misc_RNA (1)...(19): siRNA sense strand
gcacacacauguccaccau

SEQ ID NO: 1244980 - RNA, 19 nt, Homo sapiens
  misc_RNA (1)...(19): siRNA sense strand
gcgaugaaguagcaaauag

SEQ ID NO: 1244981 - RNA, 19 nt, Homo sapiens
  misc_RNA (1)...(19): siRNA sense strand
gcuguaaggucaugcugaa

SEQ ID NO: 1244982 - RNA, 19 nt, Homo sapiens
  misc_RNA (1)...(19): siRNA sense strand
gcaaacacccucugugagu

SEQ ID NO: 1244983 - RNA, 19 nt, Homo sapiens
  misc_RNA (1)...(19): siRNA sense strand
ccacccggcugauguuuga

SEQ ID NO: 1244984 - RNA, 19 nt, Homo sapiens
  misc_RNA (1)...(19): siRNA sense strand
caagacagcuauuuuguug

SEQ ID NO: 1244985 - RNA, 19 nt, Homo sapiens
  misc_RNA (1)...(19): siRNA sense strand
gcuauggguuucaucuuga

SEQ ID NO: 1244986 - RNA, 19 nt, Homo sapiens
  misc_RNA (1)...(19): siRNA sense strand
caacacggccucugugguu

SEQ ID NO: 1244987 - RNA, 19 nt, Homo sapiens
  misc_RNA (1)...(19): siRNA sense strand
gaaaccaccaccucuguug

SEQ ID NO: 1244988 - RNA, 19 nt, Homo sapiens
  misc_RNA (1)...(19): siRNA sense strand
ucagaaaggccacaucuug

SEQ ID NO: 1244989 - RNA, 19 nt, Homo sapiens
  misc_RNA (1)...(19): siRNA sense strand
gcacuuugcccaccacaug

SEQ ID NO: 1244990 - RNA, 19 nt, Homo sapiens
  misc_RNA (1)...(19): siRNA sense strand
acaagaaccgcaagaauga

SEQ ID NO: 1244991 - RNA, 19 nt, Homo sapiens
  misc_RNA (1)...(19): siRNA sense strand
gcaaauagugacagugaau

SEQ ID NO: 1244992 - RNA, 19 nt, Homo sapiens
  misc_RNA (1)...(19): siRNA sense strand
aagaaagggucaucaggaa

SEQ ID NO: 1244993 - RNA, 19 nt, Homo sapiens
  misc_RNA (1)...(19): siRNA sense strand
ccaaguggacucagaagaa

SEQ ID NO: 1244994 - RNA, 19 nt, Homo sapiens
  misc_RNA (1)...(19): siRNA sense strand
gcugagggcugcauuuguc

SEQ ID NO: 1244995 - RNA, 19 nt, Homo sapiens
  misc_RNA (1)...(19): siRNA sense strand
gauacaguuugccguggua

SEQ ID NO: 1244996 - RNA, 19 nt, Homo sapiens
  misc_RNA (1)...(19): siRNA sense strand
gaaagggucaucaggaaag

SEQ ID NO: 1244997 - RNA, 19 nt, Homo sapiens
  misc_RNA (1)...(19): siRNA sense strand
gcugagagcugugaauguc

SEQ ID NO: 1244998 - RNA, 19 nt, Homo sapiens
  misc_RNA (1)...(19): siRNA sense strand
ggaguucgcauaccacaug

SEQ ID NO: 1244999 - RNA, 19 nt, Homo sapiens
  misc_RNA (1)...(19): siRNA sense strand
uacgugagcuuugauggua

SEQ ID NO: 1245000 - RNA, 19 nt, Homo sapiens
  misc_RNA (1)...(19): siRNA sense strand
caaacacccucugugaguu

SEQ ID NO: 1245001 - RNA, 19 nt, Homo sapiens
  misc_RNA (1)...(19): siRNA sense strand
gugaauuugugaacaguug

SEQ ID NO: 1245002 - RNA, 19 nt, Homo sapiens
  misc_RNA (1)...(19): siRNA sense strand
ccuacaaucuccaccaaga

SEQ ID NO: 1245003 - RNA, 19 nt, Homo sapiens
  misc_RNA (1)...(19): siRNA sense strand
gacaacagcaacagcaauu

SEQ ID NO: 1245004 - RNA, 19 nt, Homo sapiens
  misc_RNA (1)...(19): siRNA sense strand
uguaaucgcgucuguauga

SEQ ID NO: 1245005 - RNA, 19 nt, Homo sapiens
  misc_RNA (1)...(19): siRNA sense strand
ggaaggacgcaacaagaug

SEQ ID NO: 1245006 - RNA, 19 nt, Homo sapiens
  misc_RNA (1)...(19): siRNA sense strand
gcuuaagaauggccaguau

SEQ ID NO: 1245007 - RNA, 19 nt, Homo sapiens
  misc_RNA (1)...(19): siRNA sense strand
acuaucaucuccacagaaa

SEQ ID NO: 1245008 - RNA, 19 nt, Homo sapiens
  misc_RNA (1)...(19): siRNA sense strand
cauuuaugcuucagucuug

SEQ ID NO: 1245009 - RNA, 19 nt, Homo sapiens
  misc_RNA (1)...(19): siRNA sense strand
acagagcgcugcccuccaa

SEQ ID NO: 1245010 - RNA, 19 nt, Homo sapiens
  misc_RNA (1)...(19): siRNA sense strand
ugaccuauguucugaucaa

SEQ ID NO: 1245011 - RNA, 19 nt, Homo sapiens
  misc_RNA (1)...(19): siRNA sense strand
cccguuaccucacauuuga

SEQ ID NO: 1245012 - RNA, 19 nt, Homo sapiens
  misc_RNA (1)...(19): siRNA sense strand
gcuaugugcugagugaaga

SEQ ID NO: 1245013 - RNA, 19 nt, Homo sapiens
  misc_RNA (1)...(19): siRNA sense strand
caacaacgacuacuaugag

SEQ ID NO: 1245014 - RNA, 19 nt, Homo sapiens
  misc_RNA (1)...(19): siRNA sense strand
ugaaaccacuggccucaca

SEQ ID NO: 1245015 - RNA, 19 nt, Homo sapiens
  misc_RNA (1)...(19): siRNA sense strand
ggacauugacccaaguugu

SEQ ID NO: 1245016 - RNA, 19 nt, Homo sapiens
  misc_RNA (1)...(19): siRNA sense strand
ugugggaacuucaaugaug

SEQ ID NO: 1245017 - RNA, 19 nt, Homo sapiens
  misc_RNA (1)...(19): siRNA sense strand
gaagggccaccgugugcua

SEQ ID NO: 1245018 - RNA, 19 nt, Homo sapiens
  misc_RNA (1)...(19): siRNA sense strand
caagaucagugccaagcau

SEQ ID NO: 1245019 - RNA, 19 nt, Homo sapiens
  misc_RNA (1)...(19): siRNA sense strand
gaacuaugacggcaacagu

SEQ ID NO: 1245020 - RNA, 19 nt, Homo sapiens
  misc_RNA (1)...(19): siRNA sense strand
caacucaacagacccauuc

SEQ ID NO: 1245021 - RNA, 19 nt, Homo sapiens
  misc_RNA (1)...(19): siRNA sense strand
cuacggagacccucauuau

SEQ ID NO: 1245022 - RNA, 19 nt, Homo sapiens
  misc_RNA (1)...(19): siRNA sense strand
agacuaccaucucuacaga

SEQ ID NO: 1245023 - RNA, 19 nt, Homo sapiens
  misc_RNA (1)...(19): siRNA sense strand
gaccaggagugucagaagu

SEQ ID NO: 1245024 - RNA, 19 nt, Homo sapiens
  misc_RNA (1)...(19): siRNA sense strand
ccgcaagaaugacaugaug

SEQ ID NO: 1245025 - RNA, 19 nt, Homo sapiens
  misc_RNA (1)...(19): siRNA sense strand
gugcaaacacccucuguga

SEQ ID NO: 1245026 - RNA, 19 nt, Homo sapiens
  misc_RNA (1)...(19): siRNA sense strand
gcccagcgaugaaguagca

SEQ ID NO: 1245027 - RNA, 19 nt, Homo sapiens
  misc_RNA (1)...(19): siRNA sense strand
gugggaacuucaaugauga

SEQ ID NO: 1245028 - RNA, 19 nt, Homo sapiens
  misc_RNA (1)...(19): siRNA sense strand
cagaaaggccacaucuuga

SEQ ID NO: 1245029 - RNA, 19 nt, Homo sapiens
  misc_RNA (1)...(19): siRNA sense strand
caacgcccaucccuucugu

SEQ ID NO: 1245030 - RNA, 19 nt, Homo sapiens
  misc_RNA (1)...(19): siRNA sense strand
guaaggucaugcugaaugg

SEQ ID NO: 1245031 - RNA, 19 nt, Homo sapiens
  misc_RNA (1)...(19): siRNA sense strand
gaugugcucuggaaacacu

SEQ ID NO: 1245032 - RNA, 19 nt, Homo sapiens
  misc_RNA (1)...(19): siRNA sense strand
acaaugaccaccugaaguu

SEQ ID NO: 1245033 - RNA, 19 nt, Homo sapiens
  misc_RNA (1)...(19): siRNA sense strand
gguuucaucuugaucaauc

SEQ ID NO: 1245034 - RNA, 19 nt, Homo sapiens
  misc_RNA (1)...(19): siRNA sense strand
gggaguauccggaaacaca

SEQ ID NO: 1245035 - RNA, 19 nt, Homo sapiens
  misc_RNA (1)...(19): siRNA sense strand
cagcuuugguggaaggaaa

SEQ ID NO: 1245036 - RNA, 19 nt, Homo sapiens
  misc_RNA (1)...(19): siRNA sense strand
uagcaaauagugacaguga

SEQ ID NO: 1245037 - RNA, 19 nt, Homo sapiens
  misc_RNA (1)...(19): siRNA sense strand
cugcaaacccaaccagaua

SEQ ID NO: 1245038 - RNA, 19 nt, Homo sapiens
  misc_RNA (1)...(19): siRNA sense strand
gcgaagccaugcccugaca

SEQ ID NO: 1245039 - RNA, 19 nt, Homo sapiens
  misc_RNA (1)...(19): siRNA sense strand
agacuaccaucuccacaga

SEQ ID NO: 1245040 - RNA, 19 nt, Homo sapiens
  misc_RNA (1)...(19): siRNA sense strand
agacuaccaucuccacaga

SEQ ID NO: 1245041 - RNA, 19 nt, Homo sapiens
  misc_RNA (1)...(19): siRNA sense strand
gaucaauccugggacuugu

SEQ ID NO: 1245042 - RNA, 19 nt, Homo sapiens
  misc_RNA (1)...(19): siRNA sense strand
uaacggagagggcagcuau

SEQ ID NO: 1245043 - RNA, 19 nt, Homo sapiens
  misc_RNA (1)...(19): siRNA sense strand
caggagaacccgaguggaa

SEQ ID NO: 1245044 - RNA, 19 nt, Homo sapiens
  misc_RNA (1)...(19): siRNA sense strand
ugaggaagaggacgaacua

SEQ ID NO: 1245045 - RNA, 19 nt, Homo sapiens
  misc_RNA (1)...(19): siRNA sense strand
cuacagcauuguuaacauc

SEQ ID NO: 1245046 - RNA, 19 nt, Homo sapiens
  misc_RNA (1)...(19): siRNA sense strand
ccauaaggcucagcagcaa

SEQ ID NO: 1245047 - RNA, 19 nt, Homo sapiens
  misc_RNA (1)...(19): siRNA sense strand
ugaaagcaacaacagaauu

SEQ ID NO: 1245048 - RNA, 19 nt, Homo sapiens
  misc_RNA (1)...(19): siRNA sense strand
cuacaacaacgacuacuau

SEQ ID NO: 1245049 - RNA, 19 nt, Homo sapiens
  misc_RNA (1)...(19): siRNA sense strand
ccaaaugcccgcuacgaau

SEQ ID NO: 1245050 - RNA, 19 nt, Homo sapiens
  misc_RNA (1)...(19): siRNA sense strand
gaagcaacacggccucugu

SEQ ID NO: 1245051 - RNA, 19 nt, Homo sapiens
  misc_RNA (1)...(19): siRNA sense strand
uucaugaggucuacauuga

SEQ ID NO: 1245052 - RNA, 19 nt, Homo sapiens
  misc_RNA (1)...(19): siRNA sense strand
caacagcaacagcaauugu

SEQ ID NO: 1245053 - RNA, 19 nt, Homo sapiens
  misc_RNA (1)...(19): siRNA sense strand
caugaggucuacauugaca

SEQ ID NO: 1245054 - RNA, 19 nt, Homo sapiens
  misc_RNA (1)...(19): siRNA sense strand
ccacuggccucacagaaaa

SEQ ID NO: 1245055 - RNA, 19 nt, Homo sapiens
  misc_RNA (1)...(19): siRNA sense strand
cgacaagaaccgcaagaau

SEQ ID NO: 1245056 - RNA, 19 nt, Homo sapiens
  misc_RNA (1)...(19): siRNA sense strand
acugugcgaucuuaauaaa

SEQ ID NO: 1245057 - RNA, 19 nt, Homo sapiens
  misc_RNA (1)...(19): siRNA sense strand
gcacucuuguccuggugaa

SEQ ID NO: 1245058 - RNA, 19 nt, Homo sapiens
  misc_RNA (1)...(19): siRNA sense strand
gaugaaguagcaaauagug

SEQ ID NO: 1245059 - RNA, 19 nt, Homo sapiens
  misc_RNA (1)...(19): siRNA sense strand
gaacuucaaugaugaggaa

SEQ ID NO: 1245060 - RNA, 19 nt, Homo sapiens
  misc_RNA (1)...(19): siRNA sense strand
gaaacacacucucuucuca

SEQ ID NO: 1245061 - RNA, 19 nt, Homo sapiens
  misc_RNA (1)...(19): siRNA sense strand
gugcagcccuccacauuua

SEQ ID NO: 1245062 - RNA, 19 nt, Homo sapiens
  misc_RNA (1)...(19): siRNA sense strand
gaacugugcgaucuuaaua

SEQ ID NO: 1245063 - RNA, 19 nt, Homo sapiens
  misc_RNA (1)...(19): siRNA sense strand
gaacaaugcucagucuaug

SEQ ID NO: 1245064 - RNA, 19 nt, Homo sapiens
  misc_RNA (1)...(19): siRNA sense strand
gaucaagacuguggacgua

SEQ ID NO: 1245065 - RNA, 19 nt, Homo sapiens
  misc_RNA (1)...(19): siRNA sense strand
ugacgggaaucaucucuua

SEQ ID NO: 1245066 - RNA, 19 nt, Homo sapiens
  misc_RNA (1)...(19): siRNA sense strand
ggaaagauaaggacauuga

SEQ ID NO: 1245067 - RNA, 19 nt, Homo sapiens
  misc_RNA (1)...(19): siRNA sense strand
caacagcaauugugucuca

SEQ ID NO: 1245068 - RNA, 19 nt, Homo sapiens
  misc_RNA (1)...(19): siRNA sense strand
gugaacaguuggaaagaua

SEQ ID NO: 1245069 - RNA, 19 nt, Homo sapiens
  misc_RNA (1)...(19): siRNA sense strand
caacagcccaugcagcuua

SEQ ID NO: 1245070 - RNA, 19 nt, Homo sapiens
  misc_RNA (1)...(19): siRNA sense strand
gaagaggacgaacuaauga

SEQ ID NO: 1245071 - RNA, 19 nt, Homo sapiens
  misc_RNA (1)...(19): siRNA sense strand
gcaauugcuucuacaacaa

SEQ ID NO: 1245072 - RNA, 19 nt, Homo sapiens
  misc_RNA (1)...(19): siRNA sense strand
gcagacgccuggaacaaga

SEQ ID NO: 1245073 - RNA, 19 nt, Homo sapiens
  misc_RNA (1)...(19): siRNA sense strand
ggaagaggacgaacuaaug

SEQ ID NO: 1245074 - RNA, 19 nt, Homo sapiens
  misc_RNA (1)...(19): siRNA sense strand
ggaaaggucugcggcaugu

SEQ ID NO: 1245075 - RNA, 19 nt, Homo sapiens
  misc_RNA (1)...(19): siRNA sense strand
gaaagcaacaacagaauuc

SEQ ID NO: 1245076 - RNA, 19 nt, Homo sapiens
  misc_RNA (1)...(19): siRNA sense strand
caaguggacucagaagaaa

SEQ ID NO: 1245077 - RNA, 19 nt, Homo sapiens
  misc_RNA (1)...(19): siRNA sense strand
ccaacaggaugguaucuau

SEQ ID NO: 1245078 - RNA, 19 nt, Homo sapiens
  misc_RNA (1)...(19): siRNA sense strand
gacaagaaccgcaagaaug

SEQ ID NO: 1245079 - RNA, 19 nt, Homo sapiens
  misc_RNA (1)...(19): siRNA sense strand
gcacacacauguccaccau

SEQ ID NO: 1245080 - RNA, 19 nt, Homo sapiens
  misc_RNA (1)...(19): siRNA sense strand
gcgaugaaguagcaaauag

SEQ ID NO: 1245081 - RNA, 19 nt, Homo sapiens
  misc_RNA (1)...(19): siRNA sense strand
gcuguaaggucaugcugaa

SEQ ID NO: 1245082 - RNA, 19 nt, Homo sapiens
  misc_RNA (1)...(19): siRNA sense strand
gcaaacacccucugugagu

SEQ ID NO: 1245083 - RNA, 19 nt, Homo sapiens
  misc_RNA (1)...(19): siRNA sense strand
ccacccggcugauguuuga

SEQ ID NO: 1245084 - RNA, 19 nt, Homo sapiens
  misc_RNA (1)...(19): siRNA sense strand
caagacagcuauuuuguug

SEQ ID NO: 1245085 - RNA, 19 nt, Homo sapiens
  misc_RNA (1)...(19): siRNA sense strand
gcuauggguuucaucuuga

SEQ ID NO: 1245086 - RNA, 19 nt, Homo sapiens
  misc_RNA (1)...(19): siRNA sense strand
caacacggccucugugguu

SEQ ID NO: 1245087 - RNA, 19 nt, Homo sapiens
  misc_RNA (1)...(19): siRNA sense strand
gaaaccaccaccucuguug

SEQ ID NO: 1245088 - RNA, 19 nt, Homo sapiens
  misc_RNA (1)...(19): siRNA sense strand
ucagaaaggccacaucuug

SEQ ID NO: 1245089 - RNA, 19 nt, Homo sapiens
  misc_RNA (1)...(19): siRNA sense strand
gcacuuugcccaccacaug

SEQ ID NO: 1245090 - RNA, 19 nt, Homo sapiens
  misc_RNA (1)...(19): siRNA sense strand
acaagaaccgcaagaauga

SEQ ID NO: 1245091 - RNA, 19 nt, Homo sapiens
  misc_RNA (1)...(19): siRNA sense strand
gcaaauagugacagugaau

SEQ ID NO: 1245092 - RNA, 19 nt, Homo sapiens
  misc_RNA (1)...(19): siRNA sense strand
aagaaagggucaucaggaa

SEQ ID NO: 1245093 - RNA, 19 nt, Homo sapiens
  misc_RNA (1)...(19): siRNA sense strand
ccaaguggacucagaagaa

SEQ ID NO: 1245094 - RNA, 19 nt, Homo sapiens
  misc_RNA (1)...(19): siRNA sense strand
gcugagggcugcauuuguc

SEQ ID NO: 1245095 - RNA, 19 nt, Homo sapiens
  misc_RNA (1)...(19): siRNA sense strand
gauacaguuugccguggua

SEQ ID NO: 1245096 - RNA, 19 nt, Homo sapiens
  misc_RNA (1)...(19): siRNA sense strand
gaaagggucaucaggaaag

SEQ ID NO: 1245097 - RNA, 19 nt, Homo sapiens
  misc_RNA (1)...(19): siRNA sense strand
gcugagagcugugaauguc

SEQ ID NO: 1245098 - RNA, 19 nt, Homo sapiens
  misc_RNA (1)...(19): siRNA sense strand
ggaguucgcauaccacaug

SEQ ID NO: 1245099 - RNA, 19 nt, Homo sapiens
  misc_RNA (1)...(19): siRNA sense strand
uacgugagcuuugauggua

SEQ ID NO: 1245100 - RNA, 19 nt, Homo sapiens
  misc_RNA (1)...(19): siRNA sense strand
caaacacccucugugaguu

SEQ ID NO: 1245101 - RNA, 19 nt, Homo sapiens
  misc_RNA (1)...(19): siRNA sense strand
gugaauuugugaacaguug

SEQ ID NO: 1245102 - RNA, 19 nt, Homo sapiens
  misc_RNA (1)...(19): siRNA sense strand
ccuacaaucuccaccaaga

SEQ ID NO: 1245103 - RNA, 19 nt, Homo sapiens
  misc_RNA (1)...(19): siRNA sense strand
gacaacagcaacagcaauu

SEQ ID NO: 1245104 - RNA, 19 nt, Homo sapiens
  misc_RNA (1)...(19): siRNA sense strand
uguaaucgcgucuguauga

SEQ ID NO: 1245105 - RNA, 19 nt, Homo sapiens
  misc_RNA (1)...(19): siRNA sense strand
ggaaggacgcaacaagaug

SEQ ID NO: 1245106 - RNA, 19 nt, Homo sapiens
  misc_RNA (1)...(19): siRNA sense strand
gcuuaagaauggccaguau

SEQ ID NO: 1245107 - RNA, 19 nt, Homo sapiens
  misc_RNA (1)...(19): siRNA sense strand
acuaucaucuccacagaaa

SEQ ID NO: 1245108 - RNA, 19 nt, Homo sapiens
  misc_RNA (1)...(19): siRNA sense strand
cauuuaugcuucagucuug

SEQ ID NO: 1245109 - RNA, 19 nt, Homo sapiens
  misc_RNA (1)...(19): siRNA sense strand
acagagcgcugcccuccaa

SEQ ID NO: 1245110 - RNA, 19 nt, Homo sapiens
  misc_RNA (1)...(19): siRNA sense strand
ugaccuauguucugaucaa

SEQ ID NO: 1245111 - RNA, 19 nt, Homo sapiens
  misc_RNA (1)...(19): siRNA sense strand
cccguuaccucacauuuga

SEQ ID NO: 1245112 - RNA, 19 nt, Homo sapiens
  misc_RNA (1)...(19): siRNA sense strand
gcuaugugcugagugaaga

SEQ ID NO: 1245113 - RNA, 19 nt, Homo sapiens
  misc_RNA (1)...(19): siRNA sense strand
caacaacgacuacuaugag

SEQ ID NO: 1245114 - RNA, 19 nt, Homo sapiens
  misc_RNA (1)...(19): siRNA sense strand
ugaaaccacuggccucaca

SEQ ID NO: 1245115 - RNA, 19 nt, Homo sapiens
  misc_RNA (1)...(19): siRNA sense strand
ggacauugacccaaguugu

SEQ ID NO: 1245116 - RNA, 19 nt, Homo sapiens
  misc_RNA (1)...(19): siRNA sense strand
ugugggaacuucaaugaug

SEQ ID NO: 1245117 - RNA, 19 nt, Homo sapiens
  misc_RNA (1)...(19): siRNA sense strand
gaagggccaccgugugcua

SEQ ID NO: 1245118 - RNA, 19 nt, Homo sapiens
  misc_RNA (1)...(19): siRNA sense strand
caagaucagugccaagcau

SEQ ID NO: 1245119 - RNA, 19 nt, Homo sapiens
  misc_RNA (1)...(19): siRNA sense strand
gaacuaugacggcaacagu

SEQ ID NO: 1245120 - RNA, 19 nt, Homo sapiens
  misc_RNA (1)...(19): siRNA sense strand
caacucaacagacccauuc

SEQ ID NO: 1245121 - RNA, 19 nt, Homo sapiens
  misc_RNA (1)...(19): siRNA sense strand
cuacggagacccucauuau

SEQ ID NO: 1245122 - RNA, 19 nt, Homo sapiens
  misc_RNA (1)...(19): siRNA sense strand
agacuaccaucucuacaga

SEQ ID NO: 1245123 - RNA, 19 nt, Homo sapiens
  misc_RNA (1)...(19): siRNA sense strand
gaccaggagugucagaagu

SEQ ID NO: 1245124 - RNA, 19 nt, Homo sapiens
  misc_RNA (1)...(19): siRNA sense strand
ccgcaagaaugacaugaug

SEQ ID NO: 1245125 - RNA, 19 nt, Homo sapiens
  misc_RNA (1)...(19): siRNA sense strand
gugcaaacacccucuguga

SEQ ID NO: 1245126 - RNA, 19 nt, Homo sapiens
  misc_RNA (1)...(19): siRNA sense strand
gcccagcgaugaaguagca

SEQ ID NO: 1245127 - RNA, 19 nt, Homo sapiens
  misc_RNA (1)...(19): siRNA sense strand
gugggaacuucaaugauga

SEQ ID NO: 1245128 - RNA, 19 nt, Homo sapiens
  misc_RNA (1)...(19): siRNA sense strand
cagaaaggccacaucuuga

SEQ ID NO: 1245129 - RNA, 19 nt, Homo sapiens
  misc_RNA (1)...(19): siRNA sense strand
caacgcccaucccuucugu

SEQ ID NO: 1245130 - RNA, 19 nt, Homo sapiens
  misc_RNA (1)...(19): siRNA sense strand
guaaggucaugcugaaugg

SEQ ID NO: 1245131 - RNA, 19 nt, Homo sapiens
  misc_RNA (1)...(19): siRNA sense strand
gaugugcucuggaaacacu

SEQ ID NO: 1245132 - RNA, 19 nt, Homo sapiens
  misc_RNA (1)...(19): siRNA sense strand
acaaugaccaccugaaguu

SEQ ID NO: 1245133 - RNA, 19 nt, Homo sapiens
  misc_RNA (1)...(19): siRNA sense strand
gguuucaucuugaucaauc

SEQ ID NO: 1245134 - RNA, 19 nt, Homo sapiens
  misc_RNA (1)...(19): siRNA sense strand
gggaguauccggaaacaca

SEQ ID NO: 1245135 - RNA, 19 nt, Homo sapiens
  misc_RNA (1)...(19): siRNA sense strand
cagcuuugguggaaggaaa

SEQ ID NO: 1245136 - RNA, 19 nt, Homo sapiens
  misc_RNA (1)...(19): siRNA sense strand
uagcaaauagugacaguga

SEQ ID NO: 1245137 - RNA, 19 nt, Homo sapiens
  misc_RNA (1)...(19): siRNA sense strand
cugcaaacccaaccagaua

SEQ ID NO: 1245138 - RNA, 19 nt, Homo sapiens
  misc_RNA (1)...(19): siRNA sense strand
gcgaagccaugcccugaca

SEQ ID NO: 1245139 - RNA, 19 nt, Homo sapiens
  misc_RNA (1)...(19): siRNA sense strand
agacuaccaucuccacaga

SEQ ID NO: 1245140 - RNA, 19 nt, Homo sapiens
  misc_RNA (1)...(19): siRNA sense strand
agacuaccaucuccacaga

SEQ ID NO: 1245141 - RNA, 19 nt, Homo sapiens
  misc_RNA (1)...(19): siRNA sense strand
gaucaauccugggacuugu

SEQ ID NO: 1245142 - RNA, 19 nt, Homo sapiens
  misc_RNA (1)...(19): siRNA sense strand
uaacggagagggcagcuau

SEQ ID NO: 1245143 - RNA, 19 nt, Homo sapiens
  misc_RNA (1)...(19): siRNA sense strand
caggagaacccgaguggaa

SEQ ID NO: 1245144 - RNA, 19 nt, Homo sapiens
  misc_RNA (1)...(19): siRNA sense strand
ugaggaagaggacgaacua

SEQ ID NO: 1245145 - RNA, 19 nt, Homo sapiens
  misc_RNA (1)...(19): siRNA sense strand
cuacagcauuguuaacauc

SEQ ID NO: 1245146 - RNA, 19 nt, Homo sapiens
  misc_RNA (1)...(19): siRNA sense strand
ccauaaggcucagcagcaa

SEQ ID NO: 1245147 - RNA, 19 nt, Homo sapiens
  misc_RNA (1)...(19): siRNA sense strand
ugaaagcaacaacagaauu

SEQ ID NO: 1245148 - RNA, 19 nt, Homo sapiens
  misc_RNA (1)...(19): siRNA sense strand
cuacaacaacgacuacuau

SEQ ID NO: 1245149 - RNA, 19 nt, Homo sapiens
  misc_RNA (1)...(19): siRNA sense strand
ccaaaugcccgcuacgaau

SEQ ID NO: 1245150 - RNA, 19 nt, Homo sapiens
  misc_RNA (1)...(19): siRNA sense strand
gaagcaacacggccucugu

SEQ ID NO: 1245151 - RNA, 19 nt, Homo sapiens
  misc_RNA (1)...(19): siRNA sense strand
uucaugaggucuacauuga

SEQ ID NO: 1245152 - RNA, 19 nt, Homo sapiens
  misc_RNA (1)...(19): siRNA sense strand
caacagcaacagcaauugu

SEQ ID NO: 1245153 - RNA, 19 nt, Homo sapiens
  misc_RNA (1)...(19): siRNA sense strand
caugaggucuacauugaca

SEQ ID NO: 1245154 - RNA, 19 nt, Homo sapiens
  misc_RNA (1)...(19): siRNA sense strand
ccacuggccucacagaaaa

SEQ ID NO: 1245155 - RNA, 19 nt, Homo sapiens
  misc_RNA (1)...(19): siRNA sense strand
cgacaagaaccgcaagaau

SEQ ID NO: 1245156 - RNA, 19 nt, Homo sapiens
  misc_RNA (1)...(19): siRNA sense strand
acugugcgaucuuaauaaa

SEQ ID NO: 1245157 - RNA, 19 nt, Homo sapiens
  misc_RNA (1)...(19): siRNA sense strand
gcacucuuguccuggugaa

SEQ ID NO: 1245158 - RNA, 19 nt, Homo sapiens
  misc_RNA (1)...(19): siRNA sense strand
gaugaaguagcaaauagug

SEQ ID NO: 1245159 - RNA, 19 nt, Homo sapiens
  misc_RNA (1)...(19): siRNA sense strand
gaacuucaaugaugaggaa

SEQ ID NO: 1245160 - RNA, 19 nt, Homo sapiens
  misc_RNA (1)...(19): siRNA sense strand
gaaacacacucucuucuca

SEQ ID NO: 1245161 - RNA, 19 nt, Homo sapiens
  misc_RNA (1)...(19): siRNA sense strand
gugcagcccuccacauuua

SEQ ID NO: 1245162 - RNA, 19 nt, Homo sapiens
  misc_RNA (1)...(19): siRNA sense strand
gaacugugcgaucuuaaua

SEQ ID NO: 1245163 - RNA, 19 nt, Homo sapiens
  misc_RNA (1)...(19): siRNA sense strand
gaacaaugcucagucuaug

SEQ ID NO: 1245164 - RNA, 19 nt, Homo sapiens
  misc_RNA (1)...(19): siRNA sense strand
gaucaagacuguggacgua

SEQ ID NO: 1245165 - RNA, 19 nt, Homo sapiens
  misc_RNA (1)...(19): siRNA sense strand
ugacgggaaucaucucuua

SEQ ID NO: 1245166 - RNA, 19 nt, Homo sapiens
  misc_RNA (1)...(19): siRNA sense strand
ggaaagauaaggacauuga

SEQ ID NO: 1245167 - RNA, 19 nt, Homo sapiens
  misc_RNA (1)...(19): siRNA sense strand
caacagcaauugugucuca

SEQ ID NO: 1245168 - RNA, 19 nt, Homo sapiens
  misc_RNA (1)...(19): siRNA sense strand
gugaacaguuggaaagaua

SEQ ID NO: 1245169 - RNA, 19 nt, Homo sapiens
  misc_RNA (1)...(19): siRNA sense strand
ccagaaagccagcaucuaa

SEQ ID NO: 1245170 - RNA, 19 nt, Homo sapiens
  misc_RNA (1)...(19): siRNA sense strand
caacagcccaugcagcuua

SEQ ID NO: 1245171 - RNA, 19 nt, Homo sapiens
  misc_RNA (1)...(19): siRNA sense strand
gaagaggacgaacuaauga

SEQ ID NO: 1245172 - RNA, 19 nt, Homo sapiens
  misc_RNA (1)...(19): siRNA sense strand
gcaauugcuucuacaacaa

SEQ ID NO: 1245173 - RNA, 19 nt, Homo sapiens
  misc_RNA (1)...(19): siRNA sense strand
gcagacgccuggaacaaga

SEQ ID NO: 1245174 - RNA, 19 nt, Homo sapiens
  misc_RNA (1)...(19): siRNA sense strand
ggaagaggacgaacuaaug

SEQ ID NO: 1245175 - RNA, 19 nt, Homo sapiens
  misc_RNA (1)...(19): siRNA sense strand
ggaaaggucugcggcaugu

SEQ ID NO: 1245176 - RNA, 19 nt, Homo sapiens
  misc_RNA (1)...(19): siRNA sense strand
gaaagcaacaacagaauuc

SEQ ID NO: 1245177 - RNA, 19 nt, Homo sapiens
  misc_RNA (1)...(19): siRNA sense strand
caaguggacucagaagaaa

SEQ ID NO: 1245178 - RNA, 19 nt, Homo sapiens
  misc_RNA (1)...(19): siRNA sense strand
ccaacaggaugguaucuau

SEQ ID NO: 1245179 - RNA, 19 nt, Homo sapiens
  misc_RNA (1)...(19): siRNA sense strand
gacaagaaccgcaagaaug

SEQ ID NO: 1245180 - RNA, 19 nt, Homo sapiens
  misc_RNA (1)...(19): siRNA sense strand
gcacacacauguccaccau

SEQ ID NO: 1245181 - RNA, 19 nt, Homo sapiens
  misc_RNA (1)...(19): siRNA sense strand
gaacgaggaggaagagaga

SEQ ID NO: 1245182 - RNA, 19 nt, Homo sapiens
  misc_RNA (1)...(19): siRNA sense strand
gcgaugaaguagcaaauag

SEQ ID NO: 1245183 - RNA, 19 nt, Homo sapiens
  misc_RNA (1)...(19): siRNA sense strand
gcuguaaggucaugcugaa

SEQ ID NO: 1245184 - RNA, 19 nt, Homo sapiens
  misc_RNA (1)...(19): siRNA sense strand
gcaaacacccucugugagu

SEQ ID NO: 1245185 - RNA, 19 nt, Homo sapiens
  misc_RNA (1)...(19): siRNA sense strand
ccacccggcugauguuuga

SEQ ID NO: 1245186 - RNA, 19 nt, Homo sapiens
  misc_RNA (1)...(19): siRNA sense strand
caagacagcuauuuuguug

SEQ ID NO: 1245187 - RNA, 19 nt, Homo sapiens
  misc_RNA (1)...(19): siRNA sense strand
gcuauggguuucaucuuga

SEQ ID NO: 1245188 - RNA, 19 nt, Homo sapiens
  misc_RNA (1)...(19): siRNA sense strand
caacacggccucugugguu

SEQ ID NO: 1245189 - RNA, 19 nt, Homo sapiens
  misc_RNA (1)...(19): siRNA sense strand
gaaaccaccaccucuguug

SEQ ID NO: 1245190 - RNA, 19 nt, Homo sapiens
  misc_RNA (1)...(19): siRNA sense strand
ucagaaaggccacaucuug

SEQ ID NO: 1245191 - RNA, 19 nt, Homo sapiens
  misc_RNA (1)...(19): siRNA sense strand
gcacuuugcccaccacaug

SEQ ID NO: 1245192 - RNA, 19 nt, Homo sapiens
  misc_RNA (1)...(19): siRNA sense strand
acaagaaccgcaagaauga

SEQ ID NO: 1245193 - RNA, 19 nt, Homo sapiens
  misc_RNA (1)...(19): siRNA sense strand
gcaaauagugacagugaau

SEQ ID NO: 1245194 - RNA, 19 nt, Homo sapiens
  misc_RNA (1)...(19): siRNA sense strand
aagaaagggucaucaggaa

SEQ ID NO: 1245195 - RNA, 19 nt, Homo sapiens
  misc_RNA (1)...(19): siRNA sense strand
ccaaguggacucagaagaa

SEQ ID NO: 1245196 - RNA, 19 nt, Homo sapiens
  misc_RNA (1)...(19): siRNA sense strand
gcugagggcugcauuuguc

SEQ ID NO: 1245197 - RNA, 19 nt, Homo sapiens
  misc_RNA (1)...(19): siRNA sense strand
gauacaguuugccguggua

SEQ ID NO: 1245198 - RNA, 19 nt, Homo sapiens
  misc_RNA (1)...(19): siRNA sense strand
gaaagggucaucaggaaag

SEQ ID NO: 1245199 - RNA, 19 nt, Homo sapiens
  misc_RNA (1)...(19): siRNA sense strand
gcugagagcugugaauguc

SEQ ID NO: 1245200 - RNA, 19 nt, Homo sapiens
  misc_RNA (1)...(19): siRNA sense strand
ggaguucgcauaccacaug

SEQ ID NO: 1245201 - RNA, 19 nt, Homo sapiens
  misc_RNA (1)...(19): siRNA sense strand
uacgugagcuuugauggua

SEQ ID NO: 1245202 - RNA, 19 nt, Homo sapiens
  misc_RNA (1)...(19): siRNA sense strand
caaacacccucugugaguu

SEQ ID NO: 1245203 - RNA, 19 nt, Homo sapiens
  misc_RNA (1)...(19): siRNA sense strand
gugaauuugugaacaguug

SEQ ID NO: 1245204 - RNA, 19 nt, Homo sapiens
  misc_RNA (1)...(19): siRNA sense strand
ccuacaaucuccaccaaga

SEQ ID NO: 1245205 - RNA, 19 nt, Homo sapiens
  misc_RNA (1)...(19): siRNA sense strand
gacaacagcaacagcaauu

SEQ ID NO: 1245206 - RNA, 19 nt, Homo sapiens
  misc_RNA (1)...(19): siRNA sense strand
uguaaucgcgucuguauga

SEQ ID NO: 1245207 - RNA, 19 nt, Homo sapiens
  misc_RNA (1)...(19): siRNA sense strand
ggaaggacgcaacaagaug

SEQ ID NO: 1245208 - RNA, 19 nt, Homo sapiens
  misc_RNA (1)...(19): siRNA sense strand
gcuuaagaauggccaguau

SEQ ID NO: 1245209 - RNA, 19 nt, Homo sapiens
  misc_RNA (1)...(19): siRNA sense strand
acuaucaucuccacagaaa

SEQ ID NO: 1245210 - RNA, 19 nt, Homo sapiens
  misc_RNA (1)...(19): siRNA sense strand
cauuuaugcuucagucuug

SEQ ID NO: 1245211 - RNA, 19 nt, Homo sapiens
  misc_RNA (1)...(19): siRNA sense strand
acagagcgcugcccuccaa

SEQ ID NO: 1245212 - RNA, 19 nt, Homo sapiens
  misc_RNA (1)...(19): siRNA sense strand
ugaccuauguucugaucaa

SEQ ID NO: 1245213 - RNA, 19 nt, Homo sapiens
  misc_RNA (1)...(19): siRNA sense strand
cccguuaccucacauuuga

SEQ ID NO: 1245214 - RNA, 19 nt, Homo sapiens
  misc_RNA (1)...(19): siRNA sense strand
gcuaugugcugagugaaga

SEQ ID NO: 1245215 - RNA, 19 nt, Homo sapiens
  misc_RNA (1)...(19): siRNA sense strand
caacaacgacuacuaugag

SEQ ID NO: 1245216 - RNA, 19 nt, Homo sapiens
  misc_RNA (1)...(19): siRNA sense strand
ugaaaccacuggccucaca

SEQ ID NO: 1245217 - RNA, 19 nt, Homo sapiens
  misc_RNA (1)...(19): siRNA sense strand
gagagugcauuuacagaac

SEQ ID NO: 1245218 - RNA, 19 nt, Homo sapiens
  misc_RNA (1)...(19): siRNA sense strand
ggacauugacccaaguugu

SEQ ID NO: 1245219 - RNA, 19 nt, Homo sapiens
  misc_RNA (1)...(19): siRNA sense strand
ugugggaacuucaaugaug

SEQ ID NO: 1245220 - RNA, 19 nt, Homo sapiens
  misc_RNA (1)...(19): siRNA sense strand
gaagggccaccgugugcua

SEQ ID NO: 1245221 - RNA, 19 nt, Homo sapiens
  misc_RNA (1)...(19): siRNA sense strand
caagaucagugccaagcau

SEQ ID NO: 1245222 - RNA, 19 nt, Homo sapiens
  misc_RNA (1)...(19): siRNA sense strand
gaacuaugacggcaacagu

SEQ ID NO: 1245223 - RNA, 19 nt, Homo sapiens
  misc_RNA (1)...(19): siRNA sense strand
caacucaacagacccauuc

SEQ ID NO: 1245224 - RNA, 19 nt, Homo sapiens
  misc_RNA (1)...(19): siRNA sense strand
cuacggagacccucauuau

SEQ ID NO: 1245225 - RNA, 19 nt, Homo sapiens
  misc_RNA (1)...(19): siRNA sense strand
agacuaccaucucuacaga

SEQ ID NO: 1245226 - RNA, 19 nt, Homo sapiens
  misc_RNA (1)...(19): siRNA sense strand
gaccaggagugucagaagu

SEQ ID NO: 1245227 - RNA, 19 nt, Homo sapiens
  misc_RNA (1)...(19): siRNA sense strand
ccgcaagaaugacaugaug

SEQ ID NO: 1245228 - RNA, 19 nt, Homo sapiens
  misc_RNA (1)...(19): siRNA sense strand
gugcaaacacccucuguga

SEQ ID NO: 1245229 - RNA, 19 nt, Homo sapiens
  misc_RNA (1)...(19): siRNA sense strand
gcccagcgaugaaguagca

SEQ ID NO: 1245230 - RNA, 19 nt, Homo sapiens
  misc_RNA (1)...(19): siRNA sense strand
gugggaacuucaaugauga

SEQ ID NO: 1245231 - RNA, 19 nt, Homo sapiens
  misc_RNA (1)...(19): siRNA sense strand
cagaaaggccacaucuuga

SEQ ID NO: 1245232 - RNA, 19 nt, Homo sapiens
  misc_RNA (1)...(19): siRNA sense strand
caacgcccaucccuucugu

SEQ ID NO: 1245233 - RNA, 19 nt, Homo sapiens
  misc_RNA (1)...(19): siRNA sense strand
gaugugcucuggaaacacu

SEQ ID NO: 1245234 - RNA, 19 nt, Homo sapiens
  misc_RNA (1)...(19): siRNA sense strand
guaaggucaugcugaaugg

SEQ ID NO: 1245235 - RNA, 19 nt, Homo sapiens
  misc_RNA (1)...(19): siRNA sense strand
acaaugaccaccugaaguu

SEQ ID NO: 1245236 - RNA, 19 nt, Homo sapiens
  misc_RNA (1)...(19): siRNA sense strand
gguuucaucuugaucaauc

SEQ ID NO: 1245237 - RNA, 19 nt, Homo sapiens
  misc_RNA (1)...(19): siRNA sense strand
gggaguauccggaaacaca

SEQ ID NO: 1245238 - RNA, 19 nt, Homo sapiens
  misc_RNA (1)...(19): siRNA sense strand
cagcuuugguggaaggaaa

SEQ ID NO: 1245239 - RNA, 19 nt, Homo sapiens
  misc_RNA (1)...(19): siRNA sense strand
uagcaaauagugacaguga

SEQ ID NO: 1245240 - RNA, 19 nt, Homo sapiens
  misc_RNA (1)...(19): siRNA sense strand
cugcaaacccaaccagaua

SEQ ID NO: 1245241 - RNA, 19 nt, Homo sapiens
  misc_RNA (1)...(19): siRNA sense strand
gcgaagccaugcccugaca

SEQ ID NO: 1245242 - RNA, 19 nt, Homo sapiens
  misc_RNA (1)...(19): siRNA sense strand
agacuaccaucuccacaga

SEQ ID NO: 1245243 - RNA, 19 nt, Homo sapiens
  misc_RNA (1)...(19): siRNA sense strand
agacuaccaucuccacaga

SEQ ID NO: 1245244 - RNA, 19 nt, Homo sapiens
  misc_RNA (1)...(19): siRNA sense strand
gaucaauccugggacuugu

SEQ ID NO: 1245245 - RNA, 19 nt, Homo sapiens
  misc_RNA (1)...(19): siRNA sense strand
gaagcaacacggccucugu

SEQ ID NO: 1245246 - RNA, 19 nt, Homo sapiens
  misc_RNA (1)...(19): siRNA sense strand
uaacggagagggcagcuau

SEQ ID NO: 1245247 - RNA, 19 nt, Homo sapiens
  misc_RNA (1)...(19): siRNA sense strand
caggagaacccgaguggaa

SEQ ID NO: 1245248 - RNA, 19 nt, Homo sapiens
  misc_RNA (1)...(19): siRNA sense strand
ugaggaagaggacgaacua

SEQ ID NO: 1245249 - RNA, 19 nt, Homo sapiens
  misc_RNA (1)...(19): siRNA sense strand
cuacagcauuguuaacauc

SEQ ID NO: 1245250 - RNA, 19 nt, Homo sapiens
  misc_RNA (1)...(19): siRNA sense strand
ccauaaggcucagcagcaa

SEQ ID NO: 1245251 - RNA, 19 nt, Homo sapiens
  misc_RNA (1)...(19): siRNA sense strand
ugaaagcaacaacagaauu

SEQ ID NO: 1245252 - RNA, 19 nt, Homo sapiens
  misc_RNA (1)...(19): siRNA sense strand
cuacaacaacgacuacuau

SEQ ID NO: 1245253 - RNA, 19 nt, Homo sapiens
  misc_RNA (1)...(19): siRNA sense strand
ccaaaugcccgcuacgaau

SEQ ID NO: 1245254 - RNA, 19 nt, Homo sapiens
  misc_RNA (1)...(19): siRNA sense strand
uucaugaggucuacauuga

SEQ ID NO: 1245255 - RNA, 19 nt, Homo sapiens
  misc_RNA (1)...(19): siRNA sense strand
caacagcaacagcaauugu

SEQ ID NO: 1245256 - RNA, 19 nt, Homo sapiens
  misc_RNA (1)...(19): siRNA sense strand
caugaggucuacauugaca

SEQ ID NO: 1245257 - RNA, 19 nt, Homo sapiens
  misc_RNA (1)...(19): siRNA sense strand
acugugcgaucuuaauaaa

SEQ ID NO: 1245258 - RNA, 19 nt, Homo sapiens
  misc_RNA (1)...(19): siRNA sense strand
cgacaagaaccgcaagaau

SEQ ID NO: 1245259 - RNA, 19 nt, Homo sapiens
  misc_RNA (1)...(19): siRNA sense strand
uagaagaggucaaggauaa

SEQ ID NO: 1245260 - RNA, 19 nt, Homo sapiens
  misc_RNA (1)...(19): siRNA sense strand
gaaagccacuccugccaaa

SEQ ID NO: 1245261 - RNA, 19 nt, Homo sapiens
  misc_RNA (1)...(19): siRNA sense strand
caaagaaaccugcagauga

SEQ ID NO: 1245262 - RNA, 19 nt, Homo sapiens
  misc_RNA (1)...(19): siRNA sense strand
ggaagcagauccagaagau

SEQ ID NO: 1245263 - RNA, 19 nt, Homo sapiens
  misc_RNA (1)...(19): siRNA sense strand
guaaagagaaaccaucuaa

SEQ ID NO: 1245264 - RNA, 19 nt, Homo sapiens
  misc_RNA (1)...(19): siRNA sense strand
gaagccaccuacaaagaaa

SEQ ID NO: 1245265 - RNA, 19 nt, Homo sapiens
  misc_RNA (1)...(19): siRNA sense strand
aaacaauuccuccugauua

SEQ ID NO: 1245266 - RNA, 19 nt, Homo sapiens
  misc_RNA (1)...(19): siRNA sense strand
ggagaaggccaaagaagaa

SEQ ID NO: 1245267 - RNA, 19 nt, Homo sapiens
  misc_RNA (1)...(19): siRNA sense strand
gaaaaccugugauggauaa

SEQ ID NO: 1245268 - RNA, 19 nt, Homo sapiens
  misc_RNA (1)...(19): siRNA sense strand
caaaaugcuucaucucuua

SEQ ID NO: 1245269 - RNA, 19 nt, Homo sapiens
  misc_RNA (1)...(19): siRNA sense strand
gaaacaaucccaucugagu

SEQ ID NO: 1245270 - RNA, 19 nt, Homo sapiens
  misc_RNA (1)...(19): siRNA sense strand
acaaaccaauggaagauaa

SEQ ID NO: 1245271 - RNA, 19 nt, Homo sapiens
  misc_RNA (1)...(19): siRNA sense strand
gaacagcuuccacccauga

SEQ ID NO: 1245272 - RNA, 19 nt, Homo sapiens
  misc_RNA (1)...(19): siRNA sense strand
gaaacaauuccuccugauu

SEQ ID NO: 1245273 - RNA, 19 nt, Homo sapiens
  misc_RNA (1)...(19): siRNA sense strand
agaaagagaugacacuauc

SEQ ID NO: 1245274 - RNA, 19 nt, Homo sapiens
  misc_RNA (1)...(19): siRNA sense strand
uaaacucucugacagucua

SEQ ID NO: 1245275 - RNA, 19 nt, Homo sapiens
  misc_RNA (1)...(19): siRNA sense strand
acagaaaccucacagaaca

SEQ ID NO: 1245276 - RNA, 19 nt, Homo sapiens
  misc_RNA (1)...(19): siRNA sense strand
gaacaaaccaauggaagau

SEQ ID NO: 1245277 - RNA, 19 nt, Homo sapiens
  misc_RNA (1)...(19): siRNA sense strand
ggucaaggauaaagaugga

SEQ ID NO: 1245278 - RNA, 19 nt, Homo sapiens
  misc_RNA (1)...(19): siRNA sense strand
ggacaggacaaaccaguga

SEQ ID NO: 1245279 - RNA, 19 nt, Homo sapiens
  misc_RNA (1)...(19): siRNA sense strand
gagacaagcuuggagaaag

SEQ ID NO: 1245280 - RNA, 19 nt, Homo sapiens
  misc_RNA (1)...(19): siRNA sense strand
ugaccggucugaauguaaa

SEQ ID NO: 1245281 - RNA, 19 nt, Homo sapiens
  misc_RNA (1)...(19): siRNA sense strand
ccaaagcaccuaagaaugg

SEQ ID NO: 1245282 - RNA, 19 nt, Homo sapiens
  misc_RNA (1)...(19): siRNA sense strand
ugucggaccuccaugugua

SEQ ID NO: 1245283 - RNA, 19 nt, Homo sapiens
  misc_RNA (1)...(19): siRNA sense strand
caaagaagaagaccgugaa

SEQ ID NO: 1245284 - RNA, 19 nt, Homo sapiens
  misc_RNA (1)...(19): siRNA sense strand
agacaagcuuggagaaaga

SEQ ID NO: 1245285 - RNA, 19 nt, Homo sapiens
  misc_RNA (1)...(19): siRNA sense strand
aaagaaaccugcagaugac

SEQ ID NO: 1245286 - RNA, 19 nt, Homo sapiens
  misc_RNA (1)...(19): siRNA sense strand
gcaaagacaacagaggaaa

SEQ ID NO: 1245287 - RNA, 19 nt, Homo sapiens
  misc_RNA (1)...(19): siRNA sense strand
ggaccuccauguguaguau

SEQ ID NO: 1245288 - RNA, 19 nt, Homo sapiens
  misc_RNA (1)...(19): siRNA sense strand
gagaaagagaugacacuau

SEQ ID NO: 1245289 - RNA, 19 nt, Homo sapiens
  misc_RNA (1)...(19): siRNA sense strand
gaugaugccuuggauaaac

SEQ ID NO: 1245290 - RNA, 19 nt, Homo sapiens
  misc_RNA (1)...(19): siRNA sense strand
aaaggaagcagauccagaa

SEQ ID NO: 1245291 - RNA, 19 nt, Homo sapiens
  misc_RNA (1)...(19): siRNA sense strand
ugacaaagaccucgaugau

SEQ ID NO: 1245292 - RNA, 19 nt, Homo sapiens
  misc_RNA (1)...(19): siRNA sense strand
gugaaaagcuuggugaaaa

SEQ ID NO: 1245293 - RNA, 19 nt, Homo sapiens
  misc_RNA (1)...(19): siRNA sense strand
uggauaaagucaaggagaa

SEQ ID NO: 1245294 - RNA, 19 nt, Homo sapiens
  misc_RNA (1)...(19): siRNA sense strand
caaagcaccuaagaaugga

SEQ ID NO: 1245295 - RNA, 19 nt, Homo sapiens
  misc_RNA (1)...(19): siRNA sense strand
cuacagaaaccucacagaa

SEQ ID NO: 1245296 - RNA, 19 nt, Homo sapiens
  misc_RNA (1)...(19): siRNA sense strand
gaccuccgcucaauuaagg

SEQ ID NO: 1245297 - RNA, 19 nt, Homo sapiens
  misc_RNA (1)...(19): siRNA sense strand
gccagaugaugcuguagaa

SEQ ID NO: 1245298 - RNA, 19 nt, Homo sapiens
  misc_RNA (1)...(19): siRNA sense strand
gaacacagcaaaggauaag

SEQ ID NO: 1245299 - RNA, 19 nt, Homo sapiens
  misc_RNA (1)...(19): siRNA sense strand
ucaaggagaaggccaaaga

SEQ ID NO: 1245300 - RNA, 19 nt, Homo sapiens
  misc_RNA (1)...(19): siRNA sense strand
ggagaaagagaugacacua

SEQ ID NO: 1245301 - RNA, 19 nt, Homo sapiens
  misc_RNA (1)...(19): siRNA sense strand
ggagguaaagcgaaggauu

SEQ ID NO: 1245302 - RNA, 19 nt, Homo sapiens
  misc_RNA (1)...(19): siRNA sense strand
aaacaaucccaucugagua

SEQ ID NO: 1245303 - RNA, 19 nt, Homo sapiens
  misc_RNA (1)...(19): siRNA sense strand
caaaggauaagugcaagaa

SEQ ID NO: 1245304 - RNA, 19 nt, Homo sapiens
  misc_RNA (1)...(19): siRNA sense strand
gcgaaggauucagcaaaga

SEQ ID NO: 1245305 - RNA, 19 nt, Homo sapiens
  misc_RNA (1)...(19): siRNA sense strand
ugacccagaugagaacaaa

SEQ ID NO: 1245306 - RNA, 19 nt, Homo sapiens
  misc_RNA (1)...(19): siRNA sense strand
gagguaaagcgaaggauuc

SEQ ID NO: 1245307 - RNA, 19 nt, Homo sapiens
  misc_RNA (1)...(19): siRNA sense strand
uaucccaccugaauacaga

SEQ ID NO: 1245308 - RNA, 19 nt, Homo sapiens
  misc_RNA (1)...(19): siRNA sense strand
gaugagaacaaaccaaugg

SEQ ID NO: 1245309 - RNA, 19 nt, Homo sapiens
  misc_RNA (1)...(19): siRNA sense strand
auacagacaucuccuggau

SEQ ID NO: 1245310 - RNA, 19 nt, Homo sapiens
  misc_RNA (1)...(19): siRNA sense strand
gaaguguggugaggaugau

SEQ ID NO: 1245311 - RNA, 19 nt, Homo sapiens
  misc_RNA (1)...(19): siRNA sense strand
ccaauggaagauaaaguaa

SEQ ID NO: 1245312 - RNA, 19 nt, Homo sapiens
  misc_RNA (1)...(19): siRNA sense strand
cagcaaaggauaagugcaa

SEQ ID NO: 1245313 - RNA, 19 nt, Homo sapiens
  misc_RNA (1)...(19): siRNA sense strand
aacaauuccuccugauuau

SEQ ID NO: 1245314 - RNA, 19 nt, Homo sapiens
  misc_RNA (1)...(19): siRNA sense strand
cagaacacagcaaaggaua

SEQ ID NO: 1245315 - RNA, 19 nt, Homo sapiens
  misc_RNA (1)...(19): siRNA sense strand
ugaagccaccuacaaagaa

SEQ ID NO: 1245316 - RNA, 19 nt, Homo sapiens
  misc_RNA (1)...(19): siRNA sense strand
ggauaaagauggaaaacca

SEQ ID NO: 1245317 - RNA, 19 nt, Homo sapiens
  misc_RNA (1)...(19): siRNA sense strand
ggaagauaaaguaaaggaa

SEQ ID NO: 1245318 - RNA, 19 nt, Homo sapiens
  misc_RNA (1)...(19): siRNA sense strand
caauuaaggaagucgauga

SEQ ID NO: 1245319 - RNA, 19 nt, Homo sapiens
  misc_RNA (1)...(19): siRNA sense strand
gaaaccaucuaagccaacu

SEQ ID NO: 1245320 - RNA, 19 nt, Homo sapiens
  misc_RNA (1)...(19): siRNA sense strand
ugccaucucugaagugguu

SEQ ID NO: 1245321 - RNA, 19 nt, Homo sapiens
  misc_RNA (1)...(19): siRNA sense strand
ucgaugaugccuuggauaa

SEQ ID NO: 1245322 - RNA, 19 nt, Homo sapiens
  misc_RNA (1)...(19): siRNA sense strand
gacacuaucccaccugaau

SEQ ID NO: 1245323 - RNA, 19 nt, Homo sapiens
  misc_RNA (1)...(19): siRNA sense strand
gugaagccaccuacaaaga

SEQ ID NO: 1245324 - RNA, 19 nt, Homo sapiens
  misc_RNA (1)...(19): siRNA sense strand
ugaggaugaugaaacaauc

SEQ ID NO: 1245325 - RNA, 19 nt, Homo sapiens
  misc_RNA (1)...(19): siRNA sense strand
gaaggauucagcaaagaca

SEQ ID NO: 1245326 - RNA, 19 nt, Homo sapiens
  misc_RNA (1)...(19): siRNA sense strand
ucaaagaaaccugcagaug

SEQ ID NO: 1245327 - RNA, 19 nt, Homo sapiens
  misc_RNA (1)...(19): siRNA sense strand
gacaaagaccucgaugaug

SEQ ID NO: 1245328 - RNA, 19 nt, Homo sapiens
  misc_RNA (1)...(19): siRNA sense strand
gaagaggucaaggauaaag

SEQ ID NO: 1245329 - RNA, 19 nt, Homo sapiens
  misc_RNA (1)...(19): siRNA sense strand
gauuagaagaggucaagga

SEQ ID NO: 1245330 - RNA, 19 nt, Homo sapiens
  misc_RNA (1)...(19): siRNA sense strand
caauuccuccugauuauag

SEQ ID NO: 1245331 - RNA, 19 nt, Homo sapiens
  misc_RNA (1)...(19): siRNA sense strand
caaggagaaggccaaagaa

SEQ ID NO: 1245332 - RNA, 19 nt, Homo sapiens
  misc_RNA (1)...(19): siRNA sense strand
augaaacaaucccaucuga

SEQ ID NO: 1245333 - RNA, 19 nt, Homo sapiens
  misc_RNA (1)...(19): siRNA sense strand
gcaaaggauaagugcaaga

SEQ ID NO: 1245334 - RNA, 19 nt, Homo sapiens
  misc_RNA (1)...(19): siRNA sense strand
cagugaagccaccuacaaa

SEQ ID NO: 1245335 - RNA, 19 nt, Homo sapiens
  misc_RNA (1)...(19): siRNA sense strand
ccagugaagccaccuacaa

SEQ ID NO: 1245336 - RNA, 19 nt, Homo sapiens
  misc_RNA (1)...(19): siRNA sense strand
ggauaaacucucugacagu

SEQ ID NO: 1245337 - RNA, 19 nt, Homo sapiens
  misc_RNA (1)...(19): siRNA sense strand
ggucugaauguaaagagaa

SEQ ID NO: 1245338 - RNA, 19 nt, Homo sapiens
  misc_RNA (1)...(19): siRNA sense strand
cagaugagaacaaaccaau

SEQ ID NO: 1245339 - RNA, 19 nt, Homo sapiens
  misc_RNA (1)...(19): siRNA sense strand
gaaaccugcagaugaccaa

SEQ ID NO: 1245340 - RNA, 19 nt, Homo sapiens
  misc_RNA (1)...(19): siRNA sense strand
acacuaucccaccugaaua

SEQ ID NO: 1245341 - RNA, 19 nt, Homo sapiens
  misc_RNA (1)...(19): siRNA sense strand
agagaaguguggugaggau

SEQ ID NO: 1245342 - RNA, 19 nt, Homo sapiens
  misc_RNA (1)...(19): siRNA sense strand
caaaccaauggaagauaaa

SEQ ID NO: 1245343 - RNA, 19 nt, Homo sapiens
  misc_RNA (1)...(19): siRNA sense strand
agaacaaaccaauggaaga

SEQ ID NO: 1245344 - RNA, 19 nt, Homo sapiens
  misc_RNA (1)...(19): siRNA sense strand
ccacggauaaagauggaaa

SEQ ID NO: 1245345 - RNA, 19 nt, Homo sapiens
  misc_RNA (1)...(19): siRNA sense strand
aaagagaaaccaucuaagc

SEQ ID NO: 1245346 - RNA, 19 nt, Homo sapiens
  misc_RNA (1)...(19): siRNA sense strand
gcuccaaagcaccuaagaa

SEQ ID NO: 1245347 - RNA, 19 nt, Homo sapiens
  misc_RNA (1)...(19): siRNA sense strand
caaaagagucuaaggaaca

SEQ ID NO: 1245348 - RNA, 19 nt, Homo sapiens
  misc_RNA (1)...(19): siRNA sense strand
ucaaggauaaagauggaaa

SEQ ID NO: 1245349 - RNA, 19 nt, Homo sapiens
  misc_RNA (1)...(19): siRNA sense strand
agaaacaauuccuccugau

SEQ ID NO: 1245350 - RNA, 19 nt, Homo sapiens
  misc_RNA (1)...(19): siRNA sense strand
gaagauggaaaaccuguga

SEQ ID NO: 1245351 - RNA, 19 nt, Homo sapiens
  misc_RNA (1)...(19): siRNA sense strand
caucuaagccaacugaaaa

SEQ ID NO: 1245352 - RNA, 19 nt, Homo sapiens
  misc_RNA (1)...(19): siRNA sense strand
gucugaauguaaagagaaa

SEQ ID NO: 1245353 - RNA, 19 nt, Homo sapiens
  misc_RNA (1)...(19): siRNA sense strand
accaauggaagauaaagua

SEQ ID NO: 1245354 - RNA, 19 nt, Homo sapiens
  misc_RNA (1)...(19): siRNA sense strand
ccaucuaagccaacugaaa

SEQ ID NO: 1245355 - RNA, 19 nt, Homo sapiens
  misc_RNA (1)...(19): siRNA sense strand
ucagaggauucaaagaaac

SEQ ID NO: 1245356 - RNA, 19 nt, Homo sapiens
  misc_RNA (1)...(19): siRNA sense strand
aucagaggauucaaagaaa

SEQ ID NO: 1245357 - RNA, 19 nt, Homo sapiens
  misc_RNA (1)...(19): siRNA sense strand
ccaccugaauacagacauc

SEQ ID NO: 1245358 - RNA, 19 nt, Homo sapiens
  misc_RNA (1)...(19): siRNA sense strand
aagcgaaggauucagcaaa

SEQ ID NO: 1245359 - RNA, 19 nt, Homo sapiens
  misc_RNA (1)...(19): siRNA sense strand
uagaagaggucaaggauaa

SEQ ID NO: 1245360 - RNA, 19 nt, Homo sapiens
  misc_RNA (1)...(19): siRNA sense strand
gaaagccacuccugccaaa

SEQ ID NO: 1245361 - RNA, 19 nt, Homo sapiens
  misc_RNA (1)...(19): siRNA sense strand
caaagaaaccugcagauga

SEQ ID NO: 1245362 - RNA, 19 nt, Homo sapiens
  misc_RNA (1)...(19): siRNA sense strand
ggaagcagauccagaagau

SEQ ID NO: 1245363 - RNA, 19 nt, Homo sapiens
  misc_RNA (1)...(19): siRNA sense strand
guaaagagaaaccaucuaa

SEQ ID NO: 1245364 - RNA, 19 nt, Homo sapiens
  misc_RNA (1)...(19): siRNA sense strand
gaagccaccuacaaagaaa

SEQ ID NO: 1245365 - RNA, 19 nt, Homo sapiens
  misc_RNA (1)...(19): siRNA sense strand
aaacaauuccuccugauua

SEQ ID NO: 1245366 - RNA, 19 nt, Homo sapiens
  misc_RNA (1)...(19): siRNA sense strand
ggagaaggccaaagaagaa

SEQ ID NO: 1245367 - RNA, 19 nt, Homo sapiens
  misc_RNA (1)...(19): siRNA sense strand
gaaaaccugugauggauaa

SEQ ID NO: 1245368 - RNA, 19 nt, Homo sapiens
  misc_RNA (1)...(19): siRNA sense strand
caaaaugcuucaucucuua

SEQ ID NO: 1245369 - RNA, 19 nt, Homo sapiens
  misc_RNA (1)...(19): siRNA sense strand
gaaacaaucccaucugagu

SEQ ID NO: 1245370 - RNA, 19 nt, Homo sapiens
  misc_RNA (1)...(19): siRNA sense strand
acaaaccaauggaagauaa

SEQ ID NO: 1245371 - RNA, 19 nt, Homo sapiens
  misc_RNA (1)...(19): siRNA sense strand
gaacagcuuccacccauga

SEQ ID NO: 1245372 - RNA, 19 nt, Homo sapiens
  misc_RNA (1)...(19): siRNA sense strand
gaaacaauuccuccugauu

SEQ ID NO: 1245373 - RNA, 19 nt, Homo sapiens
  misc_RNA (1)...(19): siRNA sense strand
agaaagagaugacacuauc

SEQ ID NO: 1245374 - RNA, 19 nt, Homo sapiens
  misc_RNA (1)...(19): siRNA sense strand
uaaacucucugacagucua

SEQ ID NO: 1245375 - RNA, 19 nt, Homo sapiens
  misc_RNA (1)...(19): siRNA sense strand
acagaaaccucacagaaca

SEQ ID NO: 1245376 - RNA, 19 nt, Homo sapiens
  misc_RNA (1)...(19): siRNA sense strand
gaacaaaccaauggaagau

SEQ ID NO: 1245377 - RNA, 19 nt, Homo sapiens
  misc_RNA (1)...(19): siRNA sense strand
ggucaaggauaaagaugga

SEQ ID NO: 1245378 - RNA, 19 nt, Homo sapiens
  misc_RNA (1)...(19): siRNA sense strand
ggacaggacaaaccaguga

SEQ ID NO: 1245379 - RNA, 19 nt, Homo sapiens
  misc_RNA (1)...(19): siRNA sense strand
gagacaagcuuggagaaag

SEQ ID NO: 1245380 - RNA, 19 nt, Homo sapiens
  misc_RNA (1)...(19): siRNA sense strand
ugaccggucugaauguaaa

SEQ ID NO: 1245381 - RNA, 19 nt, Homo sapiens
  misc_RNA (1)...(19): siRNA sense strand
ccaaagcaccuaagaaugg

SEQ ID NO: 1245382 - RNA, 19 nt, Homo sapiens
  misc_RNA (1)...(19): siRNA sense strand
ugucggaccuccaugugua

SEQ ID NO: 1245383 - RNA, 19 nt, Homo sapiens
  misc_RNA (1)...(19): siRNA sense strand
caaagaagaagaccgugaa

SEQ ID NO: 1245384 - RNA, 19 nt, Homo sapiens
  misc_RNA (1)...(19): siRNA sense strand
agacaagcuuggagaaaga

SEQ ID NO: 1245385 - RNA, 19 nt, Homo sapiens
  misc_RNA (1)...(19): siRNA sense strand
aaagaaaccugcagaugac

SEQ ID NO: 1245386 - RNA, 19 nt, Homo sapiens
  misc_RNA (1)...(19): siRNA sense strand
gcaaagacaacagaggaaa

SEQ ID NO: 1245387 - RNA, 19 nt, Homo sapiens
  misc_RNA (1)...(19): siRNA sense strand
ggaccuccauguguaguau

SEQ ID NO: 1245388 - RNA, 19 nt, Homo sapiens
  misc_RNA (1)...(19): siRNA sense strand
gagaaagagaugacacuau

SEQ ID NO: 1245389 - RNA, 19 nt, Homo sapiens
  misc_RNA (1)...(19): siRNA sense strand
gaugaugccuuggauaaac

SEQ ID NO: 1245390 - RNA, 19 nt, Homo sapiens
  misc_RNA (1)...(19): siRNA sense strand
aaaggaagcagauccagaa

SEQ ID NO: 1245391 - RNA, 19 nt, Homo sapiens
  misc_RNA (1)...(19): siRNA sense strand
ugacaaagaccucgaugau

SEQ ID NO: 1245392 - RNA, 19 nt, Homo sapiens
  misc_RNA (1)...(19): siRNA sense strand
gugaaaagcuuggugaaaa

SEQ ID NO: 1245393 - RNA, 19 nt, Homo sapiens
  misc_RNA (1)...(19): siRNA sense strand
uggauaaagucaaggagaa

SEQ ID NO: 1245394 - RNA, 19 nt, Homo sapiens
  misc_RNA (1)...(19): siRNA sense strand
caaagcaccuaagaaugga

SEQ ID NO: 1245395 - RNA, 19 nt, Homo sapiens
  misc_RNA (1)...(19): siRNA sense strand
cuacagaaaccucacagaa

SEQ ID NO: 1245396 - RNA, 19 nt, Homo sapiens
  misc_RNA (1)...(19): siRNA sense strand
gaccuccgcucaauuaagg

SEQ ID NO: 1245397 - RNA, 19 nt, Homo sapiens
  misc_RNA (1)...(19): siRNA sense strand
gccagaugaugcuguagaa

SEQ ID NO: 1245398 - RNA, 19 nt, Homo sapiens
  misc_RNA (1)...(19): siRNA sense strand
gaacacagcaaaggauaag

SEQ ID NO: 1245399 - RNA, 19 nt, Homo sapiens
  misc_RNA (1)...(19): siRNA sense strand
ucaaggagaaggccaaaga

SEQ ID NO: 1245400 - RNA, 19 nt, Homo sapiens
  misc_RNA (1)...(19): siRNA sense strand
ggagaaagagaugacacua

SEQ ID NO: 1245401 - RNA, 19 nt, Homo sapiens
  misc_RNA (1)...(19): siRNA sense strand
ggagguaaagcgaaggauu

SEQ ID NO: 1245402 - RNA, 19 nt, Homo sapiens
  misc_RNA (1)...(19): siRNA sense strand
aaacaaucccaucugagua

SEQ ID NO: 1245403 - RNA, 19 nt, Homo sapiens
  misc_RNA (1)...(19): siRNA sense strand
caaaggauaagugcaagaa

SEQ ID NO: 1245404 - RNA, 19 nt, Homo sapiens
  misc_RNA (1)...(19): siRNA sense strand
gcgaaggauucagcaaaga

SEQ ID NO: 1245405 - RNA, 19 nt, Homo sapiens
  misc_RNA (1)...(19): siRNA sense strand
ugacccagaugagaacaaa

SEQ ID NO: 1245406 - RNA, 19 nt, Homo sapiens
  misc_RNA (1)...(19): siRNA sense strand
gagguaaagcgaaggauuc

SEQ ID NO: 1245407 - RNA, 19 nt, Homo sapiens
  misc_RNA (1)...(19): siRNA sense strand
uaucccaccugaauacaga

SEQ ID NO: 1245408 - RNA, 19 nt, Homo sapiens
  misc_RNA (1)...(19): siRNA sense strand
gaugagaacaaaccaaugg

SEQ ID NO: 1245409 - RNA, 19 nt, Homo sapiens
  misc_RNA (1)...(19): siRNA sense strand
auacagacaucuccuggau

SEQ ID NO: 1245410 - RNA, 19 nt, Homo sapiens
  misc_RNA (1)...(19): siRNA sense strand
gaaguguggugaggaugau

SEQ ID NO: 1245411 - RNA, 19 nt, Homo sapiens
  misc_RNA (1)...(19): siRNA sense strand
ccaauggaagauaaaguaa

SEQ ID NO: 1245412 - RNA, 19 nt, Homo sapiens
  misc_RNA (1)...(19): siRNA sense strand
cagcaaaggauaagugcaa

SEQ ID NO: 1245413 - RNA, 19 nt, Homo sapiens
  misc_RNA (1)...(19): siRNA sense strand
aacaauuccuccugauuau

SEQ ID NO: 1245414 - RNA, 19 nt, Homo sapiens
  misc_RNA (1)...(19): siRNA sense strand
cagaacacagcaaaggaua

SEQ ID NO: 1245415 - RNA, 19 nt, Homo sapiens
  misc_RNA (1)...(19): siRNA sense strand
ugaagccaccuacaaagaa

SEQ ID NO: 1245416 - RNA, 19 nt, Homo sapiens
  misc_RNA (1)...(19): siRNA sense strand
ggauaaagauggaaaacca

SEQ ID NO: 1245417 - RNA, 19 nt, Homo sapiens
  misc_RNA (1)...(19): siRNA sense strand
ggaagauaaaguaaaggaa

SEQ ID NO: 1245418 - RNA, 19 nt, Homo sapiens
  misc_RNA (1)...(19): siRNA sense strand
caauuaaggaagucgauga

SEQ ID NO: 1245419 - RNA, 19 nt, Homo sapiens
  misc_RNA (1)...(19): siRNA sense strand
gaaaccaucuaagccaacu

SEQ ID NO: 1245420 - RNA, 19 nt, Homo sapiens
  misc_RNA (1)...(19): siRNA sense strand
ugccaucucugaagugguu

SEQ ID NO: 1245421 - RNA, 19 nt, Homo sapiens
  misc_RNA (1)...(19): siRNA sense strand
ucgaugaugccuuggauaa

SEQ ID NO: 1245422 - RNA, 19 nt, Homo sapiens
  misc_RNA (1)...(19): siRNA sense strand
gacacuaucccaccugaau

SEQ ID NO: 1245423 - RNA, 19 nt, Homo sapiens
  misc_RNA (1)...(19): siRNA sense strand
gugaagccaccuacaaaga

SEQ ID NO: 1245424 - RNA, 19 nt, Homo sapiens
  misc_RNA (1)...(19): siRNA sense strand
ugaggaugaugaaacaauc

SEQ ID NO: 1245425 - RNA, 19 nt, Homo sapiens
  misc_RNA (1)...(19): siRNA sense strand
gaaggauucagcaaagaca

SEQ ID NO: 1245426 - RNA, 19 nt, Homo sapiens
  misc_RNA (1)...(19): siRNA sense strand
ucaaagaaaccugcagaug

SEQ ID NO: 1245427 - RNA, 19 nt, Homo sapiens
  misc_RNA (1)...(19): siRNA sense strand
gacaaagaccucgaugaug

SEQ ID NO: 1245428 - RNA, 19 nt, Homo sapiens
  misc_RNA (1)...(19): siRNA sense strand
gaagaggucaaggauaaag

SEQ ID NO: 1245429 - RNA, 19 nt, Homo sapiens
  misc_RNA (1)...(19): siRNA sense strand
gauuagaagaggucaagga

SEQ ID NO: 1245430 - RNA, 19 nt, Homo sapiens
  misc_RNA (1)...(19): siRNA sense strand
caauuccuccugauuauag

SEQ ID NO: 1245431 - RNA, 19 nt, Homo sapiens
  misc_RNA (1)...(19): siRNA sense strand
caaggagaaggccaaagaa

SEQ ID NO: 1245432 - RNA, 19 nt, Homo sapiens
  misc_RNA (1)...(19): siRNA sense strand
augaaacaaucccaucuga

SEQ ID NO: 1245433 - RNA, 19 nt, Homo sapiens
  misc_RNA (1)...(19): siRNA sense strand
gcaaaggauaagugcaaga

SEQ ID NO: 1245434 - RNA, 19 nt, Homo sapiens
  misc_RNA (1)...(19): siRNA sense strand
cagugaagccaccuacaaa

SEQ ID NO: 1245435 - RNA, 19 nt, Homo sapiens
  misc_RNA (1)...(19): siRNA sense strand
ccagugaagccaccuacaa

SEQ ID NO: 1245436 - RNA, 19 nt, Homo sapiens
  misc_RNA (1)...(19): siRNA sense strand
ggauaaacucucugacagu

SEQ ID NO: 1245437 - RNA, 19 nt, Homo sapiens
  misc_RNA (1)...(19): siRNA sense strand
ggucugaauguaaagagaa

SEQ ID NO: 1245438 - RNA, 19 nt, Homo sapiens
  misc_RNA (1)...(19): siRNA sense strand
cagaugagaacaaaccaau

SEQ ID NO: 1245439 - RNA, 19 nt, Homo sapiens
  misc_RNA (1)...(19): siRNA sense strand
gaaaccugcagaugaccaa

SEQ ID NO: 1245440 - RNA, 19 nt, Homo sapiens
  misc_RNA (1)...(19): siRNA sense strand
acacuaucccaccugaaua

SEQ ID NO: 1245441 - RNA, 19 nt, Homo sapiens
  misc_RNA (1)...(19): siRNA sense strand
agagaaguguggugaggau

SEQ ID NO: 1245442 - RNA, 19 nt, Homo sapiens
  misc_RNA (1)...(19): siRNA sense strand
caaaccaauggaagauaaa

SEQ ID NO: 1245443 - RNA, 19 nt, Homo sapiens
  misc_RNA (1)...(19): siRNA sense strand
agaacaaaccaauggaaga

SEQ ID NO: 1245444 - RNA, 19 nt, Homo sapiens
  misc_RNA (1)...(19): siRNA sense strand
ccacggauaaagauggaaa

SEQ ID NO: 1245445 - RNA, 19 nt, Homo sapiens
  misc_RNA (1)...(19): siRNA sense strand
aaagagaaaccaucuaagc

SEQ ID NO: 1245446 - RNA, 19 nt, Homo sapiens
  misc_RNA (1)...(19): siRNA sense strand
gcuccaaagcaccuaagaa

SEQ ID NO: 1245447 - RNA, 19 nt, Homo sapiens
  misc_RNA (1)...(19): siRNA sense strand
caaaagagucuaaggaaca

SEQ ID NO: 1245448 - RNA, 19 nt, Homo sapiens
  misc_RNA (1)...(19): siRNA sense strand
ucaaggauaaagauggaaa

SEQ ID NO: 1245449 - RNA, 19 nt, Homo sapiens
  misc_RNA (1)...(19): siRNA sense strand
agaaacaauuccuccugau

SEQ ID NO: 1245450 - RNA, 19 nt, Homo sapiens
  misc_RNA (1)...(19): siRNA sense strand
gaagauggaaaaccuguga

SEQ ID NO: 1245451 - RNA, 19 nt, Homo sapiens
  misc_RNA (1)...(19): siRNA sense strand
caucuaagccaacugaaaa

SEQ ID NO: 1245452 - RNA, 19 nt, Homo sapiens
  misc_RNA (1)...(19): siRNA sense strand
gucugaauguaaagagaaa

SEQ ID NO: 1245453 - RNA, 19 nt, Homo sapiens
  misc_RNA (1)...(19): siRNA sense strand
accaauggaagauaaagua

SEQ ID NO: 1245454 - RNA, 19 nt, Homo sapiens
  misc_RNA (1)...(19): siRNA sense strand
ccaucuaagccaacugaaa

SEQ ID NO: 1245455 - RNA, 19 nt, Homo sapiens
  misc_RNA (1)...(19): siRNA sense strand
ucagaggauucaaagaaac

SEQ ID NO: 1245456 - RNA, 19 nt, Homo sapiens
  misc_RNA (1)...(19): siRNA sense strand
aucagaggauucaaagaaa

SEQ ID NO: 1245457 - RNA, 19 nt, Homo sapiens
  misc_RNA (1)...(19): siRNA sense strand
ccaccugaauacagacauc

SEQ ID NO: 1245458 - RNA, 19 nt, Homo sapiens
  misc_RNA (1)...(19): siRNA sense strand
aagcgaaggauucagcaaa

SEQ ID NO: 1245459 - RNA, 19 nt, Homo sapiens
  misc_RNA (1)...(19): siRNA sense strand
uagaagaggucaaggauaa

SEQ ID NO: 1245460 - RNA, 19 nt, Homo sapiens
  misc_RNA (1)...(19): siRNA sense strand
gaaagccacuccugccaaa

SEQ ID NO: 1245461 - RNA, 19 nt, Homo sapiens
  misc_RNA (1)...(19): siRNA sense strand
caaagaaaccugcagauga

SEQ ID NO: 1245462 - RNA, 19 nt, Homo sapiens
  misc_RNA (1)...(19): siRNA sense strand
ggaagcagauccagaagau

SEQ ID NO: 1245463 - RNA, 19 nt, Homo sapiens
  misc_RNA (1)...(19): siRNA sense strand
guaaagagaaaccaucuaa

SEQ ID NO: 1245464 - RNA, 19 nt, Homo sapiens
  misc_RNA (1)...(19): siRNA sense strand
gaagccaccuacaaagaaa

SEQ ID NO: 1245465 - RNA, 19 nt, Homo sapiens
  misc_RNA (1)...(19): siRNA sense strand
aaacaauuccuccugauua

SEQ ID NO: 1245466 - RNA, 19 nt, Homo sapiens
  misc_RNA (1)...(19): siRNA sense strand
ggagaaggccaaagaagaa

SEQ ID NO: 1245467 - RNA, 19 nt, Homo sapiens
  misc_RNA (1)...(19): siRNA sense strand
gaaaaccugugauggauaa

SEQ ID NO: 1245468 - RNA, 19 nt, Homo sapiens
  misc_RNA (1)...(19): siRNA sense strand
caaaaugcuucaucucuua

SEQ ID NO: 1245469 - RNA, 19 nt, Homo sapiens
  misc_RNA (1)...(19): siRNA sense strand
gaaacaaucccaucugagu

SEQ ID NO: 1245470 - RNA, 19 nt, Homo sapiens
  misc_RNA (1)...(19): siRNA sense strand
acaaaccaauggaagauaa

SEQ ID NO: 1245471 - RNA, 19 nt, Homo sapiens
  misc_RNA (1)...(19): siRNA sense strand
gaacagcuuccacccauga

SEQ ID NO: 1245472 - RNA, 19 nt, Homo sapiens
  misc_RNA (1)...(19): siRNA sense strand
gaaacaauuccuccugauu

SEQ ID NO: 1245473 - RNA, 19 nt, Homo sapiens
  misc_RNA (1)...(19): siRNA sense strand
agaaagagaugacacuauc

SEQ ID NO: 1245474 - RNA, 19 nt, Homo sapiens
  misc_RNA (1)...(19): siRNA sense strand
uaaacucucugacagucua

SEQ ID NO: 1245475 - RNA, 19 nt, Homo sapiens
  misc_RNA (1)...(19): siRNA sense strand
acagaaaccucacagaaca

SEQ ID NO: 1245476 - RNA, 19 nt, Homo sapiens
  misc_RNA (1)...(19): siRNA sense strand
gaacaaaccaauggaagau

SEQ ID NO: 1245477 - RNA, 19 nt, Homo sapiens
  misc_RNA (1)...(19): siRNA sense strand
ggucaaggauaaagaugga

SEQ ID NO: 1245478 - RNA, 19 nt, Homo sapiens
  misc_RNA (1)...(19): siRNA sense strand
ggacaggacaaaccaguga

SEQ ID NO: 1245479 - RNA, 19 nt, Homo sapiens
  misc_RNA (1)...(19): siRNA sense strand
gagacaagcuuggagaaag

SEQ ID NO: 1245480 - RNA, 19 nt, Homo sapiens
  misc_RNA (1)...(19): siRNA sense strand
ugaccggucugaauguaaa

SEQ ID NO: 1245481 - RNA, 19 nt, Homo sapiens
  misc_RNA (1)...(19): siRNA sense strand
ccaaagcaccuaagaaugg

SEQ ID NO: 1245482 - RNA, 19 nt, Homo sapiens
  misc_RNA (1)...(19): siRNA sense strand
ugucggaccuccaugugua

SEQ ID NO: 1245483 - RNA, 19 nt, Homo sapiens
  misc_RNA (1)...(19): siRNA sense strand
caaagaagaagaccgugaa

SEQ ID NO: 1245484 - RNA, 19 nt, Homo sapiens
  misc_RNA (1)...(19): siRNA sense strand
agacaagcuuggagaaaga

SEQ ID NO: 1245485 - RNA, 19 nt, Homo sapiens
  misc_RNA (1)...(19): siRNA sense strand
aaagaaaccugcagaugac

SEQ ID NO: 1245486 - RNA, 19 nt, Homo sapiens
  misc_RNA (1)...(19): siRNA sense strand
gcaaagacaacagaggaaa

SEQ ID NO: 1245487 - RNA, 19 nt, Homo sapiens
  misc_RNA (1)...(19): siRNA sense strand
ggaccuccauguguaguau

SEQ ID NO: 1245488 - RNA, 19 nt, Homo sapiens
  misc_RNA (1)...(19): siRNA sense strand
gagaaagagaugacacuau

SEQ ID NO: 1245489 - RNA, 19 nt, Homo sapiens
  misc_RNA (1)...(19): siRNA sense strand
gaugaugccuuggauaaac

SEQ ID NO: 1245490 - RNA, 19 nt, Homo sapiens
  misc_RNA (1)...(19): siRNA sense strand
aaaggaagcagauccagaa

SEQ ID NO: 1245491 - RNA, 19 nt, Homo sapiens
  misc_RNA (1)...(19): siRNA sense strand
ugacaaagaccucgaugau

SEQ ID NO: 1245492 - RNA, 19 nt, Homo sapiens
  misc_RNA (1)...(19): siRNA sense strand
gugaaaagcuuggugaaaa

SEQ ID NO: 1245493 - RNA, 19 nt, Homo sapiens
  misc_RNA (1)...(19): siRNA sense strand
uggauaaagucaaggagaa

SEQ ID NO: 1245494 - RNA, 19 nt, Homo sapiens
  misc_RNA (1)...(19): siRNA sense strand
caaagcaccuaagaaugga

SEQ ID NO: 1245495 - RNA, 19 nt, Homo sapiens
  misc_RNA (1)...(19): siRNA sense strand
cuacagaaaccucacagaa

SEQ ID NO: 1245496 - RNA, 19 nt, Homo sapiens
  misc_RNA (1)...(19): siRNA sense strand
gccagaugaugcuguagaa

SEQ ID NO: 1245497 - RNA, 19 nt, Homo sapiens
  misc_RNA (1)...(19): siRNA sense strand
gaacacagcaaaggauaag

SEQ ID NO: 1245498 - RNA, 19 nt, Homo sapiens
  misc_RNA (1)...(19): siRNA sense strand
ucaaggagaaggccaaaga

SEQ ID NO: 1245499 - RNA, 19 nt, Homo sapiens
  misc_RNA (1)...(19): siRNA sense strand
aaacaaucccaucugagua

SEQ ID NO: 1245500 - RNA, 19 nt, Homo sapiens
  misc_RNA (1)...(19): siRNA sense strand
ggagguaaagcgaaggauu

SEQ ID NO: 1245501 - RNA, 19 nt, Homo sapiens
  misc_RNA (1)...(19): siRNA sense strand
ggagaaagagaugacacua

SEQ ID NO: 1245502 - RNA, 19 nt, Homo sapiens
  misc_RNA (1)...(19): siRNA sense strand
caaaggauaagugcaagaa

SEQ ID NO: 1245503 - RNA, 19 nt, Homo sapiens
  misc_RNA (1)...(19): siRNA sense strand
gcgaaggauucagcaaaga

SEQ ID NO: 1245504 - RNA, 19 nt, Homo sapiens
  misc_RNA (1)...(19): siRNA sense strand
ugacccagaugagaacaaa

SEQ ID NO: 1245505 - RNA, 19 nt, Homo sapiens
  misc_RNA (1)...(19): siRNA sense strand
gagguaaagcgaaggauuc

SEQ ID NO: 1245506 - RNA, 19 nt, Homo sapiens
  misc_RNA (1)...(19): siRNA sense strand
uaucccaccugaauacaga

SEQ ID NO: 1245507 - RNA, 19 nt, Homo sapiens
  misc_RNA (1)...(19): siRNA sense strand
gaugagaacaaaccaaugg

SEQ ID NO: 1245508 - RNA, 19 nt, Homo sapiens
  misc_RNA (1)...(19): siRNA sense strand
gaaguguggugaggaugau

SEQ ID NO: 1245509 - RNA, 19 nt, Homo sapiens
  misc_RNA (1)...(19): siRNA sense strand
auacagacaucuccuggau

SEQ ID NO: 1245510 - RNA, 19 nt, Homo sapiens
  misc_RNA (1)...(19): siRNA sense strand
ccaauggaagauaaaguaa

SEQ ID NO: 1245511 - RNA, 19 nt, Homo sapiens
  misc_RNA (1)...(19): siRNA sense strand
cagcaaaggauaagugcaa

SEQ ID NO: 1245512 - RNA, 19 nt, Homo sapiens
  misc_RNA (1)...(19): siRNA sense strand
aacaauuccuccugauuau

SEQ ID NO: 1245513 - RNA, 19 nt, Homo sapiens
  misc_RNA (1)...(19): siRNA sense strand
ggauaaagauggaaaacca

SEQ ID NO: 1245514 - RNA, 19 nt, Homo sapiens
  misc_RNA (1)...(19): siRNA sense strand
cagaacacagcaaaggaua

SEQ ID NO: 1245515 - RNA, 19 nt, Homo sapiens
  misc_RNA (1)...(19): siRNA sense strand
ugaagccaccuacaaagaa

SEQ ID NO: 1245516 - RNA, 19 nt, Homo sapiens
  misc_RNA (1)...(19): siRNA sense strand
ggaagauaaaguaaaggaa

SEQ ID NO: 1245517 - RNA, 19 nt, Homo sapiens
  misc_RNA (1)...(19): siRNA sense strand
gaaaccaucuaagccaacu

SEQ ID NO: 1245518 - RNA, 19 nt, Homo sapiens
  misc_RNA (1)...(19): siRNA sense strand
ugccaucucugaagugguu

SEQ ID NO: 1245519 - RNA, 19 nt, Homo sapiens
  misc_RNA (1)...(19): siRNA sense strand
ucgaugaugccuuggauaa

SEQ ID NO: 1245520 - RNA, 19 nt, Homo sapiens
  misc_RNA (1)...(19): siRNA sense strand
gacacuaucccaccugaau

SEQ ID NO: 1245521 - RNA, 19 nt, Homo sapiens
  misc_RNA (1)...(19): siRNA sense strand
gugaagccaccuacaaaga

SEQ ID NO: 1245522 - RNA, 19 nt, Homo sapiens
  misc_RNA (1)...(19): siRNA sense strand
caauuccuccugauuauag

SEQ ID NO: 1245523 - RNA, 19 nt, Homo sapiens
  misc_RNA (1)...(19): siRNA sense strand
gaaggauucagcaaagaca

SEQ ID NO: 1245524 - RNA, 19 nt, Homo sapiens
  misc_RNA (1)...(19): siRNA sense strand
ucaaagaaaccugcagaug

SEQ ID NO: 1245525 - RNA, 19 nt, Homo sapiens
  misc_RNA (1)...(19): siRNA sense strand
ugaggaugaugaaacaauc

SEQ ID NO: 1245526 - RNA, 19 nt, Homo sapiens
  misc_RNA (1)...(19): siRNA sense strand
gacaaagaccucgaugaug

SEQ ID NO: 1245527 - RNA, 19 nt, Homo sapiens
  misc_RNA (1)...(19): siRNA sense strand
gaagaggucaaggauaaag

SEQ ID NO: 1245528 - RNA, 19 nt, Homo sapiens
  misc_RNA (1)...(19): siRNA sense strand
gauuagaagaggucaagga

SEQ ID NO: 1245529 - RNA, 19 nt, Homo sapiens
  misc_RNA (1)...(19): siRNA sense strand
caaggagaaggccaaagaa

SEQ ID NO: 1245530 - RNA, 19 nt, Homo sapiens
  misc_RNA (1)...(19): siRNA sense strand
gcaaaggauaagugcaaga

SEQ ID NO: 1245531 - RNA, 19 nt, Homo sapiens
  misc_RNA (1)...(19): siRNA sense strand
cagugaagccaccuacaaa

SEQ ID NO: 1245532 - RNA, 19 nt, Homo sapiens
  misc_RNA (1)...(19): siRNA sense strand
ccagugaagccaccuacaa

SEQ ID NO: 1245533 - RNA, 19 nt, Homo sapiens
  misc_RNA (1)...(19): siRNA sense strand
ggauaaacucucugacagu

SEQ ID NO: 1245534 - RNA, 19 nt, Homo sapiens
  misc_RNA (1)...(19): siRNA sense strand
augaaacaaucccaucuga

SEQ ID NO: 1245535 - RNA, 19 nt, Homo sapiens
  misc_RNA (1)...(19): siRNA sense strand
ggucugaauguaaagagaa

SEQ ID NO: 1245536 - RNA, 19 nt, Homo sapiens
  misc_RNA (1)...(19): siRNA sense strand
agagaaguguggugaggau

SEQ ID NO: 1245537 - RNA, 19 nt, Homo sapiens
  misc_RNA (1)...(19): siRNA sense strand
gaaaccugcagaugaccaa

SEQ ID NO: 1245538 - RNA, 19 nt, Homo sapiens
  misc_RNA (1)...(19): siRNA sense strand
acacuaucccaccugaaua

SEQ ID NO: 1245539 - RNA, 19 nt, Homo sapiens
  misc_RNA (1)...(19): siRNA sense strand
caaaccaauggaagauaaa

SEQ ID NO: 1245540 - RNA, 19 nt, Homo sapiens
  misc_RNA (1)...(19): siRNA sense strand
cagaugagaacaaaccaau

SEQ ID NO: 1245541 - RNA, 19 nt, Homo sapiens
  misc_RNA (1)...(19): siRNA sense strand
ccacggauaaagauggaaa

SEQ ID NO: 1245542 - RNA, 19 nt, Homo sapiens
  misc_RNA (1)...(19): siRNA sense strand
agaacaaaccaauggaaga

SEQ ID NO: 1245543 - RNA, 19 nt, Homo sapiens
  misc_RNA (1)...(19): siRNA sense strand
gaagauggaaaaccuguga

SEQ ID NO: 1245544 - RNA, 19 nt, Homo sapiens
  misc_RNA (1)...(19): siRNA sense strand
gcuccaaagcaccuaagaa

SEQ ID NO: 1245545 - RNA, 19 nt, Homo sapiens
  misc_RNA (1)...(19): siRNA sense strand
aaagagaaaccaucuaagc

SEQ ID NO: 1245546 - RNA, 19 nt, Homo sapiens
  misc_RNA (1)...(19): siRNA sense strand
caaaagagucuaaggaaca

SEQ ID NO: 1245547 - RNA, 19 nt, Homo sapiens
  misc_RNA (1)...(19): siRNA sense strand
ucaaggauaaagauggaaa

SEQ ID NO: 1245548 - RNA, 19 nt, Homo sapiens
  misc_RNA (1)...(19): siRNA sense strand
agaaacaauuccuccugau

SEQ ID NO: 1245549 - RNA, 19 nt, Homo sapiens
  misc_RNA (1)...(19): siRNA sense strand
caucuaagccaacugaaaa

SEQ ID NO: 1245550 - RNA, 19 nt, Homo sapiens
  misc_RNA (1)...(19): siRNA sense strand
accaauggaagauaaagua

SEQ ID NO: 1245551 - RNA, 19 nt, Homo sapiens
  misc_RNA (1)...(19): siRNA sense strand
gucugaauguaaagagaaa

SEQ ID NO: 1245552 - RNA, 19 nt, Homo sapiens
  misc_RNA (1)...(19): siRNA sense strand
ccaucuaagccaacugaaa

SEQ ID NO: 1245553 - RNA, 19 nt, Homo sapiens
  misc_RNA (1)...(19): siRNA sense strand
ucagaggauucaaagaaac

SEQ ID NO: 1245554 - RNA, 19 nt, Homo sapiens
  misc_RNA (1)...(19): siRNA sense strand
aucagaggauucaaagaaa

SEQ ID NO: 1245555 - RNA, 19 nt, Homo sapiens
  misc_RNA (1)...(19): siRNA sense strand
ccaccugaauacagacauc

SEQ ID NO: 1245556 - RNA, 19 nt, Homo sapiens
  misc_RNA (1)...(19): siRNA sense strand
ugagaacaaaccaauggaa

SEQ ID NO: 1245557 - RNA, 19 nt, Homo sapiens
  misc_RNA (1)...(19): siRNA sense strand
aagcgaaggauucagcaaa

SEQ ID NO: 1245558 - RNA, 19 nt, Homo sapiens
  misc_RNA (1)...(19): siRNA sense strand
ccucacagaacacagcaaa

SEQ ID NO: 1245559 - RNA, 19 nt, Homo sapiens
  misc_RNA (1)...(19): siRNA sense strand
uagaagaggucaaggauaa

SEQ ID NO: 1245560 - RNA, 19 nt, Homo sapiens
  misc_RNA (1)...(19): siRNA sense strand
gaaagccacuccugccaaa

SEQ ID NO: 1245561 - RNA, 19 nt, Homo sapiens
  misc_RNA (1)...(19): siRNA sense strand
caaagaaaccugcagauga

SEQ ID NO: 1245562 - RNA, 19 nt, Homo sapiens
  misc_RNA (1)...(19): siRNA sense strand
ggaagcagauccagaagau

SEQ ID NO: 1245563 - RNA, 19 nt, Homo sapiens
  misc_RNA (1)...(19): siRNA sense strand
guaaagagaaaccaucuaa

SEQ ID NO: 1245564 - RNA, 19 nt, Homo sapiens
  misc_RNA (1)...(19): siRNA sense strand
gaagccaccuacaaagaaa

SEQ ID NO: 1245565 - RNA, 19 nt, Homo sapiens
  misc_RNA (1)...(19): siRNA sense strand
aaacaauuccuccugauua

SEQ ID NO: 1245566 - RNA, 19 nt, Homo sapiens
  misc_RNA (1)...(19): siRNA sense strand
ggagaaggccaaagaagaa

SEQ ID NO: 1245567 - RNA, 19 nt, Homo sapiens
  misc_RNA (1)...(19): siRNA sense strand
gaaaaccugugauggauaa

SEQ ID NO: 1245568 - RNA, 19 nt, Homo sapiens
  misc_RNA (1)...(19): siRNA sense strand
caaaaugcuucaucucuua

SEQ ID NO: 1245569 - RNA, 19 nt, Homo sapiens
  misc_RNA (1)...(19): siRNA sense strand
gaaacaaucccaucugagu

SEQ ID NO: 1245570 - RNA, 19 nt, Homo sapiens
  misc_RNA (1)...(19): siRNA sense strand
acaaaccaauggaagauaa

SEQ ID NO: 1245571 - RNA, 19 nt, Homo sapiens
  misc_RNA (1)...(19): siRNA sense strand
gaacagcuuccacccauga

SEQ ID NO: 1245572 - RNA, 19 nt, Homo sapiens
  misc_RNA (1)...(19): siRNA sense strand
gaaacaauuccuccugauu

SEQ ID NO: 1245573 - RNA, 19 nt, Homo sapiens
  misc_RNA (1)...(19): siRNA sense strand
agaaagagaugacacuauc

SEQ ID NO: 1245574 - RNA, 19 nt, Homo sapiens
  misc_RNA (1)...(19): siRNA sense strand
uaaacucucugacagucua

SEQ ID NO: 1245575 - RNA, 19 nt, Homo sapiens
  misc_RNA (1)...(19): siRNA sense strand
acagaaaccucacagaaca

SEQ ID NO: 1245576 - RNA, 19 nt, Homo sapiens
  misc_RNA (1)...(19): siRNA sense strand
gaacaaaccaauggaagau

SEQ ID NO: 1245577 - RNA, 19 nt, Homo sapiens
  misc_RNA (1)...(19): siRNA sense strand
ggucaaggauaaagaugga

SEQ ID NO: 1245578 - RNA, 19 nt, Homo sapiens
  misc_RNA (1)...(19): siRNA sense strand
ggacaggacaaaccaguga

SEQ ID NO: 1245579 - RNA, 19 nt, Homo sapiens
  misc_RNA (1)...(19): siRNA sense strand
gagacaagcuuggagaaag

SEQ ID NO: 1245580 - RNA, 19 nt, Homo sapiens
  misc_RNA (1)...(19): siRNA sense strand
ugaccggucugaauguaaa

SEQ ID NO: 1245581 - RNA, 19 nt, Homo sapiens
  misc_RNA (1)...(19): siRNA sense strand
ccaaagcaccuaagaaugg

SEQ ID NO: 1245582 - RNA, 19 nt, Homo sapiens
  misc_RNA (1)...(19): siRNA sense strand
ugucggaccuccaugugua

SEQ ID NO: 1245583 - RNA, 19 nt, Homo sapiens
  misc_RNA (1)...(19): siRNA sense strand
caaagaagaagaccgugaa

SEQ ID NO: 1245584 - RNA, 19 nt, Homo sapiens
  misc_RNA (1)...(19): siRNA sense strand
agacaagcuuggagaaaga

SEQ ID NO: 1245585 - RNA, 19 nt, Homo sapiens
  misc_RNA (1)...(19): siRNA sense strand
aaagaaaccugcagaugac

SEQ ID NO: 1245586 - RNA, 19 nt, Homo sapiens
  misc_RNA (1)...(19): siRNA sense strand
gcaaagacaacagaggaaa

SEQ ID NO: 1245587 - RNA, 19 nt, Homo sapiens
  misc_RNA (1)...(19): siRNA sense strand
ggaccuccauguguaguau

SEQ ID NO: 1245588 - RNA, 19 nt, Homo sapiens
  misc_RNA (1)...(19): siRNA sense strand
gagaaagagaugacacuau

SEQ ID NO: 1245589 - RNA, 19 nt, Homo sapiens
  misc_RNA (1)...(19): siRNA sense strand
gaugaugccuuggauaaac

SEQ ID NO: 1245590 - RNA, 19 nt, Homo sapiens
  misc_RNA (1)...(19): siRNA sense strand
aaaggaagcagauccagaa

SEQ ID NO: 1245591 - RNA, 19 nt, Homo sapiens
  misc_RNA (1)...(19): siRNA sense strand
ugacaaagaccucgaugau

SEQ ID NO: 1245592 - RNA, 19 nt, Homo sapiens
  misc_RNA (1)...(19): siRNA sense strand
gugaaaagcuuggugaaaa

SEQ ID NO: 1245593 - RNA, 19 nt, Homo sapiens
  misc_RNA (1)...(19): siRNA sense strand
uggauaaagucaaggagaa

SEQ ID NO: 1245594 - RNA, 19 nt, Homo sapiens
  misc_RNA (1)...(19): siRNA sense strand
caaagcaccuaagaaugga

SEQ ID NO: 1245595 - RNA, 19 nt, Homo sapiens
  misc_RNA (1)...(19): siRNA sense strand
cuacagaaaccucacagaa

SEQ ID NO: 1245596 - RNA, 19 nt, Homo sapiens
  misc_RNA (1)...(19): siRNA sense strand
gaccuccgcucaauuaagg

SEQ ID NO: 1245597 - RNA, 19 nt, Homo sapiens
  misc_RNA (1)...(19): siRNA sense strand
gccagaugaugcuguagaa

SEQ ID NO: 1245598 - RNA, 19 nt, Homo sapiens
  misc_RNA (1)...(19): siRNA sense strand
gaacacagcaaaggauaag

SEQ ID NO: 1245599 - RNA, 19 nt, Homo sapiens
  misc_RNA (1)...(19): siRNA sense strand
ucaaggagaaggccaaaga

SEQ ID NO: 1245600 - RNA, 19 nt, Homo sapiens
  misc_RNA (1)...(19): siRNA sense strand
ggagaaagagaugacacua

SEQ ID NO: 1245601 - RNA, 19 nt, Homo sapiens
  misc_RNA (1)...(19): siRNA sense strand
ggagguaaagcgaaggauu

SEQ ID NO: 1245602 - RNA, 19 nt, Homo sapiens
  misc_RNA (1)...(19): siRNA sense strand
aaacaaucccaucugagua

SEQ ID NO: 1245603 - RNA, 19 nt, Homo sapiens
  misc_RNA (1)...(19): siRNA sense strand
caaaggauaagugcaagaa

SEQ ID NO: 1245604 - RNA, 19 nt, Homo sapiens
  misc_RNA (1)...(19): siRNA sense strand
gcgaaggauucagcaaaga

SEQ ID NO: 1245605 - RNA, 19 nt, Homo sapiens
  misc_RNA (1)...(19): siRNA sense strand
ugacccagaugagaacaaa

SEQ ID NO: 1245606 - RNA, 19 nt, Homo sapiens
  misc_RNA (1)...(19): siRNA sense strand
gagguaaagcgaaggauuc

SEQ ID NO: 1245607 - RNA, 19 nt, Homo sapiens
  misc_RNA (1)...(19): siRNA sense strand
uaucccaccugaauacaga

SEQ ID NO: 1245608 - RNA, 19 nt, Homo sapiens
  misc_RNA (1)...(19): siRNA sense strand
gaugagaacaaaccaaugg

SEQ ID NO: 1245609 - RNA, 19 nt, Homo sapiens
  misc_RNA (1)...(19): siRNA sense strand
auacagacaucuccuggau

SEQ ID NO: 1245610 - RNA, 19 nt, Homo sapiens
  misc_RNA (1)...(19): siRNA sense strand
gaaguguggugaggaugau

SEQ ID NO: 1245611 - RNA, 19 nt, Homo sapiens
  misc_RNA (1)...(19): siRNA sense strand
ccaauggaagauaaaguaa

SEQ ID NO: 1245612 - RNA, 19 nt, Homo sapiens
  misc_RNA (1)...(19): siRNA sense strand
cagcaaaggauaagugcaa

SEQ ID NO: 1245613 - RNA, 19 nt, Homo sapiens
  misc_RNA (1)...(19): siRNA sense strand
aacaauuccuccugauuau

SEQ ID NO: 1245614 - RNA, 19 nt, Homo sapiens
  misc_RNA (1)...(19): siRNA sense strand
cagaacacagcaaaggaua

SEQ ID NO: 1245615 - RNA, 19 nt, Homo sapiens
  misc_RNA (1)...(19): siRNA sense strand
ugaagccaccuacaaagaa

SEQ ID NO: 1245616 - RNA, 19 nt, Homo sapiens
  misc_RNA (1)...(19): siRNA sense strand
ggauaaagauggaaaacca

SEQ ID NO: 1245617 - RNA, 19 nt, Homo sapiens
  misc_RNA (1)...(19): siRNA sense strand
ggaagauaaaguaaaggaa

SEQ ID NO: 1245618 - RNA, 19 nt, Homo sapiens
  misc_RNA (1)...(19): siRNA sense strand
caauuaaggaagucgauga

SEQ ID NO: 1245619 - RNA, 19 nt, Homo sapiens
  misc_RNA (1)...(19): siRNA sense strand
gaaaccaucuaagccaacu

SEQ ID NO: 1245620 - RNA, 19 nt, Homo sapiens
  misc_RNA (1)...(19): siRNA sense strand
ugccaucucugaagugguu

SEQ ID NO: 1245621 - RNA, 19 nt, Homo sapiens
  misc_RNA (1)...(19): siRNA sense strand
ucgaugaugccuuggauaa

SEQ ID NO: 1245622 - RNA, 19 nt, Homo sapiens
  misc_RNA (1)...(19): siRNA sense strand
gacacuaucccaccugaau

SEQ ID NO: 1245623 - RNA, 19 nt, Homo sapiens
  misc_RNA (1)...(19): siRNA sense strand
gugaagccaccuacaaaga

SEQ ID NO: 1245624 - RNA, 19 nt, Homo sapiens
  misc_RNA (1)...(19): siRNA sense strand
ugaggaugaugaaacaauc

SEQ ID NO: 1245625 - RNA, 19 nt, Homo sapiens
  misc_RNA (1)...(19): siRNA sense strand
gaaggauucagcaaagaca

SEQ ID NO: 1245626 - RNA, 19 nt, Homo sapiens
  misc_RNA (1)...(19): siRNA sense strand
ucaaagaaaccugcagaug

SEQ ID NO: 1245627 - RNA, 19 nt, Homo sapiens
  misc_RNA (1)...(19): siRNA sense strand
gacaaagaccucgaugaug

SEQ ID NO: 1245628 - RNA, 19 nt, Homo sapiens
  misc_RNA (1)...(19): siRNA sense strand
gaagaggucaaggauaaag

SEQ ID NO: 1245629 - RNA, 19 nt, Homo sapiens
  misc_RNA (1)...(19): siRNA sense strand
gauuagaagaggucaagga

SEQ ID NO: 1245630 - RNA, 19 nt, Homo sapiens
  misc_RNA (1)...(19): siRNA sense strand
caauuccuccugauuauag

SEQ ID NO: 1245631 - RNA, 19 nt, Homo sapiens
  misc_RNA (1)...(19): siRNA sense strand
caaggagaaggccaaagaa

SEQ ID NO: 1245632 - RNA, 19 nt, Homo sapiens
  misc_RNA (1)...(19): siRNA sense strand
augaaacaaucccaucuga

SEQ ID NO: 1245633 - RNA, 19 nt, Homo sapiens
  misc_RNA (1)...(19): siRNA sense strand
gcaaaggauaagugcaaga

SEQ ID NO: 1245634 - RNA, 19 nt, Homo sapiens
  misc_RNA (1)...(19): siRNA sense strand
cagugaagccaccuacaaa

SEQ ID NO: 1245635 - RNA, 19 nt, Homo sapiens
  misc_RNA (1)...(19): siRNA sense strand
ccagugaagccaccuacaa

SEQ ID NO: 1245636 - RNA, 19 nt, Homo sapiens
  misc_RNA (1)...(19): siRNA sense strand
ggauaaacucucugacagu

SEQ ID NO: 1245637 - RNA, 19 nt, Homo sapiens
  misc_RNA (1)...(19): siRNA sense strand
ggucugaauguaaagagaa

SEQ ID NO: 1245638 - RNA, 19 nt, Homo sapiens
  misc_RNA (1)...(19): siRNA sense strand
cagaugagaacaaaccaau

SEQ ID NO: 1245639 - RNA, 19 nt, Homo sapiens
  misc_RNA (1)...(19): siRNA sense strand
gaaaccugcagaugaccaa

SEQ ID NO: 1245640 - RNA, 19 nt, Homo sapiens
  misc_RNA (1)...(19): siRNA sense strand
acacuaucccaccugaaua

SEQ ID NO: 1245641 - RNA, 19 nt, Homo sapiens
  misc_RNA (1)...(19): siRNA sense strand
agagaaguguggugaggau

SEQ ID NO: 1245642 - RNA, 19 nt, Homo sapiens
  misc_RNA (1)...(19): siRNA sense strand
caaaccaauggaagauaaa

SEQ ID NO: 1245643 - RNA, 19 nt, Homo sapiens
  misc_RNA (1)...(19): siRNA sense strand
agaacaaaccaauggaaga

SEQ ID NO: 1245644 - RNA, 19 nt, Homo sapiens
  misc_RNA (1)...(19): siRNA sense strand
ccacggauaaagauggaaa

SEQ ID NO: 1245645 - RNA, 19 nt, Homo sapiens
  misc_RNA (1)...(19): siRNA sense strand
aaagagaaaccaucuaagc

SEQ ID NO: 1245646 - RNA, 19 nt, Homo sapiens
  misc_RNA (1)...(19): siRNA sense strand
gcuccaaagcaccuaagaa

SEQ ID NO: 1245647 - RNA, 19 nt, Homo sapiens
  misc_RNA (1)...(19): siRNA sense strand
caaaagagucuaaggaaca

SEQ ID NO: 1245648 - RNA, 19 nt, Homo sapiens
  misc_RNA (1)...(19): siRNA sense strand
ucaaggauaaagauggaaa

SEQ ID NO: 1245649 - RNA, 19 nt, Homo sapiens
  misc_RNA (1)...(19): siRNA sense strand
agaaacaauuccuccugau

SEQ ID NO: 1245650 - RNA, 19 nt, Homo sapiens
  misc_RNA (1)...(19): siRNA sense strand
gaagauggaaaaccuguga

SEQ ID NO: 1245651 - RNA, 19 nt, Homo sapiens
  misc_RNA (1)...(19): siRNA sense strand
caucuaagccaacugaaaa

SEQ ID NO: 1245652 - RNA, 19 nt, Homo sapiens
  misc_RNA (1)...(19): siRNA sense strand
gucugaauguaaagagaaa

SEQ ID NO: 1245653 - RNA, 19 nt, Homo sapiens
  misc_RNA (1)...(19): siRNA sense strand
accaauggaagauaaagua

SEQ ID NO: 1245654 - RNA, 19 nt, Homo sapiens
  misc_RNA (1)...(19): siRNA sense strand
ccaucuaagccaacugaaa

SEQ ID NO: 1245655 - RNA, 19 nt, Homo sapiens
  misc_RNA (1)...(19): siRNA sense strand
ucagaggauucaaagaaac

SEQ ID NO: 1245656 - RNA, 19 nt, Homo sapiens
  misc_RNA (1)...(19): siRNA sense strand
aucagaggauucaaagaaa

SEQ ID NO: 1245657 - RNA, 19 nt, Homo sapiens
  misc_RNA (1)...(19): siRNA sense strand
ccaccugaauacagacauc

SEQ ID NO: 1245658 - RNA, 19 nt, Homo sapiens
  misc_RNA (1)...(19): siRNA sense strand
aagcgaaggauucagcaaa

SEQ ID NO: 1245659 - RNA, 19 nt, Homo sapiens
  misc_RNA (1)...(19): siRNA sense strand
uagaagaggucaaggauaa

SEQ ID NO: 1245660 - RNA, 19 nt, Homo sapiens
  misc_RNA (1)...(19): siRNA sense strand
gaaagccacuccugccaaa

SEQ ID NO: 1245661 - RNA, 19 nt, Homo sapiens
  misc_RNA (1)...(19): siRNA sense strand
caaagaaaccugcagauga

SEQ ID NO: 1245662 - RNA, 19 nt, Homo sapiens
  misc_RNA (1)...(19): siRNA sense strand
ggaagcagauccagaagau

SEQ ID NO: 1245663 - RNA, 19 nt, Homo sapiens
  misc_RNA (1)...(19): siRNA sense strand
guaaagagaaaccaucuaa

SEQ ID NO: 1245664 - RNA, 19 nt, Homo sapiens
  misc_RNA (1)...(19): siRNA sense strand
gaagccaccuacaaagaaa

SEQ ID NO: 1245665 - RNA, 19 nt, Homo sapiens
  misc_RNA (1)...(19): siRNA sense strand
aaacaauuccuccugauua

SEQ ID NO: 1245666 - RNA, 19 nt, Homo sapiens
  misc_RNA (1)...(19): siRNA sense strand
ggagaaggccaaagaagaa

SEQ ID NO: 1245667 - RNA, 19 nt, Homo sapiens
  misc_RNA (1)...(19): siRNA sense strand
gaaaaccugugauggauaa

SEQ ID NO: 1245668 - RNA, 19 nt, Homo sapiens
  misc_RNA (1)...(19): siRNA sense strand
caaaaugcuucaucucuua

SEQ ID NO: 1245669 - RNA, 19 nt, Homo sapiens
  misc_RNA (1)...(19): siRNA sense strand
gaaacaaucccaucugagu

SEQ ID NO: 1245670 - RNA, 19 nt, Homo sapiens
  misc_RNA (1)...(19): siRNA sense strand
acaaaccaauggaagauaa

SEQ ID NO: 1245671 - RNA, 19 nt, Homo sapiens
  misc_RNA (1)...(19): siRNA sense strand
gaacagcuuccacccauga

SEQ ID NO: 1245672 - RNA, 19 nt, Homo sapiens
  misc_RNA (1)...(19): siRNA sense strand
gaaacaauuccuccugauu

SEQ ID NO: 1245673 - RNA, 19 nt, Homo sapiens
  misc_RNA (1)...(19): siRNA sense strand
agaaagagaugacacuauc

SEQ ID NO: 1245674 - RNA, 19 nt, Homo sapiens
  misc_RNA (1)...(19): siRNA sense strand
uaaacucucugacagucua

SEQ ID NO: 1245675 - RNA, 19 nt, Homo sapiens
  misc_RNA (1)...(19): siRNA sense strand
acagaaaccucacagaaca

SEQ ID NO: 1245676 - RNA, 19 nt, Homo sapiens
  misc_RNA (1)...(19): siRNA sense strand
gaacaaaccaauggaagau

SEQ ID NO: 1245677 - RNA, 19 nt, Homo sapiens
  misc_RNA (1)...(19): siRNA sense strand
ggucaaggauaaagaugga

SEQ ID NO: 1245678 - RNA, 19 nt, Homo sapiens
  misc_RNA (1)...(19): siRNA sense strand
ggacaggacaaaccaguga

SEQ ID NO: 1245679 - RNA, 19 nt, Homo sapiens
  misc_RNA (1)...(19): siRNA sense strand
gagacaagcuuggagaaag

SEQ ID NO: 1245680 - RNA, 19 nt, Homo sapiens
  misc_RNA (1)...(19): siRNA sense strand
ugaccggucugaauguaaa

SEQ ID NO: 1245681 - RNA, 19 nt, Homo sapiens
  misc_RNA (1)...(19): siRNA sense strand
ccaaagcaccuaagaaugg

SEQ ID NO: 1245682 - RNA, 19 nt, Homo sapiens
  misc_RNA (1)...(19): siRNA sense strand
ugucggaccuccaugugua

SEQ ID NO: 1245683 - RNA, 19 nt, Homo sapiens
  misc_RNA (1)...(19): siRNA sense strand
caaagaagaagaccgugaa

SEQ ID NO: 1245684 - RNA, 19 nt, Homo sapiens
  misc_RNA (1)...(19): siRNA sense strand
agacaagcuuggagaaaga

SEQ ID NO: 1245685 - RNA, 19 nt, Homo sapiens
  misc_RNA (1)...(19): siRNA sense strand
aaagaaaccugcagaugac

SEQ ID NO: 1245686 - RNA, 19 nt, Homo sapiens
  misc_RNA (1)...(19): siRNA sense strand
gcaaagacaacagaggaaa

SEQ ID NO: 1245687 - RNA, 19 nt, Homo sapiens
  misc_RNA (1)...(19): siRNA sense strand
ggaccuccauguguaguau

SEQ ID NO: 1245688 - RNA, 19 nt, Homo sapiens
  misc_RNA (1)...(19): siRNA sense strand
gagaaagagaugacacuau

SEQ ID NO: 1245689 - RNA, 19 nt, Homo sapiens
  misc_RNA (1)...(19): siRNA sense strand
gaugaugccuuggauaaac

SEQ ID NO: 1245690 - RNA, 19 nt, Homo sapiens
  misc_RNA (1)...(19): siRNA sense strand
aaaggaagcagauccagaa

SEQ ID NO: 1245691 - RNA, 19 nt, Homo sapiens
  misc_RNA (1)...(19): siRNA sense strand
ugacaaagaccucgaugau

SEQ ID NO: 1245692 - RNA, 19 nt, Homo sapiens
  misc_RNA (1)...(19): siRNA sense strand
gugaaaagcuuggugaaaa

SEQ ID NO: 1245693 - RNA, 19 nt, Homo sapiens
  misc_RNA (1)...(19): siRNA sense strand
uggauaaagucaaggagaa

SEQ ID NO: 1245694 - RNA, 19 nt, Homo sapiens
  misc_RNA (1)...(19): siRNA sense strand
caaagcaccuaagaaugga

SEQ ID NO: 1245695 - RNA, 19 nt, Homo sapiens
  misc_RNA (1)...(19): siRNA sense strand
cuacagaaaccucacagaa

SEQ ID NO: 1245696 - RNA, 19 nt, Homo sapiens
  misc_RNA (1)...(19): siRNA sense strand
gaccuccgcucaauuaagg

SEQ ID NO: 1245697 - RNA, 19 nt, Homo sapiens
  misc_RNA (1)...(19): siRNA sense strand
gccagaugaugcuguagaa

SEQ ID NO: 1245698 - RNA, 19 nt, Homo sapiens
  misc_RNA (1)...(19): siRNA sense strand
gaacacagcaaaggauaag

SEQ ID NO: 1245699 - RNA, 19 nt, Homo sapiens
  misc_RNA (1)...(19): siRNA sense strand
ucaaggagaaggccaaaga

SEQ ID NO: 1245700 - RNA, 19 nt, Homo sapiens
  misc_RNA (1)...(19): siRNA sense strand
ggagaaagagaugacacua

SEQ ID NO: 1245701 - RNA, 19 nt, Homo sapiens
  misc_RNA (1)...(19): siRNA sense strand
ggagguaaagcgaaggauu

SEQ ID NO: 1245702 - RNA, 19 nt, Homo sapiens
  misc_RNA (1)...(19): siRNA sense strand
aaacaaucccaucugagua

SEQ ID NO: 1245703 - RNA, 19 nt, Homo sapiens
  misc_RNA (1)...(19): siRNA sense strand
caaaggauaagugcaagaa

SEQ ID NO: 1245704 - RNA, 19 nt, Homo sapiens
  misc_RNA (1)...(19): siRNA sense strand
gcgaaggauucagcaaaga

SEQ ID NO: 1245705 - RNA, 19 nt, Homo sapiens
  misc_RNA (1)...(19): siRNA sense strand
ugacccagaugagaacaaa

SEQ ID NO: 1245706 - RNA, 19 nt, Homo sapiens
  misc_RNA (1)...(19): siRNA sense strand
gagguaaagcgaaggauuc

SEQ ID NO: 1245707 - RNA, 19 nt, Homo sapiens
  misc_RNA (1)...(19): siRNA sense strand
uaucccaccugaauacaga

SEQ ID NO: 1245708 - RNA, 19 nt, Homo sapiens
  misc_RNA (1)...(19): siRNA sense strand
gaugagaacaaaccaaugg

SEQ ID NO: 1245709 - RNA, 19 nt, Homo sapiens
  misc_RNA (1)...(19): siRNA sense strand
auacagacaucuccuggau

SEQ ID NO: 1245710 - RNA, 19 nt, Homo sapiens
  misc_RNA (1)...(19): siRNA sense strand
gaaguguggugaggaugau

SEQ ID NO: 1245711 - RNA, 19 nt, Homo sapiens
  misc_RNA (1)...(19): siRNA sense strand
ccaauggaagauaaaguaa

SEQ ID NO: 1245712 - RNA, 19 nt, Homo sapiens
  misc_RNA (1)...(19): siRNA sense strand
cagcaaaggauaagugcaa

SEQ ID NO: 1245713 - RNA, 19 nt, Homo sapiens
  misc_RNA (1)...(19): siRNA sense strand
aacaauuccuccugauuau

SEQ ID NO: 1245714 - RNA, 19 nt, Homo sapiens
  misc_RNA (1)...(19): siRNA sense strand
cagaacacagcaaaggaua

SEQ ID NO: 1245715 - RNA, 19 nt, Homo sapiens
  misc_RNA (1)...(19): siRNA sense strand
ugaagccaccuacaaagaa

SEQ ID NO: 1245716 - RNA, 19 nt, Homo sapiens
  misc_RNA (1)...(19): siRNA sense strand
ggauaaagauggaaaacca

SEQ ID NO: 1245717 - RNA, 19 nt, Homo sapiens
  misc_RNA (1)...(19): siRNA sense strand
ggaagauaaaguaaaggaa

SEQ ID NO: 1245718 - RNA, 19 nt, Homo sapiens
  misc_RNA (1)...(19): siRNA sense strand
caauuaaggaagucgauga

SEQ ID NO: 1245719 - RNA, 19 nt, Homo sapiens
  misc_RNA (1)...(19): siRNA sense strand
gaaaccaucuaagccaacu

SEQ ID NO: 1245720 - RNA, 19 nt, Homo sapiens
  misc_RNA (1)...(19): siRNA sense strand
ugccaucucugaagugguu

SEQ ID NO: 1245721 - RNA, 19 nt, Homo sapiens
  misc_RNA (1)...(19): siRNA sense strand
ucgaugaugccuuggauaa

SEQ ID NO: 1245722 - RNA, 19 nt, Homo sapiens
  misc_RNA (1)...(19): siRNA sense strand
gacacuaucccaccugaau

SEQ ID NO: 1245723 - RNA, 19 nt, Homo sapiens
  misc_RNA (1)...(19): siRNA sense strand
gugaagccaccuacaaaga

SEQ ID NO: 1245724 - RNA, 19 nt, Homo sapiens
  misc_RNA (1)...(19): siRNA sense strand
ugaggaugaugaaacaauc

SEQ ID NO: 1245725 - RNA, 19 nt, Homo sapiens
  misc_RNA (1)...(19): siRNA sense strand
gaaggauucagcaaagaca

SEQ ID NO: 1245726 - RNA, 19 nt, Homo sapiens
  misc_RNA (1)...(19): siRNA sense strand
ucaaagaaaccugcagaug

SEQ ID NO: 1245727 - RNA, 19 nt, Homo sapiens
  misc_RNA (1)...(19): siRNA sense strand
gacaaagaccucgaugaug

SEQ ID NO: 1245728 - RNA, 19 nt, Homo sapiens
  misc_RNA (1)...(19): siRNA sense strand
gaagaggucaaggauaaag

SEQ ID NO: 1245729 - RNA, 19 nt, Homo sapiens
  misc_RNA (1)...(19): siRNA sense strand
gauuagaagaggucaagga

SEQ ID NO: 1245730 - RNA, 19 nt, Homo sapiens
  misc_RNA (1)...(19): siRNA sense strand
caauuccuccugauuauag

SEQ ID NO: 1245731 - RNA, 19 nt, Homo sapiens
  misc_RNA (1)...(19): siRNA sense strand
caaggagaaggccaaagaa

SEQ ID NO: 1245732 - RNA, 19 nt, Homo sapiens
  misc_RNA (1)...(19): siRNA sense strand
augaaacaaucccaucuga

SEQ ID NO: 1245733 - RNA, 19 nt, Homo sapiens
  misc_RNA (1)...(19): siRNA sense strand
gcaaaggauaagugcaaga

SEQ ID NO: 1245734 - RNA, 19 nt, Homo sapiens
  misc_RNA (1)...(19): siRNA sense strand
cagugaagccaccuacaaa

SEQ ID NO: 1245735 - RNA, 19 nt, Homo sapiens
  misc_RNA (1)...(19): siRNA sense strand
ccagugaagccaccuacaa

SEQ ID NO: 1245736 - RNA, 19 nt, Homo sapiens
  misc_RNA (1)...(19): siRNA sense strand
ggauaaacucucugacagu

SEQ ID NO: 1245737 - RNA, 19 nt, Homo sapiens
  misc_RNA (1)...(19): siRNA sense strand
ggucugaauguaaagagaa

SEQ ID NO: 1245738 - RNA, 19 nt, Homo sapiens
  misc_RNA (1)...(19): siRNA sense strand
cagaugagaacaaaccaau

SEQ ID NO: 1245739 - RNA, 19 nt, Homo sapiens
  misc_RNA (1)...(19): siRNA sense strand
gaaaccugcagaugaccaa

SEQ ID NO: 1245740 - RNA, 19 nt, Homo sapiens
  misc_RNA (1)...(19): siRNA sense strand
acacuaucccaccugaaua

SEQ ID NO: 1245741 - RNA, 19 nt, Homo sapiens
  misc_RNA (1)...(19): siRNA sense strand
agagaaguguggugaggau

SEQ ID NO: 1245742 - RNA, 19 nt, Homo sapiens
  misc_RNA (1)...(19): siRNA sense strand
caaaccaauggaagauaaa

SEQ ID NO: 1245743 - RNA, 19 nt, Homo sapiens
  misc_RNA (1)...(19): siRNA sense strand
agaacaaaccaauggaaga

SEQ ID NO: 1245744 - RNA, 19 nt, Homo sapiens
  misc_RNA (1)...(19): siRNA sense strand
ccacggauaaagauggaaa

SEQ ID NO: 1245745 - RNA, 19 nt, Homo sapiens
  misc_RNA (1)...(19): siRNA sense strand
aaagagaaaccaucuaagc

SEQ ID NO: 1245746 - RNA, 19 nt, Homo sapiens
  misc_RNA (1)...(19): siRNA sense strand
gcuccaaagcaccuaagaa

SEQ ID NO: 1245747 - RNA, 19 nt, Homo sapiens
  misc_RNA (1)...(19): siRNA sense strand
caaaagagucuaaggaaca

SEQ ID NO: 1245748 - RNA, 19 nt, Homo sapiens
  misc_RNA (1)...(19): siRNA sense strand
ucaaggauaaagauggaaa

SEQ ID NO: 1245749 - RNA, 19 nt, Homo sapiens
  misc_RNA (1)...(19): siRNA sense strand
agaaacaauuccuccugau

SEQ ID NO: 1245750 - RNA, 19 nt, Homo sapiens
  misc_RNA (1)...(19): siRNA sense strand
gaagauggaaaaccuguga

SEQ ID NO: 1245751 - RNA, 19 nt, Homo sapiens
  misc_RNA (1)...(19): siRNA sense strand
caucuaagccaacugaaaa

SEQ ID NO: 1245752 - RNA, 19 nt, Homo sapiens
  misc_RNA (1)...(19): siRNA sense strand
gucugaauguaaagagaaa

SEQ ID NO: 1245753 - RNA, 19 nt, Homo sapiens
  misc_RNA (1)...(19): siRNA sense strand
accaauggaagauaaagua

SEQ ID NO: 1245754 - RNA, 19 nt, Homo sapiens
  misc_RNA (1)...(19): siRNA sense strand
ccaucuaagccaacugaaa

SEQ ID NO: 1245755 - RNA, 19 nt, Homo sapiens
  misc_RNA (1)...(19): siRNA sense strand
ucagaggauucaaagaaac

SEQ ID NO: 1245756 - RNA, 19 nt, Homo sapiens
  misc_RNA (1)...(19): siRNA sense strand
aucagaggauucaaagaaa

SEQ ID NO: 1245757 - RNA, 19 nt, Homo sapiens
  misc_RNA (1)...(19): siRNA sense strand
ccaccugaauacagacauc

SEQ ID NO: 1245758 - RNA, 19 nt, Homo sapiens
  misc_RNA (1)...(19): siRNA sense strand
aagcgaaggauucagcaaa

SEQ ID NO: 1245759 - RNA, 19 nt, Homo sapiens
  misc_RNA (1)...(19): siRNA sense strand
uagaagaggucaaggauaa

SEQ ID NO: 1245760 - RNA, 19 nt, Homo sapiens
  misc_RNA (1)...(19): siRNA sense strand
gaaagccacuccugccaaa

SEQ ID NO: 1245761 - RNA, 19 nt, Homo sapiens
  misc_RNA (1)...(19): siRNA sense strand
caaagaaaccugcagauga

SEQ ID NO: 1245762 - RNA, 19 nt, Homo sapiens
  misc_RNA (1)...(19): siRNA sense strand
ggaagcagauccagaagau

SEQ ID NO: 1245763 - RNA, 19 nt, Homo sapiens
  misc_RNA (1)...(19): siRNA sense strand
guaaagagaaaccaucuaa

SEQ ID NO: 1245764 - RNA, 19 nt, Homo sapiens
  misc_RNA (1)...(19): siRNA sense strand
gaagccaccuacaaagaaa

SEQ ID NO: 1245765 - RNA, 19 nt, Homo sapiens
  misc_RNA (1)...(19): siRNA sense strand
aaacaauuccuccugauua

SEQ ID NO: 1245766 - RNA, 19 nt, Homo sapiens
  misc_RNA (1)...(19): siRNA sense strand
ggagaaggccaaagaagaa

SEQ ID NO: 1245767 - RNA, 19 nt, Homo sapiens
  misc_RNA (1)...(19): siRNA sense strand
gaaaaccugugauggauaa

SEQ ID NO: 1245768 - RNA, 19 nt, Homo sapiens
  misc_RNA (1)...(19): siRNA sense strand
caaaaugcuucaucucuua

SEQ ID NO: 1245769 - RNA, 19 nt, Homo sapiens
  misc_RNA (1)...(19): siRNA sense strand
gaaacaaucccaucugagu

SEQ ID NO: 1245770 - RNA, 19 nt, Homo sapiens
  misc_RNA (1)...(19): siRNA sense strand
acaaaccaauggaagauaa

SEQ ID NO: 1245771 - RNA, 19 nt, Homo sapiens
  misc_RNA (1)...(19): siRNA sense strand
gaacagcuuccacccauga

SEQ ID NO: 1245772 - RNA, 19 nt, Homo sapiens
  misc_RNA (1)...(19): siRNA sense strand
gaaacaauuccuccugauu

SEQ ID NO: 1245773 - RNA, 19 nt, Homo sapiens
  misc_RNA (1)...(19): siRNA sense strand
agaaagagaugacacuauc

SEQ ID NO: 1245774 - RNA, 19 nt, Homo sapiens
  misc_RNA (1)...(19): siRNA sense strand
uaaacucucugacagucua

SEQ ID NO: 1245775 - RNA, 19 nt, Homo sapiens
  misc_RNA (1)...(19): siRNA sense strand
acagaaaccucacagaaca

SEQ ID NO: 1245776 - RNA, 19 nt, Homo sapiens
  misc_RNA (1)...(19): siRNA sense strand
gaacaaaccaauggaagau

SEQ ID NO: 1245777 - RNA, 19 nt, Homo sapiens
  misc_RNA (1)...(19): siRNA sense strand
ggucaaggauaaagaugga

SEQ ID NO: 1245778 - RNA, 19 nt, Homo sapiens
  misc_RNA (1)...(19): siRNA sense strand
ggacaggacaaaccaguga

SEQ ID NO: 1245779 - RNA, 19 nt, Homo sapiens
  misc_RNA (1)...(19): siRNA sense strand
gagacaagcuuggagaaag

SEQ ID NO: 1245780 - RNA, 19 nt, Homo sapiens
  misc_RNA (1)...(19): siRNA sense strand
ugaccggucugaauguaaa

SEQ ID NO: 1245781 - RNA, 19 nt, Homo sapiens
  misc_RNA (1)...(19): siRNA sense strand
ccaaagcaccuaagaaugg

SEQ ID NO: 1245782 - RNA, 19 nt, Homo sapiens
  misc_RNA (1)...(19): siRNA sense strand
ugucggaccuccaugugua

SEQ ID NO: 1245783 - RNA, 19 nt, Homo sapiens
  misc_RNA (1)...(19): siRNA sense strand
caaagaagaagaccgugaa

SEQ ID NO: 1245784 - RNA, 19 nt, Homo sapiens
  misc_RNA (1)...(19): siRNA sense strand
agacaagcuuggagaaaga

SEQ ID NO: 1245785 - RNA, 19 nt, Homo sapiens
  misc_RNA (1)...(19): siRNA sense strand
aaagaaaccugcagaugac

SEQ ID NO: 1245786 - RNA, 19 nt, Homo sapiens
  misc_RNA (1)...(19): siRNA sense strand
gcaaagacaacagaggaaa

SEQ ID NO: 1245787 - RNA, 19 nt, Homo sapiens
  misc_RNA (1)...(19): siRNA sense strand
ggaccuccauguguaguau

SEQ ID NO: 1245788 - RNA, 19 nt, Homo sapiens
  misc_RNA (1)...(19): siRNA sense strand
gagaaagagaugacacuau

SEQ ID NO: 1245789 - RNA, 19 nt, Homo sapiens
  misc_RNA (1)...(19): siRNA sense strand
gaugaugccuuggauaaac

SEQ ID NO: 1245790 - RNA, 19 nt, Homo sapiens
  misc_RNA (1)...(19): siRNA sense strand
aaaggaagcagauccagaa

SEQ ID NO: 1245791 - RNA, 19 nt, Homo sapiens
  misc_RNA (1)...(19): siRNA sense strand
ugacaaagaccucgaugau

SEQ ID NO: 1245792 - RNA, 19 nt, Homo sapiens
  misc_RNA (1)...(19): siRNA sense strand
gugaaaagcuuggugaaaa

SEQ ID NO: 1245793 - RNA, 19 nt, Homo sapiens
  misc_RNA (1)...(19): siRNA sense strand
uggauaaagucaaggagaa

SEQ ID NO: 1245794 - RNA, 19 nt, Homo sapiens
  misc_RNA (1)...(19): siRNA sense strand
caaagcaccuaagaaugga

SEQ ID NO: 1245795 - RNA, 19 nt, Homo sapiens
  misc_RNA (1)...(19): siRNA sense strand
cuacagaaaccucacagaa

SEQ ID NO: 1245796 - RNA, 19 nt, Homo sapiens
  misc_RNA (1)...(19): siRNA sense strand
gaccuccgcucaauuaagg

SEQ ID NO: 1245797 - RNA, 19 nt, Homo sapiens
  misc_RNA (1)...(19): siRNA sense strand
gccagaugaugcuguagaa

SEQ ID NO: 1245798 - RNA, 19 nt, Homo sapiens
  misc_RNA (1)...(19): siRNA sense strand
gaacacagcaaaggauaag

SEQ ID NO: 1245799 - RNA, 19 nt, Homo sapiens
  misc_RNA (1)...(19): siRNA sense strand
ucaaggagaaggccaaaga

SEQ ID NO: 1245800 - RNA, 19 nt, Homo sapiens
  misc_RNA (1)...(19): siRNA sense strand
ggagaaagagaugacacua

SEQ ID NO: 1245801 - RNA, 19 nt, Homo sapiens
  misc_RNA (1)...(19): siRNA sense strand
ggagguaaagcgaaggauu

SEQ ID NO: 1245802 - RNA, 19 nt, Homo sapiens
  misc_RNA (1)...(19): siRNA sense strand
aaacaaucccaucugagua

SEQ ID NO: 1245803 - RNA, 19 nt, Homo sapiens
  misc_RNA (1)...(19): siRNA sense strand
caaaggauaagugcaagaa

SEQ ID NO: 1245804 - RNA, 19 nt, Homo sapiens
  misc_RNA (1)...(19): siRNA sense strand
gcgaaggauucagcaaaga

SEQ ID NO: 1245805 - RNA, 19 nt, Homo sapiens
  misc_RNA (1)...(19): siRNA sense strand
ugacccagaugagaacaaa

SEQ ID NO: 1245806 - RNA, 19 nt, Homo sapiens
  misc_RNA (1)...(19): siRNA sense strand
gagguaaagcgaaggauuc

SEQ ID NO: 1245807 - RNA, 19 nt, Homo sapiens
  misc_RNA (1)...(19): siRNA sense strand
uaucccaccugaauacaga

SEQ ID NO: 1245808 - RNA, 19 nt, Homo sapiens
  misc_RNA (1)...(19): siRNA sense strand
gaugagaacaaaccaaugg

SEQ ID NO: 1245809 - RNA, 19 nt, Homo sapiens
  misc_RNA (1)...(19): siRNA sense strand
auacagacaucuccuggau

SEQ ID NO: 1245810 - RNA, 19 nt, Homo sapiens
  misc_RNA (1)...(19): siRNA sense strand
gaaguguggugaggaugau

SEQ ID NO: 1245811 - RNA, 19 nt, Homo sapiens
  misc_RNA (1)...(19): siRNA sense strand
ccaauggaagauaaaguaa

SEQ ID NO: 1245812 - RNA, 19 nt, Homo sapiens
  misc_RNA (1)...(19): siRNA sense strand
cagcaaaggauaagugcaa

SEQ ID NO: 1245813 - RNA, 19 nt, Homo sapiens
  misc_RNA (1)...(19): siRNA sense strand
aacaauuccuccugauuau

SEQ ID NO: 1245814 - RNA, 19 nt, Homo sapiens
  misc_RNA (1)...(19): siRNA sense strand
cagaacacagcaaaggaua

SEQ ID NO: 1245815 - RNA, 19 nt, Homo sapiens
  misc_RNA (1)...(19): siRNA sense strand
ugaagccaccuacaaagaa

SEQ ID NO: 1245816 - RNA, 19 nt, Homo sapiens
  misc_RNA (1)...(19): siRNA sense strand
ggauaaagauggaaaacca

SEQ ID NO: 1245817 - RNA, 19 nt, Homo sapiens
  misc_RNA (1)...(19): siRNA sense strand
ggaagauaaaguaaaggaa

SEQ ID NO: 1245818 - RNA, 19 nt, Homo sapiens
  misc_RNA (1)...(19): siRNA sense strand
caauuaaggaagucgauga

SEQ ID NO: 1245819 - RNA, 19 nt, Homo sapiens
  misc_RNA (1)...(19): siRNA sense strand
gaaaccaucuaagccaacu

SEQ ID NO: 1245820 - RNA, 19 nt, Homo sapiens
  misc_RNA (1)...(19): siRNA sense strand
ugccaucucugaagugguu

SEQ ID NO: 1245821 - RNA, 19 nt, Homo sapiens
  misc_RNA (1)...(19): siRNA sense strand
ucgaugaugccuuggauaa

SEQ ID NO: 1245822 - RNA, 19 nt, Homo sapiens
  misc_RNA (1)...(19): siRNA sense strand
gacacuaucccaccugaau

SEQ ID NO: 1245823 - RNA, 19 nt, Homo sapiens
  misc_RNA (1)...(19): siRNA sense strand
gugaagccaccuacaaaga

SEQ ID NO: 1245824 - RNA, 19 nt, Homo sapiens
  misc_RNA (1)...(19): siRNA sense strand
ugaggaugaugaaacaauc

SEQ ID NO: 1245825 - RNA, 19 nt, Homo sapiens
  misc_RNA (1)...(19): siRNA sense strand
gaaggauucagcaaagaca

SEQ ID NO: 1245826 - RNA, 19 nt, Homo sapiens
  misc_RNA (1)...(19): siRNA sense strand
ucaaagaaaccugcagaug

SEQ ID NO: 1245827 - RNA, 19 nt, Homo sapiens
  misc_RNA (1)...(19): siRNA sense strand
gacaaagaccucgaugaug

SEQ ID NO: 1245828 - RNA, 19 nt, Homo sapiens
  misc_RNA (1)...(19): siRNA sense strand
gaagaggucaaggauaaag

SEQ ID NO: 1245829 - RNA, 19 nt, Homo sapiens
  misc_RNA (1)...(19): siRNA sense strand
gauuagaagaggucaagga

SEQ ID NO: 1245830 - RNA, 19 nt, Homo sapiens
  misc_RNA (1)...(19): siRNA sense strand
caauuccuccugauuauag

SEQ ID NO: 1245831 - RNA, 19 nt, Homo sapiens
  misc_RNA (1)...(19): siRNA sense strand
caaggagaaggccaaagaa

SEQ ID NO: 1245832 - RNA, 19 nt, Homo sapiens
  misc_RNA (1)...(19): siRNA sense strand
augaaacaaucccaucuga

SEQ ID NO: 1245833 - RNA, 19 nt, Homo sapiens
  misc_RNA (1)...(19): siRNA sense strand
gcaaaggauaagugcaaga

SEQ ID NO: 1245834 - RNA, 19 nt, Homo sapiens
  misc_RNA (1)...(19): siRNA sense strand
cagugaagccaccuacaaa

SEQ ID NO: 1245835 - RNA, 19 nt, Homo sapiens
  misc_RNA (1)...(19): siRNA sense strand
ccagugaagccaccuacaa

SEQ ID NO: 1245836 - RNA, 19 nt, Homo sapiens
  misc_RNA (1)...(19): siRNA sense strand
ggauaaacucucugacagu

SEQ ID NO: 1245837 - RNA, 19 nt, Homo sapiens
  misc_RNA (1)...(19): siRNA sense strand
ggucugaauguaaagagaa

SEQ ID NO: 1245838 - RNA, 19 nt, Homo sapiens
  misc_RNA (1)...(19): siRNA sense strand
cagaugagaacaaaccaau

SEQ ID NO: 1245839 - RNA, 19 nt, Homo sapiens
  misc_RNA (1)...(19): siRNA sense strand
gaaaccugcagaugaccaa

SEQ ID NO: 1245840 - RNA, 19 nt, Homo sapiens
  misc_RNA (1)...(19): siRNA sense strand
acacuaucccaccugaaua

SEQ ID NO: 1245841 - RNA, 19 nt, Homo sapiens
  misc_RNA (1)...(19): siRNA sense strand
agagaaguguggugaggau

SEQ ID NO: 1245842 - RNA, 19 nt, Homo sapiens
  misc_RNA (1)...(19): siRNA sense strand
caaaccaauggaagauaaa

SEQ ID NO: 1245843 - RNA, 19 nt, Homo sapiens
  misc_RNA (1)...(19): siRNA sense strand
agaacaaaccaauggaaga

SEQ ID NO: 1245844 - RNA, 19 nt, Homo sapiens
  misc_RNA (1)...(19): siRNA sense strand
ccacggauaaagauggaaa

SEQ ID NO: 1245845 - RNA, 19 nt, Homo sapiens
  misc_RNA (1)...(19): siRNA sense strand
aaagagaaaccaucuaagc

SEQ ID NO: 1245846 - RNA, 19 nt, Homo sapiens
  misc_RNA (1)...(19): siRNA sense strand
gcuccaaagcaccuaagaa

SEQ ID NO: 1245847 - RNA, 19 nt, Homo sapiens
  misc_RNA (1)...(19): siRNA sense strand
caaaagagucuaaggaaca

SEQ ID NO: 1245848 - RNA, 19 nt, Homo sapiens
  misc_RNA (1)...(19): siRNA sense strand
ucaaggauaaagauggaaa

SEQ ID NO: 1245849 - RNA, 19 nt, Homo sapiens
  misc_RNA (1)...(19): siRNA sense strand
agaaacaauuccuccugau

SEQ ID NO: 1245850 - RNA, 19 nt, Homo sapiens
  misc_RNA (1)...(19): siRNA sense strand
gaagauggaaaaccuguga

SEQ ID NO: 1245851 - RNA, 19 nt, Homo sapiens
  misc_RNA (1)...(19): siRNA sense strand
caucuaagccaacugaaaa

SEQ ID NO: 1245852 - RNA, 19 nt, Homo sapiens
  misc_RNA (1)...(19): siRNA sense strand
gucugaauguaaagagaaa

SEQ ID NO: 1245853 - RNA, 19 nt, Homo sapiens
  misc_RNA (1)...(19): siRNA sense strand
accaauggaagauaaagua

SEQ ID NO: 1245854 - RNA, 19 nt, Homo sapiens
  misc_RNA (1)...(19): siRNA sense strand
ccaucuaagccaacugaaa

SEQ ID NO: 1245855 - RNA, 19 nt, Homo sapiens
  misc_RNA (1)...(19): siRNA sense strand
ucagaggauucaaagaaac

SEQ ID NO: 1245856 - RNA, 19 nt, Homo sapiens
  misc_RNA (1)...(19): siRNA sense strand
aucagaggauucaaagaaa

SEQ ID NO: 1245857 - RNA, 19 nt, Homo sapiens
  misc_RNA (1)...(19): siRNA sense strand
ccaccugaauacagacauc

SEQ ID NO: 1245858 - RNA, 19 nt, Homo sapiens
  misc_RNA (1)...(19): siRNA sense strand
aagcgaaggauucagcaaa

SEQ ID NO: 1245859 - RNA, 19 nt, Homo sapiens
  misc_RNA (1)...(19): siRNA sense strand
uagaagaggucaaggauaa

SEQ ID NO: 1245860 - RNA, 19 nt, Homo sapiens
  misc_RNA (1)...(19): siRNA sense strand
gaaagccacuccugccaaa

SEQ ID NO: 1245861 - RNA, 19 nt, Homo sapiens
  misc_RNA (1)...(19): siRNA sense strand
caaagaaaccugcagauga

SEQ ID NO: 1245862 - RNA, 19 nt, Homo sapiens
  misc_RNA (1)...(19): siRNA sense strand
ggaagcagauccagaagau

SEQ ID NO: 1245863 - RNA, 19 nt, Homo sapiens
  misc_RNA (1)...(19): siRNA sense strand
guaaagagaaaccaucuaa

SEQ ID NO: 1245864 - RNA, 19 nt, Homo sapiens
  misc_RNA (1)...(19): siRNA sense strand
gaagccaccuacaaagaaa

SEQ ID NO: 1245865 - RNA, 19 nt, Homo sapiens
  misc_RNA (1)...(19): siRNA sense strand
aaacaauuccuccugauua

SEQ ID NO: 1245866 - RNA, 19 nt, Homo sapiens
  misc_RNA (1)...(19): siRNA sense strand
ggagaaggccaaagaagaa

SEQ ID NO: 1245867 - RNA, 19 nt, Homo sapiens
  misc_RNA (1)...(19): siRNA sense strand
gaaaaccugugauggauaa

SEQ ID NO: 1245868 - RNA, 19 nt, Homo sapiens
  misc_RNA (1)...(19): siRNA sense strand
caaaaugcuucaucucuua

SEQ ID NO: 1245869 - RNA, 19 nt, Homo sapiens
  misc_RNA (1)...(19): siRNA sense strand
gaaacaaucccaucugagu

SEQ ID NO: 1245870 - RNA, 19 nt, Homo sapiens
  misc_RNA (1)...(19): siRNA sense strand
acaaaccaauggaagauaa

SEQ ID NO: 1245871 - RNA, 19 nt, Homo sapiens
  misc_RNA (1)...(19): siRNA sense strand
gaacagcuuccacccauga

SEQ ID NO: 1245872 - RNA, 19 nt, Homo sapiens
  misc_RNA (1)...(19): siRNA sense strand
gaaacaauuccuccugauu

SEQ ID NO: 1245873 - RNA, 19 nt, Homo sapiens
  misc_RNA (1)...(19): siRNA sense strand
agaaagagaugacacuauc

SEQ ID NO: 1245874 - RNA, 19 nt, Homo sapiens
  misc_RNA (1)...(19): siRNA sense strand
uaaacucucugacagucua

SEQ ID NO: 1245875 - RNA, 19 nt, Homo sapiens
  misc_RNA (1)...(19): siRNA sense strand
acagaaaccucacagaaca

SEQ ID NO: 1245876 - RNA, 19 nt, Homo sapiens
  misc_RNA (1)...(19): siRNA sense strand
gaacaaaccaauggaagau

SEQ ID NO: 1245877 - RNA, 19 nt, Homo sapiens
  misc_RNA (1)...(19): siRNA sense strand
ggucaaggauaaagaugga

SEQ ID NO: 1245878 - RNA, 19 nt, Homo sapiens
  misc_RNA (1)...(19): siRNA sense strand
ggacaggacaaaccaguga

SEQ ID NO: 1245879 - RNA, 19 nt, Homo sapiens
  misc_RNA (1)...(19): siRNA sense strand
gagacaagcuuggagaaag

SEQ ID NO: 1245880 - RNA, 19 nt, Homo sapiens
  misc_RNA (1)...(19): siRNA sense strand
ugaccggucugaauguaaa

SEQ ID NO: 1245881 - RNA, 19 nt, Homo sapiens
  misc_RNA (1)...(19): siRNA sense strand
ccaaagcaccuaagaaugg

SEQ ID NO: 1245882 - RNA, 19 nt, Homo sapiens
  misc_RNA (1)...(19): siRNA sense strand
ugucggaccuccaugugua

SEQ ID NO: 1245883 - RNA, 19 nt, Homo sapiens
  misc_RNA (1)...(19): siRNA sense strand
caaagaagaagaccgugaa

SEQ ID NO: 1245884 - RNA, 19 nt, Homo sapiens
  misc_RNA (1)...(19): siRNA sense strand
agacaagcuuggagaaaga

SEQ ID NO: 1245885 - RNA, 19 nt, Homo sapiens
  misc_RNA (1)...(19): siRNA sense strand
aaagaaaccugcagaugac

SEQ ID NO: 1245886 - RNA, 19 nt, Homo sapiens
  misc_RNA (1)...(19): siRNA sense strand
gcaaagacaacagaggaaa

SEQ ID NO: 1245887 - RNA, 19 nt, Homo sapiens
  misc_RNA (1)...(19): siRNA sense strand
ggaccuccauguguaguau

SEQ ID NO: 1245888 - RNA, 19 nt, Homo sapiens
  misc_RNA (1)...(19): siRNA sense strand
gagaaagagaugacacuau

SEQ ID NO: 1245889 - RNA, 19 nt, Homo sapiens
  misc_RNA (1)...(19): siRNA sense strand
gaugaugccuuggauaaac

SEQ ID NO: 1245890 - RNA, 19 nt, Homo sapiens
  misc_RNA (1)...(19): siRNA sense strand
aaaggaagcagauccagaa

SEQ ID NO: 1245891 - RNA, 19 nt, Homo sapiens
  misc_RNA (1)...(19): siRNA sense strand
ugacaaagaccucgaugau

SEQ ID NO: 1245892 - RNA, 19 nt, Homo sapiens
  misc_RNA (1)...(19): siRNA sense strand
gugaaaagcuuggugaaaa

SEQ ID NO: 1245893 - RNA, 19 nt, Homo sapiens
  misc_RNA (1)...(19): siRNA sense strand
uggauaaagucaaggagaa

SEQ ID NO: 1245894 - RNA, 19 nt, Homo sapiens
  misc_RNA (1)...(19): siRNA sense strand
caaagcaccuaagaaugga

SEQ ID NO: 1245895 - RNA, 19 nt, Homo sapiens
  misc_RNA (1)...(19): siRNA sense strand
cuacagaaaccucacagaa

SEQ ID NO: 1245896 - RNA, 19 nt, Homo sapiens
  misc_RNA (1)...(19): siRNA sense strand
gccagaugaugcuguagaa

SEQ ID NO: 1245897 - RNA, 19 nt, Homo sapiens
  misc_RNA (1)...(19): siRNA sense strand
gaacacagcaaaggauaag

SEQ ID NO: 1245898 - RNA, 19 nt, Homo sapiens
  misc_RNA (1)...(19): siRNA sense strand
ucaaggagaaggccaaaga

SEQ ID NO: 1245899 - RNA, 19 nt, Homo sapiens
  misc_RNA (1)...(19): siRNA sense strand
aaacaaucccaucugagua

SEQ ID NO: 1245900 - RNA, 19 nt, Homo sapiens
  misc_RNA (1)...(19): siRNA sense strand
ggagguaaagcgaaggauu

SEQ ID NO: 1245901 - RNA, 19 nt, Homo sapiens
  misc_RNA (1)...(19): siRNA sense strand
ggagaaagagaugacacua

SEQ ID NO: 1245902 - RNA, 19 nt, Homo sapiens
  misc_RNA (1)...(19): siRNA sense strand
caaaggauaagugcaagaa

SEQ ID NO: 1245903 - RNA, 19 nt, Homo sapiens
  misc_RNA (1)...(19): siRNA sense strand
gcgaaggauucagcaaaga

SEQ ID NO: 1245904 - RNA, 19 nt, Homo sapiens
  misc_RNA (1)...(19): siRNA sense strand
ugacccagaugagaacaaa

SEQ ID NO: 1245905 - RNA, 19 nt, Homo sapiens
  misc_RNA (1)...(19): siRNA sense strand
gagguaaagcgaaggauuc

SEQ ID NO: 1245906 - RNA, 19 nt, Homo sapiens
  misc_RNA (1)...(19): siRNA sense strand
uaucccaccugaauacaga

SEQ ID NO: 1245907 - RNA, 19 nt, Homo sapiens
  misc_RNA (1)...(19): siRNA sense strand
gaugagaacaaaccaaugg

SEQ ID NO: 1245908 - RNA, 19 nt, Homo sapiens
  misc_RNA (1)...(19): siRNA sense strand
gaaguguggugaggaugau

SEQ ID NO: 1245909 - RNA, 19 nt, Homo sapiens
  misc_RNA (1)...(19): siRNA sense strand
auacagacaucuccuggau

SEQ ID NO: 1245910 - RNA, 19 nt, Homo sapiens
  misc_RNA (1)...(19): siRNA sense strand
ccaauggaagauaaaguaa

SEQ ID NO: 1245911 - RNA, 19 nt, Homo sapiens
  misc_RNA (1)...(19): siRNA sense strand
cagcaaaggauaagugcaa

SEQ ID NO: 1245912 - RNA, 19 nt, Homo sapiens
  misc_RNA (1)...(19): siRNA sense strand
aacaauuccuccugauuau

SEQ ID NO: 1245913 - RNA, 19 nt, Homo sapiens
  misc_RNA (1)...(19): siRNA sense strand
ggauaaagauggaaaacca

SEQ ID NO: 1245914 - RNA, 19 nt, Homo sapiens
  misc_RNA (1)...(19): siRNA sense strand
cagaacacagcaaaggaua

SEQ ID NO: 1245915 - RNA, 19 nt, Homo sapiens
  misc_RNA (1)...(19): siRNA sense strand
ugaagccaccuacaaagaa

SEQ ID NO: 1245916 - RNA, 19 nt, Homo sapiens
  misc_RNA (1)...(19): siRNA sense strand
ggaagauaaaguaaaggaa

SEQ ID NO: 1245917 - RNA, 19 nt, Homo sapiens
  misc_RNA (1)...(19): siRNA sense strand
gaaaccaucuaagccaacu

SEQ ID NO: 1245918 - RNA, 19 nt, Homo sapiens
  misc_RNA (1)...(19): siRNA sense strand
ugccaucucugaagugguu

SEQ ID NO: 1245919 - RNA, 19 nt, Homo sapiens
  misc_RNA (1)...(19): siRNA sense strand
ucgaugaugccuuggauaa

SEQ ID NO: 1245920 - RNA, 19 nt, Homo sapiens
  misc_RNA (1)...(19): siRNA sense strand
gacacuaucccaccugaau

SEQ ID NO: 1245921 - RNA, 19 nt, Homo sapiens
  misc_RNA (1)...(19): siRNA sense strand
gugaagccaccuacaaaga

SEQ ID NO: 1245922 - RNA, 19 nt, Homo sapiens
  misc_RNA (1)...(19): siRNA sense strand
caauuccuccugauuauag

SEQ ID NO: 1245923 - RNA, 19 nt, Homo sapiens
  misc_RNA (1)...(19): siRNA sense strand
gaaggauucagcaaagaca

SEQ ID NO: 1245924 - RNA, 19 nt, Homo sapiens
  misc_RNA (1)...(19): siRNA sense strand
ucaaagaaaccugcagaug

SEQ ID NO: 1245925 - RNA, 19 nt, Homo sapiens
  misc_RNA (1)...(19): siRNA sense strand
ugaggaugaugaaacaauc

SEQ ID NO: 1245926 - RNA, 19 nt, Homo sapiens
  misc_RNA (1)...(19): siRNA sense strand
gacaaagaccucgaugaug

SEQ ID NO: 1245927 - RNA, 19 nt, Homo sapiens
  misc_RNA (1)...(19): siRNA sense strand
gaagaggucaaggauaaag

SEQ ID NO: 1245928 - RNA, 19 nt, Homo sapiens
  misc_RNA (1)...(19): siRNA sense strand
gauuagaagaggucaagga

SEQ ID NO: 1245929 - RNA, 19 nt, Homo sapiens
  misc_RNA (1)...(19): siRNA sense strand
caaggagaaggccaaagaa

SEQ ID NO: 1245930 - RNA, 19 nt, Homo sapiens
  misc_RNA (1)...(19): siRNA sense strand
gcaaaggauaagugcaaga

SEQ ID NO: 1245931 - RNA, 19 nt, Homo sapiens
  misc_RNA (1)...(19): siRNA sense strand
cagugaagccaccuacaaa

SEQ ID NO: 1245932 - RNA, 19 nt, Homo sapiens
  misc_RNA (1)...(19): siRNA sense strand
ccagugaagccaccuacaa

SEQ ID NO: 1245933 - RNA, 19 nt, Homo sapiens
  misc_RNA (1)...(19): siRNA sense strand
ggauaaacucucugacagu

SEQ ID NO: 1245934 - RNA, 19 nt, Homo sapiens
  misc_RNA (1)...(19): siRNA sense strand
augaaacaaucccaucuga

SEQ ID NO: 1245935 - RNA, 19 nt, Homo sapiens
  misc_RNA (1)...(19): siRNA sense strand
ggucugaauguaaagagaa

SEQ ID NO: 1245936 - RNA, 19 nt, Homo sapiens
  misc_RNA (1)...(19): siRNA sense strand
agagaaguguggugaggau

SEQ ID NO: 1245937 - RNA, 19 nt, Homo sapiens
  misc_RNA (1)...(19): siRNA sense strand
gaaaccugcagaugaccaa

SEQ ID NO: 1245938 - RNA, 19 nt, Homo sapiens
  misc_RNA (1)...(19): siRNA sense strand
acacuaucccaccugaaua

SEQ ID NO: 1245939 - RNA, 19 nt, Homo sapiens
  misc_RNA (1)...(19): siRNA sense strand
caaaccaauggaagauaaa

SEQ ID NO: 1245940 - RNA, 19 nt, Homo sapiens
  misc_RNA (1)...(19): siRNA sense strand
cagaugagaacaaaccaau

SEQ ID NO: 1245941 - RNA, 19 nt, Homo sapiens
  misc_RNA (1)...(19): siRNA sense strand
ccacggauaaagauggaaa

SEQ ID NO: 1245942 - RNA, 19 nt, Homo sapiens
  misc_RNA (1)...(19): siRNA sense strand
agaacaaaccaauggaaga

SEQ ID NO: 1245943 - RNA, 19 nt, Homo sapiens
  misc_RNA (1)...(19): siRNA sense strand
gaagauggaaaaccuguga

SEQ ID NO: 1245944 - RNA, 19 nt, Homo sapiens
  misc_RNA (1)...(19): siRNA sense strand
gcuccaaagcaccuaagaa

SEQ ID NO: 1245945 - RNA, 19 nt, Homo sapiens
  misc_RNA (1)...(19): siRNA sense strand
aaagagaaaccaucuaagc

SEQ ID NO: 1245946 - RNA, 19 nt, Homo sapiens
  misc_RNA (1)...(19): siRNA sense strand
caaaagagucuaaggaaca

SEQ ID NO: 1245947 - RNA, 19 nt, Homo sapiens
  misc_RNA (1)...(19): siRNA sense strand
ucaaggauaaagauggaaa

SEQ ID NO: 1245948 - RNA, 19 nt, Homo sapiens
  misc_RNA (1)...(19): siRNA sense strand
agaaacaauuccuccugau

SEQ ID NO: 1245949 - RNA, 19 nt, Homo sapiens
  misc_RNA (1)...(19): siRNA sense strand
caucuaagccaacugaaaa

SEQ ID NO: 1245950 - RNA, 19 nt, Homo sapiens
  misc_RNA (1)...(19): siRNA sense strand
accaauggaagauaaagua

SEQ ID NO: 1245951 - RNA, 19 nt, Homo sapiens
  misc_RNA (1)...(19): siRNA sense strand
gucugaauguaaagagaaa

SEQ ID NO: 1245952 - RNA, 19 nt, Homo sapiens
  misc_RNA (1)...(19): siRNA sense strand
ccaucuaagccaacugaaa

SEQ ID NO: 1245953 - RNA, 19 nt, Homo sapiens
  misc_RNA (1)...(19): siRNA sense strand
ucagaggauucaaagaaac

SEQ ID NO: 1245954 - RNA, 19 nt, Homo sapiens
  misc_RNA (1)...(19): siRNA sense strand
aucagaggauucaaagaaa

SEQ ID NO: 1245955 - RNA, 19 nt, Homo sapiens
  misc_RNA (1)...(19): siRNA sense strand
ccaccugaauacagacauc

SEQ ID NO: 1245956 - RNA, 19 nt, Homo sapiens
  misc_RNA (1)...(19): siRNA sense strand
ugagaacaaaccaauggaa

SEQ ID NO: 1245957 - RNA, 19 nt, Homo sapiens
  misc_RNA (1)...(19): siRNA sense strand
aagcgaaggauucagcaaa

SEQ ID NO: 1245958 - RNA, 19 nt, Homo sapiens
  misc_RNA (1)...(19): siRNA sense strand
ccucacagaacacagcaaa

SEQ ID NO: 1245959 - RNA, 19 nt, Homo sapiens
  misc_RNA (1)...(19): siRNA sense strand
uagaagaggucaaggauaa

SEQ ID NO: 1245960 - RNA, 19 nt, Homo sapiens
  misc_RNA (1)...(19): siRNA sense strand
gaaagccacuccugccaaa

SEQ ID NO: 1245961 - RNA, 19 nt, Homo sapiens
  misc_RNA (1)...(19): siRNA sense strand
caaagaaaccugcagauga

SEQ ID NO: 1245962 - RNA, 19 nt, Homo sapiens
  misc_RNA (1)...(19): siRNA sense strand
ggaagcagauccagaagau

SEQ ID NO: 1245963 - RNA, 19 nt, Homo sapiens
  misc_RNA (1)...(19): siRNA sense strand
guaaagagaaaccaucuaa

SEQ ID NO: 1245964 - RNA, 19 nt, Homo sapiens
  misc_RNA (1)...(19): siRNA sense strand
gaagccaccuacaaagaaa

SEQ ID NO: 1245965 - RNA, 19 nt, Homo sapiens
  misc_RNA (1)...(19): siRNA sense strand
aaacaauuccuccugauua

SEQ ID NO: 1245966 - RNA, 19 nt, Homo sapiens
  misc_RNA (1)...(19): siRNA sense strand
ggagaaggccaaagaagaa

SEQ ID NO: 1245967 - RNA, 19 nt, Homo sapiens
  misc_RNA (1)...(19): siRNA sense strand
gaaaaccugugauggauaa

SEQ ID NO: 1245968 - RNA, 19 nt, Homo sapiens
  misc_RNA (1)...(19): siRNA sense strand
caaaaugcuucaucucuua

SEQ ID NO: 1245969 - RNA, 19 nt, Homo sapiens
  misc_RNA (1)...(19): siRNA sense strand
gaaacaaucccaucugagu

SEQ ID NO: 1245970 - RNA, 19 nt, Homo sapiens
  misc_RNA (1)...(19): siRNA sense strand
acaaaccaauggaagauaa

SEQ ID NO: 1245971 - RNA, 19 nt, Homo sapiens
  misc_RNA (1)...(19): siRNA sense strand
gaacagcuuccacccauga

SEQ ID NO: 1245972 - RNA, 19 nt, Homo sapiens
  misc_RNA (1)...(19): siRNA sense strand
gaaacaauuccuccugauu

SEQ ID NO: 1245973 - RNA, 19 nt, Homo sapiens
  misc_RNA (1)...(19): siRNA sense strand
agaaagagaugacacuauc

SEQ ID NO: 1245974 - RNA, 19 nt, Homo sapiens
  misc_RNA (1)...(19): siRNA sense strand
uaaacucucugacagucua

SEQ ID NO: 1245975 - RNA, 19 nt, Homo sapiens
  misc_RNA (1)...(19): siRNA sense strand
acagaaaccucacagaaca

SEQ ID NO: 1245976 - RNA, 19 nt, Homo sapiens
  misc_RNA (1)...(19): siRNA sense strand
gaacaaaccaauggaagau

SEQ ID NO: 1245977 - RNA, 19 nt, Homo sapiens
  misc_RNA (1)...(19): siRNA sense strand
ggucaaggauaaagaugga

SEQ ID NO: 1245978 - RNA, 19 nt, Homo sapiens
  misc_RNA (1)...(19): siRNA sense strand
ggacaggacaaaccaguga

SEQ ID NO: 1245979 - RNA, 19 nt, Homo sapiens
  misc_RNA (1)...(19): siRNA sense strand
gagacaagcuuggagaaag

SEQ ID NO: 1245980 - RNA, 19 nt, Homo sapiens
  misc_RNA (1)...(19): siRNA sense strand
ugaccggucugaauguaaa

SEQ ID NO: 1245981 - RNA, 19 nt, Homo sapiens
  misc_RNA (1)...(19): siRNA sense strand
ccaaagcaccuaagaaugg

SEQ ID NO: 1245982 - RNA, 19 nt, Homo sapiens
  misc_RNA (1)...(19): siRNA sense strand
ugucggaccuccaugugua

SEQ ID NO: 1245983 - RNA, 19 nt, Homo sapiens
  misc_RNA (1)...(19): siRNA sense strand
caaagaagaagaccgugaa

SEQ ID NO: 1245984 - RNA, 19 nt, Homo sapiens
  misc_RNA (1)...(19): siRNA sense strand
agacaagcuuggagaaaga

SEQ ID NO: 1245985 - RNA, 19 nt, Homo sapiens
  misc_RNA (1)...(19): siRNA sense strand
aaagaaaccugcagaugac

SEQ ID NO: 1245986 - RNA, 19 nt, Homo sapiens
  misc_RNA (1)...(19): siRNA sense strand
gcaaagacaacagaggaaa

SEQ ID NO: 1245987 - RNA, 19 nt, Homo sapiens
  misc_RNA (1)...(19): siRNA sense strand
ggaccuccauguguaguau

SEQ ID NO: 1245988 - RNA, 19 nt, Homo sapiens
  misc_RNA (1)...(19): siRNA sense strand
gagaaagagaugacacuau

SEQ ID NO: 1245989 - RNA, 19 nt, Homo sapiens
  misc_RNA (1)...(19): siRNA sense strand
gaugaugccuuggauaaac

SEQ ID NO: 1245990 - RNA, 19 nt, Homo sapiens
  misc_RNA (1)...(19): siRNA sense strand
aaaggaagcagauccagaa

SEQ ID NO: 1245991 - RNA, 19 nt, Homo sapiens
  misc_RNA (1)...(19): siRNA sense strand
ugacaaagaccucgaugau

SEQ ID NO: 1245992 - RNA, 19 nt, Homo sapiens
  misc_RNA (1)...(19): siRNA sense strand
gugaaaagcuuggugaaaa

SEQ ID NO: 1245993 - RNA, 19 nt, Homo sapiens
  misc_RNA (1)...(19): siRNA sense strand
uggauaaagucaaggagaa

SEQ ID NO: 1245994 - RNA, 19 nt, Homo sapiens
  misc_RNA (1)...(19): siRNA sense strand
caaagcaccuaagaaugga

SEQ ID NO: 1245995 - RNA, 19 nt, Homo sapiens
  misc_RNA (1)...(19): siRNA sense strand
cuacagaaaccucacagaa

SEQ ID NO: 1245996 - RNA, 19 nt, Homo sapiens
  misc_RNA (1)...(19): siRNA sense strand
gaccuccgcucaauuaagg

SEQ ID NO: 1245997 - RNA, 19 nt, Homo sapiens
  misc_RNA (1)...(19): siRNA sense strand
gccagaugaugcuguagaa

SEQ ID NO: 1245998 - RNA, 19 nt, Homo sapiens
  misc_RNA (1)...(19): siRNA sense strand
gaacacagcaaaggauaag

SEQ ID NO: 1245999 - RNA, 19 nt, Homo sapiens
  misc_RNA (1)...(19): siRNA sense strand
ucaaggagaaggccaaaga

SEQ ID NO: 1246000 - RNA, 19 nt, Homo sapiens
  misc_RNA (1)...(19): siRNA sense strand
ggagaaagagaugacacua

SEQ ID NO: 1246001 - RNA, 19 nt, Homo sapiens
  misc_RNA (1)...(19): siRNA sense strand
ggagguaaagcgaaggauu

SEQ ID NO: 1246002 - RNA, 19 nt, Homo sapiens
  misc_RNA (1)...(19): siRNA sense strand
aaacaaucccaucugagua

SEQ ID NO: 1246003 - RNA, 19 nt, Homo sapiens
  misc_RNA (1)...(19): siRNA sense strand
caaaggauaagugcaagaa

SEQ ID NO: 1246004 - RNA, 19 nt, Homo sapiens
  misc_RNA (1)...(19): siRNA sense strand
gcgaaggauucagcaaaga

SEQ ID NO: 1246005 - RNA, 19 nt, Homo sapiens
  misc_RNA (1)...(19): siRNA sense strand
ugacccagaugagaacaaa

SEQ ID NO: 1246006 - RNA, 19 nt, Homo sapiens
  misc_RNA (1)...(19): siRNA sense strand
gagguaaagcgaaggauuc

SEQ ID NO: 1246007 - RNA, 19 nt, Homo sapiens
  misc_RNA (1)...(19): siRNA sense strand
uaucccaccugaauacaga

SEQ ID NO: 1246008 - RNA, 19 nt, Homo sapiens
  misc_RNA (1)...(19): siRNA sense strand
gaugagaacaaaccaaugg

SEQ ID NO: 1246009 - RNA, 19 nt, Homo sapiens
  misc_RNA (1)...(19): siRNA sense strand
auacagacaucuccuggau

SEQ ID NO: 1246010 - RNA, 19 nt, Homo sapiens
  misc_RNA (1)...(19): siRNA sense strand
gaaguguggugaggaugau

SEQ ID NO: 1246011 - RNA, 19 nt, Homo sapiens
  misc_RNA (1)...(19): siRNA sense strand
ccaauggaagauaaaguaa

SEQ ID NO: 1246012 - RNA, 19 nt, Homo sapiens
  misc_RNA (1)...(19): siRNA sense strand
cagcaaaggauaagugcaa

SEQ ID NO: 1246013 - RNA, 19 nt, Homo sapiens
  misc_RNA (1)...(19): siRNA sense strand
aacaauuccuccugauuau

SEQ ID NO: 1246014 - RNA, 19 nt, Homo sapiens
  misc_RNA (1)...(19): siRNA sense strand
cagaacacagcaaaggaua

SEQ ID NO: 1246015 - RNA, 19 nt, Homo sapiens
  misc_RNA (1)...(19): siRNA sense strand
ugaagccaccuacaaagaa

SEQ ID NO: 1246016 - RNA, 19 nt, Homo sapiens
  misc_RNA (1)...(19): siRNA sense strand
ggauaaagauggaaaacca

SEQ ID NO: 1246017 - RNA, 19 nt, Homo sapiens
  misc_RNA (1)...(19): siRNA sense strand
ggaagauaaaguaaaggaa

SEQ ID NO: 1246018 - RNA, 19 nt, Homo sapiens
  misc_RNA (1)...(19): siRNA sense strand
caauuaaggaagucgauga

SEQ ID NO: 1246019 - RNA, 19 nt, Homo sapiens
  misc_RNA (1)...(19): siRNA sense strand
gaaaccaucuaagccaacu

SEQ ID NO: 1246020 - RNA, 19 nt, Homo sapiens
  misc_RNA (1)...(19): siRNA sense strand
ugccaucucugaagugguu

SEQ ID NO: 1246021 - RNA, 19 nt, Homo sapiens
  misc_RNA (1)...(19): siRNA sense strand
ucgaugaugccuuggauaa

SEQ ID NO: 1246022 - RNA, 19 nt, Homo sapiens
  misc_RNA (1)...(19): siRNA sense strand
gacacuaucccaccugaau

SEQ ID NO: 1246023 - RNA, 19 nt, Homo sapiens
  misc_RNA (1)...(19): siRNA sense strand
gugaagccaccuacaaaga

SEQ ID NO: 1246024 - RNA, 19 nt, Homo sapiens
  misc_RNA (1)...(19): siRNA sense strand
ugaggaugaugaaacaauc

SEQ ID NO: 1246025 - RNA, 19 nt, Homo sapiens
  misc_RNA (1)...(19): siRNA sense strand
gaaggauucagcaaagaca

SEQ ID NO: 1246026 - RNA, 19 nt, Homo sapiens
  misc_RNA (1)...(19): siRNA sense strand
ucaaagaaaccugcagaug

SEQ ID NO: 1246027 - RNA, 19 nt, Homo sapiens
  misc_RNA (1)...(19): siRNA sense strand
gacaaagaccucgaugaug

SEQ ID NO: 1246028 - RNA, 19 nt, Homo sapiens
  misc_RNA (1)...(19): siRNA sense strand
gaagaggucaaggauaaag

SEQ ID NO: 1246029 - RNA, 19 nt, Homo sapiens
  misc_RNA (1)...(19): siRNA sense strand
gauuagaagaggucaagga

SEQ ID NO: 1246030 - RNA, 19 nt, Homo sapiens
  misc_RNA (1)...(19): siRNA sense strand
caauuccuccugauuauag

SEQ ID NO: 1246031 - RNA, 19 nt, Homo sapiens
  misc_RNA (1)...(19): siRNA sense strand
caaggagaaggccaaagaa

SEQ ID NO: 1246032 - RNA, 19 nt, Homo sapiens
  misc_RNA (1)...(19): siRNA sense strand
augaaacaaucccaucuga

SEQ ID NO: 1246033 - RNA, 19 nt, Homo sapiens
  misc_RNA (1)...(19): siRNA sense strand
gcaaaggauaagugcaaga

SEQ ID NO: 1246034 - RNA, 19 nt, Homo sapiens
  misc_RNA (1)...(19): siRNA sense strand
cagugaagccaccuacaaa

SEQ ID NO: 1246035 - RNA, 19 nt, Homo sapiens
  misc_RNA (1)...(19): siRNA sense strand
ccagugaagccaccuacaa

SEQ ID NO: 1246036 - RNA, 19 nt, Homo sapiens
  misc_RNA (1)...(19): siRNA sense strand
ggauaaacucucugacagu

SEQ ID NO: 1246037 - RNA, 19 nt, Homo sapiens
  misc_RNA (1)...(19): siRNA sense strand
ggucugaauguaaagagaa

SEQ ID NO: 1246038 - RNA, 19 nt, Homo sapiens
  misc_RNA (1)...(19): siRNA sense strand
cagaugagaacaaaccaau

SEQ ID NO: 1246039 - RNA, 19 nt, Homo sapiens
  misc_RNA (1)...(19): siRNA sense strand
gaaaccugcagaugaccaa

SEQ ID NO: 1246040 - RNA, 19 nt, Homo sapiens
  misc_RNA (1)...(19): siRNA sense strand
acacuaucccaccugaaua

SEQ ID NO: 1246041 - RNA, 19 nt, Homo sapiens
  misc_RNA (1)...(19): siRNA sense strand
agagaaguguggugaggau

SEQ ID NO: 1246042 - RNA, 19 nt, Homo sapiens
  misc_RNA (1)...(19): siRNA sense strand
caaaccaauggaagauaaa

SEQ ID NO: 1246043 - RNA, 19 nt, Homo sapiens
  misc_RNA (1)...(19): siRNA sense strand
agaacaaaccaauggaaga

SEQ ID NO: 1246044 - RNA, 19 nt, Homo sapiens
  misc_RNA (1)...(19): siRNA sense strand
ccacggauaaagauggaaa

SEQ ID NO: 1246045 - RNA, 19 nt, Homo sapiens
  misc_RNA (1)...(19): siRNA sense strand
aaagagaaaccaucuaagc

SEQ ID NO: 1246046 - RNA, 19 nt, Homo sapiens
  misc_RNA (1)...(19): siRNA sense strand
gcuccaaagcaccuaagaa

SEQ ID NO: 1246047 - RNA, 19 nt, Homo sapiens
  misc_RNA (1)...(19): siRNA sense strand
caaaagagucuaaggaaca

SEQ ID NO: 1246048 - RNA, 19 nt, Homo sapiens
  misc_RNA (1)...(19): siRNA sense strand
ucaaggauaaagauggaaa

SEQ ID NO: 1246049 - RNA, 19 nt, Homo sapiens
  misc_RNA (1)...(19): siRNA sense strand
agaaacaauuccuccugau

SEQ ID NO: 1246050 - RNA, 19 nt, Homo sapiens
  misc_RNA (1)...(19): siRNA sense strand
gaagauggaaaaccuguga

SEQ ID NO: 1246051 - RNA, 19 nt, Homo sapiens
  misc_RNA (1)...(19): siRNA sense strand
caucuaagccaacugaaaa

SEQ ID NO: 1246052 - RNA, 19 nt, Homo sapiens
  misc_RNA (1)...(19): siRNA sense strand
gucugaauguaaagagaaa

SEQ ID NO: 1246053 - RNA, 19 nt, Homo sapiens
  misc_RNA (1)...(19): siRNA sense strand
accaauggaagauaaagua

SEQ ID NO: 1246054 - RNA, 19 nt, Homo sapiens
  misc_RNA (1)...(19): siRNA sense strand
ccaucuaagccaacugaaa

SEQ ID NO: 1246055 - RNA, 19 nt, Homo sapiens
  misc_RNA (1)...(19): siRNA sense strand
ucagaggauucaaagaaac

SEQ ID NO: 1246056 - RNA, 19 nt, Homo sapiens
  misc_RNA (1)...(19): siRNA sense strand
aucagaggauucaaagaaa

SEQ ID NO: 1246057 - RNA, 19 nt, Homo sapiens
  misc_RNA (1)...(19): siRNA sense strand
ccaccugaauacagacauc

SEQ ID NO: 1246058 - RNA, 19 nt, Homo sapiens
  misc_RNA (1)...(19): siRNA sense strand
aagcgaaggauucagcaaa

SEQ ID NO: 1246059 - RNA, 19 nt, Homo sapiens
  misc_RNA (1)...(19): siRNA sense strand
uagaagaggucaaggauaa

SEQ ID NO: 1246060 - RNA, 19 nt, Homo sapiens
  misc_RNA (1)...(19): siRNA sense strand
gaaagccacuccugccaaa

SEQ ID NO: 1246061 - RNA, 19 nt, Homo sapiens
  misc_RNA (1)...(19): siRNA sense strand
caaagaaaccugcagauga

SEQ ID NO: 1246062 - RNA, 19 nt, Homo sapiens
  misc_RNA (1)...(19): siRNA sense strand
ggaagcagauccagaagau

SEQ ID NO: 1246063 - RNA, 19 nt, Homo sapiens
  misc_RNA (1)...(19): siRNA sense strand
guaaagagaaaccaucuaa

SEQ ID NO: 1246064 - RNA, 19 nt, Homo sapiens
  misc_RNA (1)...(19): siRNA sense strand
gaagccaccuacaaagaaa

SEQ ID NO: 1246065 - RNA, 19 nt, Homo sapiens
  misc_RNA (1)...(19): siRNA sense strand
aaacaauuccuccugauua

SEQ ID NO: 1246066 - RNA, 19 nt, Homo sapiens
  misc_RNA (1)...(19): siRNA sense strand
ggagaaggccaaagaagaa

SEQ ID NO: 1246067 - RNA, 19 nt, Homo sapiens
  misc_RNA (1)...(19): siRNA sense strand
gaaaaccugugauggauaa

SEQ ID NO: 1246068 - RNA, 19 nt, Homo sapiens
  misc_RNA (1)...(19): siRNA sense strand
caaaaugcuucaucucuua

SEQ ID NO: 1246069 - RNA, 19 nt, Homo sapiens
  misc_RNA (1)...(19): siRNA sense strand
gaaacaaucccaucugagu

SEQ ID NO: 1246070 - RNA, 19 nt, Homo sapiens
  misc_RNA (1)...(19): siRNA sense strand
acaaaccaauggaagauaa

SEQ ID NO: 1246071 - RNA, 19 nt, Homo sapiens
  misc_RNA (1)...(19): siRNA sense strand
gaacagcuuccacccauga

SEQ ID NO: 1246072 - RNA, 19 nt, Homo sapiens
  misc_RNA (1)...(19): siRNA sense strand
gaaacaauuccuccugauu

SEQ ID NO: 1246073 - RNA, 19 nt, Homo sapiens
  misc_RNA (1)...(19): siRNA sense strand
agaaagagaugacacuauc

SEQ ID NO: 1246074 - RNA, 19 nt, Homo sapiens
  misc_RNA (1)...(19): siRNA sense strand
uaaacucucugacagucua

SEQ ID NO: 1246075 - RNA, 19 nt, Homo sapiens
  misc_RNA (1)...(19): siRNA sense strand
acagaaaccucacagaaca

SEQ ID NO: 1246076 - RNA, 19 nt, Homo sapiens
  misc_RNA (1)...(19): siRNA sense strand
gaacaaaccaauggaagau

SEQ ID NO: 1246077 - RNA, 19 nt, Homo sapiens
  misc_RNA (1)...(19): siRNA sense strand
ggucaaggauaaagaugga

SEQ ID NO: 1246078 - RNA, 19 nt, Homo sapiens
  misc_RNA (1)...(19): siRNA sense strand
ggacaggacaaaccaguga

SEQ ID NO: 1246079 - RNA, 19 nt, Homo sapiens
  misc_RNA (1)...(19): siRNA sense strand
gagacaagcuuggagaaag

SEQ ID NO: 1246080 - RNA, 19 nt, Homo sapiens
  misc_RNA (1)...(19): siRNA sense strand
ugaccggucugaauguaaa

SEQ ID NO: 1246081 - RNA, 19 nt, Homo sapiens
  misc_RNA (1)...(19): siRNA sense strand
ccaaagcaccuaagaaugg

SEQ ID NO: 1246082 - RNA, 19 nt, Homo sapiens
  misc_RNA (1)...(19): siRNA sense strand
ugucggaccuccaugugua

SEQ ID NO: 1246083 - RNA, 19 nt, Homo sapiens
  misc_RNA (1)...(19): siRNA sense strand
caaagaagaagaccgugaa

SEQ ID NO: 1246084 - RNA, 19 nt, Homo sapiens
  misc_RNA (1)...(19): siRNA sense strand
agacaagcuuggagaaaga

SEQ ID NO: 1246085 - RNA, 19 nt, Homo sapiens
  misc_RNA (1)...(19): siRNA sense strand
aaagaaaccugcagaugac

SEQ ID NO: 1246086 - RNA, 19 nt, Homo sapiens
  misc_RNA (1)...(19): siRNA sense strand
gcaaagacaacagaggaaa

SEQ ID NO: 1246087 - RNA, 19 nt, Homo sapiens
  misc_RNA (1)...(19): siRNA sense strand
ggaccuccauguguaguau

SEQ ID NO: 1246088 - RNA, 19 nt, Homo sapiens
  misc_RNA (1)...(19): siRNA sense strand
gagaaagagaugacacuau

SEQ ID NO: 1246089 - RNA, 19 nt, Homo sapiens
  misc_RNA (1)...(19): siRNA sense strand
gaugaugccuuggauaaac

SEQ ID NO: 1246090 - RNA, 19 nt, Homo sapiens
  misc_RNA (1)...(19): siRNA sense strand
aaaggaagcagauccagaa

SEQ ID NO: 1246091 - RNA, 19 nt, Homo sapiens
  misc_RNA (1)...(19): siRNA sense strand
ugacaaagaccucgaugau

SEQ ID NO: 1246092 - RNA, 19 nt, Homo sapiens
  misc_RNA (1)...(19): siRNA sense strand
gugaaaagcuuggugaaaa

SEQ ID NO: 1246093 - RNA, 19 nt, Homo sapiens
  misc_RNA (1)...(19): siRNA sense strand
uggauaaagucaaggagaa

SEQ ID NO: 1246094 - RNA, 19 nt, Homo sapiens
  misc_RNA (1)...(19): siRNA sense strand
caaagcaccuaagaaugga

SEQ ID NO: 1246095 - RNA, 19 nt, Homo sapiens
  misc_RNA (1)...(19): siRNA sense strand
cuacagaaaccucacagaa

SEQ ID NO: 1246096 - RNA, 19 nt, Homo sapiens
  misc_RNA (1)...(19): siRNA sense strand
gaccuccgcucaauuaagg

SEQ ID NO: 1246097 - RNA, 19 nt, Homo sapiens
  misc_RNA (1)...(19): siRNA sense strand
gccagaugaugcuguagaa

SEQ ID NO: 1246098 - RNA, 19 nt, Homo sapiens
  misc_RNA (1)...(19): siRNA sense strand
gaacacagcaaaggauaag

SEQ ID NO: 1246099 - RNA, 19 nt, Homo sapiens
  misc_RNA (1)...(19): siRNA sense strand
ucaaggagaaggccaaaga

SEQ ID NO: 1246100 - RNA, 19 nt, Homo sapiens
  misc_RNA (1)...(19): siRNA sense strand
ggagaaagagaugacacua

SEQ ID NO: 1246101 - RNA, 19 nt, Homo sapiens
  misc_RNA (1)...(19): siRNA sense strand
ggagguaaagcgaaggauu

SEQ ID NO: 1246102 - RNA, 19 nt, Homo sapiens
  misc_RNA (1)...(19): siRNA sense strand
aaacaaucccaucugagua

SEQ ID NO: 1246103 - RNA, 19 nt, Homo sapiens
  misc_RNA (1)...(19): siRNA sense strand
caaaggauaagugcaagaa

SEQ ID NO: 1246104 - RNA, 19 nt, Homo sapiens
  misc_RNA (1)...(19): siRNA sense strand
gcgaaggauucagcaaaga

SEQ ID NO: 1246105 - RNA, 19 nt, Homo sapiens
  misc_RNA (1)...(19): siRNA sense strand
ugacccagaugagaacaaa

SEQ ID NO: 1246106 - RNA, 19 nt, Homo sapiens
  misc_RNA (1)...(19): siRNA sense strand
gagguaaagcgaaggauuc

SEQ ID NO: 1246107 - RNA, 19 nt, Homo sapiens
  misc_RNA (1)...(19): siRNA sense strand
uaucccaccugaauacaga

SEQ ID NO: 1246108 - RNA, 19 nt, Homo sapiens
  misc_RNA (1)...(19): siRNA sense strand
gaugagaacaaaccaaugg

SEQ ID NO: 1246109 - RNA, 19 nt, Homo sapiens
  misc_RNA (1)...(19): siRNA sense strand
auacagacaucuccuggau

SEQ ID NO: 1246110 - RNA, 19 nt, Homo sapiens
  misc_RNA (1)...(19): siRNA sense strand
gaaguguggugaggaugau

SEQ ID NO: 1246111 - RNA, 19 nt, Homo sapiens
  misc_RNA (1)...(19): siRNA sense strand
ccaauggaagauaaaguaa

SEQ ID NO: 1246112 - RNA, 19 nt, Homo sapiens
  misc_RNA (1)...(19): siRNA sense strand
cagcaaaggauaagugcaa

SEQ ID NO: 1246113 - RNA, 19 nt, Homo sapiens
  misc_RNA (1)...(19): siRNA sense strand
aacaauuccuccugauuau

SEQ ID NO: 1246114 - RNA, 19 nt, Homo sapiens
  misc_RNA (1)...(19): siRNA sense strand
cagaacacagcaaaggaua

SEQ ID NO: 1246115 - RNA, 19 nt, Homo sapiens
  misc_RNA (1)...(19): siRNA sense strand
ugaagccaccuacaaagaa

SEQ ID NO: 1246116 - RNA, 19 nt, Homo sapiens
  misc_RNA (1)...(19): siRNA sense strand
ggauaaagauggaaaacca

SEQ ID NO: 1246117 - RNA, 19 nt, Homo sapiens
  misc_RNA (1)...(19): siRNA sense strand
ggaagauaaaguaaaggaa

SEQ ID NO: 1246118 - RNA, 19 nt, Homo sapiens
  misc_RNA (1)...(19): siRNA sense strand
caauuaaggaagucgauga

SEQ ID NO: 1246119 - RNA, 19 nt, Homo sapiens
  misc_RNA (1)...(19): siRNA sense strand
gaaaccaucuaagccaacu

SEQ ID NO: 1246120 - RNA, 19 nt, Homo sapiens
  misc_RNA (1)...(19): siRNA sense strand
ugccaucucugaagugguu

SEQ ID NO: 1246121 - RNA, 19 nt, Homo sapiens
  misc_RNA (1)...(19): siRNA sense strand
ucgaugaugccuuggauaa

SEQ ID NO: 1246122 - RNA, 19 nt, Homo sapiens
  misc_RNA (1)...(19): siRNA sense strand
gacacuaucccaccugaau

SEQ ID NO: 1246123 - RNA, 19 nt, Homo sapiens
  misc_RNA (1)...(19): siRNA sense strand
gugaagccaccuacaaaga

SEQ ID NO: 1246124 - RNA, 19 nt, Homo sapiens
  misc_RNA (1)...(19): siRNA sense strand
ugaggaugaugaaacaauc

SEQ ID NO: 1246125 - RNA, 19 nt, Homo sapiens
  misc_RNA (1)...(19): siRNA sense strand
gaaggauucagcaaagaca

SEQ ID NO: 1246126 - RNA, 19 nt, Homo sapiens
  misc_RNA (1)...(19): siRNA sense strand
ucaaagaaaccugcagaug

SEQ ID NO: 1246127 - RNA, 19 nt, Homo sapiens
  misc_RNA (1)...(19): siRNA sense strand
gacaaagaccucgaugaug

SEQ ID NO: 1246128 - RNA, 19 nt, Homo sapiens
  misc_RNA (1)...(19): siRNA sense strand
gaagaggucaaggauaaag

SEQ ID NO: 1246129 - RNA, 19 nt, Homo sapiens
  misc_RNA (1)...(19): siRNA sense strand
gauuagaagaggucaagga

SEQ ID NO: 1246130 - RNA, 19 nt, Homo sapiens
  misc_RNA (1)...(19): siRNA sense strand
caauuccuccugauuauag

SEQ ID NO: 1246131 - RNA, 19 nt, Homo sapiens
  misc_RNA (1)...(19): siRNA sense strand
caaggagaaggccaaagaa

SEQ ID NO: 1246132 - RNA, 19 nt, Homo sapiens
  misc_RNA (1)...(19): siRNA sense strand
augaaacaaucccaucuga

SEQ ID NO: 1246133 - RNA, 19 nt, Homo sapiens
  misc_RNA (1)...(19): siRNA sense strand
gcaaaggauaagugcaaga

SEQ ID NO: 1246134 - RNA, 19 nt, Homo sapiens
  misc_RNA (1)...(19): siRNA sense strand
cagugaagccaccuacaaa

SEQ ID NO: 1246135 - RNA, 19 nt, Homo sapiens
  misc_RNA (1)...(19): siRNA sense strand
ccagugaagccaccuacaa

SEQ ID NO: 1246136 - RNA, 19 nt, Homo sapiens
  misc_RNA (1)...(19): siRNA sense strand
ggauaaacucucugacagu

SEQ ID NO: 1246137 - RNA, 19 nt, Homo sapiens
  misc_RNA (1)...(19): siRNA sense strand
ggucugaauguaaagagaa

SEQ ID NO: 1246138 - RNA, 19 nt, Homo sapiens
  misc_RNA (1)...(19): siRNA sense strand
cagaugagaacaaaccaau

SEQ ID NO: 1246139 - RNA, 19 nt, Homo sapiens
  misc_RNA (1)...(19): siRNA sense strand
gaaaccugcagaugaccaa

SEQ ID NO: 1246140 - RNA, 19 nt, Homo sapiens
  misc_RNA (1)...(19): siRNA sense strand
acacuaucccaccugaaua

SEQ ID NO: 1246141 - RNA, 19 nt, Homo sapiens
  misc_RNA (1)...(19): siRNA sense strand
agagaaguguggugaggau

SEQ ID NO: 1246142 - RNA, 19 nt, Homo sapiens
  misc_RNA (1)...(19): siRNA sense strand
caaaccaauggaagauaaa

SEQ ID NO: 1246143 - RNA, 19 nt, Homo sapiens
  misc_RNA (1)...(19): siRNA sense strand
agaacaaaccaauggaaga

SEQ ID NO: 1246144 - RNA, 19 nt, Homo sapiens
  misc_RNA (1)...(19): siRNA sense strand
ccacggauaaagauggaaa

SEQ ID NO: 1246145 - RNA, 19 nt, Homo sapiens
  misc_RNA (1)...(19): siRNA sense strand
aaagagaaaccaucuaagc

SEQ ID NO: 1246146 - RNA, 19 nt, Homo sapiens
  misc_RNA (1)...(19): siRNA sense strand
gcuccaaagcaccuaagaa

SEQ ID NO: 1246147 - RNA, 19 nt, Homo sapiens
  misc_RNA (1)...(19): siRNA sense strand
caaaagagucuaaggaaca

SEQ ID NO: 1246148 - RNA, 19 nt, Homo sapiens
  misc_RNA (1)...(19): siRNA sense strand
ucaaggauaaagauggaaa

SEQ ID NO: 1246149 - RNA, 19 nt, Homo sapiens
  misc_RNA (1)...(19): siRNA sense strand
agaaacaauuccuccugau

SEQ ID NO: 1246150 - RNA, 19 nt, Homo sapiens
  misc_RNA (1)...(19): siRNA sense strand
gaagauggaaaaccuguga

SEQ ID NO: 1246151 - RNA, 19 nt, Homo sapiens
  misc_RNA (1)...(19): siRNA sense strand
caucuaagccaacugaaaa

SEQ ID NO: 1246152 - RNA, 19 nt, Homo sapiens
  misc_RNA (1)...(19): siRNA sense strand
gucugaauguaaagagaaa

SEQ ID NO: 1246153 - RNA, 19 nt, Homo sapiens
  misc_RNA (1)...(19): siRNA sense strand
accaauggaagauaaagua

SEQ ID NO: 1246154 - RNA, 19 nt, Homo sapiens
  misc_RNA (1)...(19): siRNA sense strand
ccaucuaagccaacugaaa

SEQ ID NO: 1246155 - RNA, 19 nt, Homo sapiens
  misc_RNA (1)...(19): siRNA sense strand
ucagaggauucaaagaaac

SEQ ID NO: 1246156 - RNA, 19 nt, Homo sapiens
  misc_RNA (1)...(19): siRNA sense strand
aucagaggauucaaagaaa

SEQ ID NO: 1246157 - RNA, 19 nt, Homo sapiens
  misc_RNA (1)...(19): siRNA sense strand
ccaccugaauacagacauc

SEQ ID NO: 1246158 - RNA, 19 nt, Homo sapiens
  misc_RNA (1)...(19): siRNA sense strand
aagcgaaggauucagcaaa

SEQ ID NO: 1246159 - RNA, 19 nt, Homo sapiens
  misc_RNA (1)...(19): siRNA sense strand
uagaagaggucaaggauaa

SEQ ID NO: 1246160 - RNA, 19 nt, Homo sapiens
  misc_RNA (1)...(19): siRNA sense strand
gaaagccacuccugccaaa

SEQ ID NO: 1246161 - RNA, 19 nt, Homo sapiens
  misc_RNA (1)...(19): siRNA sense strand
caaagaaaccugcagauga

SEQ ID NO: 1246162 - RNA, 19 nt, Homo sapiens
  misc_RNA (1)...(19): siRNA sense strand
ggaagcagauccagaagau

SEQ ID NO: 1246163 - RNA, 19 nt, Homo sapiens
  misc_RNA (1)...(19): siRNA sense strand
guaaagagaaaccaucuaa

SEQ ID NO: 1246164 - RNA, 19 nt, Homo sapiens
  misc_RNA (1)...(19): siRNA sense strand
gaagccaccuacaaagaaa

SEQ ID NO: 1246165 - RNA, 19 nt, Homo sapiens
  misc_RNA (1)...(19): siRNA sense strand
aaacaauuccuccugauua

SEQ ID NO: 1246166 - RNA, 19 nt, Homo sapiens
  misc_RNA (1)...(19): siRNA sense strand
ggagaaggccaaagaagaa

SEQ ID NO: 1246167 - RNA, 19 nt, Homo sapiens
  misc_RNA (1)...(19): siRNA sense strand
gaaaaccugugauggauaa

SEQ ID NO: 1246168 - RNA, 19 nt, Homo sapiens
  misc_RNA (1)...(19): siRNA sense strand
caaaaugcuucaucucuua

SEQ ID NO: 1246169 - RNA, 19 nt, Homo sapiens
  misc_RNA (1)...(19): siRNA sense strand
gaaacaaucccaucugagu

SEQ ID NO: 1246170 - RNA, 19 nt, Homo sapiens
  misc_RNA (1)...(19): siRNA sense strand
acaaaccaauggaagauaa

SEQ ID NO: 1246171 - RNA, 19 nt, Homo sapiens
  misc_RNA (1)...(19): siRNA sense strand
gaacagcuuccacccauga

SEQ ID NO: 1246172 - RNA, 19 nt, Homo sapiens
  misc_RNA (1)...(19): siRNA sense strand
gaaacaauuccuccugauu

SEQ ID NO: 1246173 - RNA, 19 nt, Homo sapiens
  misc_RNA (1)...(19): siRNA sense strand
agaaagagaugacacuauc

SEQ ID NO: 1246174 - RNA, 19 nt, Homo sapiens
  misc_RNA (1)...(19): siRNA sense strand
uaaacucucugacagucua

SEQ ID NO: 1246175 - RNA, 19 nt, Homo sapiens
  misc_RNA (1)...(19): siRNA sense strand
acagaaaccucacagaaca

SEQ ID NO: 1246176 - RNA, 19 nt, Homo sapiens
  misc_RNA (1)...(19): siRNA sense strand
gaacaaaccaauggaagau

SEQ ID NO: 1246177 - RNA, 19 nt, Homo sapiens
  misc_RNA (1)...(19): siRNA sense strand
ggucaaggauaaagaugga

SEQ ID NO: 1246178 - RNA, 19 nt, Homo sapiens
  misc_RNA (1)...(19): siRNA sense strand
ggacaggacaaaccaguga

SEQ ID NO: 1246179 - RNA, 19 nt, Homo sapiens
  misc_RNA (1)...(19): siRNA sense strand
gagacaagcuuggagaaag

SEQ ID NO: 1246180 - RNA, 19 nt, Homo sapiens
  misc_RNA (1)...(19): siRNA sense strand
ugaccggucugaauguaaa

SEQ ID NO: 1246181 - RNA, 19 nt, Homo sapiens
  misc_RNA (1)...(19): siRNA sense strand
ccaaagcaccuaagaaugg

SEQ ID NO: 1246182 - RNA, 19 nt, Homo sapiens
  misc_RNA (1)...(19): siRNA sense strand
ugucggaccuccaugugua

SEQ ID NO: 1246183 - RNA, 19 nt, Homo sapiens
  misc_RNA (1)...(19): siRNA sense strand
caaagaagaagaccgugaa

SEQ ID NO: 1246184 - RNA, 19 nt, Homo sapiens
  misc_RNA (1)...(19): siRNA sense strand
agacaagcuuggagaaaga

SEQ ID NO: 1246185 - RNA, 19 nt, Homo sapiens
  misc_RNA (1)...(19): siRNA sense strand
aaagaaaccugcagaugac

SEQ ID NO: 1246186 - RNA, 19 nt, Homo sapiens
  misc_RNA (1)...(19): siRNA sense strand
gcaaagacaacagaggaaa

SEQ ID NO: 1246187 - RNA, 19 nt, Homo sapiens
  misc_RNA (1)...(19): siRNA sense strand
ggaccuccauguguaguau

SEQ ID NO: 1246188 - RNA, 19 nt, Homo sapiens
  misc_RNA (1)...(19): siRNA sense strand
gagaaagagaugacacuau

SEQ ID NO: 1246189 - RNA, 19 nt, Homo sapiens
  misc_RNA (1)...(19): siRNA sense strand
gaugaugccuuggauaaac

SEQ ID NO: 1246190 - RNA, 19 nt, Homo sapiens
  misc_RNA (1)...(19): siRNA sense strand
aaaggaagcagauccagaa

SEQ ID NO: 1246191 - RNA, 19 nt, Homo sapiens
  misc_RNA (1)...(19): siRNA sense strand
ugacaaagaccucgaugau

SEQ ID NO: 1246192 - RNA, 19 nt, Homo sapiens
  misc_RNA (1)...(19): siRNA sense strand
gugaaaagcuuggugaaaa

SEQ ID NO: 1246193 - RNA, 19 nt, Homo sapiens
  misc_RNA (1)...(19): siRNA sense strand
uggauaaagucaaggagaa

SEQ ID NO: 1246194 - RNA, 19 nt, Homo sapiens
  misc_RNA (1)...(19): siRNA sense strand
caaagcaccuaagaaugga

SEQ ID NO: 1246195 - RNA, 19 nt, Homo sapiens
  misc_RNA (1)...(19): siRNA sense strand
cuacagaaaccucacagaa

SEQ ID NO: 1246196 - RNA, 19 nt, Homo sapiens
  misc_RNA (1)...(19): siRNA sense strand
gaccuccgcucaauuaagg

SEQ ID NO: 1246197 - RNA, 19 nt, Homo sapiens
  misc_RNA (1)...(19): siRNA sense strand
gccagaugaugcuguagaa

SEQ ID NO: 1246198 - RNA, 19 nt, Homo sapiens
  misc_RNA (1)...(19): siRNA sense strand
gaacacagcaaaggauaag

SEQ ID NO: 1246199 - RNA, 19 nt, Homo sapiens
  misc_RNA (1)...(19): siRNA sense strand
ucaaggagaaggccaaaga

SEQ ID NO: 1246200 - RNA, 19 nt, Homo sapiens
  misc_RNA (1)...(19): siRNA sense strand
ggagaaagagaugacacua

SEQ ID NO: 1246201 - RNA, 19 nt, Homo sapiens
  misc_RNA (1)...(19): siRNA sense strand
ggagguaaagcgaaggauu

SEQ ID NO: 1246202 - RNA, 19 nt, Homo sapiens
  misc_RNA (1)...(19): siRNA sense strand
aaacaaucccaucugagua

SEQ ID NO: 1246203 - RNA, 19 nt, Homo sapiens
  misc_RNA (1)...(19): siRNA sense strand
caaaggauaagugcaagaa

SEQ ID NO: 1246204 - RNA, 19 nt, Homo sapiens
  misc_RNA (1)...(19): siRNA sense strand
gcgaaggauucagcaaaga

SEQ ID NO: 1246205 - RNA, 19 nt, Homo sapiens
  misc_RNA (1)...(19): siRNA sense strand
ugacccagaugagaacaaa

SEQ ID NO: 1246206 - RNA, 19 nt, Homo sapiens
  misc_RNA (1)...(19): siRNA sense strand
gagguaaagcgaaggauuc

SEQ ID NO: 1246207 - RNA, 19 nt, Homo sapiens
  misc_RNA (1)...(19): siRNA sense strand
uaucccaccugaauacaga

SEQ ID NO: 1246208 - RNA, 19 nt, Homo sapiens
  misc_RNA (1)...(19): siRNA sense strand
gaugagaacaaaccaaugg

SEQ ID NO: 1246209 - RNA, 19 nt, Homo sapiens
  misc_RNA (1)...(19): siRNA sense strand
auacagacaucuccuggau

SEQ ID NO: 1246210 - RNA, 19 nt, Homo sapiens
  misc_RNA (1)...(19): siRNA sense strand
gaaguguggugaggaugau

SEQ ID NO: 1246211 - RNA, 19 nt, Homo sapiens
  misc_RNA (1)...(19): siRNA sense strand
ccaauggaagauaaaguaa

SEQ ID NO: 1246212 - RNA, 19 nt, Homo sapiens
  misc_RNA (1)...(19): siRNA sense strand
cagcaaaggauaagugcaa

SEQ ID NO: 1246213 - RNA, 19 nt, Homo sapiens
  misc_RNA (1)...(19): siRNA sense strand
aacaauuccuccugauuau

SEQ ID NO: 1246214 - RNA, 19 nt, Homo sapiens
  misc_RNA (1)...(19): siRNA sense strand
cagaacacagcaaaggaua

SEQ ID NO: 1246215 - RNA, 19 nt, Homo sapiens
  misc_RNA (1)...(19): siRNA sense strand
ugaagccaccuacaaagaa

SEQ ID NO: 1246216 - RNA, 19 nt, Homo sapiens
  misc_RNA (1)...(19): siRNA sense strand
ggauaaagauggaaaacca

SEQ ID NO: 1246217 - RNA, 19 nt, Homo sapiens
  misc_RNA (1)...(19): siRNA sense strand
ggaagauaaaguaaaggaa

SEQ ID NO: 1246218 - RNA, 19 nt, Homo sapiens
  misc_RNA (1)...(19): siRNA sense strand
caauuaaggaagucgauga

SEQ ID NO: 1246219 - RNA, 19 nt, Homo sapiens
  misc_RNA (1)...(19): siRNA sense strand
gaaaccaucuaagccaacu

SEQ ID NO: 1246220 - RNA, 19 nt, Homo sapiens
  misc_RNA (1)...(19): siRNA sense strand
ugccaucucugaagugguu

SEQ ID NO: 1246221 - RNA, 19 nt, Homo sapiens
  misc_RNA (1)...(19): siRNA sense strand
ucgaugaugccuuggauaa

SEQ ID NO: 1246222 - RNA, 19 nt, Homo sapiens
  misc_RNA (1)...(19): siRNA sense strand
gacacuaucccaccugaau

SEQ ID NO: 1246223 - RNA, 19 nt, Homo sapiens
  misc_RNA (1)...(19): siRNA sense strand
gugaagccaccuacaaaga

SEQ ID NO: 1246224 - RNA, 19 nt, Homo sapiens
  misc_RNA (1)...(19): siRNA sense strand
ugaggaugaugaaacaauc

SEQ ID NO: 1246225 - RNA, 19 nt, Homo sapiens
  misc_RNA (1)...(19): siRNA sense strand
gaaggauucagcaaagaca

SEQ ID NO: 1246226 - RNA, 19 nt, Homo sapiens
  misc_RNA (1)...(19): siRNA sense strand
ucaaagaaaccugcagaug

SEQ ID NO: 1246227 - RNA, 19 nt, Homo sapiens
  misc_RNA (1)...(19): siRNA sense strand
gacaaagaccucgaugaug

SEQ ID NO: 1246228 - RNA, 19 nt, Homo sapiens
  misc_RNA (1)...(19): siRNA sense strand
gaagaggucaaggauaaag

SEQ ID NO: 1246229 - RNA, 19 nt, Homo sapiens
  misc_RNA (1)...(19): siRNA sense strand
gauuagaagaggucaagga

SEQ ID NO: 1246230 - RNA, 19 nt, Homo sapiens
  misc_RNA (1)...(19): siRNA sense strand
caauuccuccugauuauag

SEQ ID NO: 1246231 - RNA, 19 nt, Homo sapiens
  misc_RNA (1)...(19): siRNA sense strand
caaggagaaggccaaagaa

SEQ ID NO: 1246232 - RNA, 19 nt, Homo sapiens
  misc_RNA (1)...(19): siRNA sense strand
augaaacaaucccaucuga

SEQ ID NO: 1246233 - RNA, 19 nt, Homo sapiens
  misc_RNA (1)...(19): siRNA sense strand
gcaaaggauaagugcaaga

SEQ ID NO: 1246234 - RNA, 19 nt, Homo sapiens
  misc_RNA (1)...(19): siRNA sense strand
cagugaagccaccuacaaa

SEQ ID NO: 1246235 - RNA, 19 nt, Homo sapiens
  misc_RNA (1)...(19): siRNA sense strand
ccagugaagccaccuacaa

SEQ ID NO: 1246236 - RNA, 19 nt, Homo sapiens
  misc_RNA (1)...(19): siRNA sense strand
ggauaaacucucugacagu

SEQ ID NO: 1246237 - RNA, 19 nt, Homo sapiens
  misc_RNA (1)...(19): siRNA sense strand
ggucugaauguaaagagaa

SEQ ID NO: 1246238 - RNA, 19 nt, Homo sapiens
  misc_RNA (1)...(19): siRNA sense strand
cagaugagaacaaaccaau

SEQ ID NO: 1246239 - RNA, 19 nt, Homo sapiens
  misc_RNA (1)...(19): siRNA sense strand
gaaaccugcagaugaccaa

SEQ ID NO: 1246240 - RNA, 19 nt, Homo sapiens
  misc_RNA (1)...(19): siRNA sense strand
acacuaucccaccugaaua

SEQ ID NO: 1246241 - RNA, 19 nt, Homo sapiens
  misc_RNA (1)...(19): siRNA sense strand
agagaaguguggugaggau

SEQ ID NO: 1246242 - RNA, 19 nt, Homo sapiens
  misc_RNA (1)...(19): siRNA sense strand
caaaccaauggaagauaaa

SEQ ID NO: 1246243 - RNA, 19 nt, Homo sapiens
  misc_RNA (1)...(19): siRNA sense strand
agaacaaaccaauggaaga

SEQ ID NO: 1246244 - RNA, 19 nt, Homo sapiens
  misc_RNA (1)...(19): siRNA sense strand
ccacggauaaagauggaaa

SEQ ID NO: 1246245 - RNA, 19 nt, Homo sapiens
  misc_RNA (1)...(19): siRNA sense strand
aaagagaaaccaucuaagc

SEQ ID NO: 1246246 - RNA, 19 nt, Homo sapiens
  misc_RNA (1)...(19): siRNA sense strand
gcuccaaagcaccuaagaa

SEQ ID NO: 1246247 - RNA, 19 nt, Homo sapiens
  misc_RNA (1)...(19): siRNA sense strand
caaaagagucuaaggaaca

SEQ ID NO: 1246248 - RNA, 19 nt, Homo sapiens
  misc_RNA (1)...(19): siRNA sense strand
ucaaggauaaagauggaaa

SEQ ID NO: 1246249 - RNA, 19 nt, Homo sapiens
  misc_RNA (1)...(19): siRNA sense strand
agaaacaauuccuccugau

SEQ ID NO: 1246250 - RNA, 19 nt, Homo sapiens
  misc_RNA (1)...(19): siRNA sense strand
gaagauggaaaaccuguga

SEQ ID NO: 1246251 - RNA, 19 nt, Homo sapiens
  misc_RNA (1)...(19): siRNA sense strand
caucuaagccaacugaaaa

SEQ ID NO: 1246252 - RNA, 19 nt, Homo sapiens
  misc_RNA (1)...(19): siRNA sense strand
gucugaauguaaagagaaa

SEQ ID NO: 1246253 - RNA, 19 nt, Homo sapiens
  misc_RNA (1)...(19): siRNA sense strand
accaauggaagauaaagua

SEQ ID NO: 1246254 - RNA, 19 nt, Homo sapiens
  misc_RNA (1)...(19): siRNA sense strand
ccaucuaagccaacugaaa

SEQ ID NO: 1246255 - RNA, 19 nt, Homo sapiens
  misc_RNA (1)...(19): siRNA sense strand
ucagaggauucaaagaaac

SEQ ID NO: 1246256 - RNA, 19 nt, Homo sapiens
  misc_RNA (1)...(19): siRNA sense strand
aucagaggauucaaagaaa

SEQ ID NO: 1246257 - RNA, 19 nt, Homo sapiens
  misc_RNA (1)...(19): siRNA sense strand
ccaccugaauacagacauc

SEQ ID NO: 1246258 - RNA, 19 nt, Homo sapiens
  misc_RNA (1)...(19): siRNA sense strand
aagcgaaggauucagcaaa

SEQ ID NO: 1246259 - RNA, 19 nt, Homo sapiens
  misc_RNA (1)...(19): siRNA sense strand
uagaagaggucaaggauaa

SEQ ID NO: 1246260 - RNA, 19 nt, Homo sapiens
  misc_RNA (1)...(19): siRNA sense strand
gaaagccacuccugccaaa

SEQ ID NO: 1246261 - RNA, 19 nt, Homo sapiens
  misc_RNA (1)...(19): siRNA sense strand
caaagaaaccugcagauga

SEQ ID NO: 1246262 - RNA, 19 nt, Homo sapiens
  misc_RNA (1)...(19): siRNA sense strand
ggaagcagauccagaagau

SEQ ID NO: 1246263 - RNA, 19 nt, Homo sapiens
  misc_RNA (1)...(19): siRNA sense strand
guaaagagaaaccaucuaa

SEQ ID NO: 1246264 - RNA, 19 nt, Homo sapiens
  misc_RNA (1)...(19): siRNA sense strand
gaagccaccuacaaagaaa

SEQ ID NO: 1246265 - RNA, 19 nt, Homo sapiens
  misc_RNA (1)...(19): siRNA sense strand
aaacaauuccuccugauua

SEQ ID NO: 1246266 - RNA, 19 nt, Homo sapiens
  misc_RNA (1)...(19): siRNA sense strand
ggagaaggccaaagaagaa

SEQ ID NO: 1246267 - RNA, 19 nt, Homo sapiens
  misc_RNA (1)...(19): siRNA sense strand
gaaaaccugugauggauaa

SEQ ID NO: 1246268 - RNA, 19 nt, Homo sapiens
  misc_RNA (1)...(19): siRNA sense strand
caaaaugcuucaucucuua

SEQ ID NO: 1246269 - RNA, 19 nt, Homo sapiens
  misc_RNA (1)...(19): siRNA sense strand
gaaacaaucccaucugagu

SEQ ID NO: 1246270 - RNA, 19 nt, Homo sapiens
  misc_RNA (1)...(19): siRNA sense strand
acaaaccaauggaagauaa

SEQ ID NO: 1246271 - RNA, 19 nt, Homo sapiens
  misc_RNA (1)...(19): siRNA sense strand
gaacagcuuccacccauga

SEQ ID NO: 1246272 - RNA, 19 nt, Homo sapiens
  misc_RNA (1)...(19): siRNA sense strand
gaaacaauuccuccugauu

SEQ ID NO: 1246273 - RNA, 19 nt, Homo sapiens
  misc_RNA (1)...(19): siRNA sense strand
agaaagagaugacacuauc

SEQ ID NO: 1246274 - RNA, 19 nt, Homo sapiens
  misc_RNA (1)...(19): siRNA sense strand
uaaacucucugacagucua

SEQ ID NO: 1246275 - RNA, 19 nt, Homo sapiens
  misc_RNA (1)...(19): siRNA sense strand
acagaaaccucacagaaca

SEQ ID NO: 1246276 - RNA, 19 nt, Homo sapiens
  misc_RNA (1)...(19): siRNA sense strand
gaacaaaccaauggaagau

SEQ ID NO: 1246277 - RNA, 19 nt, Homo sapiens
  misc_RNA (1)...(19): siRNA sense strand
ggucaaggauaaagaugga

SEQ ID NO: 1246278 - RNA, 19 nt, Homo sapiens
  misc_RNA (1)...(19): siRNA sense strand
ggacaggacaaaccaguga

SEQ ID NO: 1246279 - RNA, 19 nt, Homo sapiens
  misc_RNA (1)...(19): siRNA sense strand
gagacaagcuuggagaaag

SEQ ID NO: 1246280 - RNA, 19 nt, Homo sapiens
  misc_RNA (1)...(19): siRNA sense strand
ugaccggucugaauguaaa

SEQ ID NO: 1246281 - RNA, 19 nt, Homo sapiens
  misc_RNA (1)...(19): siRNA sense strand
ccaaagcaccuaagaaugg

SEQ ID NO: 1246282 - RNA, 19 nt, Homo sapiens
  misc_RNA (1)...(19): siRNA sense strand
ugucggaccuccaugugua

SEQ ID NO: 1246283 - RNA, 19 nt, Homo sapiens
  misc_RNA (1)...(19): siRNA sense strand
caaagaagaagaccgugaa

SEQ ID NO: 1246284 - RNA, 19 nt, Homo sapiens
  misc_RNA (1)...(19): siRNA sense strand
agacaagcuuggagaaaga

SEQ ID NO: 1246285 - RNA, 19 nt, Homo sapiens
  misc_RNA (1)...(19): siRNA sense strand
aaagaaaccugcagaugac

SEQ ID NO: 1246286 - RNA, 19 nt, Homo sapiens
  misc_RNA (1)...(19): siRNA sense strand
gcaaagacaacagaggaaa

SEQ ID NO: 1246287 - RNA, 19 nt, Homo sapiens
  misc_RNA (1)...(19): siRNA sense strand
ggaccuccauguguaguau

SEQ ID NO: 1246288 - RNA, 19 nt, Homo sapiens
  misc_RNA (1)...(19): siRNA sense strand
gagaaagagaugacacuau

SEQ ID NO: 1246289 - RNA, 19 nt, Homo sapiens
  misc_RNA (1)...(19): siRNA sense strand
gaugaugccuuggauaaac

SEQ ID NO: 1246290 - RNA, 19 nt, Homo sapiens
  misc_RNA (1)...(19): siRNA sense strand
aaaggaagcagauccagaa

SEQ ID NO: 1246291 - RNA, 19 nt, Homo sapiens
  misc_RNA (1)...(19): siRNA sense strand
ugacaaagaccucgaugau

SEQ ID NO: 1246292 - RNA, 19 nt, Homo sapiens
  misc_RNA (1)...(19): siRNA sense strand
gugaaaagcuuggugaaaa

SEQ ID NO: 1246293 - RNA, 19 nt, Homo sapiens
  misc_RNA (1)...(19): siRNA sense strand
uggauaaagucaaggagaa

SEQ ID NO: 1246294 - RNA, 19 nt, Homo sapiens
  misc_RNA (1)...(19): siRNA sense strand
caaagcaccuaagaaugga

SEQ ID NO: 1246295 - RNA, 19 nt, Homo sapiens
  misc_RNA (1)...(19): siRNA sense strand
cuacagaaaccucacagaa

SEQ ID NO: 1246296 - RNA, 19 nt, Homo sapiens
  misc_RNA (1)...(19): siRNA sense strand
gccagaugaugcuguagaa

SEQ ID NO: 1246297 - RNA, 19 nt, Homo sapiens
  misc_RNA (1)...(19): siRNA sense strand
gaacacagcaaaggauaag

SEQ ID NO: 1246298 - RNA, 19 nt, Homo sapiens
  misc_RNA (1)...(19): siRNA sense strand
ucaaggagaaggccaaaga

SEQ ID NO: 1246299 - RNA, 19 nt, Homo sapiens
  misc_RNA (1)...(19): siRNA sense strand
aaacaaucccaucugagua

SEQ ID NO: 1246300 - RNA, 19 nt, Homo sapiens
  misc_RNA (1)...(19): siRNA sense strand
ggagguaaagcgaaggauu

SEQ ID NO: 1246301 - RNA, 19 nt, Homo sapiens
  misc_RNA (1)...(19): siRNA sense strand
ggagaaagagaugacacua

SEQ ID NO: 1246302 - RNA, 19 nt, Homo sapiens
  misc_RNA (1)...(19): siRNA sense strand
caaaggauaagugcaagaa

SEQ ID NO: 1246303 - RNA, 19 nt, Homo sapiens
  misc_RNA (1)...(19): siRNA sense strand
gcgaaggauucagcaaaga

SEQ ID NO: 1246304 - RNA, 19 nt, Homo sapiens
  misc_RNA (1)...(19): siRNA sense strand
ugacccagaugagaacaaa

SEQ ID NO: 1246305 - RNA, 19 nt, Homo sapiens
  misc_RNA (1)...(19): siRNA sense strand
gagguaaagcgaaggauuc

SEQ ID NO: 1246306 - RNA, 19 nt, Homo sapiens
  misc_RNA (1)...(19): siRNA sense strand
uaucccaccugaauacaga

SEQ ID NO: 1246307 - RNA, 19 nt, Homo sapiens
  misc_RNA (1)...(19): siRNA sense strand
gaugagaacaaaccaaugg

SEQ ID NO: 1246308 - RNA, 19 nt, Homo sapiens
  misc_RNA (1)...(19): siRNA sense strand
gaaguguggugaggaugau

SEQ ID NO: 1246309 - RNA, 19 nt, Homo sapiens
  misc_RNA (1)...(19): siRNA sense strand
auacagacaucuccuggau

SEQ ID NO: 1246310 - RNA, 19 nt, Homo sapiens
  misc_RNA (1)...(19): siRNA sense strand
ccaauggaagauaaaguaa

SEQ ID NO: 1246311 - RNA, 19 nt, Homo sapiens
  misc_RNA (1)...(19): siRNA sense strand
cagcaaaggauaagugcaa

SEQ ID NO: 1246312 - RNA, 19 nt, Homo sapiens
  misc_RNA (1)...(19): siRNA sense strand
aacaauuccuccugauuau

SEQ ID NO: 1246313 - RNA, 19 nt, Homo sapiens
  misc_RNA (1)...(19): siRNA sense strand
ggauaaagauggaaaacca

SEQ ID NO: 1246314 - RNA, 19 nt, Homo sapiens
  misc_RNA (1)...(19): siRNA sense strand
cagaacacagcaaaggaua

SEQ ID NO: 1246315 - RNA, 19 nt, Homo sapiens
  misc_RNA (1)...(19): siRNA sense strand
ugaagccaccuacaaagaa

SEQ ID NO: 1246316 - RNA, 19 nt, Homo sapiens
  misc_RNA (1)...(19): siRNA sense strand
ggaagauaaaguaaaggaa

SEQ ID NO: 1246317 - RNA, 19 nt, Homo sapiens
  misc_RNA (1)...(19): siRNA sense strand
gaaaccaucuaagccaacu

SEQ ID NO: 1246318 - RNA, 19 nt, Homo sapiens
  misc_RNA (1)...(19): siRNA sense strand
ugccaucucugaagugguu

SEQ ID NO: 1246319 - RNA, 19 nt, Homo sapiens
  misc_RNA (1)...(19): siRNA sense strand
ucgaugaugccuuggauaa

SEQ ID NO: 1246320 - RNA, 19 nt, Homo sapiens
  misc_RNA (1)...(19): siRNA sense strand
gacacuaucccaccugaau

SEQ ID NO: 1246321 - RNA, 19 nt, Homo sapiens
  misc_RNA (1)...(19): siRNA sense strand
gugaagccaccuacaaaga

SEQ ID NO: 1246322 - RNA, 19 nt, Homo sapiens
  misc_RNA (1)...(19): siRNA sense strand
caauuccuccugauuauag

SEQ ID NO: 1246323 - RNA, 19 nt, Homo sapiens
  misc_RNA (1)...(19): siRNA sense strand
gaaggauucagcaaagaca

SEQ ID NO: 1246324 - RNA, 19 nt, Homo sapiens
  misc_RNA (1)...(19): siRNA sense strand
ucaaagaaaccugcagaug

SEQ ID NO: 1246325 - RNA, 19 nt, Homo sapiens
  misc_RNA (1)...(19): siRNA sense strand
ugaggaugaugaaacaauc

SEQ ID NO: 1246326 - RNA, 19 nt, Homo sapiens
  misc_RNA (1)...(19): siRNA sense strand
gacaaagaccucgaugaug

SEQ ID NO: 1246327 - RNA, 19 nt, Homo sapiens
  misc_RNA (1)...(19): siRNA sense strand
gaagaggucaaggauaaag

SEQ ID NO: 1246328 - RNA, 19 nt, Homo sapiens
  misc_RNA (1)...(19): siRNA sense strand
gauuagaagaggucaagga

SEQ ID NO: 1246329 - RNA, 19 nt, Homo sapiens
  misc_RNA (1)...(19): siRNA sense strand
caaggagaaggccaaagaa

SEQ ID NO: 1246330 - RNA, 19 nt, Homo sapiens
  misc_RNA (1)...(19): siRNA sense strand
gcaaaggauaagugcaaga

SEQ ID NO: 1246331 - RNA, 19 nt, Homo sapiens
  misc_RNA (1)...(19): siRNA sense strand
cagugaagccaccuacaaa

SEQ ID NO: 1246332 - RNA, 19 nt, Homo sapiens
  misc_RNA (1)...(19): siRNA sense strand
ccagugaagccaccuacaa

SEQ ID NO: 1246333 - RNA, 19 nt, Homo sapiens
  misc_RNA (1)...(19): siRNA sense strand
ggauaaacucucugacagu

SEQ ID NO: 1246334 - RNA, 19 nt, Homo sapiens
  misc_RNA (1)...(19): siRNA sense strand
augaaacaaucccaucuga

SEQ ID NO: 1246335 - RNA, 19 nt, Homo sapiens
  misc_RNA (1)...(19): siRNA sense strand
ggucugaauguaaagagaa

SEQ ID NO: 1246336 - RNA, 19 nt, Homo sapiens
  misc_RNA (1)...(19): siRNA sense strand
agagaaguguggugaggau

SEQ ID NO: 1246337 - RNA, 19 nt, Homo sapiens
  misc_RNA (1)...(19): siRNA sense strand
gaaaccugcagaugaccaa

SEQ ID NO: 1246338 - RNA, 19 nt, Homo sapiens
  misc_RNA (1)...(19): siRNA sense strand
acacuaucccaccugaaua

SEQ ID NO: 1246339 - RNA, 19 nt, Homo sapiens
  misc_RNA (1)...(19): siRNA sense strand
caaaccaauggaagauaaa

SEQ ID NO: 1246340 - RNA, 19 nt, Homo sapiens
  misc_RNA (1)...(19): siRNA sense strand
cagaugagaacaaaccaau

SEQ ID NO: 1246341 - RNA, 19 nt, Homo sapiens
  misc_RNA (1)...(19): siRNA sense strand
ccacggauaaagauggaaa

SEQ ID NO: 1246342 - RNA, 19 nt, Homo sapiens
  misc_RNA (1)...(19): siRNA sense strand
agaacaaaccaauggaaga

SEQ ID NO: 1246343 - RNA, 19 nt, Homo sapiens
  misc_RNA (1)...(19): siRNA sense strand
gaagauggaaaaccuguga

SEQ ID NO: 1246344 - RNA, 19 nt, Homo sapiens
  misc_RNA (1)...(19): siRNA sense strand
gcuccaaagcaccuaagaa

SEQ ID NO: 1246345 - RNA, 19 nt, Homo sapiens
  misc_RNA (1)...(19): siRNA sense strand
aaagagaaaccaucuaagc

SEQ ID NO: 1246346 - RNA, 19 nt, Homo sapiens
  misc_RNA (1)...(19): siRNA sense strand
caaaagagucuaaggaaca

SEQ ID NO: 1246347 - RNA, 19 nt, Homo sapiens
  misc_RNA (1)...(19): siRNA sense strand
ucaaggauaaagauggaaa

SEQ ID NO: 1246348 - RNA, 19 nt, Homo sapiens
  misc_RNA (1)...(19): siRNA sense strand
agaaacaauuccuccugau

SEQ ID NO: 1246349 - RNA, 19 nt, Homo sapiens
  misc_RNA (1)...(19): siRNA sense strand
caucuaagccaacugaaaa

SEQ ID NO: 1246350 - RNA, 19 nt, Homo sapiens
  misc_RNA (1)...(19): siRNA sense strand
accaauggaagauaaagua

SEQ ID NO: 1246351 - RNA, 19 nt, Homo sapiens
  misc_RNA (1)...(19): siRNA sense strand
gucugaauguaaagagaaa

SEQ ID NO: 1246352 - RNA, 19 nt, Homo sapiens
  misc_RNA (1)...(19): siRNA sense strand
ccaucuaagccaacugaaa

SEQ ID NO: 1246353 - RNA, 19 nt, Homo sapiens
  misc_RNA (1)...(19): siRNA sense strand
ucagaggauucaaagaaac

SEQ ID NO: 1246354 - RNA, 19 nt, Homo sapiens
  misc_RNA (1)...(19): siRNA sense strand
aucagaggauucaaagaaa

SEQ ID NO: 1246355 - RNA, 19 nt, Homo sapiens
  misc_RNA (1)...(19): siRNA sense strand
ccaccugaauacagacauc

SEQ ID NO: 1246356 - RNA, 19 nt, Homo sapiens
  misc_RNA (1)...(19): siRNA sense strand
ugagaacaaaccaauggaa

SEQ ID NO: 1246357 - RNA, 19 nt, Homo sapiens
  misc_RNA (1)...(19): siRNA sense strand
aagcgaaggauucagcaaa

SEQ ID NO: 1246358 - RNA, 19 nt, Homo sapiens
  misc_RNA (1)...(19): siRNA sense strand
ccucacagaacacagcaaa

SEQ ID NO: 1246359 - RNA, 19 nt, Homo sapiens
  misc_RNA (1)...(19): siRNA sense strand
uagaagaggucaaggauaa

SEQ ID NO: 1246360 - RNA, 19 nt, Homo sapiens
  misc_RNA (1)...(19): siRNA sense strand
gaaagccacuccugccaaa

SEQ ID NO: 1246361 - RNA, 19 nt, Homo sapiens
  misc_RNA (1)...(19): siRNA sense strand
caaagaaaccugcagauga

SEQ ID NO: 1246362 - RNA, 19 nt, Homo sapiens
  misc_RNA (1)...(19): siRNA sense strand
ggaagcagauccagaagau

SEQ ID NO: 1246363 - RNA, 19 nt, Homo sapiens
  misc_RNA (1)...(19): siRNA sense strand
guaaagagaaaccaucuaa

SEQ ID NO: 1246364 - RNA, 19 nt, Homo sapiens
  misc_RNA (1)...(19): siRNA sense strand
gaagccaccuacaaagaaa

SEQ ID NO: 1246365 - RNA, 19 nt, Homo sapiens
  misc_RNA (1)...(19): siRNA sense strand
aaacaauuccuccugauua

SEQ ID NO: 1246366 - RNA, 19 nt, Homo sapiens
  misc_RNA (1)...(19): siRNA sense strand
ggagaaggccaaagaagaa

SEQ ID NO: 1246367 - RNA, 19 nt, Homo sapiens
  misc_RNA (1)...(19): siRNA sense strand
gaaaaccugugauggauaa

SEQ ID NO: 1246368 - RNA, 19 nt, Homo sapiens
  misc_RNA (1)...(19): siRNA sense strand
caaaaugcuucaucucuua

SEQ ID NO: 1246369 - RNA, 19 nt, Homo sapiens
  misc_RNA (1)...(19): siRNA sense strand
gaaacaaucccaucugagu

SEQ ID NO: 1246370 - RNA, 19 nt, Homo sapiens
  misc_RNA (1)...(19): siRNA sense strand
acaaaccaauggaagauaa

SEQ ID NO: 1246371 - RNA, 19 nt, Homo sapiens
  misc_RNA (1)...(19): siRNA sense strand
gaacagcuuccacccauga

SEQ ID NO: 1246372 - RNA, 19 nt, Homo sapiens
  misc_RNA (1)...(19): siRNA sense strand
gaaacaauuccuccugauu

SEQ ID NO: 1246373 - RNA, 19 nt, Homo sapiens
  misc_RNA (1)...(19): siRNA sense strand
agaaagagaugacacuauc

SEQ ID NO: 1246374 - RNA, 19 nt, Homo sapiens
  misc_RNA (1)...(19): siRNA sense strand
uaaacucucugacagucua

SEQ ID NO: 1246375 - RNA, 19 nt, Homo sapiens
  misc_RNA (1)...(19): siRNA sense strand
acagaaaccucacagaaca

SEQ ID NO: 1246376 - RNA, 19 nt, Homo sapiens
  misc_RNA (1)...(19): siRNA sense strand
gaacaaaccaauggaagau

SEQ ID NO: 1246377 - RNA, 19 nt, Homo sapiens
  misc_RNA (1)...(19): siRNA sense strand
ggucaaggauaaagaugga

SEQ ID NO: 1246378 - RNA, 19 nt, Homo sapiens
  misc_RNA (1)...(19): siRNA sense strand
ggacaggacaaaccaguga

SEQ ID NO: 1246379 - RNA, 19 nt, Homo sapiens
  misc_RNA (1)...(19): siRNA sense strand
gagacaagcuuggagaaag

SEQ ID NO: 1246380 - RNA, 19 nt, Homo sapiens
  misc_RNA (1)...(19): siRNA sense strand
ugaccggucugaauguaaa

SEQ ID NO: 1246381 - RNA, 19 nt, Homo sapiens
  misc_RNA (1)...(19): siRNA sense strand
ccaaagcaccuaagaaugg

SEQ ID NO: 1246382 - RNA, 19 nt, Homo sapiens
  misc_RNA (1)...(19): siRNA sense strand
ugucggaccuccaugugua

SEQ ID NO: 1246383 - RNA, 19 nt, Homo sapiens
  misc_RNA (1)...(19): siRNA sense strand
caaagaagaagaccgugaa

SEQ ID NO: 1246384 - RNA, 19 nt, Homo sapiens
  misc_RNA (1)...(19): siRNA sense strand
agacaagcuuggagaaaga

SEQ ID NO: 1246385 - RNA, 19 nt, Homo sapiens
  misc_RNA (1)...(19): siRNA sense strand
aaagaaaccugcagaugac

SEQ ID NO: 1246386 - RNA, 19 nt, Homo sapiens
  misc_RNA (1)...(19): siRNA sense strand
gcaaagacaacagaggaaa

SEQ ID NO: 1246387 - RNA, 19 nt, Homo sapiens
  misc_RNA (1)...(19): siRNA sense strand
ggaccuccauguguaguau

SEQ ID NO: 1246388 - RNA, 19 nt, Homo sapiens
  misc_RNA (1)...(19): siRNA sense strand
gagaaagagaugacacuau

SEQ ID NO: 1246389 - RNA, 19 nt, Homo sapiens
  misc_RNA (1)...(19): siRNA sense strand
gaugaugccuuggauaaac

SEQ ID NO: 1246390 - RNA, 19 nt, Homo sapiens
  misc_RNA (1)...(19): siRNA sense strand
aaaggaagcagauccagaa

SEQ ID NO: 1246391 - RNA, 19 nt, Homo sapiens
  misc_RNA (1)...(19): siRNA sense strand
ugacaaagaccucgaugau

SEQ ID NO: 1246392 - RNA, 19 nt, Homo sapiens
  misc_RNA (1)...(19): siRNA sense strand
gugaaaagcuuggugaaaa

SEQ ID NO: 1246393 - RNA, 19 nt, Homo sapiens
  misc_RNA (1)...(19): siRNA sense strand
uggauaaagucaaggagaa

SEQ ID NO: 1246394 - RNA, 19 nt, Homo sapiens
  misc_RNA (1)...(19): siRNA sense strand
caaagcaccuaagaaugga

SEQ ID NO: 1246395 - RNA, 19 nt, Homo sapiens
  misc_RNA (1)...(19): siRNA sense strand
cuacagaaaccucacagaa

SEQ ID NO: 1246396 - RNA, 19 nt, Homo sapiens
  misc_RNA (1)...(19): siRNA sense strand
gaccuccgcucaauuaagg

SEQ ID NO: 1246397 - RNA, 19 nt, Homo sapiens
  misc_RNA (1)...(19): siRNA sense strand
gccagaugaugcuguagaa

SEQ ID NO: 1246398 - RNA, 19 nt, Homo sapiens
  misc_RNA (1)...(19): siRNA sense strand
gaacacagcaaaggauaag

SEQ ID NO: 1246399 - RNA, 19 nt, Homo sapiens
  misc_RNA (1)...(19): siRNA sense strand
ucaaggagaaggccaaaga

SEQ ID NO: 1246400 - RNA, 19 nt, Homo sapiens
  misc_RNA (1)...(19): siRNA sense strand
ggagaaagagaugacacua

SEQ ID NO: 1246401 - RNA, 19 nt, Homo sapiens
  misc_RNA (1)...(19): siRNA sense strand
ggagguaaagcgaaggauu

SEQ ID NO: 1246402 - RNA, 19 nt, Homo sapiens
  misc_RNA (1)...(19): siRNA sense strand
aaacaaucccaucugagua

SEQ ID NO: 1246403 - RNA, 19 nt, Homo sapiens
  misc_RNA (1)...(19): siRNA sense strand
caaaggauaagugcaagaa

SEQ ID NO: 1246404 - RNA, 19 nt, Homo sapiens
  misc_RNA (1)...(19): siRNA sense strand
gcgaaggauucagcaaaga

SEQ ID NO: 1246405 - RNA, 19 nt, Homo sapiens
  misc_RNA (1)...(19): siRNA sense strand
ugacccagaugagaacaaa

SEQ ID NO: 1246406 - RNA, 19 nt, Homo sapiens
  misc_RNA (1)...(19): siRNA sense strand
gagguaaagcgaaggauuc

SEQ ID NO: 1246407 - RNA, 19 nt, Homo sapiens
  misc_RNA (1)...(19): siRNA sense strand
uaucccaccugaauacaga

SEQ ID NO: 1246408 - RNA, 19 nt, Homo sapiens
  misc_RNA (1)...(19): siRNA sense strand
gaugagaacaaaccaaugg

SEQ ID NO: 1246409 - RNA, 19 nt, Homo sapiens
  misc_RNA (1)...(19): siRNA sense strand
auacagacaucuccuggau

SEQ ID NO: 1246410 - RNA, 19 nt, Homo sapiens
  misc_RNA (1)...(19): siRNA sense strand
gaaguguggugaggaugau

SEQ ID NO: 1246411 - RNA, 19 nt, Homo sapiens
  misc_RNA (1)...(19): siRNA sense strand
ccaauggaagauaaaguaa

SEQ ID NO: 1246412 - RNA, 19 nt, Homo sapiens
  misc_RNA (1)...(19): siRNA sense strand
cagcaaaggauaagugcaa

SEQ ID NO: 1246413 - RNA, 19 nt, Homo sapiens
  misc_RNA (1)...(19): siRNA sense strand
aacaauuccuccugauuau

SEQ ID NO: 1246414 - RNA, 19 nt, Homo sapiens
  misc_RNA (1)...(19): siRNA sense strand
cagaacacagcaaaggaua

SEQ ID NO: 1246415 - RNA, 19 nt, Homo sapiens
  misc_RNA (1)...(19): siRNA sense strand
ugaagccaccuacaaagaa

SEQ ID NO: 1246416 - RNA, 19 nt, Homo sapiens
  misc_RNA (1)...(19): siRNA sense strand
ggauaaagauggaaaacca

SEQ ID NO: 1246417 - RNA, 19 nt, Homo sapiens
  misc_RNA (1)...(19): siRNA sense strand
ggaagauaaaguaaaggaa

SEQ ID NO: 1246418 - RNA, 19 nt, Homo sapiens
  misc_RNA (1)...(19): siRNA sense strand
caauuaaggaagucgauga

SEQ ID NO: 1246419 - RNA, 19 nt, Homo sapiens
  misc_RNA (1)...(19): siRNA sense strand
gaaaccaucuaagccaacu

SEQ ID NO: 1246420 - RNA, 19 nt, Homo sapiens
  misc_RNA (1)...(19): siRNA sense strand
ugccaucucugaagugguu

SEQ ID NO: 1246421 - RNA, 19 nt, Homo sapiens
  misc_RNA (1)...(19): siRNA sense strand
ucgaugaugccuuggauaa

SEQ ID NO: 1246422 - RNA, 19 nt, Homo sapiens
  misc_RNA (1)...(19): siRNA sense strand
gacacuaucccaccugaau

SEQ ID NO: 1246423 - RNA, 19 nt, Homo sapiens
  misc_RNA (1)...(19): siRNA sense strand
gugaagccaccuacaaaga

SEQ ID NO: 1246424 - RNA, 19 nt, Homo sapiens
  misc_RNA (1)...(19): siRNA sense strand
ugaggaugaugaaacaauc

SEQ ID NO: 1246425 - RNA, 19 nt, Homo sapiens
  misc_RNA (1)...(19): siRNA sense strand
gaaggauucagcaaagaca

SEQ ID NO: 1246426 - RNA, 19 nt, Homo sapiens
  misc_RNA (1)...(19): siRNA sense strand
ucaaagaaaccugcagaug

SEQ ID NO: 1246427 - RNA, 19 nt, Homo sapiens
  misc_RNA (1)...(19): siRNA sense strand
gacaaagaccucgaugaug

SEQ ID NO: 1246428 - RNA, 19 nt, Homo sapiens
  misc_RNA (1)...(19): siRNA sense strand
gaagaggucaaggauaaag

SEQ ID NO: 1246429 - RNA, 19 nt, Homo sapiens
  misc_RNA (1)...(19): siRNA sense strand
gauuagaagaggucaagga

SEQ ID NO: 1246430 - RNA, 19 nt, Homo sapiens
  misc_RNA (1)...(19): siRNA sense strand
caauuccuccugauuauag

SEQ ID NO: 1246431 - RNA, 19 nt, Homo sapiens
  misc_RNA (1)...(19): siRNA sense strand
caaggagaaggccaaagaa

SEQ ID NO: 1246432 - RNA, 19 nt, Homo sapiens
  misc_RNA (1)...(19): siRNA sense strand
augaaacaaucccaucuga

SEQ ID NO: 1246433 - RNA, 19 nt, Homo sapiens
  misc_RNA (1)...(19): siRNA sense strand
gcaaaggauaagugcaaga

SEQ ID NO: 1246434 - RNA, 19 nt, Homo sapiens
  misc_RNA (1)...(19): siRNA sense strand
cagugaagccaccuacaaa

SEQ ID NO: 1246435 - RNA, 19 nt, Homo sapiens
  misc_RNA (1)...(19): siRNA sense strand
ccagugaagccaccuacaa

SEQ ID NO: 1246436 - RNA, 19 nt, Homo sapiens
  misc_RNA (1)...(19): siRNA sense strand
ggauaaacucucugacagu

SEQ ID NO: 1246437 - RNA, 19 nt, Homo sapiens
  misc_RNA (1)...(19): siRNA sense strand
ggucugaauguaaagagaa

SEQ ID NO: 1246438 - RNA, 19 nt, Homo sapiens
  misc_RNA (1)...(19): siRNA sense strand
cagaugagaacaaaccaau

SEQ ID NO: 1246439 - RNA, 19 nt, Homo sapiens
  misc_RNA (1)...(19): siRNA sense strand
gaaaccugcagaugaccaa

SEQ ID NO: 1246440 - RNA, 19 nt, Homo sapiens
  misc_RNA (1)...(19): siRNA sense strand
acacuaucccaccugaaua

SEQ ID NO: 1246441 - RNA, 19 nt, Homo sapiens
  misc_RNA (1)...(19): siRNA sense strand
agagaaguguggugaggau

SEQ ID NO: 1246442 - RNA, 19 nt, Homo sapiens
  misc_RNA (1)...(19): siRNA sense strand
caaaccaauggaagauaaa

SEQ ID NO: 1246443 - RNA, 19 nt, Homo sapiens
  misc_RNA (1)...(19): siRNA sense strand
agaacaaaccaauggaaga

SEQ ID NO: 1246444 - RNA, 19 nt, Homo sapiens
  misc_RNA (1)...(19): siRNA sense strand
ccacggauaaagauggaaa

SEQ ID NO: 1246445 - RNA, 19 nt, Homo sapiens
  misc_RNA (1)...(19): siRNA sense strand
aaagagaaaccaucuaagc

SEQ ID NO: 1246446 - RNA, 19 nt, Homo sapiens
  misc_RNA (1)...(19): siRNA sense strand
gcuccaaagcaccuaagaa

SEQ ID NO: 1246447 - RNA, 19 nt, Homo sapiens
  misc_RNA (1)...(19): siRNA sense strand
caaaagagucuaaggaaca

SEQ ID NO: 1246448 - RNA, 19 nt, Homo sapiens
  misc_RNA (1)...(19): siRNA sense strand
ucaaggauaaagauggaaa

SEQ ID NO: 1246449 - RNA, 19 nt, Homo sapiens
  misc_RNA (1)...(19): siRNA sense strand
agaaacaauuccuccugau

SEQ ID NO: 1246450 - RNA, 19 nt, Homo sapiens
  misc_RNA (1)...(19): siRNA sense strand
gaagauggaaaaccuguga

SEQ ID NO: 1246451 - RNA, 19 nt, Homo sapiens
  misc_RNA (1)...(19): siRNA sense strand
caucuaagccaacugaaaa

SEQ ID NO: 1246452 - RNA, 19 nt, Homo sapiens
  misc_RNA (1)...(19): siRNA sense strand
gucugaauguaaagagaaa

SEQ ID NO: 1246453 - RNA, 19 nt, Homo sapiens
  misc_RNA (1)...(19): siRNA sense strand
accaauggaagauaaagua

SEQ ID NO: 1246454 - RNA, 19 nt, Homo sapiens
  misc_RNA (1)...(19): siRNA sense strand
ccaucuaagccaacugaaa

SEQ ID NO: 1246455 - RNA, 19 nt, Homo sapiens
  misc_RNA (1)...(19): siRNA sense strand
ucagaggauucaaagaaac

SEQ ID NO: 1246456 - RNA, 19 nt, Homo sapiens
  misc_RNA (1)...(19): siRNA sense strand
aucagaggauucaaagaaa

SEQ ID NO: 1246457 - RNA, 19 nt, Homo sapiens
  misc_RNA (1)...(19): siRNA sense strand
ccaccugaauacagacauc

SEQ ID NO: 1246458 - RNA, 19 nt, Homo sapiens
  misc_RNA (1)...(19): siRNA sense strand
aagcgaaggauucagcaaa

SEQ ID NO: 1246459 - RNA, 19 nt, Homo sapiens
  misc_RNA (1)...(19): siRNA sense strand
ccacaaaccuuucauuaua

SEQ ID NO: 1246460 - RNA, 19 nt, Homo sapiens
  misc_RNA (1)...(19): siRNA sense strand
ggacuuccauuaugaauuu

SEQ ID NO: 1246461 - RNA, 19 nt, Homo sapiens
  misc_RNA (1)...(19): siRNA sense strand
ggagagacacccaguauua

SEQ ID NO: 1246462 - RNA, 19 nt, Homo sapiens
  misc_RNA (1)...(19): siRNA sense strand
gcucaaggcuguuauuuau

SEQ ID NO: 1246463 - RNA, 19 nt, Homo sapiens
  misc_RNA (1)...(19): siRNA sense strand
uaacagugcugauagaauu

SEQ ID NO: 1246464 - RNA, 19 nt, Homo sapiens
  misc_RNA (1)...(19): siRNA sense strand
ggccauggcuuguuacuuu

SEQ ID NO: 1246465 - RNA, 19 nt, Homo sapiens
  misc_RNA (1)...(19): siRNA sense strand
uuaaagaugucacugcuua

SEQ ID NO: 1246466 - RNA, 19 nt, Homo sapiens
  misc_RNA (1)...(19): siRNA sense strand
ggaaacaccuccaaacaca

SEQ ID NO: 1246467 - RNA, 19 nt, Homo sapiens
  misc_RNA (1)...(19): siRNA sense strand
gcgaggaccuguauaauuc

SEQ ID NO: 1246468 - RNA, 19 nt, Homo sapiens
  misc_RNA (1)...(19): siRNA sense strand
cagaguaccuggaggauuu

SEQ ID NO: 1246469 - RNA, 19 nt, Homo sapiens
  misc_RNA (1)...(19): siRNA sense strand
aaagaaagcugguuacauc

SEQ ID NO: 1246470 - RNA, 19 nt, Homo sapiens
  misc_RNA (1)...(19): siRNA sense strand
gaacagacagugacaauca

SEQ ID NO: 1246471 - RNA, 19 nt, Homo sapiens
  misc_RNA (1)...(19): siRNA sense strand
gaaaagcacugugguuaua

SEQ ID NO: 1246472 - RNA, 19 nt, Homo sapiens
  misc_RNA (1)...(19): siRNA sense strand
ccaaacagauauuuagcua

SEQ ID NO: 1246473 - RNA, 19 nt, Homo sapiens
  misc_RNA (1)...(19): siRNA sense strand
ggaagucucugagcaagaa

SEQ ID NO: 1246474 - RNA, 19 nt, Homo sapiens
  misc_RNA (1)...(19): siRNA sense strand
gaaaggaauuccagacaca

SEQ ID NO: 1246475 - RNA, 19 nt, Homo sapiens
  misc_RNA (1)...(19): siRNA sense strand
ucagaaagaugccagugua

SEQ ID NO: 1246476 - RNA, 19 nt, Homo sapiens
  misc_RNA (1)...(19): siRNA sense strand
gaaaugaggcuacacaaca

SEQ ID NO: 1246477 - RNA, 19 nt, Homo sapiens
  misc_RNA (1)...(19): siRNA sense strand
ggaagaggcugagaugguu

SEQ ID NO: 1246478 - RNA, 19 nt, Homo sapiens
  misc_RNA (1)...(19): siRNA sense strand
ggaagucuaucgacaugaa

SEQ ID NO: 1246479 - RNA, 19 nt, Homo sapiens
  misc_RNA (1)...(19): siRNA sense strand
ccaguaaccuuggauauga

SEQ ID NO: 1246480 - RNA, 19 nt, Homo sapiens
  misc_RNA (1)...(19): siRNA sense strand
gaggauggccuggauaaua

SEQ ID NO: 1246481 - RNA, 19 nt, Homo sapiens
  misc_RNA (1)...(19): siRNA sense strand
gcacugugguuauacauca

SEQ ID NO: 1246482 - RNA, 19 nt, Homo sapiens
  misc_RNA (1)...(19): siRNA sense strand
caacaugucugaggcaaug

SEQ ID NO: 1246483 - RNA, 19 nt, Homo sapiens
  misc_RNA (1)...(19): siRNA sense strand
ggacuuugccgagcauuua

SEQ ID NO: 1246484 - RNA, 19 nt, Homo sapiens
  misc_RNA (1)...(19): siRNA sense strand
ucaaagguguacauuguuu

SEQ ID NO: 1246485 - RNA, 19 nt, Homo sapiens
  misc_RNA (1)...(19): siRNA sense strand
gaagcagcguuaaguguug

SEQ ID NO: 1246486 - RNA, 19 nt, Homo sapiens
  misc_RNA (1)...(19): siRNA sense strand
ggacauuucuaguuaccaa

SEQ ID NO: 1246487 - RNA, 19 nt, Homo sapiens
  misc_RNA (1)...(19): siRNA sense strand
guucaacucuaccguauga

SEQ ID NO: 1246488 - RNA, 19 nt, Homo sapiens
  misc_RNA (1)...(19): siRNA sense strand
gaauuacagucaucucaga

SEQ ID NO: 1246489 - RNA, 19 nt, Homo sapiens
  misc_RNA (1)...(19): siRNA sense strand
gaagacagccagcuaagga

SEQ ID NO: 1246490 - RNA, 19 nt, Homo sapiens
  misc_RNA (1)...(19): siRNA sense strand
gaauuuaguuaccagauag

SEQ ID NO: 1246491 - RNA, 19 nt, Homo sapiens
  misc_RNA (1)...(19): siRNA sense strand
gaaucacaauuacuacuug

SEQ ID NO: 1246492 - RNA, 19 nt, Homo sapiens
  misc_RNA (1)...(19): siRNA sense strand
gcacuucacucucuauaac

SEQ ID NO: 1246493 - RNA, 19 nt, Homo sapiens
  misc_RNA (1)...(19): siRNA sense strand
gcagugaacuauacaguac

SEQ ID NO: 1246494 - RNA, 19 nt, Homo sapiens
  misc_RNA (1)...(19): siRNA sense strand
gcauuuaccuggugaccuu

SEQ ID NO: 1246495 - RNA, 19 nt, Homo sapiens
  misc_RNA (1)...(19): siRNA sense strand
ggaacuugauggacucuga

SEQ ID NO: 1246496 - RNA, 19 nt, Homo sapiens
  misc_RNA (1)...(19): siRNA sense strand
gugagcacuuggacaauua

SEQ ID NO: 1246497 - RNA, 19 nt, Homo sapiens
  misc_RNA (1)...(19): siRNA sense strand
cucgugagcuucucuaaua

SEQ ID NO: 1246498 - RNA, 19 nt, Homo sapiens
  misc_RNA (1)...(19): siRNA sense strand
gaagaaggaauuacaguca

SEQ ID NO: 1246499 - RNA, 19 nt, Homo sapiens
  misc_RNA (1)...(19): siRNA sense strand
gcacuuggacaauuacaaa

SEQ ID NO: 1246500 - RNA, 19 nt, Homo sapiens
  misc_RNA (1)...(19): siRNA sense strand
uaguggacauuucuaguua

SEQ ID NO: 1246501 - RNA, 19 nt, Homo sapiens
  misc_RNA (1)...(19): siRNA sense strand
ccucaaagguguacauugu

SEQ ID NO: 1246502 - RNA, 19 nt, Homo sapiens
  misc_RNA (1)...(19): siRNA sense strand
auacaucacuuuccaucua

SEQ ID NO: 1246503 - RNA, 19 nt, Homo sapiens
  misc_RNA (1)...(19): siRNA sense strand
acacagaaaucaggaacua

SEQ ID NO: 1246504 - RNA, 19 nt, Homo sapiens
  misc_RNA (1)...(19): siRNA sense strand
gcagucuucugugauauuu

SEQ ID NO: 1246505 - RNA, 19 nt, Homo sapiens
  misc_RNA (1)...(19): siRNA sense strand
gcugcagucuucugugaua

SEQ ID NO: 1246506 - RNA, 19 nt, Homo sapiens
  misc_RNA (1)...(19): siRNA sense strand
cagcaugacugucugguau

SEQ ID NO: 1246507 - RNA, 19 nt, Homo sapiens
  misc_RNA (1)...(19): siRNA sense strand
cggaaagaauuuacaagaa

SEQ ID NO: 1246508 - RNA, 19 nt, Homo sapiens
  misc_RNA (1)...(19): siRNA sense strand
cagcaggacuucucugaug

SEQ ID NO: 1246509 - RNA, 19 nt, Homo sapiens
  misc_RNA (1)...(19): siRNA sense strand
gaggaagucuaucgacaug

SEQ ID NO: 1246510 - RNA, 19 nt, Homo sapiens
  misc_RNA (1)...(19): siRNA sense strand
gcaugacugucugguauaa

SEQ ID NO: 1246511 - RNA, 19 nt, Homo sapiens
  misc_RNA (1)...(19): siRNA sense strand
gaacguuucucuccacaac

SEQ ID NO: 1246512 - RNA, 19 nt, Homo sapiens
  misc_RNA (1)...(19): siRNA sense strand
gcacagauguugccuaccu

SEQ ID NO: 1246513 - RNA, 19 nt, Homo sapiens
  misc_RNA (1)...(19): siRNA sense strand
caaucaagcuauccggaaa

SEQ ID NO: 1246514 - RNA, 19 nt, Homo sapiens
  misc_RNA (1)...(19): siRNA sense strand
cagagcccaugcuacauua

SEQ ID NO: 1246515 - RNA, 19 nt, Homo sapiens
  misc_RNA (1)...(19): siRNA sense strand
gcagugaaauaccgaaucu

SEQ ID NO: 1246516 - RNA, 19 nt, Homo sapiens
  misc_RNA (1)...(19): siRNA sense strand
ugacagcuaugaucaguuc

SEQ ID NO: 1246517 - RNA, 19 nt, Homo sapiens
  misc_RNA (1)...(19): siRNA sense strand
gaggcucucugucugauga

SEQ ID NO: 1246518 - RNA, 19 nt, Homo sapiens
  misc_RNA (1)...(19): siRNA sense strand
gaaaugauugguucuguuc

SEQ ID NO: 1246519 - RNA, 19 nt, Homo sapiens
  misc_RNA (1)...(19): siRNA sense strand
gcacugugguggugacugu

SEQ ID NO: 1246520 - RNA, 19 nt, Homo sapiens
  misc_RNA (1)...(19): siRNA sense strand
gagacacccaguauuauuu

SEQ ID NO: 1246521 - RNA, 19 nt, Homo sapiens
  misc_RNA (1)...(19): siRNA sense strand
ggccggaacucuucugaga

SEQ ID NO: 1246522 - RNA, 19 nt, Homo sapiens
  misc_RNA (1)...(19): siRNA sense strand
gcacacaccuauucuucuc

SEQ ID NO: 1246523 - RNA, 19 nt, Homo sapiens
  misc_RNA (1)...(19): siRNA sense strand
acacagacauuacauuuac

SEQ ID NO: 1246524 - RNA, 19 nt, Homo sapiens
  misc_RNA (1)...(19): siRNA sense strand
ucauauaacguguccuuua

SEQ ID NO: 1246525 - RNA, 19 nt, Homo sapiens
  misc_RNA (1)...(19): siRNA sense strand
gcagauugguggaguugug

SEQ ID NO: 1246526 - RNA, 19 nt, Homo sapiens
  misc_RNA (1)...(19): siRNA sense strand
uauaugcggucgucauuga

SEQ ID NO: 1246527 - RNA, 19 nt, Homo sapiens
  misc_RNA (1)...(19): siRNA sense strand
cuacagagccacccagaaa

SEQ ID NO: 1246528 - RNA, 19 nt, Homo sapiens
  misc_RNA (1)...(19): siRNA sense strand
gaacuauacaguacauuuc

SEQ ID NO: 1246529 - RNA, 19 nt, Homo sapiens
  misc_RNA (1)...(19): siRNA sense strand
uguaggcuauuuauccuua

SEQ ID NO: 1246530 - RNA, 19 nt, Homo sapiens
  misc_RNA (1)...(19): siRNA sense strand
ggugugcucugaauggaaa

SEQ ID NO: 1246531 - RNA, 19 nt, Homo sapiens
  misc_RNA (1)...(19): siRNA sense strand
cagcagacaucaaggacuu

SEQ ID NO: 1246532 - RNA, 19 nt, Homo sapiens
  misc_RNA (1)...(19): siRNA sense strand
gcacugggcagauggaguu

SEQ ID NO: 1246533 - RNA, 19 nt, Homo sapiens
  misc_RNA (1)...(19): siRNA sense strand
gaaaacaacuagugaagca

SEQ ID NO: 1246534 - RNA, 19 nt, Homo sapiens
  misc_RNA (1)...(19): siRNA sense strand
uagacgaacuucugaugaa

SEQ ID NO: 1246535 - RNA, 19 nt, Homo sapiens
  misc_RNA (1)...(19): siRNA sense strand
ggaaaaugcuaccuaauag

SEQ ID NO: 1246536 - RNA, 19 nt, Homo sapiens
  misc_RNA (1)...(19): siRNA sense strand
gaugaauacucccucaauc

SEQ ID NO: 1246537 - RNA, 19 nt, Homo sapiens
  misc_RNA (1)...(19): siRNA sense strand
ugagagacauuuccaugga

SEQ ID NO: 1246538 - RNA, 19 nt, Homo sapiens
  misc_RNA (1)...(19): siRNA sense strand
ggugagcacuuggacaauu

SEQ ID NO: 1246539 - RNA, 19 nt, Homo sapiens
  misc_RNA (1)...(19): siRNA sense strand
ccaaugguaucgugugaug

SEQ ID NO: 1246540 - RNA, 19 nt, Homo sapiens
  misc_RNA (1)...(19): siRNA sense strand
gacacagacauuacauuua

SEQ ID NO: 1246541 - RNA, 19 nt, Homo sapiens
  misc_RNA (1)...(19): siRNA sense strand
cauccuagcucgaaauucu

SEQ ID NO: 1246542 - RNA, 19 nt, Homo sapiens
  misc_RNA (1)...(19): siRNA sense strand
gcuaaucaugugcuucuua

SEQ ID NO: 1246543 - RNA, 19 nt, Homo sapiens
  misc_RNA (1)...(19): siRNA sense strand
guagacaaguagaucauca

SEQ ID NO: 1246544 - RNA, 19 nt, Homo sapiens
  misc_RNA (1)...(19): siRNA sense strand
gaaaucaggaacuacauca

SEQ ID NO: 1246545 - RNA, 19 nt, Homo sapiens
  misc_RNA (1)...(19): siRNA sense strand
gaaaaccggacuuccauua

SEQ ID NO: 1246546 - RNA, 19 nt, Homo sapiens
  misc_RNA (1)...(19): siRNA sense strand
gcaauaccaucgggaggaa

SEQ ID NO: 1246547 - RNA, 19 nt, Homo sapiens
  misc_RNA (1)...(19): siRNA sense strand
aaaccggacuuccauuaug

SEQ ID NO: 1246548 - RNA, 19 nt, Homo sapiens
  misc_RNA (1)...(19): siRNA sense strand
ggaggaaaaugcuaccuaa

SEQ ID NO: 1246549 - RNA, 19 nt, Homo sapiens
  misc_RNA (1)...(19): siRNA sense strand
gaauacaggaugcauuaau

SEQ ID NO: 1246550 - RNA, 19 nt, Homo sapiens
  misc_RNA (1)...(19): siRNA sense strand
ggauauguccaccuacaaa

SEQ ID NO: 1246551 - RNA, 19 nt, Homo sapiens
  misc_RNA (1)...(19): siRNA sense strand
uauuauggguucugugauu

SEQ ID NO: 1246552 - RNA, 19 nt, Homo sapiens
  misc_RNA (1)...(19): siRNA sense strand
agucaauugugcagauuua

SEQ ID NO: 1246553 - RNA, 19 nt, Homo sapiens
  misc_RNA (1)...(19): siRNA sense strand
ggaggaggauggccuggau

SEQ ID NO: 1246554 - RNA, 19 nt, Homo sapiens
  misc_RNA (1)...(19): siRNA sense strand
ggacccuucuucauuacaa

SEQ ID NO: 1246555 - RNA, 19 nt, Homo sapiens
  misc_RNA (1)...(19): siRNA sense strand
uaugaucaguuccuuguga

SEQ ID NO: 1246556 - RNA, 19 nt, Homo sapiens
  misc_RNA (1)...(19): siRNA sense strand
gguaucgugugaugguuaa

SEQ ID NO: 1246557 - RNA, 19 nt, Homo sapiens
  misc_RNA (1)...(19): siRNA sense strand
agacacagacauuacauuu

SEQ ID NO: 1246558 - RNA, 19 nt, Homo sapiens
  misc_RNA (1)...(19): siRNA sense strand
ccaugaagaugaagugcuu

SEQ ID NO: 1246559 - RNA, 19 nt, Homo sapiens
  misc_RNA (1)...(19): siRNA sense strand
gaugaccacuucuccauug

SEQ ID NO: 1246560 - RNA, 19 nt, Homo sapiens
  misc_RNA (1)...(19): siRNA sense strand
gaaauucaguaggagagaa

SEQ ID NO: 1246561 - RNA, 19 nt, Homo sapiens
  misc_RNA (1)...(19): siRNA sense strand
ucagcuaccuggauauuga

SEQ ID NO: 1246562 - RNA, 19 nt, Homo sapiens
  misc_RNA (1)...(19): siRNA sense strand
ggaagacgccuguguacga

SEQ ID NO: 1246563 - RNA, 19 nt, Homo sapiens
  misc_RNA (1)...(19): siRNA sense strand
gcaaagaauucaccaugac

SEQ ID NO: 1246564 - RNA, 19 nt, Homo sapiens
  misc_RNA (1)...(19): siRNA sense strand
gaguggagcguuucauuga

SEQ ID NO: 1246565 - RNA, 19 nt, Homo sapiens
  misc_RNA (1)...(19): siRNA sense strand
gggauucucuacgaaauuc

SEQ ID NO: 1246566 - RNA, 19 nt, Homo sapiens
  misc_RNA (1)...(19): siRNA sense strand
gcaagaaggcagccaagca

SEQ ID NO: 1246567 - RNA, 19 nt, Homo sapiens
  misc_RNA (1)...(19): siRNA sense strand
cgcaaagaauucaccauga

SEQ ID NO: 1246568 - RNA, 19 nt, Homo sapiens
  misc_RNA (1)...(19): siRNA sense strand
cacgucagcuaccuggaua

SEQ ID NO: 1246569 - RNA, 19 nt, Homo sapiens
  misc_RNA (1)...(19): siRNA sense strand
guggagcguuucauugaga

SEQ ID NO: 1246570 - RNA, 19 nt, Homo sapiens
  misc_RNA (1)...(19): siRNA sense strand
ggaguaugggaccagaaua

SEQ ID NO: 1246571 - RNA, 19 nt, Homo sapiens
  misc_RNA (1)...(19): siRNA sense strand
caccugggauucucuacga

SEQ ID NO: 1246572 - RNA, 19 nt, Homo sapiens
  misc_RNA (1)...(19): siRNA sense strand
gaguaugggaccagaauag

SEQ ID NO: 1246573 - RNA, 19 nt, Homo sapiens
  misc_RNA (1)...(19): siRNA sense strand
gccaagcccaccagccuaa

SEQ ID NO: 1246574 - RNA, 19 nt, Homo sapiens
  misc_RNA (1)...(19): siRNA sense strand
cgaguggagcguuucauug

SEQ ID NO: 1246575 - RNA, 19 nt, Homo sapiens
  misc_RNA (1)...(19): siRNA sense strand
uagggaagacgccugugua

SEQ ID NO: 1246576 - RNA, 19 nt, Homo sapiens
  misc_RNA (1)...(19): siRNA sense strand
gaaggcagccaagcacaag

SEQ ID NO: 1246577 - RNA, 19 nt, Homo sapiens
  misc_RNA (1)...(19): siRNA sense strand
ucagccuucugcaggagua

SEQ ID NO: 1246578 - RNA, 19 nt, Homo sapiens
  misc_RNA (1)...(19): siRNA sense strand
gcccugcaguaccucaaga

SEQ ID NO: 1246579 - RNA, 19 nt, Homo sapiens
  misc_RNA (1)...(19): siRNA sense strand
gagcguuucauugagauug

SEQ ID NO: 1246580 - RNA, 19 nt, Homo sapiens
  misc_RNA (1)...(19): siRNA sense strand
caagcccaccagccuaauu

SEQ ID NO: 1246581 - RNA, 19 nt, Homo sapiens
  misc_RNA (1)...(19): siRNA sense strand
ugcaguaccucaagaucau

SEQ ID NO: 1246582 - RNA, 19 nt, Homo sapiens
  misc_RNA (1)...(19): siRNA sense strand
ugucauggcucugcaacca

SEQ ID NO: 1246583 - RNA, 19 nt, Homo sapiens
  misc_RNA (1)...(19): siRNA sense strand
gguggagccugaugaugac

SEQ ID NO: 1246584 - RNA, 19 nt, Homo sapiens
  misc_RNA (1)...(19): siRNA sense strand
uguacgaccuucucaaagc

SEQ ID NO: 1246585 - RNA, 19 nt, Homo sapiens
  misc_RNA (1)...(19): siRNA sense strand
ccugaggacauuccgguuu

SEQ ID NO: 1246586 - RNA, 19 nt, Homo sapiens
  misc_RNA (1)...(19): siRNA sense strand
aagcccaccagccuaauuu

SEQ ID NO: 1246587 - RNA, 19 nt, Homo sapiens
  misc_RNA (1)...(19): siRNA sense strand
gcugccguguccucaguga

SEQ ID NO: 1246588 - RNA, 19 nt, Homo sapiens
  misc_RNA (1)...(19): siRNA sense strand
agguggagccugaugauga

SEQ ID NO: 1246589 - RNA, 19 nt, Homo sapiens
  misc_RNA (1)...(19): siRNA sense strand
uguguacgaccuucucaaa

SEQ ID NO: 1246590 - RNA, 19 nt, Homo sapiens
  misc_RNA (1)...(19): siRNA sense strand
ccugucgaguggagcguuu

SEQ ID NO: 1246591 - RNA, 19 nt, Homo sapiens
  misc_RNA (1)...(19): siRNA sense strand
cugaggagcaggccuuuca

SEQ ID NO: 1246592 - RNA, 19 nt, Homo sapiens
  misc_RNA (1)...(19): siRNA sense strand
cauggcaggcagcaaguga

SEQ ID NO: 1246593 - RNA, 19 nt, Homo sapiens
  misc_RNA (1)...(19): siRNA sense strand
gaugaccacuucuccauug

SEQ ID NO: 1246594 - RNA, 19 nt, Homo sapiens
  misc_RNA (1)...(19): siRNA sense strand
gaaauucaguaggagagaa

SEQ ID NO: 1246595 - RNA, 19 nt, Homo sapiens
  misc_RNA (1)...(19): siRNA sense strand
ucagcuaccuggauauuga

SEQ ID NO: 1246596 - RNA, 19 nt, Homo sapiens
  misc_RNA (1)...(19): siRNA sense strand
ggaagacgccuguguacga

SEQ ID NO: 1246597 - RNA, 19 nt, Homo sapiens
  misc_RNA (1)...(19): siRNA sense strand
gcaaagaauucaccaugac

SEQ ID NO: 1246598 - RNA, 19 nt, Homo sapiens
  misc_RNA (1)...(19): siRNA sense strand
gaguggagcguuucauuga

SEQ ID NO: 1246599 - RNA, 19 nt, Homo sapiens
  misc_RNA (1)...(19): siRNA sense strand
gggauucucuacgaaauuc

SEQ ID NO: 1246600 - RNA, 19 nt, Homo sapiens
  misc_RNA (1)...(19): siRNA sense strand
gcaagaaggcagccaagca

SEQ ID NO: 1246601 - RNA, 19 nt, Homo sapiens
  misc_RNA (1)...(19): siRNA sense strand
cgcaaagaauucaccauga

SEQ ID NO: 1246602 - RNA, 19 nt, Homo sapiens
  misc_RNA (1)...(19): siRNA sense strand
cacgucagcuaccuggaua

SEQ ID NO: 1246603 - RNA, 19 nt, Homo sapiens
  misc_RNA (1)...(19): siRNA sense strand
guggagcguuucauugaga

SEQ ID NO: 1246604 - RNA, 19 nt, Homo sapiens
  misc_RNA (1)...(19): siRNA sense strand
ggaguaugggaccagaaua

SEQ ID NO: 1246605 - RNA, 19 nt, Homo sapiens
  misc_RNA (1)...(19): siRNA sense strand
caccugggauucucuacga

SEQ ID NO: 1246606 - RNA, 19 nt, Homo sapiens
  misc_RNA (1)...(19): siRNA sense strand
gaguaugggaccagaauag

SEQ ID NO: 1246607 - RNA, 19 nt, Homo sapiens
  misc_RNA (1)...(19): siRNA sense strand
gccaagcccaccagccuaa

SEQ ID NO: 1246608 - RNA, 19 nt, Homo sapiens
  misc_RNA (1)...(19): siRNA sense strand
cgaguggagcguuucauug

SEQ ID NO: 1246609 - RNA, 19 nt, Homo sapiens
  misc_RNA (1)...(19): siRNA sense strand
uagggaagacgccugugua

SEQ ID NO: 1246610 - RNA, 19 nt, Homo sapiens
  misc_RNA (1)...(19): siRNA sense strand
gaaggcagccaagcacaag

SEQ ID NO: 1246611 - RNA, 19 nt, Homo sapiens
  misc_RNA (1)...(19): siRNA sense strand
ucagccuucugcaggagua

SEQ ID NO: 1246612 - RNA, 19 nt, Homo sapiens
  misc_RNA (1)...(19): siRNA sense strand
gcccugcaguaccucaaga

SEQ ID NO: 1246613 - RNA, 19 nt, Homo sapiens
  misc_RNA (1)...(19): siRNA sense strand
gagcguuucauugagauug

SEQ ID NO: 1246614 - RNA, 19 nt, Homo sapiens
  misc_RNA (1)...(19): siRNA sense strand
caagcccaccagccuaauu

SEQ ID NO: 1246615 - RNA, 19 nt, Homo sapiens
  misc_RNA (1)...(19): siRNA sense strand
ugcaguaccucaagaucau

SEQ ID NO: 1246616 - RNA, 19 nt, Homo sapiens
  misc_RNA (1)...(19): siRNA sense strand
ugucauggcucugcaacca

SEQ ID NO: 1246617 - RNA, 19 nt, Homo sapiens
  misc_RNA (1)...(19): siRNA sense strand
gguggagccugaugaugac

SEQ ID NO: 1246618 - RNA, 19 nt, Homo sapiens
  misc_RNA (1)...(19): siRNA sense strand
uguacgaccuucucaaagc

SEQ ID NO: 1246619 - RNA, 19 nt, Homo sapiens
  misc_RNA (1)...(19): siRNA sense strand
ccugaggacauuccgguuu

SEQ ID NO: 1246620 - RNA, 19 nt, Homo sapiens
  misc_RNA (1)...(19): siRNA sense strand
aagcccaccagccuaauuu

SEQ ID NO: 1246621 - RNA, 19 nt, Homo sapiens
  misc_RNA (1)...(19): siRNA sense strand
gcugccguguccucaguga

SEQ ID NO: 1246622 - RNA, 19 nt, Homo sapiens
  misc_RNA (1)...(19): siRNA sense strand
agguggagccugaugauga

SEQ ID NO: 1246623 - RNA, 19 nt, Homo sapiens
  misc_RNA (1)...(19): siRNA sense strand
uguguacgaccuucucaaa

SEQ ID NO: 1246624 - RNA, 19 nt, Homo sapiens
  misc_RNA (1)...(19): siRNA sense strand
ccugucgaguggagcguuu

SEQ ID NO: 1246625 - RNA, 19 nt, Homo sapiens
  misc_RNA (1)...(19): siRNA sense strand
cugaggagcaggccuuuca

SEQ ID NO: 1246626 - RNA, 19 nt, Homo sapiens
  misc_RNA (1)...(19): siRNA sense strand
cauggcaggcagcaaguga

SEQ ID NO: 1246627 - RNA, 19 nt, Homo sapiens
  misc_RNA (1)...(19): siRNA sense strand
ggaagacgccuguguacga

SEQ ID NO: 1246628 - RNA, 19 nt, Homo sapiens
  misc_RNA (1)...(19): siRNA sense strand
gcaagaaggcagccaagca

SEQ ID NO: 1246629 - RNA, 19 nt, Homo sapiens
  misc_RNA (1)...(19): siRNA sense strand
ggaguaugggaccagaaua

SEQ ID NO: 1246630 - RNA, 19 nt, Homo sapiens
  misc_RNA (1)...(19): siRNA sense strand
gaguaugggaccagaauag

SEQ ID NO: 1246631 - RNA, 19 nt, Homo sapiens
  misc_RNA (1)...(19): siRNA sense strand
gccaagcccaccagccuaa

SEQ ID NO: 1246632 - RNA, 19 nt, Homo sapiens
  misc_RNA (1)...(19): siRNA sense strand
uagggaagacgccugugua

SEQ ID NO: 1246633 - RNA, 19 nt, Homo sapiens
  misc_RNA (1)...(19): siRNA sense strand
gaaggcagccaagcacaag

SEQ ID NO: 1246634 - RNA, 19 nt, Homo sapiens
  misc_RNA (1)...(19): siRNA sense strand
ucagccuucugcaggagua

SEQ ID NO: 1246635 - RNA, 19 nt, Homo sapiens
  misc_RNA (1)...(19): siRNA sense strand
caagcccaccagccuaauu

SEQ ID NO: 1246636 - RNA, 19 nt, Homo sapiens
  misc_RNA (1)...(19): siRNA sense strand
uguacgaccuucucaaagc

SEQ ID NO: 1246637 - RNA, 19 nt, Homo sapiens
  misc_RNA (1)...(19): siRNA sense strand
aagcccaccagccuaauuu

SEQ ID NO: 1246638 - RNA, 19 nt, Homo sapiens
  misc_RNA (1)...(19): siRNA sense strand
uguguacgaccuucucaaa

SEQ ID NO: 1246639 - RNA, 19 nt, Homo sapiens
  misc_RNA (1)...(19): siRNA sense strand
gaaagaaacuucgacaaga

SEQ ID NO: 1246640 - RNA, 19 nt, Homo sapiens
  misc_RNA (1)...(19): siRNA sense strand
ccacagugcugauggauuu

SEQ ID NO: 1246641 - RNA, 19 nt, Homo sapiens
  misc_RNA (1)...(19): siRNA sense strand
gcaaaugucagcaagaaua

SEQ ID NO: 1246642 - RNA, 19 nt, Homo sapiens
  misc_RNA (1)...(19): siRNA sense strand
gacaauacgucaggaaaua

SEQ ID NO: 1246643 - RNA, 19 nt, Homo sapiens
  misc_RNA (1)...(19): siRNA sense strand
gcaagaauauuucggugaa

SEQ ID NO: 1246644 - RNA, 19 nt, Homo sapiens
  misc_RNA (1)...(19): siRNA sense strand
gaaaugccuucuaguagug

SEQ ID NO: 1246645 - RNA, 19 nt, Homo sapiens
  misc_RNA (1)...(19): siRNA sense strand
gcugauggauuugagguua

SEQ ID NO: 1246646 - RNA, 19 nt, Homo sapiens
  misc_RNA (1)...(19): siRNA sense strand
gaagaaacagaaagaagaa

SEQ ID NO: 1246647 - RNA, 19 nt, Homo sapiens
  misc_RNA (1)...(19): siRNA sense strand
caggaaauaugaaggagaa

SEQ ID NO: 1246648 - RNA, 19 nt, Homo sapiens
  misc_RNA (1)...(19): siRNA sense strand
acaagagaauggaaaugua

SEQ ID NO: 1246649 - RNA, 19 nt, Homo sapiens
  misc_RNA (1)...(19): siRNA sense strand
ugaaaugccuucuaguagu

SEQ ID NO: 1246650 - RNA, 19 nt, Homo sapiens
  misc_RNA (1)...(19): siRNA sense strand
agucagaguugaacaggua

SEQ ID NO: 1246651 - RNA, 19 nt, Homo sapiens
  misc_RNA (1)...(19): siRNA sense strand
ucacggagaaugcaaauau

SEQ ID NO: 1246652 - RNA, 19 nt, Homo sapiens
  misc_RNA (1)...(19): siRNA sense strand
ccacaaauaccuggcuaua

SEQ ID NO: 1246653 - RNA, 19 nt, Homo sapiens
  misc_RNA (1)...(19): siRNA sense strand
ccauuaugcugcuggauug

SEQ ID NO: 1246654 - RNA, 19 nt, Homo sapiens
  misc_RNA (1)...(19): siRNA sense strand
ggagaaugcaaauauauag

SEQ ID NO: 1246655 - RNA, 19 nt, Homo sapiens
  misc_RNA (1)...(19): siRNA sense strand
agaagaguaugauaacgaa

SEQ ID NO: 1246656 - RNA, 19 nt, Homo sapiens
  misc_RNA (1)...(19): siRNA sense strand
ugauaacgaaccacaaaua

SEQ ID NO: 1246657 - RNA, 19 nt, Homo sapiens
  misc_RNA (1)...(19): siRNA sense strand
ugagugaaaugccuucuag

SEQ ID NO: 1246658 - RNA, 19 nt, Homo sapiens
  misc_RNA (1)...(19): siRNA sense strand
gaauggaaauguacaugcu

SEQ ID NO: 1246659 - RNA, 19 nt, Homo sapiens
  misc_RNA (1)...(19): siRNA sense strand
cacggagaaugcaaauaua

SEQ ID NO: 1246660 - RNA, 19 nt, Homo sapiens
  misc_RNA (1)...(19): siRNA sense strand
ggaccacagugcugaugga

SEQ ID NO: 1246661 - RNA, 19 nt, Homo sapiens
  misc_RNA (1)...(19): siRNA sense strand
guuauuacaguccagcuua

SEQ ID NO: 1246662 - RNA, 19 nt, Homo sapiens
  misc_RNA (1)...(19): siRNA sense strand
gaguugaacagguaguuaa

SEQ ID NO: 1246663 - RNA, 19 nt, Homo sapiens
  misc_RNA (1)...(19): siRNA sense strand
aaagaaacuucgacaagag

SEQ ID NO: 1246664 - RNA, 19 nt, Homo sapiens
  misc_RNA (1)...(19): siRNA sense strand
gcuauauugucgaugauuc

SEQ ID NO: 1246665 - RNA, 19 nt, Homo sapiens
  misc_RNA (1)...(19): siRNA sense strand
gauugacaguaguuuauca

SEQ ID NO: 1246666 - RNA, 19 nt, Homo sapiens
  misc_RNA (1)...(19): siRNA sense strand
agaagaaacagaaagaaga

SEQ ID NO: 1246667 - RNA, 19 nt, Homo sapiens
  misc_RNA (1)...(19): siRNA sense strand
gaagacaauacgucaggaa

SEQ ID NO: 1246668 - RNA, 19 nt, Homo sapiens
  misc_RNA (1)...(19): siRNA sense strand
gacaagagaauggaaaugu

SEQ ID NO: 1246669 - RNA, 19 nt, Homo sapiens
  misc_RNA (1)...(19): siRNA sense strand
ggaaauguacaugcuauag

SEQ ID NO: 1246670 - RNA, 19 nt, Homo sapiens
  misc_RNA (1)...(19): siRNA sense strand
cggagaaugcaaauauaua

SEQ ID NO: 1246671 - RNA, 19 nt, Homo sapiens
  misc_RNA (1)...(19): siRNA sense strand
ugggaagcgugaaccauuu

SEQ ID NO: 1246672 - RNA, 19 nt, Homo sapiens
  misc_RNA (1)...(19): siRNA sense strand
aaacaagacggaaagugaa

SEQ ID NO: 1246673 - RNA, 19 nt, Homo sapiens
  misc_RNA (1)...(19): siRNA sense strand
ggggaaaaguccaugaaaa

SEQ ID NO: 1246674 - RNA, 19 nt, Homo sapiens
  misc_RNA (1)...(19): siRNA sense strand
caaaugucagcaagaauau

SEQ ID NO: 1246675 - RNA, 19 nt, Homo sapiens
  misc_RNA (1)...(19): siRNA sense strand
gauaacgaaccacaaauac

SEQ ID NO: 1246676 - RNA, 19 nt, Homo sapiens
  misc_RNA (1)...(19): siRNA sense strand
gagaagcugaggaacgaaa

SEQ ID NO: 1246677 - RNA, 19 nt, Homo sapiens
  misc_RNA (1)...(19): siRNA sense strand
ugaaggagaagcugaggaa

SEQ ID NO: 1246678 - RNA, 19 nt, Homo sapiens
  misc_RNA (1)...(19): siRNA sense strand
caugauugacaguaguuua

SEQ ID NO: 1246679 - RNA, 19 nt, Homo sapiens
  misc_RNA (1)...(19): siRNA sense strand
agugaaaugccuucuagua

SEQ ID NO: 1246680 - RNA, 19 nt, Homo sapiens
  misc_RNA (1)...(19): siRNA sense strand
uaugauaacgaaccacaaa

SEQ ID NO: 1246681 - RNA, 19 nt, Homo sapiens
  misc_RNA (1)...(19): siRNA sense strand
gugaaaugccuucuaguag

SEQ ID NO: 1246682 - RNA, 19 nt, Homo sapiens
  misc_RNA (1)...(19): siRNA sense strand
cgacuaugacuacucagaa

SEQ ID NO: 1246683 - RNA, 19 nt, Homo sapiens
  misc_RNA (1)...(19): siRNA sense strand
uccauguaaugcagaauuu

SEQ ID NO: 1246684 - RNA, 19 nt, Homo sapiens
  misc_RNA (1)...(19): siRNA sense strand
aaacucacagcaugauuga

SEQ ID NO: 1246685 - RNA, 19 nt, Homo sapiens
  misc_RNA (1)...(19): siRNA sense strand
ggaagcaguaacaugcaaa

SEQ ID NO: 1246686 - RNA, 19 nt, Homo sapiens
  misc_RNA (1)...(19): siRNA sense strand
gcaccuggaagcaguaaca

SEQ ID NO: 1246687 - RNA, 19 nt, Homo sapiens
  misc_RNA (1)...(19): siRNA sense strand
cagaagaguaugauaacga

SEQ ID NO: 1246688 - RNA, 19 nt, Homo sapiens
  misc_RNA (1)...(19): siRNA sense strand
gacuaugacuacucagaag

SEQ ID NO: 1246689 - RNA, 19 nt, Homo sapiens
  misc_RNA (1)...(19): siRNA sense strand
gaggaacgaaagaaacuuc

SEQ ID NO: 1246690 - RNA, 19 nt, Homo sapiens
  misc_RNA (1)...(19): siRNA sense strand
gaaauaugaaggagaagcu

SEQ ID NO: 1246691 - RNA, 19 nt, Homo sapiens
  misc_RNA (1)...(19): siRNA sense strand
gaagcaguaacaugcaaau

SEQ ID NO: 1246692 - RNA, 19 nt, Homo sapiens
  misc_RNA (1)...(19): siRNA sense strand
gccauuaugcugcuggauu

SEQ ID NO: 1246693 - RNA, 19 nt, Homo sapiens
  misc_RNA (1)...(19): siRNA sense strand
caagagaauggaaauguac

SEQ ID NO: 1246694 - RNA, 19 nt, Homo sapiens
  misc_RNA (1)...(19): siRNA sense strand
cagauaaacccaaaagaaa

SEQ ID NO: 1246695 - RNA, 19 nt, Homo sapiens
  misc_RNA (1)...(19): siRNA sense strand
ggugcugucgcucuugaua

SEQ ID NO: 1246696 - RNA, 19 nt, Homo sapiens
  misc_RNA (1)...(19): siRNA sense strand
ugucgaugauucagucaga

SEQ ID NO: 1246697 - RNA, 19 nt, Homo sapiens
  misc_RNA (1)...(19): siRNA sense strand
gaaauguacaugcuauagc

SEQ ID NO: 1246698 - RNA, 19 nt, Homo sapiens
  misc_RNA (1)...(19): siRNA sense strand
gagaauggaaauguacaug

SEQ ID NO: 1246699 - RNA, 19 nt, Homo sapiens
  misc_RNA (1)...(19): siRNA sense strand
aggagaagcugaggaacga

SEQ ID NO: 1246700 - RNA, 19 nt, Homo sapiens
  misc_RNA (1)...(19): siRNA sense strand
caauacgucaggaaauaug

SEQ ID NO: 1246701 - RNA, 19 nt, Homo sapiens
  misc_RNA (1)...(19): siRNA sense strand
gaugauucagucagaguug

SEQ ID NO: 1246702 - RNA, 19 nt, Homo sapiens
  misc_RNA (1)...(19): siRNA sense strand
augcaaaugucagcaagaa

SEQ ID NO: 1246703 - RNA, 19 nt, Homo sapiens
  misc_RNA (1)...(19): siRNA sense strand
gaaacuucgacaagagaau

SEQ ID NO: 1246704 - RNA, 19 nt, Homo sapiens
  misc_RNA (1)...(19): siRNA sense strand
gaagcugaggaacgaaaga

SEQ ID NO: 1246705 - RNA, 19 nt, Homo sapiens
  misc_RNA (1)...(19): siRNA sense strand
cagcaugauugacaguagu

SEQ ID NO: 1246706 - RNA, 19 nt, Homo sapiens
  misc_RNA (1)...(19): siRNA sense strand
uaacgaaccacaaauaccu

SEQ ID NO: 1246707 - RNA, 19 nt, Homo sapiens
  misc_RNA (1)...(19): siRNA sense strand
cuggcuauauugucgauga

SEQ ID NO: 1246708 - RNA, 19 nt, Homo sapiens
  misc_RNA (1)...(19): siRNA sense strand
guggugcugucgcucuuga

SEQ ID NO: 1246709 - RNA, 19 nt, Homo sapiens
  misc_RNA (1)...(19): siRNA sense strand
gccuuuaugucugcuguga

SEQ ID NO: 1246710 - RNA, 19 nt, Homo sapiens
  misc_RNA (1)...(19): siRNA sense strand
aaaaguccaugaaaacuca

SEQ ID NO: 1246711 - RNA, 19 nt, Homo sapiens
  misc_RNA (1)...(19): siRNA sense strand
gauaaacccaaaagaaaga

SEQ ID NO: 1246712 - RNA, 19 nt, Homo sapiens
  misc_RNA (1)...(19): siRNA sense strand
uagaagaaacagaaagaag

SEQ ID NO: 1246713 - RNA, 19 nt, Homo sapiens
  misc_RNA (1)...(19): siRNA sense strand
ucagauaaacccaaaagaa

SEQ ID NO: 1246714 - RNA, 19 nt, Homo sapiens
  misc_RNA (1)...(19): siRNA sense strand
uggaagcaguaacaugcaa

SEQ ID NO: 1246715 - RNA, 19 nt, Homo sapiens
  misc_RNA (1)...(19): siRNA sense strand
cauguaaugcagaauuuca

SEQ ID NO: 1246716 - RNA, 19 nt, Homo sapiens
  misc_RNA (1)...(19): siRNA sense strand
cacaaauaccuggcuauau

SEQ ID NO: 1246717 - RNA, 19 nt, Homo sapiens
  misc_RNA (1)...(19): siRNA sense strand
auacucggcucaggccauu

SEQ ID NO: 1246718 - RNA, 19 nt, Homo sapiens
  misc_RNA (1)...(19): siRNA sense strand
agacaauacgucaggaaau

SEQ ID NO: 1246719 - RNA, 19 nt, Homo sapiens
  misc_RNA (1)...(19): siRNA sense strand
aaaacaagacggaaaguga

SEQ ID NO: 1246720 - RNA, 19 nt, Homo sapiens
  misc_RNA (1)...(19): siRNA sense strand
cuuuaugucugcugugauc

SEQ ID NO: 1246721 - RNA, 19 nt, Homo sapiens
  misc_RNA (1)...(19): siRNA sense strand
aaauccauguaaugcagaa

SEQ ID NO: 1246722 - RNA, 19 nt, Homo sapiens
  misc_RNA (1)...(19): siRNA sense strand
aaacuucgacaagagaaug

SEQ ID NO: 1246723 - RNA, 19 nt, Homo sapiens
  misc_RNA (1)...(19): siRNA sense strand
agaguugaacagguaguua

SEQ ID NO: 1246724 - RNA, 19 nt, Homo sapiens
  misc_RNA (1)...(19): siRNA sense strand
cgucaggaaauaugaagga

SEQ ID NO: 1246725 - RNA, 19 nt, Homo sapiens
  misc_RNA (1)...(19): siRNA sense strand
acagcaugauugacaguag

SEQ ID NO: 1246726 - RNA, 19 nt, Homo sapiens
  misc_RNA (1)...(19): siRNA sense strand
auauauagagcaccuggaa

SEQ ID NO: 1246727 - RNA, 19 nt, Homo sapiens
  misc_RNA (1)...(19): siRNA sense strand
cgacaagagaauggaaaug

SEQ ID NO: 1246728 - RNA, 19 nt, Homo sapiens
  misc_RNA (1)...(19): siRNA sense strand
aagacaauacgucaggaaa

SEQ ID NO: 1246729 - RNA, 19 nt, Homo sapiens
  misc_RNA (1)...(19): siRNA sense strand
gugagugaaaugccuucua

SEQ ID NO: 1246730 - RNA, 19 nt, Homo sapiens
  misc_RNA (1)...(19): siRNA sense strand
auggaaauguacaugcuau

SEQ ID NO: 1246731 - RNA, 19 nt, Homo sapiens
  misc_RNA (1)...(19): siRNA sense strand
aagaaacuucgacaagaga

SEQ ID NO: 1246732 - RNA, 19 nt, Homo sapiens
  misc_RNA (1)...(19): siRNA sense strand
acucacagcaugauugaca

SEQ ID NO: 1246733 - RNA, 19 nt, Homo sapiens
  misc_RNA (1)...(19): siRNA sense strand
gaaaaguccaugaaaacuc

SEQ ID NO: 1246734 - RNA, 19 nt, Homo sapiens
  misc_RNA (1)...(19): siRNA sense strand
uacuucagauaaacccaaa

SEQ ID NO: 1246735 - RNA, 19 nt, Homo sapiens
  misc_RNA (1)...(19): siRNA sense strand
gcacaucucucacuuuaaa

SEQ ID NO: 1246736 - RNA, 19 nt, Homo sapiens
  misc_RNA (1)...(19): siRNA sense strand
gaugaggaguuguuucuua

SEQ ID NO: 1246737 - RNA, 19 nt, Homo sapiens
  misc_RNA (1)...(19): siRNA sense strand
cuagggcccuuaagaauua

SEQ ID NO: 1246738 - RNA, 19 nt, Homo sapiens
  misc_RNA (1)...(19): siRNA sense strand
gcaaacaguuagccaaguu

SEQ ID NO: 1246739 - RNA, 19 nt, Homo sapiens
  misc_RNA (1)...(19): siRNA sense strand
gaaacagccuucuauugga

SEQ ID NO: 1246740 - RNA, 19 nt, Homo sapiens
  misc_RNA (1)...(19): siRNA sense strand
cagcaugguuuacugaaua

SEQ ID NO: 1246741 - RNA, 19 nt, Homo sapiens
  misc_RNA (1)...(19): siRNA sense strand
uaaugcagcuggugacuuu

SEQ ID NO: 1246742 - RNA, 19 nt, Homo sapiens
  misc_RNA (1)...(19): siRNA sense strand
ggaaguaagugcagaugug

SEQ ID NO: 1246743 - RNA, 19 nt, Homo sapiens
  misc_RNA (1)...(19): siRNA sense strand
gaacuagaauuagaaguag

SEQ ID NO: 1246744 - RNA, 19 nt, Homo sapiens
  misc_RNA (1)...(19): siRNA sense strand
ucgcacaucucucacuuua

SEQ ID NO: 1246745 - RNA, 19 nt, Homo sapiens
  misc_RNA (1)...(19): siRNA sense strand
gaaaugacaacaaaggauu

SEQ ID NO: 1246746 - RNA, 19 nt, Homo sapiens
  misc_RNA (1)...(19): siRNA sense strand
gaagguggcuacacuaaac

SEQ ID NO: 1246747 - RNA, 19 nt, Homo sapiens
  misc_RNA (1)...(19): siRNA sense strand
ggucaaauugucaacauua

SEQ ID NO: 1246748 - RNA, 19 nt, Homo sapiens
  misc_RNA (1)...(19): siRNA sense strand
gcugcaaucucaugauaaa

SEQ ID NO: 1246749 - RNA, 19 nt, Homo sapiens
  misc_RNA (1)...(19): siRNA sense strand
gagcucugauggagauaua

SEQ ID NO: 1246750 - RNA, 19 nt, Homo sapiens
  misc_RNA (1)...(19): siRNA sense strand
uggaaaggauucaccauuu

SEQ ID NO: 1246751 - RNA, 19 nt, Homo sapiens
  misc_RNA (1)...(19): siRNA sense strand
ccaaugaacacacgaauga

SEQ ID NO: 1246752 - RNA, 19 nt, Homo sapiens
  misc_RNA (1)...(19): siRNA sense strand
caagagcucugauggagau

SEQ ID NO: 1246753 - RNA, 19 nt, Homo sapiens
  misc_RNA (1)...(19): siRNA sense strand
gaacuuucauagcuagaga

SEQ ID NO: 1246754 - RNA, 19 nt, Homo sapiens
  misc_RNA (1)...(19): siRNA sense strand
uaacaggaguuuggaagaa

SEQ ID NO: 1246755 - RNA, 19 nt, Homo sapiens
  misc_RNA (1)...(19): siRNA sense strand
caggcugacucucuuguua

SEQ ID NO: 1246756 - RNA, 19 nt, Homo sapiens
  misc_RNA (1)...(19): siRNA sense strand
caaguuauccagaagcuuu

SEQ ID NO: 1246757 - RNA, 19 nt, Homo sapiens
  misc_RNA (1)...(19): siRNA sense strand
uguggaagcugcagaagaa

SEQ ID NO: 1246758 - RNA, 19 nt, Homo sapiens
  misc_RNA (1)...(19): siRNA sense strand
ggaaauagcaaaagaacua

SEQ ID NO: 1246759 - RNA, 19 nt, Homo sapiens
  misc_RNA (1)...(19): siRNA sense strand
ucuaagugcucaagugaaa

SEQ ID NO: 1246760 - RNA, 19 nt, Homo sapiens
  misc_RNA (1)...(19): siRNA sense strand
cuucaccgaugucuuauuu

SEQ ID NO: 1246761 - RNA, 19 nt, Homo sapiens
  misc_RNA (1)...(19): siRNA sense strand
gaagaaaaguuugaagcua

SEQ ID NO: 1246762 - RNA, 19 nt, Homo sapiens
  misc_RNA (1)...(19): siRNA sense strand
ggaaaggauucaccauuuu

SEQ ID NO: 1246763 - RNA, 19 nt, Homo sapiens
  misc_RNA (1)...(19): siRNA sense strand
acacacgaaugauaagaaa

SEQ ID NO: 1246764 - RNA, 19 nt, Homo sapiens
  misc_RNA (1)...(19): siRNA sense strand
ggagauauacgaggagauu

SEQ ID NO: 1246765 - RNA, 19 nt, Homo sapiens
  misc_RNA (1)...(19): siRNA sense strand
aaacagccuucuauuggaa

SEQ ID NO: 1246766 - RNA, 19 nt, Homo sapiens
  misc_RNA (1)...(19): siRNA sense strand
aaagaagccauuuccauaa

SEQ ID NO: 1246767 - RNA, 19 nt, Homo sapiens
  misc_RNA (1)...(19): siRNA sense strand
gugcagaugugguggaaau

SEQ ID NO: 1246768 - RNA, 19 nt, Homo sapiens
  misc_RNA (1)...(19): siRNA sense strand
uaaagcagcagcaggguuu

SEQ ID NO: 1246769 - RNA, 19 nt, Homo sapiens
  misc_RNA (1)...(19): siRNA sense strand
gggaggaggucaaauuguc

SEQ ID NO: 1246770 - RNA, 19 nt, Homo sapiens
  misc_RNA (1)...(19): siRNA sense strand
ugaagaugcugugaacauu

SEQ ID NO: 1246771 - RNA, 19 nt, Homo sapiens
  misc_RNA (1)...(19): siRNA sense strand
gccaaagccuaauccagaa

SEQ ID NO: 1246772 - RNA, 19 nt, Homo sapiens
  misc_RNA (1)...(19): siRNA sense strand
gaagaugcugugaacauug

SEQ ID NO: 1246773 - RNA, 19 nt, Homo sapiens
  misc_RNA (1)...(19): siRNA sense strand
gaaaggauucaccauuuua

SEQ ID NO: 1246774 - RNA, 19 nt, Homo sapiens
  misc_RNA (1)...(19): siRNA sense strand
gagguugguucaugagguu

SEQ ID NO: 1246775 - RNA, 19 nt, Homo sapiens
  misc_RNA (1)...(19): siRNA sense strand
uagcagagguugguucaug

SEQ ID NO: 1246776 - RNA, 19 nt, Homo sapiens
  misc_RNA (1)...(19): siRNA sense strand
aagcuucaccgaugucuua

SEQ ID NO: 1246777 - RNA, 19 nt, Homo sapiens
  misc_RNA (1)...(19): siRNA sense strand
uguagaagcugcagcaagu

SEQ ID NO: 1246778 - RNA, 19 nt, Homo sapiens
  misc_RNA (1)...(19): siRNA sense strand
ucaccgaugucuuauuuua

SEQ ID NO: 1246779 - RNA, 19 nt, Homo sapiens
  misc_RNA (1)...(19): siRNA sense strand
ugaaacagccuucuauugg

SEQ ID NO: 1246780 - RNA, 19 nt, Homo sapiens
  misc_RNA (1)...(19): siRNA sense strand
cugaagauguaacugaauu

SEQ ID NO: 1246781 - RNA, 19 nt, Homo sapiens
  misc_RNA (1)...(19): siRNA sense strand
ggaguuguuucuuauggau

SEQ ID NO: 1246782 - RNA, 19 nt, Homo sapiens
  misc_RNA (1)...(19): siRNA sense strand
cuaacucucuucaacucua

SEQ ID NO: 1246783 - RNA, 19 nt, Homo sapiens
  misc_RNA (1)...(19): siRNA sense strand
gaggaguuguuucuuaugg

SEQ ID NO: 1246784 - RNA, 19 nt, Homo sapiens
  misc_RNA (1)...(19): siRNA sense strand
aguagagccugaagaugua

SEQ ID NO: 1246785 - RNA, 19 nt, Homo sapiens
  misc_RNA (1)...(19): siRNA sense strand
acgaggagauuaauguuau

SEQ ID NO: 1246786 - RNA, 19 nt, Homo sapiens
  misc_RNA (1)...(19): siRNA sense strand
gaugaaacagccuucuauu

SEQ ID NO: 1246787 - RNA, 19 nt, Homo sapiens
  misc_RNA (1)...(19): siRNA sense strand
caacagauuuucaauguag

SEQ ID NO: 1246788 - RNA, 19 nt, Homo sapiens
  misc_RNA (1)...(19): siRNA sense strand
gaacacacgaaugauaaga

SEQ ID NO: 1246789 - RNA, 19 nt, Homo sapiens
  misc_RNA (1)...(19): siRNA sense strand
gacaacaaaggauuuagaa

SEQ ID NO: 1246790 - RNA, 19 nt, Homo sapiens
  misc_RNA (1)...(19): siRNA sense strand
gaggucaaauugucaacau

SEQ ID NO: 1246791 - RNA, 19 nt, Homo sapiens
  misc_RNA (1)...(19): siRNA sense strand
gaucagaccagccgcaaca

SEQ ID NO: 1246792 - RNA, 19 nt, Homo sapiens
  misc_RNA (1)...(19): siRNA sense strand
gaagccauuuccauaacau

SEQ ID NO: 1246793 - RNA, 19 nt, Homo sapiens
  misc_RNA (1)...(19): siRNA sense strand
uagcugccauggauaguga

SEQ ID NO: 1246794 - RNA, 19 nt, Homo sapiens
  misc_RNA (1)...(19): siRNA sense strand
gagaccuacugcucagaaa

SEQ ID NO: 1246795 - RNA, 19 nt, Homo sapiens
  misc_RNA (1)...(19): siRNA sense strand
gucagugccuggcuucaaa

SEQ ID NO: 1246796 - RNA, 19 nt, Homo sapiens
  misc_RNA (1)...(19): siRNA sense strand
ugacgaagguggcuacacu

SEQ ID NO: 1246797 - RNA, 19 nt, Homo sapiens
  misc_RNA (1)...(19): siRNA sense strand
gcugauauggagaaaguuu

SEQ ID NO: 1246798 - RNA, 19 nt, Homo sapiens
  misc_RNA (1)...(19): siRNA sense strand
ucuagaacuuucauagcua

SEQ ID NO: 1246799 - RNA, 19 nt, Homo sapiens
  misc_RNA (1)...(19): siRNA sense strand
uagaagcugcagcaaguua

SEQ ID NO: 1246800 - RNA, 19 nt, Homo sapiens
  misc_RNA (1)...(19): siRNA sense strand
uaagaucauugacgaaggu

SEQ ID NO: 1246801 - RNA, 19 nt, Homo sapiens
  misc_RNA (1)...(19): siRNA sense strand
gaaaggaagagucgcacau

SEQ ID NO: 1246802 - RNA, 19 nt, Homo sapiens
  misc_RNA (1)...(19): siRNA sense strand
gaucugggcaaagcaaauu

SEQ ID NO: 1246803 - RNA, 19 nt, Homo sapiens
  misc_RNA (1)...(19): siRNA sense strand
ggauagugaugucucugau

SEQ ID NO: 1246804 - RNA, 19 nt, Homo sapiens
  misc_RNA (1)...(19): siRNA sense strand
agaaagcgaaacagccuua

SEQ ID NO: 1246805 - RNA, 19 nt, Homo sapiens
  misc_RNA (1)...(19): siRNA sense strand
cgaggagauuaauguuauu

SEQ ID NO: 1246806 - RNA, 19 nt, Homo sapiens
  misc_RNA (1)...(19): siRNA sense strand
gcagcaaguuauccagaag

SEQ ID NO: 1246807 - RNA, 19 nt, Homo sapiens
  misc_RNA (1)...(19): siRNA sense strand
aaugaacacacgaaugaua

SEQ ID NO: 1246808 - RNA, 19 nt, Homo sapiens
  misc_RNA (1)...(19): siRNA sense strand
cgaccuucaagucuuauua

SEQ ID NO: 1246809 - RNA, 19 nt, Homo sapiens
  misc_RNA (1)...(19): siRNA sense strand
acaguuagccaaguuguaa

SEQ ID NO: 1246810 - RNA, 19 nt, Homo sapiens
  misc_RNA (1)...(19): siRNA sense strand
aagcgaaacagccuuauug

SEQ ID NO: 1246811 - RNA, 19 nt, Homo sapiens
  misc_RNA (1)...(19): siRNA sense strand
aacauucccuuaagccaaa

SEQ ID NO: 1246812 - RNA, 19 nt, Homo sapiens
  misc_RNA (1)...(19): siRNA sense strand
cagcaggguuugagaggau

SEQ ID NO: 1246813 - RNA, 19 nt, Homo sapiens
  misc_RNA (1)...(19): siRNA sense strand
gccugaagauguaacugaa

SEQ ID NO: 1246814 - RNA, 19 nt, Homo sapiens
  misc_RNA (1)...(19): siRNA sense strand
caugggaggaggucaaauu

SEQ ID NO: 1246815 - RNA, 19 nt, Homo sapiens
  misc_RNA (1)...(19): siRNA sense strand
uuucgaccuucaagucuua

SEQ ID NO: 1246816 - RNA, 19 nt, Homo sapiens
  misc_RNA (1)...(19): siRNA sense strand
acaaagcccuaacucucuu

SEQ ID NO: 1246817 - RNA, 19 nt, Homo sapiens
  misc_RNA (1)...(19): siRNA sense strand
uaacacaacauccauucug

SEQ ID NO: 1246818 - RNA, 19 nt, Homo sapiens
  misc_RNA (1)...(19): siRNA sense strand
caccgaaggcucagauuga

SEQ ID NO: 1246819 - RNA, 19 nt, Homo sapiens
  misc_RNA (1)...(19): siRNA sense strand
aaagugguuucuugagaug

SEQ ID NO: 1246820 - RNA, 19 nt, Homo sapiens
  misc_RNA (1)...(19): siRNA sense strand
uaaaagugcuacuccaaug

SEQ ID NO: 1246821 - RNA, 19 nt, Homo sapiens
  misc_RNA (1)...(19): siRNA sense strand
gagauauacgaggagauua

SEQ ID NO: 1246822 - RNA, 19 nt, Homo sapiens
  misc_RNA (1)...(19): siRNA sense strand
uucaugagguuuaaggaaa

SEQ ID NO: 1246823 - RNA, 19 nt, Homo sapiens
  misc_RNA (1)...(19): siRNA sense strand
uaacucucuucaacucuau

SEQ ID NO: 1246824 - RNA, 19 nt, Homo sapiens
  misc_RNA (1)...(19): siRNA sense strand
ugacaacaaaggauuuaga

SEQ ID NO: 1246825 - RNA, 19 nt, Homo sapiens
  misc_RNA (1)...(19): siRNA sense strand
gaaguagagccugaagaug

SEQ ID NO: 1246826 - RNA, 19 nt, Homo sapiens
  misc_RNA (1)...(19): siRNA sense strand
cagcaaagcccggaugaca

SEQ ID NO: 1246827 - RNA, 19 nt, Homo sapiens
  misc_RNA (1)...(19): siRNA sense strand
agauauacgaggagauuaa

SEQ ID NO: 1246828 - RNA, 19 nt, Homo sapiens
  misc_RNA (1)...(19): siRNA sense strand
gccaaguuguaaaugcaaa

SEQ ID NO: 1246829 - RNA, 19 nt, Homo sapiens
  misc_RNA (1)...(19): siRNA sense strand
gcaaaaugcuaucaaacag

SEQ ID NO: 1246830 - RNA, 19 nt, Homo sapiens
  misc_RNA (1)...(19): siRNA sense strand
uuuaacagaugaggaguug

SEQ ID NO: 1246831 - RNA, 19 nt, Homo sapiens
  misc_RNA (1)...(19): siRNA sense strand
gggcaaagcaaauugaaaa

SEQ ID NO: 1246832 - RNA, 19 nt, Homo sapiens
  misc_RNA (1)...(19): siRNA sense strand
gcuaacacaacauccauuc

SEQ ID NO: 1246833 - RNA, 19 nt, Homo sapiens
  misc_RNA (1)...(19): siRNA sense strand
ccuagggcccuuaagaauu

SEQ ID NO: 1246834 - RNA, 19 nt, Homo sapiens
  misc_RNA (1)...(19): siRNA sense strand
aagaugcugugaacauugu

SEQ ID NO: 1246835 - RNA, 19 nt, Homo sapiens
  misc_RNA (1)...(19): siRNA sense strand
ggacaagggucaggugaug

SEQ ID NO: 1246836 - RNA, 19 nt, Homo sapiens
  misc_RNA (1)...(19): siRNA sense strand
ggaaggagaaccuggaguu

SEQ ID NO: 1246837 - RNA, 19 nt, Homo sapiens
  misc_RNA (1)...(19): siRNA sense strand
ggugaugacugguuacuac

SEQ ID NO: 1246838 - RNA, 19 nt, Homo sapiens
  misc_RNA (1)...(19): siRNA sense strand
gcagcagcgucuucgacua

SEQ ID NO: 1246839 - RNA, 19 nt, Homo sapiens
  misc_RNA (1)...(19): siRNA sense strand
ccugggaggucacaucuug

SEQ ID NO: 1246840 - RNA, 19 nt, Homo sapiens
  misc_RNA (1)...(19): siRNA sense strand
ccucuucgcuugcagauac

SEQ ID NO: 1246841 - RNA, 19 nt, Homo sapiens
  misc_RNA (1)...(19): siRNA sense strand
gaaaauuccucuacaucuc

SEQ ID NO: 1246842 - RNA, 19 nt, Homo sapiens
  misc_RNA (1)...(19): siRNA sense strand
gggcaaacgcaucaaagug

SEQ ID NO: 1246843 - RNA, 19 nt, Homo sapiens
  misc_RNA (1)...(19): siRNA sense strand
ggacaguggcgacgaggau

SEQ ID NO: 1246844 - RNA, 19 nt, Homo sapiens
  misc_RNA (1)...(19): siRNA sense strand
ccgcagcugcuaccaguuu

SEQ ID NO: 1246845 - RNA, 19 nt, Homo sapiens
  misc_RNA (1)...(19): siRNA sense strand
ugaaauccacgcucaccaa

SEQ ID NO: 1246846 - RNA, 19 nt, Homo sapiens
  misc_RNA (1)...(19): siRNA sense strand
gaggguggccaaacuccuu

SEQ ID NO: 1246847 - RNA, 19 nt, Homo sapiens
  misc_RNA (1)...(19): siRNA sense strand
ggcccgaguucaccucugu

SEQ ID NO: 1246848 - RNA, 19 nt, Homo sapiens
  misc_RNA (1)...(19): siRNA sense strand
aauccacgcucaccaagag

SEQ ID NO: 1246849 - RNA, 19 nt, Homo sapiens
  misc_RNA (1)...(19): siRNA sense strand
cgaguucaccucugucauc

SEQ ID NO: 1246850 - RNA, 19 nt, Homo sapiens
  misc_RNA (1)...(19): siRNA sense strand
gaaccaggaaggaaaauuc

SEQ ID NO: 1246851 - RNA, 19 nt, Homo sapiens
  misc_RNA (1)...(19): siRNA sense strand
gcgcuggucuccgaagucu

SEQ ID NO: 1246852 - RNA, 19 nt, Homo sapiens
  misc_RNA (1)...(19): siRNA sense strand
ggucucaccauccuugcuu

SEQ ID NO: 1246853 - RNA, 19 nt, Homo sapiens
  misc_RNA (1)...(19): siRNA sense strand
gcggaagcgaggucaaaug

SEQ ID NO: 1246854 - RNA, 19 nt, Homo sapiens
  misc_RNA (1)...(19): siRNA sense strand
cagcgucuucgacuacauu

SEQ ID NO: 1246855 - RNA, 19 nt, Homo sapiens
  misc_RNA (1)...(19): siRNA sense strand
ccagggcaaacgcaucaaa

SEQ ID NO: 1246856 - RNA, 19 nt, Homo sapiens
  misc_RNA (1)...(19): siRNA sense strand
ucguguggcugcagucugu

SEQ ID NO: 1246857 - RNA, 19 nt, Homo sapiens
  misc_RNA (1)...(19): siRNA sense strand
gcuuuguguucgccuugaa

SEQ ID NO: 1246858 - RNA, 19 nt, Homo sapiens
  misc_RNA (1)...(19): siRNA sense strand
cagagucagcgaccacaug

SEQ ID NO: 1246859 - RNA, 19 nt, Homo sapiens
  misc_RNA (1)...(19): siRNA sense strand
gacaagggucaggugauga

SEQ ID NO: 1246860 - RNA, 19 nt, Homo sapiens
  misc_RNA (1)...(19): siRNA sense strand
ccagagccacguggacuug

SEQ ID NO: 1246861 - RNA, 19 nt, Homo sapiens
  misc_RNA (1)...(19): siRNA sense strand
gcaaauguggugagaaaua

SEQ ID NO: 1246862 - RNA, 19 nt, Homo sapiens
  misc_RNA (1)...(19): siRNA sense strand
gcaaugaacugccaaaauu

SEQ ID NO: 1246863 - RNA, 19 nt, Homo sapiens
  misc_RNA (1)...(19): siRNA sense strand
gcaccuuuaucuaugguua

SEQ ID NO: 1246864 - RNA, 19 nt, Homo sapiens
  misc_RNA (1)...(19): siRNA sense strand
ugaaggaggucagguauau

SEQ ID NO: 1246865 - RNA, 19 nt, Homo sapiens
  misc_RNA (1)...(19): siRNA sense strand
caaauguggugagaaauau

SEQ ID NO: 1246866 - RNA, 19 nt, Homo sapiens
  misc_RNA (1)...(19): siRNA sense strand
ggacuugucugcacaucuc

SEQ ID NO: 1246867 - RNA, 19 nt, Homo sapiens
  misc_RNA (1)...(19): siRNA sense strand
ggugagaaauaucagcuau

SEQ ID NO: 1246868 - RNA, 19 nt, Homo sapiens
  misc_RNA (1)...(19): siRNA sense strand
cugcaaauguggugagaaa

SEQ ID NO: 1246869 - RNA, 19 nt, Homo sapiens
  misc_RNA (1)...(19): siRNA sense strand
ucaucuaccuggucacuau

SEQ ID NO: 1246870 - RNA, 19 nt, Homo sapiens
  misc_RNA (1)...(19): siRNA sense strand
ggcagcaccuuuaucuaug

SEQ ID NO: 1246871 - RNA, 19 nt, Homo sapiens
  misc_RNA (1)...(19): siRNA sense strand
caucauggcaguggaguuu

SEQ ID NO: 1246872 - RNA, 19 nt, Homo sapiens
  misc_RNA (1)...(19): siRNA sense strand
ggagcuccaugggauagaa

SEQ ID NO: 1246873 - RNA, 19 nt, Homo sapiens
  misc_RNA (1)...(19): siRNA sense strand
gaaccgaguguuugacaag

SEQ ID NO: 1246874 - RNA, 19 nt, Homo sapiens
  misc_RNA (1)...(19): siRNA sense strand
cgagucaucuugggcaaug

SEQ ID NO: 1246875 - RNA, 19 nt, Homo sapiens
  misc_RNA (1)...(19): siRNA sense strand
cggcagcaccuuuaucuau

SEQ ID NO: 1246876 - RNA, 19 nt, Homo sapiens
  misc_RNA (1)...(19): siRNA sense strand
gcagcaccuuuaucuaugg

SEQ ID NO: 1246877 - RNA, 19 nt, Homo sapiens
  misc_RNA (1)...(19): siRNA sense strand
ucauggcaguggaguuuga

SEQ ID NO: 1246878 - RNA, 19 nt, Homo sapiens
  misc_RNA (1)...(19): siRNA sense strand
ggaggucagguauauggaa

SEQ ID NO: 1246879 - RNA, 19 nt, Homo sapiens
  misc_RNA (1)...(19): siRNA sense strand
gcaggcgcuucaccacaga

SEQ ID NO: 1246880 - RNA, 19 nt, Homo sapiens
  misc_RNA (1)...(19): siRNA sense strand
gguggugaaccgaguguuu

SEQ ID NO: 1246881 - RNA, 19 nt, Homo sapiens
  misc_RNA (1)...(19): siRNA sense strand
uaucuaugguuauguggau

SEQ ID NO: 1246882 - RNA, 19 nt, Homo sapiens
  misc_RNA (1)...(19): siRNA sense strand
gugagaaauaucagcuaua

SEQ ID NO: 1246883 - RNA, 19 nt, Homo sapiens
  misc_RNA (1)...(19): siRNA sense strand
caucuacugugcacucucu

SEQ ID NO: 1246884 - RNA, 19 nt, Homo sapiens
  misc_RNA (1)...(19): siRNA sense strand
gugaaggaggucagguaua

SEQ ID NO: 1246885 - RNA, 19 nt, Homo sapiens
  misc_RNA (1)...(19): siRNA sense strand
gaaggaggucagguauaug

SEQ ID NO: 1246886 - RNA, 19 nt, Homo sapiens
  misc_RNA (1)...(19): siRNA sense strand
auaaauaucgagaggacuu

SEQ ID NO: 1246887 - RNA, 19 nt, Homo sapiens
  misc_RNA (1)...(19): siRNA sense strand
ugaaccgaguguuugacaa

SEQ ID NO: 1246888 - RNA, 19 nt, Homo sapiens
  misc_RNA (1)...(19): siRNA sense strand
gucugcacaucucauggua

SEQ ID NO: 1246889 - RNA, 19 nt, Homo sapiens
  misc_RNA (1)...(19): siRNA sense strand
ggaccaucgagucaucuug

SEQ ID NO: 1246890 - RNA, 19 nt, Homo sapiens
  misc_RNA (1)...(19): siRNA sense strand
gaggagugcaggcgcuuca

SEQ ID NO: 1246891 - RNA, 19 nt, Homo sapiens
  misc_RNA (1)...(19): siRNA sense strand
gguguggaccaucgaguca

SEQ ID NO: 1246892 - RNA, 19 nt, Homo sapiens
  misc_RNA (1)...(19): siRNA sense strand
gcaaauguggugagaaaua

SEQ ID NO: 1246893 - RNA, 19 nt, Homo sapiens
  misc_RNA (1)...(19): siRNA sense strand
gcaaugaacugccaaaauu

SEQ ID NO: 1246894 - RNA, 19 nt, Homo sapiens
  misc_RNA (1)...(19): siRNA sense strand
gcaccuuuaucuaugguua

SEQ ID NO: 1246895 - RNA, 19 nt, Homo sapiens
  misc_RNA (1)...(19): siRNA sense strand
ugaaggaggucagguauau

SEQ ID NO: 1246896 - RNA, 19 nt, Homo sapiens
  misc_RNA (1)...(19): siRNA sense strand
caaauguggugagaaauau

SEQ ID NO: 1246897 - RNA, 19 nt, Homo sapiens
  misc_RNA (1)...(19): siRNA sense strand
ggacuugucugcacaucuc

SEQ ID NO: 1246898 - RNA, 19 nt, Homo sapiens
  misc_RNA (1)...(19): siRNA sense strand
ggugagaaauaucagcuau

SEQ ID NO: 1246899 - RNA, 19 nt, Homo sapiens
  misc_RNA (1)...(19): siRNA sense strand
cugcaaauguggugagaaa

SEQ ID NO: 1246900 - RNA, 19 nt, Homo sapiens
  misc_RNA (1)...(19): siRNA sense strand
ucaucuaccuggucacuau

SEQ ID NO: 1246901 - RNA, 19 nt, Homo sapiens
  misc_RNA (1)...(19): siRNA sense strand
ggcagcaccuuuaucuaug

SEQ ID NO: 1246902 - RNA, 19 nt, Homo sapiens
  misc_RNA (1)...(19): siRNA sense strand
caucauggcaguggaguuu

SEQ ID NO: 1246903 - RNA, 19 nt, Homo sapiens
  misc_RNA (1)...(19): siRNA sense strand
ggagcuccaugggauagaa

SEQ ID NO: 1246904 - RNA, 19 nt, Homo sapiens
  misc_RNA (1)...(19): siRNA sense strand
gaaccgaguguuugacaag

SEQ ID NO: 1246905 - RNA, 19 nt, Homo sapiens
  misc_RNA (1)...(19): siRNA sense strand
cgagucaucuugggcaaug

SEQ ID NO: 1246906 - RNA, 19 nt, Homo sapiens
  misc_RNA (1)...(19): siRNA sense strand
cggcagcaccuuuaucuau

SEQ ID NO: 1246907 - RNA, 19 nt, Homo sapiens
  misc_RNA (1)...(19): siRNA sense strand
gcagcaccuuuaucuaugg

SEQ ID NO: 1246908 - RNA, 19 nt, Homo sapiens
  misc_RNA (1)...(19): siRNA sense strand
ucauggcaguggaguuuga

SEQ ID NO: 1246909 - RNA, 19 nt, Homo sapiens
  misc_RNA (1)...(19): siRNA sense strand
ggaggucagguauauggaa

SEQ ID NO: 1246910 - RNA, 19 nt, Homo sapiens
  misc_RNA (1)...(19): siRNA sense strand
gcaggcgcuucaccacaga

SEQ ID NO: 1246911 - RNA, 19 nt, Homo sapiens
  misc_RNA (1)...(19): siRNA sense strand
gguggugaaccgaguguuu

SEQ ID NO: 1246912 - RNA, 19 nt, Homo sapiens
  misc_RNA (1)...(19): siRNA sense strand
uaucuaugguuauguggau

SEQ ID NO: 1246913 - RNA, 19 nt, Homo sapiens
  misc_RNA (1)...(19): siRNA sense strand
gugagaaauaucagcuaua

SEQ ID NO: 1246914 - RNA, 19 nt, Homo sapiens
  misc_RNA (1)...(19): siRNA sense strand
caucuacugugcacucucu

SEQ ID NO: 1246915 - RNA, 19 nt, Homo sapiens
  misc_RNA (1)...(19): siRNA sense strand
gugaaggaggucagguaua

SEQ ID NO: 1246916 - RNA, 19 nt, Homo sapiens
  misc_RNA (1)...(19): siRNA sense strand
gaaggaggucagguauaug

SEQ ID NO: 1246917 - RNA, 19 nt, Homo sapiens
  misc_RNA (1)...(19): siRNA sense strand
auaaauaucgagaggacuu

SEQ ID NO: 1246918 - RNA, 19 nt, Homo sapiens
  misc_RNA (1)...(19): siRNA sense strand
ugaaccgaguguuugacaa

SEQ ID NO: 1246919 - RNA, 19 nt, Homo sapiens
  misc_RNA (1)...(19): siRNA sense strand
gucugcacaucucauggua

SEQ ID NO: 1246920 - RNA, 19 nt, Homo sapiens
  misc_RNA (1)...(19): siRNA sense strand
ggaccaucgagucaucuug

SEQ ID NO: 1246921 - RNA, 19 nt, Homo sapiens
  misc_RNA (1)...(19): siRNA sense strand
gaggagugcaggcgcuuca

SEQ ID NO: 1246922 - RNA, 19 nt, Homo sapiens
  misc_RNA (1)...(19): siRNA sense strand
gguguggaccaucgaguca

SEQ ID NO: 1246923 - RNA, 19 nt, Homo sapiens
  misc_RNA (1)...(19): siRNA sense strand
gccaugaacucgaaaguga

SEQ ID NO: 1246924 - RNA, 19 nt, Homo sapiens
  misc_RNA (1)...(19): siRNA sense strand
gaaggcgucuacaacaauu

SEQ ID NO: 1246925 - RNA, 19 nt, Homo sapiens
  misc_RNA (1)...(19): siRNA sense strand
ccaguuggcucgagagauu

SEQ ID NO: 1246926 - RNA, 19 nt, Homo sapiens
  misc_RNA (1)...(19): siRNA sense strand
gaggagaacuacgguguga

SEQ ID NO: 1246927 - RNA, 19 nt, Homo sapiens
  misc_RNA (1)...(19): siRNA sense strand
gggcuccacuugugaugua

SEQ ID NO: 1246928 - RNA, 19 nt, Homo sapiens
  misc_RNA (1)...(19): siRNA sense strand
auagcagucuuucuucuua

SEQ ID NO: 1246929 - RNA, 19 nt, Homo sapiens
  misc_RNA (1)...(19): siRNA sense strand
aaagacaaguucaccgauu

SEQ ID NO: 1246930 - RNA, 19 nt, Homo sapiens
  misc_RNA (1)...(19): siRNA sense strand
ucaagacgcuaagcucaaa

SEQ ID NO: 1246931 - RNA, 19 nt, Homo sapiens
  misc_RNA (1)...(19): siRNA sense strand
gaacuacggugugaagacu

SEQ ID NO: 1246932 - RNA, 19 nt, Homo sapiens
  misc_RNA (1)...(19): siRNA sense strand
acuaugaccucgagucuga

SEQ ID NO: 1246933 - RNA, 19 nt, Homo sapiens
  misc_RNA (1)...(19): siRNA sense strand
ggacagagcacaggaaagg

SEQ ID NO: 1246934 - RNA, 19 nt, Homo sapiens
  misc_RNA (1)...(19): siRNA sense strand
caacuaugcuacuaaagac

SEQ ID NO: 1246935 - RNA, 19 nt, Homo sapiens
  misc_RNA (1)...(19): siRNA sense strand
guucaccgauucagccauu

SEQ ID NO: 1246936 - RNA, 19 nt, Homo sapiens
  misc_RNA (1)...(19): siRNA sense strand
gaaauguucaaguucaaug

SEQ ID NO: 1246937 - RNA, 19 nt, Homo sapiens
  misc_RNA (1)...(19): siRNA sense strand
ucaacuaugcuacuaaaga

SEQ ID NO: 1246938 - RNA, 19 nt, Homo sapiens
  misc_RNA (1)...(19): siRNA sense strand
gugaagacuaccuaugaua

SEQ ID NO: 1246939 - RNA, 19 nt, Homo sapiens
  misc_RNA (1)...(19): siRNA sense strand
cuucaacuaugcuacuaaa

SEQ ID NO: 1246940 - RNA, 19 nt, Homo sapiens
  misc_RNA (1)...(19): siRNA sense strand
gcaacagcgacgacuauga

SEQ ID NO: 1246941 - RNA, 19 nt, Homo sapiens
  misc_RNA (1)...(19): siRNA sense strand
uaagccaagugaugucaug

SEQ ID NO: 1246942 - RNA, 19 nt, Homo sapiens
  misc_RNA (1)...(19): siRNA sense strand
gcacugaagaggagaagca

SEQ ID NO: 1246943 - RNA, 19 nt, Homo sapiens
  misc_RNA (1)...(19): siRNA sense strand
uaugauagcagucuuucuu

SEQ ID NO: 1246944 - RNA, 19 nt, Homo sapiens
  misc_RNA (1)...(19): siRNA sense strand
gccaagugaugucaugcuu

SEQ ID NO: 1246945 - RNA, 19 nt, Homo sapiens
  misc_RNA (1)...(19): siRNA sense strand
gugugaagacuaccuauga

SEQ ID NO: 1246946 - RNA, 19 nt, Homo sapiens
  misc_RNA (1)...(19): siRNA sense strand
gacgcuaagcucaaaguuu

SEQ ID NO: 1246947 - RNA, 19 nt, Homo sapiens
  misc_RNA (1)...(19): siRNA sense strand
gauagcagucuuucuucuu

SEQ ID NO: 1246948 - RNA, 19 nt, Homo sapiens
  misc_RNA (1)...(19): siRNA sense strand
cuuguucacuuccgaaaug

SEQ ID NO: 1246949 - RNA, 19 nt, Homo sapiens
  misc_RNA (1)...(19): siRNA sense strand
ggagaacuacggugugaag

SEQ ID NO: 1246950 - RNA, 19 nt, Homo sapiens
  misc_RNA (1)...(19): siRNA sense strand
ccauugccaugaacucgaa

SEQ ID NO: 1246951 - RNA, 19 nt, Homo sapiens
  misc_RNA (1)...(19): siRNA sense strand
gacuucaacuaugcuacua

SEQ ID NO: 1246952 - RNA, 19 nt, Homo sapiens
  misc_RNA (1)...(19): siRNA sense strand
cuuauacggugcccuuaga

SEQ ID NO: 1246953 - RNA, 19 nt, Homo sapiens
  misc_RNA (1)...(19): siRNA sense strand
aagacaaguucaccgauuc

SEQ ID NO: 1246954 - RNA, 19 nt, Homo sapiens
  misc_RNA (1)...(19): siRNA sense strand
cagcaacagcgacgacuau

SEQ ID NO: 1246955 - RNA, 19 nt, Homo sapiens
  misc_RNA (1)...(19): siRNA sense strand
caacagcgacgacuaugac

SEQ ID NO: 1246956 - RNA, 19 nt, Homo sapiens
  misc_RNA (1)...(19): siRNA sense strand
ugucaugcuuguucacuuc

SEQ ID NO: 1246957 - RNA, 19 nt, Homo sapiens
  misc_RNA (1)...(19): siRNA sense strand
agucugacauguccaaugg

SEQ ID NO: 1246958 - RNA, 19 nt, Homo sapiens
  misc_RNA (1)...(19): siRNA sense strand
uagcagucuuucuucuuau

SEQ ID NO: 1246959 - RNA, 19 nt, Homo sapiens
  misc_RNA (1)...(19): siRNA sense strand
uugaaggcgucuacaacaa

SEQ ID NO: 1246960 - RNA, 19 nt, Homo sapiens
  misc_RNA (1)...(19): siRNA sense strand
ggaucgccauggagaacga

SEQ ID NO: 1246961 - RNA, 19 nt, Homo sapiens
  misc_RNA (1)...(19): siRNA sense strand
agcagucuuucuucuuaua

SEQ ID NO: 1246962 - RNA, 19 nt, Homo sapiens
  misc_RNA (1)...(19): siRNA sense strand
guucacuuccgaaauguug

SEQ ID NO: 1246963 - RNA, 19 nt, Homo sapiens
  misc_RNA (1)...(19): siRNA sense strand
gcauuuccuuacagcuguu

SEQ ID NO: 1246964 - RNA, 19 nt, Homo sapiens
  misc_RNA (1)...(19): siRNA sense strand
cuuccgaaauguugacuuc

SEQ ID NO: 1246965 - RNA, 19 nt, Homo sapiens
  misc_RNA (1)...(19): siRNA sense strand
ugaaggcgucuacaacaau

SEQ ID NO: 1246966 - RNA, 19 nt, Homo sapiens
  misc_RNA (1)...(19): siRNA sense strand
ugugaagacuaccuaugau

SEQ ID NO: 1246967 - RNA, 19 nt, Homo sapiens
  misc_RNA (1)...(19): siRNA sense strand
ugauagcagucuuucuucu

SEQ ID NO: 1246968 - RNA, 19 nt, Homo sapiens
  misc_RNA (1)...(19): siRNA sense strand
gugaugucaugcuuguuca

SEQ ID NO: 1246969 - RNA, 19 nt, Homo sapiens
  misc_RNA (1)...(19): siRNA sense strand
aaaaugguaccacuuauga

SEQ ID NO: 1246970 - RNA, 19 nt, Homo sapiens
  misc_RNA (1)...(19): siRNA sense strand
gaaaaggacaacucagaag

SEQ ID NO: 1246971 - RNA, 19 nt, Homo sapiens
  misc_RNA (1)...(19): siRNA sense strand
gggagccgaaggcaucuug

SEQ ID NO: 1246972 - RNA, 19 nt, Homo sapiens
  misc_RNA (1)...(19): siRNA sense strand
gacgaugggcgcacugaag

SEQ ID NO: 1246973 - RNA, 19 nt, Homo sapiens
  misc_RNA (1)...(19): siRNA sense strand
caugaacucgaaagugaau

SEQ ID NO: 1246974 - RNA, 19 nt, Homo sapiens
  misc_RNA (1)...(19): siRNA sense strand
gaccucgagucugacaugu

SEQ ID NO: 1246975 - RNA, 19 nt, Homo sapiens
  misc_RNA (1)...(19): siRNA sense strand
ccacuugugauguaaaggu

SEQ ID NO: 1246976 - RNA, 19 nt, Homo sapiens
  misc_RNA (1)...(19): siRNA sense strand
ggaccccaaugaaauguuc

SEQ ID NO: 1246977 - RNA, 19 nt, Homo sapiens
  misc_RNA (1)...(19): siRNA sense strand
ggugugaagacuaccuaug

SEQ ID NO: 1246978 - RNA, 19 nt, Homo sapiens
  misc_RNA (1)...(19): siRNA sense strand
uauacggugcccuuagaaa

SEQ ID NO: 1246979 - RNA, 19 nt, Homo sapiens
  misc_RNA (1)...(19): siRNA sense strand
gccaugaacucgaaaguga

SEQ ID NO: 1246980 - RNA, 19 nt, Homo sapiens
  misc_RNA (1)...(19): siRNA sense strand
gaaggcgucuacaacaauu

SEQ ID NO: 1246981 - RNA, 19 nt, Homo sapiens
  misc_RNA (1)...(19): siRNA sense strand
ccaguuggcucgagagauu

SEQ ID NO: 1246982 - RNA, 19 nt, Homo sapiens
  misc_RNA (1)...(19): siRNA sense strand
gaggagaacuacgguguga

SEQ ID NO: 1246983 - RNA, 19 nt, Homo sapiens
  misc_RNA (1)...(19): siRNA sense strand
gggcuccacuugugaugua

SEQ ID NO: 1246984 - RNA, 19 nt, Homo sapiens
  misc_RNA (1)...(19): siRNA sense strand
gacggaagaucuuuuauuu

SEQ ID NO: 1246985 - RNA, 19 nt, Homo sapiens
  misc_RNA (1)...(19): siRNA sense strand
auagcagucuuucuucuua

SEQ ID NO: 1246986 - RNA, 19 nt, Homo sapiens
  misc_RNA (1)...(19): siRNA sense strand
aaagacaaguucaccgauu

SEQ ID NO: 1246987 - RNA, 19 nt, Homo sapiens
  misc_RNA (1)...(19): siRNA sense strand
ucaagacgcuaagcucaaa

SEQ ID NO: 1246988 - RNA, 19 nt, Homo sapiens
  misc_RNA (1)...(19): siRNA sense strand
gaacuacggugugaagacu

SEQ ID NO: 1246989 - RNA, 19 nt, Homo sapiens
  misc_RNA (1)...(19): siRNA sense strand
acuaugaccucgagucuga

SEQ ID NO: 1246990 - RNA, 19 nt, Homo sapiens
  misc_RNA (1)...(19): siRNA sense strand
caacuaugcuacuaaagac

SEQ ID NO: 1246991 - RNA, 19 nt, Homo sapiens
  misc_RNA (1)...(19): siRNA sense strand
ggacagagcacaggaaagg

SEQ ID NO: 1246992 - RNA, 19 nt, Homo sapiens
  misc_RNA (1)...(19): siRNA sense strand
guucaccgauucagccauu

SEQ ID NO: 1246993 - RNA, 19 nt, Homo sapiens
  misc_RNA (1)...(19): siRNA sense strand
gaaauguucaaguucaaug

SEQ ID NO: 1246994 - RNA, 19 nt, Homo sapiens
  misc_RNA (1)...(19): siRNA sense strand
ucaacuaugcuacuaaaga

SEQ ID NO: 1246995 - RNA, 19 nt, Homo sapiens
  misc_RNA (1)...(19): siRNA sense strand
gugaagacuaccuaugaua

SEQ ID NO: 1246996 - RNA, 19 nt, Homo sapiens
  misc_RNA (1)...(19): siRNA sense strand
cggaagaucuuuuauuuuc

SEQ ID NO: 1246997 - RNA, 19 nt, Homo sapiens
  misc_RNA (1)...(19): siRNA sense strand
cuucaacuaugcuacuaaa

SEQ ID NO: 1246998 - RNA, 19 nt, Homo sapiens
  misc_RNA (1)...(19): siRNA sense strand
gcaacagcgacgacuauga

SEQ ID NO: 1246999 - RNA, 19 nt, Homo sapiens
  misc_RNA (1)...(19): siRNA sense strand
uaagccaagugaugucaug

SEQ ID NO: 1247000 - RNA, 19 nt, Homo sapiens
  misc_RNA (1)...(19): siRNA sense strand
gcacugaagaggagaagca

SEQ ID NO: 1247001 - RNA, 19 nt, Homo sapiens
  misc_RNA (1)...(19): siRNA sense strand
uaugauagcagucuuucuu

SEQ ID NO: 1247002 - RNA, 19 nt, Homo sapiens
  misc_RNA (1)...(19): siRNA sense strand
gccaagugaugucaugcuu

SEQ ID NO: 1247003 - RNA, 19 nt, Homo sapiens
  misc_RNA (1)...(19): siRNA sense strand
gugugaagacuaccuauga

SEQ ID NO: 1247004 - RNA, 19 nt, Homo sapiens
  misc_RNA (1)...(19): siRNA sense strand
gacgcuaagcucaaaguuu

SEQ ID NO: 1247005 - RNA, 19 nt, Homo sapiens
  misc_RNA (1)...(19): siRNA sense strand
gauagcagucuuucuucuu

SEQ ID NO: 1247006 - RNA, 19 nt, Homo sapiens
  misc_RNA (1)...(19): siRNA sense strand
cuuguucacuuccgaaaug

SEQ ID NO: 1247007 - RNA, 19 nt, Homo sapiens
  misc_RNA (1)...(19): siRNA sense strand
ggagaacuacggugugaag

SEQ ID NO: 1247008 - RNA, 19 nt, Homo sapiens
  misc_RNA (1)...(19): siRNA sense strand
ccauugccaugaacucgaa

SEQ ID NO: 1247009 - RNA, 19 nt, Homo sapiens
  misc_RNA (1)...(19): siRNA sense strand
ggagacggaagaucuuuua

SEQ ID NO: 1247010 - RNA, 19 nt, Homo sapiens
  misc_RNA (1)...(19): siRNA sense strand
gacuucaacuaugcuacua

SEQ ID NO: 1247011 - RNA, 19 nt, Homo sapiens
  misc_RNA (1)...(19): siRNA sense strand
cuuauacggugcccuuaga

SEQ ID NO: 1247012 - RNA, 19 nt, Homo sapiens
  misc_RNA (1)...(19): siRNA sense strand
aagacaaguucaccgauuc

SEQ ID NO: 1247013 - RNA, 19 nt, Homo sapiens
  misc_RNA (1)...(19): siRNA sense strand
cagcaacagcgacgacuau

SEQ ID NO: 1247014 - RNA, 19 nt, Homo sapiens
  misc_RNA (1)...(19): siRNA sense strand
cccauccucucaucuauuc

SEQ ID NO: 1247015 - RNA, 19 nt, Homo sapiens
  misc_RNA (1)...(19): siRNA sense strand
caacagcgacgacuaugac

SEQ ID NO: 1247016 - RNA, 19 nt, Homo sapiens
  misc_RNA (1)...(19): siRNA sense strand
ugucaugcuuguucacuuc

SEQ ID NO: 1247017 - RNA, 19 nt, Homo sapiens
  misc_RNA (1)...(19): siRNA sense strand
agucugacauguccaaugg

SEQ ID NO: 1247018 - RNA, 19 nt, Homo sapiens
  misc_RNA (1)...(19): siRNA sense strand
uugaaggcgucuacaacaa

SEQ ID NO: 1247019 - RNA, 19 nt, Homo sapiens
  misc_RNA (1)...(19): siRNA sense strand
ggaucgccauggagaacga

SEQ ID NO: 1247020 - RNA, 19 nt, Homo sapiens
  misc_RNA (1)...(19): siRNA sense strand
agcagucuuucuucuuaua

SEQ ID NO: 1247021 - RNA, 19 nt, Homo sapiens
  misc_RNA (1)...(19): siRNA sense strand
uagcagucuuucuucuuau

SEQ ID NO: 1247022 - RNA, 19 nt, Homo sapiens
  misc_RNA (1)...(19): siRNA sense strand
guucacuuccgaaauguug

SEQ ID NO: 1247023 - RNA, 19 nt, Homo sapiens
  misc_RNA (1)...(19): siRNA sense strand
gcauuuccuuacagcuguu

SEQ ID NO: 1247024 - RNA, 19 nt, Homo sapiens
  misc_RNA (1)...(19): siRNA sense strand
cuuccgaaauguugacuuc

SEQ ID NO: 1247025 - RNA, 19 nt, Homo sapiens
  misc_RNA (1)...(19): siRNA sense strand
ugaaggcgucuacaacaau

SEQ ID NO: 1247026 - RNA, 19 nt, Homo sapiens
  misc_RNA (1)...(19): siRNA sense strand
ugugaagacuaccuaugau

SEQ ID NO: 1247027 - RNA, 19 nt, Homo sapiens
  misc_RNA (1)...(19): siRNA sense strand
ugauagcagucuuucuucu

SEQ ID NO: 1247028 - RNA, 19 nt, Homo sapiens
  misc_RNA (1)...(19): siRNA sense strand
gugaugucaugcuuguuca

SEQ ID NO: 1247029 - RNA, 19 nt, Homo sapiens
  misc_RNA (1)...(19): siRNA sense strand
aaaaugguaccacuuauga

SEQ ID NO: 1247030 - RNA, 19 nt, Homo sapiens
  misc_RNA (1)...(19): siRNA sense strand
gaaaaggacaacucagaag

SEQ ID NO: 1247031 - RNA, 19 nt, Homo sapiens
  misc_RNA (1)...(19): siRNA sense strand
caugaacucgaaagugaau

SEQ ID NO: 1247032 - RNA, 19 nt, Homo sapiens
  misc_RNA (1)...(19): siRNA sense strand
gacgaugggcgcacugaag

SEQ ID NO: 1247033 - RNA, 19 nt, Homo sapiens
  misc_RNA (1)...(19): siRNA sense strand
gggagccgaaggcaucuug

SEQ ID NO: 1247034 - RNA, 19 nt, Homo sapiens
  misc_RNA (1)...(19): siRNA sense strand
ccacuugugauguaaaggu

SEQ ID NO: 1247035 - RNA, 19 nt, Homo sapiens
  misc_RNA (1)...(19): siRNA sense strand
ggaccccaaugaaauguuc

SEQ ID NO: 1247036 - RNA, 19 nt, Homo sapiens
  misc_RNA (1)...(19): siRNA sense strand
gaccucgagucugacaugu

SEQ ID NO: 1247037 - RNA, 19 nt, Homo sapiens
  misc_RNA (1)...(19): siRNA sense strand
ggugugaagacuaccuaug

SEQ ID NO: 1247038 - RNA, 19 nt, Homo sapiens
  misc_RNA (1)...(19): siRNA sense strand
ccucccauccucucaucua

SEQ ID NO: 1247039 - RNA, 19 nt, Homo sapiens
  misc_RNA (1)...(19): siRNA sense strand
uauacggugcccuuagaaa

SEQ ID NO: 1247040 - RNA, 19 nt, Homo sapiens
  misc_RNA (1)...(19): siRNA sense strand
gccaugaacucgaaaguga

SEQ ID NO: 1247041 - RNA, 19 nt, Homo sapiens
  misc_RNA (1)...(19): siRNA sense strand
gaaggcgucuacaacaauu

SEQ ID NO: 1247042 - RNA, 19 nt, Homo sapiens
  misc_RNA (1)...(19): siRNA sense strand
ccaguuggcucgagagauu

SEQ ID NO: 1247043 - RNA, 19 nt, Homo sapiens
  misc_RNA (1)...(19): siRNA sense strand
gaggagaacuacgguguga

SEQ ID NO: 1247044 - RNA, 19 nt, Homo sapiens
  misc_RNA (1)...(19): siRNA sense strand
gggcuccacuugugaugua

SEQ ID NO: 1247045 - RNA, 19 nt, Homo sapiens
  misc_RNA (1)...(19): siRNA sense strand
auagcagucuuucuucuua

SEQ ID NO: 1247046 - RNA, 19 nt, Homo sapiens
  misc_RNA (1)...(19): siRNA sense strand
aaagacaaguucaccgauu

SEQ ID NO: 1247047 - RNA, 19 nt, Homo sapiens
  misc_RNA (1)...(19): siRNA sense strand
ucaagacgcuaagcucaaa

SEQ ID NO: 1247048 - RNA, 19 nt, Homo sapiens
  misc_RNA (1)...(19): siRNA sense strand
gaacuacggugugaagacu

SEQ ID NO: 1247049 - RNA, 19 nt, Homo sapiens
  misc_RNA (1)...(19): siRNA sense strand
acuaugaccucgagucuga

SEQ ID NO: 1247050 - RNA, 19 nt, Homo sapiens
  misc_RNA (1)...(19): siRNA sense strand
ggacagagcacaggaaagg

SEQ ID NO: 1247051 - RNA, 19 nt, Homo sapiens
  misc_RNA (1)...(19): siRNA sense strand
caacuaugcuacuaaagac

SEQ ID NO: 1247052 - RNA, 19 nt, Homo sapiens
  misc_RNA (1)...(19): siRNA sense strand
guucaccgauucagccauu

SEQ ID NO: 1247053 - RNA, 19 nt, Homo sapiens
  misc_RNA (1)...(19): siRNA sense strand
gaaauguucaaguucaaug

SEQ ID NO: 1247054 - RNA, 19 nt, Homo sapiens
  misc_RNA (1)...(19): siRNA sense strand
ucaacuaugcuacuaaaga

SEQ ID NO: 1247055 - RNA, 19 nt, Homo sapiens
  misc_RNA (1)...(19): siRNA sense strand
gugaagacuaccuaugaua

SEQ ID NO: 1247056 - RNA, 19 nt, Homo sapiens
  misc_RNA (1)...(19): siRNA sense strand
cuucaacuaugcuacuaaa

SEQ ID NO: 1247057 - RNA, 19 nt, Homo sapiens
  misc_RNA (1)...(19): siRNA sense strand
gcaacagcgacgacuauga

SEQ ID NO: 1247058 - RNA, 19 nt, Homo sapiens
  misc_RNA (1)...(19): siRNA sense strand
uaagccaagugaugucaug

SEQ ID NO: 1247059 - RNA, 19 nt, Homo sapiens
  misc_RNA (1)...(19): siRNA sense strand
gcacugaagaggagaagca

SEQ ID NO: 1247060 - RNA, 19 nt, Homo sapiens
  misc_RNA (1)...(19): siRNA sense strand
uaugauagcagucuuucuu

SEQ ID NO: 1247061 - RNA, 19 nt, Homo sapiens
  misc_RNA (1)...(19): siRNA sense strand
gccaagugaugucaugcuu

SEQ ID NO: 1247062 - RNA, 19 nt, Homo sapiens
  misc_RNA (1)...(19): siRNA sense strand
gugugaagacuaccuauga

SEQ ID NO: 1247063 - RNA, 19 nt, Homo sapiens
  misc_RNA (1)...(19): siRNA sense strand
gacgcuaagcucaaaguuu

SEQ ID NO: 1247064 - RNA, 19 nt, Homo sapiens
  misc_RNA (1)...(19): siRNA sense strand
gauagcagucuuucuucuu

SEQ ID NO: 1247065 - RNA, 19 nt, Homo sapiens
  misc_RNA (1)...(19): siRNA sense strand
cuuguucacuuccgaaaug

SEQ ID NO: 1247066 - RNA, 19 nt, Homo sapiens
  misc_RNA (1)...(19): siRNA sense strand
ggagaacuacggugugaag

SEQ ID NO: 1247067 - RNA, 19 nt, Homo sapiens
  misc_RNA (1)...(19): siRNA sense strand
ccauugccaugaacucgaa

SEQ ID NO: 1247068 - RNA, 19 nt, Homo sapiens
  misc_RNA (1)...(19): siRNA sense strand
gacuucaacuaugcuacua

SEQ ID NO: 1247069 - RNA, 19 nt, Homo sapiens
  misc_RNA (1)...(19): siRNA sense strand
cuuauacggugcccuuaga

SEQ ID NO: 1247070 - RNA, 19 nt, Homo sapiens
  misc_RNA (1)...(19): siRNA sense strand
aagacaaguucaccgauuc

SEQ ID NO: 1247071 - RNA, 19 nt, Homo sapiens
  misc_RNA (1)...(19): siRNA sense strand
cagcaacagcgacgacuau

SEQ ID NO: 1247072 - RNA, 19 nt, Homo sapiens
  misc_RNA (1)...(19): siRNA sense strand
caacagcgacgacuaugac

SEQ ID NO: 1247073 - RNA, 19 nt, Homo sapiens
  misc_RNA (1)...(19): siRNA sense strand
ugucaugcuuguucacuuc

SEQ ID NO: 1247074 - RNA, 19 nt, Homo sapiens
  misc_RNA (1)...(19): siRNA sense strand
agucugacauguccaaugg

SEQ ID NO: 1247075 - RNA, 19 nt, Homo sapiens
  misc_RNA (1)...(19): siRNA sense strand
uagcagucuuucuucuuau

SEQ ID NO: 1247076 - RNA, 19 nt, Homo sapiens
  misc_RNA (1)...(19): siRNA sense strand
uugaaggcgucuacaacaa

SEQ ID NO: 1247077 - RNA, 19 nt, Homo sapiens
  misc_RNA (1)...(19): siRNA sense strand
ggaucgccauggagaacga

SEQ ID NO: 1247078 - RNA, 19 nt, Homo sapiens
  misc_RNA (1)...(19): siRNA sense strand
agcagucuuucuucuuaua

SEQ ID NO: 1247079 - RNA, 19 nt, Homo sapiens
  misc_RNA (1)...(19): siRNA sense strand
guucacuuccgaaauguug

SEQ ID NO: 1247080 - RNA, 19 nt, Homo sapiens
  misc_RNA (1)...(19): siRNA sense strand
gcauuuccuuacagcuguu

SEQ ID NO: 1247081 - RNA, 19 nt, Homo sapiens
  misc_RNA (1)...(19): siRNA sense strand
cuuccgaaauguugacuuc

SEQ ID NO: 1247082 - RNA, 19 nt, Homo sapiens
  misc_RNA (1)...(19): siRNA sense strand
ugaaggcgucuacaacaau

SEQ ID NO: 1247083 - RNA, 19 nt, Homo sapiens
  misc_RNA (1)...(19): siRNA sense strand
ugugaagacuaccuaugau

SEQ ID NO: 1247084 - RNA, 19 nt, Homo sapiens
  misc_RNA (1)...(19): siRNA sense strand
ugauagcagucuuucuucu

SEQ ID NO: 1247085 - RNA, 19 nt, Homo sapiens
  misc_RNA (1)...(19): siRNA sense strand
gugaugucaugcuuguuca

SEQ ID NO: 1247086 - RNA, 19 nt, Homo sapiens
  misc_RNA (1)...(19): siRNA sense strand
aaaaugguaccacuuauga

SEQ ID NO: 1247087 - RNA, 19 nt, Homo sapiens
  misc_RNA (1)...(19): siRNA sense strand
gaaaaggacaacucagaag

SEQ ID NO: 1247088 - RNA, 19 nt, Homo sapiens
  misc_RNA (1)...(19): siRNA sense strand
gggagccgaaggcaucuug

SEQ ID NO: 1247089 - RNA, 19 nt, Homo sapiens
  misc_RNA (1)...(19): siRNA sense strand
gacgaugggcgcacugaag

SEQ ID NO: 1247090 - RNA, 19 nt, Homo sapiens
  misc_RNA (1)...(19): siRNA sense strand
caugaacucgaaagugaau

SEQ ID NO: 1247091 - RNA, 19 nt, Homo sapiens
  misc_RNA (1)...(19): siRNA sense strand
gaccucgagucugacaugu

SEQ ID NO: 1247092 - RNA, 19 nt, Homo sapiens
  misc_RNA (1)...(19): siRNA sense strand
ccacuugugauguaaaggu

SEQ ID NO: 1247093 - RNA, 19 nt, Homo sapiens
  misc_RNA (1)...(19): siRNA sense strand
ggaccccaaugaaauguuc

SEQ ID NO: 1247094 - RNA, 19 nt, Homo sapiens
  misc_RNA (1)...(19): siRNA sense strand
ggugugaagacuaccuaug

SEQ ID NO: 1247095 - RNA, 19 nt, Homo sapiens
  misc_RNA (1)...(19): siRNA sense strand
uauacggugcccuuagaaa

SEQ ID NO: 1247096 - RNA, 19 nt, Homo sapiens
  misc_RNA (1)...(19): siRNA sense strand
gccaugaacucgaaaguga

SEQ ID NO: 1247097 - RNA, 19 nt, Homo sapiens
  misc_RNA (1)...(19): siRNA sense strand
gaaggcgucuacaacaauu

SEQ ID NO: 1247098 - RNA, 19 nt, Homo sapiens
  misc_RNA (1)...(19): siRNA sense strand
ccaguuggcucgagagauu

SEQ ID NO: 1247099 - RNA, 19 nt, Homo sapiens
  misc_RNA (1)...(19): siRNA sense strand
gaggagaacuacgguguga

SEQ ID NO: 1247100 - RNA, 19 nt, Homo sapiens
  misc_RNA (1)...(19): siRNA sense strand
gggcuccacuugugaugua

SEQ ID NO: 1247101 - RNA, 19 nt, Homo sapiens
  misc_RNA (1)...(19): siRNA sense strand
auagcagucuuucuucuua

SEQ ID NO: 1247102 - RNA, 19 nt, Homo sapiens
  misc_RNA (1)...(19): siRNA sense strand
aaagacaaguucaccgauu

SEQ ID NO: 1247103 - RNA, 19 nt, Homo sapiens
  misc_RNA (1)...(19): siRNA sense strand
ucaagacgcuaagcucaaa

SEQ ID NO: 1247104 - RNA, 19 nt, Homo sapiens
  misc_RNA (1)...(19): siRNA sense strand
gaacuacggugugaagacu

SEQ ID NO: 1247105 - RNA, 19 nt, Homo sapiens
  misc_RNA (1)...(19): siRNA sense strand
acuaugaccucgagucuga

SEQ ID NO: 1247106 - RNA, 19 nt, Homo sapiens
  misc_RNA (1)...(19): siRNA sense strand
ggacagagcacaggaaagg

SEQ ID NO: 1247107 - RNA, 19 nt, Homo sapiens
  misc_RNA (1)...(19): siRNA sense strand
caacuaugcuacuaaagac

SEQ ID NO: 1247108 - RNA, 19 nt, Homo sapiens
  misc_RNA (1)...(19): siRNA sense strand
guucaccgauucagccauu

SEQ ID NO: 1247109 - RNA, 19 nt, Homo sapiens
  misc_RNA (1)...(19): siRNA sense strand
gaaauguucaaguucaaug

SEQ ID NO: 1247110 - RNA, 19 nt, Homo sapiens
  misc_RNA (1)...(19): siRNA sense strand
ucaacuaugcuacuaaaga

SEQ ID NO: 1247111 - RNA, 19 nt, Homo sapiens
  misc_RNA (1)...(19): siRNA sense strand
gugaagacuaccuaugaua

SEQ ID NO: 1247112 - RNA, 19 nt, Homo sapiens
  misc_RNA (1)...(19): siRNA sense strand
cuucaacuaugcuacuaaa

SEQ ID NO: 1247113 - RNA, 19 nt, Homo sapiens
  misc_RNA (1)...(19): siRNA sense strand
gcaacagcgacgacuauga

SEQ ID NO: 1247114 - RNA, 19 nt, Homo sapiens
  misc_RNA (1)...(19): siRNA sense strand
uaagccaagugaugucaug

SEQ ID NO: 1247115 - RNA, 19 nt, Homo sapiens
  misc_RNA (1)...(19): siRNA sense strand
gcacugaagaggagaagca

SEQ ID NO: 1247116 - RNA, 19 nt, Homo sapiens
  misc_RNA (1)...(19): siRNA sense strand
uaugauagcagucuuucuu

SEQ ID NO: 1247117 - RNA, 19 nt, Homo sapiens
  misc_RNA (1)...(19): siRNA sense strand
gccaagugaugucaugcuu

SEQ ID NO: 1247118 - RNA, 19 nt, Homo sapiens
  misc_RNA (1)...(19): siRNA sense strand
gugugaagacuaccuauga

SEQ ID NO: 1247119 - RNA, 19 nt, Homo sapiens
  misc_RNA (1)...(19): siRNA sense strand
gacgcuaagcucaaaguuu

SEQ ID NO: 1247120 - RNA, 19 nt, Homo sapiens
  misc_RNA (1)...(19): siRNA sense strand
gauagcagucuuucuucuu

SEQ ID NO: 1247121 - RNA, 19 nt, Homo sapiens
  misc_RNA (1)...(19): siRNA sense strand
cuuguucacuuccgaaaug

SEQ ID NO: 1247122 - RNA, 19 nt, Homo sapiens
  misc_RNA (1)...(19): siRNA sense strand
ggagaacuacggugugaag

SEQ ID NO: 1247123 - RNA, 19 nt, Homo sapiens
  misc_RNA (1)...(19): siRNA sense strand
ccauugccaugaacucgaa

SEQ ID NO: 1247124 - RNA, 19 nt, Homo sapiens
  misc_RNA (1)...(19): siRNA sense strand
gacuucaacuaugcuacua

SEQ ID NO: 1247125 - RNA, 19 nt, Homo sapiens
  misc_RNA (1)...(19): siRNA sense strand
cuuauacggugcccuuaga

SEQ ID NO: 1247126 - RNA, 19 nt, Homo sapiens
  misc_RNA (1)...(19): siRNA sense strand
aagacaaguucaccgauuc

SEQ ID NO: 1247127 - RNA, 19 nt, Homo sapiens
  misc_RNA (1)...(19): siRNA sense strand
cagcaacagcgacgacuau

SEQ ID NO: 1247128 - RNA, 19 nt, Homo sapiens
  misc_RNA (1)...(19): siRNA sense strand
caacagcgacgacuaugac

SEQ ID NO: 1247129 - RNA, 19 nt, Homo sapiens
  misc_RNA (1)...(19): siRNA sense strand
ugucaugcuuguucacuuc

SEQ ID NO: 1247130 - RNA, 19 nt, Homo sapiens
  misc_RNA (1)...(19): siRNA sense strand
agucugacauguccaaugg

SEQ ID NO: 1247131 - RNA, 19 nt, Homo sapiens
  misc_RNA (1)...(19): siRNA sense strand
uagcagucuuucuucuuau

SEQ ID NO: 1247132 - RNA, 19 nt, Homo sapiens
  misc_RNA (1)...(19): siRNA sense strand
uugaaggcgucuacaacaa

SEQ ID NO: 1247133 - RNA, 19 nt, Homo sapiens
  misc_RNA (1)...(19): siRNA sense strand
ggaucgccauggagaacga

SEQ ID NO: 1247134 - RNA, 19 nt, Homo sapiens
  misc_RNA (1)...(19): siRNA sense strand
agcagucuuucuucuuaua

SEQ ID NO: 1247135 - RNA, 19 nt, Homo sapiens
  misc_RNA (1)...(19): siRNA sense strand
guucacuuccgaaauguug

SEQ ID NO: 1247136 - RNA, 19 nt, Homo sapiens
  misc_RNA (1)...(19): siRNA sense strand
gcauuuccuuacagcuguu

SEQ ID NO: 1247137 - RNA, 19 nt, Homo sapiens
  misc_RNA (1)...(19): siRNA sense strand
cuuccgaaauguugacuuc

SEQ ID NO: 1247138 - RNA, 19 nt, Homo sapiens
  misc_RNA (1)...(19): siRNA sense strand
ugaaggcgucuacaacaau

SEQ ID NO: 1247139 - RNA, 19 nt, Homo sapiens
  misc_RNA (1)...(19): siRNA sense strand
ugugaagacuaccuaugau

SEQ ID NO: 1247140 - RNA, 19 nt, Homo sapiens
  misc_RNA (1)...(19): siRNA sense strand
ugauagcagucuuucuucu

SEQ ID NO: 1247141 - RNA, 19 nt, Homo sapiens
  misc_RNA (1)...(19): siRNA sense strand
gugaugucaugcuuguuca

SEQ ID NO: 1247142 - RNA, 19 nt, Homo sapiens
  misc_RNA (1)...(19): siRNA sense strand
aaaaugguaccacuuauga

SEQ ID NO: 1247143 - RNA, 19 nt, Homo sapiens
  misc_RNA (1)...(19): siRNA sense strand
gaaaaggacaacucagaag

SEQ ID NO: 1247144 - RNA, 19 nt, Homo sapiens
  misc_RNA (1)...(19): siRNA sense strand
gggagccgaaggcaucuug

SEQ ID NO: 1247145 - RNA, 19 nt, Homo sapiens
  misc_RNA (1)...(19): siRNA sense strand
gacgaugggcgcacugaag

SEQ ID NO: 1247146 - RNA, 19 nt, Homo sapiens
  misc_RNA (1)...(19): siRNA sense strand
caugaacucgaaagugaau

SEQ ID NO: 1247147 - RNA, 19 nt, Homo sapiens
  misc_RNA (1)...(19): siRNA sense strand
gaccucgagucugacaugu

SEQ ID NO: 1247148 - RNA, 19 nt, Homo sapiens
  misc_RNA (1)...(19): siRNA sense strand
ccacuugugauguaaaggu

SEQ ID NO: 1247149 - RNA, 19 nt, Homo sapiens
  misc_RNA (1)...(19): siRNA sense strand
ggaccccaaugaaauguuc

SEQ ID NO: 1247150 - RNA, 19 nt, Homo sapiens
  misc_RNA (1)...(19): siRNA sense strand
ggugugaagacuaccuaug

SEQ ID NO: 1247151 - RNA, 19 nt, Homo sapiens
  misc_RNA (1)...(19): siRNA sense strand
uauacggugcccuuagaaa

SEQ ID NO: 1247152 - RNA, 19 nt, Homo sapiens
  misc_RNA (1)...(19): siRNA sense strand
gccaugaacucgaaaguga

SEQ ID NO: 1247153 - RNA, 19 nt, Homo sapiens
  misc_RNA (1)...(19): siRNA sense strand
gaaggcgucuacaacaauu

SEQ ID NO: 1247154 - RNA, 19 nt, Homo sapiens
  misc_RNA (1)...(19): siRNA sense strand
ccaguuggcucgagagauu

SEQ ID NO: 1247155 - RNA, 19 nt, Homo sapiens
  misc_RNA (1)...(19): siRNA sense strand
gaggagaacuacgguguga

SEQ ID NO: 1247156 - RNA, 19 nt, Homo sapiens
  misc_RNA (1)...(19): siRNA sense strand
gggcuccacuugugaugua

SEQ ID NO: 1247157 - RNA, 19 nt, Homo sapiens
  misc_RNA (1)...(19): siRNA sense strand
auagcagucuuucuucuua

SEQ ID NO: 1247158 - RNA, 19 nt, Homo sapiens
  misc_RNA (1)...(19): siRNA sense strand
aaagacaaguucaccgauu

SEQ ID NO: 1247159 - RNA, 19 nt, Homo sapiens
  misc_RNA (1)...(19): siRNA sense strand
ucaagacgcuaagcucaaa

SEQ ID NO: 1247160 - RNA, 19 nt, Homo sapiens
  misc_RNA (1)...(19): siRNA sense strand
gaacuacggugugaagacu

SEQ ID NO: 1247161 - RNA, 19 nt, Homo sapiens
  misc_RNA (1)...(19): siRNA sense strand
acuaugaccucgagucuga

SEQ ID NO: 1247162 - RNA, 19 nt, Homo sapiens
  misc_RNA (1)...(19): siRNA sense strand
ggacagagcacaggaaagg

SEQ ID NO: 1247163 - RNA, 19 nt, Homo sapiens
  misc_RNA (1)...(19): siRNA sense strand
caacuaugcuacuaaagac

SEQ ID NO: 1247164 - RNA, 19 nt, Homo sapiens
  misc_RNA (1)...(19): siRNA sense strand
guucaccgauucagccauu

SEQ ID NO: 1247165 - RNA, 19 nt, Homo sapiens
  misc_RNA (1)...(19): siRNA sense strand
gaaauguucaaguucaaug

SEQ ID NO: 1247166 - RNA, 19 nt, Homo sapiens
  misc_RNA (1)...(19): siRNA sense strand
ucaacuaugcuacuaaaga

SEQ ID NO: 1247167 - RNA, 19 nt, Homo sapiens
  misc_RNA (1)...(19): siRNA sense strand
gugaagacuaccuaugaua

SEQ ID NO: 1247168 - RNA, 19 nt, Homo sapiens
  misc_RNA (1)...(19): siRNA sense strand
cuucaacuaugcuacuaaa

SEQ ID NO: 1247169 - RNA, 19 nt, Homo sapiens
  misc_RNA (1)...(19): siRNA sense strand
gcaacagcgacgacuauga

SEQ ID NO: 1247170 - RNA, 19 nt, Homo sapiens
  misc_RNA (1)...(19): siRNA sense strand
uaagccaagugaugucaug

SEQ ID NO: 1247171 - RNA, 19 nt, Homo sapiens
  misc_RNA (1)...(19): siRNA sense strand
gcacugaagaggagaagca

SEQ ID NO: 1247172 - RNA, 19 nt, Homo sapiens
  misc_RNA (1)...(19): siRNA sense strand
uaugauagcagucuuucuu

SEQ ID NO: 1247173 - RNA, 19 nt, Homo sapiens
  misc_RNA (1)...(19): siRNA sense strand
gccaagugaugucaugcuu

SEQ ID NO: 1247174 - RNA, 19 nt, Homo sapiens
  misc_RNA (1)...(19): siRNA sense strand
gugugaagacuaccuauga

SEQ ID NO: 1247175 - RNA, 19 nt, Homo sapiens
  misc_RNA (1)...(19): siRNA sense strand
gacgcuaagcucaaaguuu

SEQ ID NO: 1247176 - RNA, 19 nt, Homo sapiens
  misc_RNA (1)...(19): siRNA sense strand
gauagcagucuuucuucuu

SEQ ID NO: 1247177 - RNA, 19 nt, Homo sapiens
  misc_RNA (1)...(19): siRNA sense strand
cuuguucacuuccgaaaug

SEQ ID NO: 1247178 - RNA, 19 nt, Homo sapiens
  misc_RNA (1)...(19): siRNA sense strand
ggagaacuacggugugaag

SEQ ID NO: 1247179 - RNA, 19 nt, Homo sapiens
  misc_RNA (1)...(19): siRNA sense strand
ccauugccaugaacucgaa

SEQ ID NO: 1247180 - RNA, 19 nt, Homo sapiens
  misc_RNA (1)...(19): siRNA sense strand
gacuucaacuaugcuacua

SEQ ID NO: 1247181 - RNA, 19 nt, Homo sapiens
  misc_RNA (1)...(19): siRNA sense strand
cuuauacggugcccuuaga

SEQ ID NO: 1247182 - RNA, 19 nt, Homo sapiens
  misc_RNA (1)...(19): siRNA sense strand
aagacaaguucaccgauuc

SEQ ID NO: 1247183 - RNA, 19 nt, Homo sapiens
  misc_RNA (1)...(19): siRNA sense strand
cagcaacagcgacgacuau

SEQ ID NO: 1247184 - RNA, 19 nt, Homo sapiens
  misc_RNA (1)...(19): siRNA sense strand
caacagcgacgacuaugac

SEQ ID NO: 1247185 - RNA, 19 nt, Homo sapiens
  misc_RNA (1)...(19): siRNA sense strand
ugucaugcuuguucacuuc

SEQ ID NO: 1247186 - RNA, 19 nt, Homo sapiens
  misc_RNA (1)...(19): siRNA sense strand
agucugacauguccaaugg

SEQ ID NO: 1247187 - RNA, 19 nt, Homo sapiens
  misc_RNA (1)...(19): siRNA sense strand
uagcagucuuucuucuuau

SEQ ID NO: 1247188 - RNA, 19 nt, Homo sapiens
  misc_RNA (1)...(19): siRNA sense strand
uugaaggcgucuacaacaa

SEQ ID NO: 1247189 - RNA, 19 nt, Homo sapiens
  misc_RNA (1)...(19): siRNA sense strand
ggaucgccauggagaacga

SEQ ID NO: 1247190 - RNA, 19 nt, Homo sapiens
  misc_RNA (1)...(19): siRNA sense strand
agcagucuuucuucuuaua

SEQ ID NO: 1247191 - RNA, 19 nt, Homo sapiens
  misc_RNA (1)...(19): siRNA sense strand
guucacuuccgaaauguug

SEQ ID NO: 1247192 - RNA, 19 nt, Homo sapiens
  misc_RNA (1)...(19): siRNA sense strand
gcauuuccuuacagcuguu

SEQ ID NO: 1247193 - RNA, 19 nt, Homo sapiens
  misc_RNA (1)...(19): siRNA sense strand
cuuccgaaauguugacuuc

SEQ ID NO: 1247194 - RNA, 19 nt, Homo sapiens
  misc_RNA (1)...(19): siRNA sense strand
ugaaggcgucuacaacaau

SEQ ID NO: 1247195 - RNA, 19 nt, Homo sapiens
  misc_RNA (1)...(19): siRNA sense strand
ugugaagacuaccuaugau

SEQ ID NO: 1247196 - RNA, 19 nt, Homo sapiens
  misc_RNA (1)...(19): siRNA sense strand
ugauagcagucuuucuucu

SEQ ID NO: 1247197 - RNA, 19 nt, Homo sapiens
  misc_RNA (1)...(19): siRNA sense strand
gugaugucaugcuuguuca

SEQ ID NO: 1247198 - RNA, 19 nt, Homo sapiens
  misc_RNA (1)...(19): siRNA sense strand
aaaaugguaccacuuauga

SEQ ID NO: 1247199 - RNA, 19 nt, Homo sapiens
  misc_RNA (1)...(19): siRNA sense strand
gaaaaggacaacucagaag

SEQ ID NO: 1247200 - RNA, 19 nt, Homo sapiens
  misc_RNA (1)...(19): siRNA sense strand
gggagccgaaggcaucuug

SEQ ID NO: 1247201 - RNA, 19 nt, Homo sapiens
  misc_RNA (1)...(19): siRNA sense strand
gacgaugggcgcacugaag

SEQ ID NO: 1247202 - RNA, 19 nt, Homo sapiens
  misc_RNA (1)...(19): siRNA sense strand
caugaacucgaaagugaau

SEQ ID NO: 1247203 - RNA, 19 nt, Homo sapiens
  misc_RNA (1)...(19): siRNA sense strand
gaccucgagucugacaugu

SEQ ID NO: 1247204 - RNA, 19 nt, Homo sapiens
  misc_RNA (1)...(19): siRNA sense strand
ccacuugugauguaaaggu

SEQ ID NO: 1247205 - RNA, 19 nt, Homo sapiens
  misc_RNA (1)...(19): siRNA sense strand
ggaccccaaugaaauguuc

SEQ ID NO: 1247206 - RNA, 19 nt, Homo sapiens
  misc_RNA (1)...(19): siRNA sense strand
ggugugaagacuaccuaug

SEQ ID NO: 1247207 - RNA, 19 nt, Homo sapiens
  misc_RNA (1)...(19): siRNA sense strand
uauacggugcccuuagaaa

SEQ ID NO: 1247208 - RNA, 19 nt, Homo sapiens
  misc_RNA (1)...(19): siRNA sense strand
gccaugaacucgaaaguga

SEQ ID NO: 1247209 - RNA, 19 nt, Homo sapiens
  misc_RNA (1)...(19): siRNA sense strand
gaaggcgucuacaacaauu

SEQ ID NO: 1247210 - RNA, 19 nt, Homo sapiens
  misc_RNA (1)...(19): siRNA sense strand
ccaguuggcucgagagauu

SEQ ID NO: 1247211 - RNA, 19 nt, Homo sapiens
  misc_RNA (1)...(19): siRNA sense strand
gaggagaacuacgguguga

SEQ ID NO: 1247212 - RNA, 19 nt, Homo sapiens
  misc_RNA (1)...(19): siRNA sense strand
gggcuccacuugugaugua

SEQ ID NO: 1247213 - RNA, 19 nt, Homo sapiens
  misc_RNA (1)...(19): siRNA sense strand
auagcagucuuucuucuua

SEQ ID NO: 1247214 - RNA, 19 nt, Homo sapiens
  misc_RNA (1)...(19): siRNA sense strand
aaagacaaguucaccgauu

SEQ ID NO: 1247215 - RNA, 19 nt, Homo sapiens
  misc_RNA (1)...(19): siRNA sense strand
ucaagacgcuaagcucaaa

SEQ ID NO: 1247216 - RNA, 19 nt, Homo sapiens
  misc_RNA (1)...(19): siRNA sense strand
gaacuacggugugaagacu

SEQ ID NO: 1247217 - RNA, 19 nt, Homo sapiens
  misc_RNA (1)...(19): siRNA sense strand
acuaugaccucgagucuga

SEQ ID NO: 1247218 - RNA, 19 nt, Homo sapiens
  misc_RNA (1)...(19): siRNA sense strand
ggacagagcacaggaaagg

SEQ ID NO: 1247219 - RNA, 19 nt, Homo sapiens
  misc_RNA (1)...(19): siRNA sense strand
caacuaugcuacuaaagac

SEQ ID NO: 1247220 - RNA, 19 nt, Homo sapiens
  misc_RNA (1)...(19): siRNA sense strand
guucaccgauucagccauu

SEQ ID NO: 1247221 - RNA, 19 nt, Homo sapiens
  misc_RNA (1)...(19): siRNA sense strand
gaaauguucaaguucaaug

SEQ ID NO: 1247222 - RNA, 19 nt, Homo sapiens
  misc_RNA (1)...(19): siRNA sense strand
ucaacuaugcuacuaaaga

SEQ ID NO: 1247223 - RNA, 19 nt, Homo sapiens
  misc_RNA (1)...(19): siRNA sense strand
gugaagacuaccuaugaua

SEQ ID NO: 1247224 - RNA, 19 nt, Homo sapiens
  misc_RNA (1)...(19): siRNA sense strand
cuucaacuaugcuacuaaa

SEQ ID NO: 1247225 - RNA, 19 nt, Homo sapiens
  misc_RNA (1)...(19): siRNA sense strand
gcaacagcgacgacuauga

SEQ ID NO: 1247226 - RNA, 19 nt, Homo sapiens
  misc_RNA (1)...(19): siRNA sense strand
uaagccaagugaugucaug

SEQ ID NO: 1247227 - RNA, 19 nt, Homo sapiens
  misc_RNA (1)...(19): siRNA sense strand
gcacugaagaggagaagca

SEQ ID NO: 1247228 - RNA, 19 nt, Homo sapiens
  misc_RNA (1)...(19): siRNA sense strand
uaugauagcagucuuucuu

SEQ ID NO: 1247229 - RNA, 19 nt, Homo sapiens
  misc_RNA (1)...(19): siRNA sense strand
gccaagugaugucaugcuu

SEQ ID NO: 1247230 - RNA, 19 nt, Homo sapiens
  misc_RNA (1)...(19): siRNA sense strand
gugugaagacuaccuauga

SEQ ID NO: 1247231 - RNA, 19 nt, Homo sapiens
  misc_RNA (1)...(19): siRNA sense strand
gacgcuaagcucaaaguuu

SEQ ID NO: 1247232 - RNA, 19 nt, Homo sapiens
  misc_RNA (1)...(19): siRNA sense strand
gauagcagucuuucuucuu

SEQ ID NO: 1247233 - RNA, 19 nt, Homo sapiens
  misc_RNA (1)...(19): siRNA sense strand
cuuguucacuuccgaaaug

SEQ ID NO: 1247234 - RNA, 19 nt, Homo sapiens
  misc_RNA (1)...(19): siRNA sense strand
ggagaacuacggugugaag

SEQ ID NO: 1247235 - RNA, 19 nt, Homo sapiens
  misc_RNA (1)...(19): siRNA sense strand
ccauugccaugaacucgaa

SEQ ID NO: 1247236 - RNA, 19 nt, Homo sapiens
  misc_RNA (1)...(19): siRNA sense strand
gacuucaacuaugcuacua

SEQ ID NO: 1247237 - RNA, 19 nt, Homo sapiens
  misc_RNA (1)...(19): siRNA sense strand
cuuauacggugcccuuaga

SEQ ID NO: 1247238 - RNA, 19 nt, Homo sapiens
  misc_RNA (1)...(19): siRNA sense strand
aagacaaguucaccgauuc

SEQ ID NO: 1247239 - RNA, 19 nt, Homo sapiens
  misc_RNA (1)...(19): siRNA sense strand
cagcaacagcgacgacuau

SEQ ID NO: 1247240 - RNA, 19 nt, Homo sapiens
  misc_RNA (1)...(19): siRNA sense strand
caacagcgacgacuaugac

SEQ ID NO: 1247241 - RNA, 19 nt, Homo sapiens
  misc_RNA (1)...(19): siRNA sense strand
ugucaugcuuguucacuuc

SEQ ID NO: 1247242 - RNA, 19 nt, Homo sapiens
  misc_RNA (1)...(19): siRNA sense strand
agucugacauguccaaugg

SEQ ID NO: 1247243 - RNA, 19 nt, Homo sapiens
  misc_RNA (1)...(19): siRNA sense strand
uagcagucuuucuucuuau

SEQ ID NO: 1247244 - RNA, 19 nt, Homo sapiens
  misc_RNA (1)...(19): siRNA sense strand
uugaaggcgucuacaacaa

SEQ ID NO: 1247245 - RNA, 19 nt, Homo sapiens
  misc_RNA (1)...(19): siRNA sense strand
ggaucgccauggagaacga

SEQ ID NO: 1247246 - RNA, 19 nt, Homo sapiens
  misc_RNA (1)...(19): siRNA sense strand
agcagucuuucuucuuaua

SEQ ID NO: 1247247 - RNA, 19 nt, Homo sapiens
  misc_RNA (1)...(19): siRNA sense strand
guucacuuccgaaauguug

SEQ ID NO: 1247248 - RNA, 19 nt, Homo sapiens
  misc_RNA (1)...(19): siRNA sense strand
gcauuuccuuacagcuguu

SEQ ID NO: 1247249 - RNA, 19 nt, Homo sapiens
  misc_RNA (1)...(19): siRNA sense strand
cuuccgaaauguugacuuc

SEQ ID NO: 1247250 - RNA, 19 nt, Homo sapiens
  misc_RNA (1)...(19): siRNA sense strand
ugaaggcgucuacaacaau

SEQ ID NO: 1247251 - RNA, 19 nt, Homo sapiens
  misc_RNA (1)...(19): siRNA sense strand
ugugaagacuaccuaugau

SEQ ID NO: 1247252 - RNA, 19 nt, Homo sapiens
  misc_RNA (1)...(19): siRNA sense strand
ugauagcagucuuucuucu

SEQ ID NO: 1247253 - RNA, 19 nt, Homo sapiens
  misc_RNA (1)...(19): siRNA sense strand
gugaugucaugcuuguuca

SEQ ID NO: 1247254 - RNA, 19 nt, Homo sapiens
  misc_RNA (1)...(19): siRNA sense strand
aaaaugguaccacuuauga

SEQ ID NO: 1247255 - RNA, 19 nt, Homo sapiens
  misc_RNA (1)...(19): siRNA sense strand
gaaaaggacaacucagaag

SEQ ID NO: 1247256 - RNA, 19 nt, Homo sapiens
  misc_RNA (1)...(19): siRNA sense strand
gggagccgaaggcaucuug

SEQ ID NO: 1247257 - RNA, 19 nt, Homo sapiens
  misc_RNA (1)...(19): siRNA sense strand
gacgaugggcgcacugaag

SEQ ID NO: 1247258 - RNA, 19 nt, Homo sapiens
  misc_RNA (1)...(19): siRNA sense strand
caugaacucgaaagugaau

SEQ ID NO: 1247259 - RNA, 19 nt, Homo sapiens
  misc_RNA (1)...(19): siRNA sense strand
gaccucgagucugacaugu

SEQ ID NO: 1247260 - RNA, 19 nt, Homo sapiens
  misc_RNA (1)...(19): siRNA sense strand
ccacuugugauguaaaggu

SEQ ID NO: 1247261 - RNA, 19 nt, Homo sapiens
  misc_RNA (1)...(19): siRNA sense strand
ggaccccaaugaaauguuc

SEQ ID NO: 1247262 - RNA, 19 nt, Homo sapiens
  misc_RNA (1)...(19): siRNA sense strand
ggugugaagacuaccuaug

SEQ ID NO: 1247263 - RNA, 19 nt, Homo sapiens
  misc_RNA (1)...(19): siRNA sense strand
uauacggugcccuuagaaa

SEQ ID NO: 1247264 - RNA, 19 nt, Homo sapiens
  misc_RNA (1)...(19): siRNA sense strand
gaagagaauucagguauga

SEQ ID NO: 1247265 - RNA, 19 nt, Homo sapiens
  misc_RNA (1)...(19): siRNA sense strand
gcagaauaauugugaagua

SEQ ID NO: 1247266 - RNA, 19 nt, Homo sapiens
  misc_RNA (1)...(19): siRNA sense strand
ggacaagcuugacauuauu

SEQ ID NO: 1247267 - RNA, 19 nt, Homo sapiens
  misc_RNA (1)...(19): siRNA sense strand
gcacuugaauggacugaaa

SEQ ID NO: 1247268 - RNA, 19 nt, Homo sapiens
  misc_RNA (1)...(19): siRNA sense strand
ggaaaugucuaccaucaag

SEQ ID NO: 1247269 - RNA, 19 nt, Homo sapiens
  misc_RNA (1)...(19): siRNA sense strand
gcaaacaguucagauccua

SEQ ID NO: 1247270 - RNA, 19 nt, Homo sapiens
  misc_RNA (1)...(19): siRNA sense strand
gaugauggcagaauaauug

SEQ ID NO: 1247271 - RNA, 19 nt, Homo sapiens
  misc_RNA (1)...(19): siRNA sense strand
gagagagaaucaucauuau

SEQ ID NO: 1247272 - RNA, 19 nt, Homo sapiens
  misc_RNA (1)...(19): siRNA sense strand
gaagaaauguugaguucag

SEQ ID NO: 1247273 - RNA, 19 nt, Homo sapiens
  misc_RNA (1)...(19): siRNA sense strand
gacauuaacucuugaaacu

SEQ ID NO: 1247274 - RNA, 19 nt, Homo sapiens
  misc_RNA (1)...(19): siRNA sense strand
ggaagaacuugacaguguu

SEQ ID NO: 1247275 - RNA, 19 nt, Homo sapiens
  misc_RNA (1)...(19): siRNA sense strand
agagagagaaucaucauua

SEQ ID NO: 1247276 - RNA, 19 nt, Homo sapiens
  misc_RNA (1)...(19): siRNA sense strand
gagagaaucaucauuaugu

SEQ ID NO: 1247277 - RNA, 19 nt, Homo sapiens
  misc_RNA (1)...(19): siRNA sense strand
gcacugaccuuucaaaccu

SEQ ID NO: 1247278 - RNA, 19 nt, Homo sapiens
  misc_RNA (1)...(19): siRNA sense strand
gaaggcaucucuuucaaaa

SEQ ID NO: 1247279 - RNA, 19 nt, Homo sapiens
  misc_RNA (1)...(19): siRNA sense strand
cauuaacucuugaaacuga

SEQ ID NO: 1247280 - RNA, 19 nt, Homo sapiens
  misc_RNA (1)...(19): siRNA sense strand
cgugugguguugacaauua

SEQ ID NO: 1247281 - RNA, 19 nt, Homo sapiens
  misc_RNA (1)...(19): siRNA sense strand
uggaagaacuugacagugu

SEQ ID NO: 1247282 - RNA, 19 nt, Homo sapiens
  misc_RNA (1)...(19): siRNA sense strand
caaaguacuucugggugua

SEQ ID NO: 1247283 - RNA, 19 nt, Homo sapiens
  misc_RNA (1)...(19): siRNA sense strand
ccaaaugucacaagucuga

SEQ ID NO: 1247284 - RNA, 19 nt, Homo sapiens
  misc_RNA (1)...(19): siRNA sense strand
ugaaacugcugccagagaa

SEQ ID NO: 1247285 - RNA, 19 nt, Homo sapiens
  misc_RNA (1)...(19): siRNA sense strand
gcgcaaaugccacagguuu

SEQ ID NO: 1247286 - RNA, 19 nt, Homo sapiens
  misc_RNA (1)...(19): siRNA sense strand
gaaacugaccaaaguacuu

SEQ ID NO: 1247287 - RNA, 19 nt, Homo sapiens
  misc_RNA (1)...(19): siRNA sense strand
gcaaauuuauggugcugau

SEQ ID NO: 1247288 - RNA, 19 nt, Homo sapiens
  misc_RNA (1)...(19): siRNA sense strand
ccacaguucgugauauuaa

SEQ ID NO: 1247289 - RNA, 19 nt, Homo sapiens
  misc_RNA (1)...(19): siRNA sense strand
gcuucugucugauaaauug

SEQ ID NO: 1247290 - RNA, 19 nt, Homo sapiens
  misc_RNA (1)...(19): siRNA sense strand
gaaucaucauuauguguug

SEQ ID NO: 1247291 - RNA, 19 nt, Homo sapiens
  misc_RNA (1)...(19): siRNA sense strand
caacauacgaggagcuuga

SEQ ID NO: 1247292 - RNA, 19 nt, Homo sapiens
  misc_RNA (1)...(19): siRNA sense strand
auacauggaugaaggaaau

SEQ ID NO: 1247293 - RNA, 19 nt, Homo sapiens
  misc_RNA (1)...(19): siRNA sense strand
ggaaggcaucucuuucaaa

SEQ ID NO: 1247294 - RNA, 19 nt, Homo sapiens
  misc_RNA (1)...(19): siRNA sense strand
uggauuaucuugaacaaca

SEQ ID NO: 1247295 - RNA, 19 nt, Homo sapiens
  misc_RNA (1)...(19): siRNA sense strand
aggacaagcuugacauuau

SEQ ID NO: 1247296 - RNA, 19 nt, Homo sapiens
  misc_RNA (1)...(19): siRNA sense strand
gacaagcuugacauuauua

SEQ ID NO: 1247297 - RNA, 19 nt, Homo sapiens
  misc_RNA (1)...(19): siRNA sense strand
agaagcauauuagccauaa

SEQ ID NO: 1247298 - RNA, 19 nt, Homo sapiens
  misc_RNA (1)...(19): siRNA sense strand
gaggaaggcaucucuuuca

SEQ ID NO: 1247299 - RNA, 19 nt, Homo sapiens
  misc_RNA (1)...(19): siRNA sense strand
acaacaagaugacaugcuu

SEQ ID NO: 1247300 - RNA, 19 nt, Homo sapiens
  misc_RNA (1)...(19): siRNA sense strand
ggaguucuagccacuguaa

SEQ ID NO: 1247301 - RNA, 19 nt, Homo sapiens
  misc_RNA (1)...(19): siRNA sense strand
ggaugcaauuuaugaagug

SEQ ID NO: 1247302 - RNA, 19 nt, Homo sapiens
  misc_RNA (1)...(19): siRNA sense strand
gaaauacauggaugaagga

SEQ ID NO: 1247303 - RNA, 19 nt, Homo sapiens
  misc_RNA (1)...(19): siRNA sense strand
uccaaaggcugcugguaaa

SEQ ID NO: 1247304 - RNA, 19 nt, Homo sapiens
  misc_RNA (1)...(19): siRNA sense strand
ccauaaagcggcacuugaa

SEQ ID NO: 1247305 - RNA, 19 nt, Homo sapiens
  misc_RNA (1)...(19): siRNA sense strand
gagaagcauauuagccaua

SEQ ID NO: 1247306 - RNA, 19 nt, Homo sapiens
  misc_RNA (1)...(19): siRNA sense strand
ugccacagguuuacacaaa

SEQ ID NO: 1247307 - RNA, 19 nt, Homo sapiens
  misc_RNA (1)...(19): siRNA sense strand
gauggcagaauaauuguga

SEQ ID NO: 1247308 - RNA, 19 nt, Homo sapiens
  misc_RNA (1)...(19): siRNA sense strand
caagaugacaugcuucugu

SEQ ID NO: 1247309 - RNA, 19 nt, Homo sapiens
  misc_RNA (1)...(19): siRNA sense strand
ugugguagcuuucaggaau

SEQ ID NO: 1247310 - RNA, 19 nt, Homo sapiens
  misc_RNA (1)...(19): siRNA sense strand
acgaggagcuugauagagu

SEQ ID NO: 1247311 - RNA, 19 nt, Homo sapiens
  misc_RNA (1)...(19): siRNA sense strand
gaagcauauuagccauaaa

SEQ ID NO: 1247312 - RNA, 19 nt, Homo sapiens
  misc_RNA (1)...(19): siRNA sense strand
gagcuuggaacaugguaaa

SEQ ID NO: 1247313 - RNA, 19 nt, Homo sapiens
  misc_RNA (1)...(19): siRNA sense strand
caccaaaugucacaagucu

SEQ ID NO: 1247314 - RNA, 19 nt, Homo sapiens
  misc_RNA (1)...(19): siRNA sense strand
gaaauguugaguucagaug

SEQ ID NO: 1247315 - RNA, 19 nt, Homo sapiens
  misc_RNA (1)...(19): siRNA sense strand
caaaccuuccugugacaua

SEQ ID NO: 1247316 - RNA, 19 nt, Homo sapiens
  misc_RNA (1)...(19): siRNA sense strand
caauuaaggacaagcuuga

SEQ ID NO: 1247317 - RNA, 19 nt, Homo sapiens
  misc_RNA (1)...(19): siRNA sense strand
gaauccacaguucgugaua

SEQ ID NO: 1247318 - RNA, 19 nt, Homo sapiens
  misc_RNA (1)...(19): siRNA sense strand
gacagugguuugaaaagua

SEQ ID NO: 1247319 - RNA, 19 nt, Homo sapiens
  misc_RNA (1)...(19): siRNA sense strand
gaagaacuugacaguguug

SEQ ID NO: 1247320 - RNA, 19 nt, Homo sapiens
  misc_RNA (1)...(19): siRNA sense strand
caaaagccuuccaguaaga

SEQ ID NO: 1247321 - RNA, 19 nt, Homo sapiens
  misc_RNA (1)...(19): siRNA sense strand
gcaaaagccuuccaguaag

SEQ ID NO: 1247322 - RNA, 19 nt, Homo sapiens
  misc_RNA (1)...(19): siRNA sense strand
gaggagcuugauagaguua

SEQ ID NO: 1247323 - RNA, 19 nt, Homo sapiens
  misc_RNA (1)...(19): siRNA sense strand
ugaaggaaaugacccaaaa

SEQ ID NO: 1247324 - RNA, 19 nt, Homo sapiens
  misc_RNA (1)...(19): siRNA sense strand
guacggaauuggugaaucc

SEQ ID NO: 1247325 - RNA, 19 nt, Homo sapiens
  misc_RNA (1)...(19): siRNA sense strand
aaaggcugcugguaaagga

SEQ ID NO: 1247326 - RNA, 19 nt, Homo sapiens
  misc_RNA (1)...(19): siRNA sense strand
ggagcuugauagaguuaug

SEQ ID NO: 1247327 - RNA, 19 nt, Homo sapiens
  misc_RNA (1)...(19): siRNA sense strand
guuaugauagagugguuua

SEQ ID NO: 1247328 - RNA, 19 nt, Homo sapiens
  misc_RNA (1)...(19): siRNA sense strand
ggauuaucuugaacaacaa

SEQ ID NO: 1247329 - RNA, 19 nt, Homo sapiens
  misc_RNA (1)...(19): siRNA sense strand
gagcaaaagccuuccagua

SEQ ID NO: 1247330 - RNA, 19 nt, Homo sapiens
  misc_RNA (1)...(19): siRNA sense strand
gaacuugacaguguuggau

SEQ ID NO: 1247331 - RNA, 19 nt, Homo sapiens
  misc_RNA (1)...(19): siRNA sense strand
augaagaaauguugaguuc

SEQ ID NO: 1247332 - RNA, 19 nt, Homo sapiens
  misc_RNA (1)...(19): siRNA sense strand
gaaauccaagggacuuuua

SEQ ID NO: 1247333 - RNA, 19 nt, Homo sapiens
  misc_RNA (1)...(19): siRNA sense strand
cuacaaccagagcaaauuu

SEQ ID NO: 1247334 - RNA, 19 nt, Homo sapiens
  misc_RNA (1)...(19): siRNA sense strand
uaugaacauugaugaagga

SEQ ID NO: 1247335 - RNA, 19 nt, Homo sapiens
  misc_RNA (1)...(19): siRNA sense strand
cgaggagcuugauagaguu

SEQ ID NO: 1247336 - RNA, 19 nt, Homo sapiens
  misc_RNA (1)...(19): siRNA sense strand
caagucugauucaaccaau

SEQ ID NO: 1247337 - RNA, 19 nt, Homo sapiens
  misc_RNA (1)...(19): siRNA sense strand
ucagaugauggcagaauaa

SEQ ID NO: 1247338 - RNA, 19 nt, Homo sapiens
  misc_RNA (1)...(19): siRNA sense strand
cacaguucgugauauuaaa

SEQ ID NO: 1247339 - RNA, 19 nt, Homo sapiens
  misc_RNA (1)...(19): siRNA sense strand
gcagagagagaaucaucau

SEQ ID NO: 1247340 - RNA, 19 nt, Homo sapiens
  misc_RNA (1)...(19): siRNA sense strand
ucaaguaccauaaccaaag

SEQ ID NO: 1247341 - RNA, 19 nt, Homo sapiens
  misc_RNA (1)...(19): siRNA sense strand
uaugaagugucaagagcuu

SEQ ID NO: 1247342 - RNA, 19 nt, Homo sapiens
  misc_RNA (1)...(19): siRNA sense strand
ugacaguguuggaugcaau

SEQ ID NO: 1247343 - RNA, 19 nt, Homo sapiens
  misc_RNA (1)...(19): siRNA sense strand
cauuauguguugcgcaaau

SEQ ID NO: 1247344 - RNA, 19 nt, Homo sapiens
  misc_RNA (1)...(19): siRNA sense strand
ggacauuaacucuugaaac

SEQ ID NO: 1247345 - RNA, 19 nt, Homo sapiens
  misc_RNA (1)...(19): siRNA sense strand
aguguuggaugcaauuuau

SEQ ID NO: 1247346 - RNA, 19 nt, Homo sapiens
  misc_RNA (1)...(19): siRNA sense strand
ccaaugagccagggaguuc

SEQ ID NO: 1247347 - RNA, 19 nt, Homo sapiens
  misc_RNA (1)...(19): siRNA sense strand
ccaaaugaagaaauguuga

SEQ ID NO: 1247348 - RNA, 19 nt, Homo sapiens
  misc_RNA (1)...(19): siRNA sense strand
gcaaaugccacagguuuac

SEQ ID NO: 1247349 - RNA, 19 nt, Homo sapiens
  misc_RNA (1)...(19): siRNA sense strand
gagaaucaucauuaugugu

SEQ ID NO: 1247350 - RNA, 19 nt, Homo sapiens
  misc_RNA (1)...(19): siRNA sense strand
gaguuaugauagagugguu

SEQ ID NO: 1247351 - RNA, 19 nt, Homo sapiens
  misc_RNA (1)...(19): siRNA sense strand
uaaagcggcacuugaaugg

SEQ ID NO: 1247352 - RNA, 19 nt, Homo sapiens
  misc_RNA (1)...(19): siRNA sense strand
ucuugaaacugaccaaagu

SEQ ID NO: 1247353 - RNA, 19 nt, Homo sapiens
  misc_RNA (1)...(19): siRNA sense strand
gaauggaaggugauuuuaa

SEQ ID NO: 1247354 - RNA, 19 nt, Homo sapiens
  misc_RNA (1)...(19): siRNA sense strand
caggcuggcuaacucgauu

SEQ ID NO: 1247355 - RNA, 19 nt, Homo sapiens
  misc_RNA (1)...(19): siRNA sense strand
uaaggaggcuucggaccau

SEQ ID NO: 1247356 - RNA, 19 nt, Homo sapiens
  misc_RNA (1)...(19): siRNA sense strand
acagaacacagaagaaugu

SEQ ID NO: 1247357 - RNA, 19 nt, Homo sapiens
  misc_RNA (1)...(19): siRNA sense strand
ccacagguacagaagcauu

SEQ ID NO: 1247358 - RNA, 19 nt, Homo sapiens
  misc_RNA (1)...(19): siRNA sense strand
aaaccuuccugugacauau

SEQ ID NO: 1247359 - RNA, 19 nt, Homo sapiens
  misc_RNA (1)...(19): siRNA sense strand
uuggaaaugucuaccauca

SEQ ID NO: 1247360 - RNA, 19 nt, Homo sapiens
  misc_RNA (1)...(19): siRNA sense strand
gugguagcuuucaggaauu

SEQ ID NO: 1247361 - RNA, 19 nt, Homo sapiens
  misc_RNA (1)...(19): siRNA sense strand
acaugcuucugucugauaa

SEQ ID NO: 1247362 - RNA, 19 nt, Homo sapiens
  misc_RNA (1)...(19): siRNA sense strand
uaaggacaagcuugacauu

SEQ ID NO: 1247363 - RNA, 19 nt, Homo sapiens
  misc_RNA (1)...(19): siRNA sense strand
cuucggaccauaauaagaa

SEQ ID NO: 1247364 - RNA, 19 nt, Homo sapiens
  misc_RNA (1)...(19): siRNA sense strand
gagaaugaguuucccuuug

SEQ ID NO: 1247365 - RNA, 19 nt, Homo sapiens
  misc_RNA (1)...(19): siRNA sense strand
ggaaagagaacccaucugu

SEQ ID NO: 1247366 - RNA, 19 nt, Homo sapiens
  misc_RNA (1)...(19): siRNA sense strand
gaacccaucugucgcucuu

SEQ ID NO: 1247367 - RNA, 19 nt, Homo sapiens
  misc_RNA (1)...(19): siRNA sense strand
ggagauggcacuggaaaga

SEQ ID NO: 1247368 - RNA, 19 nt, Homo sapiens
  misc_RNA (1)...(19): siRNA sense strand
ucccagaccucccaccuaa

SEQ ID NO: 1247369 - RNA, 19 nt, Homo sapiens
  misc_RNA (1)...(19): siRNA sense strand
gaaggacgacacaauguuc

SEQ ID NO: 1247370 - RNA, 19 nt, Homo sapiens
  misc_RNA (1)...(19): siRNA sense strand
uguggaagaucaccaaugu

SEQ ID NO: 1247371 - RNA, 19 nt, Homo sapiens
  misc_RNA (1)...(19): siRNA sense strand
ccaaguauggcuacaaguu

SEQ ID NO: 1247372 - RNA, 19 nt, Homo sapiens
  misc_RNA (1)...(19): siRNA sense strand
agaaugaguuucccuuugg

SEQ ID NO: 1247373 - RNA, 19 nt, Homo sapiens
  misc_RNA (1)...(19): siRNA sense strand
ggaagcugcguguguuuga

SEQ ID NO: 1247374 - RNA, 19 nt, Homo sapiens
  misc_RNA (1)...(19): siRNA sense strand
ggaauugggugccccuuug

SEQ ID NO: 1247375 - RNA, 19 nt, Homo sapiens
  misc_RNA (1)...(19): siRNA sense strand
gacacaauguuccucaagu

SEQ ID NO: 1247376 - RNA, 19 nt, Homo sapiens
  misc_RNA (1)...(19): siRNA sense strand
caaguauggcuacaaguug

SEQ ID NO: 1247377 - RNA, 19 nt, Homo sapiens
  misc_RNA (1)...(19): siRNA sense strand
cuucuacacugccaaguau

SEQ ID NO: 1247378 - RNA, 19 nt, Homo sapiens
  misc_RNA (1)...(19): siRNA sense strand
acacaauguuccucaagug

SEQ ID NO: 1247379 - RNA, 19 nt, Homo sapiens
  misc_RNA (1)...(19): siRNA sense strand
ccauggcccuggagcagaa

SEQ ID NO: 1247380 - RNA, 19 nt, Homo sapiens
  misc_RNA (1)...(19): siRNA sense strand
ggugucggcugcuccuuca

SEQ ID NO: 1247381 - RNA, 19 nt, Homo sapiens
  misc_RNA (1)...(19): siRNA sense strand
agauggcacuggaaagaga

SEQ ID NO: 1247382 - RNA, 19 nt, Homo sapiens
  misc_RNA (1)...(19): siRNA sense strand
uggaagaucaccaauguca

SEQ ID NO: 1247383 - RNA, 19 nt, Homo sapiens
  misc_RNA (1)...(19): siRNA sense strand
ugaaggacgacacaauguu

SEQ ID NO: 1247384 - RNA, 19 nt, Homo sapiens
  misc_RNA (1)...(19): siRNA sense strand
ugagaaugaguuucccuuu

SEQ ID NO: 1247385 - RNA, 19 nt, Homo sapiens
  misc_RNA (1)...(19): siRNA sense strand
caauguuccucaagugcau

SEQ ID NO: 1247386 - RNA, 19 nt, Homo sapiens
  misc_RNA (1)...(19): siRNA sense strand
ggaauggcgaggaucagau

SEQ ID NO: 1247387 - RNA, 19 nt, Homo sapiens
  misc_RNA (1)...(19): siRNA sense strand
ucugagaacccgaggaaug

SEQ ID NO: 1247388 - RNA, 19 nt, Homo sapiens
  misc_RNA (1)...(19): siRNA sense strand
caagggaagcccacagucu

SEQ ID NO: 1247389 - RNA, 19 nt, Homo sapiens
  misc_RNA (1)...(19): siRNA sense strand
ccaccuaaaccugcuguug

SEQ ID NO: 1247390 - RNA, 19 nt, Homo sapiens
  misc_RNA (1)...(19): siRNA sense strand
gugaaggacgacacaaugu

SEQ ID NO: 1247391 - RNA, 19 nt, Homo sapiens
  misc_RNA (1)...(19): siRNA sense strand
gaagcugcguguguuugag

SEQ ID NO: 1247392 - RNA, 19 nt, Homo sapiens
  misc_RNA (1)...(19): siRNA sense strand
gcagagcuugcgccucaug

SEQ ID NO: 1247393 - RNA, 19 nt, Homo sapiens
  misc_RNA (1)...(19): siRNA sense strand
gcaggaccgucagccucuu

SEQ ID NO: 1247394 - RNA, 19 nt, Homo sapiens
  misc_RNA (1)...(19): siRNA sense strand
cgugaaggacgacacaaug

SEQ ID NO: 1247395 - RNA, 19 nt, Homo sapiens
  misc_RNA (1)...(19): siRNA sense strand
cgaggaauggcgaggauca

SEQ ID NO: 1247396 - RNA, 19 nt, Homo sapiens
  misc_RNA (1)...(19): siRNA sense strand
gggaagcugcguguguuug

SEQ ID NO: 1247397 - RNA, 19 nt, Homo sapiens
  misc_RNA (1)...(19): siRNA sense strand
ccagaccucccaccuaaac

SEQ ID NO: 1247398 - RNA, 19 nt, Homo sapiens
  misc_RNA (1)...(19): siRNA sense strand
gccugcggcuguaccugaa

SEQ ID NO: 1247399 - RNA, 19 nt, Homo sapiens
  misc_RNA (1)...(19): siRNA sense strand
gaacacaccugucccucuu

SEQ ID NO: 1247400 - RNA, 19 nt, Homo sapiens
  misc_RNA (1)...(19): siRNA sense strand
gaacugugcugccuguguu

SEQ ID NO: 1247401 - RNA, 19 nt, Homo sapiens
  misc_RNA (1)...(19): siRNA sense strand
caagauggaggcaaagaau

SEQ ID NO: 1247402 - RNA, 19 nt, Homo sapiens
  misc_RNA (1)...(19): siRNA sense strand
guucggccuucccagauaa

SEQ ID NO: 1247403 - RNA, 19 nt, Homo sapiens
  misc_RNA (1)...(19): siRNA sense strand
ggaccaagacaagauugaa

SEQ ID NO: 1247404 - RNA, 19 nt, Homo sapiens
  misc_RNA (1)...(19): siRNA sense strand
ccgcauacccgccaucuuc

SEQ ID NO: 1247405 - RNA, 19 nt, Homo sapiens
  misc_RNA (1)...(19): siRNA sense strand
gcagguacggcuacaagau

SEQ ID NO: 1247406 - RNA, 19 nt, Homo sapiens
  misc_RNA (1)...(19): siRNA sense strand
ucucagacuucgccaggaa

SEQ ID NO: 1247407 - RNA, 19 nt, Homo sapiens
  misc_RNA (1)...(19): siRNA sense strand
uaaugcugcucgaccagaa

SEQ ID NO: 1247408 - RNA, 19 nt, Homo sapiens
  misc_RNA (1)...(19): siRNA sense strand
acaccugucccucuucuuu

SEQ ID NO: 1247409 - RNA, 19 nt, Homo sapiens
  misc_RNA (1)...(19): siRNA sense strand
gaaggcauuucuauuuuag

SEQ ID NO: 1247410 - RNA, 19 nt, Homo sapiens
  misc_RNA (1)...(19): siRNA sense strand
agccugagcugccggcauu

SEQ ID NO: 1247411 - RNA, 19 nt, Homo sapiens
  misc_RNA (1)...(19): siRNA sense strand
caagaugugucugcguauc

SEQ ID NO: 1247412 - RNA, 19 nt, Homo sapiens
  misc_RNA (1)...(19): siRNA sense strand
gcagaaggucuuggagaug

SEQ ID NO: 1247413 - RNA, 19 nt, Homo sapiens
  misc_RNA (1)...(19): siRNA sense strand
ucacgagggcauauaugaa

SEQ ID NO: 1247414 - RNA, 19 nt, Homo sapiens
  misc_RNA (1)...(19): siRNA sense strand
ccaagauggaggcaaagaa

SEQ ID NO: 1247415 - RNA, 19 nt, Homo sapiens
  misc_RNA (1)...(19): siRNA sense strand
uaaccgggagcacgugauu

SEQ ID NO: 1247416 - RNA, 19 nt, Homo sapiens
  misc_RNA (1)...(19): siRNA sense strand
uggcugacuuggagcagaa

SEQ ID NO: 1247417 - RNA, 19 nt, Homo sapiens
  misc_RNA (1)...(19): siRNA sense strand
gacgugacuucauccucuu

SEQ ID NO: 1247418 - RNA, 19 nt, Homo sapiens
  misc_RNA (1)...(19): siRNA sense strand
gaaugucccgcgugcaaag

SEQ ID NO: 1247419 - RNA, 19 nt, Homo sapiens
  misc_RNA (1)...(19): siRNA sense strand
ggaggcauccaccuacgau

SEQ ID NO: 1247420 - RNA, 19 nt, Homo sapiens
  misc_RNA (1)...(19): siRNA sense strand
ggcccgacgugacuucauc

SEQ ID NO: 1247421 - RNA, 19 nt, Homo sapiens
  misc_RNA (1)...(19): siRNA sense strand
gaccaagacaagauugaag

SEQ ID NO: 1247422 - RNA, 19 nt, Homo sapiens
  misc_RNA (1)...(19): siRNA sense strand
cagguacggcuacaagaug

SEQ ID NO: 1247423 - RNA, 19 nt, Homo sapiens
  misc_RNA (1)...(19): siRNA sense strand
cauauaugaagaaggcauu

SEQ ID NO: 1247424 - RNA, 19 nt, Homo sapiens
  misc_RNA (1)...(19): siRNA sense strand
agauggaggcaaagaauuc

SEQ ID NO: 1247425 - RNA, 19 nt, Homo sapiens
  misc_RNA (1)...(19): siRNA sense strand
agcagaaggucuuggagau

SEQ ID NO: 1247426 - RNA, 19 nt, Homo sapiens
  misc_RNA (1)...(19): siRNA sense strand
ccgaaugucccgcgugcaa

SEQ ID NO: 1247427 - RNA, 19 nt, Homo sapiens
  misc_RNA (1)...(19): siRNA sense strand
caagauugaagcccugagu

SEQ ID NO: 1247428 - RNA, 19 nt, Homo sapiens
  misc_RNA (1)...(19): siRNA sense strand
gagggcauauaugaagaag

SEQ ID NO: 1247429 - RNA, 19 nt, Homo sapiens
  misc_RNA (1)...(19): siRNA sense strand
aguucggccuucccagaua

SEQ ID NO: 1247430 - RNA, 19 nt, Homo sapiens
  misc_RNA (1)...(19): siRNA sense strand
cgagggcauauaugaagaa

SEQ ID NO: 1247431 - RNA, 19 nt, Homo sapiens
  misc_RNA (1)...(19): siRNA sense strand
gguggcccuucaaccagaa

SEQ ID NO: 1247432 - RNA, 19 nt, Homo sapiens
  misc_RNA (1)...(19): siRNA sense strand
aagauugaagcccugagua

SEQ ID NO: 1247433 - RNA, 19 nt, Homo sapiens
  misc_RNA (1)...(19): siRNA sense strand
gaacacaccugucccucuu

SEQ ID NO: 1247434 - RNA, 19 nt, Homo sapiens
  misc_RNA (1)...(19): siRNA sense strand
gaacugugcugccuguguu

SEQ ID NO: 1247435 - RNA, 19 nt, Homo sapiens
  misc_RNA (1)...(19): siRNA sense strand
caagauggaggcaaagaau

SEQ ID NO: 1247436 - RNA, 19 nt, Homo sapiens
  misc_RNA (1)...(19): siRNA sense strand
guucggccuucccagauaa

SEQ ID NO: 1247437 - RNA, 19 nt, Homo sapiens
  misc_RNA (1)...(19): siRNA sense strand
ggaccaagacaagauugaa

SEQ ID NO: 1247438 - RNA, 19 nt, Homo sapiens
  misc_RNA (1)...(19): siRNA sense strand
ccgcauacccgccaucuuc

SEQ ID NO: 1247439 - RNA, 19 nt, Homo sapiens
  misc_RNA (1)...(19): siRNA sense strand
gcagguacggcuacaagau

SEQ ID NO: 1247440 - RNA, 19 nt, Homo sapiens
  misc_RNA (1)...(19): siRNA sense strand
ucucagacuucgccaggaa

SEQ ID NO: 1247441 - RNA, 19 nt, Homo sapiens
  misc_RNA (1)...(19): siRNA sense strand
uaaugcugcucgaccagaa

SEQ ID NO: 1247442 - RNA, 19 nt, Homo sapiens
  misc_RNA (1)...(19): siRNA sense strand
acaccugucccucuucuuu

SEQ ID NO: 1247443 - RNA, 19 nt, Homo sapiens
  misc_RNA (1)...(19): siRNA sense strand
gaaggcauuucuauuuuag

SEQ ID NO: 1247444 - RNA, 19 nt, Homo sapiens
  misc_RNA (1)...(19): siRNA sense strand
agccugagcugccggcauu

SEQ ID NO: 1247445 - RNA, 19 nt, Homo sapiens
  misc_RNA (1)...(19): siRNA sense strand
caagaugugucugcguauc

SEQ ID NO: 1247446 - RNA, 19 nt, Homo sapiens
  misc_RNA (1)...(19): siRNA sense strand
gcagaaggucuuggagaug

SEQ ID NO: 1247447 - RNA, 19 nt, Homo sapiens
  misc_RNA (1)...(19): siRNA sense strand
ucacgagggcauauaugaa

SEQ ID NO: 1247448 - RNA, 19 nt, Homo sapiens
  misc_RNA (1)...(19): siRNA sense strand
ccaagauggaggcaaagaa

SEQ ID NO: 1247449 - RNA, 19 nt, Homo sapiens
  misc_RNA (1)...(19): siRNA sense strand
uaaccgggagcacgugauu

SEQ ID NO: 1247450 - RNA, 19 nt, Homo sapiens
  misc_RNA (1)...(19): siRNA sense strand
uggcugacuuggagcagaa

SEQ ID NO: 1247451 - RNA, 19 nt, Homo sapiens
  misc_RNA (1)...(19): siRNA sense strand
gacgugacuucauccucuu

SEQ ID NO: 1247452 - RNA, 19 nt, Homo sapiens
  misc_RNA (1)...(19): siRNA sense strand
gaaugucccgcgugcaaag

SEQ ID NO: 1247453 - RNA, 19 nt, Homo sapiens
  misc_RNA (1)...(19): siRNA sense strand
ggaggcauccaccuacgau

SEQ ID NO: 1247454 - RNA, 19 nt, Homo sapiens
  misc_RNA (1)...(19): siRNA sense strand
ggcccgacgugacuucauc

SEQ ID NO: 1247455 - RNA, 19 nt, Homo sapiens
  misc_RNA (1)...(19): siRNA sense strand
gaccaagacaagauugaag

SEQ ID NO: 1247456 - RNA, 19 nt, Homo sapiens
  misc_RNA (1)...(19): siRNA sense strand
cagguacggcuacaagaug

SEQ ID NO: 1247457 - RNA, 19 nt, Homo sapiens
  misc_RNA (1)...(19): siRNA sense strand
cauauaugaagaaggcauu

SEQ ID NO: 1247458 - RNA, 19 nt, Homo sapiens
  misc_RNA (1)...(19): siRNA sense strand
agauggaggcaaagaauuc

SEQ ID NO: 1247459 - RNA, 19 nt, Homo sapiens
  misc_RNA (1)...(19): siRNA sense strand
agcagaaggucuuggagau

SEQ ID NO: 1247460 - RNA, 19 nt, Homo sapiens
  misc_RNA (1)...(19): siRNA sense strand
ccgaaugucccgcgugcaa

SEQ ID NO: 1247461 - RNA, 19 nt, Homo sapiens
  misc_RNA (1)...(19): siRNA sense strand
caagauugaagcccugagu

SEQ ID NO: 1247462 - RNA, 19 nt, Homo sapiens
  misc_RNA (1)...(19): siRNA sense strand
gagggcauauaugaagaag

SEQ ID NO: 1247463 - RNA, 19 nt, Homo sapiens
  misc_RNA (1)...(19): siRNA sense strand
aguucggccuucccagaua

SEQ ID NO: 1247464 - RNA, 19 nt, Homo sapiens
  misc_RNA (1)...(19): siRNA sense strand
cgagggcauauaugaagaa

SEQ ID NO: 1247465 - RNA, 19 nt, Homo sapiens
  misc_RNA (1)...(19): siRNA sense strand
gguggcccuucaaccagaa

SEQ ID NO: 1247466 - RNA, 19 nt, Homo sapiens
  misc_RNA (1)...(19): siRNA sense strand
aagauugaagcccugagua

SEQ ID NO: 1247467 - RNA, 19 nt, Homo sapiens
  misc_RNA (1)...(19): siRNA sense strand
gaacacaccugucccucuu

SEQ ID NO: 1247468 - RNA, 19 nt, Homo sapiens
  misc_RNA (1)...(19): siRNA sense strand
gaacugugcugccuguguu

SEQ ID NO: 1247469 - RNA, 19 nt, Homo sapiens
  misc_RNA (1)...(19): siRNA sense strand
caagauggaggcaaagaau

SEQ ID NO: 1247470 - RNA, 19 nt, Homo sapiens
  misc_RNA (1)...(19): siRNA sense strand
guucggccuucccagauaa

SEQ ID NO: 1247471 - RNA, 19 nt, Homo sapiens
  misc_RNA (1)...(19): siRNA sense strand
ggaccaagacaagauugaa

SEQ ID NO: 1247472 - RNA, 19 nt, Homo sapiens
  misc_RNA (1)...(19): siRNA sense strand
ccgcauacccgccaucuuc

SEQ ID NO: 1247473 - RNA, 19 nt, Homo sapiens
  misc_RNA (1)...(19): siRNA sense strand
gcagguacggcuacaagau

SEQ ID NO: 1247474 - RNA, 19 nt, Homo sapiens
  misc_RNA (1)...(19): siRNA sense strand
ucucagacuucgccaggaa

SEQ ID NO: 1247475 - RNA, 19 nt, Homo sapiens
  misc_RNA (1)...(19): siRNA sense strand
uaaugcugcucgaccagaa

SEQ ID NO: 1247476 - RNA, 19 nt, Homo sapiens
  misc_RNA (1)...(19): siRNA sense strand
acaccugucccucuucuuu

SEQ ID NO: 1247477 - RNA, 19 nt, Homo sapiens
  misc_RNA (1)...(19): siRNA sense strand
gaaggcauuucuauuuuag

SEQ ID NO: 1247478 - RNA, 19 nt, Homo sapiens
  misc_RNA (1)...(19): siRNA sense strand
agccugagcugccggcauu

SEQ ID NO: 1247479 - RNA, 19 nt, Homo sapiens
  misc_RNA (1)...(19): siRNA sense strand
caagaugugucugcguauc

SEQ ID NO: 1247480 - RNA, 19 nt, Homo sapiens
  misc_RNA (1)...(19): siRNA sense strand
gcagaaggucuuggagaug

SEQ ID NO: 1247481 - RNA, 19 nt, Homo sapiens
  misc_RNA (1)...(19): siRNA sense strand
ucacgagggcauauaugaa

SEQ ID NO: 1247482 - RNA, 19 nt, Homo sapiens
  misc_RNA (1)...(19): siRNA sense strand
ccaagauggaggcaaagaa

SEQ ID NO: 1247483 - RNA, 19 nt, Homo sapiens
  misc_RNA (1)...(19): siRNA sense strand
uaaccgggagcacgugauu

SEQ ID NO: 1247484 - RNA, 19 nt, Homo sapiens
  misc_RNA (1)...(19): siRNA sense strand
uggcugacuuggagcagaa

SEQ ID NO: 1247485 - RNA, 19 nt, Homo sapiens
  misc_RNA (1)...(19): siRNA sense strand
gacgugacuucauccucuu

SEQ ID NO: 1247486 - RNA, 19 nt, Homo sapiens
  misc_RNA (1)...(19): siRNA sense strand
gaaugucccgcgugcaaag

SEQ ID NO: 1247487 - RNA, 19 nt, Homo sapiens
  misc_RNA (1)...(19): siRNA sense strand
ggaggcauccaccuacgau

SEQ ID NO: 1247488 - RNA, 19 nt, Homo sapiens
  misc_RNA (1)...(19): siRNA sense strand
ggcccgacgugacuucauc

SEQ ID NO: 1247489 - RNA, 19 nt, Homo sapiens
  misc_RNA (1)...(19): siRNA sense strand
gaccaagacaagauugaag

SEQ ID NO: 1247490 - RNA, 19 nt, Homo sapiens
  misc_RNA (1)...(19): siRNA sense strand
cagguacggcuacaagaug

SEQ ID NO: 1247491 - RNA, 19 nt, Homo sapiens
  misc_RNA (1)...(19): siRNA sense strand
cauauaugaagaaggcauu

SEQ ID NO: 1247492 - RNA, 19 nt, Homo sapiens
  misc_RNA (1)...(19): siRNA sense strand
agauggaggcaaagaauuc

SEQ ID NO: 1247493 - RNA, 19 nt, Homo sapiens
  misc_RNA (1)...(19): siRNA sense strand
agcagaaggucuuggagau

SEQ ID NO: 1247494 - RNA, 19 nt, Homo sapiens
  misc_RNA (1)...(19): siRNA sense strand
ccgaaugucccgcgugcaa

SEQ ID NO: 1247495 - RNA, 19 nt, Homo sapiens
  misc_RNA (1)...(19): siRNA sense strand
caagauugaagcccugagu

SEQ ID NO: 1247496 - RNA, 19 nt, Homo sapiens
  misc_RNA (1)...(19): siRNA sense strand
gagggcauauaugaagaag

SEQ ID NO: 1247497 - RNA, 19 nt, Homo sapiens
  misc_RNA (1)...(19): siRNA sense strand
aguucggccuucccagaua

SEQ ID NO: 1247498 - RNA, 19 nt, Homo sapiens
  misc_RNA (1)...(19): siRNA sense strand
cgagggcauauaugaagaa

SEQ ID NO: 1247499 - RNA, 19 nt, Homo sapiens
  misc_RNA (1)...(19): siRNA sense strand
gguggcccuucaaccagaa

SEQ ID NO: 1247500 - RNA, 19 nt, Homo sapiens
  misc_RNA (1)...(19): siRNA sense strand
aagauugaagcccugagua

SEQ ID NO: 1247501 - RNA, 19 nt, Homo sapiens
  misc_RNA (1)...(19): siRNA sense strand
gaacacaccugucccucuu

SEQ ID NO: 1247502 - RNA, 19 nt, Homo sapiens
  misc_RNA (1)...(19): siRNA sense strand
gaacugugcugccuguguu

SEQ ID NO: 1247503 - RNA, 19 nt, Homo sapiens
  misc_RNA (1)...(19): siRNA sense strand
caagauggaggcaaagaau

SEQ ID NO: 1247504 - RNA, 19 nt, Homo sapiens
  misc_RNA (1)...(19): siRNA sense strand
guucggccuucccagauaa

SEQ ID NO: 1247505 - RNA, 19 nt, Homo sapiens
  misc_RNA (1)...(19): siRNA sense strand
ggaccaagacaagauugaa

SEQ ID NO: 1247506 - RNA, 19 nt, Homo sapiens
  misc_RNA (1)...(19): siRNA sense strand
ccgcauacccgccaucuuc

SEQ ID NO: 1247507 - RNA, 19 nt, Homo sapiens
  misc_RNA (1)...(19): siRNA sense strand
gcagguacggcuacaagau

SEQ ID NO: 1247508 - RNA, 19 nt, Homo sapiens
  misc_RNA (1)...(19): siRNA sense strand
ucucagacuucgccaggaa

SEQ ID NO: 1247509 - RNA, 19 nt, Homo sapiens
  misc_RNA (1)...(19): siRNA sense strand
uaaugcugcucgaccagaa

SEQ ID NO: 1247510 - RNA, 19 nt, Homo sapiens
  misc_RNA (1)...(19): siRNA sense strand
acaccugucccucuucuuu

SEQ ID NO: 1247511 - RNA, 19 nt, Homo sapiens
  misc_RNA (1)...(19): siRNA sense strand
gaaggcauuucuauuuuag

SEQ ID NO: 1247512 - RNA, 19 nt, Homo sapiens
  misc_RNA (1)...(19): siRNA sense strand
agccugagcugccggcauu

SEQ ID NO: 1247513 - RNA, 19 nt, Homo sapiens
  misc_RNA (1)...(19): siRNA sense strand
caagaugugucugcguauc

SEQ ID NO: 1247514 - RNA, 19 nt, Homo sapiens
  misc_RNA (1)...(19): siRNA sense strand
gcagaaggucuuggagaug

SEQ ID NO: 1247515 - RNA, 19 nt, Homo sapiens
  misc_RNA (1)...(19): siRNA sense strand
ucacgagggcauauaugaa

SEQ ID NO: 1247516 - RNA, 19 nt, Homo sapiens
  misc_RNA (1)...(19): siRNA sense strand
ccaagauggaggcaaagaa

SEQ ID NO: 1247517 - RNA, 19 nt, Homo sapiens
  misc_RNA (1)...(19): siRNA sense strand
uaaccgggagcacgugauu

SEQ ID NO: 1247518 - RNA, 19 nt, Homo sapiens
  misc_RNA (1)...(19): siRNA sense strand
uggcugacuuggagcagaa

SEQ ID NO: 1247519 - RNA, 19 nt, Homo sapiens
  misc_RNA (1)...(19): siRNA sense strand
gacgugacuucauccucuu

SEQ ID NO: 1247520 - RNA, 19 nt, Homo sapiens
  misc_RNA (1)...(19): siRNA sense strand
gaaugucccgcgugcaaag

SEQ ID NO: 1247521 - RNA, 19 nt, Homo sapiens
  misc_RNA (1)...(19): siRNA sense strand
ggaggcauccaccuacgau

SEQ ID NO: 1247522 - RNA, 19 nt, Homo sapiens
  misc_RNA (1)...(19): siRNA sense strand
ggcccgacgugacuucauc

SEQ ID NO: 1247523 - RNA, 19 nt, Homo sapiens
  misc_RNA (1)...(19): siRNA sense strand
gaccaagacaagauugaag

SEQ ID NO: 1247524 - RNA, 19 nt, Homo sapiens
  misc_RNA (1)...(19): siRNA sense strand
cagguacggcuacaagaug

SEQ ID NO: 1247525 - RNA, 19 nt, Homo sapiens
  misc_RNA (1)...(19): siRNA sense strand
cauauaugaagaaggcauu

SEQ ID NO: 1247526 - RNA, 19 nt, Homo sapiens
  misc_RNA (1)...(19): siRNA sense strand
agauggaggcaaagaauuc

SEQ ID NO: 1247527 - RNA, 19 nt, Homo sapiens
  misc_RNA (1)...(19): siRNA sense strand
agcagaaggucuuggagau

SEQ ID NO: 1247528 - RNA, 19 nt, Homo sapiens
  misc_RNA (1)...(19): siRNA sense strand
ccgaaugucccgcgugcaa

SEQ ID NO: 1247529 - RNA, 19 nt, Homo sapiens
  misc_RNA (1)...(19): siRNA sense strand
caagauugaagcccugagu

SEQ ID NO: 1247530 - RNA, 19 nt, Homo sapiens
  misc_RNA (1)...(19): siRNA sense strand
gagggcauauaugaagaag

SEQ ID NO: 1247531 - RNA, 19 nt, Homo sapiens
  misc_RNA (1)...(19): siRNA sense strand
aguucggccuucccagaua

SEQ ID NO: 1247532 - RNA, 19 nt, Homo sapiens
  misc_RNA (1)...(19): siRNA sense strand
cgagggcauauaugaagaa

SEQ ID NO: 1247533 - RNA, 19 nt, Homo sapiens
  misc_RNA (1)...(19): siRNA sense strand
gguggcccuucaaccagaa

SEQ ID NO: 1247534 - RNA, 19 nt, Homo sapiens
  misc_RNA (1)...(19): siRNA sense strand
aagauugaagcccugagua

SEQ ID NO: 1247535 - RNA, 19 nt, Homo sapiens
  misc_RNA (1)...(19): siRNA sense strand
ccaaggagcuggccgauau

SEQ ID NO: 1247536 - RNA, 19 nt, Homo sapiens
  misc_RNA (1)...(19): siRNA sense strand
ggacagagagggugccuuu

SEQ ID NO: 1247537 - RNA, 19 nt, Homo sapiens
  misc_RNA (1)...(19): siRNA sense strand
gccaaggucuggaguaugu

SEQ ID NO: 1247538 - RNA, 19 nt, Homo sapiens
  misc_RNA (1)...(19): siRNA sense strand
gcacuucuccugagcuauu

SEQ ID NO: 1247539 - RNA, 19 nt, Homo sapiens
  misc_RNA (1)...(19): siRNA sense strand
ucgcgcaucugcaagaaua

SEQ ID NO: 1247540 - RNA, 19 nt, Homo sapiens
  misc_RNA (1)...(19): siRNA sense strand
gaauugcccuugcuguauc

SEQ ID NO: 1247541 - RNA, 19 nt, Homo sapiens
  misc_RNA (1)...(19): siRNA sense strand
ggaggugguuugaaugcaa

SEQ ID NO: 1247542 - RNA, 19 nt, Homo sapiens
  misc_RNA (1)...(19): siRNA sense strand
gagccaaggucuggaguau

SEQ ID NO: 1247543 - RNA, 19 nt, Homo sapiens
  misc_RNA (1)...(19): siRNA sense strand
gcaagcgggaguccaagua

SEQ ID NO: 1247544 - RNA, 19 nt, Homo sapiens
  misc_RNA (1)...(19): siRNA sense strand
gaaacaacgucggcuuugg

SEQ ID NO: 1247545 - RNA, 19 nt, Homo sapiens
  misc_RNA (1)...(19): siRNA sense strand
gcacaaaaccucugagaug

SEQ ID NO: 1247546 - RNA, 19 nt, Homo sapiens
  misc_RNA (1)...(19): siRNA sense strand
ggagcuggccgauaucaug

SEQ ID NO: 1247547 - RNA, 19 nt, Homo sapiens
  misc_RNA (1)...(19): siRNA sense strand
cagcacuucuccugagcua

SEQ ID NO: 1247548 - RNA, 19 nt, Homo sapiens
  misc_RNA (1)...(19): siRNA sense strand
gagcggcuuugcugccuau

SEQ ID NO: 1247549 - RNA, 19 nt, Homo sapiens
  misc_RNA (1)...(19): siRNA sense strand
ggagauaggcacugaagac

SEQ ID NO: 1247550 - RNA, 19 nt, Homo sapiens
  misc_RNA (1)...(19): siRNA sense strand
uagagugguuggcacaguu

SEQ ID NO: 1247551 - RNA, 19 nt, Homo sapiens
  misc_RNA (1)...(19): siRNA sense strand
acagagagggugccuuuga

SEQ ID NO: 1247552 - RNA, 19 nt, Homo sapiens
  misc_RNA (1)...(19): siRNA sense strand
uugaggaggugguuugaau

SEQ ID NO: 1247553 - RNA, 19 nt, Homo sapiens
  misc_RNA (1)...(19): siRNA sense strand
gcaagaauaaggagaagcu

SEQ ID NO: 1247554 - RNA, 19 nt, Homo sapiens
  misc_RNA (1)...(19): siRNA sense strand
guuuggcugugcugaauug

SEQ ID NO: 1247555 - RNA, 19 nt, Homo sapiens
  misc_RNA (1)...(19): siRNA sense strand
caaggucuggaguauguaa

SEQ ID NO: 1247556 - RNA, 19 nt, Homo sapiens
  misc_RNA (1)...(19): siRNA sense strand
ugaauugcccuugcuguau

SEQ ID NO: 1247557 - RNA, 19 nt, Homo sapiens
  misc_RNA (1)...(19): siRNA sense strand
uggugcaugugaucaagua

SEQ ID NO: 1247558 - RNA, 19 nt, Homo sapiens
  misc_RNA (1)...(19): siRNA sense strand
cagagagggugccuuugag

SEQ ID NO: 1247559 - RNA, 19 nt, Homo sapiens
  misc_RNA (1)...(19): siRNA sense strand
cgaaacaacgucggcuuug

SEQ ID NO: 1247560 - RNA, 19 nt, Homo sapiens
  misc_RNA (1)...(19): siRNA sense strand
gaggagauaggcacugaag

SEQ ID NO: 1247561 - RNA, 19 nt, Homo sapiens
  misc_RNA (1)...(19): siRNA sense strand
ggagccaaggucuggagua

SEQ ID NO: 1247562 - RNA, 19 nt, Homo sapiens
  misc_RNA (1)...(19): siRNA sense strand
ggucuggaguauguaagga

SEQ ID NO: 1247563 - RNA, 19 nt, Homo sapiens
  misc_RNA (1)...(19): siRNA sense strand
gcucugcugguaccacauu

SEQ ID NO: 1247564 - RNA, 19 nt, Homo sapiens
  misc_RNA (1)...(19): siRNA sense strand
ugcuggaacuccuggauga

SEQ ID NO: 1247565 - RNA, 19 nt, Homo sapiens
  misc_RNA (1)...(19): siRNA sense strand
cugaauugcccuugcugua

SEQ ID NO: 1247566 - RNA, 19 nt, Homo sapiens
  misc_RNA (1)...(19): siRNA sense strand
ggaggaguuuucccgcuuu

SEQ ID NO: 1247567 - RNA, 19 nt, Homo sapiens
  misc_RNA (1)...(19): siRNA sense strand
cggcagcuuuggugcaugu

SEQ ID NO: 1247568 - RNA, 19 nt, Homo sapiens
  misc_RNA (1)...(19): siRNA sense strand
ggcccaugcugcuccacaa

SEQ ID NO: 1247569 - RNA, 19 nt, Homo sapiens
  misc_RNA (1)...(19): siRNA sense strand
cagcagcuucauucaagaa

SEQ ID NO: 1247570 - RNA, 19 nt, Homo sapiens
  misc_RNA (1)...(19): siRNA sense strand
ucagcagcuucauucaaga

SEQ ID NO: 1247571 - RNA, 19 nt, Homo sapiens
  misc_RNA (1)...(19): siRNA sense strand
cagcuuuggugcaugugau

SEQ ID NO: 1247572 - RNA, 19 nt, Homo sapiens
  misc_RNA (1)...(19): siRNA sense strand
guguuuggcugugcugaau

SEQ ID NO: 1247573 - RNA, 19 nt, Homo sapiens
  misc_RNA (1)...(19): siRNA sense strand
aggaggagauaggcacuga

SEQ ID NO: 1247574 - RNA, 19 nt, Homo sapiens
  misc_RNA (1)...(19): siRNA sense strand
ggaaacgccgaaacaacgu

SEQ ID NO: 1247575 - RNA, 19 nt, Homo sapiens
  misc_RNA (1)...(19): siRNA sense strand
gaaugcaacagcacuucuc

SEQ ID NO: 1247576 - RNA, 19 nt, Homo sapiens
  misc_RNA (1)...(19): siRNA sense strand
uucagcagcuucauucaag

SEQ ID NO: 1247577 - RNA, 19 nt, Homo sapiens
  misc_RNA (1)...(19): siRNA sense strand
cagcugccucuuucccuaa

SEQ ID NO: 1247578 - RNA, 19 nt, Homo sapiens
  misc_RNA (1)...(19): siRNA sense strand
gcuggaaacgccgaaacaa

SEQ ID NO: 1247579 - RNA, 19 nt, Homo sapiens
  misc_RNA (1)...(19): siRNA sense strand
gaggagguggagcggcuuu

SEQ ID NO: 1247580 - RNA, 19 nt, Homo sapiens
  misc_RNA (1)...(19): siRNA sense strand
gaggaggugguuugaaugc

SEQ ID NO: 1247581 - RNA, 19 nt, Homo sapiens
  misc_RNA (1)...(19): siRNA sense strand
uaucaugggccaggacuuc

SEQ ID NO: 1247582 - RNA, 19 nt, Homo sapiens
  misc_RNA (1)...(19): siRNA sense strand
ggaauugacugcacuguug

SEQ ID NO: 1247583 - RNA, 19 nt, Homo sapiens
  misc_RNA (1)...(19): siRNA sense strand
gcgaagcgcuggugaguau

SEQ ID NO: 1247584 - RNA, 19 nt, Homo sapiens
  misc_RNA (1)...(19): siRNA sense strand
gcaaggccaugauugagaa

SEQ ID NO: 1247585 - RNA, 19 nt, Homo sapiens
  misc_RNA (1)...(19): siRNA sense strand
cagcggaccuuccucauuc

SEQ ID NO: 1247586 - RNA, 19 nt, Homo sapiens
  misc_RNA (1)...(19): siRNA sense strand
cugaggagcugaugacuau

SEQ ID NO: 1247587 - RNA, 19 nt, Homo sapiens
  misc_RNA (1)...(19): siRNA sense strand
ccaagugugucuucaccua

SEQ ID NO: 1247588 - RNA, 19 nt, Homo sapiens
  misc_RNA (1)...(19): siRNA sense strand
ugaacgauguggaggaauu

SEQ ID NO: 1247589 - RNA, 19 nt, Homo sapiens
  misc_RNA (1)...(19): siRNA sense strand
cgaggaggcugcagcauca

SEQ ID NO: 1247590 - RNA, 19 nt, Homo sapiens
  misc_RNA (1)...(19): siRNA sense strand
gaucagagcacggacuuug

SEQ ID NO: 1247591 - RNA, 19 nt, Homo sapiens
  misc_RNA (1)...(19): siRNA sense strand
gcugauggcucugcuguca

SEQ ID NO: 1247592 - RNA, 19 nt, Homo sapiens
  misc_RNA (1)...(19): siRNA sense strand
gcaccaugaugcaaaccaa

SEQ ID NO: 1247593 - RNA, 19 nt, Homo sapiens
  misc_RNA (1)...(19): siRNA sense strand
uugagaagcuggagaagga

SEQ ID NO: 1247594 - RNA, 19 nt, Homo sapiens
  misc_RNA (1)...(19): siRNA sense strand
gaacagcaggcagagguuu

SEQ ID NO: 1247595 - RNA, 19 nt, Homo sapiens
  misc_RNA (1)...(19): siRNA sense strand
gaagaaagagcugaugaag

SEQ ID NO: 1247596 - RNA, 19 nt, Homo sapiens
  misc_RNA (1)...(19): siRNA sense strand
agaacuggcugcacucuca

SEQ ID NO: 1247597 - RNA, 19 nt, Homo sapiens
  misc_RNA (1)...(19): siRNA sense strand
gcacuguuaccaagacuga

SEQ ID NO: 1247598 - RNA, 19 nt, Homo sapiens
  misc_RNA (1)...(19): siRNA sense strand
gcugaugacuauugaggau

SEQ ID NO: 1247599 - RNA, 19 nt, Homo sapiens
  misc_RNA (1)...(19): siRNA sense strand
ggagguggacgacaugaug

SEQ ID NO: 1247600 - RNA, 19 nt, Homo sapiens
  misc_RNA (1)...(19): siRNA sense strand
gggaucguguccacaaguu

SEQ ID NO: 1247601 - RNA, 19 nt, Homo sapiens
  misc_RNA (1)...(19): siRNA sense strand
gaggagcugaugacuauug

SEQ ID NO: 1247602 - RNA, 19 nt, Homo sapiens
  misc_RNA (1)...(19): siRNA sense strand
gaagcgcuggugaguauga

SEQ ID NO: 1247603 - RNA, 19 nt, Homo sapiens
  misc_RNA (1)...(19): siRNA sense strand
ugaugacuauugaggauga

SEQ ID NO: 1247604 - RNA, 19 nt, Homo sapiens
  misc_RNA (1)...(19): siRNA sense strand
gagguggccuucucaucug

SEQ ID NO: 1247605 - RNA, 19 nt, Homo sapiens
  misc_RNA (1)...(19): siRNA sense strand
gagcagacccgagugaaca

SEQ ID NO: 1247606 - RNA, 19 nt, Homo sapiens
  misc_RNA (1)...(19): siRNA sense strand
caugaacgauguggaggaa

SEQ ID NO: 1247607 - RNA, 19 nt, Homo sapiens
  misc_RNA (1)...(19): siRNA sense strand
ucacucaugucaccagcuu

SEQ ID NO: 1247608 - RNA, 19 nt, Homo sapiens
  misc_RNA (1)...(19): siRNA sense strand
ccaagaagaugggcagcau

SEQ ID NO: 1247609 - RNA, 19 nt, Homo sapiens
  misc_RNA (1)...(19): siRNA sense strand
ggccuuagcugggcuggau

SEQ ID NO: 1247610 - RNA, 19 nt, Homo sapiens
  misc_RNA (1)...(19): siRNA sense strand
gaaccgacgccagaacuuc

SEQ ID NO: 1247611 - RNA, 19 nt, Homo sapiens
  misc_RNA (1)...(19): siRNA sense strand
gaagaagaaagagcugaug

SEQ ID NO: 1247612 - RNA, 19 nt, Homo sapiens
  misc_RNA (1)...(19): siRNA sense strand
gcacacaggcuggaacagu

SEQ ID NO: 1247613 - RNA, 19 nt, Homo sapiens
  misc_RNA (1)...(19): siRNA sense strand
gaacgauguggaggaauug

SEQ ID NO: 1247614 - RNA, 19 nt, Homo sapiens
  misc_RNA (1)...(19): siRNA sense strand
gugaggcgcucggagaaug

SEQ ID NO: 1247615 - RNA, 19 nt, Homo sapiens
  misc_RNA (1)...(19): siRNA sense strand
uggacaagaugcuggauca

SEQ ID NO: 1247616 - RNA, 19 nt, Homo sapiens
  misc_RNA (1)...(19): siRNA sense strand
gacaagaugcuggaucaga

SEQ ID NO: 1247617 - RNA, 19 nt, Homo sapiens
  misc_RNA (1)...(19): siRNA sense strand
caaggagcaacgaggagua

SEQ ID NO: 1247618 - RNA, 19 nt, Homo sapiens
  misc_RNA (1)...(19): siRNA sense strand
ccaacagcaucaagcagau

SEQ ID NO: 1247619 - RNA, 19 nt, Homo sapiens
  misc_RNA (1)...(19): siRNA sense strand
gagaccagcgggacaagga

SEQ ID NO: 1247620 - RNA, 19 nt, Homo sapiens
  misc_RNA (1)...(19): siRNA sense strand
gaucguguccacaaguuca

SEQ ID NO: 1247621 - RNA, 19 nt, Homo sapiens
  misc_RNA (1)...(19): siRNA sense strand
gcugaggagcugaugacua

SEQ ID NO: 1247622 - RNA, 19 nt, Homo sapiens
  misc_RNA (1)...(19): siRNA sense strand
ccagagggcagaacugaca

SEQ ID NO: 1247623 - RNA, 19 nt, Homo sapiens
  misc_RNA (1)...(19): siRNA sense strand
ggcaguggcagcaccauga

SEQ ID NO: 1247624 - RNA, 19 nt, Homo sapiens
  misc_RNA (1)...(19): siRNA sense strand
ucagagcacggacuuugaa

SEQ ID NO: 1247625 - RNA, 19 nt, Homo sapiens
  misc_RNA (1)...(19): siRNA sense strand
gcagcaccaugaugcaaac

SEQ ID NO: 1247626 - RNA, 19 nt, Homo sapiens
  misc_RNA (1)...(19): siRNA sense strand
gcaggcagagguuucaaag

SEQ ID NO: 1247627 - RNA, 19 nt, Homo sapiens
  misc_RNA (1)...(19): siRNA sense strand
gagguggacgacaugauga

SEQ ID NO: 1247628 - RNA, 19 nt, Homo sapiens
  misc_RNA (1)...(19): siRNA sense strand
ucacaucugauucuccuau

SEQ ID NO: 1247629 - RNA, 19 nt, Homo sapiens
  misc_RNA (1)...(19): siRNA sense strand
caaguucacaucugauucu

SEQ ID NO: 1247630 - RNA, 19 nt, Homo sapiens
  misc_RNA (1)...(19): siRNA sense strand
uccacaaguucacaucuga

SEQ ID NO: 1247631 - RNA, 19 nt, Homo sapiens
  misc_RNA (1)...(19): siRNA sense strand
agaagaaagagcugaugaa

SEQ ID NO: 1247632 - RNA, 19 nt, Homo sapiens
  misc_RNA (1)...(19): siRNA sense strand
cgagguggccuucucaucu

SEQ ID NO: 1247633 - RNA, 19 nt, Homo sapiens
  misc_RNA (1)...(19): siRNA sense strand
gugaugggauggccuucug

SEQ ID NO: 1247634 - RNA, 19 nt, Homo sapiens
  misc_RNA (1)...(19): siRNA sense strand
ccagcggaccuuccucauu

SEQ ID NO: 1247635 - RNA, 19 nt, Homo sapiens
  misc_RNA (1)...(19): siRNA sense strand
uguacgggcucaggagauu

SEQ ID NO: 1247636 - RNA, 19 nt, Homo sapiens
  misc_RNA (1)...(19): siRNA sense strand
gagcuccgacaaaggaaga

SEQ ID NO: 1247637 - RNA, 19 nt, Homo sapiens
  misc_RNA (1)...(19): siRNA sense strand
ggaacagcaggcagagguu

SEQ ID NO: 1247638 - RNA, 19 nt, Homo sapiens
  misc_RNA (1)...(19): siRNA sense strand
gcacgucgacauccagaac

SEQ ID NO: 1247639 - RNA, 19 nt, Homo sapiens
  misc_RNA (1)...(19): siRNA sense strand
aagaagaaagagcugauga

SEQ ID NO: 1247640 - RNA, 19 nt, Homo sapiens
  misc_RNA (1)...(19): siRNA sense strand
ggaggcugcagcaucaaga

SEQ ID NO: 1247641 - RNA, 19 nt, Homo sapiens
  misc_RNA (1)...(19): siRNA sense strand
cacaaguucacaucugauu

SEQ ID NO: 1247642 - RNA, 19 nt, Homo sapiens
  misc_RNA (1)...(19): siRNA sense strand
ucccaacaguggcucaaga

SEQ ID NO: 1247643 - RNA, 19 nt, Homo sapiens
  misc_RNA (1)...(19): siRNA sense strand
guccacaaguucacaucug

SEQ ID NO: 1247644 - RNA, 19 nt, Homo sapiens
  misc_RNA (1)...(19): siRNA sense strand
ugauugagaagcuggagaa

SEQ ID NO: 1247645 - RNA, 19 nt, Homo sapiens
  misc_RNA (1)...(19): siRNA sense strand
ggaggucacagcagaucug

SEQ ID NO: 1247646 - RNA, 19 nt, Homo sapiens
  misc_RNA (1)...(19): siRNA sense strand
gauaccuccucccgguuca

SEQ ID NO: 1247647 - RNA, 19 nt, Homo sapiens
  misc_RNA (1)...(19): siRNA sense strand
cgugagcuccgacaaagga

SEQ ID NO: 1247648 - RNA, 19 nt, Homo sapiens
  misc_RNA (1)...(19): siRNA sense strand
caagugugucuucaccuau

SEQ ID NO: 1247649 - RNA, 19 nt, Homo sapiens
  misc_RNA (1)...(19): siRNA sense strand
gcucaagagaggacagcaa

SEQ ID NO: 1247650 - RNA, 19 nt, Homo sapiens
  misc_RNA (1)...(19): siRNA sense strand
gcgcgcaaggccaugauug

SEQ ID NO: 1247651 - RNA, 19 nt, Homo sapiens
  misc_RNA (1)...(19): siRNA sense strand
ggcagcaccaugaugcaaa

SEQ ID NO: 1247652 - RNA, 19 nt, Homo sapiens
  misc_RNA (1)...(19): siRNA sense strand
gcugagcagacccgaguga

SEQ ID NO: 1247653 - RNA, 19 nt, Homo sapiens
  misc_RNA (1)...(19): siRNA sense strand
ccacauucaccaucgagau

SEQ ID NO: 1247654 - RNA, 19 nt, Homo sapiens
  misc_RNA (1)...(19): siRNA sense strand
ugcagucgcucuacaacca

SEQ ID NO: 1247655 - RNA, 19 nt, Homo sapiens
  misc_RNA (1)...(19): siRNA sense strand
ggcaggacaacaaggagaa

SEQ ID NO: 1247656 - RNA, 19 nt, Homo sapiens
  misc_RNA (1)...(19): siRNA sense strand
cauccgggcugcacuucgu

SEQ ID NO: 1247657 - RNA, 19 nt, Homo sapiens
  misc_RNA (1)...(19): siRNA sense strand
gcagacccgagugaacaaa

SEQ ID NO: 1247658 - RNA, 19 nt, Homo sapiens
  misc_RNA (1)...(19): siRNA sense strand
ggucaacaagcuucugucu

SEQ ID NO: 1247659 - RNA, 19 nt, Homo sapiens
  misc_RNA (1)...(19): siRNA sense strand
aagugugucuucaccuaug

SEQ ID NO: 1247660 - RNA, 19 nt, Homo sapiens
  misc_RNA (1)...(19): siRNA sense strand
ccugaggccuucgacuaug

SEQ ID NO: 1247661 - RNA, 19 nt, Homo sapiens
  misc_RNA (1)...(19): siRNA sense strand
gcuacgagcacgucgacau

SEQ ID NO: 1247662 - RNA, 19 nt, Homo sapiens
  misc_RNA (1)...(19): siRNA sense strand
gaugacuauugaggaugaa

SEQ ID NO: 1247663 - RNA, 19 nt, Homo sapiens
  misc_RNA (1)...(19): siRNA sense strand
aggagcugaugacuauuga

SEQ ID NO: 1247664 - RNA, 19 nt, Homo sapiens
  misc_RNA (1)...(19): siRNA sense strand
aggaggcccuggcauccaa

SEQ ID NO: 1247665 - RNA, 19 nt, Homo sapiens
  misc_RNA (1)...(19): siRNA sense strand
gcucguccacuccaaugau

SEQ ID NO: 1247666 - RNA, 19 nt, Homo sapiens
  misc_RNA (1)...(19): siRNA sense strand
ggaauugacugcacuguug

SEQ ID NO: 1247667 - RNA, 19 nt, Homo sapiens
  misc_RNA (1)...(19): siRNA sense strand
gcgaagcgcuggugaguau

SEQ ID NO: 1247668 - RNA, 19 nt, Homo sapiens
  misc_RNA (1)...(19): siRNA sense strand
gcaaggccaugauugagaa

SEQ ID NO: 1247669 - RNA, 19 nt, Homo sapiens
  misc_RNA (1)...(19): siRNA sense strand
cagcggaccuuccucauuc

SEQ ID NO: 1247670 - RNA, 19 nt, Homo sapiens
  misc_RNA (1)...(19): siRNA sense strand
cugaggagcugaugacuau

SEQ ID NO: 1247671 - RNA, 19 nt, Homo sapiens
  misc_RNA (1)...(19): siRNA sense strand
ugaacgauguggaggaauu

SEQ ID NO: 1247672 - RNA, 19 nt, Homo sapiens
  misc_RNA (1)...(19): siRNA sense strand
cgaggaggcugcagcauca

SEQ ID NO: 1247673 - RNA, 19 nt, Homo sapiens
  misc_RNA (1)...(19): siRNA sense strand
gaucagagcacggacuuug

SEQ ID NO: 1247674 - RNA, 19 nt, Homo sapiens
  misc_RNA (1)...(19): siRNA sense strand
gcugauggcucugcuguca

SEQ ID NO: 1247675 - RNA, 19 nt, Homo sapiens
  misc_RNA (1)...(19): siRNA sense strand
gcaccaugaugcaaaccaa

SEQ ID NO: 1247676 - RNA, 19 nt, Homo sapiens
  misc_RNA (1)...(19): siRNA sense strand
uugagaagcuggagaagga

SEQ ID NO: 1247677 - RNA, 19 nt, Homo sapiens
  misc_RNA (1)...(19): siRNA sense strand
gaacagcaggcagagguuu

SEQ ID NO: 1247678 - RNA, 19 nt, Homo sapiens
  misc_RNA (1)...(19): siRNA sense strand
gaagaaagagcugaugaag

SEQ ID NO: 1247679 - RNA, 19 nt, Homo sapiens
  misc_RNA (1)...(19): siRNA sense strand
agaacuggcugcacucuca

SEQ ID NO: 1247680 - RNA, 19 nt, Homo sapiens
  misc_RNA (1)...(19): siRNA sense strand
gcacuguuaccaagacuga

SEQ ID NO: 1247681 - RNA, 19 nt, Homo sapiens
  misc_RNA (1)...(19): siRNA sense strand
gcugaugacuauugaggau

SEQ ID NO: 1247682 - RNA, 19 nt, Homo sapiens
  misc_RNA (1)...(19): siRNA sense strand
gggaucguguccacaaguu

SEQ ID NO: 1247683 - RNA, 19 nt, Homo sapiens
  misc_RNA (1)...(19): siRNA sense strand
gaggagcugaugacuauug

SEQ ID NO: 1247684 - RNA, 19 nt, Homo sapiens
  misc_RNA (1)...(19): siRNA sense strand
gaagcgcuggugaguauga

SEQ ID NO: 1247685 - RNA, 19 nt, Homo sapiens
  misc_RNA (1)...(19): siRNA sense strand
ugaugacuauugaggauga

SEQ ID NO: 1247686 - RNA, 19 nt, Homo sapiens
  misc_RNA (1)...(19): siRNA sense strand
gagguggccuucucaucug

SEQ ID NO: 1247687 - RNA, 19 nt, Homo sapiens
  misc_RNA (1)...(19): siRNA sense strand
gagcagacccgagugaaca

SEQ ID NO: 1247688 - RNA, 19 nt, Homo sapiens
  misc_RNA (1)...(19): siRNA sense strand
caugaacgauguggaggaa

SEQ ID NO: 1247689 - RNA, 19 nt, Homo sapiens
  misc_RNA (1)...(19): siRNA sense strand
ucacucaugucaccagcuu

SEQ ID NO: 1247690 - RNA, 19 nt, Homo sapiens
  misc_RNA (1)...(19): siRNA sense strand
ccaagaagaugggcagcau

SEQ ID NO: 1247691 - RNA, 19 nt, Homo sapiens
  misc_RNA (1)...(19): siRNA sense strand
ggccuuagcugggcuggau

SEQ ID NO: 1247692 - RNA, 19 nt, Homo sapiens
  misc_RNA (1)...(19): siRNA sense strand
gaaccgacgccagaacuuc

SEQ ID NO: 1247693 - RNA, 19 nt, Homo sapiens
  misc_RNA (1)...(19): siRNA sense strand
gaagaagaaagagcugaug

SEQ ID NO: 1247694 - RNA, 19 nt, Homo sapiens
  misc_RNA (1)...(19): siRNA sense strand
gaacgauguggaggaauug

SEQ ID NO: 1247695 - RNA, 19 nt, Homo sapiens
  misc_RNA (1)...(19): siRNA sense strand
gugaggcgcucggagaaug

SEQ ID NO: 1247696 - RNA, 19 nt, Homo sapiens
  misc_RNA (1)...(19): siRNA sense strand
uggacaagaugcuggauca

SEQ ID NO: 1247697 - RNA, 19 nt, Homo sapiens
  misc_RNA (1)...(19): siRNA sense strand
gcacacaggcuggaacagu

SEQ ID NO: 1247698 - RNA, 19 nt, Homo sapiens
  misc_RNA (1)...(19): siRNA sense strand
gacaagaugcuggaucaga

SEQ ID NO: 1247699 - RNA, 19 nt, Homo sapiens
  misc_RNA (1)...(19): siRNA sense strand
caaggagcaacgaggagua

SEQ ID NO: 1247700 - RNA, 19 nt, Homo sapiens
  misc_RNA (1)...(19): siRNA sense strand
ccaacagcaucaagcagau

SEQ ID NO: 1247701 - RNA, 19 nt, Homo sapiens
  misc_RNA (1)...(19): siRNA sense strand
gagaccagcgggacaagga

SEQ ID NO: 1247702 - RNA, 19 nt, Homo sapiens
  misc_RNA (1)...(19): siRNA sense strand
gaucguguccacaaguuca

SEQ ID NO: 1247703 - RNA, 19 nt, Homo sapiens
  misc_RNA (1)...(19): siRNA sense strand
gcugaggagcugaugacua

SEQ ID NO: 1247704 - RNA, 19 nt, Homo sapiens
  misc_RNA (1)...(19): siRNA sense strand
ccagagggcagaacugaca

SEQ ID NO: 1247705 - RNA, 19 nt, Homo sapiens
  misc_RNA (1)...(19): siRNA sense strand
ggcaguggcagcaccauga

SEQ ID NO: 1247706 - RNA, 19 nt, Homo sapiens
  misc_RNA (1)...(19): siRNA sense strand
ucagagcacggacuuugaa

SEQ ID NO: 1247707 - RNA, 19 nt, Homo sapiens
  misc_RNA (1)...(19): siRNA sense strand
gcagcaccaugaugcaaac

SEQ ID NO: 1247708 - RNA, 19 nt, Homo sapiens
  misc_RNA (1)...(19): siRNA sense strand
gcaggcagagguuucaaag

SEQ ID NO: 1247709 - RNA, 19 nt, Homo sapiens
  misc_RNA (1)...(19): siRNA sense strand
ucacaucugauucuccuau

SEQ ID NO: 1247710 - RNA, 19 nt, Homo sapiens
  misc_RNA (1)...(19): siRNA sense strand
caaguucacaucugauucu

SEQ ID NO: 1247711 - RNA, 19 nt, Homo sapiens
  misc_RNA (1)...(19): siRNA sense strand
uccacaaguucacaucuga

SEQ ID NO: 1247712 - RNA, 19 nt, Homo sapiens
  misc_RNA (1)...(19): siRNA sense strand
agaagaaagagcugaugaa

SEQ ID NO: 1247713 - RNA, 19 nt, Homo sapiens
  misc_RNA (1)...(19): siRNA sense strand
cgagguggccuucucaucu

SEQ ID NO: 1247714 - RNA, 19 nt, Homo sapiens
  misc_RNA (1)...(19): siRNA sense strand
gugaugggauggccuucug

SEQ ID NO: 1247715 - RNA, 19 nt, Homo sapiens
  misc_RNA (1)...(19): siRNA sense strand
uguacgggcucaggagauu

SEQ ID NO: 1247716 - RNA, 19 nt, Homo sapiens
  misc_RNA (1)...(19): siRNA sense strand
ccagcggaccuuccucauu

SEQ ID NO: 1247717 - RNA, 19 nt, Homo sapiens
  misc_RNA (1)...(19): siRNA sense strand
gagcuccgacaaaggaaga

SEQ ID NO: 1247718 - RNA, 19 nt, Homo sapiens
  misc_RNA (1)...(19): siRNA sense strand
ggaacagcaggcagagguu

SEQ ID NO: 1247719 - RNA, 19 nt, Homo sapiens
  misc_RNA (1)...(19): siRNA sense strand
gcacgucgacauccagaac

SEQ ID NO: 1247720 - RNA, 19 nt, Homo sapiens
  misc_RNA (1)...(19): siRNA sense strand
aagaagaaagagcugauga

SEQ ID NO: 1247721 - RNA, 19 nt, Homo sapiens
  misc_RNA (1)...(19): siRNA sense strand
ggaggcugcagcaucaaga

SEQ ID NO: 1247722 - RNA, 19 nt, Homo sapiens
  misc_RNA (1)...(19): siRNA sense strand
ucccaacaguggcucaaga

SEQ ID NO: 1247723 - RNA, 19 nt, Homo sapiens
  misc_RNA (1)...(19): siRNA sense strand
cacaaguucacaucugauu

SEQ ID NO: 1247724 - RNA, 19 nt, Homo sapiens
  misc_RNA (1)...(19): siRNA sense strand
guccacaaguucacaucug

SEQ ID NO: 1247725 - RNA, 19 nt, Homo sapiens
  misc_RNA (1)...(19): siRNA sense strand
ugauugagaagcuggagaa

SEQ ID NO: 1247726 - RNA, 19 nt, Homo sapiens
  misc_RNA (1)...(19): siRNA sense strand
ggaggucacagcagaucug

SEQ ID NO: 1247727 - RNA, 19 nt, Homo sapiens
  misc_RNA (1)...(19): siRNA sense strand
gauaccuccucccgguuca

SEQ ID NO: 1247728 - RNA, 19 nt, Homo sapiens
  misc_RNA (1)...(19): siRNA sense strand
cgugagcuccgacaaagga

SEQ ID NO: 1247729 - RNA, 19 nt, Homo sapiens
  misc_RNA (1)...(19): siRNA sense strand
gcugagcagacccgaguga

SEQ ID NO: 1247730 - RNA, 19 nt, Homo sapiens
  misc_RNA (1)...(19): siRNA sense strand
gcucaagagaggacagcaa

SEQ ID NO: 1247731 - RNA, 19 nt, Homo sapiens
  misc_RNA (1)...(19): siRNA sense strand
gcgcgcaaggccaugauug

SEQ ID NO: 1247732 - RNA, 19 nt, Homo sapiens
  misc_RNA (1)...(19): siRNA sense strand
ggcagcaccaugaugcaaa

SEQ ID NO: 1247733 - RNA, 19 nt, Homo sapiens
  misc_RNA (1)...(19): siRNA sense strand
ccacauucaccaucgagau

SEQ ID NO: 1247734 - RNA, 19 nt, Homo sapiens
  misc_RNA (1)...(19): siRNA sense strand
cauccgggcugcacuucgu

SEQ ID NO: 1247735 - RNA, 19 nt, Homo sapiens
  misc_RNA (1)...(19): siRNA sense strand
ggcaggacaacaaggagaa

SEQ ID NO: 1247736 - RNA, 19 nt, Homo sapiens
  misc_RNA (1)...(19): siRNA sense strand
gcagacccgagugaacaaa

SEQ ID NO: 1247737 - RNA, 19 nt, Homo sapiens
  misc_RNA (1)...(19): siRNA sense strand
ggucaacaagcuucugucu

SEQ ID NO: 1247738 - RNA, 19 nt, Homo sapiens
  misc_RNA (1)...(19): siRNA sense strand
ccugaggccuucgacuaug

SEQ ID NO: 1247739 - RNA, 19 nt, Homo sapiens
  misc_RNA (1)...(19): siRNA sense strand
gcuacgagcacgucgacau

SEQ ID NO: 1247740 - RNA, 19 nt, Homo sapiens
  misc_RNA (1)...(19): siRNA sense strand
gaugacuauugaggaugaa

SEQ ID NO: 1247741 - RNA, 19 nt, Homo sapiens
  misc_RNA (1)...(19): siRNA sense strand
aggagcugaugacuauuga

SEQ ID NO: 1247742 - RNA, 19 nt, Homo sapiens
  misc_RNA (1)...(19): siRNA sense strand
aggaggcccuggcauccaa

SEQ ID NO: 1247743 - RNA, 19 nt, Homo sapiens
  misc_RNA (1)...(19): siRNA sense strand
gcucguccacuccaaugau

SEQ ID NO: 1247744 - RNA, 19 nt, Homo sapiens
  misc_RNA (1)...(19): siRNA sense strand
ggaauugacugcacuguug

SEQ ID NO: 1247745 - RNA, 19 nt, Homo sapiens
  misc_RNA (1)...(19): siRNA sense strand
gcgaagcgcuggugaguau

SEQ ID NO: 1247746 - RNA, 19 nt, Homo sapiens
  misc_RNA (1)...(19): siRNA sense strand
gcaaggccaugauugagaa

SEQ ID NO: 1247747 - RNA, 19 nt, Homo sapiens
  misc_RNA (1)...(19): siRNA sense strand
cagcggaccuuccucauuc

SEQ ID NO: 1247748 - RNA, 19 nt, Homo sapiens
  misc_RNA (1)...(19): siRNA sense strand
cugaggagcugaugacuau

SEQ ID NO: 1247749 - RNA, 19 nt, Homo sapiens
  misc_RNA (1)...(19): siRNA sense strand
ccaagugugucuucaccua

SEQ ID NO: 1247750 - RNA, 19 nt, Homo sapiens
  misc_RNA (1)...(19): siRNA sense strand
ugaacgauguggaggaauu

SEQ ID NO: 1247751 - RNA, 19 nt, Homo sapiens
  misc_RNA (1)...(19): siRNA sense strand
cgaggaggcugcagcauca

SEQ ID NO: 1247752 - RNA, 19 nt, Homo sapiens
  misc_RNA (1)...(19): siRNA sense strand
gaucagagcacggacuuug

SEQ ID NO: 1247753 - RNA, 19 nt, Homo sapiens
  misc_RNA (1)...(19): siRNA sense strand
gcugauggcucugcuguca

SEQ ID NO: 1247754 - RNA, 19 nt, Homo sapiens
  misc_RNA (1)...(19): siRNA sense strand
gcaccaugaugcaaaccaa

SEQ ID NO: 1247755 - RNA, 19 nt, Homo sapiens
  misc_RNA (1)...(19): siRNA sense strand
uugagaagcuggagaagga

SEQ ID NO: 1247756 - RNA, 19 nt, Homo sapiens
  misc_RNA (1)...(19): siRNA sense strand
gaacagcaggcagagguuu

SEQ ID NO: 1247757 - RNA, 19 nt, Homo sapiens
  misc_RNA (1)...(19): siRNA sense strand
gaagaaagagcugaugaag

SEQ ID NO: 1247758 - RNA, 19 nt, Homo sapiens
  misc_RNA (1)...(19): siRNA sense strand
agaacuggcugcacucuca

SEQ ID NO: 1247759 - RNA, 19 nt, Homo sapiens
  misc_RNA (1)...(19): siRNA sense strand
gcacuguuaccaagacuga

SEQ ID NO: 1247760 - RNA, 19 nt, Homo sapiens
  misc_RNA (1)...(19): siRNA sense strand
gcugaugacuauugaggau

SEQ ID NO: 1247761 - RNA, 19 nt, Homo sapiens
  misc_RNA (1)...(19): siRNA sense strand
ggagguggacgacaugaug

SEQ ID NO: 1247762 - RNA, 19 nt, Homo sapiens
  misc_RNA (1)...(19): siRNA sense strand
gggaucguguccacaaguu

SEQ ID NO: 1247763 - RNA, 19 nt, Homo sapiens
  misc_RNA (1)...(19): siRNA sense strand
gaggagcugaugacuauug

SEQ ID NO: 1247764 - RNA, 19 nt, Homo sapiens
  misc_RNA (1)...(19): siRNA sense strand
gaagcgcuggugaguauga

SEQ ID NO: 1247765 - RNA, 19 nt, Homo sapiens
  misc_RNA (1)...(19): siRNA sense strand
ugaugacuauugaggauga

SEQ ID NO: 1247766 - RNA, 19 nt, Homo sapiens
  misc_RNA (1)...(19): siRNA sense strand
gagguggccuucucaucug

SEQ ID NO: 1247767 - RNA, 19 nt, Homo sapiens
  misc_RNA (1)...(19): siRNA sense strand
gagcagacccgagugaaca

SEQ ID NO: 1247768 - RNA, 19 nt, Homo sapiens
  misc_RNA (1)...(19): siRNA sense strand
caugaacgauguggaggaa

SEQ ID NO: 1247769 - RNA, 19 nt, Homo sapiens
  misc_RNA (1)...(19): siRNA sense strand
ucacucaugucaccagcuu

SEQ ID NO: 1247770 - RNA, 19 nt, Homo sapiens
  misc_RNA (1)...(19): siRNA sense strand
ccaagaagaugggcagcau

SEQ ID NO: 1247771 - RNA, 19 nt, Homo sapiens
  misc_RNA (1)...(19): siRNA sense strand
ggccuuagcugggcuggau

SEQ ID NO: 1247772 - RNA, 19 nt, Homo sapiens
  misc_RNA (1)...(19): siRNA sense strand
gaaccgacgccagaacuuc

SEQ ID NO: 1247773 - RNA, 19 nt, Homo sapiens
  misc_RNA (1)...(19): siRNA sense strand
gaagaagaaagagcugaug

SEQ ID NO: 1247774 - RNA, 19 nt, Homo sapiens
  misc_RNA (1)...(19): siRNA sense strand
gcacacaggcuggaacagu

SEQ ID NO: 1247775 - RNA, 19 nt, Homo sapiens
  misc_RNA (1)...(19): siRNA sense strand
gaacgauguggaggaauug

SEQ ID NO: 1247776 - RNA, 19 nt, Homo sapiens
  misc_RNA (1)...(19): siRNA sense strand
gugaggcgcucggagaaug

SEQ ID NO: 1247777 - RNA, 19 nt, Homo sapiens
  misc_RNA (1)...(19): siRNA sense strand
uggacaagaugcuggauca

SEQ ID NO: 1247778 - RNA, 19 nt, Homo sapiens
  misc_RNA (1)...(19): siRNA sense strand
gacaagaugcuggaucaga

SEQ ID NO: 1247779 - RNA, 19 nt, Homo sapiens
  misc_RNA (1)...(19): siRNA sense strand
caaggagcaacgaggagua

SEQ ID NO: 1247780 - RNA, 19 nt, Homo sapiens
  misc_RNA (1)...(19): siRNA sense strand
ccaacagcaucaagcagau

SEQ ID NO: 1247781 - RNA, 19 nt, Homo sapiens
  misc_RNA (1)...(19): siRNA sense strand
gagaccagcgggacaagga

SEQ ID NO: 1247782 - RNA, 19 nt, Homo sapiens
  misc_RNA (1)...(19): siRNA sense strand
gaucguguccacaaguuca

SEQ ID NO: 1247783 - RNA, 19 nt, Homo sapiens
  misc_RNA (1)...(19): siRNA sense strand
gcugaggagcugaugacua

SEQ ID NO: 1247784 - RNA, 19 nt, Homo sapiens
  misc_RNA (1)...(19): siRNA sense strand
ccagagggcagaacugaca

SEQ ID NO: 1247785 - RNA, 19 nt, Homo sapiens
  misc_RNA (1)...(19): siRNA sense strand
ggcaguggcagcaccauga

SEQ ID NO: 1247786 - RNA, 19 nt, Homo sapiens
  misc_RNA (1)...(19): siRNA sense strand
ucagagcacggacuuugaa

SEQ ID NO: 1247787 - RNA, 19 nt, Homo sapiens
  misc_RNA (1)...(19): siRNA sense strand
gcagcaccaugaugcaaac

SEQ ID NO: 1247788 - RNA, 19 nt, Homo sapiens
  misc_RNA (1)...(19): siRNA sense strand
gcaggcagagguuucaaag

SEQ ID NO: 1247789 - RNA, 19 nt, Homo sapiens
  misc_RNA (1)...(19): siRNA sense strand
gagguggacgacaugauga

SEQ ID NO: 1247790 - RNA, 19 nt, Homo sapiens
  misc_RNA (1)...(19): siRNA sense strand
ucacaucugauucuccuau

SEQ ID NO: 1247791 - RNA, 19 nt, Homo sapiens
  misc_RNA (1)...(19): siRNA sense strand
caaguucacaucugauucu

SEQ ID NO: 1247792 - RNA, 19 nt, Homo sapiens
  misc_RNA (1)...(19): siRNA sense strand
uccacaaguucacaucuga

SEQ ID NO: 1247793 - RNA, 19 nt, Homo sapiens
  misc_RNA (1)...(19): siRNA sense strand
agaagaaagagcugaugaa

SEQ ID NO: 1247794 - RNA, 19 nt, Homo sapiens
  misc_RNA (1)...(19): siRNA sense strand
cgagguggccuucucaucu

SEQ ID NO: 1247795 - RNA, 19 nt, Homo sapiens
  misc_RNA (1)...(19): siRNA sense strand
gugaugggauggccuucug

SEQ ID NO: 1247796 - RNA, 19 nt, Homo sapiens
  misc_RNA (1)...(19): siRNA sense strand
ccagcggaccuuccucauu

SEQ ID NO: 1247797 - RNA, 19 nt, Homo sapiens
  misc_RNA (1)...(19): siRNA sense strand
uguacgggcucaggagauu

SEQ ID NO: 1247798 - RNA, 19 nt, Homo sapiens
  misc_RNA (1)...(19): siRNA sense strand
gagcuccgacaaaggaaga

SEQ ID NO: 1247799 - RNA, 19 nt, Homo sapiens
  misc_RNA (1)...(19): siRNA sense strand
ggaacagcaggcagagguu

SEQ ID NO: 1247800 - RNA, 19 nt, Homo sapiens
  misc_RNA (1)...(19): siRNA sense strand
gcacgucgacauccagaac

SEQ ID NO: 1247801 - RNA, 19 nt, Homo sapiens
  misc_RNA (1)...(19): siRNA sense strand
aagaagaaagagcugauga

SEQ ID NO: 1247802 - RNA, 19 nt, Homo sapiens
  misc_RNA (1)...(19): siRNA sense strand
ggaggcugcagcaucaaga

SEQ ID NO: 1247803 - RNA, 19 nt, Homo sapiens
  misc_RNA (1)...(19): siRNA sense strand
cacaaguucacaucugauu

SEQ ID NO: 1247804 - RNA, 19 nt, Homo sapiens
  misc_RNA (1)...(19): siRNA sense strand
ucccaacaguggcucaaga

SEQ ID NO: 1247805 - RNA, 19 nt, Homo sapiens
  misc_RNA (1)...(19): siRNA sense strand
guccacaaguucacaucug

SEQ ID NO: 1247806 - RNA, 19 nt, Homo sapiens
  misc_RNA (1)...(19): siRNA sense strand
ugauugagaagcuggagaa

SEQ ID NO: 1247807 - RNA, 19 nt, Homo sapiens
  misc_RNA (1)...(19): siRNA sense strand
ggaggucacagcagaucug

SEQ ID NO: 1247808 - RNA, 19 nt, Homo sapiens
  misc_RNA (1)...(19): siRNA sense strand
gauaccuccucccgguuca

SEQ ID NO: 1247809 - RNA, 19 nt, Homo sapiens
  misc_RNA (1)...(19): siRNA sense strand
cgugagcuccgacaaagga

SEQ ID NO: 1247810 - RNA, 19 nt, Homo sapiens
  misc_RNA (1)...(19): siRNA sense strand
caagugugucuucaccuau

SEQ ID NO: 1247811 - RNA, 19 nt, Homo sapiens
  misc_RNA (1)...(19): siRNA sense strand
gcucaagagaggacagcaa

SEQ ID NO: 1247812 - RNA, 19 nt, Homo sapiens
  misc_RNA (1)...(19): siRNA sense strand
gcgcgcaaggccaugauug

SEQ ID NO: 1247813 - RNA, 19 nt, Homo sapiens
  misc_RNA (1)...(19): siRNA sense strand
ggcagcaccaugaugcaaa

SEQ ID NO: 1247814 - RNA, 19 nt, Homo sapiens
  misc_RNA (1)...(19): siRNA sense strand
gcugagcagacccgaguga

SEQ ID NO: 1247815 - RNA, 19 nt, Homo sapiens
  misc_RNA (1)...(19): siRNA sense strand
ccacauucaccaucgagau

SEQ ID NO: 1247816 - RNA, 19 nt, Homo sapiens
  misc_RNA (1)...(19): siRNA sense strand
ugcagucgcucuacaacca

SEQ ID NO: 1247817 - RNA, 19 nt, Homo sapiens
  misc_RNA (1)...(19): siRNA sense strand
ggcaggacaacaaggagaa

SEQ ID NO: 1247818 - RNA, 19 nt, Homo sapiens
  misc_RNA (1)...(19): siRNA sense strand
cauccgggcugcacuucgu

SEQ ID NO: 1247819 - RNA, 19 nt, Homo sapiens
  misc_RNA (1)...(19): siRNA sense strand
gcagacccgagugaacaaa

SEQ ID NO: 1247820 - RNA, 19 nt, Homo sapiens
  misc_RNA (1)...(19): siRNA sense strand
ggucaacaagcuucugucu

SEQ ID NO: 1247821 - RNA, 19 nt, Homo sapiens
  misc_RNA (1)...(19): siRNA sense strand
aagugugucuucaccuaug

SEQ ID NO: 1247822 - RNA, 19 nt, Homo sapiens
  misc_RNA (1)...(19): siRNA sense strand
ccugaggccuucgacuaug

SEQ ID NO: 1247823 - RNA, 19 nt, Homo sapiens
  misc_RNA (1)...(19): siRNA sense strand
gcuacgagcacgucgacau

SEQ ID NO: 1247824 - RNA, 19 nt, Homo sapiens
  misc_RNA (1)...(19): siRNA sense strand
gaugacuauugaggaugaa

SEQ ID NO: 1247825 - RNA, 19 nt, Homo sapiens
  misc_RNA (1)...(19): siRNA sense strand
aggagcugaugacuauuga

SEQ ID NO: 1247826 - RNA, 19 nt, Homo sapiens
  misc_RNA (1)...(19): siRNA sense strand
aggaggcccuggcauccaa

SEQ ID NO: 1247827 - RNA, 19 nt, Homo sapiens
  misc_RNA (1)...(19): siRNA sense strand
gcucguccacuccaaugau

SEQ ID NO: 1247828 - RNA, 19 nt, Homo sapiens
  misc_RNA (1)...(19): siRNA sense strand
gaacuggacugucugauuc

SEQ ID NO: 1247829 - RNA, 19 nt, Homo sapiens
  misc_RNA (1)...(19): siRNA sense strand
guggaacgcugguuaaauu

SEQ ID NO: 1247830 - RNA, 19 nt, Homo sapiens
  misc_RNA (1)...(19): siRNA sense strand
ccaugaagcugcuggcaua

SEQ ID NO: 1247831 - RNA, 19 nt, Homo sapiens
  misc_RNA (1)...(19): siRNA sense strand
gaacauagacagaguugug

SEQ ID NO: 1247832 - RNA, 19 nt, Homo sapiens
  misc_RNA (1)...(19): siRNA sense strand
caacaacauuggcuccauu

SEQ ID NO: 1247833 - RNA, 19 nt, Homo sapiens
  misc_RNA (1)...(19): siRNA sense strand
gaccauguguggacgcaaa

SEQ ID NO: 1247834 - RNA, 19 nt, Homo sapiens
  misc_RNA (1)...(19): siRNA sense strand
gcaacaugaugaguaaaga

SEQ ID NO: 1247835 - RNA, 19 nt, Homo sapiens
  misc_RNA (1)...(19): siRNA sense strand
gggcucaggugucagcauu

SEQ ID NO: 1247836 - RNA, 19 nt, Homo sapiens
  misc_RNA (1)...(19): siRNA sense strand
uaauacugcuuaugggaaa

SEQ ID NO: 1247837 - RNA, 19 nt, Homo sapiens
  misc_RNA (1)...(19): siRNA sense strand
gaacgcugguuaaauuggu

SEQ ID NO: 1247838 - RNA, 19 nt, Homo sapiens
  misc_RNA (1)...(19): siRNA sense strand
agacagaguuguguuuguu

SEQ ID NO: 1247839 - RNA, 19 nt, Homo sapiens
  misc_RNA (1)...(19): siRNA sense strand
ugaagagcauccggaagua

SEQ ID NO: 1247840 - RNA, 19 nt, Homo sapiens
  misc_RNA (1)...(19): siRNA sense strand
gcaaagggaaccugcacuu

SEQ ID NO: 1247841 - RNA, 19 nt, Homo sapiens
  misc_RNA (1)...(19): siRNA sense strand
uacccuauguugcugguua

SEQ ID NO: 1247842 - RNA, 19 nt, Homo sapiens
  misc_RNA (1)...(19): siRNA sense strand
gaacuucucuagccuucac

SEQ ID NO: 1247843 - RNA, 19 nt, Homo sapiens
  misc_RNA (1)...(19): siRNA sense strand
caaaaugacugaugacaag

SEQ ID NO: 1247844 - RNA, 19 nt, Homo sapiens
  misc_RNA (1)...(19): siRNA sense strand
ugacuucuaauacugcuua

SEQ ID NO: 1247845 - RNA, 19 nt, Homo sapiens
  misc_RNA (1)...(19): siRNA sense strand
gagauuccaucagcaagga

SEQ ID NO: 1247846 - RNA, 19 nt, Homo sapiens
  misc_RNA (1)...(19): siRNA sense strand
ucccacaaauccugaauug

SEQ ID NO: 1247847 - RNA, 19 nt, Homo sapiens
  misc_RNA (1)...(19): siRNA sense strand
ggaugugcgcguugaauga

SEQ ID NO: 1247848 - RNA, 19 nt, Homo sapiens
  misc_RNA (1)...(19): siRNA sense strand
gccagaauguuacuauuuu

SEQ ID NO: 1247849 - RNA, 19 nt, Homo sapiens
  misc_RNA (1)...(19): siRNA sense strand
caacaugaugaguaaagaa

SEQ ID NO: 1247850 - RNA, 19 nt, Homo sapiens
  misc_RNA (1)...(19): siRNA sense strand
gaacaugaggguuauuuug

SEQ ID NO: 1247851 - RNA, 19 nt, Homo sapiens
  misc_RNA (1)...(19): siRNA sense strand
gagaacauagacagaguug

SEQ ID NO: 1247852 - RNA, 19 nt, Homo sapiens
  misc_RNA (1)...(19): siRNA sense strand
gcacagguucauucagaug

SEQ ID NO: 1247853 - RNA, 19 nt, Homo sapiens
  misc_RNA (1)...(19): siRNA sense strand
gcucggaugugcgcguuga

SEQ ID NO: 1247854 - RNA, 19 nt, Homo sapiens
  misc_RNA (1)...(19): siRNA sense strand
gaagagcauccggaaguau

SEQ ID NO: 1247855 - RNA, 19 nt, Homo sapiens
  misc_RNA (1)...(19): siRNA sense strand
uggaugaacuggacugucu

SEQ ID NO: 1247856 - RNA, 19 nt, Homo sapiens
  misc_RNA (1)...(19): siRNA sense strand
aauccugaauugugucaaa

SEQ ID NO: 1247857 - RNA, 19 nt, Homo sapiens
  misc_RNA (1)...(19): siRNA sense strand
gaaugagaacauagacaga

SEQ ID NO: 1247858 - RNA, 19 nt, Homo sapiens
  misc_RNA (1)...(19): siRNA sense strand
aagccguacugccuugaua

SEQ ID NO: 1247859 - RNA, 19 nt, Homo sapiens
  misc_RNA (1)...(19): siRNA sense strand
ugaacuggacugucugauu

SEQ ID NO: 1247860 - RNA, 19 nt, Homo sapiens
  misc_RNA (1)...(19): siRNA sense strand
gaguuguguuuguuggaaa

SEQ ID NO: 1247861 - RNA, 19 nt, Homo sapiens
  misc_RNA (1)...(19): siRNA sense strand
aaagggaaccugcacuuca

SEQ ID NO: 1247862 - RNA, 19 nt, Homo sapiens
  misc_RNA (1)...(19): siRNA sense strand
cauagacagaguuguguuu

SEQ ID NO: 1247863 - RNA, 19 nt, Homo sapiens
  misc_RNA (1)...(19): siRNA sense strand
caacggcaagccagaaugu

SEQ ID NO: 1247864 - RNA, 19 nt, Homo sapiens
  misc_RNA (1)...(19): siRNA sense strand
gcuaugcacagguucauuc

SEQ ID NO: 1247865 - RNA, 19 nt, Homo sapiens
  misc_RNA (1)...(19): siRNA sense strand
cgaagaggagcaagaggaa

SEQ ID NO: 1247866 - RNA, 19 nt, Homo sapiens
  misc_RNA (1)...(19): siRNA sense strand
caagccagaauguuacuau

SEQ ID NO: 1247867 - RNA, 19 nt, Homo sapiens
  misc_RNA (1)...(19): siRNA sense strand
augcacagguucauucaga

SEQ ID NO: 1247868 - RNA, 19 nt, Homo sapiens
  misc_RNA (1)...(19): siRNA sense strand
caccaucaccaacaacauu

SEQ ID NO: 1247869 - RNA, 19 nt, Homo sapiens
  misc_RNA (1)...(19): siRNA sense strand
uggagaaccugaagagcau

SEQ ID NO: 1247870 - RNA, 19 nt, Homo sapiens
  misc_RNA (1)...(19): siRNA sense strand
gaaguggagaaccugaaga

SEQ ID NO: 1247871 - RNA, 19 nt, Homo sapiens
  misc_RNA (1)...(19): siRNA sense strand
ugaagcugcuggcauaugc

SEQ ID NO: 1247872 - RNA, 19 nt, Homo sapiens
  misc_RNA (1)...(19): siRNA sense strand
gcagcugcauaaacuggau

SEQ ID NO: 1247873 - RNA, 19 nt, Homo sapiens
  misc_RNA (1)...(19): siRNA sense strand
gaggacuucagaaugauug

SEQ ID NO: 1247874 - RNA, 19 nt, Homo sapiens
  misc_RNA (1)...(19): siRNA sense strand
uuggcaacaugaugaguaa

SEQ ID NO: 1247875 - RNA, 19 nt, Homo sapiens
  misc_RNA (1)...(19): siRNA sense strand
acuccaaggacaacuauaa

SEQ ID NO: 1247876 - RNA, 19 nt, Homo sapiens
  misc_RNA (1)...(19): siRNA sense strand
acggcaagccagaauguua

SEQ ID NO: 1247877 - RNA, 19 nt, Homo sapiens
  misc_RNA (1)...(19): siRNA sense strand
gaugaacuggacugucuga

SEQ ID NO: 1247878 - RNA, 19 nt, Homo sapiens
  misc_RNA (1)...(19): siRNA sense strand
gcauaaacuggaugaacug

SEQ ID NO: 1247879 - RNA, 19 nt, Homo sapiens
  misc_RNA (1)...(19): siRNA sense strand
aaaugacugaugacaagua

SEQ ID NO: 1247880 - RNA, 19 nt, Homo sapiens
  misc_RNA (1)...(19): siRNA sense strand
uagacagaguuguguuugu

SEQ ID NO: 1247881 - RNA, 19 nt, Homo sapiens
  misc_RNA (1)...(19): siRNA sense strand
gaaaagcgagauuccauca

SEQ ID NO: 1247882 - RNA, 19 nt, Homo sapiens
  misc_RNA (1)...(19): siRNA sense strand
gcucaggugucagcauucu

SEQ ID NO: 1247883 - RNA, 19 nt, Homo sapiens
  misc_RNA (1)...(19): siRNA sense strand
aagccagaauguuacuauu

SEQ ID NO: 1247884 - RNA, 19 nt, Homo sapiens
  misc_RNA (1)...(19): siRNA sense strand
ggaaguggagaaccugaag

SEQ ID NO: 1247885 - RNA, 19 nt, Homo sapiens
  misc_RNA (1)...(19): siRNA sense strand
ugcauaaacuggaugaacu

SEQ ID NO: 1247886 - RNA, 19 nt, Homo sapiens
  misc_RNA (1)...(19): siRNA sense strand
gggcacuguuggaacuguu

SEQ ID NO: 1247887 - RNA, 19 nt, Homo sapiens
  misc_RNA (1)...(19): siRNA sense strand
caacugaaagcucuguuuu

SEQ ID NO: 1247888 - RNA, 19 nt, Homo sapiens
  misc_RNA (1)...(19): siRNA sense strand
guacuccaaggacaacuau

SEQ ID NO: 1247889 - RNA, 19 nt, Homo sapiens
  misc_RNA (1)...(19): siRNA sense strand
aagggaaccugcacuucau

SEQ ID NO: 1247890 - RNA, 19 nt, Homo sapiens
  misc_RNA (1)...(19): siRNA sense strand
caaagggaaccugcacuuc

SEQ ID NO: 1247891 - RNA, 19 nt, Homo sapiens
  misc_RNA (1)...(19): siRNA sense strand
agaguuguguuuguuggaa

SEQ ID NO: 1247892 - RNA, 19 nt, Homo sapiens
  misc_RNA (1)...(19): siRNA sense strand
aagagcauccggaaguauu

SEQ ID NO: 1247893 - RNA, 19 nt, Homo sapiens
  misc_RNA (1)...(19): siRNA sense strand
cgcguugaaugagaacaua

SEQ ID NO: 1247894 - RNA, 19 nt, Homo sapiens
  misc_RNA (1)...(19): siRNA sense strand
agccagaauguuacuauuu

SEQ ID NO: 1247895 - RNA, 19 nt, Homo sapiens
  misc_RNA (1)...(19): siRNA sense strand
gacagaguuguguuuguug

SEQ ID NO: 1247896 - RNA, 19 nt, Homo sapiens
  misc_RNA (1)...(19): siRNA sense strand
aacaugggcucagguguca

SEQ ID NO: 1247897 - RNA, 19 nt, Homo sapiens
  misc_RNA (1)...(19): siRNA sense strand
ucagcauucuagccgugua

SEQ ID NO: 1247898 - RNA, 19 nt, Homo sapiens
  misc_RNA (1)...(19): siRNA sense strand
acaacugaaagcucuguuu

SEQ ID NO: 1247899 - RNA, 19 nt, Homo sapiens
  misc_RNA (1)...(19): siRNA sense strand
ggacaacugaaagcucugu

SEQ ID NO: 1247900 - RNA, 19 nt, Homo sapiens
  misc_RNA (1)...(19): siRNA sense strand
gagcauccggaaguauuug

SEQ ID NO: 1247901 - RNA, 19 nt, Homo sapiens
  misc_RNA (1)...(19): siRNA sense strand
ggaacgcugguuaaauugg

SEQ ID NO: 1247902 - RNA, 19 nt, Homo sapiens
  misc_RNA (1)...(19): siRNA sense strand
cugaagagcauccggaagu

SEQ ID NO: 1247903 - RNA, 19 nt, Homo sapiens
  misc_RNA (1)...(19): siRNA sense strand
caacauuggcuccauugcu

SEQ ID NO: 1247904 - RNA, 19 nt, Homo sapiens
  misc_RNA (1)...(19): siRNA sense strand
gguggaacgcugguuaaau

SEQ ID NO: 1247905 - RNA, 19 nt, Homo sapiens
  misc_RNA (1)...(19): siRNA sense strand
cugguuaaauugguguauu

SEQ ID NO: 1247906 - RNA, 19 nt, Homo sapiens
  misc_RNA (1)...(19): siRNA sense strand
aaugacugaugacaaguag

SEQ ID NO: 1247907 - RNA, 19 nt, Homo sapiens
  misc_RNA (1)...(19): siRNA sense strand
caaggacaacuauaaaaga

SEQ ID NO: 1247908 - RNA, 19 nt, Homo sapiens
  misc_RNA (1)...(19): siRNA sense strand
gcaagccagaauguuacua

SEQ ID NO: 1247909 - RNA, 19 nt, Homo sapiens
  misc_RNA (1)...(19): siRNA sense strand
uggaacaugaggguuauuu

SEQ ID NO: 1247910 - RNA, 19 nt, Homo sapiens
  misc_RNA (1)...(19): siRNA sense strand
ggauauuacagccgaagag

SEQ ID NO: 1247911 - RNA, 19 nt, Homo sapiens
  misc_RNA (1)...(19): siRNA sense strand
ggcaacaugaugaguaaag

SEQ ID NO: 1247912 - RNA, 19 nt, Homo sapiens
  misc_RNA (1)...(19): siRNA sense strand
caaauccugaauuguguca

SEQ ID NO: 1247913 - RNA, 19 nt, Homo sapiens
  misc_RNA (1)...(19): siRNA sense strand
cuucuaauacugcuuaugg

SEQ ID NO: 1247914 - RNA, 19 nt, Homo sapiens
  misc_RNA (1)...(19): siRNA sense strand
ucaggugucagcauucuag

SEQ ID NO: 1247915 - RNA, 19 nt, Homo sapiens
  misc_RNA (1)...(19): siRNA sense strand
ccaaaggacaacugaaagc

SEQ ID NO: 1247916 - RNA, 19 nt, Homo sapiens
  misc_RNA (1)...(19): siRNA sense strand
gaacuggacugucugauuc

SEQ ID NO: 1247917 - RNA, 19 nt, Homo sapiens
  misc_RNA (1)...(19): siRNA sense strand
guggaacgcugguuaaauu

SEQ ID NO: 1247918 - RNA, 19 nt, Homo sapiens
  misc_RNA (1)...(19): siRNA sense strand
ccaugaagcugcuggcaua

SEQ ID NO: 1247919 - RNA, 19 nt, Homo sapiens
  misc_RNA (1)...(19): siRNA sense strand
gaacauagacagaguugug

SEQ ID NO: 1247920 - RNA, 19 nt, Homo sapiens
  misc_RNA (1)...(19): siRNA sense strand
caacaacauuggcuccauu

SEQ ID NO: 1247921 - RNA, 19 nt, Homo sapiens
  misc_RNA (1)...(19): siRNA sense strand
gaccauguguggacgcaaa

SEQ ID NO: 1247922 - RNA, 19 nt, Homo sapiens
  misc_RNA (1)...(19): siRNA sense strand
gcaacaugaugaguaaaga

SEQ ID NO: 1247923 - RNA, 19 nt, Homo sapiens
  misc_RNA (1)...(19): siRNA sense strand
gggcucaggugucagcauu

SEQ ID NO: 1247924 - RNA, 19 nt, Homo sapiens
  misc_RNA (1)...(19): siRNA sense strand
uaauacugcuuaugggaaa

SEQ ID NO: 1247925 - RNA, 19 nt, Homo sapiens
  misc_RNA (1)...(19): siRNA sense strand
gaacgcugguuaaauuggu

SEQ ID NO: 1247926 - RNA, 19 nt, Homo sapiens
  misc_RNA (1)...(19): siRNA sense strand
agacagaguuguguuuguu

SEQ ID NO: 1247927 - RNA, 19 nt, Homo sapiens
  misc_RNA (1)...(19): siRNA sense strand
ugaagagcauccggaagua

SEQ ID NO: 1247928 - RNA, 19 nt, Homo sapiens
  misc_RNA (1)...(19): siRNA sense strand
gcaaagggaaccugcacuu

SEQ ID NO: 1247929 - RNA, 19 nt, Homo sapiens
  misc_RNA (1)...(19): siRNA sense strand
uacccuauguugcugguua

SEQ ID NO: 1247930 - RNA, 19 nt, Homo sapiens
  misc_RNA (1)...(19): siRNA sense strand
gaacuucucuagccuucac

SEQ ID NO: 1247931 - RNA, 19 nt, Homo sapiens
  misc_RNA (1)...(19): siRNA sense strand
caaaaugacugaugacaag

SEQ ID NO: 1247932 - RNA, 19 nt, Homo sapiens
  misc_RNA (1)...(19): siRNA sense strand
ugacuucuaauacugcuua

SEQ ID NO: 1247933 - RNA, 19 nt, Homo sapiens
  misc_RNA (1)...(19): siRNA sense strand
gagauuccaucagcaagga

SEQ ID NO: 1247934 - RNA, 19 nt, Homo sapiens
  misc_RNA (1)...(19): siRNA sense strand
ucccacaaauccugaauug

SEQ ID NO: 1247935 - RNA, 19 nt, Homo sapiens
  misc_RNA (1)...(19): siRNA sense strand
ggaugugcgcguugaauga

SEQ ID NO: 1247936 - RNA, 19 nt, Homo sapiens
  misc_RNA (1)...(19): siRNA sense strand
gccagaauguuacuauuuu

SEQ ID NO: 1247937 - RNA, 19 nt, Homo sapiens
  misc_RNA (1)...(19): siRNA sense strand
caacaugaugaguaaagaa

SEQ ID NO: 1247938 - RNA, 19 nt, Homo sapiens
  misc_RNA (1)...(19): siRNA sense strand
gaacaugaggguuauuuug

SEQ ID NO: 1247939 - RNA, 19 nt, Homo sapiens
  misc_RNA (1)...(19): siRNA sense strand
gagaacauagacagaguug

SEQ ID NO: 1247940 - RNA, 19 nt, Homo sapiens
  misc_RNA (1)...(19): siRNA sense strand
gcacagguucauucagaug

SEQ ID NO: 1247941 - RNA, 19 nt, Homo sapiens
  misc_RNA (1)...(19): siRNA sense strand
gcucggaugugcgcguuga

SEQ ID NO: 1247942 - RNA, 19 nt, Homo sapiens
  misc_RNA (1)...(19): siRNA sense strand
gaagagcauccggaaguau

SEQ ID NO: 1247943 - RNA, 19 nt, Homo sapiens
  misc_RNA (1)...(19): siRNA sense strand
uggaugaacuggacugucu

SEQ ID NO: 1247944 - RNA, 19 nt, Homo sapiens
  misc_RNA (1)...(19): siRNA sense strand
aauccugaauugugucaaa

SEQ ID NO: 1247945 - RNA, 19 nt, Homo sapiens
  misc_RNA (1)...(19): siRNA sense strand
gaaugagaacauagacaga

SEQ ID NO: 1247946 - RNA, 19 nt, Homo sapiens
  misc_RNA (1)...(19): siRNA sense strand
aagccguacugccuugaua

SEQ ID NO: 1247947 - RNA, 19 nt, Homo sapiens
  misc_RNA (1)...(19): siRNA sense strand
ugaacuggacugucugauu

SEQ ID NO: 1247948 - RNA, 19 nt, Homo sapiens
  misc_RNA (1)...(19): siRNA sense strand
gaguuguguuuguuggaaa

SEQ ID NO: 1247949 - RNA, 19 nt, Homo sapiens
  misc_RNA (1)...(19): siRNA sense strand
aaagggaaccugcacuuca

SEQ ID NO: 1247950 - RNA, 19 nt, Homo sapiens
  misc_RNA (1)...(19): siRNA sense strand
cauagacagaguuguguuu

SEQ ID NO: 1247951 - RNA, 19 nt, Homo sapiens
  misc_RNA (1)...(19): siRNA sense strand
caacggcaagccagaaugu

SEQ ID NO: 1247952 - RNA, 19 nt, Homo sapiens
  misc_RNA (1)...(19): siRNA sense strand
gcuaugcacagguucauuc

SEQ ID NO: 1247953 - RNA, 19 nt, Homo sapiens
  misc_RNA (1)...(19): siRNA sense strand
cgaagaggagcaagaggaa

SEQ ID NO: 1247954 - RNA, 19 nt, Homo sapiens
  misc_RNA (1)...(19): siRNA sense strand
caagccagaauguuacuau

SEQ ID NO: 1247955 - RNA, 19 nt, Homo sapiens
  misc_RNA (1)...(19): siRNA sense strand
augcacagguucauucaga

SEQ ID NO: 1247956 - RNA, 19 nt, Homo sapiens
  misc_RNA (1)...(19): siRNA sense strand
caccaucaccaacaacauu

SEQ ID NO: 1247957 - RNA, 19 nt, Homo sapiens
  misc_RNA (1)...(19): siRNA sense strand
uggagaaccugaagagcau

SEQ ID NO: 1247958 - RNA, 19 nt, Homo sapiens
  misc_RNA (1)...(19): siRNA sense strand
gaaguggagaaccugaaga

SEQ ID NO: 1247959 - RNA, 19 nt, Homo sapiens
  misc_RNA (1)...(19): siRNA sense strand
ugaagcugcuggcauaugc

SEQ ID NO: 1247960 - RNA, 19 nt, Homo sapiens
  misc_RNA (1)...(19): siRNA sense strand
gcagcugcauaaacuggau

SEQ ID NO: 1247961 - RNA, 19 nt, Homo sapiens
  misc_RNA (1)...(19): siRNA sense strand
gaggacuucagaaugauug

SEQ ID NO: 1247962 - RNA, 19 nt, Homo sapiens
  misc_RNA (1)...(19): siRNA sense strand
uuggcaacaugaugaguaa

SEQ ID NO: 1247963 - RNA, 19 nt, Homo sapiens
  misc_RNA (1)...(19): siRNA sense strand
acuccaaggacaacuauaa

SEQ ID NO: 1247964 - RNA, 19 nt, Homo sapiens
  misc_RNA (1)...(19): siRNA sense strand
acggcaagccagaauguua

SEQ ID NO: 1247965 - RNA, 19 nt, Homo sapiens
  misc_RNA (1)...(19): siRNA sense strand
gaugaacuggacugucuga

SEQ ID NO: 1247966 - RNA, 19 nt, Homo sapiens
  misc_RNA (1)...(19): siRNA sense strand
gcauaaacuggaugaacug

SEQ ID NO: 1247967 - RNA, 19 nt, Homo sapiens
  misc_RNA (1)...(19): siRNA sense strand
aaaugacugaugacaagua

SEQ ID NO: 1247968 - RNA, 19 nt, Homo sapiens
  misc_RNA (1)...(19): siRNA sense strand
uagacagaguuguguuugu

SEQ ID NO: 1247969 - RNA, 19 nt, Homo sapiens
  misc_RNA (1)...(19): siRNA sense strand
gaaaagcgagauuccauca

SEQ ID NO: 1247970 - RNA, 19 nt, Homo sapiens
  misc_RNA (1)...(19): siRNA sense strand
gcucaggugucagcauucu

SEQ ID NO: 1247971 - RNA, 19 nt, Homo sapiens
  misc_RNA (1)...(19): siRNA sense strand
aagccagaauguuacuauu

SEQ ID NO: 1247972 - RNA, 19 nt, Homo sapiens
  misc_RNA (1)...(19): siRNA sense strand
ggaaguggagaaccugaag

SEQ ID NO: 1247973 - RNA, 19 nt, Homo sapiens
  misc_RNA (1)...(19): siRNA sense strand
ugcauaaacuggaugaacu

SEQ ID NO: 1247974 - RNA, 19 nt, Homo sapiens
  misc_RNA (1)...(19): siRNA sense strand
gggcacuguuggaacuguu

SEQ ID NO: 1247975 - RNA, 19 nt, Homo sapiens
  misc_RNA (1)...(19): siRNA sense strand
caacugaaagcucuguuuu

SEQ ID NO: 1247976 - RNA, 19 nt, Homo sapiens
  misc_RNA (1)...(19): siRNA sense strand
guacuccaaggacaacuau

SEQ ID NO: 1247977 - RNA, 19 nt, Homo sapiens
  misc_RNA (1)...(19): siRNA sense strand
aagggaaccugcacuucau

SEQ ID NO: 1247978 - RNA, 19 nt, Homo sapiens
  misc_RNA (1)...(19): siRNA sense strand
caaagggaaccugcacuuc

SEQ ID NO: 1247979 - RNA, 19 nt, Homo sapiens
  misc_RNA (1)...(19): siRNA sense strand
agaguuguguuuguuggaa

SEQ ID NO: 1247980 - RNA, 19 nt, Homo sapiens
  misc_RNA (1)...(19): siRNA sense strand
aagagcauccggaaguauu

SEQ ID NO: 1247981 - RNA, 19 nt, Homo sapiens
  misc_RNA (1)...(19): siRNA sense strand
cgcguugaaugagaacaua

SEQ ID NO: 1247982 - RNA, 19 nt, Homo sapiens
  misc_RNA (1)...(19): siRNA sense strand
agccagaauguuacuauuu

SEQ ID NO: 1247983 - RNA, 19 nt, Homo sapiens
  misc_RNA (1)...(19): siRNA sense strand
gacagaguuguguuuguug

SEQ ID NO: 1247984 - RNA, 19 nt, Homo sapiens
  misc_RNA (1)...(19): siRNA sense strand
aacaugggcucagguguca

SEQ ID NO: 1247985 - RNA, 19 nt, Homo sapiens
  misc_RNA (1)...(19): siRNA sense strand
ucagcauucuagccgugua

SEQ ID NO: 1247986 - RNA, 19 nt, Homo sapiens
  misc_RNA (1)...(19): siRNA sense strand
acaacugaaagcucuguuu

SEQ ID NO: 1247987 - RNA, 19 nt, Homo sapiens
  misc_RNA (1)...(19): siRNA sense strand
ggacaacugaaagcucugu

SEQ ID NO: 1247988 - RNA, 19 nt, Homo sapiens
  misc_RNA (1)...(19): siRNA sense strand
gagcauccggaaguauuug

SEQ ID NO: 1247989 - RNA, 19 nt, Homo sapiens
  misc_RNA (1)...(19): siRNA sense strand
ggaacgcugguuaaauugg

SEQ ID NO: 1247990 - RNA, 19 nt, Homo sapiens
  misc_RNA (1)...(19): siRNA sense strand
cugaagagcauccggaagu

SEQ ID NO: 1247991 - RNA, 19 nt, Homo sapiens
  misc_RNA (1)...(19): siRNA sense strand
caacauuggcuccauugcu

SEQ ID NO: 1247992 - RNA, 19 nt, Homo sapiens
  misc_RNA (1)...(19): siRNA sense strand
gguggaacgcugguuaaau

SEQ ID NO: 1247993 - RNA, 19 nt, Homo sapiens
  misc_RNA (1)...(19): siRNA sense strand
cugguuaaauugguguauu

SEQ ID NO: 1247994 - RNA, 19 nt, Homo sapiens
  misc_RNA (1)...(19): siRNA sense strand
aaugacugaugacaaguag

SEQ ID NO: 1247995 - RNA, 19 nt, Homo sapiens
  misc_RNA (1)...(19): siRNA sense strand
caaggacaacuauaaaaga

SEQ ID NO: 1247996 - RNA, 19 nt, Homo sapiens
  misc_RNA (1)...(19): siRNA sense strand
gcaagccagaauguuacua

SEQ ID NO: 1247997 - RNA, 19 nt, Homo sapiens
  misc_RNA (1)...(19): siRNA sense strand
uggaacaugaggguuauuu

SEQ ID NO: 1247998 - RNA, 19 nt, Homo sapiens
  misc_RNA (1)...(19): siRNA sense strand
ggauauuacagccgaagag

SEQ ID NO: 1247999 - RNA, 19 nt, Homo sapiens
  misc_RNA (1)...(19): siRNA sense strand
ggcaacaugaugaguaaag

SEQ ID NO: 1248000 - RNA, 19 nt, Homo sapiens
  misc_RNA (1)...(19): siRNA sense strand
caaauccugaauuguguca

SEQ ID NO: 1248001 - RNA, 19 nt, Homo sapiens
  misc_RNA (1)...(19): siRNA sense strand
cuucuaauacugcuuaugg

SEQ ID NO: 1248002 - RNA, 19 nt, Homo sapiens
  misc_RNA (1)...(19): siRNA sense strand
ucaggugucagcauucuag

SEQ ID NO: 1248003 - RNA, 19 nt, Homo sapiens
  misc_RNA (1)...(19): siRNA sense strand
ccaaaggacaacugaaagc

SEQ ID NO: 1248004 - RNA, 19 nt, Homo sapiens
  misc_RNA (1)...(19): siRNA sense strand
gaacuggacugucugauuc

SEQ ID NO: 1248005 - RNA, 19 nt, Homo sapiens
  misc_RNA (1)...(19): siRNA sense strand
guggaacgcugguuaaauu

SEQ ID NO: 1248006 - RNA, 19 nt, Homo sapiens
  misc_RNA (1)...(19): siRNA sense strand
ccaugaagcugcuggcaua

SEQ ID NO: 1248007 - RNA, 19 nt, Homo sapiens
  misc_RNA (1)...(19): siRNA sense strand
gaacauagacagaguugug

SEQ ID NO: 1248008 - RNA, 19 nt, Homo sapiens
  misc_RNA (1)...(19): siRNA sense strand
caacaacauuggcuccauu

SEQ ID NO: 1248009 - RNA, 19 nt, Homo sapiens
  misc_RNA (1)...(19): siRNA sense strand
gaccauguguggacgcaaa

SEQ ID NO: 1248010 - RNA, 19 nt, Homo sapiens
  misc_RNA (1)...(19): siRNA sense strand
gcaacaugaugaguaaaga

SEQ ID NO: 1248011 - RNA, 19 nt, Homo sapiens
  misc_RNA (1)...(19): siRNA sense strand
gggcucaggugucagcauu

SEQ ID NO: 1248012 - RNA, 19 nt, Homo sapiens
  misc_RNA (1)...(19): siRNA sense strand
uaauacugcuuaugggaaa

SEQ ID NO: 1248013 - RNA, 19 nt, Homo sapiens
  misc_RNA (1)...(19): siRNA sense strand
gaacgcugguuaaauuggu

SEQ ID NO: 1248014 - RNA, 19 nt, Homo sapiens
  misc_RNA (1)...(19): siRNA sense strand
agacagaguuguguuuguu

SEQ ID NO: 1248015 - RNA, 19 nt, Homo sapiens
  misc_RNA (1)...(19): siRNA sense strand
ugaagagcauccggaagua

SEQ ID NO: 1248016 - RNA, 19 nt, Homo sapiens
  misc_RNA (1)...(19): siRNA sense strand
gcaaagggaaccugcacuu

SEQ ID NO: 1248017 - RNA, 19 nt, Homo sapiens
  misc_RNA (1)...(19): siRNA sense strand
uacccuauguugcugguua

SEQ ID NO: 1248018 - RNA, 19 nt, Homo sapiens
  misc_RNA (1)...(19): siRNA sense strand
gaacuucucuagccuucac

SEQ ID NO: 1248019 - RNA, 19 nt, Homo sapiens
  misc_RNA (1)...(19): siRNA sense strand
caaaaugacugaugacaag

SEQ ID NO: 1248020 - RNA, 19 nt, Homo sapiens
  misc_RNA (1)...(19): siRNA sense strand
ugacuucuaauacugcuua

SEQ ID NO: 1248021 - RNA, 19 nt, Homo sapiens
  misc_RNA (1)...(19): siRNA sense strand
gagauuccaucagcaagga

SEQ ID NO: 1248022 - RNA, 19 nt, Homo sapiens
  misc_RNA (1)...(19): siRNA sense strand
ucccacaaauccugaauug

SEQ ID NO: 1248023 - RNA, 19 nt, Homo sapiens
  misc_RNA (1)...(19): siRNA sense strand
ggaugugcgcguugaauga

SEQ ID NO: 1248024 - RNA, 19 nt, Homo sapiens
  misc_RNA (1)...(19): siRNA sense strand
gccagaauguuacuauuuu

SEQ ID NO: 1248025 - RNA, 19 nt, Homo sapiens
  misc_RNA (1)...(19): siRNA sense strand
caacaugaugaguaaagaa

SEQ ID NO: 1248026 - RNA, 19 nt, Homo sapiens
  misc_RNA (1)...(19): siRNA sense strand
gaacaugaggguuauuuug

SEQ ID NO: 1248027 - RNA, 19 nt, Homo sapiens
  misc_RNA (1)...(19): siRNA sense strand
gagaacauagacagaguug

SEQ ID NO: 1248028 - RNA, 19 nt, Homo sapiens
  misc_RNA (1)...(19): siRNA sense strand
gcacagguucauucagaug

SEQ ID NO: 1248029 - RNA, 19 nt, Homo sapiens
  misc_RNA (1)...(19): siRNA sense strand
gcucggaugugcgcguuga

SEQ ID NO: 1248030 - RNA, 19 nt, Homo sapiens
  misc_RNA (1)...(19): siRNA sense strand
gaagagcauccggaaguau

SEQ ID NO: 1248031 - RNA, 19 nt, Homo sapiens
  misc_RNA (1)...(19): siRNA sense strand
uggaugaacuggacugucu

SEQ ID NO: 1248032 - RNA, 19 nt, Homo sapiens
  misc_RNA (1)...(19): siRNA sense strand
aauccugaauugugucaaa

SEQ ID NO: 1248033 - RNA, 19 nt, Homo sapiens
  misc_RNA (1)...(19): siRNA sense strand
gaaugagaacauagacaga

SEQ ID NO: 1248034 - RNA, 19 nt, Homo sapiens
  misc_RNA (1)...(19): siRNA sense strand
aagccguacugccuugaua

SEQ ID NO: 1248035 - RNA, 19 nt, Homo sapiens
  misc_RNA (1)...(19): siRNA sense strand
ugaacuggacugucugauu

SEQ ID NO: 1248036 - RNA, 19 nt, Homo sapiens
  misc_RNA (1)...(19): siRNA sense strand
gaguuguguuuguuggaaa

SEQ ID NO: 1248037 - RNA, 19 nt, Homo sapiens
  misc_RNA (1)...(19): siRNA sense strand
aaagggaaccugcacuuca

SEQ ID NO: 1248038 - RNA, 19 nt, Homo sapiens
  misc_RNA (1)...(19): siRNA sense strand
cauagacagaguuguguuu

SEQ ID NO: 1248039 - RNA, 19 nt, Homo sapiens
  misc_RNA (1)...(19): siRNA sense strand
caacggcaagccagaaugu

SEQ ID NO: 1248040 - RNA, 19 nt, Homo sapiens
  misc_RNA (1)...(19): siRNA sense strand
gcuaugcacagguucauuc

SEQ ID NO: 1248041 - RNA, 19 nt, Homo sapiens
  misc_RNA (1)...(19): siRNA sense strand
cgaagaggagcaagaggaa

SEQ ID NO: 1248042 - RNA, 19 nt, Homo sapiens
  misc_RNA (1)...(19): siRNA sense strand
caagccagaauguuacuau

SEQ ID NO: 1248043 - RNA, 19 nt, Homo sapiens
  misc_RNA (1)...(19): siRNA sense strand
augcacagguucauucaga

SEQ ID NO: 1248044 - RNA, 19 nt, Homo sapiens
  misc_RNA (1)...(19): siRNA sense strand
caccaucaccaacaacauu

SEQ ID NO: 1248045 - RNA, 19 nt, Homo sapiens
  misc_RNA (1)...(19): siRNA sense strand
uggagaaccugaagagcau

SEQ ID NO: 1248046 - RNA, 19 nt, Homo sapiens
  misc_RNA (1)...(19): siRNA sense strand
gaaguggagaaccugaaga

SEQ ID NO: 1248047 - RNA, 19 nt, Homo sapiens
  misc_RNA (1)...(19): siRNA sense strand
ugaagcugcuggcauaugc

SEQ ID NO: 1248048 - RNA, 19 nt, Homo sapiens
  misc_RNA (1)...(19): siRNA sense strand
gcagcugcauaaacuggau

SEQ ID NO: 1248049 - RNA, 19 nt, Homo sapiens
  misc_RNA (1)...(19): siRNA sense strand
gaggacuucagaaugauug

SEQ ID NO: 1248050 - RNA, 19 nt, Homo sapiens
  misc_RNA (1)...(19): siRNA sense strand
uuggcaacaugaugaguaa

SEQ ID NO: 1248051 - RNA, 19 nt, Homo sapiens
  misc_RNA (1)...(19): siRNA sense strand
acuccaaggacaacuauaa

SEQ ID NO: 1248052 - RNA, 19 nt, Homo sapiens
  misc_RNA (1)...(19): siRNA sense strand
acggcaagccagaauguua

SEQ ID NO: 1248053 - RNA, 19 nt, Homo sapiens
  misc_RNA (1)...(19): siRNA sense strand
gaugaacuggacugucuga

SEQ ID NO: 1248054 - RNA, 19 nt, Homo sapiens
  misc_RNA (1)...(19): siRNA sense strand
gcauaaacuggaugaacug

SEQ ID NO: 1248055 - RNA, 19 nt, Homo sapiens
  misc_RNA (1)...(19): siRNA sense strand
aaaugacugaugacaagua

SEQ ID NO: 1248056 - RNA, 19 nt, Homo sapiens
  misc_RNA (1)...(19): siRNA sense strand
uagacagaguuguguuugu

SEQ ID NO: 1248057 - RNA, 19 nt, Homo sapiens
  misc_RNA (1)...(19): siRNA sense strand
gaaaagcgagauuccauca

SEQ ID NO: 1248058 - RNA, 19 nt, Homo sapiens
  misc_RNA (1)...(19): siRNA sense strand
gcucaggugucagcauucu

SEQ ID NO: 1248059 - RNA, 19 nt, Homo sapiens
  misc_RNA (1)...(19): siRNA sense strand
aagccagaauguuacuauu

SEQ ID NO: 1248060 - RNA, 19 nt, Homo sapiens
  misc_RNA (1)...(19): siRNA sense strand
ggaaguggagaaccugaag

SEQ ID NO: 1248061 - RNA, 19 nt, Homo sapiens
  misc_RNA (1)...(19): siRNA sense strand
ugcauaaacuggaugaacu

SEQ ID NO: 1248062 - RNA, 19 nt, Homo sapiens
  misc_RNA (1)...(19): siRNA sense strand
gggcacuguuggaacuguu

SEQ ID NO: 1248063 - RNA, 19 nt, Homo sapiens
  misc_RNA (1)...(19): siRNA sense strand
caacugaaagcucuguuuu

SEQ ID NO: 1248064 - RNA, 19 nt, Homo sapiens
  misc_RNA (1)...(19): siRNA sense strand
guacuccaaggacaacuau

SEQ ID NO: 1248065 - RNA, 19 nt, Homo sapiens
  misc_RNA (1)...(19): siRNA sense strand
aagggaaccugcacuucau

SEQ ID NO: 1248066 - RNA, 19 nt, Homo sapiens
  misc_RNA (1)...(19): siRNA sense strand
caaagggaaccugcacuuc

SEQ ID NO: 1248067 - RNA, 19 nt, Homo sapiens
  misc_RNA (1)...(19): siRNA sense strand
agaguuguguuuguuggaa

SEQ ID NO: 1248068 - RNA, 19 nt, Homo sapiens
  misc_RNA (1)...(19): siRNA sense strand
aagagcauccggaaguauu

SEQ ID NO: 1248069 - RNA, 19 nt, Homo sapiens
  misc_RNA (1)...(19): siRNA sense strand
cgcguugaaugagaacaua

SEQ ID NO: 1248070 - RNA, 19 nt, Homo sapiens
  misc_RNA (1)...(19): siRNA sense strand
agccagaauguuacuauuu

SEQ ID NO: 1248071 - RNA, 19 nt, Homo sapiens
  misc_RNA (1)...(19): siRNA sense strand
gacagaguuguguuuguug

SEQ ID NO: 1248072 - RNA, 19 nt, Homo sapiens
  misc_RNA (1)...(19): siRNA sense strand
aacaugggcucagguguca

SEQ ID NO: 1248073 - RNA, 19 nt, Homo sapiens
  misc_RNA (1)...(19): siRNA sense strand
ucagcauucuagccgugua

SEQ ID NO: 1248074 - RNA, 19 nt, Homo sapiens
  misc_RNA (1)...(19): siRNA sense strand
acaacugaaagcucuguuu

SEQ ID NO: 1248075 - RNA, 19 nt, Homo sapiens
  misc_RNA (1)...(19): siRNA sense strand
ggacaacugaaagcucugu

SEQ ID NO: 1248076 - RNA, 19 nt, Homo sapiens
  misc_RNA (1)...(19): siRNA sense strand
gagcauccggaaguauuug

SEQ ID NO: 1248077 - RNA, 19 nt, Homo sapiens
  misc_RNA (1)...(19): siRNA sense strand
ggaacgcugguuaaauugg

SEQ ID NO: 1248078 - RNA, 19 nt, Homo sapiens
  misc_RNA (1)...(19): siRNA sense strand
cugaagagcauccggaagu

SEQ ID NO: 1248079 - RNA, 19 nt, Homo sapiens
  misc_RNA (1)...(19): siRNA sense strand
caacauuggcuccauugcu

SEQ ID NO: 1248080 - RNA, 19 nt, Homo sapiens
  misc_RNA (1)...(19): siRNA sense strand
gguggaacgcugguuaaau

SEQ ID NO: 1248081 - RNA, 19 nt, Homo sapiens
  misc_RNA (1)...(19): siRNA sense strand
cugguuaaauugguguauu

SEQ ID NO: 1248082 - RNA, 19 nt, Homo sapiens
  misc_RNA (1)...(19): siRNA sense strand
aaugacugaugacaaguag

SEQ ID NO: 1248083 - RNA, 19 nt, Homo sapiens
  misc_RNA (1)...(19): siRNA sense strand
caaggacaacuauaaaaga

SEQ ID NO: 1248084 - RNA, 19 nt, Homo sapiens
  misc_RNA (1)...(19): siRNA sense strand
gcaagccagaauguuacua

SEQ ID NO: 1248085 - RNA, 19 nt, Homo sapiens
  misc_RNA (1)...(19): siRNA sense strand
uggaacaugaggguuauuu

SEQ ID NO: 1248086 - RNA, 19 nt, Homo sapiens
  misc_RNA (1)...(19): siRNA sense strand
ggauauuacagccgaagag

SEQ ID NO: 1248087 - RNA, 19 nt, Homo sapiens
  misc_RNA (1)...(19): siRNA sense strand
ggcaacaugaugaguaaag

SEQ ID NO: 1248088 - RNA, 19 nt, Homo sapiens
  misc_RNA (1)...(19): siRNA sense strand
caaauccugaauuguguca

SEQ ID NO: 1248089 - RNA, 19 nt, Homo sapiens
  misc_RNA (1)...(19): siRNA sense strand
cuucuaauacugcuuaugg

SEQ ID NO: 1248090 - RNA, 19 nt, Homo sapiens
  misc_RNA (1)...(19): siRNA sense strand
ucaggugucagcauucuag

SEQ ID NO: 1248091 - RNA, 19 nt, Homo sapiens
  misc_RNA (1)...(19): siRNA sense strand
ccaaaggacaacugaaagc

SEQ ID NO: 1248092 - RNA, 19 nt, Homo sapiens
  misc_RNA (1)...(19): siRNA sense strand
gaaaguaaaucggaugaaa

SEQ ID NO: 1248093 - RNA, 19 nt, Homo sapiens
  misc_RNA (1)...(19): siRNA sense strand
gaagguagcaaagaauuua

SEQ ID NO: 1248094 - RNA, 19 nt, Homo sapiens
  misc_RNA (1)...(19): siRNA sense strand
gaaagugacauaacaaaug

SEQ ID NO: 1248095 - RNA, 19 nt, Homo sapiens
  misc_RNA (1)...(19): siRNA sense strand
gaagaggcauuaaugagau

SEQ ID NO: 1248096 - RNA, 19 nt, Homo sapiens
  misc_RNA (1)...(19): siRNA sense strand
aaagagaacuccacauugu

SEQ ID NO: 1248097 - RNA, 19 nt, Homo sapiens
  misc_RNA (1)...(19): siRNA sense strand
ggcaauaacugcuuuagau

SEQ ID NO: 1248098 - RNA, 19 nt, Homo sapiens
  misc_RNA (1)...(19): siRNA sense strand
guugauacauugcaucuuu

SEQ ID NO: 1248099 - RNA, 19 nt, Homo sapiens
  misc_RNA (1)...(19): siRNA sense strand
caucauaaaugcaguggaa

SEQ ID NO: 1248100 - RNA, 19 nt, Homo sapiens
  misc_RNA (1)...(19): siRNA sense strand
gcaauaacugcuuuagaua

SEQ ID NO: 1248101 - RNA, 19 nt, Homo sapiens
  misc_RNA (1)...(19): siRNA sense strand
agaauuuccugaagguuua

SEQ ID NO: 1248102 - RNA, 19 nt, Homo sapiens
  misc_RNA (1)...(19): siRNA sense strand
ggaagaggcauuaaugaga

SEQ ID NO: 1248103 - RNA, 19 nt, Homo sapiens
  misc_RNA (1)...(19): siRNA sense strand
gaacugaacucccuuuacc

SEQ ID NO: 1248104 - RNA, 19 nt, Homo sapiens
  misc_RNA (1)...(19): siRNA sense strand
gguccgauguuacgucuaa

SEQ ID NO: 1248105 - RNA, 19 nt, Homo sapiens
  misc_RNA (1)...(19): siRNA sense strand
uuaaugagaugguaucgaa

SEQ ID NO: 1248106 - RNA, 19 nt, Homo sapiens
  misc_RNA (1)...(19): siRNA sense strand
agagauugcugcugaauau

SEQ ID NO: 1248107 - RNA, 19 nt, Homo sapiens
  misc_RNA (1)...(19): siRNA sense strand
uagcagaccuugaaaauuu

SEQ ID NO: 1248108 - RNA, 19 nt, Homo sapiens
  misc_RNA (1)...(19): siRNA sense strand
gaagucaagauaugaauga

SEQ ID NO: 1248109 - RNA, 19 nt, Homo sapiens
  misc_RNA (1)...(19): siRNA sense strand
ggaaaguuaugcaaagaca

SEQ ID NO: 1248110 - RNA, 19 nt, Homo sapiens
  misc_RNA (1)...(19): siRNA sense strand
gaugaccuccgauguauuu

SEQ ID NO: 1248111 - RNA, 19 nt, Homo sapiens
  misc_RNA (1)...(19): siRNA sense strand
gaaaagaucgacaucauaa

SEQ ID NO: 1248112 - RNA, 19 nt, Homo sapiens
  misc_RNA (1)...(19): siRNA sense strand
gggagaaagugacauaaca

SEQ ID NO: 1248113 - RNA, 19 nt, Homo sapiens
  misc_RNA (1)...(19): siRNA sense strand
ccaaauguauagcuaugaa

SEQ ID NO: 1248114 - RNA, 19 nt, Homo sapiens
  misc_RNA (1)...(19): siRNA sense strand
cgaaacauguucaguugga

SEQ ID NO: 1248115 - RNA, 19 nt, Homo sapiens
  misc_RNA (1)...(19): siRNA sense strand
ggcgaaacauguucaguug

SEQ ID NO: 1248116 - RNA, 19 nt, Homo sapiens
  misc_RNA (1)...(19): siRNA sense strand
gaaggauacuggucuggau

SEQ ID NO: 1248117 - RNA, 19 nt, Homo sapiens
  misc_RNA (1)...(19): siRNA sense strand
aaucauugccuguguguua

SEQ ID NO: 1248118 - RNA, 19 nt, Homo sapiens
  misc_RNA (1)...(19): siRNA sense strand
auucagagcucaaccugua

SEQ ID NO: 1248119 - RNA, 19 nt, Homo sapiens
  misc_RNA (1)...(19): siRNA sense strand
ccacauuguuucaaagguu

SEQ ID NO: 1248120 - RNA, 19 nt, Homo sapiens
  misc_RNA (1)...(19): siRNA sense strand
gaagguuuaucuauagaag

SEQ ID NO: 1248121 - RNA, 19 nt, Homo sapiens
  misc_RNA (1)...(19): siRNA sense strand
caacgaagaguggugauuu

SEQ ID NO: 1248122 - RNA, 19 nt, Homo sapiens
  misc_RNA (1)...(19): siRNA sense strand
aaucaaauaucgacacugu

SEQ ID NO: 1248123 - RNA, 19 nt, Homo sapiens
  misc_RNA (1)...(19): siRNA sense strand
gagaaagugacauaacaaa

SEQ ID NO: 1248124 - RNA, 19 nt, Homo sapiens
  misc_RNA (1)...(19): siRNA sense strand
ggaguagaauuuccugaag

SEQ ID NO: 1248125 - RNA, 19 nt, Homo sapiens
  misc_RNA (1)...(19): siRNA sense strand
gaacucccuuuaccaucaa

SEQ ID NO: 1248126 - RNA, 19 nt, Homo sapiens
  misc_RNA (1)...(19): siRNA sense strand
ugaagaggaugaugaugga

SEQ ID NO: 1248127 - RNA, 19 nt, Homo sapiens
  misc_RNA (1)...(19): siRNA sense strand
aaacugggccauaaugauu

SEQ ID NO: 1248128 - RNA, 19 nt, Homo sapiens
  misc_RNA (1)...(19): siRNA sense strand
ucucagaagucaagauaug

SEQ ID NO: 1248129 - RNA, 19 nt, Homo sapiens
  misc_RNA (1)...(19): siRNA sense strand
uagaugcaguugauacauu

SEQ ID NO: 1248130 - RNA, 19 nt, Homo sapiens
  misc_RNA (1)...(19): siRNA sense strand
gcugcuuuaucgaauguua

SEQ ID NO: 1248131 - RNA, 19 nt, Homo sapiens
  misc_RNA (1)...(19): siRNA sense strand
uaacaaaugcagagaagga

SEQ ID NO: 1248132 - RNA, 19 nt, Homo sapiens
  misc_RNA (1)...(19): siRNA sense strand
gcgaaagcuugaugaggaa

SEQ ID NO: 1248133 - RNA, 19 nt, Homo sapiens
  misc_RNA (1)...(19): siRNA sense strand
gaccuccgauguauuugaa

SEQ ID NO: 1248134 - RNA, 19 nt, Homo sapiens
  misc_RNA (1)...(19): siRNA sense strand
gcucagagaaacuuccuuu

SEQ ID NO: 1248135 - RNA, 19 nt, Homo sapiens
  misc_RNA (1)...(19): siRNA sense strand
ugaacucccuuuaccauca

SEQ ID NO: 1248136 - RNA, 19 nt, Homo sapiens
  misc_RNA (1)...(19): siRNA sense strand
gaaacugggccauaaugau

SEQ ID NO: 1248137 - RNA, 19 nt, Homo sapiens
  misc_RNA (1)...(19): siRNA sense strand
gaagaggcaggauucaaau

SEQ ID NO: 1248138 - RNA, 19 nt, Homo sapiens
  misc_RNA (1)...(19): siRNA sense strand
gaaacauguucaguuggaa

SEQ ID NO: 1248139 - RNA, 19 nt, Homo sapiens
  misc_RNA (1)...(19): siRNA sense strand
gaaacuggauuuuacacuu

SEQ ID NO: 1248140 - RNA, 19 nt, Homo sapiens
  misc_RNA (1)...(19): siRNA sense strand
cauaacaaaugcagagaag

SEQ ID NO: 1248141 - RNA, 19 nt, Homo sapiens
  misc_RNA (1)...(19): siRNA sense strand
ggagaaagugacauaacaa

SEQ ID NO: 1248142 - RNA, 19 nt, Homo sapiens
  misc_RNA (1)...(19): siRNA sense strand
uuaugaagcuaacagaaug

SEQ ID NO: 1248143 - RNA, 19 nt, Homo sapiens
  misc_RNA (1)...(19): siRNA sense strand
agacugggcugcuuuaucg

SEQ ID NO: 1248144 - RNA, 19 nt, Homo sapiens
  misc_RNA (1)...(19): siRNA sense strand
cgaauguuaccuaccaaua

SEQ ID NO: 1248145 - RNA, 19 nt, Homo sapiens
  misc_RNA (1)...(19): siRNA sense strand
cagguaugguuuaguauuc

SEQ ID NO: 1248146 - RNA, 19 nt, Homo sapiens
  misc_RNA (1)...(19): siRNA sense strand
ccugaagguuuaucuauag

SEQ ID NO: 1248147 - RNA, 19 nt, Homo sapiens
  misc_RNA (1)...(19): siRNA sense strand
aaagggagaaagugacaua

SEQ ID NO: 1248148 - RNA, 19 nt, Homo sapiens
  misc_RNA (1)...(19): siRNA sense strand
aaacuuccuuugcuuguca

SEQ ID NO: 1248149 - RNA, 19 nt, Homo sapiens
  misc_RNA (1)...(19): siRNA sense strand
gcaaagacagaauaacucu

SEQ ID NO: 1248150 - RNA, 19 nt, Homo sapiens
  misc_RNA (1)...(19): siRNA sense strand
ggaaaagaucgacaucaua

SEQ ID NO: 1248151 - RNA, 19 nt, Homo sapiens
  misc_RNA (1)...(19): siRNA sense strand
aaagcuugaugaggaauuu

SEQ ID NO: 1248152 - RNA, 19 nt, Homo sapiens
  misc_RNA (1)...(19): siRNA sense strand
agagaacuccacauuguuu

SEQ ID NO: 1248153 - RNA, 19 nt, Homo sapiens
  misc_RNA (1)...(19): siRNA sense strand
cagagaaacuuccuuugcu

SEQ ID NO: 1248154 - RNA, 19 nt, Homo sapiens
  misc_RNA (1)...(19): siRNA sense strand
gaauguuaccuaccaauac

SEQ ID NO: 1248155 - RNA, 19 nt, Homo sapiens
  misc_RNA (1)...(19): siRNA sense strand
uagaauuuccugaagguuu

SEQ ID NO: 1248156 - RNA, 19 nt, Homo sapiens
  misc_RNA (1)...(19): siRNA sense strand
cacauuguuucaaagguuu

SEQ ID NO: 1248157 - RNA, 19 nt, Homo sapiens
  misc_RNA (1)...(19): siRNA sense strand
gaaacuuccuuugcuuguc

SEQ ID NO: 1248158 - RNA, 19 nt, Homo sapiens
  misc_RNA (1)...(19): siRNA sense strand
agagaaacuuccuuugcuu

SEQ ID NO: 1248159 - RNA, 19 nt, Homo sapiens
  misc_RNA (1)...(19): siRNA sense strand
ucuagaagccuuugaaucu

SEQ ID NO: 1248160 - RNA, 19 nt, Homo sapiens
  misc_RNA (1)...(19): siRNA sense strand
aaagugacauaacaaaugc

SEQ ID NO: 1248161 - RNA, 19 nt, Homo sapiens
  misc_RNA (1)...(19): siRNA sense strand
cgauguauuugaacaaugg

SEQ ID NO: 1248162 - RNA, 19 nt, Homo sapiens
  misc_RNA (1)...(19): siRNA sense strand
uggaugaccuccgauguau

SEQ ID NO: 1248163 - RNA, 19 nt, Homo sapiens
  misc_RNA (1)...(19): siRNA sense strand
agaauaugcugcccuggau

SEQ ID NO: 1248164 - RNA, 19 nt, Homo sapiens
  misc_RNA (1)...(19): siRNA sense strand
uccugaagguuuaucuaua

SEQ ID NO: 1248165 - RNA, 19 nt, Homo sapiens
  misc_RNA (1)...(19): siRNA sense strand
cccagagacuauuguuaaa

SEQ ID NO: 1248166 - RNA, 19 nt, Homo sapiens
  misc_RNA (1)...(19): siRNA sense strand
ccuaaaauccauugaguua

SEQ ID NO: 1248167 - RNA, 19 nt, Homo sapiens
  misc_RNA (1)...(19): siRNA sense strand
gaaagcuugaugaggaauu

SEQ ID NO: 1248168 - RNA, 19 nt, Homo sapiens
  misc_RNA (1)...(19): siRNA sense strand
uaucgaauguuaccuacca

SEQ ID NO: 1248169 - RNA, 19 nt, Homo sapiens
  misc_RNA (1)...(19): siRNA sense strand
ggauacuggucuggauuug

SEQ ID NO: 1248170 - RNA, 19 nt, Homo sapiens
  misc_RNA (1)...(19): siRNA sense strand
guuaugcaaagacagaaua

SEQ ID NO: 1248171 - RNA, 19 nt, Homo sapiens
  misc_RNA (1)...(19): siRNA sense strand
guuggaaaguuaugcaaag

SEQ ID NO: 1248172 - RNA, 19 nt, Homo sapiens
  misc_RNA (1)...(19): siRNA sense strand
ucucuaagauuugauccaa

SEQ ID NO: 1248173 - RNA, 19 nt, Homo sapiens
  misc_RNA (1)...(19): siRNA sense strand
ggaugaaacuggauuuuac

SEQ ID NO: 1248174 - RNA, 19 nt, Homo sapiens
  misc_RNA (1)...(19): siRNA sense strand
gaacaauggaugcgaaagc

SEQ ID NO: 1248175 - RNA, 19 nt, Homo sapiens
  misc_RNA (1)...(19): siRNA sense strand
gagaugguaucgaauugcu

SEQ ID NO: 1248176 - RNA, 19 nt, Homo sapiens
  misc_RNA (1)...(19): siRNA sense strand
gauugcugcugaauaugga

SEQ ID NO: 1248177 - RNA, 19 nt, Homo sapiens
  misc_RNA (1)...(19): siRNA sense strand
agaugcaguugauacauug

SEQ ID NO: 1248178 - RNA, 19 nt, Homo sapiens
  misc_RNA (1)...(19): siRNA sense strand
caucauguuuaucuuccaa

SEQ ID NO: 1248179 - RNA, 19 nt, Homo sapiens
  misc_RNA (1)...(19): siRNA sense strand
gauuuuaagugcaguaaug

SEQ ID NO: 1248180 - RNA, 19 nt, Homo sapiens
  misc_RNA (1)...(19): siRNA sense strand
gucuaaauguaccaguuaa

SEQ ID NO: 1248181 - RNA, 19 nt, Homo sapiens
  misc_RNA (1)...(19): siRNA sense strand
ugucuaaauguaccaguua

SEQ ID NO: 1248182 - RNA, 19 nt, Homo sapiens
  misc_RNA (1)...(19): siRNA sense strand
gggcugcuuuaucgaaugu

SEQ ID NO: 1248183 - RNA, 19 nt, Homo sapiens
  misc_RNA (1)...(19): siRNA sense strand
aguggaaaguggcaagaaa

SEQ ID NO: 1248184 - RNA, 19 nt, Homo sapiens
  misc_RNA (1)...(19): siRNA sense strand
gcugcugaauauggaauaa

SEQ ID NO: 1248185 - RNA, 19 nt, Homo sapiens
  misc_RNA (1)...(19): siRNA sense strand
gaacuccacauuguuucaa

SEQ ID NO: 1248186 - RNA, 19 nt, Homo sapiens
  misc_RNA (1)...(19): siRNA sense strand
aauguuaccuaccaauaca

SEQ ID NO: 1248187 - RNA, 19 nt, Homo sapiens
  misc_RNA (1)...(19): siRNA sense strand
ugaagguagcaaagaauuu

SEQ ID NO: 1248188 - RNA, 19 nt, Homo sapiens
  misc_RNA (1)...(19): siRNA sense strand
ccauugaguuagcauucuu

SEQ ID NO: 1248189 - RNA, 19 nt, Homo sapiens
  misc_RNA (1)...(19): siRNA sense strand
cagcacauccagagguaaa

SEQ ID NO: 1248190 - RNA, 19 nt, Homo sapiens
  misc_RNA (1)...(19): siRNA sense strand
gaauugcucagugucuaaa

SEQ ID NO: 1248191 - RNA, 19 nt, Homo sapiens
  misc_RNA (1)...(19): siRNA sense strand
cauguucaguuggaaaguu

SEQ ID NO: 1248192 - RNA, 19 nt, Homo sapiens
  misc_RNA (1)...(19): siRNA sense strand
gauaagguguuuaaggaua

SEQ ID NO: 1248193 - RNA, 19 nt, Homo sapiens
  misc_RNA (1)...(19): siRNA sense strand
ggaaaugcuucgaaauaau

SEQ ID NO: 1248194 - RNA, 19 nt, Homo sapiens
  misc_RNA (1)...(19): siRNA sense strand
gagagcaucguuaaagaua

SEQ ID NO: 1248195 - RNA, 19 nt, Homo sapiens
  misc_RNA (1)...(19): siRNA sense strand
acaaggagguuacaaggaa

SEQ ID NO: 1248196 - RNA, 19 nt, Homo sapiens
  misc_RNA (1)...(19): siRNA sense strand
caucaugcguggagaauau

SEQ ID NO: 1248197 - RNA, 19 nt, Homo sapiens
  misc_RNA (1)...(19): siRNA sense strand
gaaaugcuucgaaauaaug

SEQ ID NO: 1248198 - RNA, 19 nt, Homo sapiens
  misc_RNA (1)...(19): siRNA sense strand
ggacaaaccagcagaucaa

SEQ ID NO: 1248199 - RNA, 19 nt, Homo sapiens
  misc_RNA (1)...(19): siRNA sense strand
gcaaguggcucggaacaca

SEQ ID NO: 1248200 - RNA, 19 nt, Homo sapiens
  misc_RNA (1)...(19): siRNA sense strand
aagauaagguguuuaagga

SEQ ID NO: 1248201 - RNA, 19 nt, Homo sapiens
  misc_RNA (1)...(19): siRNA sense strand
gacaucugcuggugcauuu

SEQ ID NO: 1248202 - RNA, 19 nt, Homo sapiens
  misc_RNA (1)...(19): siRNA sense strand
gaaaaggucuugaggaaag

SEQ ID NO: 1248203 - RNA, 19 nt, Homo sapiens
  misc_RNA (1)...(19): siRNA sense strand
ggcccaaacuguucuagaa

SEQ ID NO: 1248204 - RNA, 19 nt, Homo sapiens
  misc_RNA (1)...(19): siRNA sense strand
ggagaaggcguguaaauac

SEQ ID NO: 1248205 - RNA, 19 nt, Homo sapiens
  misc_RNA (1)...(19): siRNA sense strand
aaucagauauguagcuuug

SEQ ID NO: 1248206 - RNA, 19 nt, Homo sapiens
  misc_RNA (1)...(19): siRNA sense strand
gcaacucgcucgaaaagaa

SEQ ID NO: 1248207 - RNA, 19 nt, Homo sapiens
  misc_RNA (1)...(19): siRNA sense strand
ucagauauguagcuuugaa

SEQ ID NO: 1248208 - RNA, 19 nt, Homo sapiens
  misc_RNA (1)...(19): siRNA sense strand
aaggaaaugcuucgaaaua

SEQ ID NO: 1248209 - RNA, 19 nt, Homo sapiens
  misc_RNA (1)...(19): siRNA sense strand
gaagcccacuggagagaug

SEQ ID NO: 1248210 - RNA, 19 nt, Homo sapiens
  misc_RNA (1)...(19): siRNA sense strand
aggaaaugcuucgaaauaa

SEQ ID NO: 1248211 - RNA, 19 nt, Homo sapiens
  misc_RNA (1)...(19): siRNA sense strand
acaagagcauacaaaguuu

SEQ ID NO: 1248212 - RNA, 19 nt, Homo sapiens
  misc_RNA (1)...(19): siRNA sense strand
gagcaucguuaaagauaag

SEQ ID NO: 1248213 - RNA, 19 nt, Homo sapiens
  misc_RNA (1)...(19): siRNA sense strand
cgcuaaagcugcacacuga

SEQ ID NO: 1248214 - RNA, 19 nt, Homo sapiens
  misc_RNA (1)...(19): siRNA sense strand
uuucuacacugguuacuuu

SEQ ID NO: 1248215 - RNA, 19 nt, Homo sapiens
  misc_RNA (1)...(19): siRNA sense strand
caagagagcaucguuaaag

SEQ ID NO: 1248216 - RNA, 19 nt, Homo sapiens
  misc_RNA (1)...(19): siRNA sense strand
caaggagguuacaaggaaa

SEQ ID NO: 1248217 - RNA, 19 nt, Homo sapiens
  misc_RNA (1)...(19): siRNA sense strand
ggacgcacuugucgcuguu

SEQ ID NO: 1248218 - RNA, 19 nt, Homo sapiens
  misc_RNA (1)...(19): siRNA sense strand
aacaagagcauacaaaguu

SEQ ID NO: 1248219 - RNA, 19 nt, Homo sapiens
  misc_RNA (1)...(19): siRNA sense strand
cugcugagcucuucaaguc

SEQ ID NO: 1248220 - RNA, 19 nt, Homo sapiens
  misc_RNA (1)...(19): siRNA sense strand
aagagagcaucguuaaaga

SEQ ID NO: 1248221 - RNA, 19 nt, Homo sapiens
  misc_RNA (1)...(19): siRNA sense strand
cguccugacugcaaagaaa

SEQ ID NO: 1248222 - RNA, 19 nt, Homo sapiens
  misc_RNA (1)...(19): siRNA sense strand
cguuaaagauaagguguuu

SEQ ID NO: 1248223 - RNA, 19 nt, Homo sapiens
  misc_RNA (1)...(19): siRNA sense strand
gaagcagacagcaugaaga

SEQ ID NO: 1248224 - RNA, 19 nt, Homo sapiens
  misc_RNA (1)...(19): siRNA sense strand
ucagaucuauugucggaau

SEQ ID NO: 1248225 - RNA, 19 nt, Homo sapiens
  misc_RNA (1)...(19): siRNA sense strand
gaugaucgcgcugcagaaa

SEQ ID NO: 1248226 - RNA, 19 nt, Homo sapiens
  misc_RNA (1)...(19): siRNA sense strand
ggagugcucaucuggaaga

SEQ ID NO: 1248227 - RNA, 19 nt, Homo sapiens
  misc_RNA (1)...(19): siRNA sense strand
ggacaucugcuggugcauu

SEQ ID NO: 1248228 - RNA, 19 nt, Homo sapiens
  misc_RNA (1)...(19): siRNA sense strand
ggaagauucgcgacuacaa

SEQ ID NO: 1248229 - RNA, 19 nt, Homo sapiens
  misc_RNA (1)...(19): siRNA sense strand
gcagaaugaaaguguagaa

SEQ ID NO: 1248230 - RNA, 19 nt, Homo sapiens
  misc_RNA (1)...(19): siRNA sense strand
uggagaaggcguguaaaua

SEQ ID NO: 1248231 - RNA, 19 nt, Homo sapiens
  misc_RNA (1)...(19): siRNA sense strand
gucaagagagcaucguuaa

SEQ ID NO: 1248232 - RNA, 19 nt, Homo sapiens
  misc_RNA (1)...(19): siRNA sense strand
ggagaccgccagcuacaau

SEQ ID NO: 1248233 - RNA, 19 nt, Homo sapiens
  misc_RNA (1)...(19): siRNA sense strand
gagccggcaugaccagaug

SEQ ID NO: 1248234 - RNA, 19 nt, Homo sapiens
  misc_RNA (1)...(19): siRNA sense strand
gaucuauugucggaaugaa

SEQ ID NO: 1248235 - RNA, 19 nt, Homo sapiens
  misc_RNA (1)...(19): siRNA sense strand
aaaaggaaaugcuucgaaa

SEQ ID NO: 1248236 - RNA, 19 nt, Homo sapiens
  misc_RNA (1)...(19): siRNA sense strand
ugaagaccguggaggacaa

SEQ ID NO: 1248237 - RNA, 19 nt, Homo sapiens
  misc_RNA (1)...(19): siRNA sense strand
ccacuggagagaugaauau

SEQ ID NO: 1248238 - RNA, 19 nt, Homo sapiens
  misc_RNA (1)...(19): siRNA sense strand
ggaagcagacagcaugaag

SEQ ID NO: 1248239 - RNA, 19 nt, Homo sapiens
  misc_RNA (1)...(19): siRNA sense strand
gaagauucgcgacuacaag

SEQ ID NO: 1248240 - RNA, 19 nt, Homo sapiens
  misc_RNA (1)...(19): siRNA sense strand
ucauuuacagcgagugaua

SEQ ID NO: 1248241 - RNA, 19 nt, Homo sapiens
  misc_RNA (1)...(19): siRNA sense strand
agagcaucguuaaagauaa

SEQ ID NO: 1248242 - RNA, 19 nt, Homo sapiens
  misc_RNA (1)...(19): siRNA sense strand
agaauaugaugcccugcuu

SEQ ID NO: 1248243 - RNA, 19 nt, Homo sapiens
  misc_RNA (1)...(19): siRNA sense strand
ugaucgcgcugcagaaaca

SEQ ID NO: 1248244 - RNA, 19 nt, Homo sapiens
  misc_RNA (1)...(19): siRNA sense strand
gagaaggcguguaaauacc

SEQ ID NO: 1248245 - RNA, 19 nt, Homo sapiens
  misc_RNA (1)...(19): siRNA sense strand
gaaugaaagcagagguugu

SEQ ID NO: 1248246 - RNA, 19 nt, Homo sapiens
  misc_RNA (1)...(19): siRNA sense strand
gcccaaacuguucuagaaa

SEQ ID NO: 1248247 - RNA, 19 nt, Homo sapiens
  misc_RNA (1)...(19): siRNA sense strand
aaacaagagcauacaaagu

SEQ ID NO: 1248248 - RNA, 19 nt, Homo sapiens
  misc_RNA (1)...(19): siRNA sense strand
caucugcuggugcauuuaa

SEQ ID NO: 1248249 - RNA, 19 nt, Homo sapiens
  misc_RNA (1)...(19): siRNA sense strand
guugcagaaugaaagugua

SEQ ID NO: 1248250 - RNA, 19 nt, Homo sapiens
  misc_RNA (1)...(19): siRNA sense strand
gaagcaggaggccgucaug

SEQ ID NO: 1248251 - RNA, 19 nt, Homo sapiens
  misc_RNA (1)...(19): siRNA sense strand
aaagauaagguguuuaagg

SEQ ID NO: 1248252 - RNA, 19 nt, Homo sapiens
  misc_RNA (1)...(19): siRNA sense strand
ggaggacaaguacaagugu

SEQ ID NO: 1248253 - RNA, 19 nt, Homo sapiens
  misc_RNA (1)...(19): siRNA sense strand
agagucagguuccgaugau

SEQ ID NO: 1248254 - RNA, 19 nt, Homo sapiens
  misc_RNA (1)...(19): siRNA sense strand
ugucaagagagcaucguua

SEQ ID NO: 1248255 - RNA, 19 nt, Homo sapiens
  misc_RNA (1)...(19): siRNA sense strand
cugcuuccuuggccguuua

SEQ ID NO: 1248256 - RNA, 19 nt, Homo sapiens
  misc_RNA (1)...(19): siRNA sense strand
cugguuacuuuggcuauaa

SEQ ID NO: 1248257 - RNA, 19 nt, Homo sapiens
  misc_RNA (1)...(19): siRNA sense strand
ucuggaagauucgcgacua

SEQ ID NO: 1248258 - RNA, 19 nt, Homo sapiens
  misc_RNA (1)...(19): siRNA sense strand
ucaagagagcaucguuaaa

SEQ ID NO: 1248259 - RNA, 19 nt, Homo sapiens
  misc_RNA (1)...(19): siRNA sense strand
gggacaaaccagcagauca

SEQ ID NO: 1248260 - RNA, 19 nt, Homo sapiens
  misc_RNA (1)...(19): siRNA sense strand
acaaucagauauguagcuu

SEQ ID NO: 1248261 - RNA, 19 nt, Homo sapiens
  misc_RNA (1)...(19): siRNA sense strand
caacagcagcagcuucaag

SEQ ID NO: 1248262 - RNA, 19 nt, Homo sapiens
  misc_RNA (1)...(19): siRNA sense strand
cgacgucauuugggagaug

SEQ ID NO: 1248263 - RNA, 19 nt, Homo sapiens
  misc_RNA (1)...(19): siRNA sense strand
agacagccaagcagagaaa

SEQ ID NO: 1248264 - RNA, 19 nt, Homo sapiens
  misc_RNA (1)...(19): siRNA sense strand
gaggaagcagacagcauga

SEQ ID NO: 1248265 - RNA, 19 nt, Homo sapiens
  misc_RNA (1)...(19): siRNA sense strand
ugacacucaugcugaugga

SEQ ID NO: 1248266 - RNA, 19 nt, Homo sapiens
  misc_RNA (1)...(19): siRNA sense strand
acaauggagugcucaucug

SEQ ID NO: 1248267 - RNA, 19 nt, Homo sapiens
  misc_RNA (1)...(19): siRNA sense strand
cagaaugaaaguguagaaa

SEQ ID NO: 1248268 - RNA, 19 nt, Homo sapiens
  misc_RNA (1)...(19): siRNA sense strand
guggagaaggcguguaaau

SEQ ID NO: 1248269 - RNA, 19 nt, Homo sapiens
  misc_RNA (1)...(19): siRNA sense strand
uacuuuggcuauaagaugu

SEQ ID NO: 1248270 - RNA, 19 nt, Homo sapiens
  misc_RNA (1)...(19): siRNA sense strand
acacgaagacaccgacugu

SEQ ID NO: 1248271 - RNA, 19 nt, Homo sapiens
  misc_RNA (1)...(19): siRNA sense strand
aagcagagaaacugaagga

SEQ ID NO: 1248272 - RNA, 19 nt, Homo sapiens
  misc_RNA (1)...(19): siRNA sense strand
cagccagccuuucuacacu

SEQ ID NO: 1248273 - RNA, 19 nt, Homo sapiens
  misc_RNA (1)...(19): siRNA sense strand
uuacuuuggcuauaagaug

SEQ ID NO: 1248274 - RNA, 19 nt, Homo sapiens
  misc_RNA (1)...(19): siRNA sense strand
cagccuuucuacacugguu

SEQ ID NO: 1248275 - RNA, 19 nt, Homo sapiens
  misc_RNA (1)...(19): siRNA sense strand
gacaaguacaagugugaga

SEQ ID NO: 1248276 - RNA, 19 nt, Homo sapiens
  misc_RNA (1)...(19): siRNA sense strand
uuugggagaugcauucaag

SEQ ID NO: 1248277 - RNA, 19 nt, Homo sapiens
  misc_RNA (1)...(19): siRNA sense strand
uaugaugcccugcuuccuu

SEQ ID NO: 1248278 - RNA, 19 nt, Homo sapiens
  misc_RNA (1)...(19): siRNA sense strand
uuacagcgagugauagaca

SEQ ID NO: 1248279 - RNA, 19 nt, Homo sapiens
  misc_RNA (1)...(19): siRNA sense strand
uuaaagucauaguggauac

SEQ ID NO: 1248280 - RNA, 19 nt, Homo sapiens
  misc_RNA (1)...(19): siRNA sense strand
ccaaacuguucuagaaaau

SEQ ID NO: 1248281 - RNA, 19 nt, Homo sapiens
  misc_RNA (1)...(19): siRNA sense strand
auggagugcucaucuggaa

SEQ ID NO: 1248282 - RNA, 19 nt, Homo sapiens
  misc_RNA (1)...(19): siRNA sense strand
ugaacaaggagguuacaag

SEQ ID NO: 1248283 - RNA, 19 nt, Homo sapiens
  misc_RNA (1)...(19): siRNA sense strand
uguacagcgugucaagaga

SEQ ID NO: 1248284 - RNA, 19 nt, Homo sapiens
  misc_RNA (1)...(19): siRNA sense strand
aaaggaaaugcuucgaaau

SEQ ID NO: 1248285 - RNA, 19 nt, Homo sapiens
  misc_RNA (1)...(19): siRNA sense strand
cagauauguagcuuugaaa

SEQ ID NO: 1248286 - RNA, 19 nt, Homo sapiens
  misc_RNA (1)...(19): siRNA sense strand
aaaguuugcacaaucagau

SEQ ID NO: 1248287 - RNA, 19 nt, Homo sapiens
  misc_RNA (1)...(19): siRNA sense strand
gcacgucaaccugcugaag

SEQ ID NO: 1248288 - RNA, 19 nt, Homo sapiens
  misc_RNA (1)...(19): siRNA sense strand
caaguacaagugugagaag

SEQ ID NO: 1248289 - RNA, 19 nt, Homo sapiens
  misc_RNA (1)...(19): siRNA sense strand
gagguugugcagagcaguu

SEQ ID NO: 1248290 - RNA, 19 nt, Homo sapiens
  misc_RNA (1)...(19): siRNA sense strand
caaaaggaaaugcuucgaa

SEQ ID NO: 1248291 - RNA, 19 nt, Homo sapiens
  misc_RNA (1)...(19): siRNA sense strand
gauaagguguuuaaggaua

SEQ ID NO: 1248292 - RNA, 19 nt, Homo sapiens
  misc_RNA (1)...(19): siRNA sense strand
ggaaaugcuucgaaauaau

SEQ ID NO: 1248293 - RNA, 19 nt, Homo sapiens
  misc_RNA (1)...(19): siRNA sense strand
gagagcaucguuaaagaua

SEQ ID NO: 1248294 - RNA, 19 nt, Homo sapiens
  misc_RNA (1)...(19): siRNA sense strand
acaaggagguuacaaggaa

SEQ ID NO: 1248295 - RNA, 19 nt, Homo sapiens
  misc_RNA (1)...(19): siRNA sense strand
caucaugcguggagaauau

SEQ ID NO: 1248296 - RNA, 19 nt, Homo sapiens
  misc_RNA (1)...(19): siRNA sense strand
gaaaugcuucgaaauaaug

SEQ ID NO: 1248297 - RNA, 19 nt, Homo sapiens
  misc_RNA (1)...(19): siRNA sense strand
ggacaaaccagcagaucaa

SEQ ID NO: 1248298 - RNA, 19 nt, Homo sapiens
  misc_RNA (1)...(19): siRNA sense strand
gcaaguggcucggaacaca

SEQ ID NO: 1248299 - RNA, 19 nt, Homo sapiens
  misc_RNA (1)...(19): siRNA sense strand
aagauaagguguuuaagga

SEQ ID NO: 1248300 - RNA, 19 nt, Homo sapiens
  misc_RNA (1)...(19): siRNA sense strand
gacaucugcuggugcauuu

SEQ ID NO: 1248301 - RNA, 19 nt, Homo sapiens
  misc_RNA (1)...(19): siRNA sense strand
gaaaaggucuugaggaaag

SEQ ID NO: 1248302 - RNA, 19 nt, Homo sapiens
  misc_RNA (1)...(19): siRNA sense strand
ggcccaaacuguucuagaa

SEQ ID NO: 1248303 - RNA, 19 nt, Homo sapiens
  misc_RNA (1)...(19): siRNA sense strand
ggagaaggcguguaaauac

SEQ ID NO: 1248304 - RNA, 19 nt, Homo sapiens
  misc_RNA (1)...(19): siRNA sense strand
aaucagauauguagcuuug

SEQ ID NO: 1248305 - RNA, 19 nt, Homo sapiens
  misc_RNA (1)...(19): siRNA sense strand
gcaacucgcucgaaaagaa

SEQ ID NO: 1248306 - RNA, 19 nt, Homo sapiens
  misc_RNA (1)...(19): siRNA sense strand
ucagauauguagcuuugaa

SEQ ID NO: 1248307 - RNA, 19 nt, Homo sapiens
  misc_RNA (1)...(19): siRNA sense strand
aaggaaaugcuucgaaaua

SEQ ID NO: 1248308 - RNA, 19 nt, Homo sapiens
  misc_RNA (1)...(19): siRNA sense strand
gaagcccacuggagagaug

SEQ ID NO: 1248309 - RNA, 19 nt, Homo sapiens
  misc_RNA (1)...(19): siRNA sense strand
aggaaaugcuucgaaauaa

SEQ ID NO: 1248310 - RNA, 19 nt, Homo sapiens
  misc_RNA (1)...(19): siRNA sense strand
acaagagcauacaaaguuu

SEQ ID NO: 1248311 - RNA, 19 nt, Homo sapiens
  misc_RNA (1)...(19): siRNA sense strand
gagcaucguuaaagauaag

SEQ ID NO: 1248312 - RNA, 19 nt, Homo sapiens
  misc_RNA (1)...(19): siRNA sense strand
cgcuaaagcugcacacuga

SEQ ID NO: 1248313 - RNA, 19 nt, Homo sapiens
  misc_RNA (1)...(19): siRNA sense strand
uuucuacacugguuacuuu

SEQ ID NO: 1248314 - RNA, 19 nt, Homo sapiens
  misc_RNA (1)...(19): siRNA sense strand
caagagagcaucguuaaag

SEQ ID NO: 1248315 - RNA, 19 nt, Homo sapiens
  misc_RNA (1)...(19): siRNA sense strand
caaggagguuacaaggaaa

SEQ ID NO: 1248316 - RNA, 19 nt, Homo sapiens
  misc_RNA (1)...(19): siRNA sense strand
ggacgcacuugucgcuguu

SEQ ID NO: 1248317 - RNA, 19 nt, Homo sapiens
  misc_RNA (1)...(19): siRNA sense strand
aacaagagcauacaaaguu

SEQ ID NO: 1248318 - RNA, 19 nt, Homo sapiens
  misc_RNA (1)...(19): siRNA sense strand
cugcugagcucuucaaguc

SEQ ID NO: 1248319 - RNA, 19 nt, Homo sapiens
  misc_RNA (1)...(19): siRNA sense strand
aagagagcaucguuaaaga

SEQ ID NO: 1248320 - RNA, 19 nt, Homo sapiens
  misc_RNA (1)...(19): siRNA sense strand
cguccugacugcaaagaaa

SEQ ID NO: 1248321 - RNA, 19 nt, Homo sapiens
  misc_RNA (1)...(19): siRNA sense strand
cguuaaagauaagguguuu

SEQ ID NO: 1248322 - RNA, 19 nt, Homo sapiens
  misc_RNA (1)...(19): siRNA sense strand
gaagcagacagcaugaaga

SEQ ID NO: 1248323 - RNA, 19 nt, Homo sapiens
  misc_RNA (1)...(19): siRNA sense strand
ucagaucuauugucggaau

SEQ ID NO: 1248324 - RNA, 19 nt, Homo sapiens
  misc_RNA (1)...(19): siRNA sense strand
gaugaucgcgcugcagaaa

SEQ ID NO: 1248325 - RNA, 19 nt, Homo sapiens
  misc_RNA (1)...(19): siRNA sense strand
ggagugcucaucuggaaga

SEQ ID NO: 1248326 - RNA, 19 nt, Homo sapiens
  misc_RNA (1)...(19): siRNA sense strand
ggacaucugcuggugcauu

SEQ ID NO: 1248327 - RNA, 19 nt, Homo sapiens
  misc_RNA (1)...(19): siRNA sense strand
ggaagauucgcgacuacaa

SEQ ID NO: 1248328 - RNA, 19 nt, Homo sapiens
  misc_RNA (1)...(19): siRNA sense strand
gcagaaugaaaguguagaa

SEQ ID NO: 1248329 - RNA, 19 nt, Homo sapiens
  misc_RNA (1)...(19): siRNA sense strand
uggagaaggcguguaaaua

SEQ ID NO: 1248330 - RNA, 19 nt, Homo sapiens
  misc_RNA (1)...(19): siRNA sense strand
gucaagagagcaucguuaa

SEQ ID NO: 1248331 - RNA, 19 nt, Homo sapiens
  misc_RNA (1)...(19): siRNA sense strand
ggagaccgccagcuacaau

SEQ ID NO: 1248332 - RNA, 19 nt, Homo sapiens
  misc_RNA (1)...(19): siRNA sense strand
gagccggcaugaccagaug

SEQ ID NO: 1248333 - RNA, 19 nt, Homo sapiens
  misc_RNA (1)...(19): siRNA sense strand
gaucuauugucggaaugaa

SEQ ID NO: 1248334 - RNA, 19 nt, Homo sapiens
  misc_RNA (1)...(19): siRNA sense strand
aaaaggaaaugcuucgaaa

SEQ ID NO: 1248335 - RNA, 19 nt, Homo sapiens
  misc_RNA (1)...(19): siRNA sense strand
ugaagaccguggaggacaa

SEQ ID NO: 1248336 - RNA, 19 nt, Homo sapiens
  misc_RNA (1)...(19): siRNA sense strand
ccacuggagagaugaauau

SEQ ID NO: 1248337 - RNA, 19 nt, Homo sapiens
  misc_RNA (1)...(19): siRNA sense strand
ggaagcagacagcaugaag

SEQ ID NO: 1248338 - RNA, 19 nt, Homo sapiens
  misc_RNA (1)...(19): siRNA sense strand
gaagauucgcgacuacaag

SEQ ID NO: 1248339 - RNA, 19 nt, Homo sapiens
  misc_RNA (1)...(19): siRNA sense strand
ucauuuacagcgagugaua

SEQ ID NO: 1248340 - RNA, 19 nt, Homo sapiens
  misc_RNA (1)...(19): siRNA sense strand
agagcaucguuaaagauaa

SEQ ID NO: 1248341 - RNA, 19 nt, Homo sapiens
  misc_RNA (1)...(19): siRNA sense strand
agaauaugaugcccugcuu

SEQ ID NO: 1248342 - RNA, 19 nt, Homo sapiens
  misc_RNA (1)...(19): siRNA sense strand
ugaucgcgcugcagaaaca

SEQ ID NO: 1248343 - RNA, 19 nt, Homo sapiens
  misc_RNA (1)...(19): siRNA sense strand
gagaaggcguguaaauacc

SEQ ID NO: 1248344 - RNA, 19 nt, Homo sapiens
  misc_RNA (1)...(19): siRNA sense strand
gaaugaaagcagagguugu

SEQ ID NO: 1248345 - RNA, 19 nt, Homo sapiens
  misc_RNA (1)...(19): siRNA sense strand
gcccaaacuguucuagaaa

SEQ ID NO: 1248346 - RNA, 19 nt, Homo sapiens
  misc_RNA (1)...(19): siRNA sense strand
aaacaagagcauacaaagu

SEQ ID NO: 1248347 - RNA, 19 nt, Homo sapiens
  misc_RNA (1)...(19): siRNA sense strand
caucugcuggugcauuuaa

SEQ ID NO: 1248348 - RNA, 19 nt, Homo sapiens
  misc_RNA (1)...(19): siRNA sense strand
guugcagaaugaaagugua

SEQ ID NO: 1248349 - RNA, 19 nt, Homo sapiens
  misc_RNA (1)...(19): siRNA sense strand
gaagcaggaggccgucaug

SEQ ID NO: 1248350 - RNA, 19 nt, Homo sapiens
  misc_RNA (1)...(19): siRNA sense strand
aaagauaagguguuuaagg

SEQ ID NO: 1248351 - RNA, 19 nt, Homo sapiens
  misc_RNA (1)...(19): siRNA sense strand
ggaggacaaguacaagugu

SEQ ID NO: 1248352 - RNA, 19 nt, Homo sapiens
  misc_RNA (1)...(19): siRNA sense strand
agagucagguuccgaugau

SEQ ID NO: 1248353 - RNA, 19 nt, Homo sapiens
  misc_RNA (1)...(19): siRNA sense strand
ugucaagagagcaucguua

SEQ ID NO: 1248354 - RNA, 19 nt, Homo sapiens
  misc_RNA (1)...(19): siRNA sense strand
cugcuuccuuggccguuua

SEQ ID NO: 1248355 - RNA, 19 nt, Homo sapiens
  misc_RNA (1)...(19): siRNA sense strand
cugguuacuuuggcuauaa

SEQ ID NO: 1248356 - RNA, 19 nt, Homo sapiens
  misc_RNA (1)...(19): siRNA sense strand
ucuggaagauucgcgacua

SEQ ID NO: 1248357 - RNA, 19 nt, Homo sapiens
  misc_RNA (1)...(19): siRNA sense strand
ucaagagagcaucguuaaa

SEQ ID NO: 1248358 - RNA, 19 nt, Homo sapiens
  misc_RNA (1)...(19): siRNA sense strand
gggacaaaccagcagauca

SEQ ID NO: 1248359 - RNA, 19 nt, Homo sapiens
  misc_RNA (1)...(19): siRNA sense strand
acaaucagauauguagcuu

SEQ ID NO: 1248360 - RNA, 19 nt, Homo sapiens
  misc_RNA (1)...(19): siRNA sense strand
caacagcagcagcuucaag

SEQ ID NO: 1248361 - RNA, 19 nt, Homo sapiens
  misc_RNA (1)...(19): siRNA sense strand
cgacgucauuugggagaug

SEQ ID NO: 1248362 - RNA, 19 nt, Homo sapiens
  misc_RNA (1)...(19): siRNA sense strand
agacagccaagcagagaaa

SEQ ID NO: 1248363 - RNA, 19 nt, Homo sapiens
  misc_RNA (1)...(19): siRNA sense strand
gaggaagcagacagcauga

SEQ ID NO: 1248364 - RNA, 19 nt, Homo sapiens
  misc_RNA (1)...(19): siRNA sense strand
ugacacucaugcugaugga

SEQ ID NO: 1248365 - RNA, 19 nt, Homo sapiens
  misc_RNA (1)...(19): siRNA sense strand
acaauggagugcucaucug

SEQ ID NO: 1248366 - RNA, 19 nt, Homo sapiens
  misc_RNA (1)...(19): siRNA sense strand
cagaaugaaaguguagaaa

SEQ ID NO: 1248367 - RNA, 19 nt, Homo sapiens
  misc_RNA (1)...(19): siRNA sense strand
guggagaaggcguguaaau

SEQ ID NO: 1248368 - RNA, 19 nt, Homo sapiens
  misc_RNA (1)...(19): siRNA sense strand
uacuuuggcuauaagaugu

SEQ ID NO: 1248369 - RNA, 19 nt, Homo sapiens
  misc_RNA (1)...(19): siRNA sense strand
acacgaagacaccgacugu

SEQ ID NO: 1248370 - RNA, 19 nt, Homo sapiens
  misc_RNA (1)...(19): siRNA sense strand
aagcagagaaacugaagga

SEQ ID NO: 1248371 - RNA, 19 nt, Homo sapiens
  misc_RNA (1)...(19): siRNA sense strand
cagccagccuuucuacacu

SEQ ID NO: 1248372 - RNA, 19 nt, Homo sapiens
  misc_RNA (1)...(19): siRNA sense strand
uuacuuuggcuauaagaug

SEQ ID NO: 1248373 - RNA, 19 nt, Homo sapiens
  misc_RNA (1)...(19): siRNA sense strand
cagccuuucuacacugguu

SEQ ID NO: 1248374 - RNA, 19 nt, Homo sapiens
  misc_RNA (1)...(19): siRNA sense strand
gacaaguacaagugugaga

SEQ ID NO: 1248375 - RNA, 19 nt, Homo sapiens
  misc_RNA (1)...(19): siRNA sense strand
uuugggagaugcauucaag

SEQ ID NO: 1248376 - RNA, 19 nt, Homo sapiens
  misc_RNA (1)...(19): siRNA sense strand
uaugaugcccugcuuccuu

SEQ ID NO: 1248377 - RNA, 19 nt, Homo sapiens
  misc_RNA (1)...(19): siRNA sense strand
uuacagcgagugauagaca

SEQ ID NO: 1248378 - RNA, 19 nt, Homo sapiens
  misc_RNA (1)...(19): siRNA sense strand
uuaaagucauaguggauac

SEQ ID NO: 1248379 - RNA, 19 nt, Homo sapiens
  misc_RNA (1)...(19): siRNA sense strand
ccaaacuguucuagaaaau

SEQ ID NO: 1248380 - RNA, 19 nt, Homo sapiens
  misc_RNA (1)...(19): siRNA sense strand
auggagugcucaucuggaa

SEQ ID NO: 1248381 - RNA, 19 nt, Homo sapiens
  misc_RNA (1)...(19): siRNA sense strand
ugaacaaggagguuacaag

SEQ ID NO: 1248382 - RNA, 19 nt, Homo sapiens
  misc_RNA (1)...(19): siRNA sense strand
uguacagcgugucaagaga

SEQ ID NO: 1248383 - RNA, 19 nt, Homo sapiens
  misc_RNA (1)...(19): siRNA sense strand
aaaggaaaugcuucgaaau

SEQ ID NO: 1248384 - RNA, 19 nt, Homo sapiens
  misc_RNA (1)...(19): siRNA sense strand
cagauauguagcuuugaaa

SEQ ID NO: 1248385 - RNA, 19 nt, Homo sapiens
  misc_RNA (1)...(19): siRNA sense strand
aaaguuugcacaaucagau

SEQ ID NO: 1248386 - RNA, 19 nt, Homo sapiens
  misc_RNA (1)...(19): siRNA sense strand
gcacgucaaccugcugaag

SEQ ID NO: 1248387 - RNA, 19 nt, Homo sapiens
  misc_RNA (1)...(19): siRNA sense strand
caaguacaagugugagaag

SEQ ID NO: 1248388 - RNA, 19 nt, Homo sapiens
  misc_RNA (1)...(19): siRNA sense strand
gagguugugcagagcaguu

SEQ ID NO: 1248389 - RNA, 19 nt, Homo sapiens
  misc_RNA (1)...(19): siRNA sense strand
caaaaggaaaugcuucgaa

SEQ ID NO: 1248390 - RNA, 19 nt, Homo sapiens
  misc_RNA (1)...(19): siRNA sense strand
gauaagguguuuaaggaua

SEQ ID NO: 1248391 - RNA, 19 nt, Homo sapiens
  misc_RNA (1)...(19): siRNA sense strand
ggaaaugcuucgaaauaau

SEQ ID NO: 1248392 - RNA, 19 nt, Homo sapiens
  misc_RNA (1)...(19): siRNA sense strand
gagagcaucguuaaagaua

SEQ ID NO: 1248393 - RNA, 19 nt, Homo sapiens
  misc_RNA (1)...(19): siRNA sense strand
acaaggagguuacaaggaa

SEQ ID NO: 1248394 - RNA, 19 nt, Homo sapiens
  misc_RNA (1)...(19): siRNA sense strand
caucaugcguggagaauau

SEQ ID NO: 1248395 - RNA, 19 nt, Homo sapiens
  misc_RNA (1)...(19): siRNA sense strand
gaaaugcuucgaaauaaug

SEQ ID NO: 1248396 - RNA, 19 nt, Homo sapiens
  misc_RNA (1)...(19): siRNA sense strand
ggacaaaccagcagaucaa

SEQ ID NO: 1248397 - RNA, 19 nt, Homo sapiens
  misc_RNA (1)...(19): siRNA sense strand
gcaaguggcucggaacaca

SEQ ID NO: 1248398 - RNA, 19 nt, Homo sapiens
  misc_RNA (1)...(19): siRNA sense strand
aagauaagguguuuaagga

SEQ ID NO: 1248399 - RNA, 19 nt, Homo sapiens
  misc_RNA (1)...(19): siRNA sense strand
gacaucugcuggugcauuu

SEQ ID NO: 1248400 - RNA, 19 nt, Homo sapiens
  misc_RNA (1)...(19): siRNA sense strand
gaaaaggucuugaggaaag

SEQ ID NO: 1248401 - RNA, 19 nt, Homo sapiens
  misc_RNA (1)...(19): siRNA sense strand
ggcccaaacuguucuagaa

SEQ ID NO: 1248402 - RNA, 19 nt, Homo sapiens
  misc_RNA (1)...(19): siRNA sense strand
ggagaaggcguguaaauac

SEQ ID NO: 1248403 - RNA, 19 nt, Homo sapiens
  misc_RNA (1)...(19): siRNA sense strand
aaucagauauguagcuuug

SEQ ID NO: 1248404 - RNA, 19 nt, Homo sapiens
  misc_RNA (1)...(19): siRNA sense strand
gcaacucgcucgaaaagaa

SEQ ID NO: 1248405 - RNA, 19 nt, Homo sapiens
  misc_RNA (1)...(19): siRNA sense strand
ucagauauguagcuuugaa

SEQ ID NO: 1248406 - RNA, 19 nt, Homo sapiens
  misc_RNA (1)...(19): siRNA sense strand
aaggaaaugcuucgaaaua

SEQ ID NO: 1248407 - RNA, 19 nt, Homo sapiens
  misc_RNA (1)...(19): siRNA sense strand
gaagcccacuggagagaug

SEQ ID NO: 1248408 - RNA, 19 nt, Homo sapiens
  misc_RNA (1)...(19): siRNA sense strand
aggaaaugcuucgaaauaa

SEQ ID NO: 1248409 - RNA, 19 nt, Homo sapiens
  misc_RNA (1)...(19): siRNA sense strand
acaagagcauacaaaguuu

SEQ ID NO: 1248410 - RNA, 19 nt, Homo sapiens
  misc_RNA (1)...(19): siRNA sense strand
gagcaucguuaaagauaag

SEQ ID NO: 1248411 - RNA, 19 nt, Homo sapiens
  misc_RNA (1)...(19): siRNA sense strand
cgcuaaagcugcacacuga

SEQ ID NO: 1248412 - RNA, 19 nt, Homo sapiens
  misc_RNA (1)...(19): siRNA sense strand
uuucuacacugguuacuuu

SEQ ID NO: 1248413 - RNA, 19 nt, Homo sapiens
  misc_RNA (1)...(19): siRNA sense strand
caagagagcaucguuaaag

SEQ ID NO: 1248414 - RNA, 19 nt, Homo sapiens
  misc_RNA (1)...(19): siRNA sense strand
caaggagguuacaaggaaa

SEQ ID NO: 1248415 - RNA, 19 nt, Homo sapiens
  misc_RNA (1)...(19): siRNA sense strand
ggacgcacuugucgcuguu

SEQ ID NO: 1248416 - RNA, 19 nt, Homo sapiens
  misc_RNA (1)...(19): siRNA sense strand
aacaagagcauacaaaguu

SEQ ID NO: 1248417 - RNA, 19 nt, Homo sapiens
  misc_RNA (1)...(19): siRNA sense strand
cugcugagcucuucaaguc

SEQ ID NO: 1248418 - RNA, 19 nt, Homo sapiens
  misc_RNA (1)...(19): siRNA sense strand
aagagagcaucguuaaaga

SEQ ID NO: 1248419 - RNA, 19 nt, Homo sapiens
  misc_RNA (1)...(19): siRNA sense strand
cguccugacugcaaagaaa

SEQ ID NO: 1248420 - RNA, 19 nt, Homo sapiens
  misc_RNA (1)...(19): siRNA sense strand
cguuaaagauaagguguuu

SEQ ID NO: 1248421 - RNA, 19 nt, Homo sapiens
  misc_RNA (1)...(19): siRNA sense strand
gaagcagacagcaugaaga

SEQ ID NO: 1248422 - RNA, 19 nt, Homo sapiens
  misc_RNA (1)...(19): siRNA sense strand
ucagaucuauugucggaau

SEQ ID NO: 1248423 - RNA, 19 nt, Homo sapiens
  misc_RNA (1)...(19): siRNA sense strand
gaugaucgcgcugcagaaa

SEQ ID NO: 1248424 - RNA, 19 nt, Homo sapiens
  misc_RNA (1)...(19): siRNA sense strand
ggagugcucaucuggaaga

SEQ ID NO: 1248425 - RNA, 19 nt, Homo sapiens
  misc_RNA (1)...(19): siRNA sense strand
ggacaucugcuggugcauu

SEQ ID NO: 1248426 - RNA, 19 nt, Homo sapiens
  misc_RNA (1)...(19): siRNA sense strand
ggaagauucgcgacuacaa

SEQ ID NO: 1248427 - RNA, 19 nt, Homo sapiens
  misc_RNA (1)...(19): siRNA sense strand
gcagaaugaaaguguagaa

SEQ ID NO: 1248428 - RNA, 19 nt, Homo sapiens
  misc_RNA (1)...(19): siRNA sense strand
uggagaaggcguguaaaua

SEQ ID NO: 1248429 - RNA, 19 nt, Homo sapiens
  misc_RNA (1)...(19): siRNA sense strand
gucaagagagcaucguuaa

SEQ ID NO: 1248430 - RNA, 19 nt, Homo sapiens
  misc_RNA (1)...(19): siRNA sense strand
ggagaccgccagcuacaau

SEQ ID NO: 1248431 - RNA, 19 nt, Homo sapiens
  misc_RNA (1)...(19): siRNA sense strand
gagccggcaugaccagaug

SEQ ID NO: 1248432 - RNA, 19 nt, Homo sapiens
  misc_RNA (1)...(19): siRNA sense strand
gaucuauugucggaaugaa

SEQ ID NO: 1248433 - RNA, 19 nt, Homo sapiens
  misc_RNA (1)...(19): siRNA sense strand
aaaaggaaaugcuucgaaa

SEQ ID NO: 1248434 - RNA, 19 nt, Homo sapiens
  misc_RNA (1)...(19): siRNA sense strand
ugaagaccguggaggacaa

SEQ ID NO: 1248435 - RNA, 19 nt, Homo sapiens
  misc_RNA (1)...(19): siRNA sense strand
ccacuggagagaugaauau

SEQ ID NO: 1248436 - RNA, 19 nt, Homo sapiens
  misc_RNA (1)...(19): siRNA sense strand
ggaagcagacagcaugaag

SEQ ID NO: 1248437 - RNA, 19 nt, Homo sapiens
  misc_RNA (1)...(19): siRNA sense strand
gaagauucgcgacuacaag

SEQ ID NO: 1248438 - RNA, 19 nt, Homo sapiens
  misc_RNA (1)...(19): siRNA sense strand
ucauuuacagcgagugaua

SEQ ID NO: 1248439 - RNA, 19 nt, Homo sapiens
  misc_RNA (1)...(19): siRNA sense strand
agagcaucguuaaagauaa

SEQ ID NO: 1248440 - RNA, 19 nt, Homo sapiens
  misc_RNA (1)...(19): siRNA sense strand
agaauaugaugcccugcuu

SEQ ID NO: 1248441 - RNA, 19 nt, Homo sapiens
  misc_RNA (1)...(19): siRNA sense strand
ugaucgcgcugcagaaaca

SEQ ID NO: 1248442 - RNA, 19 nt, Homo sapiens
  misc_RNA (1)...(19): siRNA sense strand
gagaaggcguguaaauacc

SEQ ID NO: 1248443 - RNA, 19 nt, Homo sapiens
  misc_RNA (1)...(19): siRNA sense strand
gaaugaaagcagagguugu

SEQ ID NO: 1248444 - RNA, 19 nt, Homo sapiens
  misc_RNA (1)...(19): siRNA sense strand
gcccaaacuguucuagaaa

SEQ ID NO: 1248445 - RNA, 19 nt, Homo sapiens
  misc_RNA (1)...(19): siRNA sense strand
aaacaagagcauacaaagu

SEQ ID NO: 1248446 - RNA, 19 nt, Homo sapiens
  misc_RNA (1)...(19): siRNA sense strand
caucugcuggugcauuuaa

SEQ ID NO: 1248447 - RNA, 19 nt, Homo sapiens
  misc_RNA (1)...(19): siRNA sense strand
guugcagaaugaaagugua

SEQ ID NO: 1248448 - RNA, 19 nt, Homo sapiens
  misc_RNA (1)...(19): siRNA sense strand
gaagcaggaggccgucaug

SEQ ID NO: 1248449 - RNA, 19 nt, Homo sapiens
  misc_RNA (1)...(19): siRNA sense strand
aaagauaagguguuuaagg

SEQ ID NO: 1248450 - RNA, 19 nt, Homo sapiens
  misc_RNA (1)...(19): siRNA sense strand
ggaggacaaguacaagugu

SEQ ID NO: 1248451 - RNA, 19 nt, Homo sapiens
  misc_RNA (1)...(19): siRNA sense strand
agagucagguuccgaugau

SEQ ID NO: 1248452 - RNA, 19 nt, Homo sapiens
  misc_RNA (1)...(19): siRNA sense strand
ugucaagagagcaucguua

SEQ ID NO: 1248453 - RNA, 19 nt, Homo sapiens
  misc_RNA (1)...(19): siRNA sense strand
cugcuuccuuggccguuua

SEQ ID NO: 1248454 - RNA, 19 nt, Homo sapiens
  misc_RNA (1)...(19): siRNA sense strand
cugguuacuuuggcuauaa

SEQ ID NO: 1248455 - RNA, 19 nt, Homo sapiens
  misc_RNA (1)...(19): siRNA sense strand
ucuggaagauucgcgacua

SEQ ID NO: 1248456 - RNA, 19 nt, Homo sapiens
  misc_RNA (1)...(19): siRNA sense strand
ucaagagagcaucguuaaa

SEQ ID NO: 1248457 - RNA, 19 nt, Homo sapiens
  misc_RNA (1)...(19): siRNA sense strand
gggacaaaccagcagauca

SEQ ID NO: 1248458 - RNA, 19 nt, Homo sapiens
  misc_RNA (1)...(19): siRNA sense strand
acaaucagauauguagcuu

SEQ ID NO: 1248459 - RNA, 19 nt, Homo sapiens
  misc_RNA (1)...(19): siRNA sense strand
caacagcagcagcuucaag

SEQ ID NO: 1248460 - RNA, 19 nt, Homo sapiens
  misc_RNA (1)...(19): siRNA sense strand
cgacgucauuugggagaug

SEQ ID NO: 1248461 - RNA, 19 nt, Homo sapiens
  misc_RNA (1)...(19): siRNA sense strand
agacagccaagcagagaaa

SEQ ID NO: 1248462 - RNA, 19 nt, Homo sapiens
  misc_RNA (1)...(19): siRNA sense strand
gaggaagcagacagcauga

SEQ ID NO: 1248463 - RNA, 19 nt, Homo sapiens
  misc_RNA (1)...(19): siRNA sense strand
ugacacucaugcugaugga

SEQ ID NO: 1248464 - RNA, 19 nt, Homo sapiens
  misc_RNA (1)...(19): siRNA sense strand
acaauggagugcucaucug

SEQ ID NO: 1248465 - RNA, 19 nt, Homo sapiens
  misc_RNA (1)...(19): siRNA sense strand
cagaaugaaaguguagaaa

SEQ ID NO: 1248466 - RNA, 19 nt, Homo sapiens
  misc_RNA (1)...(19): siRNA sense strand
guggagaaggcguguaaau

SEQ ID NO: 1248467 - RNA, 19 nt, Homo sapiens
  misc_RNA (1)...(19): siRNA sense strand
uacuuuggcuauaagaugu

SEQ ID NO: 1248468 - RNA, 19 nt, Homo sapiens
  misc_RNA (1)...(19): siRNA sense strand
acacgaagacaccgacugu

SEQ ID NO: 1248469 - RNA, 19 nt, Homo sapiens
  misc_RNA (1)...(19): siRNA sense strand
aagcagagaaacugaagga

SEQ ID NO: 1248470 - RNA, 19 nt, Homo sapiens
  misc_RNA (1)...(19): siRNA sense strand
cagccagccuuucuacacu

SEQ ID NO: 1248471 - RNA, 19 nt, Homo sapiens
  misc_RNA (1)...(19): siRNA sense strand
uuacuuuggcuauaagaug

SEQ ID NO: 1248472 - RNA, 19 nt, Homo sapiens
  misc_RNA (1)...(19): siRNA sense strand
cagccuuucuacacugguu

SEQ ID NO: 1248473 - RNA, 19 nt, Homo sapiens
  misc_RNA (1)...(19): siRNA sense strand
gacaaguacaagugugaga

SEQ ID NO: 1248474 - RNA, 19 nt, Homo sapiens
  misc_RNA (1)...(19): siRNA sense strand
uuugggagaugcauucaag

SEQ ID NO: 1248475 - RNA, 19 nt, Homo sapiens
  misc_RNA (1)...(19): siRNA sense strand
uaugaugcccugcuuccuu

SEQ ID NO: 1248476 - RNA, 19 nt, Homo sapiens
  misc_RNA (1)...(19): siRNA sense strand
uuacagcgagugauagaca

SEQ ID NO: 1248477 - RNA, 19 nt, Homo sapiens
  misc_RNA (1)...(19): siRNA sense strand
uuaaagucauaguggauac

SEQ ID NO: 1248478 - RNA, 19 nt, Homo sapiens
  misc_RNA (1)...(19): siRNA sense strand
ccaaacuguucuagaaaau

SEQ ID NO: 1248479 - RNA, 19 nt, Homo sapiens
  misc_RNA (1)...(19): siRNA sense strand
auggagugcucaucuggaa

SEQ ID NO: 1248480 - RNA, 19 nt, Homo sapiens
  misc_RNA (1)...(19): siRNA sense strand
ugaacaaggagguuacaag

SEQ ID NO: 1248481 - RNA, 19 nt, Homo sapiens
  misc_RNA (1)...(19): siRNA sense strand
uguacagcgugucaagaga

SEQ ID NO: 1248482 - RNA, 19 nt, Homo sapiens
  misc_RNA (1)...(19): siRNA sense strand
aaaggaaaugcuucgaaau

SEQ ID NO: 1248483 - RNA, 19 nt, Homo sapiens
  misc_RNA (1)...(19): siRNA sense strand
cagauauguagcuuugaaa

SEQ ID NO: 1248484 - RNA, 19 nt, Homo sapiens
  misc_RNA (1)...(19): siRNA sense strand
aaaguuugcacaaucagau

SEQ ID NO: 1248485 - RNA, 19 nt, Homo sapiens
  misc_RNA (1)...(19): siRNA sense strand
gcacgucaaccugcugaag

SEQ ID NO: 1248486 - RNA, 19 nt, Homo sapiens
  misc_RNA (1)...(19): siRNA sense strand
caaguacaagugugagaag

SEQ ID NO: 1248487 - RNA, 19 nt, Homo sapiens
  misc_RNA (1)...(19): siRNA sense strand
gagguugugcagagcaguu

SEQ ID NO: 1248488 - RNA, 19 nt, Homo sapiens
  misc_RNA (1)...(19): siRNA sense strand
caaaaggaaaugcuucgaa

SEQ ID NO: 1248489 - RNA, 19 nt, Homo sapiens
  misc_RNA (1)...(19): siRNA sense strand
gauaagguguuuaaggaua

SEQ ID NO: 1248490 - RNA, 19 nt, Homo sapiens
  misc_RNA (1)...(19): siRNA sense strand
ggaaaugcuucgaaauaau

SEQ ID NO: 1248491 - RNA, 19 nt, Homo sapiens
  misc_RNA (1)...(19): siRNA sense strand
gagagcaucguuaaagaua

SEQ ID NO: 1248492 - RNA, 19 nt, Homo sapiens
  misc_RNA (1)...(19): siRNA sense strand
acaaggagguuacaaggaa

SEQ ID NO: 1248493 - RNA, 19 nt, Homo sapiens
  misc_RNA (1)...(19): siRNA sense strand
caucaugcguggagaauau

SEQ ID NO: 1248494 - RNA, 19 nt, Homo sapiens
  misc_RNA (1)...(19): siRNA sense strand
gaaaugcuucgaaauaaug

SEQ ID NO: 1248495 - RNA, 19 nt, Homo sapiens
  misc_RNA (1)...(19): siRNA sense strand
ggacaaaccagcagaucaa

SEQ ID NO: 1248496 - RNA, 19 nt, Homo sapiens
  misc_RNA (1)...(19): siRNA sense strand
gcaaguggcucggaacaca

SEQ ID NO: 1248497 - RNA, 19 nt, Homo sapiens
  misc_RNA (1)...(19): siRNA sense strand
aagauaagguguuuaagga

SEQ ID NO: 1248498 - RNA, 19 nt, Homo sapiens
  misc_RNA (1)...(19): siRNA sense strand
gacaucugcuggugcauuu

SEQ ID NO: 1248499 - RNA, 19 nt, Homo sapiens
  misc_RNA (1)...(19): siRNA sense strand
gaaaaggucuugaggaaag

SEQ ID NO: 1248500 - RNA, 19 nt, Homo sapiens
  misc_RNA (1)...(19): siRNA sense strand
ggcccaaacuguucuagaa

SEQ ID NO: 1248501 - RNA, 19 nt, Homo sapiens
  misc_RNA (1)...(19): siRNA sense strand
ggagaaggcguguaaauac

SEQ ID NO: 1248502 - RNA, 19 nt, Homo sapiens
  misc_RNA (1)...(19): siRNA sense strand
aaucagauauguagcuuug

SEQ ID NO: 1248503 - RNA, 19 nt, Homo sapiens
  misc_RNA (1)...(19): siRNA sense strand
gcaacucgcucgaaaagaa

SEQ ID NO: 1248504 - RNA, 19 nt, Homo sapiens
  misc_RNA (1)...(19): siRNA sense strand
ucagauauguagcuuugaa

SEQ ID NO: 1248505 - RNA, 19 nt, Homo sapiens
  misc_RNA (1)...(19): siRNA sense strand
aaggaaaugcuucgaaaua

SEQ ID NO: 1248506 - RNA, 19 nt, Homo sapiens
  misc_RNA (1)...(19): siRNA sense strand
gaagcccacuggagagaug

SEQ ID NO: 1248507 - RNA, 19 nt, Homo sapiens
  misc_RNA (1)...(19): siRNA sense strand
aggaaaugcuucgaaauaa

SEQ ID NO: 1248508 - RNA, 19 nt, Homo sapiens
  misc_RNA (1)...(19): siRNA sense strand
acaagagcauacaaaguuu

SEQ ID NO: 1248509 - RNA, 19 nt, Homo sapiens
  misc_RNA (1)...(19): siRNA sense strand
gagcaucguuaaagauaag

SEQ ID NO: 1248510 - RNA, 19 nt, Homo sapiens
  misc_RNA (1)...(19): siRNA sense strand
cgcuaaagcugcacacuga

SEQ ID NO: 1248511 - RNA, 19 nt, Homo sapiens
  misc_RNA (1)...(19): siRNA sense strand
uuucuacacugguuacuuu

SEQ ID NO: 1248512 - RNA, 19 nt, Homo sapiens
  misc_RNA (1)...(19): siRNA sense strand
caagagagcaucguuaaag

SEQ ID NO: 1248513 - RNA, 19 nt, Homo sapiens
  misc_RNA (1)...(19): siRNA sense strand
caaggagguuacaaggaaa

SEQ ID NO: 1248514 - RNA, 19 nt, Homo sapiens
  misc_RNA (1)...(19): siRNA sense strand
ggacgcacuugucgcuguu

SEQ ID NO: 1248515 - RNA, 19 nt, Homo sapiens
  misc_RNA (1)...(19): siRNA sense strand
aacaagagcauacaaaguu

SEQ ID NO: 1248516 - RNA, 19 nt, Homo sapiens
  misc_RNA (1)...(19): siRNA sense strand
cugcugagcucuucaaguc

SEQ ID NO: 1248517 - RNA, 19 nt, Homo sapiens
  misc_RNA (1)...(19): siRNA sense strand
aagagagcaucguuaaaga

SEQ ID NO: 1248518 - RNA, 19 nt, Homo sapiens
  misc_RNA (1)...(19): siRNA sense strand
cguccugacugcaaagaaa

SEQ ID NO: 1248519 - RNA, 19 nt, Homo sapiens
  misc_RNA (1)...(19): siRNA sense strand
cguuaaagauaagguguuu

SEQ ID NO: 1248520 - RNA, 19 nt, Homo sapiens
  misc_RNA (1)...(19): siRNA sense strand
gaagcagacagcaugaaga

SEQ ID NO: 1248521 - RNA, 19 nt, Homo sapiens
  misc_RNA (1)...(19): siRNA sense strand
ucagaucuauugucggaau

SEQ ID NO: 1248522 - RNA, 19 nt, Homo sapiens
  misc_RNA (1)...(19): siRNA sense strand
gaugaucgcgcugcagaaa

SEQ ID NO: 1248523 - RNA, 19 nt, Homo sapiens
  misc_RNA (1)...(19): siRNA sense strand
ggagugcucaucuggaaga

SEQ ID NO: 1248524 - RNA, 19 nt, Homo sapiens
  misc_RNA (1)...(19): siRNA sense strand
ggacaucugcuggugcauu

SEQ ID NO: 1248525 - RNA, 19 nt, Homo sapiens
  misc_RNA (1)...(19): siRNA sense strand
ggaagauucgcgacuacaa

SEQ ID NO: 1248526 - RNA, 19 nt, Homo sapiens
  misc_RNA (1)...(19): siRNA sense strand
gcagaaugaaaguguagaa

SEQ ID NO: 1248527 - RNA, 19 nt, Homo sapiens
  misc_RNA (1)...(19): siRNA sense strand
uggagaaggcguguaaaua

SEQ ID NO: 1248528 - RNA, 19 nt, Homo sapiens
  misc_RNA (1)...(19): siRNA sense strand
gucaagagagcaucguuaa

SEQ ID NO: 1248529 - RNA, 19 nt, Homo sapiens
  misc_RNA (1)...(19): siRNA sense strand
ggagaccgccagcuacaau

SEQ ID NO: 1248530 - RNA, 19 nt, Homo sapiens
  misc_RNA (1)...(19): siRNA sense strand
gagccggcaugaccagaug

SEQ ID NO: 1248531 - RNA, 19 nt, Homo sapiens
  misc_RNA (1)...(19): siRNA sense strand
gaucuauugucggaaugaa

SEQ ID NO: 1248532 - RNA, 19 nt, Homo sapiens
  misc_RNA (1)...(19): siRNA sense strand
aaaaggaaaugcuucgaaa

SEQ ID NO: 1248533 - RNA, 19 nt, Homo sapiens
  misc_RNA (1)...(19): siRNA sense strand
ugaagaccguggaggacaa

SEQ ID NO: 1248534 - RNA, 19 nt, Homo sapiens
  misc_RNA (1)...(19): siRNA sense strand
ccacuggagagaugaauau

SEQ ID NO: 1248535 - RNA, 19 nt, Homo sapiens
  misc_RNA (1)...(19): siRNA sense strand
ggaagcagacagcaugaag

SEQ ID NO: 1248536 - RNA, 19 nt, Homo sapiens
  misc_RNA (1)...(19): siRNA sense strand
gaagauucgcgacuacaag

SEQ ID NO: 1248537 - RNA, 19 nt, Homo sapiens
  misc_RNA (1)...(19): siRNA sense strand
ucauuuacagcgagugaua

SEQ ID NO: 1248538 - RNA, 19 nt, Homo sapiens
  misc_RNA (1)...(19): siRNA sense strand
agagcaucguuaaagauaa

SEQ ID NO: 1248539 - RNA, 19 nt, Homo sapiens
  misc_RNA (1)...(19): siRNA sense strand
agaauaugaugcccugcuu

SEQ ID NO: 1248540 - RNA, 19 nt, Homo sapiens
  misc_RNA (1)...(19): siRNA sense strand
ugaucgcgcugcagaaaca

SEQ ID NO: 1248541 - RNA, 19 nt, Homo sapiens
  misc_RNA (1)...(19): siRNA sense strand
gagaaggcguguaaauacc

SEQ ID NO: 1248542 - RNA, 19 nt, Homo sapiens
  misc_RNA (1)...(19): siRNA sense strand
gaaugaaagcagagguugu

SEQ ID NO: 1248543 - RNA, 19 nt, Homo sapiens
  misc_RNA (1)...(19): siRNA sense strand
gcccaaacuguucuagaaa

SEQ ID NO: 1248544 - RNA, 19 nt, Homo sapiens
  misc_RNA (1)...(19): siRNA sense strand
aaacaagagcauacaaagu

SEQ ID NO: 1248545 - RNA, 19 nt, Homo sapiens
  misc_RNA (1)...(19): siRNA sense strand
caucugcuggugcauuuaa

SEQ ID NO: 1248546 - RNA, 19 nt, Homo sapiens
  misc_RNA (1)...(19): siRNA sense strand
guugcagaaugaaagugua

SEQ ID NO: 1248547 - RNA, 19 nt, Homo sapiens
  misc_RNA (1)...(19): siRNA sense strand
gaagcaggaggccgucaug

SEQ ID NO: 1248548 - RNA, 19 nt, Homo sapiens
  misc_RNA (1)...(19): siRNA sense strand
aaagauaagguguuuaagg

SEQ ID NO: 1248549 - RNA, 19 nt, Homo sapiens
  misc_RNA (1)...(19): siRNA sense strand
ggaggacaaguacaagugu

SEQ ID NO: 1248550 - RNA, 19 nt, Homo sapiens
  misc_RNA (1)...(19): siRNA sense strand
agagucagguuccgaugau

SEQ ID NO: 1248551 - RNA, 19 nt, Homo sapiens
  misc_RNA (1)...(19): siRNA sense strand
ugucaagagagcaucguua

SEQ ID NO: 1248552 - RNA, 19 nt, Homo sapiens
  misc_RNA (1)...(19): siRNA sense strand
cugcuuccuuggccguuua

SEQ ID NO: 1248553 - RNA, 19 nt, Homo sapiens
  misc_RNA (1)...(19): siRNA sense strand
cugguuacuuuggcuauaa

SEQ ID NO: 1248554 - RNA, 19 nt, Homo sapiens
  misc_RNA (1)...(19): siRNA sense strand
ucuggaagauucgcgacua

SEQ ID NO: 1248555 - RNA, 19 nt, Homo sapiens
  misc_RNA (1)...(19): siRNA sense strand
ucaagagagcaucguuaaa

SEQ ID NO: 1248556 - RNA, 19 nt, Homo sapiens
  misc_RNA (1)...(19): siRNA sense strand
gggacaaaccagcagauca

SEQ ID NO: 1248557 - RNA, 19 nt, Homo sapiens
  misc_RNA (1)...(19): siRNA sense strand
acaaucagauauguagcuu

SEQ ID NO: 1248558 - RNA, 19 nt, Homo sapiens
  misc_RNA (1)...(19): siRNA sense strand
caacagcagcagcuucaag

SEQ ID NO: 1248559 - RNA, 19 nt, Homo sapiens
  misc_RNA (1)...(19): siRNA sense strand
cgacgucauuugggagaug

SEQ ID NO: 1248560 - RNA, 19 nt, Homo sapiens
  misc_RNA (1)...(19): siRNA sense strand
agacagccaagcagagaaa

SEQ ID NO: 1248561 - RNA, 19 nt, Homo sapiens
  misc_RNA (1)...(19): siRNA sense strand
gaggaagcagacagcauga

SEQ ID NO: 1248562 - RNA, 19 nt, Homo sapiens
  misc_RNA (1)...(19): siRNA sense strand
ugacacucaugcugaugga

SEQ ID NO: 1248563 - RNA, 19 nt, Homo sapiens
  misc_RNA (1)...(19): siRNA sense strand
acaauggagugcucaucug

SEQ ID NO: 1248564 - RNA, 19 nt, Homo sapiens
  misc_RNA (1)...(19): siRNA sense strand
cagaaugaaaguguagaaa

SEQ ID NO: 1248565 - RNA, 19 nt, Homo sapiens
  misc_RNA (1)...(19): siRNA sense strand
guggagaaggcguguaaau

SEQ ID NO: 1248566 - RNA, 19 nt, Homo sapiens
  misc_RNA (1)...(19): siRNA sense strand
uacuuuggcuauaagaugu

SEQ ID NO: 1248567 - RNA, 19 nt, Homo sapiens
  misc_RNA (1)...(19): siRNA sense strand
acacgaagacaccgacugu

SEQ ID NO: 1248568 - RNA, 19 nt, Homo sapiens
  misc_RNA (1)...(19): siRNA sense strand
aagcagagaaacugaagga

SEQ ID NO: 1248569 - RNA, 19 nt, Homo sapiens
  misc_RNA (1)...(19): siRNA sense strand
cagccagccuuucuacacu

SEQ ID NO: 1248570 - RNA, 19 nt, Homo sapiens
  misc_RNA (1)...(19): siRNA sense strand
uuacuuuggcuauaagaug

SEQ ID NO: 1248571 - RNA, 19 nt, Homo sapiens
  misc_RNA (1)...(19): siRNA sense strand
cagccuuucuacacugguu

SEQ ID NO: 1248572 - RNA, 19 nt, Homo sapiens
  misc_RNA (1)...(19): siRNA sense strand
gacaaguacaagugugaga

SEQ ID NO: 1248573 - RNA, 19 nt, Homo sapiens
  misc_RNA (1)...(19): siRNA sense strand
uuugggagaugcauucaag

SEQ ID NO: 1248574 - RNA, 19 nt, Homo sapiens
  misc_RNA (1)...(19): siRNA sense strand
uaugaugcccugcuuccuu

SEQ ID NO: 1248575 - RNA, 19 nt, Homo sapiens
  misc_RNA (1)...(19): siRNA sense strand
uuacagcgagugauagaca

SEQ ID NO: 1248576 - RNA, 19 nt, Homo sapiens
  misc_RNA (1)...(19): siRNA sense strand
uuaaagucauaguggauac

SEQ ID NO: 1248577 - RNA, 19 nt, Homo sapiens
  misc_RNA (1)...(19): siRNA sense strand
ccaaacuguucuagaaaau

SEQ ID NO: 1248578 - RNA, 19 nt, Homo sapiens
  misc_RNA (1)...(19): siRNA sense strand
auggagugcucaucuggaa

SEQ ID NO: 1248579 - RNA, 19 nt, Homo sapiens
  misc_RNA (1)...(19): siRNA sense strand
ugaacaaggagguuacaag

SEQ ID NO: 1248580 - RNA, 19 nt, Homo sapiens
  misc_RNA (1)...(19): siRNA sense strand
uguacagcgugucaagaga

SEQ ID NO: 1248581 - RNA, 19 nt, Homo sapiens
  misc_RNA (1)...(19): siRNA sense strand
aaaggaaaugcuucgaaau

SEQ ID NO: 1248582 - RNA, 19 nt, Homo sapiens
  misc_RNA (1)...(19): siRNA sense strand
cagauauguagcuuugaaa

SEQ ID NO: 1248583 - RNA, 19 nt, Homo sapiens
  misc_RNA (1)...(19): siRNA sense strand
aaaguuugcacaaucagau

SEQ ID NO: 1248584 - RNA, 19 nt, Homo sapiens
  misc_RNA (1)...(19): siRNA sense strand
gcacgucaaccugcugaag

SEQ ID NO: 1248585 - RNA, 19 nt, Homo sapiens
  misc_RNA (1)...(19): siRNA sense strand
caaguacaagugugagaag

SEQ ID NO: 1248586 - RNA, 19 nt, Homo sapiens
  misc_RNA (1)...(19): siRNA sense strand
gagguugugcagagcaguu

SEQ ID NO: 1248587 - RNA, 19 nt, Homo sapiens
  misc_RNA (1)...(19): siRNA sense strand
caaaaggaaaugcuucgaa

SEQ ID NO: 1248588 - RNA, 19 nt, Homo sapiens
  misc_RNA (1)...(19): siRNA sense strand
gauaagguguuuaaggaua

SEQ ID NO: 1248589 - RNA, 19 nt, Homo sapiens
  misc_RNA (1)...(19): siRNA sense strand
ggaaaugcuucgaaauaau

SEQ ID NO: 1248590 - RNA, 19 nt, Homo sapiens
  misc_RNA (1)...(19): siRNA sense strand
gagagcaucguuaaagaua

SEQ ID NO: 1248591 - RNA, 19 nt, Homo sapiens
  misc_RNA (1)...(19): siRNA sense strand
acaaggagguuacaaggaa

SEQ ID NO: 1248592 - RNA, 19 nt, Homo sapiens
  misc_RNA (1)...(19): siRNA sense strand
caucaugcguggagaauau

SEQ ID NO: 1248593 - RNA, 19 nt, Homo sapiens
  misc_RNA (1)...(19): siRNA sense strand
gaaaugcuucgaaauaaug

SEQ ID NO: 1248594 - RNA, 19 nt, Homo sapiens
  misc_RNA (1)...(19): siRNA sense strand
ggacaaaccagcagaucaa

SEQ ID NO: 1248595 - RNA, 19 nt, Homo sapiens
  misc_RNA (1)...(19): siRNA sense strand
gcaaguggcucggaacaca

SEQ ID NO: 1248596 - RNA, 19 nt, Homo sapiens
  misc_RNA (1)...(19): siRNA sense strand
aagauaagguguuuaagga

SEQ ID NO: 1248597 - RNA, 19 nt, Homo sapiens
  misc_RNA (1)...(19): siRNA sense strand
gacaucugcuggugcauuu

SEQ ID NO: 1248598 - RNA, 19 nt, Homo sapiens
  misc_RNA (1)...(19): siRNA sense strand
gaaaaggucuugaggaaag

SEQ ID NO: 1248599 - RNA, 19 nt, Homo sapiens
  misc_RNA (1)...(19): siRNA sense strand
ggcccaaacuguucuagaa

SEQ ID NO: 1248600 - RNA, 19 nt, Homo sapiens
  misc_RNA (1)...(19): siRNA sense strand
ggagaaggcguguaaauac

SEQ ID NO: 1248601 - RNA, 19 nt, Homo sapiens
  misc_RNA (1)...(19): siRNA sense strand
aaucagauauguagcuuug

SEQ ID NO: 1248602 - RNA, 19 nt, Homo sapiens
  misc_RNA (1)...(19): siRNA sense strand
gcaacucgcucgaaaagaa

SEQ ID NO: 1248603 - RNA, 19 nt, Homo sapiens
  misc_RNA (1)...(19): siRNA sense strand
ucagauauguagcuuugaa

SEQ ID NO: 1248604 - RNA, 19 nt, Homo sapiens
  misc_RNA (1)...(19): siRNA sense strand
aaggaaaugcuucgaaaua

SEQ ID NO: 1248605 - RNA, 19 nt, Homo sapiens
  misc_RNA (1)...(19): siRNA sense strand
gaagcccacuggagagaug

SEQ ID NO: 1248606 - RNA, 19 nt, Homo sapiens
  misc_RNA (1)...(19): siRNA sense strand
aggaaaugcuucgaaauaa

SEQ ID NO: 1248607 - RNA, 19 nt, Homo sapiens
  misc_RNA (1)...(19): siRNA sense strand
acaagagcauacaaaguuu

SEQ ID NO: 1248608 - RNA, 19 nt, Homo sapiens
  misc_RNA (1)...(19): siRNA sense strand
gagcaucguuaaagauaag

SEQ ID NO: 1248609 - RNA, 19 nt, Homo sapiens
  misc_RNA (1)...(19): siRNA sense strand
cgcuaaagcugcacacuga

SEQ ID NO: 1248610 - RNA, 19 nt, Homo sapiens
  misc_RNA (1)...(19): siRNA sense strand
uuucuacacugguuacuuu

SEQ ID NO: 1248611 - RNA, 19 nt, Homo sapiens
  misc_RNA (1)...(19): siRNA sense strand
caagagagcaucguuaaag

SEQ ID NO: 1248612 - RNA, 19 nt, Homo sapiens
  misc_RNA (1)...(19): siRNA sense strand
caaggagguuacaaggaaa

SEQ ID NO: 1248613 - RNA, 19 nt, Homo sapiens
  misc_RNA (1)...(19): siRNA sense strand
ggacgcacuugucgcuguu

SEQ ID NO: 1248614 - RNA, 19 nt, Homo sapiens
  misc_RNA (1)...(19): siRNA sense strand
aacaagagcauacaaaguu

SEQ ID NO: 1248615 - RNA, 19 nt, Homo sapiens
  misc_RNA (1)...(19): siRNA sense strand
cugcugagcucuucaaguc

SEQ ID NO: 1248616 - RNA, 19 nt, Homo sapiens
  misc_RNA (1)...(19): siRNA sense strand
aagagagcaucguuaaaga

SEQ ID NO: 1248617 - RNA, 19 nt, Homo sapiens
  misc_RNA (1)...(19): siRNA sense strand
cguccugacugcaaagaaa

SEQ ID NO: 1248618 - RNA, 19 nt, Homo sapiens
  misc_RNA (1)...(19): siRNA sense strand
cguuaaagauaagguguuu

SEQ ID NO: 1248619 - RNA, 19 nt, Homo sapiens
  misc_RNA (1)...(19): siRNA sense strand
gaagcagacagcaugaaga

SEQ ID NO: 1248620 - RNA, 19 nt, Homo sapiens
  misc_RNA (1)...(19): siRNA sense strand
ucagaucuauugucggaau

SEQ ID NO: 1248621 - RNA, 19 nt, Homo sapiens
  misc_RNA (1)...(19): siRNA sense strand
gaugaucgcgcugcagaaa

SEQ ID NO: 1248622 - RNA, 19 nt, Homo sapiens
  misc_RNA (1)...(19): siRNA sense strand
ggagugcucaucuggaaga

SEQ ID NO: 1248623 - RNA, 19 nt, Homo sapiens
  misc_RNA (1)...(19): siRNA sense strand
ggacaucugcuggugcauu

SEQ ID NO: 1248624 - RNA, 19 nt, Homo sapiens
  misc_RNA (1)...(19): siRNA sense strand
ggaagauucgcgacuacaa

SEQ ID NO: 1248625 - RNA, 19 nt, Homo sapiens
  misc_RNA (1)...(19): siRNA sense strand
gcagaaugaaaguguagaa

SEQ ID NO: 1248626 - RNA, 19 nt, Homo sapiens
  misc_RNA (1)...(19): siRNA sense strand
uggagaaggcguguaaaua

SEQ ID NO: 1248627 - RNA, 19 nt, Homo sapiens
  misc_RNA (1)...(19): siRNA sense strand
gucaagagagcaucguuaa

SEQ ID NO: 1248628 - RNA, 19 nt, Homo sapiens
  misc_RNA (1)...(19): siRNA sense strand
ggagaccgccagcuacaau

SEQ ID NO: 1248629 - RNA, 19 nt, Homo sapiens
  misc_RNA (1)...(19): siRNA sense strand
gagccggcaugaccagaug

SEQ ID NO: 1248630 - RNA, 19 nt, Homo sapiens
  misc_RNA (1)...(19): siRNA sense strand
gaucuauugucggaaugaa

SEQ ID NO: 1248631 - RNA, 19 nt, Homo sapiens
  misc_RNA (1)...(19): siRNA sense strand
aaaaggaaaugcuucgaaa

SEQ ID NO: 1248632 - RNA, 19 nt, Homo sapiens
  misc_RNA (1)...(19): siRNA sense strand
ugaagaccguggaggacaa

SEQ ID NO: 1248633 - RNA, 19 nt, Homo sapiens
  misc_RNA (1)...(19): siRNA sense strand
ccacuggagagaugaauau

SEQ ID NO: 1248634 - RNA, 19 nt, Homo sapiens
  misc_RNA (1)...(19): siRNA sense strand
ggaagcagacagcaugaag

SEQ ID NO: 1248635 - RNA, 19 nt, Homo sapiens
  misc_RNA (1)...(19): siRNA sense strand
gaagauucgcgacuacaag

SEQ ID NO: 1248636 - RNA, 19 nt, Homo sapiens
  misc_RNA (1)...(19): siRNA sense strand
ucauuuacagcgagugaua

SEQ ID NO: 1248637 - RNA, 19 nt, Homo sapiens
  misc_RNA (1)...(19): siRNA sense strand
agagcaucguuaaagauaa

SEQ ID NO: 1248638 - RNA, 19 nt, Homo sapiens
  misc_RNA (1)...(19): siRNA sense strand
agaauaugaugcccugcuu

SEQ ID NO: 1248639 - RNA, 19 nt, Homo sapiens
  misc_RNA (1)...(19): siRNA sense strand
ugaucgcgcugcagaaaca

SEQ ID NO: 1248640 - RNA, 19 nt, Homo sapiens
  misc_RNA (1)...(19): siRNA sense strand
gagaaggcguguaaauacc

SEQ ID NO: 1248641 - RNA, 19 nt, Homo sapiens
  misc_RNA (1)...(19): siRNA sense strand
gaaugaaagcagagguugu

SEQ ID NO: 1248642 - RNA, 19 nt, Homo sapiens
  misc_RNA (1)...(19): siRNA sense strand
gcccaaacuguucuagaaa

SEQ ID NO: 1248643 - RNA, 19 nt, Homo sapiens
  misc_RNA (1)...(19): siRNA sense strand
aaacaagagcauacaaagu

SEQ ID NO: 1248644 - RNA, 19 nt, Homo sapiens
  misc_RNA (1)...(19): siRNA sense strand
caucugcuggugcauuuaa

SEQ ID NO: 1248645 - RNA, 19 nt, Homo sapiens
  misc_RNA (1)...(19): siRNA sense strand
guugcagaaugaaagugua

SEQ ID NO: 1248646 - RNA, 19 nt, Homo sapiens
  misc_RNA (1)...(19): siRNA sense strand
gaagcaggaggccgucaug

SEQ ID NO: 1248647 - RNA, 19 nt, Homo sapiens
  misc_RNA (1)...(19): siRNA sense strand
aaagauaagguguuuaagg

SEQ ID NO: 1248648 - RNA, 19 nt, Homo sapiens
  misc_RNA (1)...(19): siRNA sense strand
ggaggacaaguacaagugu

SEQ ID NO: 1248649 - RNA, 19 nt, Homo sapiens
  misc_RNA (1)...(19): siRNA sense strand
agagucagguuccgaugau

SEQ ID NO: 1248650 - RNA, 19 nt, Homo sapiens
  misc_RNA (1)...(19): siRNA sense strand
ugucaagagagcaucguua

SEQ ID NO: 1248651 - RNA, 19 nt, Homo sapiens
  misc_RNA (1)...(19): siRNA sense strand
cugcuuccuuggccguuua

SEQ ID NO: 1248652 - RNA, 19 nt, Homo sapiens
  misc_RNA (1)...(19): siRNA sense strand
cugguuacuuuggcuauaa

SEQ ID NO: 1248653 - RNA, 19 nt, Homo sapiens
  misc_RNA (1)...(19): siRNA sense strand
ucuggaagauucgcgacua

SEQ ID NO: 1248654 - RNA, 19 nt, Homo sapiens
  misc_RNA (1)...(19): siRNA sense strand
ucaagagagcaucguuaaa

SEQ ID NO: 1248655 - RNA, 19 nt, Homo sapiens
  misc_RNA (1)...(19): siRNA sense strand
gggacaaaccagcagauca

SEQ ID NO: 1248656 - RNA, 19 nt, Homo sapiens
  misc_RNA (1)...(19): siRNA sense strand
acaaucagauauguagcuu

SEQ ID NO: 1248657 - RNA, 19 nt, Homo sapiens
  misc_RNA (1)...(19): siRNA sense strand
caacagcagcagcuucaag

SEQ ID NO: 1248658 - RNA, 19 nt, Homo sapiens
  misc_RNA (1)...(19): siRNA sense strand
cgacgucauuugggagaug

SEQ ID NO: 1248659 - RNA, 19 nt, Homo sapiens
  misc_RNA (1)...(19): siRNA sense strand
agacagccaagcagagaaa

SEQ ID NO: 1248660 - RNA, 19 nt, Homo sapiens
  misc_RNA (1)...(19): siRNA sense strand
gaggaagcagacagcauga

SEQ ID NO: 1248661 - RNA, 19 nt, Homo sapiens
  misc_RNA (1)...(19): siRNA sense strand
ugacacucaugcugaugga

SEQ ID NO: 1248662 - RNA, 19 nt, Homo sapiens
  misc_RNA (1)...(19): siRNA sense strand
acaauggagugcucaucug

SEQ ID NO: 1248663 - RNA, 19 nt, Homo sapiens
  misc_RNA (1)...(19): siRNA sense strand
cagaaugaaaguguagaaa

SEQ ID NO: 1248664 - RNA, 19 nt, Homo sapiens
  misc_RNA (1)...(19): siRNA sense strand
guggagaaggcguguaaau

SEQ ID NO: 1248665 - RNA, 19 nt, Homo sapiens
  misc_RNA (1)...(19): siRNA sense strand
uacuuuggcuauaagaugu

SEQ ID NO: 1248666 - RNA, 19 nt, Homo sapiens
  misc_RNA (1)...(19): siRNA sense strand
acacgaagacaccgacugu

SEQ ID NO: 1248667 - RNA, 19 nt, Homo sapiens
  misc_RNA (1)...(19): siRNA sense strand
aagcagagaaacugaagga

SEQ ID NO: 1248668 - RNA, 19 nt, Homo sapiens
  misc_RNA (1)...(19): siRNA sense strand
cagccagccuuucuacacu

SEQ ID NO: 1248669 - RNA, 19 nt, Homo sapiens
  misc_RNA (1)...(19): siRNA sense strand
uuacuuuggcuauaagaug

SEQ ID NO: 1248670 - RNA, 19 nt, Homo sapiens
  misc_RNA (1)...(19): siRNA sense strand
cagccuuucuacacugguu

SEQ ID NO: 1248671 - RNA, 19 nt, Homo sapiens
  misc_RNA (1)...(19): siRNA sense strand
gacaaguacaagugugaga

SEQ ID NO: 1248672 - RNA, 19 nt, Homo sapiens
  misc_RNA (1)...(19): siRNA sense strand
uuugggagaugcauucaag

SEQ ID NO: 1248673 - RNA, 19 nt, Homo sapiens
  misc_RNA (1)...(19): siRNA sense strand
uaugaugcccugcuuccuu

SEQ ID NO: 1248674 - RNA, 19 nt, Homo sapiens
  misc_RNA (1)...(19): siRNA sense strand
uuacagcgagugauagaca

SEQ ID NO: 1248675 - RNA, 19 nt, Homo sapiens
  misc_RNA (1)...(19): siRNA sense strand
uuaaagucauaguggauac

SEQ ID NO: 1248676 - RNA, 19 nt, Homo sapiens
  misc_RNA (1)...(19): siRNA sense strand
ccaaacuguucuagaaaau

SEQ ID NO: 1248677 - RNA, 19 nt, Homo sapiens
  misc_RNA (1)...(19): siRNA sense strand
auggagugcucaucuggaa

SEQ ID NO: 1248678 - RNA, 19 nt, Homo sapiens
  misc_RNA (1)...(19): siRNA sense strand
ugaacaaggagguuacaag

SEQ ID NO: 1248679 - RNA, 19 nt, Homo sapiens
  misc_RNA (1)...(19): siRNA sense strand
uguacagcgugucaagaga

SEQ ID NO: 1248680 - RNA, 19 nt, Homo sapiens
  misc_RNA (1)...(19): siRNA sense strand
aaaggaaaugcuucgaaau

SEQ ID NO: 1248681 - RNA, 19 nt, Homo sapiens
  misc_RNA (1)...(19): siRNA sense strand
cagauauguagcuuugaaa

SEQ ID NO: 1248682 - RNA, 19 nt, Homo sapiens
  misc_RNA (1)...(19): siRNA sense strand
aaaguuugcacaaucagau

SEQ ID NO: 1248683 - RNA, 19 nt, Homo sapiens
  misc_RNA (1)...(19): siRNA sense strand
gcacgucaaccugcugaag

SEQ ID NO: 1248684 - RNA, 19 nt, Homo sapiens
  misc_RNA (1)...(19): siRNA sense strand
caaguacaagugugagaag

SEQ ID NO: 1248685 - RNA, 19 nt, Homo sapiens
  misc_RNA (1)...(19): siRNA sense strand
gagguugugcagagcaguu

SEQ ID NO: 1248686 - RNA, 19 nt, Homo sapiens
  misc_RNA (1)...(19): siRNA sense strand
caaaaggaaaugcuucgaa

SEQ ID NO: 1248687 - RNA, 19 nt, Homo sapiens
  misc_RNA (1)...(19): siRNA sense strand
gauaagguguuuaaggaua

SEQ ID NO: 1248688 - RNA, 19 nt, Homo sapiens
  misc_RNA (1)...(19): siRNA sense strand
ggaaaugcuucgaaauaau

SEQ ID NO: 1248689 - RNA, 19 nt, Homo sapiens
  misc_RNA (1)...(19): siRNA sense strand
gagagcaucguuaaagaua

SEQ ID NO: 1248690 - RNA, 19 nt, Homo sapiens
  misc_RNA (1)...(19): siRNA sense strand
acaaggagguuacaaggaa

SEQ ID NO: 1248691 - RNA, 19 nt, Homo sapiens
  misc_RNA (1)...(19): siRNA sense strand
caucaugcguggagaauau

SEQ ID NO: 1248692 - RNA, 19 nt, Homo sapiens
  misc_RNA (1)...(19): siRNA sense strand
gaaaugcuucgaaauaaug

SEQ ID NO: 1248693 - RNA, 19 nt, Homo sapiens
  misc_RNA (1)...(19): siRNA sense strand
ggacaaaccagcagaucaa

SEQ ID NO: 1248694 - RNA, 19 nt, Homo sapiens
  misc_RNA (1)...(19): siRNA sense strand
gcaaguggcucggaacaca

SEQ ID NO: 1248695 - RNA, 19 nt, Homo sapiens
  misc_RNA (1)...(19): siRNA sense strand
aagauaagguguuuaagga

SEQ ID NO: 1248696 - RNA, 19 nt, Homo sapiens
  misc_RNA (1)...(19): siRNA sense strand
gacaucugcuggugcauuu

SEQ ID NO: 1248697 - RNA, 19 nt, Homo sapiens
  misc_RNA (1)...(19): siRNA sense strand
gaaaaggucuugaggaaag

SEQ ID NO: 1248698 - RNA, 19 nt, Homo sapiens
  misc_RNA (1)...(19): siRNA sense strand
ggcccaaacuguucuagaa

SEQ ID NO: 1248699 - RNA, 19 nt, Homo sapiens
  misc_RNA (1)...(19): siRNA sense strand
ggagaaggcguguaaauac

SEQ ID NO: 1248700 - RNA, 19 nt, Homo sapiens
  misc_RNA (1)...(19): siRNA sense strand
aaucagauauguagcuuug

SEQ ID NO: 1248701 - RNA, 19 nt, Homo sapiens
  misc_RNA (1)...(19): siRNA sense strand
gcaacucgcucgaaaagaa

SEQ ID NO: 1248702 - RNA, 19 nt, Homo sapiens
  misc_RNA (1)...(19): siRNA sense strand
ucagauauguagcuuugaa

SEQ ID NO: 1248703 - RNA, 19 nt, Homo sapiens
  misc_RNA (1)...(19): siRNA sense strand
aaggaaaugcuucgaaaua

SEQ ID NO: 1248704 - RNA, 19 nt, Homo sapiens
  misc_RNA (1)...(19): siRNA sense strand
gaagcccacuggagagaug

SEQ ID NO: 1248705 - RNA, 19 nt, Homo sapiens
  misc_RNA (1)...(19): siRNA sense strand
aggaaaugcuucgaaauaa

SEQ ID NO: 1248706 - RNA, 19 nt, Homo sapiens
  misc_RNA (1)...(19): siRNA sense strand
acaagagcauacaaaguuu

SEQ ID NO: 1248707 - RNA, 19 nt, Homo sapiens
  misc_RNA (1)...(19): siRNA sense strand
gagcaucguuaaagauaag

SEQ ID NO: 1248708 - RNA, 19 nt, Homo sapiens
  misc_RNA (1)...(19): siRNA sense strand
cgcuaaagcugcacacuga

SEQ ID NO: 1248709 - RNA, 19 nt, Homo sapiens
  misc_RNA (1)...(19): siRNA sense strand
uuucuacacugguuacuuu

SEQ ID NO: 1248710 - RNA, 19 nt, Homo sapiens
  misc_RNA (1)...(19): siRNA sense strand
caagagagcaucguuaaag

SEQ ID NO: 1248711 - RNA, 19 nt, Homo sapiens
  misc_RNA (1)...(19): siRNA sense strand
caaggagguuacaaggaaa

SEQ ID NO: 1248712 - RNA, 19 nt, Homo sapiens
  misc_RNA (1)...(19): siRNA sense strand
ggacgcacuugucgcuguu

SEQ ID NO: 1248713 - RNA, 19 nt, Homo sapiens
  misc_RNA (1)...(19): siRNA sense strand
aacaagagcauacaaaguu

SEQ ID NO: 1248714 - RNA, 19 nt, Homo sapiens
  misc_RNA (1)...(19): siRNA sense strand
cugcugagcucuucaaguc

SEQ ID NO: 1248715 - RNA, 19 nt, Homo sapiens
  misc_RNA (1)...(19): siRNA sense strand
aagagagcaucguuaaaga

SEQ ID NO: 1248716 - RNA, 19 nt, Homo sapiens
  misc_RNA (1)...(19): siRNA sense strand
cguccugacugcaaagaaa

SEQ ID NO: 1248717 - RNA, 19 nt, Homo sapiens
  misc_RNA (1)...(19): siRNA sense strand
cguuaaagauaagguguuu

SEQ ID NO: 1248718 - RNA, 19 nt, Homo sapiens
  misc_RNA (1)...(19): siRNA sense strand
gaagcagacagcaugaaga

SEQ ID NO: 1248719 - RNA, 19 nt, Homo sapiens
  misc_RNA (1)...(19): siRNA sense strand
ucagaucuauugucggaau

SEQ ID NO: 1248720 - RNA, 19 nt, Homo sapiens
  misc_RNA (1)...(19): siRNA sense strand
gaugaucgcgcugcagaaa

SEQ ID NO: 1248721 - RNA, 19 nt, Homo sapiens
  misc_RNA (1)...(19): siRNA sense strand
ggagugcucaucuggaaga

SEQ ID NO: 1248722 - RNA, 19 nt, Homo sapiens
  misc_RNA (1)...(19): siRNA sense strand
ggacaucugcuggugcauu

SEQ ID NO: 1248723 - RNA, 19 nt, Homo sapiens
  misc_RNA (1)...(19): siRNA sense strand
ggaagauucgcgacuacaa

SEQ ID NO: 1248724 - RNA, 19 nt, Homo sapiens
  misc_RNA (1)...(19): siRNA sense strand
gcagaaugaaaguguagaa

SEQ ID NO: 1248725 - RNA, 19 nt, Homo sapiens
  misc_RNA (1)...(19): siRNA sense strand
uggagaaggcguguaaaua

SEQ ID NO: 1248726 - RNA, 19 nt, Homo sapiens
  misc_RNA (1)...(19): siRNA sense strand
gucaagagagcaucguuaa

SEQ ID NO: 1248727 - RNA, 19 nt, Homo sapiens
  misc_RNA (1)...(19): siRNA sense strand
ggagaccgccagcuacaau

SEQ ID NO: 1248728 - RNA, 19 nt, Homo sapiens
  misc_RNA (1)...(19): siRNA sense strand
gagccggcaugaccagaug

SEQ ID NO: 1248729 - RNA, 19 nt, Homo sapiens
  misc_RNA (1)...(19): siRNA sense strand
gaucuauugucggaaugaa

SEQ ID NO: 1248730 - RNA, 19 nt, Homo sapiens
  misc_RNA (1)...(19): siRNA sense strand
aaaaggaaaugcuucgaaa

SEQ ID NO: 1248731 - RNA, 19 nt, Homo sapiens
  misc_RNA (1)...(19): siRNA sense strand
ugaagaccguggaggacaa

SEQ ID NO: 1248732 - RNA, 19 nt, Homo sapiens
  misc_RNA (1)...(19): siRNA sense strand
ccacuggagagaugaauau

SEQ ID NO: 1248733 - RNA, 19 nt, Homo sapiens
  misc_RNA (1)...(19): siRNA sense strand
ggaagcagacagcaugaag

SEQ ID NO: 1248734 - RNA, 19 nt, Homo sapiens
  misc_RNA (1)...(19): siRNA sense strand
gaagauucgcgacuacaag

SEQ ID NO: 1248735 - RNA, 19 nt, Homo sapiens
  misc_RNA (1)...(19): siRNA sense strand
ucauuuacagcgagugaua

SEQ ID NO: 1248736 - RNA, 19 nt, Homo sapiens
  misc_RNA (1)...(19): siRNA sense strand
agagcaucguuaaagauaa

SEQ ID NO: 1248737 - RNA, 19 nt, Homo sapiens
  misc_RNA (1)...(19): siRNA sense strand
agaauaugaugcccugcuu

SEQ ID NO: 1248738 - RNA, 19 nt, Homo sapiens
  misc_RNA (1)...(19): siRNA sense strand
ugaucgcgcugcagaaaca

SEQ ID NO: 1248739 - RNA, 19 nt, Homo sapiens
  misc_RNA (1)...(19): siRNA sense strand
gagaaggcguguaaauacc

SEQ ID NO: 1248740 - RNA, 19 nt, Homo sapiens
  misc_RNA (1)...(19): siRNA sense strand
gaaugaaagcagagguugu

SEQ ID NO: 1248741 - RNA, 19 nt, Homo sapiens
  misc_RNA (1)...(19): siRNA sense strand
gcccaaacuguucuagaaa

SEQ ID NO: 1248742 - RNA, 19 nt, Homo sapiens
  misc_RNA (1)...(19): siRNA sense strand
aaacaagagcauacaaagu

SEQ ID NO: 1248743 - RNA, 19 nt, Homo sapiens
  misc_RNA (1)...(19): siRNA sense strand
caucugcuggugcauuuaa

SEQ ID NO: 1248744 - RNA, 19 nt, Homo sapiens
  misc_RNA (1)...(19): siRNA sense strand
guugcagaaugaaagugua

SEQ ID NO: 1248745 - RNA, 19 nt, Homo sapiens
  misc_RNA (1)...(19): siRNA sense strand
gaagcaggaggccgucaug

SEQ ID NO: 1248746 - RNA, 19 nt, Homo sapiens
  misc_RNA (1)...(19): siRNA sense strand
aaagauaagguguuuaagg

SEQ ID NO: 1248747 - RNA, 19 nt, Homo sapiens
  misc_RNA (1)...(19): siRNA sense strand
ggaggacaaguacaagugu

SEQ ID NO: 1248748 - RNA, 19 nt, Homo sapiens
  misc_RNA (1)...(19): siRNA sense strand
agagucagguuccgaugau

SEQ ID NO: 1248749 - RNA, 19 nt, Homo sapiens
  misc_RNA (1)...(19): siRNA sense strand
ugucaagagagcaucguua

SEQ ID NO: 1248750 - RNA, 19 nt, Homo sapiens
  misc_RNA (1)...(19): siRNA sense strand
cugcuuccuuggccguuua

SEQ ID NO: 1248751 - RNA, 19 nt, Homo sapiens
  misc_RNA (1)...(19): siRNA sense strand
cugguuacuuuggcuauaa

SEQ ID NO: 1248752 - RNA, 19 nt, Homo sapiens
  misc_RNA (1)...(19): siRNA sense strand
ucuggaagauucgcgacua

SEQ ID NO: 1248753 - RNA, 19 nt, Homo sapiens
  misc_RNA (1)...(19): siRNA sense strand
ucaagagagcaucguuaaa

SEQ ID NO: 1248754 - RNA, 19 nt, Homo sapiens
  misc_RNA (1)...(19): siRNA sense strand
gggacaaaccagcagauca

SEQ ID NO: 1248755 - RNA, 19 nt, Homo sapiens
  misc_RNA (1)...(19): siRNA sense strand
acaaucagauauguagcuu

SEQ ID NO: 1248756 - RNA, 19 nt, Homo sapiens
  misc_RNA (1)...(19): siRNA sense strand
caacagcagcagcuucaag

SEQ ID NO: 1248757 - RNA, 19 nt, Homo sapiens
  misc_RNA (1)...(19): siRNA sense strand
cgacgucauuugggagaug

SEQ ID NO: 1248758 - RNA, 19 nt, Homo sapiens
  misc_RNA (1)...(19): siRNA sense strand
agacagccaagcagagaaa

SEQ ID NO: 1248759 - RNA, 19 nt, Homo sapiens
  misc_RNA (1)...(19): siRNA sense strand
gaggaagcagacagcauga

SEQ ID NO: 1248760 - RNA, 19 nt, Homo sapiens
  misc_RNA (1)...(19): siRNA sense strand
ugacacucaugcugaugga

SEQ ID NO: 1248761 - RNA, 19 nt, Homo sapiens
  misc_RNA (1)...(19): siRNA sense strand
acaauggagugcucaucug

SEQ ID NO: 1248762 - RNA, 19 nt, Homo sapiens
  misc_RNA (1)...(19): siRNA sense strand
cagaaugaaaguguagaaa

SEQ ID NO: 1248763 - RNA, 19 nt, Homo sapiens
  misc_RNA (1)...(19): siRNA sense strand
guggagaaggcguguaaau

SEQ ID NO: 1248764 - RNA, 19 nt, Homo sapiens
  misc_RNA (1)...(19): siRNA sense strand
uacuuuggcuauaagaugu

SEQ ID NO: 1248765 - RNA, 19 nt, Homo sapiens
  misc_RNA (1)...(19): siRNA sense strand
acacgaagacaccgacugu

SEQ ID NO: 1248766 - RNA, 19 nt, Homo sapiens
  misc_RNA (1)...(19): siRNA sense strand
aagcagagaaacugaagga

SEQ ID NO: 1248767 - RNA, 19 nt, Homo sapiens
  misc_RNA (1)...(19): siRNA sense strand
cagccagccuuucuacacu

SEQ ID NO: 1248768 - RNA, 19 nt, Homo sapiens
  misc_RNA (1)...(19): siRNA sense strand
uuacuuuggcuauaagaug

SEQ ID NO: 1248769 - RNA, 19 nt, Homo sapiens
  misc_RNA (1)...(19): siRNA sense strand
cagccuuucuacacugguu

SEQ ID NO: 1248770 - RNA, 19 nt, Homo sapiens
  misc_RNA (1)...(19): siRNA sense strand
gacaaguacaagugugaga

SEQ ID NO: 1248771 - RNA, 19 nt, Homo sapiens
  misc_RNA (1)...(19): siRNA sense strand
uuugggagaugcauucaag

SEQ ID NO: 1248772 - RNA, 19 nt, Homo sapiens
  misc_RNA (1)...(19): siRNA sense strand
uaugaugcccugcuuccuu

SEQ ID NO: 1248773 - RNA, 19 nt, Homo sapiens
  misc_RNA (1)...(19): siRNA sense strand
uuacagcgagugauagaca

SEQ ID NO: 1248774 - RNA, 19 nt, Homo sapiens
  misc_RNA (1)...(19): siRNA sense strand
uuaaagucauaguggauac

SEQ ID NO: 1248775 - RNA, 19 nt, Homo sapiens
  misc_RNA (1)...(19): siRNA sense strand
ccaaacuguucuagaaaau

SEQ ID NO: 1248776 - RNA, 19 nt, Homo sapiens
  misc_RNA (1)...(19): siRNA sense strand
auggagugcucaucuggaa

SEQ ID NO: 1248777 - RNA, 19 nt, Homo sapiens
  misc_RNA (1)...(19): siRNA sense strand
ugaacaaggagguuacaag

SEQ ID NO: 1248778 - RNA, 19 nt, Homo sapiens
  misc_RNA (1)...(19): siRNA sense strand
uguacagcgugucaagaga

SEQ ID NO: 1248779 - RNA, 19 nt, Homo sapiens
  misc_RNA (1)...(19): siRNA sense strand
aaaggaaaugcuucgaaau

SEQ ID NO: 1248780 - RNA, 19 nt, Homo sapiens
  misc_RNA (1)...(19): siRNA sense strand
cagauauguagcuuugaaa

SEQ ID NO: 1248781 - RNA, 19 nt, Homo sapiens
  misc_RNA (1)...(19): siRNA sense strand
aaaguuugcacaaucagau

SEQ ID NO: 1248782 - RNA, 19 nt, Homo sapiens
  misc_RNA (1)...(19): siRNA sense strand
gcacgucaaccugcugaag

SEQ ID NO: 1248783 - RNA, 19 nt, Homo sapiens
  misc_RNA (1)...(19): siRNA sense strand
caaguacaagugugagaag

SEQ ID NO: 1248784 - RNA, 19 nt, Homo sapiens
  misc_RNA (1)...(19): siRNA sense strand
gagguugugcagagcaguu

SEQ ID NO: 1248785 - RNA, 19 nt, Homo sapiens
  misc_RNA (1)...(19): siRNA sense strand
caaaaggaaaugcuucgaa

SEQ ID NO: 1248786 - RNA, 19 nt, Homo sapiens
  misc_RNA (1)...(19): siRNA sense strand
ggaagaaccugccaagcuu

SEQ ID NO: 1248787 - RNA, 19 nt, Homo sapiens
  misc_RNA (1)...(19): siRNA sense strand
gcacauacuucaccacugu

SEQ ID NO: 1248788 - RNA, 19 nt, Homo sapiens
  misc_RNA (1)...(19): siRNA sense strand
ccuagaggauucauucaua

SEQ ID NO: 1248789 - RNA, 19 nt, Homo sapiens
  misc_RNA (1)...(19): siRNA sense strand
cuacuucuguuauuucuga

SEQ ID NO: 1248790 - RNA, 19 nt, Homo sapiens
  misc_RNA (1)...(19): siRNA sense strand
gcaggcccuugguguuaua

SEQ ID NO: 1248791 - RNA, 19 nt, Homo sapiens
  misc_RNA (1)...(19): siRNA sense strand
caggagugcuaccacagua

SEQ ID NO: 1248792 - RNA, 19 nt, Homo sapiens
  misc_RNA (1)...(19): siRNA sense strand
gaggauucauucauacaag

SEQ ID NO: 1248793 - RNA, 19 nt, Homo sapiens
  misc_RNA (1)...(19): siRNA sense strand
gaaaaguacccaaaugaug

SEQ ID NO: 1248794 - RNA, 19 nt, Homo sapiens
  misc_RNA (1)...(19): siRNA sense strand
ccacaguaauggacagagu

SEQ ID NO: 1248795 - RNA, 19 nt, Homo sapiens
  misc_RNA (1)...(19): siRNA sense strand
cggcaggcccuugguguua

SEQ ID NO: 1248796 - RNA, 19 nt, Homo sapiens
  misc_RNA (1)...(19): siRNA sense strand
acaguaauggacagaguua

SEQ ID NO: 1248797 - RNA, 19 nt, Homo sapiens
  misc_RNA (1)...(19): siRNA sense strand
ccagaaaaguacccaaaug

SEQ ID NO: 1248798 - RNA, 19 nt, Homo sapiens
  misc_RNA (1)...(19): siRNA sense strand
ggagugcuaccacaguaau

SEQ ID NO: 1248799 - RNA, 19 nt, Homo sapiens
  misc_RNA (1)...(19): siRNA sense strand
guagaaccccagaaaagua

SEQ ID NO: 1248800 - RNA, 19 nt, Homo sapiens
  misc_RNA (1)...(19): siRNA sense strand
cuagaggauucauucauac

SEQ ID NO: 1248801 - RNA, 19 nt, Homo sapiens
  misc_RNA (1)...(19): siRNA sense strand
ggcaggcccuugguguuau

SEQ ID NO: 1248802 - RNA, 19 nt, Homo sapiens
  misc_RNA (1)...(19): siRNA sense strand
ccacaccagcacaguagaa

SEQ ID NO: 1248803 - RNA, 19 nt, Homo sapiens
  misc_RNA (1)...(19): siRNA sense strand
guuccaagccuagaggauu

SEQ ID NO: 1248804 - RNA, 19 nt, Homo sapiens
  misc_RNA (1)...(19): siRNA sense strand
guucgugccucugacuguu

SEQ ID NO: 1248805 - RNA, 19 nt, Homo sapiens
  misc_RNA (1)...(19): siRNA sense strand
caaaugauggcuugaucuc

SEQ ID NO: 1248806 - RNA, 19 nt, Homo sapiens
  misc_RNA (1)...(19): siRNA sense strand
guucuucuacuucuguuau

SEQ ID NO: 1248807 - RNA, 19 nt, Homo sapiens
  misc_RNA (1)...(19): siRNA sense strand
gcaggagugcuaccacagu

SEQ ID NO: 1248808 - RNA, 19 nt, Homo sapiens
  misc_RNA (1)...(19): siRNA sense strand
uaucgaggcacauacuuca

SEQ ID NO: 1248809 - RNA, 19 nt, Homo sapiens
  misc_RNA (1)...(19): siRNA sense strand
cccaaaugauggcuugauc

SEQ ID NO: 1248810 - RNA, 19 nt, Homo sapiens
  misc_RNA (1)...(19): siRNA sense strand
cagaaaaguacccaaauga

SEQ ID NO: 1248811 - RNA, 19 nt, Homo sapiens
  misc_RNA (1)...(19): siRNA sense strand
agaguuaucgaggcacaua

SEQ ID NO: 1248812 - RNA, 19 nt, Homo sapiens
  misc_RNA (1)...(19): siRNA sense strand
ggaacauaaggaagugguu

SEQ ID NO: 1248813 - RNA, 19 nt, Homo sapiens
  misc_RNA (1)...(19): siRNA sense strand
ggaguacugcaaccugaca

SEQ ID NO: 1248814 - RNA, 19 nt, Homo sapiens
  misc_RNA (1)...(19): siRNA sense strand
ucgaacuacugcaggaauc

SEQ ID NO: 1248815 - RNA, 19 nt, Homo sapiens
  misc_RNA (1)...(19): siRNA sense strand
ggauucauucauacaagug

SEQ ID NO: 1248816 - RNA, 19 nt, Homo sapiens
  misc_RNA (1)...(19): siRNA sense strand
ggcccuugguguuauacga

SEQ ID NO: 1248817 - RNA, 19 nt, Homo sapiens
  misc_RNA (1)...(19): siRNA sense strand
ggcuugaucucgaacuacu

SEQ ID NO: 1248818 - RNA, 19 nt, Homo sapiens
  misc_RNA (1)...(19): siRNA sense strand
guaauggacagaguuaucg

SEQ ID NO: 1248819 - RNA, 19 nt, Homo sapiens
  misc_RNA (1)...(19): siRNA sense strand
ggaagaaccugccaagcuu

SEQ ID NO: 1248820 - RNA, 19 nt, Homo sapiens
  misc_RNA (1)...(19): siRNA sense strand
gcacauacuucaccacugu

SEQ ID NO: 1248821 - RNA, 19 nt, Homo sapiens
  misc_RNA (1)...(19): siRNA sense strand
ccuagaggauucauucaua

SEQ ID NO: 1248822 - RNA, 19 nt, Homo sapiens
  misc_RNA (1)...(19): siRNA sense strand
cuacuucuguuauuucuga

SEQ ID NO: 1248823 - RNA, 19 nt, Homo sapiens
  misc_RNA (1)...(19): siRNA sense strand
gcaggcccuugguguuaua

SEQ ID NO: 1248824 - RNA, 19 nt, Homo sapiens
  misc_RNA (1)...(19): siRNA sense strand
caggagugcuaccacagua

SEQ ID NO: 1248825 - RNA, 19 nt, Homo sapiens
  misc_RNA (1)...(19): siRNA sense strand
gaggauucauucauacaag

SEQ ID NO: 1248826 - RNA, 19 nt, Homo sapiens
  misc_RNA (1)...(19): siRNA sense strand
gaaaaguacccaaaugaug

SEQ ID NO: 1248827 - RNA, 19 nt, Homo sapiens
  misc_RNA (1)...(19): siRNA sense strand
ccacaguaauggacagagu

SEQ ID NO: 1248828 - RNA, 19 nt, Homo sapiens
  misc_RNA (1)...(19): siRNA sense strand
cggcaggcccuugguguua

SEQ ID NO: 1248829 - RNA, 19 nt, Homo sapiens
  misc_RNA (1)...(19): siRNA sense strand
acaguaauggacagaguua

SEQ ID NO: 1248830 - RNA, 19 nt, Homo sapiens
  misc_RNA (1)...(19): siRNA sense strand
ccagaaaaguacccaaaug

SEQ ID NO: 1248831 - RNA, 19 nt, Homo sapiens
  misc_RNA (1)...(19): siRNA sense strand
ggagugcuaccacaguaau

SEQ ID NO: 1248832 - RNA, 19 nt, Homo sapiens
  misc_RNA (1)...(19): siRNA sense strand
guagaaccccagaaaagua

SEQ ID NO: 1248833 - RNA, 19 nt, Homo sapiens
  misc_RNA (1)...(19): siRNA sense strand
cuagaggauucauucauac

SEQ ID NO: 1248834 - RNA, 19 nt, Homo sapiens
  misc_RNA (1)...(19): siRNA sense strand
ggcaggcccuugguguuau

SEQ ID NO: 1248835 - RNA, 19 nt, Homo sapiens
  misc_RNA (1)...(19): siRNA sense strand
ccacaccagcacaguagaa

SEQ ID NO: 1248836 - RNA, 19 nt, Homo sapiens
  misc_RNA (1)...(19): siRNA sense strand
guuccaagccuagaggauu

SEQ ID NO: 1248837 - RNA, 19 nt, Homo sapiens
  misc_RNA (1)...(19): siRNA sense strand
guucgugccucugacuguu

SEQ ID NO: 1248838 - RNA, 19 nt, Homo sapiens
  misc_RNA (1)...(19): siRNA sense strand
caaaugauggcuugaucuc

SEQ ID NO: 1248839 - RNA, 19 nt, Homo sapiens
  misc_RNA (1)...(19): siRNA sense strand
guucuucuacuucuguuau

SEQ ID NO: 1248840 - RNA, 19 nt, Homo sapiens
  misc_RNA (1)...(19): siRNA sense strand
gcaggagugcuaccacagu

SEQ ID NO: 1248841 - RNA, 19 nt, Homo sapiens
  misc_RNA (1)...(19): siRNA sense strand
uaucgaggcacauacuuca

SEQ ID NO: 1248842 - RNA, 19 nt, Homo sapiens
  misc_RNA (1)...(19): siRNA sense strand
cccaaaugauggcuugauc

SEQ ID NO: 1248843 - RNA, 19 nt, Homo sapiens
  misc_RNA (1)...(19): siRNA sense strand
cagaaaaguacccaaauga

SEQ ID NO: 1248844 - RNA, 19 nt, Homo sapiens
  misc_RNA (1)...(19): siRNA sense strand
agaguuaucgaggcacaua

SEQ ID NO: 1248845 - RNA, 19 nt, Homo sapiens
  misc_RNA (1)...(19): siRNA sense strand
ggaacauaaggaagugguu

SEQ ID NO: 1248846 - RNA, 19 nt, Homo sapiens
  misc_RNA (1)...(19): siRNA sense strand
ggaguacugcaaccugaca

SEQ ID NO: 1248847 - RNA, 19 nt, Homo sapiens
  misc_RNA (1)...(19): siRNA sense strand
ucgaacuacugcaggaauc

SEQ ID NO: 1248848 - RNA, 19 nt, Homo sapiens
  misc_RNA (1)...(19): siRNA sense strand
ggauucauucauacaagug

SEQ ID NO: 1248849 - RNA, 19 nt, Homo sapiens
  misc_RNA (1)...(19): siRNA sense strand
ggcccuugguguuauacga

SEQ ID NO: 1248850 - RNA, 19 nt, Homo sapiens
  misc_RNA (1)...(19): siRNA sense strand
ggcuugaucucgaacuacu

SEQ ID NO: 1248851 - RNA, 19 nt, Homo sapiens
  misc_RNA (1)...(19): siRNA sense strand
guaauggacagaguuaucg

SEQ ID NO: 1248852 - RNA, 19 nt, Homo sapiens
  misc_RNA (1)...(19): siRNA sense strand
gaacaaagccagaagagaa

SEQ ID NO: 1248853 - RNA, 19 nt, Homo sapiens
  misc_RNA (1)...(19): siRNA sense strand
gaaagaaacagaccagaaa

SEQ ID NO: 1248854 - RNA, 19 nt, Homo sapiens
  misc_RNA (1)...(19): siRNA sense strand
ggaggaagguuauggagaa

SEQ ID NO: 1248855 - RNA, 19 nt, Homo sapiens
  misc_RNA (1)...(19): siRNA sense strand
ggacugagcgaaugucaua

SEQ ID NO: 1248856 - RNA, 19 nt, Homo sapiens
  misc_RNA (1)...(19): siRNA sense strand
gcucggcacuguauucuaa

SEQ ID NO: 1248857 - RNA, 19 nt, Homo sapiens
  misc_RNA (1)...(19): siRNA sense strand
gcaaggauauuaaggaagu

SEQ ID NO: 1248858 - RNA, 19 nt, Homo sapiens
  misc_RNA (1)...(19): siRNA sense strand
gggaagaauugacaaaguu

SEQ ID NO: 1248859 - RNA, 19 nt, Homo sapiens
  misc_RNA (1)...(19): siRNA sense strand
gaaaguugcccuccucuau

SEQ ID NO: 1248860 - RNA, 19 nt, Homo sapiens
  misc_RNA (1)...(19): siRNA sense strand
gcaaggcgauuccaugaca

SEQ ID NO: 1248861 - RNA, 19 nt, Homo sapiens
  misc_RNA (1)...(19): siRNA sense strand
gagcaggccauguuugaua

SEQ ID NO: 1248862 - RNA, 19 nt, Homo sapiens
  misc_RNA (1)...(19): siRNA sense strand
ggaagaauugacaaaguua

SEQ ID NO: 1248863 - RNA, 19 nt, Homo sapiens
  misc_RNA (1)...(19): siRNA sense strand
gagcaaaggucgucaacgu

SEQ ID NO: 1248864 - RNA, 19 nt, Homo sapiens
  misc_RNA (1)...(19): siRNA sense strand
ugacaaaguuagauaagga

SEQ ID NO: 1248865 - RNA, 19 nt, Homo sapiens
  misc_RNA (1)...(19): siRNA sense strand
gaaagcacacggucaaaug

SEQ ID NO: 1248866 - RNA, 19 nt, Homo sapiens
  misc_RNA (1)...(19): siRNA sense strand
gcaaggagcaggccauguu

SEQ ID NO: 1248867 - RNA, 19 nt, Homo sapiens
  misc_RNA (1)...(19): siRNA sense strand
gcaaagaugaggccaguga

SEQ ID NO: 1248868 - RNA, 19 nt, Homo sapiens
  misc_RNA (1)...(19): siRNA sense strand
agaaaguaauccagagaua

SEQ ID NO: 1248869 - RNA, 19 nt, Homo sapiens
  misc_RNA (1)...(19): siRNA sense strand
gaagucaacgucucacaaa

SEQ ID NO: 1248870 - RNA, 19 nt, Homo sapiens
  misc_RNA (1)...(19): siRNA sense strand
gaaacaaauccuaucacua

SEQ ID NO: 1248871 - RNA, 19 nt, Homo sapiens
  misc_RNA (1)...(19): siRNA sense strand
gagcgaaugucauaugaag

SEQ ID NO: 1248872 - RNA, 19 nt, Homo sapiens
  misc_RNA (1)...(19): siRNA sense strand
uggaggagcccgugaguua

SEQ ID NO: 1248873 - RNA, 19 nt, Homo sapiens
  misc_RNA (1)...(19): siRNA sense strand
gaagcgagacagagagaaa

SEQ ID NO: 1248874 - RNA, 19 nt, Homo sapiens
  misc_RNA (1)...(19): siRNA sense strand
ggucggugauuucagauga

SEQ ID NO: 1248875 - RNA, 19 nt, Homo sapiens
  misc_RNA (1)...(19): siRNA sense strand
gaaaacaucguuaccagua

SEQ ID NO: 1248876 - RNA, 19 nt, Homo sapiens
  misc_RNA (1)...(19): siRNA sense strand
gaggaggaauccaccauca

SEQ ID NO: 1248877 - RNA, 19 nt, Homo sapiens
  misc_RNA (1)...(19): siRNA sense strand
aaaccaacgucagaacuuu

SEQ ID NO: 1248878 - RNA, 19 nt, Homo sapiens
  misc_RNA (1)...(19): siRNA sense strand
aaaggucggugauuucaga

SEQ ID NO: 1248879 - RNA, 19 nt, Homo sapiens
  misc_RNA (1)...(19): siRNA sense strand
gagagagaggugccgauua

SEQ ID NO: 1248880 - RNA, 19 nt, Homo sapiens
  misc_RNA (1)...(19): siRNA sense strand
ggaaagaacaagcuagaag

SEQ ID NO: 1248881 - RNA, 19 nt, Homo sapiens
  misc_RNA (1)...(19): siRNA sense strand
agagagaggugccgauuag

SEQ ID NO: 1248882 - RNA, 19 nt, Homo sapiens
  misc_RNA (1)...(19): siRNA sense strand
ggagaaggcuaaggagaag

SEQ ID NO: 1248883 - RNA, 19 nt, Homo sapiens
  misc_RNA (1)...(19): siRNA sense strand
gacagaaaccguagcagaa

SEQ ID NO: 1248884 - RNA, 19 nt, Homo sapiens
  misc_RNA (1)...(19): siRNA sense strand
gaagaccggccucaguuug

SEQ ID NO: 1248885 - RNA, 19 nt, Homo sapiens
  misc_RNA (1)...(19): siRNA sense strand
gcaguuggugugagcuuua

SEQ ID NO: 1248886 - RNA, 19 nt, Homo sapiens
  misc_RNA (1)...(19): siRNA sense strand
aaacaugccgucagaauuc

SEQ ID NO: 1248887 - RNA, 19 nt, Homo sapiens
  misc_RNA (1)...(19): siRNA sense strand
gaacccacagucauugaaa

SEQ ID NO: 1248888 - RNA, 19 nt, Homo sapiens
  misc_RNA (1)...(19): siRNA sense strand
gagaaagccagcagaugaa

SEQ ID NO: 1248889 - RNA, 19 nt, Homo sapiens
  misc_RNA (1)...(19): siRNA sense strand
agagaaagccagcagauga

SEQ ID NO: 1248890 - RNA, 19 nt, Homo sapiens
  misc_RNA (1)...(19): siRNA sense strand
gccgauuagucuagaagua

SEQ ID NO: 1248891 - RNA, 19 nt, Homo sapiens
  misc_RNA (1)...(19): siRNA sense strand
gaaaguaauccagagauag

SEQ ID NO: 1248892 - RNA, 19 nt, Homo sapiens
  misc_RNA (1)...(19): siRNA sense strand
ggagagacgcggacaguag

SEQ ID NO: 1248893 - RNA, 19 nt, Homo sapiens
  misc_RNA (1)...(19): siRNA sense strand
uuaaggaggaggaagguua

SEQ ID NO: 1248894 - RNA, 19 nt, Homo sapiens
  misc_RNA (1)...(19): siRNA sense strand
aagcaaggauauuaaggaa

SEQ ID NO: 1248895 - RNA, 19 nt, Homo sapiens
  misc_RNA (1)...(19): siRNA sense strand
gccagcagaugaaggagaa

SEQ ID NO: 1248896 - RNA, 19 nt, Homo sapiens
  misc_RNA (1)...(19): siRNA sense strand
cagaaaccauccgaacaaa

SEQ ID NO: 1248897 - RNA, 19 nt, Homo sapiens
  misc_RNA (1)...(19): siRNA sense strand
ccagaaaccauccgaacaa

SEQ ID NO: 1248898 - RNA, 19 nt, Homo sapiens
  misc_RNA (1)...(19): siRNA sense strand
uaaaauaccccacgaauuc

SEQ ID NO: 1248899 - RNA, 19 nt, Homo sapiens
  misc_RNA (1)...(19): siRNA sense strand
gaaggaggacacagaagga

SEQ ID NO: 1248900 - RNA, 19 nt, Homo sapiens
  misc_RNA (1)...(19): siRNA sense strand
uaaacugacugaggauguu

SEQ ID NO: 1248901 - RNA, 19 nt, Homo sapiens
  misc_RNA (1)...(19): siRNA sense strand
gcgaaugucauaugaagga

SEQ ID NO: 1248902 - RNA, 19 nt, Homo sapiens
  misc_RNA (1)...(19): siRNA sense strand
ggaccgucauucugggaaa

SEQ ID NO: 1248903 - RNA, 19 nt, Homo sapiens
  misc_RNA (1)...(19): siRNA sense strand
ggagaaaguaauccagaga

SEQ ID NO: 1248904 - RNA, 19 nt, Homo sapiens
  misc_RNA (1)...(19): siRNA sense strand
gaggaagguuauggagaaa

SEQ ID NO: 1248905 - RNA, 19 nt, Homo sapiens
  misc_RNA (1)...(19): siRNA sense strand
ccaguauccugaagcaguu

SEQ ID NO: 1248906 - RNA, 19 nt, Homo sapiens
  misc_RNA (1)...(19): siRNA sense strand
cgagggagcaagaaagaaa

SEQ ID NO: 1248907 - RNA, 19 nt, Homo sapiens
  misc_RNA (1)...(19): siRNA sense strand
gaacuuucucuccaaccua

SEQ ID NO: 1248908 - RNA, 19 nt, Homo sapiens
  misc_RNA (1)...(19): siRNA sense strand
ggaaaacucauacggaaaa

SEQ ID NO: 1248909 - RNA, 19 nt, Homo sapiens
  misc_RNA (1)...(19): siRNA sense strand
ccuaagaugggaagaauug

SEQ ID NO: 1248910 - RNA, 19 nt, Homo sapiens
  misc_RNA (1)...(19): siRNA sense strand
ggaaagcacacggucaaau

SEQ ID NO: 1248911 - RNA, 19 nt, Homo sapiens
  misc_RNA (1)...(19): siRNA sense strand
uggaggaggucgaagaugu

SEQ ID NO: 1248912 - RNA, 19 nt, Homo sapiens
  misc_RNA (1)...(19): siRNA sense strand
gacugaggauguugauguu

SEQ ID NO: 1248913 - RNA, 19 nt, Homo sapiens
  misc_RNA (1)...(19): siRNA sense strand
gaaaccauccgaacaaagc

SEQ ID NO: 1248914 - RNA, 19 nt, Homo sapiens
  misc_RNA (1)...(19): siRNA sense strand
gauaaggaagcgagacaga

SEQ ID NO: 1248915 - RNA, 19 nt, Homo sapiens
  misc_RNA (1)...(19): siRNA sense strand
cgacucacguggaagaagu

SEQ ID NO: 1248916 - RNA, 19 nt, Homo sapiens
  misc_RNA (1)...(19): siRNA sense strand
caagagagcuacgguucag

SEQ ID NO: 1248917 - RNA, 19 nt, Homo sapiens
  misc_RNA (1)...(19): siRNA sense strand
uaaggaagcgagacagaga

SEQ ID NO: 1248918 - RNA, 19 nt, Homo sapiens
  misc_RNA (1)...(19): siRNA sense strand
gcagacgccugugaaggau

SEQ ID NO: 1248919 - RNA, 19 nt, Homo sapiens
  misc_RNA (1)...(19): siRNA sense strand
gaauuccacaccuccauga

SEQ ID NO: 1248920 - RNA, 19 nt, Homo sapiens
  misc_RNA (1)...(19): siRNA sense strand
gagaugacggcucggugua

SEQ ID NO: 1248921 - RNA, 19 nt, Homo sapiens
  misc_RNA (1)...(19): siRNA sense strand
gagcagaguuauuuugugu

SEQ ID NO: 1248922 - RNA, 19 nt, Homo sapiens
  misc_RNA (1)...(19): siRNA sense strand
ggaagguuauggagaaagc

SEQ ID NO: 1248923 - RNA, 19 nt, Homo sapiens
  misc_RNA (1)...(19): siRNA sense strand
aaauacuuguggagucuaa

SEQ ID NO: 1248924 - RNA, 19 nt, Homo sapiens
  misc_RNA (1)...(19): siRNA sense strand
gaggagagaaaccuaagau

SEQ ID NO: 1248925 - RNA, 19 nt, Homo sapiens
  misc_RNA (1)...(19): siRNA sense strand
gcugcuggcauucgcuuua

SEQ ID NO: 1248926 - RNA, 19 nt, Homo sapiens
  misc_RNA (1)...(19): siRNA sense strand
gcuagaagcggugaauuuc

SEQ ID NO: 1248927 - RNA, 19 nt, Homo sapiens
  misc_RNA (1)...(19): siRNA sense strand
aaacaucguuaccaguauc

SEQ ID NO: 1248928 - RNA, 19 nt, Homo sapiens
  misc_RNA (1)...(19): siRNA sense strand
agaaacaaauccuaucacu

SEQ ID NO: 1248929 - RNA, 19 nt, Homo sapiens
  misc_RNA (1)...(19): siRNA sense strand
gcaagagagcuacgguuca

SEQ ID NO: 1248930 - RNA, 19 nt, Homo sapiens
  misc_RNA (1)...(19): siRNA sense strand
ugaaggagaaggcuaagga

SEQ ID NO: 1248931 - RNA, 19 nt, Homo sapiens
  misc_RNA (1)...(19): siRNA sense strand
caaaccaacgucagaacuu

SEQ ID NO: 1248932 - RNA, 19 nt, Homo sapiens
  misc_RNA (1)...(19): siRNA sense strand
uggaggaggugagcaaaga

SEQ ID NO: 1248933 - RNA, 19 nt, Homo sapiens
  misc_RNA (1)...(19): siRNA sense strand
ugaagggcaucuccuccaa

SEQ ID NO: 1248934 - RNA, 19 nt, Homo sapiens
  misc_RNA (1)...(19): siRNA sense strand
uaagcaaggauauuaagga

SEQ ID NO: 1248935 - RNA, 19 nt, Homo sapiens
  misc_RNA (1)...(19): siRNA sense strand
ugacugaggauguugaugu

SEQ ID NO: 1248936 - RNA, 19 nt, Homo sapiens
  misc_RNA (1)...(19): siRNA sense strand
gaagagaaaauguucgauu

SEQ ID NO: 1248937 - RNA, 19 nt, Homo sapiens
  misc_RNA (1)...(19): siRNA sense strand
gaaaagccgucagcaguca

SEQ ID NO: 1248938 - RNA, 19 nt, Homo sapiens
  misc_RNA (1)...(19): siRNA sense strand
gaaggugcagcuccagaga

SEQ ID NO: 1248939 - RNA, 19 nt, Homo sapiens
  misc_RNA (1)...(19): siRNA sense strand
caaggagcaggccauguuu

SEQ ID NO: 1248940 - RNA, 19 nt, Homo sapiens
  misc_RNA (1)...(19): siRNA sense strand
ugaaggacccacugcagaa

SEQ ID NO: 1248941 - RNA, 19 nt, Homo sapiens
  misc_RNA (1)...(19): siRNA sense strand
cgucagaauucagaaacaa

SEQ ID NO: 1248942 - RNA, 19 nt, Homo sapiens
  misc_RNA (1)...(19): siRNA sense strand
agaaagaaacagaccagaa

SEQ ID NO: 1248943 - RNA, 19 nt, Homo sapiens
  misc_RNA (1)...(19): siRNA sense strand
ggagguccccguuuacaua

SEQ ID NO: 1248944 - RNA, 19 nt, Homo sapiens
  misc_RNA (1)...(19): siRNA sense strand
ggagcaagaaagaaacaga

SEQ ID NO: 1248945 - RNA, 19 nt, Homo sapiens
  misc_RNA (1)...(19): siRNA sense strand
gacagaggcaggugauuca

SEQ ID NO: 1248946 - RNA, 19 nt, Homo sapiens
  misc_RNA (1)...(19): siRNA sense strand
gaggagcccgugaguuaug

SEQ ID NO: 1248947 - RNA, 19 nt, Homo sapiens
  misc_RNA (1)...(19): siRNA sense strand
ugaaauacuuguggagucu

SEQ ID NO: 1248948 - RNA, 19 nt, Homo sapiens
  misc_RNA (1)...(19): siRNA sense strand
gugaagaccggccucaguu

SEQ ID NO: 1248949 - RNA, 19 nt, Homo sapiens
  misc_RNA (1)...(19): siRNA sense strand
aagcaccuuuggcaaguuu

SEQ ID NO: 1248950 - RNA, 19 nt, Homo sapiens
  misc_RNA (1)...(19): siRNA sense strand
gaagaauugacaaaguuag

SEQ ID NO: 1248951 - RNA, 19 nt, Homo sapiens
  misc_RNA (1)...(19): siRNA sense strand
gaugggaagaauugacaaa

SEQ ID NO: 1248952 - RNA, 19 nt, Homo sapiens
  misc_RNA (1)...(19): siRNA sense strand
gaacaaagccagaagagaa

SEQ ID NO: 1248953 - RNA, 19 nt, Homo sapiens
  misc_RNA (1)...(19): siRNA sense strand
gaaagaaacagaccagaaa

SEQ ID NO: 1248954 - RNA, 19 nt, Homo sapiens
  misc_RNA (1)...(19): siRNA sense strand
ggaggaagguuauggagaa

SEQ ID NO: 1248955 - RNA, 19 nt, Homo sapiens
  misc_RNA (1)...(19): siRNA sense strand
ggacugagcgaaugucaua

SEQ ID NO: 1248956 - RNA, 19 nt, Homo sapiens
  misc_RNA (1)...(19): siRNA sense strand
gcucggcacuguauucuaa

SEQ ID NO: 1248957 - RNA, 19 nt, Homo sapiens
  misc_RNA (1)...(19): siRNA sense strand
gcaaggauauuaaggaagu

SEQ ID NO: 1248958 - RNA, 19 nt, Homo sapiens
  misc_RNA (1)...(19): siRNA sense strand
gggaagaauugacaaaguu

SEQ ID NO: 1248959 - RNA, 19 nt, Homo sapiens
  misc_RNA (1)...(19): siRNA sense strand
gaaaguugcccuccucuau

SEQ ID NO: 1248960 - RNA, 19 nt, Homo sapiens
  misc_RNA (1)...(19): siRNA sense strand
gcaaggcgauuccaugaca

SEQ ID NO: 1248961 - RNA, 19 nt, Homo sapiens
  misc_RNA (1)...(19): siRNA sense strand
gagcaggccauguuugaua

SEQ ID NO: 1248962 - RNA, 19 nt, Homo sapiens
  misc_RNA (1)...(19): siRNA sense strand
ggaagaauugacaaaguua

SEQ ID NO: 1248963 - RNA, 19 nt, Homo sapiens
  misc_RNA (1)...(19): siRNA sense strand
gagcaaaggucgucaacgu

SEQ ID NO: 1248964 - RNA, 19 nt, Homo sapiens
  misc_RNA (1)...(19): siRNA sense strand
ugacaaaguuagauaagga

SEQ ID NO: 1248965 - RNA, 19 nt, Homo sapiens
  misc_RNA (1)...(19): siRNA sense strand
gaaagcacacggucaaaug

SEQ ID NO: 1248966 - RNA, 19 nt, Homo sapiens
  misc_RNA (1)...(19): siRNA sense strand
gcaaggagcaggccauguu

SEQ ID NO: 1248967 - RNA, 19 nt, Homo sapiens
  misc_RNA (1)...(19): siRNA sense strand
gcaaagaugaggccaguga

SEQ ID NO: 1248968 - RNA, 19 nt, Homo sapiens
  misc_RNA (1)...(19): siRNA sense strand
agaaaguaauccagagaua

SEQ ID NO: 1248969 - RNA, 19 nt, Homo sapiens
  misc_RNA (1)...(19): siRNA sense strand
gaagucaacgucucacaaa

SEQ ID NO: 1248970 - RNA, 19 nt, Homo sapiens
  misc_RNA (1)...(19): siRNA sense strand
gaaacaaauccuaucacua

SEQ ID NO: 1248971 - RNA, 19 nt, Homo sapiens
  misc_RNA (1)...(19): siRNA sense strand
gagcgaaugucauaugaag

SEQ ID NO: 1248972 - RNA, 19 nt, Homo sapiens
  misc_RNA (1)...(19): siRNA sense strand
uggaggagcccgugaguua

SEQ ID NO: 1248973 - RNA, 19 nt, Homo sapiens
  misc_RNA (1)...(19): siRNA sense strand
gaagcgagacagagagaaa

SEQ ID NO: 1248974 - RNA, 19 nt, Homo sapiens
  misc_RNA (1)...(19): siRNA sense strand
ggucggugauuucagauga

SEQ ID NO: 1248975 - RNA, 19 nt, Homo sapiens
  misc_RNA (1)...(19): siRNA sense strand
gaaaacaucguuaccagua

SEQ ID NO: 1248976 - RNA, 19 nt, Homo sapiens
  misc_RNA (1)...(19): siRNA sense strand
gaggaggaauccaccauca

SEQ ID NO: 1248977 - RNA, 19 nt, Homo sapiens
  misc_RNA (1)...(19): siRNA sense strand
aaaccaacgucagaacuuu

SEQ ID NO: 1248978 - RNA, 19 nt, Homo sapiens
  misc_RNA (1)...(19): siRNA sense strand
aaaggucggugauuucaga

SEQ ID NO: 1248979 - RNA, 19 nt, Homo sapiens
  misc_RNA (1)...(19): siRNA sense strand
gagagagaggugccgauua

SEQ ID NO: 1248980 - RNA, 19 nt, Homo sapiens
  misc_RNA (1)...(19): siRNA sense strand
ggaaagaacaagcuagaag

SEQ ID NO: 1248981 - RNA, 19 nt, Homo sapiens
  misc_RNA (1)...(19): siRNA sense strand
agagagaggugccgauuag

SEQ ID NO: 1248982 - RNA, 19 nt, Homo sapiens
  misc_RNA (1)...(19): siRNA sense strand
ggagaaggcuaaggagaag

SEQ ID NO: 1248983 - RNA, 19 nt, Homo sapiens
  misc_RNA (1)...(19): siRNA sense strand
gacagaaaccguagcagaa

SEQ ID NO: 1248984 - RNA, 19 nt, Homo sapiens
  misc_RNA (1)...(19): siRNA sense strand
gaagaccggccucaguuug

SEQ ID NO: 1248985 - RNA, 19 nt, Homo sapiens
  misc_RNA (1)...(19): siRNA sense strand
gcaguuggugugagcuuua

SEQ ID NO: 1248986 - RNA, 19 nt, Homo sapiens
  misc_RNA (1)...(19): siRNA sense strand
aaacaugccgucagaauuc

SEQ ID NO: 1248987 - RNA, 19 nt, Homo sapiens
  misc_RNA (1)...(19): siRNA sense strand
gaacccacagucauugaaa

SEQ ID NO: 1248988 - RNA, 19 nt, Homo sapiens
  misc_RNA (1)...(19): siRNA sense strand
gagaaagccagcagaugaa

SEQ ID NO: 1248989 - RNA, 19 nt, Homo sapiens
  misc_RNA (1)...(19): siRNA sense strand
agagaaagccagcagauga

SEQ ID NO: 1248990 - RNA, 19 nt, Homo sapiens
  misc_RNA (1)...(19): siRNA sense strand
gccgauuagucuagaagua

SEQ ID NO: 1248991 - RNA, 19 nt, Homo sapiens
  misc_RNA (1)...(19): siRNA sense strand
gaaaguaauccagagauag

SEQ ID NO: 1248992 - RNA, 19 nt, Homo sapiens
  misc_RNA (1)...(19): siRNA sense strand
ggagagacgcggacaguag

SEQ ID NO: 1248993 - RNA, 19 nt, Homo sapiens
  misc_RNA (1)...(19): siRNA sense strand
uuaaggaggaggaagguua

SEQ ID NO: 1248994 - RNA, 19 nt, Homo sapiens
  misc_RNA (1)...(19): siRNA sense strand
aagcaaggauauuaaggaa

SEQ ID NO: 1248995 - RNA, 19 nt, Homo sapiens
  misc_RNA (1)...(19): siRNA sense strand
gccagcagaugaaggagaa

SEQ ID NO: 1248996 - RNA, 19 nt, Homo sapiens
  misc_RNA (1)...(19): siRNA sense strand
cagaaaccauccgaacaaa

SEQ ID NO: 1248997 - RNA, 19 nt, Homo sapiens
  misc_RNA (1)...(19): siRNA sense strand
ccagaaaccauccgaacaa

SEQ ID NO: 1248998 - RNA, 19 nt, Homo sapiens
  misc_RNA (1)...(19): siRNA sense strand
uaaaauaccccacgaauuc

SEQ ID NO: 1248999 - RNA, 19 nt, Homo sapiens
  misc_RNA (1)...(19): siRNA sense strand
gaaggaggacacagaagga

SEQ ID NO: 1249000 - RNA, 19 nt, Homo sapiens
  misc_RNA (1)...(19): siRNA sense strand
uaaacugacugaggauguu

SEQ ID NO: 1249001 - RNA, 19 nt, Homo sapiens
  misc_RNA (1)...(19): siRNA sense strand
gcgaaugucauaugaagga

SEQ ID NO: 1249002 - RNA, 19 nt, Homo sapiens
  misc_RNA (1)...(19): siRNA sense strand
ggaccgucauucugggaaa

SEQ ID NO: 1249003 - RNA, 19 nt, Homo sapiens
  misc_RNA (1)...(19): siRNA sense strand
ggagaaaguaauccagaga

SEQ ID NO: 1249004 - RNA, 19 nt, Homo sapiens
  misc_RNA (1)...(19): siRNA sense strand
gaggaagguuauggagaaa

SEQ ID NO: 1249005 - RNA, 19 nt, Homo sapiens
  misc_RNA (1)...(19): siRNA sense strand
ccaguauccugaagcaguu

SEQ ID NO: 1249006 - RNA, 19 nt, Homo sapiens
  misc_RNA (1)...(19): siRNA sense strand
cgagggagcaagaaagaaa

SEQ ID NO: 1249007 - RNA, 19 nt, Homo sapiens
  misc_RNA (1)...(19): siRNA sense strand
gaacuuucucuccaaccua

SEQ ID NO: 1249008 - RNA, 19 nt, Homo sapiens
  misc_RNA (1)...(19): siRNA sense strand
ggaaaacucauacggaaaa

SEQ ID NO: 1249009 - RNA, 19 nt, Homo sapiens
  misc_RNA (1)...(19): siRNA sense strand
ccuaagaugggaagaauug

SEQ ID NO: 1249010 - RNA, 19 nt, Homo sapiens
  misc_RNA (1)...(19): siRNA sense strand
ggaaagcacacggucaaau

SEQ ID NO: 1249011 - RNA, 19 nt, Homo sapiens
  misc_RNA (1)...(19): siRNA sense strand
uggaggaggucgaagaugu

SEQ ID NO: 1249012 - RNA, 19 nt, Homo sapiens
  misc_RNA (1)...(19): siRNA sense strand
gacugaggauguugauguu

SEQ ID NO: 1249013 - RNA, 19 nt, Homo sapiens
  misc_RNA (1)...(19): siRNA sense strand
gaaaccauccgaacaaagc

SEQ ID NO: 1249014 - RNA, 19 nt, Homo sapiens
  misc_RNA (1)...(19): siRNA sense strand
gauaaggaagcgagacaga

SEQ ID NO: 1249015 - RNA, 19 nt, Homo sapiens
  misc_RNA (1)...(19): siRNA sense strand
cgacucacguggaagaagu

SEQ ID NO: 1249016 - RNA, 19 nt, Homo sapiens
  misc_RNA (1)...(19): siRNA sense strand
caagagagcuacgguucag

SEQ ID NO: 1249017 - RNA, 19 nt, Homo sapiens
  misc_RNA (1)...(19): siRNA sense strand
uaaggaagcgagacagaga

SEQ ID NO: 1249018 - RNA, 19 nt, Homo sapiens
  misc_RNA (1)...(19): siRNA sense strand
gcagacgccugugaaggau

SEQ ID NO: 1249019 - RNA, 19 nt, Homo sapiens
  misc_RNA (1)...(19): siRNA sense strand
gaauuccacaccuccauga

SEQ ID NO: 1249020 - RNA, 19 nt, Homo sapiens
  misc_RNA (1)...(19): siRNA sense strand
gagaugacggcucggugua

SEQ ID NO: 1249021 - RNA, 19 nt, Homo sapiens
  misc_RNA (1)...(19): siRNA sense strand
gagcagaguuauuuugugu

SEQ ID NO: 1249022 - RNA, 19 nt, Homo sapiens
  misc_RNA (1)...(19): siRNA sense strand
ggaagguuauggagaaagc

SEQ ID NO: 1249023 - RNA, 19 nt, Homo sapiens
  misc_RNA (1)...(19): siRNA sense strand
aaauacuuguggagucuaa

SEQ ID NO: 1249024 - RNA, 19 nt, Homo sapiens
  misc_RNA (1)...(19): siRNA sense strand
gaggagagaaaccuaagau

SEQ ID NO: 1249025 - RNA, 19 nt, Homo sapiens
  misc_RNA (1)...(19): siRNA sense strand
gcugcuggcauucgcuuua

SEQ ID NO: 1249026 - RNA, 19 nt, Homo sapiens
  misc_RNA (1)...(19): siRNA sense strand
gcuagaagcggugaauuuc

SEQ ID NO: 1249027 - RNA, 19 nt, Homo sapiens
  misc_RNA (1)...(19): siRNA sense strand
aaacaucguuaccaguauc

SEQ ID NO: 1249028 - RNA, 19 nt, Homo sapiens
  misc_RNA (1)...(19): siRNA sense strand
agaaacaaauccuaucacu

SEQ ID NO: 1249029 - RNA, 19 nt, Homo sapiens
  misc_RNA (1)...(19): siRNA sense strand
gcaagagagcuacgguuca

SEQ ID NO: 1249030 - RNA, 19 nt, Homo sapiens
  misc_RNA (1)...(19): siRNA sense strand
ugaaggagaaggcuaagga

SEQ ID NO: 1249031 - RNA, 19 nt, Homo sapiens
  misc_RNA (1)...(19): siRNA sense strand
caaaccaacgucagaacuu

SEQ ID NO: 1249032 - RNA, 19 nt, Homo sapiens
  misc_RNA (1)...(19): siRNA sense strand
uggaggaggugagcaaaga

SEQ ID NO: 1249033 - RNA, 19 nt, Homo sapiens
  misc_RNA (1)...(19): siRNA sense strand
ugaagggcaucuccuccaa

SEQ ID NO: 1249034 - RNA, 19 nt, Homo sapiens
  misc_RNA (1)...(19): siRNA sense strand
uaagcaaggauauuaagga

SEQ ID NO: 1249035 - RNA, 19 nt, Homo sapiens
  misc_RNA (1)...(19): siRNA sense strand
ugacugaggauguugaugu

SEQ ID NO: 1249036 - RNA, 19 nt, Homo sapiens
  misc_RNA (1)...(19): siRNA sense strand
gaagagaaaauguucgauu

SEQ ID NO: 1249037 - RNA, 19 nt, Homo sapiens
  misc_RNA (1)...(19): siRNA sense strand
gaaaagccgucagcaguca

SEQ ID NO: 1249038 - RNA, 19 nt, Homo sapiens
  misc_RNA (1)...(19): siRNA sense strand
gaaggugcagcuccagaga

SEQ ID NO: 1249039 - RNA, 19 nt, Homo sapiens
  misc_RNA (1)...(19): siRNA sense strand
caaggagcaggccauguuu

SEQ ID NO: 1249040 - RNA, 19 nt, Homo sapiens
  misc_RNA (1)...(19): siRNA sense strand
ugaaggacccacugcagaa

SEQ ID NO: 1249041 - RNA, 19 nt, Homo sapiens
  misc_RNA (1)...(19): siRNA sense strand
cgucagaauucagaaacaa

SEQ ID NO: 1249042 - RNA, 19 nt, Homo sapiens
  misc_RNA (1)...(19): siRNA sense strand
agaaagaaacagaccagaa

SEQ ID NO: 1249043 - RNA, 19 nt, Homo sapiens
  misc_RNA (1)...(19): siRNA sense strand
ggagguccccguuuacaua

SEQ ID NO: 1249044 - RNA, 19 nt, Homo sapiens
  misc_RNA (1)...(19): siRNA sense strand
ggagcaagaaagaaacaga

SEQ ID NO: 1249045 - RNA, 19 nt, Homo sapiens
  misc_RNA (1)...(19): siRNA sense strand
gacagaggcaggugauuca

SEQ ID NO: 1249046 - RNA, 19 nt, Homo sapiens
  misc_RNA (1)...(19): siRNA sense strand
gaggagcccgugaguuaug

SEQ ID NO: 1249047 - RNA, 19 nt, Homo sapiens
  misc_RNA (1)...(19): siRNA sense strand
ugaaauacuuguggagucu

SEQ ID NO: 1249048 - RNA, 19 nt, Homo sapiens
  misc_RNA (1)...(19): siRNA sense strand
gugaagaccggccucaguu

SEQ ID NO: 1249049 - RNA, 19 nt, Homo sapiens
  misc_RNA (1)...(19): siRNA sense strand
aagcaccuuuggcaaguuu

SEQ ID NO: 1249050 - RNA, 19 nt, Homo sapiens
  misc_RNA (1)...(19): siRNA sense strand
gaagaauugacaaaguuag

SEQ ID NO: 1249051 - RNA, 19 nt, Homo sapiens
  misc_RNA (1)...(19): siRNA sense strand
gaugggaagaauugacaaa

SEQ ID NO: 1249052 - RNA, 19 nt, Homo sapiens
  misc_RNA (1)...(19): siRNA sense strand
acaagaaggucuauuggua

SEQ ID NO: 1249053 - RNA, 19 nt, Homo sapiens
  misc_RNA (1)...(19): siRNA sense strand
gcaaagugguucaaguuau

SEQ ID NO: 1249054 - RNA, 19 nt, Homo sapiens
  misc_RNA (1)...(19): siRNA sense strand
gagaucgaguggagauuua

SEQ ID NO: 1249055 - RNA, 19 nt, Homo sapiens
  misc_RNA (1)...(19): siRNA sense strand
gaaccaugaucccuaguga

SEQ ID NO: 1249056 - RNA, 19 nt, Homo sapiens
  misc_RNA (1)...(19): siRNA sense strand
gaugaagacugguaucugu

SEQ ID NO: 1249057 - RNA, 19 nt, Homo sapiens
  misc_RNA (1)...(19): siRNA sense strand
gaaggucuauugguauuga

SEQ ID NO: 1249058 - RNA, 19 nt, Homo sapiens
  misc_RNA (1)...(19): siRNA sense strand
gaaccuaugugcccugucu

SEQ ID NO: 1249059 - RNA, 19 nt, Homo sapiens
  misc_RNA (1)...(19): siRNA sense strand
ggaaauacaagaaggucua

SEQ ID NO: 1249060 - RNA, 19 nt, Homo sapiens
  misc_RNA (1)...(19): siRNA sense strand
caaagugguucaaguuauc

SEQ ID NO: 1249061 - RNA, 19 nt, Homo sapiens
  misc_RNA (1)...(19): siRNA sense strand
guacgagucuccacacgau

SEQ ID NO: 1249062 - RNA, 19 nt, Homo sapiens
  misc_RNA (1)...(19): siRNA sense strand
ucaaggagacccggaaaua

SEQ ID NO: 1249063 - RNA, 19 nt, Homo sapiens
  misc_RNA (1)...(19): siRNA sense strand
gaguggagauuuacugaag

SEQ ID NO: 1249064 - RNA, 19 nt, Homo sapiens
  misc_RNA (1)...(19): siRNA sense strand
uaugugcccugucuaaaga

SEQ ID NO: 1249065 - RNA, 19 nt, Homo sapiens
  misc_RNA (1)...(19): siRNA sense strand
ggcaaagugguucaaguua

SEQ ID NO: 1249066 - RNA, 19 nt, Homo sapiens
  misc_RNA (1)...(19): siRNA sense strand
caaagacacaucaguggaa

SEQ ID NO: 1249067 - RNA, 19 nt, Homo sapiens
  misc_RNA (1)...(19): siRNA sense strand
gggcaaagugguucaaguu

SEQ ID NO: 1249068 - RNA, 19 nt, Homo sapiens
  misc_RNA (1)...(19): siRNA sense strand
aagaaggucuauugguauu

SEQ ID NO: 1249069 - RNA, 19 nt, Homo sapiens
  misc_RNA (1)...(19): siRNA sense strand
aguggaagaugcuuuagaa

SEQ ID NO: 1249070 - RNA, 19 nt, Homo sapiens
  misc_RNA (1)...(19): siRNA sense strand
ccugaaacguggauugaug

SEQ ID NO: 1249071 - RNA, 19 nt, Homo sapiens
  misc_RNA (1)...(19): siRNA sense strand
caagaaggucuauugguau

SEQ ID NO: 1249072 - RNA, 19 nt, Homo sapiens
  misc_RNA (1)...(19): siRNA sense strand
acacauuaccgcuacauug

SEQ ID NO: 1249073 - RNA, 19 nt, Homo sapiens
  misc_RNA (1)...(19): siRNA sense strand
gacaggaaacccacugaga

SEQ ID NO: 1249074 - RNA, 19 nt, Homo sapiens
  misc_RNA (1)...(19): siRNA sense strand
gaaauacaagaaggucuau

SEQ ID NO: 1249075 - RNA, 19 nt, Homo sapiens
  misc_RNA (1)...(19): siRNA sense strand
gaagacugguaucuguucu

SEQ ID NO: 1249076 - RNA, 19 nt, Homo sapiens
  misc_RNA (1)...(19): siRNA sense strand
gaucaaggagacccggaaa

SEQ ID NO: 1249077 - RNA, 19 nt, Homo sapiens
  misc_RNA (1)...(19): siRNA sense strand
gaagcagggcaaagugguu

SEQ ID NO: 1249078 - RNA, 19 nt, Homo sapiens
  misc_RNA (1)...(19): siRNA sense strand
ucaaacuuguggauccuau

SEQ ID NO: 1249079 - RNA, 19 nt, Homo sapiens
  misc_RNA (1)...(19): siRNA sense strand
ugggagggcugaacacaca

SEQ ID NO: 1249080 - RNA, 19 nt, Homo sapiens
  misc_RNA (1)...(19): siRNA sense strand
acacgaucagggagaauua

SEQ ID NO: 1249081 - RNA, 19 nt, Homo sapiens
  misc_RNA (1)...(19): siRNA sense strand
gagggcugaacacacauua

SEQ ID NO: 1249082 - RNA, 19 nt, Homo sapiens
  misc_RNA (1)...(19): siRNA sense strand
ggagaauuaucccuaaacc

SEQ ID NO: 1249083 - RNA, 19 nt, Homo sapiens
  misc_RNA (1)...(19): siRNA sense strand
ggaaacccacugagaucga

SEQ ID NO: 1249084 - RNA, 19 nt, Homo sapiens
  misc_RNA (1)...(19): siRNA sense strand
ugagaucgaguggagauuu

SEQ ID NO: 1249085 - RNA, 19 nt, Homo sapiens
  misc_RNA (1)...(19): siRNA sense strand
ggagagcggguacgagucu

SEQ ID NO: 1249086 - RNA, 19 nt, Homo sapiens
  misc_RNA (1)...(19): siRNA sense strand
gcaaggaugccgggaagca

SEQ ID NO: 1249087 - RNA, 19 nt, Homo sapiens
  misc_RNA (1)...(19): siRNA sense strand
ggaaccaugaucccuagug

SEQ ID NO: 1249088 - RNA, 19 nt, Homo sapiens
  misc_RNA (1)...(19): siRNA sense strand
gaauuucccagagcugaug

SEQ ID NO: 1249089 - RNA, 19 nt, Homo sapiens
  misc_RNA (1)...(19): siRNA sense strand
cauuaccgcuaugggauga

SEQ ID NO: 1249090 - RNA, 19 nt, Homo sapiens
  misc_RNA (1)...(19): siRNA sense strand
uuggcaagaccauggauua

SEQ ID NO: 1249091 - RNA, 19 nt, Homo sapiens
  misc_RNA (1)...(19): siRNA sense strand
agacugguaucuguucugu

SEQ ID NO: 1249092 - RNA, 19 nt, Homo sapiens
  misc_RNA (1)...(19): siRNA sense strand
ggagggcugaacacacauu

SEQ ID NO: 1249093 - RNA, 19 nt, Homo sapiens
  misc_RNA (1)...(19): siRNA sense strand
guggagauuuacugaagca

SEQ ID NO: 1249094 - RNA, 19 nt, Homo sapiens
  misc_RNA (1)...(19): siRNA sense strand
caggaaacccacugagauc

SEQ ID NO: 1249095 - RNA, 19 nt, Homo sapiens
  misc_RNA (1)...(19): siRNA sense strand
acaggaaacccacugagau

SEQ ID NO: 1249096 - RNA, 19 nt, Homo sapiens
  misc_RNA (1)...(19): siRNA sense strand
caaggagacccggaaauac

SEQ ID NO: 1249097 - RNA, 19 nt, Homo sapiens
  misc_RNA (1)...(19): siRNA sense strand
ggacacgguggagauccua

SEQ ID NO: 1249098 - RNA, 19 nt, Homo sapiens
  misc_RNA (1)...(19): siRNA sense strand
aaggagacccggaaauaca

SEQ ID NO: 1249099 - RNA, 19 nt, Homo sapiens
  misc_RNA (1)...(19): siRNA sense strand
ugaagacugguaucuguuc

SEQ ID NO: 1249100 - RNA, 19 nt, Homo sapiens
  misc_RNA (1)...(19): siRNA sense strand
cacauuaccgcuacauugg

SEQ ID NO: 1249101 - RNA, 19 nt, Homo sapiens
  misc_RNA (1)...(19): siRNA sense strand
acaagaaggucuauuggua

SEQ ID NO: 1249102 - RNA, 19 nt, Homo sapiens
  misc_RNA (1)...(19): siRNA sense strand
gcaaagugguucaaguuau

SEQ ID NO: 1249103 - RNA, 19 nt, Homo sapiens
  misc_RNA (1)...(19): siRNA sense strand
gagaucgaguggagauuua

SEQ ID NO: 1249104 - RNA, 19 nt, Homo sapiens
  misc_RNA (1)...(19): siRNA sense strand
gaaccaugaucccuaguga

SEQ ID NO: 1249105 - RNA, 19 nt, Homo sapiens
  misc_RNA (1)...(19): siRNA sense strand
gaugaagacugguaucugu

SEQ ID NO: 1249106 - RNA, 19 nt, Homo sapiens
  misc_RNA (1)...(19): siRNA sense strand
gaaggucuauugguauuga

SEQ ID NO: 1249107 - RNA, 19 nt, Homo sapiens
  misc_RNA (1)...(19): siRNA sense strand
gaaccuaugugcccugucu

SEQ ID NO: 1249108 - RNA, 19 nt, Homo sapiens
  misc_RNA (1)...(19): siRNA sense strand
ggaaauacaagaaggucua

SEQ ID NO: 1249109 - RNA, 19 nt, Homo sapiens
  misc_RNA (1)...(19): siRNA sense strand
caaagugguucaaguuauc

SEQ ID NO: 1249110 - RNA, 19 nt, Homo sapiens
  misc_RNA (1)...(19): siRNA sense strand
guacgagucuccacacgau

SEQ ID NO: 1249111 - RNA, 19 nt, Homo sapiens
  misc_RNA (1)...(19): siRNA sense strand
ucaaggagacccggaaaua

SEQ ID NO: 1249112 - RNA, 19 nt, Homo sapiens
  misc_RNA (1)...(19): siRNA sense strand
gaguggagauuuacugaag

SEQ ID NO: 1249113 - RNA, 19 nt, Homo sapiens
  misc_RNA (1)...(19): siRNA sense strand
uaugugcccugucuaaaga

SEQ ID NO: 1249114 - RNA, 19 nt, Homo sapiens
  misc_RNA (1)...(19): siRNA sense strand
ggcaaagugguucaaguua

SEQ ID NO: 1249115 - RNA, 19 nt, Homo sapiens
  misc_RNA (1)...(19): siRNA sense strand
caaagacacaucaguggaa

SEQ ID NO: 1249116 - RNA, 19 nt, Homo sapiens
  misc_RNA (1)...(19): siRNA sense strand
gggcaaagugguucaaguu

SEQ ID NO: 1249117 - RNA, 19 nt, Homo sapiens
  misc_RNA (1)...(19): siRNA sense strand
aagaaggucuauugguauu

SEQ ID NO: 1249118 - RNA, 19 nt, Homo sapiens
  misc_RNA (1)...(19): siRNA sense strand
aguggaagaugcuuuagaa

SEQ ID NO: 1249119 - RNA, 19 nt, Homo sapiens
  misc_RNA (1)...(19): siRNA sense strand
ccugaaacguggauugaug

SEQ ID NO: 1249120 - RNA, 19 nt, Homo sapiens
  misc_RNA (1)...(19): siRNA sense strand
caagaaggucuauugguau

SEQ ID NO: 1249121 - RNA, 19 nt, Homo sapiens
  misc_RNA (1)...(19): siRNA sense strand
acacauuaccgcuacauug

SEQ ID NO: 1249122 - RNA, 19 nt, Homo sapiens
  misc_RNA (1)...(19): siRNA sense strand
gacaggaaacccacugaga

SEQ ID NO: 1249123 - RNA, 19 nt, Homo sapiens
  misc_RNA (1)...(19): siRNA sense strand
gaaauacaagaaggucuau

SEQ ID NO: 1249124 - RNA, 19 nt, Homo sapiens
  misc_RNA (1)...(19): siRNA sense strand
gaagacugguaucuguucu

SEQ ID NO: 1249125 - RNA, 19 nt, Homo sapiens
  misc_RNA (1)...(19): siRNA sense strand
gaucaaggagacccggaaa

SEQ ID NO: 1249126 - RNA, 19 nt, Homo sapiens
  misc_RNA (1)...(19): siRNA sense strand
gaagcagggcaaagugguu

SEQ ID NO: 1249127 - RNA, 19 nt, Homo sapiens
  misc_RNA (1)...(19): siRNA sense strand
ucaaacuuguggauccuau

SEQ ID NO: 1249128 - RNA, 19 nt, Homo sapiens
  misc_RNA (1)...(19): siRNA sense strand
ugggagggcugaacacaca

SEQ ID NO: 1249129 - RNA, 19 nt, Homo sapiens
  misc_RNA (1)...(19): siRNA sense strand
acacgaucagggagaauua

SEQ ID NO: 1249130 - RNA, 19 nt, Homo sapiens
  misc_RNA (1)...(19): siRNA sense strand
gagggcugaacacacauua

SEQ ID NO: 1249131 - RNA, 19 nt, Homo sapiens
  misc_RNA (1)...(19): siRNA sense strand
ggagaauuaucccuaaacc

SEQ ID NO: 1249132 - RNA, 19 nt, Homo sapiens
  misc_RNA (1)...(19): siRNA sense strand
ggaaacccacugagaucga

SEQ ID NO: 1249133 - RNA, 19 nt, Homo sapiens
  misc_RNA (1)...(19): siRNA sense strand
ugagaucgaguggagauuu

SEQ ID NO: 1249134 - RNA, 19 nt, Homo sapiens
  misc_RNA (1)...(19): siRNA sense strand
ggagagcggguacgagucu

SEQ ID NO: 1249135 - RNA, 19 nt, Homo sapiens
  misc_RNA (1)...(19): siRNA sense strand
gcaaggaugccgggaagca

SEQ ID NO: 1249136 - RNA, 19 nt, Homo sapiens
  misc_RNA (1)...(19): siRNA sense strand
ggaaccaugaucccuagug

SEQ ID NO: 1249137 - RNA, 19 nt, Homo sapiens
  misc_RNA (1)...(19): siRNA sense strand
gaauuucccagagcugaug

SEQ ID NO: 1249138 - RNA, 19 nt, Homo sapiens
  misc_RNA (1)...(19): siRNA sense strand
cauuaccgcuaugggauga

SEQ ID NO: 1249139 - RNA, 19 nt, Homo sapiens
  misc_RNA (1)...(19): siRNA sense strand
uuggcaagaccauggauua

SEQ ID NO: 1249140 - RNA, 19 nt, Homo sapiens
  misc_RNA (1)...(19): siRNA sense strand
agacugguaucuguucugu

SEQ ID NO: 1249141 - RNA, 19 nt, Homo sapiens
  misc_RNA (1)...(19): siRNA sense strand
ggagggcugaacacacauu

SEQ ID NO: 1249142 - RNA, 19 nt, Homo sapiens
  misc_RNA (1)...(19): siRNA sense strand
guggagauuuacugaagca

SEQ ID NO: 1249143 - RNA, 19 nt, Homo sapiens
  misc_RNA (1)...(19): siRNA sense strand
caggaaacccacugagauc

SEQ ID NO: 1249144 - RNA, 19 nt, Homo sapiens
  misc_RNA (1)...(19): siRNA sense strand
acaggaaacccacugagau

SEQ ID NO: 1249145 - RNA, 19 nt, Homo sapiens
  misc_RNA (1)...(19): siRNA sense strand
caaggagacccggaaauac

SEQ ID NO: 1249146 - RNA, 19 nt, Homo sapiens
  misc_RNA (1)...(19): siRNA sense strand
ggacacgguggagauccua

SEQ ID NO: 1249147 - RNA, 19 nt, Homo sapiens
  misc_RNA (1)...(19): siRNA sense strand
aaggagacccggaaauaca

SEQ ID NO: 1249148 - RNA, 19 nt, Homo sapiens
  misc_RNA (1)...(19): siRNA sense strand
ugaagacugguaucuguuc

SEQ ID NO: 1249149 - RNA, 19 nt, Homo sapiens
  misc_RNA (1)...(19): siRNA sense strand
cacauuaccgcuacauugg

SEQ ID NO: 1249150 - RNA, 19 nt, Homo sapiens
  misc_RNA (1)...(19): siRNA sense strand
acaagaaggucuauuggua

SEQ ID NO: 1249151 - RNA, 19 nt, Homo sapiens
  misc_RNA (1)...(19): siRNA sense strand
gcaaagugguucaaguuau

SEQ ID NO: 1249152 - RNA, 19 nt, Homo sapiens
  misc_RNA (1)...(19): siRNA sense strand
gagaucgaguggagauuua

SEQ ID NO: 1249153 - RNA, 19 nt, Homo sapiens
  misc_RNA (1)...(19): siRNA sense strand
gaaccaugaucccuaguga

SEQ ID NO: 1249154 - RNA, 19 nt, Homo sapiens
  misc_RNA (1)...(19): siRNA sense strand
gaugaagacugguaucugu

SEQ ID NO: 1249155 - RNA, 19 nt, Homo sapiens
  misc_RNA (1)...(19): siRNA sense strand
gaaggucuauugguauuga

SEQ ID NO: 1249156 - RNA, 19 nt, Homo sapiens
  misc_RNA (1)...(19): siRNA sense strand
gaaccuaugugcccugucu

SEQ ID NO: 1249157 - RNA, 19 nt, Homo sapiens
  misc_RNA (1)...(19): siRNA sense strand
ggaaauacaagaaggucua

SEQ ID NO: 1249158 - RNA, 19 nt, Homo sapiens
  misc_RNA (1)...(19): siRNA sense strand
caaagugguucaaguuauc

SEQ ID NO: 1249159 - RNA, 19 nt, Homo sapiens
  misc_RNA (1)...(19): siRNA sense strand
guacgagucuccacacgau

SEQ ID NO: 1249160 - RNA, 19 nt, Homo sapiens
  misc_RNA (1)...(19): siRNA sense strand
ucaaggagacccggaaaua

SEQ ID NO: 1249161 - RNA, 19 nt, Homo sapiens
  misc_RNA (1)...(19): siRNA sense strand
gaguggagauuuacugaag

SEQ ID NO: 1249162 - RNA, 19 nt, Homo sapiens
  misc_RNA (1)...(19): siRNA sense strand
uaugugcccugucuaaaga

SEQ ID NO: 1249163 - RNA, 19 nt, Homo sapiens
  misc_RNA (1)...(19): siRNA sense strand
ggcaaagugguucaaguua

SEQ ID NO: 1249164 - RNA, 19 nt, Homo sapiens
  misc_RNA (1)...(19): siRNA sense strand
caaagacacaucaguggaa

SEQ ID NO: 1249165 - RNA, 19 nt, Homo sapiens
  misc_RNA (1)...(19): siRNA sense strand
gggcaaagugguucaaguu

SEQ ID NO: 1249166 - RNA, 19 nt, Homo sapiens
  misc_RNA (1)...(19): siRNA sense strand
aagaaggucuauugguauu

SEQ ID NO: 1249167 - RNA, 19 nt, Homo sapiens
  misc_RNA (1)...(19): siRNA sense strand
aguggaagaugcuuuagaa

SEQ ID NO: 1249168 - RNA, 19 nt, Homo sapiens
  misc_RNA (1)...(19): siRNA sense strand
ccugaaacguggauugaug

SEQ ID NO: 1249169 - RNA, 19 nt, Homo sapiens
  misc_RNA (1)...(19): siRNA sense strand
caagaaggucuauugguau

SEQ ID NO: 1249170 - RNA, 19 nt, Homo sapiens
  misc_RNA (1)...(19): siRNA sense strand
acacauuaccgcuacauug

SEQ ID NO: 1249171 - RNA, 19 nt, Homo sapiens
  misc_RNA (1)...(19): siRNA sense strand
gacaggaaacccacugaga

SEQ ID NO: 1249172 - RNA, 19 nt, Homo sapiens
  misc_RNA (1)...(19): siRNA sense strand
gaaauacaagaaggucuau

SEQ ID NO: 1249173 - RNA, 19 nt, Homo sapiens
  misc_RNA (1)...(19): siRNA sense strand
gaagacugguaucuguucu

SEQ ID NO: 1249174 - RNA, 19 nt, Homo sapiens
  misc_RNA (1)...(19): siRNA sense strand
gaucaaggagacccggaaa

SEQ ID NO: 1249175 - RNA, 19 nt, Homo sapiens
  misc_RNA (1)...(19): siRNA sense strand
gaagcagggcaaagugguu

SEQ ID NO: 1249176 - RNA, 19 nt, Homo sapiens
  misc_RNA (1)...(19): siRNA sense strand
ucaaacuuguggauccuau

SEQ ID NO: 1249177 - RNA, 19 nt, Homo sapiens
  misc_RNA (1)...(19): siRNA sense strand
ugggagggcugaacacaca

SEQ ID NO: 1249178 - RNA, 19 nt, Homo sapiens
  misc_RNA (1)...(19): siRNA sense strand
acacgaucagggagaauua

SEQ ID NO: 1249179 - RNA, 19 nt, Homo sapiens
  misc_RNA (1)...(19): siRNA sense strand
gagggcugaacacacauua

SEQ ID NO: 1249180 - RNA, 19 nt, Homo sapiens
  misc_RNA (1)...(19): siRNA sense strand
ggagaauuaucccuaaacc

SEQ ID NO: 1249181 - RNA, 19 nt, Homo sapiens
  misc_RNA (1)...(19): siRNA sense strand
ggaaacccacugagaucga

SEQ ID NO: 1249182 - RNA, 19 nt, Homo sapiens
  misc_RNA (1)...(19): siRNA sense strand
ugagaucgaguggagauuu

SEQ ID NO: 1249183 - RNA, 19 nt, Homo sapiens
  misc_RNA (1)...(19): siRNA sense strand
ggagagcggguacgagucu

SEQ ID NO: 1249184 - RNA, 19 nt, Homo sapiens
  misc_RNA (1)...(19): siRNA sense strand
gcaaggaugccgggaagca

SEQ ID NO: 1249185 - RNA, 19 nt, Homo sapiens
  misc_RNA (1)...(19): siRNA sense strand
ggaaccaugaucccuagug

SEQ ID NO: 1249186 - RNA, 19 nt, Homo sapiens
  misc_RNA (1)...(19): siRNA sense strand
gaauuucccagagcugaug

SEQ ID NO: 1249187 - RNA, 19 nt, Homo sapiens
  misc_RNA (1)...(19): siRNA sense strand
cauuaccgcuaugggauga

SEQ ID NO: 1249188 - RNA, 19 nt, Homo sapiens
  misc_RNA (1)...(19): siRNA sense strand
uuggcaagaccauggauua

SEQ ID NO: 1249189 - RNA, 19 nt, Homo sapiens
  misc_RNA (1)...(19): siRNA sense strand
agacugguaucuguucugu

SEQ ID NO: 1249190 - RNA, 19 nt, Homo sapiens
  misc_RNA (1)...(19): siRNA sense strand
ggagggcugaacacacauu

SEQ ID NO: 1249191 - RNA, 19 nt, Homo sapiens
  misc_RNA (1)...(19): siRNA sense strand
guggagauuuacugaagca

SEQ ID NO: 1249192 - RNA, 19 nt, Homo sapiens
  misc_RNA (1)...(19): siRNA sense strand
caggaaacccacugagauc

SEQ ID NO: 1249193 - RNA, 19 nt, Homo sapiens
  misc_RNA (1)...(19): siRNA sense strand
acaggaaacccacugagau

SEQ ID NO: 1249194 - RNA, 19 nt, Homo sapiens
  misc_RNA (1)...(19): siRNA sense strand
caaggagacccggaaauac

SEQ ID NO: 1249195 - RNA, 19 nt, Homo sapiens
  misc_RNA (1)...(19): siRNA sense strand
ggacacgguggagauccua

SEQ ID NO: 1249196 - RNA, 19 nt, Homo sapiens
  misc_RNA (1)...(19): siRNA sense strand
aaggagacccggaaauaca

SEQ ID NO: 1249197 - RNA, 19 nt, Homo sapiens
  misc_RNA (1)...(19): siRNA sense strand
ugaagacugguaucuguuc

SEQ ID NO: 1249198 - RNA, 19 nt, Homo sapiens
  misc_RNA (1)...(19): siRNA sense strand
cacauuaccgcuacauugg

SEQ ID NO: 1249199 - RNA, 19 nt, Homo sapiens
  misc_RNA (1)...(19): siRNA sense strand
acaagaaggucuauuggua

SEQ ID NO: 1249200 - RNA, 19 nt, Homo sapiens
  misc_RNA (1)...(19): siRNA sense strand
gcaaagugguucaaguuau

SEQ ID NO: 1249201 - RNA, 19 nt, Homo sapiens
  misc_RNA (1)...(19): siRNA sense strand
gagaucgaguggagauuua

SEQ ID NO: 1249202 - RNA, 19 nt, Homo sapiens
  misc_RNA (1)...(19): siRNA sense strand
gaaccaugaucccuaguga

SEQ ID NO: 1249203 - RNA, 19 nt, Homo sapiens
  misc_RNA (1)...(19): siRNA sense strand
gaugaagacugguaucugu

SEQ ID NO: 1249204 - RNA, 19 nt, Homo sapiens
  misc_RNA (1)...(19): siRNA sense strand
gaaggucuauugguauuga

SEQ ID NO: 1249205 - RNA, 19 nt, Homo sapiens
  misc_RNA (1)...(19): siRNA sense strand
gaaccuaugugcccugucu

SEQ ID NO: 1249206 - RNA, 19 nt, Homo sapiens
  misc_RNA (1)...(19): siRNA sense strand
ggaaauacaagaaggucua

SEQ ID NO: 1249207 - RNA, 19 nt, Homo sapiens
  misc_RNA (1)...(19): siRNA sense strand
caaagugguucaaguuauc

SEQ ID NO: 1249208 - RNA, 19 nt, Homo sapiens
  misc_RNA (1)...(19): siRNA sense strand
guacgagucuccacacgau

SEQ ID NO: 1249209 - RNA, 19 nt, Homo sapiens
  misc_RNA (1)...(19): siRNA sense strand
ucaaggagacccggaaaua

SEQ ID NO: 1249210 - RNA, 19 nt, Homo sapiens
  misc_RNA (1)...(19): siRNA sense strand
gaguggagauuuacugaag

SEQ ID NO: 1249211 - RNA, 19 nt, Homo sapiens
  misc_RNA (1)...(19): siRNA sense strand
uaugugcccugucuaaaga

SEQ ID NO: 1249212 - RNA, 19 nt, Homo sapiens
  misc_RNA (1)...(19): siRNA sense strand
ggcaaagugguucaaguua

SEQ ID NO: 1249213 - RNA, 19 nt, Homo sapiens
  misc_RNA (1)...(19): siRNA sense strand
caaagacacaucaguggaa

SEQ ID NO: 1249214 - RNA, 19 nt, Homo sapiens
  misc_RNA (1)...(19): siRNA sense strand
gggcaaagugguucaaguu

SEQ ID NO: 1249215 - RNA, 19 nt, Homo sapiens
  misc_RNA (1)...(19): siRNA sense strand
aagaaggucuauugguauu

SEQ ID NO: 1249216 - RNA, 19 nt, Homo sapiens
  misc_RNA (1)...(19): siRNA sense strand
aguggaagaugcuuuagaa

SEQ ID NO: 1249217 - RNA, 19 nt, Homo sapiens
  misc_RNA (1)...(19): siRNA sense strand
ccugaaacguggauugaug

SEQ ID NO: 1249218 - RNA, 19 nt, Homo sapiens
  misc_RNA (1)...(19): siRNA sense strand
caagaaggucuauugguau

SEQ ID NO: 1249219 - RNA, 19 nt, Homo sapiens
  misc_RNA (1)...(19): siRNA sense strand
acacauuaccgcuacauug

SEQ ID NO: 1249220 - RNA, 19 nt, Homo sapiens
  misc_RNA (1)...(19): siRNA sense strand
gacaggaaacccacugaga

SEQ ID NO: 1249221 - RNA, 19 nt, Homo sapiens
  misc_RNA (1)...(19): siRNA sense strand
gaaauacaagaaggucuau

SEQ ID NO: 1249222 - RNA, 19 nt, Homo sapiens
  misc_RNA (1)...(19): siRNA sense strand
gaagacugguaucuguucu

SEQ ID NO: 1249223 - RNA, 19 nt, Homo sapiens
  misc_RNA (1)...(19): siRNA sense strand
gaucaaggagacccggaaa

SEQ ID NO: 1249224 - RNA, 19 nt, Homo sapiens
  misc_RNA (1)...(19): siRNA sense strand
gaagcagggcaaagugguu

SEQ ID NO: 1249225 - RNA, 19 nt, Homo sapiens
  misc_RNA (1)...(19): siRNA sense strand
ucaaacuuguggauccuau

SEQ ID NO: 1249226 - RNA, 19 nt, Homo sapiens
  misc_RNA (1)...(19): siRNA sense strand
ugggagggcugaacacaca

SEQ ID NO: 1249227 - RNA, 19 nt, Homo sapiens
  misc_RNA (1)...(19): siRNA sense strand
acacgaucagggagaauua

SEQ ID NO: 1249228 - RNA, 19 nt, Homo sapiens
  misc_RNA (1)...(19): siRNA sense strand
gagggcugaacacacauua

SEQ ID NO: 1249229 - RNA, 19 nt, Homo sapiens
  misc_RNA (1)...(19): siRNA sense strand
ggagaauuaucccuaaacc

SEQ ID NO: 1249230 - RNA, 19 nt, Homo sapiens
  misc_RNA (1)...(19): siRNA sense strand
ggaaacccacugagaucga

SEQ ID NO: 1249231 - RNA, 19 nt, Homo sapiens
  misc_RNA (1)...(19): siRNA sense strand
ugagaucgaguggagauuu

SEQ ID NO: 1249232 - RNA, 19 nt, Homo sapiens
  misc_RNA (1)...(19): siRNA sense strand
ggagagcggguacgagucu

SEQ ID NO: 1249233 - RNA, 19 nt, Homo sapiens
  misc_RNA (1)...(19): siRNA sense strand
gcaaggaugccgggaagca

SEQ ID NO: 1249234 - RNA, 19 nt, Homo sapiens
  misc_RNA (1)...(19): siRNA sense strand
ggaaccaugaucccuagug

SEQ ID NO: 1249235 - RNA, 19 nt, Homo sapiens
  misc_RNA (1)...(19): siRNA sense strand
gaauuucccagagcugaug

SEQ ID NO: 1249236 - RNA, 19 nt, Homo sapiens
  misc_RNA (1)...(19): siRNA sense strand
cauuaccgcuaugggauga

SEQ ID NO: 1249237 - RNA, 19 nt, Homo sapiens
  misc_RNA (1)...(19): siRNA sense strand
uuggcaagaccauggauua

SEQ ID NO: 1249238 - RNA, 19 nt, Homo sapiens
  misc_RNA (1)...(19): siRNA sense strand
agacugguaucuguucugu

SEQ ID NO: 1249239 - RNA, 19 nt, Homo sapiens
  misc_RNA (1)...(19): siRNA sense strand
ggagggcugaacacacauu

SEQ ID NO: 1249240 - RNA, 19 nt, Homo sapiens
  misc_RNA (1)...(19): siRNA sense strand
guggagauuuacugaagca

SEQ ID NO: 1249241 - RNA, 19 nt, Homo sapiens
  misc_RNA (1)...(19): siRNA sense strand
caggaaacccacugagauc

SEQ ID NO: 1249242 - RNA, 19 nt, Homo sapiens
  misc_RNA (1)...(19): siRNA sense strand
acaggaaacccacugagau

SEQ ID NO: 1249243 - RNA, 19 nt, Homo sapiens
  misc_RNA (1)...(19): siRNA sense strand
caaggagacccggaaauac

SEQ ID NO: 1249244 - RNA, 19 nt, Homo sapiens
  misc_RNA (1)...(19): siRNA sense strand
ggacacgguggagauccua

SEQ ID NO: 1249245 - RNA, 19 nt, Homo sapiens
  misc_RNA (1)...(19): siRNA sense strand
aaggagacccggaaauaca

SEQ ID NO: 1249246 - RNA, 19 nt, Homo sapiens
  misc_RNA (1)...(19): siRNA sense strand
ugaagacugguaucuguuc

SEQ ID NO: 1249247 - RNA, 19 nt, Homo sapiens
  misc_RNA (1)...(19): siRNA sense strand
cacauuaccgcuacauugg

SEQ ID NO: 1249248 - RNA, 19 nt, Homo sapiens
  misc_RNA (1)...(19): siRNA sense strand
agacggaacucauaaauua

SEQ ID NO: 1249249 - RNA, 19 nt, Homo sapiens
  misc_RNA (1)...(19): siRNA sense strand
gaaaggagauaaaggaguu

SEQ ID NO: 1249250 - RNA, 19 nt, Homo sapiens
  misc_RNA (1)...(19): siRNA sense strand
gcaaacggcuguauagaug

SEQ ID NO: 1249251 - RNA, 19 nt, Homo sapiens
  misc_RNA (1)...(19): siRNA sense strand
ugaaagagaugcaacaaga

SEQ ID NO: 1249252 - RNA, 19 nt, Homo sapiens
  misc_RNA (1)...(19): siRNA sense strand
guacauugccugugauaua

SEQ ID NO: 1249253 - RNA, 19 nt, Homo sapiens
  misc_RNA (1)...(19): siRNA sense strand
ggacuaccuucuugacuuu

SEQ ID NO: 1249254 - RNA, 19 nt, Homo sapiens
  misc_RNA (1)...(19): siRNA sense strand
gaagcuggacgaucacuua

SEQ ID NO: 1249255 - RNA, 19 nt, Homo sapiens
  misc_RNA (1)...(19): siRNA sense strand
ggacaacgggagccaaaua

SEQ ID NO: 1249256 - RNA, 19 nt, Homo sapiens
  misc_RNA (1)...(19): siRNA sense strand
agaaacaguuccagaguaa

SEQ ID NO: 1249257 - RNA, 19 nt, Homo sapiens
  misc_RNA (1)...(19): siRNA sense strand
gauagggugugguuaaaug

SEQ ID NO: 1249258 - RNA, 19 nt, Homo sapiens
  misc_RNA (1)...(19): siRNA sense strand
aaaccuaggccucauaaua

SEQ ID NO: 1249259 - RNA, 19 nt, Homo sapiens
  misc_RNA (1)...(19): siRNA sense strand
gaaaaggguugucuccuaa

SEQ ID NO: 1249260 - RNA, 19 nt, Homo sapiens
  misc_RNA (1)...(19): siRNA sense strand
caaauauggugauguagau

SEQ ID NO: 1249261 - RNA, 19 nt, Homo sapiens
  misc_RNA (1)...(19): siRNA sense strand
ggacgucagggcauuguua

SEQ ID NO: 1249262 - RNA, 19 nt, Homo sapiens
  misc_RNA (1)...(19): siRNA sense strand
acaaguacauugccuguga

SEQ ID NO: 1249263 - RNA, 19 nt, Homo sapiens
  misc_RNA (1)...(19): siRNA sense strand
gaugauagggugugguuaa

SEQ ID NO: 1249264 - RNA, 19 nt, Homo sapiens
  misc_RNA (1)...(19): siRNA sense strand
ggaaauauacaacacugaa

SEQ ID NO: 1249265 - RNA, 19 nt, Homo sapiens
  misc_RNA (1)...(19): siRNA sense strand
ggaugaaacagaccucuuu

SEQ ID NO: 1249266 - RNA, 19 nt, Homo sapiens
  misc_RNA (1)...(19): siRNA sense strand
aaaggaaccugaauaugau

SEQ ID NO: 1249267 - RNA, 19 nt, Homo sapiens
  misc_RNA (1)...(19): siRNA sense strand
gggaaaaucuucuuuacaa

SEQ ID NO: 1249268 - RNA, 19 nt, Homo sapiens
  misc_RNA (1)...(19): siRNA sense strand
caaaggaaguuguucaaaa

SEQ ID NO: 1249269 - RNA, 19 nt, Homo sapiens
  misc_RNA (1)...(19): siRNA sense strand
uaagagagaguuuggacua

SEQ ID NO: 1249270 - RNA, 19 nt, Homo sapiens
  misc_RNA (1)...(19): siRNA sense strand
caaauaaccauagcaaaug

SEQ ID NO: 1249271 - RNA, 19 nt, Homo sapiens
  misc_RNA (1)...(19): siRNA sense strand
aagaaacaguuccagagua

SEQ ID NO: 1249272 - RNA, 19 nt, Homo sapiens
  misc_RNA (1)...(19): siRNA sense strand
aaaugaagguucuaaguag

SEQ ID NO: 1249273 - RNA, 19 nt, Homo sapiens
  misc_RNA (1)...(19): siRNA sense strand
aaacagaccucuuuuggaa

SEQ ID NO: 1249274 - RNA, 19 nt, Homo sapiens
  misc_RNA (1)...(19): siRNA sense strand
gaaagagaugcaacaagaa

SEQ ID NO: 1249275 - RNA, 19 nt, Homo sapiens
  misc_RNA (1)...(19): siRNA sense strand
gaagcaacuugaagagagu

SEQ ID NO: 1249276 - RNA, 19 nt, Homo sapiens
  misc_RNA (1)...(19): siRNA sense strand
gcaagagaaaggagauaaa

SEQ ID NO: 1249277 - RNA, 19 nt, Homo sapiens
  misc_RNA (1)...(19): siRNA sense strand
gcgaacagauuucaaagcu

SEQ ID NO: 1249278 - RNA, 19 nt, Homo sapiens
  misc_RNA (1)...(19): siRNA sense strand
aaccaaagguggaauaaca

SEQ ID NO: 1249279 - RNA, 19 nt, Homo sapiens
  misc_RNA (1)...(19): siRNA sense strand
auacaacacugaauuugga

SEQ ID NO: 1249280 - RNA, 19 nt, Homo sapiens
  misc_RNA (1)...(19): siRNA sense strand
cagugaggauggucgaaua

SEQ ID NO: 1249281 - RNA, 19 nt, Homo sapiens
  misc_RNA (1)...(19): siRNA sense strand
guugagccauuucgacaaa

SEQ ID NO: 1249282 - RNA, 19 nt, Homo sapiens
  misc_RNA (1)...(19): siRNA sense strand
gaagcaggacaugccauua

SEQ ID NO: 1249283 - RNA, 19 nt, Homo sapiens
  misc_RNA (1)...(19): siRNA sense strand
gaaauagucaagaaacagu

SEQ ID NO: 1249284 - RNA, 19 nt, Homo sapiens
  misc_RNA (1)...(19): siRNA sense strand
ggaagucaaugccagaaaa

SEQ ID NO: 1249285 - RNA, 19 nt, Homo sapiens
  misc_RNA (1)...(19): siRNA sense strand
gaaaucggcaugcaauugg

SEQ ID NO: 1249286 - RNA, 19 nt, Homo sapiens
  misc_RNA (1)...(19): siRNA sense strand
uguaauggaugaauuugga

SEQ ID NO: 1249287 - RNA, 19 nt, Homo sapiens
  misc_RNA (1)...(19): siRNA sense strand
ggaugaauuuggaaucagu

SEQ ID NO: 1249288 - RNA, 19 nt, Homo sapiens
  misc_RNA (1)...(19): siRNA sense strand
gugguuaaauggagaugaa

SEQ ID NO: 1249289 - RNA, 19 nt, Homo sapiens
  misc_RNA (1)...(19): siRNA sense strand
agccaaauauggugaugua

SEQ ID NO: 1249290 - RNA, 19 nt, Homo sapiens
  misc_RNA (1)...(19): siRNA sense strand
gauggaagcaacuugaaga

SEQ ID NO: 1249291 - RNA, 19 nt, Homo sapiens
  misc_RNA (1)...(19): siRNA sense strand
gaggagaaacugugucuag

SEQ ID NO: 1249292 - RNA, 19 nt, Homo sapiens
  misc_RNA (1)...(19): siRNA sense strand
gcucauccuuccucugaau

SEQ ID NO: 1249293 - RNA, 19 nt, Homo sapiens
  misc_RNA (1)...(19): siRNA sense strand
caacuucugguucuaauca

SEQ ID NO: 1249294 - RNA, 19 nt, Homo sapiens
  misc_RNA (1)...(19): siRNA sense strand
aaagagaugcaacaagaaa

SEQ ID NO: 1249295 - RNA, 19 nt, Homo sapiens
  misc_RNA (1)...(19): siRNA sense strand
agaaagugaugaugagcaa

SEQ ID NO: 1249296 - RNA, 19 nt, Homo sapiens
  misc_RNA (1)...(19): siRNA sense strand
ugaagaaagugaugaugag

SEQ ID NO: 1249297 - RNA, 19 nt, Homo sapiens
  misc_RNA (1)...(19): siRNA sense strand
gagaagagaaagaggacaa

SEQ ID NO: 1249298 - RNA, 19 nt, Homo sapiens
  misc_RNA (1)...(19): siRNA sense strand
agagaugcaacaagaaaua

SEQ ID NO: 1249299 - RNA, 19 nt, Homo sapiens
  misc_RNA (1)...(19): siRNA sense strand
aauugaagcuggacgauca

SEQ ID NO: 1249300 - RNA, 19 nt, Homo sapiens
  misc_RNA (1)...(19): siRNA sense strand
uaaguuggaugaugauagg

SEQ ID NO: 1249301 - RNA, 19 nt, Homo sapiens
  misc_RNA (1)...(19): siRNA sense strand
cauugccugugauauauaa

SEQ ID NO: 1249302 - RNA, 19 nt, Homo sapiens
  misc_RNA (1)...(19): siRNA sense strand
gaaagaggacacaaguaca

SEQ ID NO: 1249303 - RNA, 19 nt, Homo sapiens
  misc_RNA (1)...(19): siRNA sense strand
gcagacggaacucauaaau

SEQ ID NO: 1249304 - RNA, 19 nt, Homo sapiens
  misc_RNA (1)...(19): siRNA sense strand
cgaacagauuucaaagcua

SEQ ID NO: 1249305 - RNA, 19 nt, Homo sapiens
  misc_RNA (1)...(19): siRNA sense strand
gaauuuggaaucaguaagu

SEQ ID NO: 1249306 - RNA, 19 nt, Homo sapiens
  misc_RNA (1)...(19): siRNA sense strand
ccaaauauggugauguaga

SEQ ID NO: 1249307 - RNA, 19 nt, Homo sapiens
  misc_RNA (1)...(19): siRNA sense strand
uaagaggcguggagcuuca

SEQ ID NO: 1249308 - RNA, 19 nt, Homo sapiens
  misc_RNA (1)...(19): siRNA sense strand
aaaaggaaccugaauauga

SEQ ID NO: 1249309 - RNA, 19 nt, Homo sapiens
  misc_RNA (1)...(19): siRNA sense strand
gaauaagagagggaaauau

SEQ ID NO: 1249310 - RNA, 19 nt, Homo sapiens
  misc_RNA (1)...(19): siRNA sense strand
uuucagagauuccacuuca

SEQ ID NO: 1249311 - RNA, 19 nt, Homo sapiens
  misc_RNA (1)...(19): siRNA sense strand
uacauugccugugauauau

SEQ ID NO: 1249312 - RNA, 19 nt, Homo sapiens
  misc_RNA (1)...(19): siRNA sense strand
cugaaucccuaaccaguga

SEQ ID NO: 1249313 - RNA, 19 nt, Homo sapiens
  misc_RNA (1)...(19): siRNA sense strand
gcaggacaugccauuagua

SEQ ID NO: 1249314 - RNA, 19 nt, Homo sapiens
  misc_RNA (1)...(19): siRNA sense strand
cgaaaucggcaugcaauug

SEQ ID NO: 1249315 - RNA, 19 nt, Homo sapiens
  misc_RNA (1)...(19): siRNA sense strand
gauaaucaaagaggagaaa

SEQ ID NO: 1249316 - RNA, 19 nt, Homo sapiens
  misc_RNA (1)...(19): siRNA sense strand
ggaauaacaaaggaaguug

SEQ ID NO: 1249317 - RNA, 19 nt, Homo sapiens
  misc_RNA (1)...(19): siRNA sense strand
ugaaagaggacacaaguac

SEQ ID NO: 1249318 - RNA, 19 nt, Homo sapiens
  misc_RNA (1)...(19): siRNA sense strand
gaggagaagcugagaagca

SEQ ID NO: 1249319 - RNA, 19 nt, Homo sapiens
  misc_RNA (1)...(19): siRNA sense strand
agagaaaggagauaaagga

SEQ ID NO: 1249320 - RNA, 19 nt, Homo sapiens
  misc_RNA (1)...(19): siRNA sense strand
gaggacaacgggagccaaa

SEQ ID NO: 1249321 - RNA, 19 nt, Homo sapiens
  misc_RNA (1)...(19): siRNA sense strand
caagaaacaguuccagagu

SEQ ID NO: 1249322 - RNA, 19 nt, Homo sapiens
  misc_RNA (1)...(19): siRNA sense strand
caacaagaaauagucaaga

SEQ ID NO: 1249323 - RNA, 19 nt, Homo sapiens
  misc_RNA (1)...(19): siRNA sense strand
ccaaagguggaauaacaaa

SEQ ID NO: 1249324 - RNA, 19 nt, Homo sapiens
  misc_RNA (1)...(19): siRNA sense strand
uuucaaggcuuagaacaug

SEQ ID NO: 1249325 - RNA, 19 nt, Homo sapiens
  misc_RNA (1)...(19): siRNA sense strand
gagagucuuguaauauuug

SEQ ID NO: 1249326 - RNA, 19 nt, Homo sapiens
  misc_RNA (1)...(19): siRNA sense strand
gcuggacgaucacuuaaaa

SEQ ID NO: 1249327 - RNA, 19 nt, Homo sapiens
  misc_RNA (1)...(19): siRNA sense strand
gaaacgcucagccgguguu

SEQ ID NO: 1249328 - RNA, 19 nt, Homo sapiens
  misc_RNA (1)...(19): siRNA sense strand
ucagugggccuucaacuuc

SEQ ID NO: 1249329 - RNA, 19 nt, Homo sapiens
  misc_RNA (1)...(19): siRNA sense strand
aaccuaggccucauaauau

SEQ ID NO: 1249330 - RNA, 19 nt, Homo sapiens
  misc_RNA (1)...(19): siRNA sense strand
caagaaauagucaagaaac

SEQ ID NO: 1249331 - RNA, 19 nt, Homo sapiens
  misc_RNA (1)...(19): siRNA sense strand
gacaacgggagccaaauau

SEQ ID NO: 1249332 - RNA, 19 nt, Homo sapiens
  misc_RNA (1)...(19): siRNA sense strand
uaagagagggaaauauaca

SEQ ID NO: 1249333 - RNA, 19 nt, Homo sapiens
  misc_RNA (1)...(19): siRNA sense strand
caacgggagccaaauaugg

SEQ ID NO: 1249334 - RNA, 19 nt, Homo sapiens
  misc_RNA (1)...(19): siRNA sense strand
guaaagauguuugguucac

SEQ ID NO: 1249335 - RNA, 19 nt, Homo sapiens
  misc_RNA (1)...(19): siRNA sense strand
uauaaacccaguaaagaug

SEQ ID NO: 1249336 - RNA, 19 nt, Homo sapiens
  misc_RNA (1)...(19): siRNA sense strand
gcaaguaggaaagauaucu

SEQ ID NO: 1249337 - RNA, 19 nt, Homo sapiens
  misc_RNA (1)...(19): siRNA sense strand
gcaacaagaaauagucaag

SEQ ID NO: 1249338 - RNA, 19 nt, Homo sapiens
  misc_RNA (1)...(19): siRNA sense strand
uggacuaccuucuugacuu

SEQ ID NO: 1249339 - RNA, 19 nt, Homo sapiens
  misc_RNA (1)...(19): siRNA sense strand
gaaucaguaagucaacauu

SEQ ID NO: 1249340 - RNA, 19 nt, Homo sapiens
  misc_RNA (1)...(19): siRNA sense strand
aaacggcuguauagaugga

SEQ ID NO: 1249341 - RNA, 19 nt, Homo sapiens
  misc_RNA (1)...(19): siRNA sense strand
gacggaacucauaaauuaa

SEQ ID NO: 1249342 - RNA, 19 nt, Homo sapiens
  misc_RNA (1)...(19): siRNA sense strand
ugaaaccuaggccucauaa

SEQ ID NO: 1249343 - RNA, 19 nt, Homo sapiens
  misc_RNA (1)...(19): siRNA sense strand
agauuccacuucacacuga

SEQ ID NO: 1249344 - RNA, 19 nt, Homo sapiens
  misc_RNA (1)...(19): siRNA sense strand
agaaaaggguugucuccua

SEQ ID NO: 1249345 - RNA, 19 nt, Homo sapiens
  misc_RNA (1)...(19): siRNA sense strand
gcaaaugcaugggaaaauc

SEQ ID NO: 1249346 - RNA, 19 nt, Homo sapiens
  misc_RNA (1)...(19): siRNA sense strand
gauaaaggaguuuccaaaa

SEQ ID NO: 1249347 - RNA, 19 nt, Homo sapiens
  misc_RNA (1)...(19): siRNA sense strand
gagcaagagaaaggagaua

SEQ ID NO: 1249348 - RNA, 19 nt, Homo sapiens
  misc_RNA (1)...(19): siRNA sense strand
uggcagagcugaaagagua

SEQ ID NO: 1249349 - RNA, 19 nt, Homo sapiens
  misc_RNA (1)...(19): siRNA sense strand
ggacgaggauccauaugug

SEQ ID NO: 1249350 - RNA, 19 nt, Homo sapiens
  misc_RNA (1)...(19): siRNA sense strand
ucauggagauguugucuaa

SEQ ID NO: 1249351 - RNA, 19 nt, Homo sapiens
  misc_RNA (1)...(19): siRNA sense strand
aggcagagcucaacaguga

SEQ ID NO: 1249352 - RNA, 19 nt, Homo sapiens
  misc_RNA (1)...(19): siRNA sense strand
ugaaggugcugaugaaguu

SEQ ID NO: 1249353 - RNA, 19 nt, Homo sapiens
  misc_RNA (1)...(19): siRNA sense strand
uagacgagcuuaucugcua

SEQ ID NO: 1249354 - RNA, 19 nt, Homo sapiens
  misc_RNA (1)...(19): siRNA sense strand
gaaagaguacgcaacagaa

SEQ ID NO: 1249355 - RNA, 19 nt, Homo sapiens
  misc_RNA (1)...(19): siRNA sense strand
gcagcgcucucagaaauug

SEQ ID NO: 1249356 - RNA, 19 nt, Homo sapiens
  misc_RNA (1)...(19): siRNA sense strand
gcagcaacaucuucacugu

SEQ ID NO: 1249357 - RNA, 19 nt, Homo sapiens
  misc_RNA (1)...(19): siRNA sense strand
gcaaguaccccaacaagua

SEQ ID NO: 1249358 - RNA, 19 nt, Homo sapiens
  misc_RNA (1)...(19): siRNA sense strand
cuaaggacuuggacuacua

SEQ ID NO: 1249359 - RNA, 19 nt, Homo sapiens
  misc_RNA (1)...(19): siRNA sense strand
ccaacuauaugcccaagga

SEQ ID NO: 1249360 - RNA, 19 nt, Homo sapiens
  misc_RNA (1)...(19): siRNA sense strand
gaaggaggcagugaagaaa

SEQ ID NO: 1249361 - RNA, 19 nt, Homo sapiens
  misc_RNA (1)...(19): siRNA sense strand
gaugggagcuguggaccuu

SEQ ID NO: 1249362 - RNA, 19 nt, Homo sapiens
  misc_RNA (1)...(19): siRNA sense strand
gaaggacgaggauccauau

SEQ ID NO: 1249363 - RNA, 19 nt, Homo sapiens
  misc_RNA (1)...(19): siRNA sense strand
guauaccucuacuugauga

SEQ ID NO: 1249364 - RNA, 19 nt, Homo sapiens
  misc_RNA (1)...(19): siRNA sense strand
gcacacugcucaagaagcu

SEQ ID NO: 1249365 - RNA, 19 nt, Homo sapiens
  misc_RNA (1)...(19): siRNA sense strand
agccagagcugcaguaugu

SEQ ID NO: 1249366 - RNA, 19 nt, Homo sapiens
  misc_RNA (1)...(19): siRNA sense strand
uggcagcgcucucagaaau

SEQ ID NO: 1249367 - RNA, 19 nt, Homo sapiens
  misc_RNA (1)...(19): siRNA sense strand
agaagccacucaucucuga

SEQ ID NO: 1249368 - RNA, 19 nt, Homo sapiens
  misc_RNA (1)...(19): siRNA sense strand
gcucaacagugacaagaag

SEQ ID NO: 1249369 - RNA, 19 nt, Homo sapiens
  misc_RNA (1)...(19): siRNA sense strand
ccacucaggacucagauaa

SEQ ID NO: 1249370 - RNA, 19 nt, Homo sapiens
  misc_RNA (1)...(19): siRNA sense strand
gcaaccugcucgaucugaa

SEQ ID NO: 1249371 - RNA, 19 nt, Homo sapiens
  misc_RNA (1)...(19): siRNA sense strand
gauguugucuaaggacuug

SEQ ID NO: 1249372 - RNA, 19 nt, Homo sapiens
  misc_RNA (1)...(19): siRNA sense strand
ugaagaagcuaguauaccu

SEQ ID NO: 1249373 - RNA, 19 nt, Homo sapiens
  misc_RNA (1)...(19): siRNA sense strand
gaagauggaccggcagaug

SEQ ID NO: 1249374 - RNA, 19 nt, Homo sapiens
  misc_RNA (1)...(19): siRNA sense strand
caucgagcccacacuguua

SEQ ID NO: 1249375 - RNA, 19 nt, Homo sapiens
  misc_RNA (1)...(19): siRNA sense strand
gaagaaggaggcagugaag

SEQ ID NO: 1249376 - RNA, 19 nt, Homo sapiens
  misc_RNA (1)...(19): siRNA sense strand
cuaaagaagccaacagaga

SEQ ID NO: 1249377 - RNA, 19 nt, Homo sapiens
  misc_RNA (1)...(19): siRNA sense strand
ggaaggcugugcgugcuau

SEQ ID NO: 1249378 - RNA, 19 nt, Homo sapiens
  misc_RNA (1)...(19): siRNA sense strand
guacaacgacccuaucuac

SEQ ID NO: 1249379 - RNA, 19 nt, Homo sapiens
  misc_RNA (1)...(19): siRNA sense strand
ggccugagauccugaagca

SEQ ID NO: 1249380 - RNA, 19 nt, Homo sapiens
  misc_RNA (1)...(19): siRNA sense strand
acaagaaggagaagaagaa

SEQ ID NO: 1249381 - RNA, 19 nt, Homo sapiens
  misc_RNA (1)...(19): siRNA sense strand
ugacagccauugugaaacu

SEQ ID NO: 1249382 - RNA, 19 nt, Homo sapiens
  misc_RNA (1)...(19): siRNA sense strand
uugacaagaucacagagua

SEQ ID NO: 1249383 - RNA, 19 nt, Homo sapiens
  misc_RNA (1)...(19): siRNA sense strand
uggcuuccgucuaccauaa

SEQ ID NO: 1249384 - RNA, 19 nt, Homo sapiens
  misc_RNA (1)...(19): siRNA sense strand
agaaagugauugcaucgau

SEQ ID NO: 1249385 - RNA, 19 nt, Homo sapiens
  misc_RNA (1)...(19): siRNA sense strand
uggagaagcuggacaucau

SEQ ID NO: 1249386 - RNA, 19 nt, Homo sapiens
  misc_RNA (1)...(19): siRNA sense strand
ugaaagaguacgcaacaga

SEQ ID NO: 1249387 - RNA, 19 nt, Homo sapiens
  misc_RNA (1)...(19): siRNA sense strand
ugaauuacgccaagaguca

SEQ ID NO: 1249388 - RNA, 19 nt, Homo sapiens
  misc_RNA (1)...(19): siRNA sense strand
gaccucaucuccgacucua

SEQ ID NO: 1249389 - RNA, 19 nt, Homo sapiens
  misc_RNA (1)...(19): siRNA sense strand
ugaaggacgaggauccaua

SEQ ID NO: 1249390 - RNA, 19 nt, Homo sapiens
  misc_RNA (1)...(19): siRNA sense strand
gaagauggagccucugaac

SEQ ID NO: 1249391 - RNA, 19 nt, Homo sapiens
  misc_RNA (1)...(19): siRNA sense strand
ggacugccucgccaacuau

SEQ ID NO: 1249392 - RNA, 19 nt, Homo sapiens
  misc_RNA (1)...(19): siRNA sense strand
gcaguaccagccaaucuug

SEQ ID NO: 1249393 - RNA, 19 nt, Homo sapiens
  misc_RNA (1)...(19): siRNA sense strand
ugcagcagguccucaguuu

SEQ ID NO: 1249394 - RNA, 19 nt, Homo sapiens
  misc_RNA (1)...(19): siRNA sense strand
agaaggaggcagugaagaa

SEQ ID NO: 1249395 - RNA, 19 nt, Homo sapiens
  misc_RNA (1)...(19): siRNA sense strand
gagaagcuggacaucauga

SEQ ID NO: 1249396 - RNA, 19 nt, Homo sapiens
  misc_RNA (1)...(19): siRNA sense strand
gaaggcagagcucaacagu

SEQ ID NO: 1249397 - RNA, 19 nt, Homo sapiens
  misc_RNA (1)...(19): siRNA sense strand
gcagagcagcaacaucuuc

SEQ ID NO: 1249398 - RNA, 19 nt, Homo sapiens
  misc_RNA (1)...(19): siRNA sense strand
acuuagagcugucccugaa

SEQ ID NO: 1249399 - RNA, 19 nt, Homo sapiens
  misc_RNA (1)...(19): siRNA sense strand
gaaguacaacgacccuauc

SEQ ID NO: 1249400 - RNA, 19 nt, Homo sapiens
  misc_RNA (1)...(19): siRNA sense strand
agaaggagaagaagaagga

SEQ ID NO: 1249401 - RNA, 19 nt, Homo sapiens
  misc_RNA (1)...(19): siRNA sense strand
ggacaucuuccgcaaguac

SEQ ID NO: 1249402 - RNA, 19 nt, Homo sapiens
  misc_RNA (1)...(19): siRNA sense strand
cggacaaccuggagcugaa

SEQ ID NO: 1249403 - RNA, 19 nt, Homo sapiens
  misc_RNA (1)...(19): siRNA sense strand
gggcugccaugaucuggau

SEQ ID NO: 1249404 - RNA, 19 nt, Homo sapiens
  misc_RNA (1)...(19): siRNA sense strand
ccaucaagguggagcaauc

SEQ ID NO: 1249405 - RNA, 19 nt, Homo sapiens
  misc_RNA (1)...(19): siRNA sense strand
gcugaaagaguacgcaaca

SEQ ID NO: 1249406 - RNA, 19 nt, Homo sapiens
  misc_RNA (1)...(19): siRNA sense strand
gaagcuaguauaccucuac

SEQ ID NO: 1249407 - RNA, 19 nt, Homo sapiens
  misc_RNA (1)...(19): siRNA sense strand
gaaggauauucccaaugag

SEQ ID NO: 1249408 - RNA, 19 nt, Homo sapiens
  misc_RNA (1)...(19): siRNA sense strand
ccacugcacauccucuuug

SEQ ID NO: 1249409 - RNA, 19 nt, Homo sapiens
  misc_RNA (1)...(19): siRNA sense strand
agauggagccucugaacaa

SEQ ID NO: 1249410 - RNA, 19 nt, Homo sapiens
  misc_RNA (1)...(19): siRNA sense strand
gcacgcugcucgaccucau

SEQ ID NO: 1249411 - RNA, 19 nt, Homo sapiens
  misc_RNA (1)...(19): siRNA sense strand
gacaagaaggagaagaaga

SEQ ID NO: 1249412 - RNA, 19 nt, Homo sapiens
  misc_RNA (1)...(19): siRNA sense strand
uggacugccucgccaacua

SEQ ID NO: 1249413 - RNA, 19 nt, Homo sapiens
  misc_RNA (1)...(19): siRNA sense strand
cugagauccugaagcauga

SEQ ID NO: 1249414 - RNA, 19 nt, Homo sapiens
  misc_RNA (1)...(19): siRNA sense strand
gaggugguguuggcugaga

SEQ ID NO: 1249415 - RNA, 19 nt, Homo sapiens
  misc_RNA (1)...(19): siRNA sense strand
aaggacaucuuccgcaagu

SEQ ID NO: 1249416 - RNA, 19 nt, Homo sapiens
  misc_RNA (1)...(19): siRNA sense strand
ggucaucaaggacaucuuc

SEQ ID NO: 1249417 - RNA, 19 nt, Homo sapiens
  misc_RNA (1)...(19): siRNA sense strand
gaagcuggacaucaugauc

SEQ ID NO: 1249418 - RNA, 19 nt, Homo sapiens
  misc_RNA (1)...(19): siRNA sense strand
uaccucuacuugaugaauu

SEQ ID NO: 1249419 - RNA, 19 nt, Homo sapiens
  misc_RNA (1)...(19): siRNA sense strand
gugacaagaaggagaagaa

SEQ ID NO: 1249420 - RNA, 19 nt, Homo sapiens
  misc_RNA (1)...(19): siRNA sense strand
guacgcaacagaaguggau

SEQ ID NO: 1249421 - RNA, 19 nt, Homo sapiens
  misc_RNA (1)...(19): siRNA sense strand
gcagagcucaacagugaca

SEQ ID NO: 1249422 - RNA, 19 nt, Homo sapiens
  misc_RNA (1)...(19): siRNA sense strand
gcugugaaggugcugauga

SEQ ID NO: 1249423 - RNA, 19 nt, Homo sapiens
  misc_RNA (1)...(19): siRNA sense strand
guggugcucucugcuguga

SEQ ID NO: 1249424 - RNA, 19 nt, Homo sapiens
  misc_RNA (1)...(19): siRNA sense strand
ggagaagcuggacaucaug

SEQ ID NO: 1249425 - RNA, 19 nt, Homo sapiens
  misc_RNA (1)...(19): siRNA sense strand
acgagaccauccucaagaa

SEQ ID NO: 1249426 - RNA, 19 nt, Homo sapiens
  misc_RNA (1)...(19): siRNA sense strand
gccaggacaugcucuacca

SEQ ID NO: 1249427 - RNA, 19 nt, Homo sapiens
  misc_RNA (1)...(19): siRNA sense strand
gcucggucaugaagaugga

SEQ ID NO: 1249428 - RNA, 19 nt, Homo sapiens
  misc_RNA (1)...(19): siRNA sense strand
cgacuuugccauccaguuc

SEQ ID NO: 1249429 - RNA, 19 nt, Homo sapiens
  misc_RNA (1)...(19): siRNA sense strand
gaccguggcuacaucuacu

SEQ ID NO: 1249430 - RNA, 19 nt, Homo sapiens
  misc_RNA (1)...(19): siRNA sense strand
gaaguucauggagauguug

SEQ ID NO: 1249431 - RNA, 19 nt, Homo sapiens
  misc_RNA (1)...(19): siRNA sense strand
uggccugagugaccucuuu

SEQ ID NO: 1249432 - RNA, 19 nt, Homo sapiens
  misc_RNA (1)...(19): siRNA sense strand
gagcucaacagugacaaga

SEQ ID NO: 1249433 - RNA, 19 nt, Homo sapiens
  misc_RNA (1)...(19): siRNA sense strand
aaagugauugcaucgauga

SEQ ID NO: 1249434 - RNA, 19 nt, Homo sapiens
  misc_RNA (1)...(19): siRNA sense strand
gcagugaagaaagugauug

SEQ ID NO: 1249435 - RNA, 19 nt, Homo sapiens
  misc_RNA (1)...(19): siRNA sense strand
ugaaguacaacgacccuau

SEQ ID NO: 1249436 - RNA, 19 nt, Homo sapiens
  misc_RNA (1)...(19): siRNA sense strand
ucaaucucaucgugcagaa

SEQ ID NO: 1249437 - RNA, 19 nt, Homo sapiens
  misc_RNA (1)...(19): siRNA sense strand
ggugcucucugcugugaag

SEQ ID NO: 1249438 - RNA, 19 nt, Homo sapiens
  misc_RNA (1)...(19): siRNA sense strand
gauggagccucugaacaac

SEQ ID NO: 1249439 - RNA, 19 nt, Homo sapiens
  misc_RNA (1)...(19): siRNA sense strand
cagcagguccucaguuugg

SEQ ID NO: 1249440 - RNA, 19 nt, Homo sapiens
  misc_RNA (1)...(19): siRNA sense strand
ggaucgacaacgcagauga

SEQ ID NO: 1249441 - RNA, 19 nt, Homo sapiens
  misc_RNA (1)...(19): siRNA sense strand
agcaugagaugaagguguu

SEQ ID NO: 1249442 - RNA, 19 nt, Homo sapiens
  misc_RNA (1)...(19): siRNA sense strand
ugucuaaggacuuggacua

SEQ ID NO: 1249443 - RNA, 19 nt, Homo sapiens
  misc_RNA (1)...(19): siRNA sense strand
caaguaugagagugugauu

SEQ ID NO: 1249444 - RNA, 19 nt, Homo sapiens
  misc_RNA (1)...(19): siRNA sense strand
uuagagcugucccugaagu

SEQ ID NO: 1249445 - RNA, 19 nt, Homo sapiens
  misc_RNA (1)...(19): siRNA sense strand
guucaaccgcaacagcuuu

SEQ ID NO: 1249446 - RNA, 19 nt, Homo sapiens
  misc_RNA (1)...(19): siRNA sense strand
gcagcagguccucaguuug

SEQ ID NO: 1249447 - RNA, 19 nt, Homo sapiens
  misc_RNA (1)...(19): siRNA sense strand
gaaucuggacucccuggau

SEQ ID NO: 1249448 - RNA, 19 nt, Homo sapiens
  misc_RNA (1)...(19): siRNA sense strand
uggcagagcugaaagagua

SEQ ID NO: 1249449 - RNA, 19 nt, Homo sapiens
  misc_RNA (1)...(19): siRNA sense strand
ggacgaggauccauaugug

SEQ ID NO: 1249450 - RNA, 19 nt, Homo sapiens
  misc_RNA (1)...(19): siRNA sense strand
ucauggagauguugucuaa

SEQ ID NO: 1249451 - RNA, 19 nt, Homo sapiens
  misc_RNA (1)...(19): siRNA sense strand
aggcagagcucaacaguga

SEQ ID NO: 1249452 - RNA, 19 nt, Homo sapiens
  misc_RNA (1)...(19): siRNA sense strand
ugaaggugcugaugaaguu

SEQ ID NO: 1249453 - RNA, 19 nt, Homo sapiens
  misc_RNA (1)...(19): siRNA sense strand
uagacgagcuuaucugcua

SEQ ID NO: 1249454 - RNA, 19 nt, Homo sapiens
  misc_RNA (1)...(19): siRNA sense strand
gaaagaguacgcaacagaa

SEQ ID NO: 1249455 - RNA, 19 nt, Homo sapiens
  misc_RNA (1)...(19): siRNA sense strand
gcagcgcucucagaaauug

SEQ ID NO: 1249456 - RNA, 19 nt, Homo sapiens
  misc_RNA (1)...(19): siRNA sense strand
gcagcaacaucuucacugu

SEQ ID NO: 1249457 - RNA, 19 nt, Homo sapiens
  misc_RNA (1)...(19): siRNA sense strand
gcaaguaccccaacaagua

SEQ ID NO: 1249458 - RNA, 19 nt, Homo sapiens
  misc_RNA (1)...(19): siRNA sense strand
cuaaggacuuggacuacua

SEQ ID NO: 1249459 - RNA, 19 nt, Homo sapiens
  misc_RNA (1)...(19): siRNA sense strand
ccaacuauaugcccaagga

SEQ ID NO: 1249460 - RNA, 19 nt, Homo sapiens
  misc_RNA (1)...(19): siRNA sense strand
gaaggaggcagugaagaaa

SEQ ID NO: 1249461 - RNA, 19 nt, Homo sapiens
  misc_RNA (1)...(19): siRNA sense strand
gaugggagcuguggaccuu

SEQ ID NO: 1249462 - RNA, 19 nt, Homo sapiens
  misc_RNA (1)...(19): siRNA sense strand
gaaggacgaggauccauau

SEQ ID NO: 1249463 - RNA, 19 nt, Homo sapiens
  misc_RNA (1)...(19): siRNA sense strand
guauaccucuacuugauga

SEQ ID NO: 1249464 - RNA, 19 nt, Homo sapiens
  misc_RNA (1)...(19): siRNA sense strand
gcacacugcucaagaagcu

SEQ ID NO: 1249465 - RNA, 19 nt, Homo sapiens
  misc_RNA (1)...(19): siRNA sense strand
agccagagcugcaguaugu

SEQ ID NO: 1249466 - RNA, 19 nt, Homo sapiens
  misc_RNA (1)...(19): siRNA sense strand
uggcagcgcucucagaaau

SEQ ID NO: 1249467 - RNA, 19 nt, Homo sapiens
  misc_RNA (1)...(19): siRNA sense strand
agaagccacucaucucuga

SEQ ID NO: 1249468 - RNA, 19 nt, Homo sapiens
  misc_RNA (1)...(19): siRNA sense strand
gcucaacagugacaagaag

SEQ ID NO: 1249469 - RNA, 19 nt, Homo sapiens
  misc_RNA (1)...(19): siRNA sense strand
ccacucaggacucagauaa

SEQ ID NO: 1249470 - RNA, 19 nt, Homo sapiens
  misc_RNA (1)...(19): siRNA sense strand
gcaaccugcucgaucugaa

SEQ ID NO: 1249471 - RNA, 19 nt, Homo sapiens
  misc_RNA (1)...(19): siRNA sense strand
gauguugucuaaggacuug

SEQ ID NO: 1249472 - RNA, 19 nt, Homo sapiens
  misc_RNA (1)...(19): siRNA sense strand
ugaagaagcuaguauaccu

SEQ ID NO: 1249473 - RNA, 19 nt, Homo sapiens
  misc_RNA (1)...(19): siRNA sense strand
gaagauggaccggcagaug

SEQ ID NO: 1249474 - RNA, 19 nt, Homo sapiens
  misc_RNA (1)...(19): siRNA sense strand
caucgagcccacacuguua

SEQ ID NO: 1249475 - RNA, 19 nt, Homo sapiens
  misc_RNA (1)...(19): siRNA sense strand
gaagaaggaggcagugaag

SEQ ID NO: 1249476 - RNA, 19 nt, Homo sapiens
  misc_RNA (1)...(19): siRNA sense strand
cuaaagaagccaacagaga

SEQ ID NO: 1249477 - RNA, 19 nt, Homo sapiens
  misc_RNA (1)...(19): siRNA sense strand
ggaaggcugugcgugcuau

SEQ ID NO: 1249478 - RNA, 19 nt, Homo sapiens
  misc_RNA (1)...(19): siRNA sense strand
guacaacgacccuaucuac

SEQ ID NO: 1249479 - RNA, 19 nt, Homo sapiens
  misc_RNA (1)...(19): siRNA sense strand
ggccugagauccugaagca

SEQ ID NO: 1249480 - RNA, 19 nt, Homo sapiens
  misc_RNA (1)...(19): siRNA sense strand
acaagaaggagaagaagaa

SEQ ID NO: 1249481 - RNA, 19 nt, Homo sapiens
  misc_RNA (1)...(19): siRNA sense strand
ugacagccauugugaaacu

SEQ ID NO: 1249482 - RNA, 19 nt, Homo sapiens
  misc_RNA (1)...(19): siRNA sense strand
uugacaagaucacagagua

SEQ ID NO: 1249483 - RNA, 19 nt, Homo sapiens
  misc_RNA (1)...(19): siRNA sense strand
uggcuuccgucuaccauaa

SEQ ID NO: 1249484 - RNA, 19 nt, Homo sapiens
  misc_RNA (1)...(19): siRNA sense strand
agaaagugauugcaucgau

SEQ ID NO: 1249485 - RNA, 19 nt, Homo sapiens
  misc_RNA (1)...(19): siRNA sense strand
uggagaagcuggacaucau

SEQ ID NO: 1249486 - RNA, 19 nt, Homo sapiens
  misc_RNA (1)...(19): siRNA sense strand
ugaaagaguacgcaacaga

SEQ ID NO: 1249487 - RNA, 19 nt, Homo sapiens
  misc_RNA (1)...(19): siRNA sense strand
ugaauuacgccaagaguca

SEQ ID NO: 1249488 - RNA, 19 nt, Homo sapiens
  misc_RNA (1)...(19): siRNA sense strand
gaccucaucuccgacucua

SEQ ID NO: 1249489 - RNA, 19 nt, Homo sapiens
  misc_RNA (1)...(19): siRNA sense strand
ugaaggacgaggauccaua

SEQ ID NO: 1249490 - RNA, 19 nt, Homo sapiens
  misc_RNA (1)...(19): siRNA sense strand
gaagauggagccucugaac

SEQ ID NO: 1249491 - RNA, 19 nt, Homo sapiens
  misc_RNA (1)...(19): siRNA sense strand
ggacugccucgccaacuau

SEQ ID NO: 1249492 - RNA, 19 nt, Homo sapiens
  misc_RNA (1)...(19): siRNA sense strand
gcaguaccagccaaucuug

SEQ ID NO: 1249493 - RNA, 19 nt, Homo sapiens
  misc_RNA (1)...(19): siRNA sense strand
ugcagcagguccucaguuu

SEQ ID NO: 1249494 - RNA, 19 nt, Homo sapiens
  misc_RNA (1)...(19): siRNA sense strand
agaaggaggcagugaagaa

SEQ ID NO: 1249495 - RNA, 19 nt, Homo sapiens
  misc_RNA (1)...(19): siRNA sense strand
gagaagcuggacaucauga

SEQ ID NO: 1249496 - RNA, 19 nt, Homo sapiens
  misc_RNA (1)...(19): siRNA sense strand
gaaggcagagcucaacagu

SEQ ID NO: 1249497 - RNA, 19 nt, Homo sapiens
  misc_RNA (1)...(19): siRNA sense strand
gcagagcagcaacaucuuc

SEQ ID NO: 1249498 - RNA, 19 nt, Homo sapiens
  misc_RNA (1)...(19): siRNA sense strand
acuuagagcugucccugaa

SEQ ID NO: 1249499 - RNA, 19 nt, Homo sapiens
  misc_RNA (1)...(19): siRNA sense strand
gaaguacaacgacccuauc

SEQ ID NO: 1249500 - RNA, 19 nt, Homo sapiens
  misc_RNA (1)...(19): siRNA sense strand
agaaggagaagaagaagga

SEQ ID NO: 1249501 - RNA, 19 nt, Homo sapiens
  misc_RNA (1)...(19): siRNA sense strand
ggacaucuuccgcaaguac

SEQ ID NO: 1249502 - RNA, 19 nt, Homo sapiens
  misc_RNA (1)...(19): siRNA sense strand
cggacaaccuggagcugaa

SEQ ID NO: 1249503 - RNA, 19 nt, Homo sapiens
  misc_RNA (1)...(19): siRNA sense strand
gggcugccaugaucuggau

SEQ ID NO: 1249504 - RNA, 19 nt, Homo sapiens
  misc_RNA (1)...(19): siRNA sense strand
ccaucaagguggagcaauc

SEQ ID NO: 1249505 - RNA, 19 nt, Homo sapiens
  misc_RNA (1)...(19): siRNA sense strand
gcugaaagaguacgcaaca

SEQ ID NO: 1249506 - RNA, 19 nt, Homo sapiens
  misc_RNA (1)...(19): siRNA sense strand
gaagcuaguauaccucuac

SEQ ID NO: 1249507 - RNA, 19 nt, Homo sapiens
  misc_RNA (1)...(19): siRNA sense strand
gaaggauauucccaaugag

SEQ ID NO: 1249508 - RNA, 19 nt, Homo sapiens
  misc_RNA (1)...(19): siRNA sense strand
ccacugcacauccucuuug

SEQ ID NO: 1249509 - RNA, 19 nt, Homo sapiens
  misc_RNA (1)...(19): siRNA sense strand
agauggagccucugaacaa

SEQ ID NO: 1249510 - RNA, 19 nt, Homo sapiens
  misc_RNA (1)...(19): siRNA sense strand
gcacgcugcucgaccucau

SEQ ID NO: 1249511 - RNA, 19 nt, Homo sapiens
  misc_RNA (1)...(19): siRNA sense strand
gacaagaaggagaagaaga

SEQ ID NO: 1249512 - RNA, 19 nt, Homo sapiens
  misc_RNA (1)...(19): siRNA sense strand
uggacugccucgccaacua

SEQ ID NO: 1249513 - RNA, 19 nt, Homo sapiens
  misc_RNA (1)...(19): siRNA sense strand
cugagauccugaagcauga

SEQ ID NO: 1249514 - RNA, 19 nt, Homo sapiens
  misc_RNA (1)...(19): siRNA sense strand
gaggugguguuggcugaga

SEQ ID NO: 1249515 - RNA, 19 nt, Homo sapiens
  misc_RNA (1)...(19): siRNA sense strand
aaggacaucuuccgcaagu

SEQ ID NO: 1249516 - RNA, 19 nt, Homo sapiens
  misc_RNA (1)...(19): siRNA sense strand
ggucaucaaggacaucuuc

SEQ ID NO: 1249517 - RNA, 19 nt, Homo sapiens
  misc_RNA (1)...(19): siRNA sense strand
gaagcuggacaucaugauc

SEQ ID NO: 1249518 - RNA, 19 nt, Homo sapiens
  misc_RNA (1)...(19): siRNA sense strand
uaccucuacuugaugaauu

SEQ ID NO: 1249519 - RNA, 19 nt, Homo sapiens
  misc_RNA (1)...(19): siRNA sense strand
gugacaagaaggagaagaa

SEQ ID NO: 1249520 - RNA, 19 nt, Homo sapiens
  misc_RNA (1)...(19): siRNA sense strand
guacgcaacagaaguggau

SEQ ID NO: 1249521 - RNA, 19 nt, Homo sapiens
  misc_RNA (1)...(19): siRNA sense strand
gcagagcucaacagugaca

SEQ ID NO: 1249522 - RNA, 19 nt, Homo sapiens
  misc_RNA (1)...(19): siRNA sense strand
gcugugaaggugcugauga

SEQ ID NO: 1249523 - RNA, 19 nt, Homo sapiens
  misc_RNA (1)...(19): siRNA sense strand
guggugcucucugcuguga

SEQ ID NO: 1249524 - RNA, 19 nt, Homo sapiens
  misc_RNA (1)...(19): siRNA sense strand
ggagaagcuggacaucaug

SEQ ID NO: 1249525 - RNA, 19 nt, Homo sapiens
  misc_RNA (1)...(19): siRNA sense strand
acgagaccauccucaagaa

SEQ ID NO: 1249526 - RNA, 19 nt, Homo sapiens
  misc_RNA (1)...(19): siRNA sense strand
gccaggacaugcucuacca

SEQ ID NO: 1249527 - RNA, 19 nt, Homo sapiens
  misc_RNA (1)...(19): siRNA sense strand
gcucggucaugaagaugga

SEQ ID NO: 1249528 - RNA, 19 nt, Homo sapiens
  misc_RNA (1)...(19): siRNA sense strand
cgacuuugccauccaguuc

SEQ ID NO: 1249529 - RNA, 19 nt, Homo sapiens
  misc_RNA (1)...(19): siRNA sense strand
gaccguggcuacaucuacu

SEQ ID NO: 1249530 - RNA, 19 nt, Homo sapiens
  misc_RNA (1)...(19): siRNA sense strand
gaaguucauggagauguug

SEQ ID NO: 1249531 - RNA, 19 nt, Homo sapiens
  misc_RNA (1)...(19): siRNA sense strand
uggccugagugaccucuuu

SEQ ID NO: 1249532 - RNA, 19 nt, Homo sapiens
  misc_RNA (1)...(19): siRNA sense strand
gagcucaacagugacaaga

SEQ ID NO: 1249533 - RNA, 19 nt, Homo sapiens
  misc_RNA (1)...(19): siRNA sense strand
aaagugauugcaucgauga

SEQ ID NO: 1249534 - RNA, 19 nt, Homo sapiens
  misc_RNA (1)...(19): siRNA sense strand
gcagugaagaaagugauug

SEQ ID NO: 1249535 - RNA, 19 nt, Homo sapiens
  misc_RNA (1)...(19): siRNA sense strand
ugaaguacaacgacccuau

SEQ ID NO: 1249536 - RNA, 19 nt, Homo sapiens
  misc_RNA (1)...(19): siRNA sense strand
ucaaucucaucgugcagaa

SEQ ID NO: 1249537 - RNA, 19 nt, Homo sapiens
  misc_RNA (1)...(19): siRNA sense strand
ggugcucucugcugugaag

SEQ ID NO: 1249538 - RNA, 19 nt, Homo sapiens
  misc_RNA (1)...(19): siRNA sense strand
gauggagccucugaacaac

SEQ ID NO: 1249539 - RNA, 19 nt, Homo sapiens
  misc_RNA (1)...(19): siRNA sense strand
cagcagguccucaguuugg

SEQ ID NO: 1249540 - RNA, 19 nt, Homo sapiens
  misc_RNA (1)...(19): siRNA sense strand
ggaucgacaacgcagauga

SEQ ID NO: 1249541 - RNA, 19 nt, Homo sapiens
  misc_RNA (1)...(19): siRNA sense strand
agcaugagaugaagguguu

SEQ ID NO: 1249542 - RNA, 19 nt, Homo sapiens
  misc_RNA (1)...(19): siRNA sense strand
ugucuaaggacuuggacua

SEQ ID NO: 1249543 - RNA, 19 nt, Homo sapiens
  misc_RNA (1)...(19): siRNA sense strand
caaguaugagagugugauu

SEQ ID NO: 1249544 - RNA, 19 nt, Homo sapiens
  misc_RNA (1)...(19): siRNA sense strand
uuagagcugucccugaagu

SEQ ID NO: 1249545 - RNA, 19 nt, Homo sapiens
  misc_RNA (1)...(19): siRNA sense strand
guucaaccgcaacagcuuu

SEQ ID NO: 1249546 - RNA, 19 nt, Homo sapiens
  misc_RNA (1)...(19): siRNA sense strand
gcagcagguccucaguuug

SEQ ID NO: 1249547 - RNA, 19 nt, Homo sapiens
  misc_RNA (1)...(19): siRNA sense strand
gaaucuggacucccuggau

SEQ ID NO: 1249548 - RNA, 19 nt, Homo sapiens
  misc_RNA (1)...(19): siRNA sense strand
gggaggaguucugcaucua

SEQ ID NO: 1249549 - RNA, 19 nt, Homo sapiens
  misc_RNA (1)...(19): siRNA sense strand
ggacaacccacugaacgaa

SEQ ID NO: 1249550 - RNA, 19 nt, Homo sapiens
  misc_RNA (1)...(19): siRNA sense strand
gaggaguucugcaucuaca

SEQ ID NO: 1249551 - RNA, 19 nt, Homo sapiens
  misc_RNA (1)...(19): siRNA sense strand
cgucaaggaccgcaagaaa

SEQ ID NO: 1249552 - RNA, 19 nt, Homo sapiens
  misc_RNA (1)...(19): siRNA sense strand
cgccaucgccuucuccuuu

SEQ ID NO: 1249553 - RNA, 19 nt, Homo sapiens
  misc_RNA (1)...(19): siRNA sense strand
ccaaggacaacccacugaa

SEQ ID NO: 1249554 - RNA, 19 nt, Homo sapiens
  misc_RNA (1)...(19): siRNA sense strand
gcagaucagcagcgucaag

SEQ ID NO: 1249555 - RNA, 19 nt, Homo sapiens
  misc_RNA (1)...(19): siRNA sense strand
ucaaggaccgcaagaaagc

SEQ ID NO: 1249556 - RNA, 19 nt, Homo sapiens
  misc_RNA (1)...(19): siRNA sense strand
ucuccaagcccaaggacaa

SEQ ID NO: 1249557 - RNA, 19 nt, Homo sapiens
  misc_RNA (1)...(19): siRNA sense strand
ggaggaguucugcaucuac

SEQ ID NO: 1249558 - RNA, 19 nt, Homo sapiens
  misc_RNA (1)...(19): siRNA sense strand
cccaacgccugcagcuaug

SEQ ID NO: 1249559 - RNA, 19 nt, Homo sapiens
  misc_RNA (1)...(19): siRNA sense strand
gggaggaguucugcaucua

SEQ ID NO: 1249560 - RNA, 19 nt, Homo sapiens
  misc_RNA (1)...(19): siRNA sense strand
ggacaacccacugaacgaa

SEQ ID NO: 1249561 - RNA, 19 nt, Homo sapiens
  misc_RNA (1)...(19): siRNA sense strand
gaggaguucugcaucuaca

SEQ ID NO: 1249562 - RNA, 19 nt, Homo sapiens
  misc_RNA (1)...(19): siRNA sense strand
cgucaaggaccgcaagaaa

SEQ ID NO: 1249563 - RNA, 19 nt, Homo sapiens
  misc_RNA (1)...(19): siRNA sense strand
cgccaucgccuucuccuuu

SEQ ID NO: 1249564 - RNA, 19 nt, Homo sapiens
  misc_RNA (1)...(19): siRNA sense strand
ccaaggacaacccacugaa

SEQ ID NO: 1249565 - RNA, 19 nt, Homo sapiens
  misc_RNA (1)...(19): siRNA sense strand
gcagaucagcagcgucaag

SEQ ID NO: 1249566 - RNA, 19 nt, Homo sapiens
  misc_RNA (1)...(19): siRNA sense strand
ucaaggaccgcaagaaagc

SEQ ID NO: 1249567 - RNA, 19 nt, Homo sapiens
  misc_RNA (1)...(19): siRNA sense strand
ucuccaagcccaaggacaa

SEQ ID NO: 1249568 - RNA, 19 nt, Homo sapiens
  misc_RNA (1)...(19): siRNA sense strand
ggaggaguucugcaucuac

SEQ ID NO: 1249569 - RNA, 19 nt, Homo sapiens
  misc_RNA (1)...(19): siRNA sense strand
cccaacgccugcagcuaug

SEQ ID NO: 1249570 - RNA, 19 nt, Homo sapiens
  misc_RNA (1)...(19): siRNA sense strand
gggaggaguucugcaucua

SEQ ID NO: 1249571 - RNA, 19 nt, Homo sapiens
  misc_RNA (1)...(19): siRNA sense strand
ggacaacccacugaacgaa

SEQ ID NO: 1249572 - RNA, 19 nt, Homo sapiens
  misc_RNA (1)...(19): siRNA sense strand
gaggaguucugcaucuaca

SEQ ID NO: 1249573 - RNA, 19 nt, Homo sapiens
  misc_RNA (1)...(19): siRNA sense strand
cgucaaggaccgcaagaaa

SEQ ID NO: 1249574 - RNA, 19 nt, Homo sapiens
  misc_RNA (1)...(19): siRNA sense strand
ccaaggacaacccacugaa

SEQ ID NO: 1249575 - RNA, 19 nt, Homo sapiens
  misc_RNA (1)...(19): siRNA sense strand
gcagaucagcagcgucaag

SEQ ID NO: 1249576 - RNA, 19 nt, Homo sapiens
  misc_RNA (1)...(19): siRNA sense strand
ucaaggaccgcaagaaagc

SEQ ID NO: 1249577 - RNA, 19 nt, Homo sapiens
  misc_RNA (1)...(19): siRNA sense strand
ucuccaagcccaaggacaa

SEQ ID NO: 1249578 - RNA, 19 nt, Homo sapiens
  misc_RNA (1)...(19): siRNA sense strand
ggaggaguucugcaucuac

SEQ ID NO: 1249579 - RNA, 19 nt, Homo sapiens
  misc_RNA (1)...(19): siRNA sense strand
cccaacgccugcagcuaug

SEQ ID NO: 1249580 - RNA, 19 nt, Homo sapiens
  misc_RNA (1)...(19): siRNA sense strand
gagagaaggucauuaguga

SEQ ID NO: 1249581 - RNA, 19 nt, Homo sapiens
  misc_RNA (1)...(19): siRNA sense strand
gaacuuuggucauugcuaa

SEQ ID NO: 1249582 - RNA, 19 nt, Homo sapiens
  misc_RNA (1)...(19): siRNA sense strand
uaagaucgaugaagaauug

SEQ ID NO: 1249583 - RNA, 19 nt, Homo sapiens
  misc_RNA (1)...(19): siRNA sense strand
ggauagaugucauagaauu

SEQ ID NO: 1249584 - RNA, 19 nt, Homo sapiens
  misc_RNA (1)...(19): siRNA sense strand
agaaagagcuguuguggaa

SEQ ID NO: 1249585 - RNA, 19 nt, Homo sapiens
  misc_RNA (1)...(19): siRNA sense strand
gaaaugggauuggguaaga

SEQ ID NO: 1249586 - RNA, 19 nt, Homo sapiens
  misc_RNA (1)...(19): siRNA sense strand
ggacacaggauuaagaaua

SEQ ID NO: 1249587 - RNA, 19 nt, Homo sapiens
  misc_RNA (1)...(19): siRNA sense strand
gaacagaauguauugcaua

SEQ ID NO: 1249588 - RNA, 19 nt, Homo sapiens
  misc_RNA (1)...(19): siRNA sense strand
gaauaucccuguagaaucu

SEQ ID NO: 1249589 - RNA, 19 nt, Homo sapiens
  misc_RNA (1)...(19): siRNA sense strand
caggauagaugucauagaa

SEQ ID NO: 1249590 - RNA, 19 nt, Homo sapiens
  misc_RNA (1)...(19): siRNA sense strand
caaagccaguuguuguuua

SEQ ID NO: 1249591 - RNA, 19 nt, Homo sapiens
  misc_RNA (1)...(19): siRNA sense strand
guaaucacgucauuugaaa

SEQ ID NO: 1249592 - RNA, 19 nt, Homo sapiens
  misc_RNA (1)...(19): siRNA sense strand
gaacagaagaagaaagaaa

SEQ ID NO: 1249593 - RNA, 19 nt, Homo sapiens
  misc_RNA (1)...(19): siRNA sense strand
gagaaggucauuagugaua

SEQ ID NO: 1249594 - RNA, 19 nt, Homo sapiens
  misc_RNA (1)...(19): siRNA sense strand
caaauacuaucgaucagaa

SEQ ID NO: 1249595 - RNA, 19 nt, Homo sapiens
  misc_RNA (1)...(19): siRNA sense strand
ugauaaagaucuagaguug

SEQ ID NO: 1249596 - RNA, 19 nt, Homo sapiens
  misc_RNA (1)...(19): siRNA sense strand
gaagagaagccaguuauga

SEQ ID NO: 1249597 - RNA, 19 nt, Homo sapiens
  misc_RNA (1)...(19): siRNA sense strand
gauagagagucgacagaaa

SEQ ID NO: 1249598 - RNA, 19 nt, Homo sapiens
  misc_RNA (1)...(19): siRNA sense strand
gcagauucauccuguggua

SEQ ID NO: 1249599 - RNA, 19 nt, Homo sapiens
  misc_RNA (1)...(19): siRNA sense strand
uaucagaacuuuggucauu

SEQ ID NO: 1249600 - RNA, 19 nt, Homo sapiens
  misc_RNA (1)...(19): siRNA sense strand
ugaaacugcugaagauauu

SEQ ID NO: 1249601 - RNA, 19 nt, Homo sapiens
  misc_RNA (1)...(19): siRNA sense strand
gaugaaggacacaggauua

SEQ ID NO: 1249602 - RNA, 19 nt, Homo sapiens
  misc_RNA (1)...(19): siRNA sense strand
ggaagugaauaucccugua

SEQ ID NO: 1249603 - RNA, 19 nt, Homo sapiens
  misc_RNA (1)...(19): siRNA sense strand
gacacaggauuaagaauau

SEQ ID NO: 1249604 - RNA, 19 nt, Homo sapiens
  misc_RNA (1)...(19): siRNA sense strand
agauaucccuacaauguua

SEQ ID NO: 1249605 - RNA, 19 nt, Homo sapiens
  misc_RNA (1)...(19): siRNA sense strand
gaaggucauuagugauaaa

SEQ ID NO: 1249606 - RNA, 19 nt, Homo sapiens
  misc_RNA (1)...(19): siRNA sense strand
ccagauaucccuacaaugu

SEQ ID NO: 1249607 - RNA, 19 nt, Homo sapiens
  misc_RNA (1)...(19): siRNA sense strand
gaaggacacaggauuaaga

SEQ ID NO: 1249608 - RNA, 19 nt, Homo sapiens
  misc_RNA (1)...(19): siRNA sense strand
aauaugaagugccgucuaa

SEQ ID NO: 1249609 - RNA, 19 nt, Homo sapiens
  misc_RNA (1)...(19): siRNA sense strand
uagaugauuucccuaauga

SEQ ID NO: 1249610 - RNA, 19 nt, Homo sapiens
  misc_RNA (1)...(19): siRNA sense strand
gaaagagaacagaauguau

SEQ ID NO: 1249611 - RNA, 19 nt, Homo sapiens
  misc_RNA (1)...(19): siRNA sense strand
guguuuaucuucuuaguga

SEQ ID NO: 1249612 - RNA, 19 nt, Homo sapiens
  misc_RNA (1)...(19): siRNA sense strand
gcucgcaugucuugggaua

SEQ ID NO: 1249613 - RNA, 19 nt, Homo sapiens
  misc_RNA (1)...(19): siRNA sense strand
gaaauucgguaccguagac

SEQ ID NO: 1249614 - RNA, 19 nt, Homo sapiens
  misc_RNA (1)...(19): siRNA sense strand
uuucagaggucaugucaaa

SEQ ID NO: 1249615 - RNA, 19 nt, Homo sapiens
  misc_RNA (1)...(19): siRNA sense strand
gaaaacuccuccucuacua

SEQ ID NO: 1249616 - RNA, 19 nt, Homo sapiens
  misc_RNA (1)...(19): siRNA sense strand
gcugauaacaaacuucuuu

SEQ ID NO: 1249617 - RNA, 19 nt, Homo sapiens
  misc_RNA (1)...(19): siRNA sense strand
cuggauggcugaauucaaa

SEQ ID NO: 1249618 - RNA, 19 nt, Homo sapiens
  misc_RNA (1)...(19): siRNA sense strand
gaucuagaguuguuguuag

SEQ ID NO: 1249619 - RNA, 19 nt, Homo sapiens
  misc_RNA (1)...(19): siRNA sense strand
acaauugaguuaaguccua

SEQ ID NO: 1249620 - RNA, 19 nt, Homo sapiens
  misc_RNA (1)...(19): siRNA sense strand
gaugaagaauugguaacaa

SEQ ID NO: 1249621 - RNA, 19 nt, Homo sapiens
  misc_RNA (1)...(19): siRNA sense strand
ggaaaaggcucgcaugucu

SEQ ID NO: 1249622 - RNA, 19 nt, Homo sapiens
  misc_RNA (1)...(19): siRNA sense strand
ggucauuagugauaaagau

SEQ ID NO: 1249623 - RNA, 19 nt, Homo sapiens
  misc_RNA (1)...(19): siRNA sense strand
caagagagaaggucauuag

SEQ ID NO: 1249624 - RNA, 19 nt, Homo sapiens
  misc_RNA (1)...(19): siRNA sense strand
uaaugaugcuacuucguaa

SEQ ID NO: 1249625 - RNA, 19 nt, Homo sapiens
  misc_RNA (1)...(19): siRNA sense strand
ugauuucccuaaugaauug

SEQ ID NO: 1249626 - RNA, 19 nt, Homo sapiens
  misc_RNA (1)...(19): siRNA sense strand
cuaacuggauggcugaauu

SEQ ID NO: 1249627 - RNA, 19 nt, Homo sapiens
  misc_RNA (1)...(19): siRNA sense strand
gaugcuacuucguaaaugu

SEQ ID NO: 1249628 - RNA, 19 nt, Homo sapiens
  misc_RNA (1)...(19): siRNA sense strand
ggauuaagaauaugaagug

SEQ ID NO: 1249629 - RNA, 19 nt, Homo sapiens
  misc_RNA (1)...(19): siRNA sense strand
caccagauaucccuacaau

SEQ ID NO: 1249630 - RNA, 19 nt, Homo sapiens
  misc_RNA (1)...(19): siRNA sense strand
gaugaaaacuccuccucua

SEQ ID NO: 1249631 - RNA, 19 nt, Homo sapiens
  misc_RNA (1)...(19): siRNA sense strand
ucugggaaguucuugauuu

SEQ ID NO: 1249632 - RNA, 19 nt, Homo sapiens
  misc_RNA (1)...(19): siRNA sense strand
gaaggcauggaauggcuua

SEQ ID NO: 1249633 - RNA, 19 nt, Homo sapiens
  misc_RNA (1)...(19): siRNA sense strand
gaggagugaugcgauggua

SEQ ID NO: 1249634 - RNA, 19 nt, Homo sapiens
  misc_RNA (1)...(19): siRNA sense strand
gaaacgguuaggcagaaua

SEQ ID NO: 1249635 - RNA, 19 nt, Homo sapiens
  misc_RNA (1)...(19): siRNA sense strand
gguaaucacgucauuugaa

SEQ ID NO: 1249636 - RNA, 19 nt, Homo sapiens
  misc_RNA (1)...(19): siRNA sense strand
ugauguugcucuugaaguu

SEQ ID NO: 1249637 - RNA, 19 nt, Homo sapiens
  misc_RNA (1)...(19): siRNA sense strand
ugacaucacuagucuuucu

SEQ ID NO: 1249638 - RNA, 19 nt, Homo sapiens
  misc_RNA (1)...(19): siRNA sense strand
cagaauguauugcauaugc

SEQ ID NO: 1249639 - RNA, 19 nt, Homo sapiens
  misc_RNA (1)...(19): siRNA sense strand
cagcaaauacuaucgauca

SEQ ID NO: 1249640 - RNA, 19 nt, Homo sapiens
  misc_RNA (1)...(19): siRNA sense strand
uauagacccuguuacacaa

SEQ ID NO: 1249641 - RNA, 19 nt, Homo sapiens
  misc_RNA (1)...(19): siRNA sense strand
gagaaguagucguuuaugc

SEQ ID NO: 1249642 - RNA, 19 nt, Homo sapiens
  misc_RNA (1)...(19): siRNA sense strand
uaagacaguucagugcauu

SEQ ID NO: 1249643 - RNA, 19 nt, Homo sapiens
  misc_RNA (1)...(19): siRNA sense strand
agagguguuuaucuucuua

SEQ ID NO: 1249644 - RNA, 19 nt, Homo sapiens
  misc_RNA (1)...(19): siRNA sense strand
ccaaguagaaggcauggaa

SEQ ID NO: 1249645 - RNA, 19 nt, Homo sapiens
  misc_RNA (1)...(19): siRNA sense strand
uaacaaauucugggaaguu

SEQ ID NO: 1249646 - RNA, 19 nt, Homo sapiens
  misc_RNA (1)...(19): siRNA sense strand
gaaacugcugaagauauua

SEQ ID NO: 1249647 - RNA, 19 nt, Homo sapiens
  misc_RNA (1)...(19): siRNA sense strand
aauggaacagcaacaauua

SEQ ID NO: 1249648 - RNA, 19 nt, Homo sapiens
  misc_RNA (1)...(19): siRNA sense strand
gcugguggccugggcauua

SEQ ID NO: 1249649 - RNA, 19 nt, Homo sapiens
  misc_RNA (1)...(19): siRNA sense strand
gaucgaugaagaauuggua

SEQ ID NO: 1249650 - RNA, 19 nt, Homo sapiens
  misc_RNA (1)...(19): siRNA sense strand
gaagucugauguugcucuu

SEQ ID NO: 1249651 - RNA, 19 nt, Homo sapiens
  misc_RNA (1)...(19): siRNA sense strand
agaaagagaacagaaugua

SEQ ID NO: 1249652 - RNA, 19 nt, Homo sapiens
  misc_RNA (1)...(19): siRNA sense strand
ccuacaauguuauaucaug

SEQ ID NO: 1249653 - RNA, 19 nt, Homo sapiens
  misc_RNA (1)...(19): siRNA sense strand
guaagacaguucagugcau

SEQ ID NO: 1249654 - RNA, 19 nt, Homo sapiens
  misc_RNA (1)...(19): siRNA sense strand
ccuguagaaucugaaguua

SEQ ID NO: 1249655 - RNA, 19 nt, Homo sapiens
  misc_RNA (1)...(19): siRNA sense strand
gaugauuucccuaaugaau

SEQ ID NO: 1249656 - RNA, 19 nt, Homo sapiens
  misc_RNA (1)...(19): siRNA sense strand
uagaggaacagaagaagaa

SEQ ID NO: 1249657 - RNA, 19 nt, Homo sapiens
  misc_RNA (1)...(19): siRNA sense strand
ccuaaggaauuaauggaau

SEQ ID NO: 1249658 - RNA, 19 nt, Homo sapiens
  misc_RNA (1)...(19): siRNA sense strand
gcaaauacuaucgaucaga

SEQ ID NO: 1249659 - RNA, 19 nt, Homo sapiens
  misc_RNA (1)...(19): siRNA sense strand
gauugaauauccuauagac

SEQ ID NO: 1249660 - RNA, 19 nt, Homo sapiens
  misc_RNA (1)...(19): siRNA sense strand
cuucguaaauguuguaauc

SEQ ID NO: 1249661 - RNA, 19 nt, Homo sapiens
  misc_RNA (1)...(19): siRNA sense strand
ugaaguuccuccuaaacga

SEQ ID NO: 1249662 - RNA, 19 nt, Homo sapiens
  misc_RNA (1)...(19): siRNA sense strand
aaagagcuguuguggaagu

SEQ ID NO: 1249663 - RNA, 19 nt, Homo sapiens
  misc_RNA (1)...(19): siRNA sense strand
gguggucagucuggauuaa

SEQ ID NO: 1249664 - RNA, 19 nt, Homo sapiens
  misc_RNA (1)...(19): siRNA sense strand
aaagccaguuguuguuuau

SEQ ID NO: 1249665 - RNA, 19 nt, Homo sapiens
  misc_RNA (1)...(19): siRNA sense strand
gaagugaauaucccuguag

SEQ ID NO: 1249666 - RNA, 19 nt, Homo sapiens
  misc_RNA (1)...(19): siRNA sense strand
gaugcgaugguaccaagua

SEQ ID NO: 1249667 - RNA, 19 nt, Homo sapiens
  misc_RNA (1)...(19): siRNA sense strand
caggaccaauuaaagagaa

SEQ ID NO: 1249668 - RNA, 19 nt, Homo sapiens
  misc_RNA (1)...(19): siRNA sense strand
auaaugaugcuacuucgua

SEQ ID NO: 1249669 - RNA, 19 nt, Homo sapiens
  misc_RNA (1)...(19): siRNA sense strand
gagcuguuguggaagugaa

SEQ ID NO: 1249670 - RNA, 19 nt, Homo sapiens
  misc_RNA (1)...(19): siRNA sense strand
ugccagauguauuugauga

SEQ ID NO: 1249671 - RNA, 19 nt, Homo sapiens
  misc_RNA (1)...(19): siRNA sense strand
acaguucagugcauugcua

SEQ ID NO: 1249672 - RNA, 19 nt, Homo sapiens
  misc_RNA (1)...(19): siRNA sense strand
guuguuagaucgaagugau

SEQ ID NO: 1249673 - RNA, 19 nt, Homo sapiens
  misc_RNA (1)...(19): siRNA sense strand
gauagaugucauagaauug

SEQ ID NO: 1249674 - RNA, 19 nt, Homo sapiens
  misc_RNA (1)...(19): siRNA sense strand
gaucuucaggcccaggaua

SEQ ID NO: 1249675 - RNA, 19 nt, Homo sapiens
  misc_RNA (1)...(19): siRNA sense strand
ucacaaaugacaagcaugu

SEQ ID NO: 1249676 - RNA, 19 nt, Homo sapiens
  misc_RNA (1)...(19): siRNA sense strand
aaagaaagagaacagaaug

SEQ ID NO: 1249677 - RNA, 19 nt, Homo sapiens
  misc_RNA (1)...(19): siRNA sense strand
agauguauuugaugacuug

SEQ ID NO: 1249678 - RNA, 19 nt, Homo sapiens
  misc_RNA (1)...(19): siRNA sense strand
gaauaugaagugccgucua

SEQ ID NO: 1249679 - RNA, 19 nt, Homo sapiens
  misc_RNA (1)...(19): siRNA sense strand
ggaaauaaaaggaucaaga

SEQ ID NO: 1249680 - RNA, 19 nt, Homo sapiens
  misc_RNA (1)...(19): siRNA sense strand
gaaggaauuugaugaggau

SEQ ID NO: 1249681 - RNA, 19 nt, Homo sapiens
  misc_RNA (1)...(19): siRNA sense strand
ggaauuugaugaggauuug

SEQ ID NO: 1249682 - RNA, 19 nt, Homo sapiens
  misc_RNA (1)...(19): siRNA sense strand
gagcagaugcgcaagaaga

SEQ ID NO: 1249683 - RNA, 19 nt, Homo sapiens
  misc_RNA (1)...(19): siRNA sense strand
gggagcccauugagaagua

SEQ ID NO: 1249684 - RNA, 19 nt, Homo sapiens
  misc_RNA (1)...(19): siRNA sense strand
ccaagcggcucaaugacaa

SEQ ID NO: 1249685 - RNA, 19 nt, Homo sapiens
  misc_RNA (1)...(19): siRNA sense strand
gacaaggaguaccaaguga

SEQ ID NO: 1249686 - RNA, 19 nt, Homo sapiens
  misc_RNA (1)...(19): siRNA sense strand
caacaucgccaggaagaaa

SEQ ID NO: 1249687 - RNA, 19 nt, Homo sapiens
  misc_RNA (1)...(19): siRNA sense strand
ucaaggaagugacacacaa

SEQ ID NO: 1249688 - RNA, 19 nt, Homo sapiens
  misc_RNA (1)...(19): siRNA sense strand
ucaaugagcaguacgagaa

SEQ ID NO: 1249689 - RNA, 19 nt, Homo sapiens
  misc_RNA (1)...(19): siRNA sense strand
gcaagaagaccaugaagac

SEQ ID NO: 1249690 - RNA, 19 nt, Homo sapiens
  misc_RNA (1)...(19): siRNA sense strand
cacacaacauccacuauga

SEQ ID NO: 1249691 - RNA, 19 nt, Homo sapiens
  misc_RNA (1)...(19): siRNA sense strand
gaugaggauuuggaggaua

SEQ ID NO: 1249692 - RNA, 19 nt, Homo sapiens
  misc_RNA (1)...(19): siRNA sense strand
gggccaagcggcucaauga

SEQ ID NO: 1249693 - RNA, 19 nt, Homo sapiens
  misc_RNA (1)...(19): siRNA sense strand
gaucuugaguucaugaaac

SEQ ID NO: 1249694 - RNA, 19 nt, Homo sapiens
  misc_RNA (1)...(19): siRNA sense strand
ggaagugacacacaacauc

SEQ ID NO: 1249695 - RNA, 19 nt, Homo sapiens
  misc_RNA (1)...(19): siRNA sense strand
gaaggaggaggucaacauc

SEQ ID NO: 1249696 - RNA, 19 nt, Homo sapiens
  misc_RNA (1)...(19): siRNA sense strand
aggauaagacggagaauga

SEQ ID NO: 1249697 - RNA, 19 nt, Homo sapiens
  misc_RNA (1)...(19): siRNA sense strand
ugacaaggaguaccaagug

SEQ ID NO: 1249698 - RNA, 19 nt, Homo sapiens
  misc_RNA (1)...(19): siRNA sense strand
gguuucgacuucaacauca

SEQ ID NO: 1249699 - RNA, 19 nt, Homo sapiens
  misc_RNA (1)...(19): siRNA sense strand
gaagugacaaggaguacca

SEQ ID NO: 1249700 - RNA, 19 nt, Homo sapiens
  misc_RNA (1)...(19): siRNA sense strand
gauaagacggagaaugaca

SEQ ID NO: 1249701 - RNA, 19 nt, Homo sapiens
  misc_RNA (1)...(19): siRNA sense strand
caacauccacuaugagacu

SEQ ID NO: 1249702 - RNA, 19 nt, Homo sapiens
  misc_RNA (1)...(19): siRNA sense strand
caaggaguaccaagugaau

SEQ ID NO: 1249703 - RNA, 19 nt, Homo sapiens
  misc_RNA (1)...(19): siRNA sense strand
ugacacacaacauccacua

SEQ ID NO: 1249704 - RNA, 19 nt, Homo sapiens
  misc_RNA (1)...(19): siRNA sense strand
augaggauuuggaggauaa

SEQ ID NO: 1249705 - RNA, 19 nt, Homo sapiens
  misc_RNA (1)...(19): siRNA sense strand
ccacugcugccuuuacuuc

SEQ ID NO: 1249706 - RNA, 19 nt, Homo sapiens
  misc_RNA (1)...(19): siRNA sense strand
ccaugagcaucaacuccaa

SEQ ID NO: 1249707 - RNA, 19 nt, Homo sapiens
  misc_RNA (1)...(19): siRNA sense strand
uaagacggagaaugacaaa

SEQ ID NO: 1249708 - RNA, 19 nt, Homo sapiens
  misc_RNA (1)...(19): siRNA sense strand
cguguccacugcugccuuu

SEQ ID NO: 1249709 - RNA, 19 nt, Homo sapiens
  misc_RNA (1)...(19): siRNA sense strand
ucgagcagaugcgcaagaa

SEQ ID NO: 1249710 - RNA, 19 nt, Homo sapiens
  misc_RNA (1)...(19): siRNA sense strand
cacaacauccacuaugaga

SEQ ID NO: 1249711 - RNA, 19 nt, Homo sapiens
  misc_RNA (1)...(19): siRNA sense strand
acacacaacauccacuaug

SEQ ID NO: 1249712 - RNA, 19 nt, Homo sapiens
  misc_RNA (1)...(19): siRNA sense strand
ugaaggaggaggucaacau

SEQ ID NO: 1249713 - RNA, 19 nt, Homo sapiens
  misc_RNA (1)...(19): siRNA sense strand
uccaggaccucaaggaagu

SEQ ID NO: 1249714 - RNA, 19 nt, Homo sapiens
  misc_RNA (1)...(19): siRNA sense strand
gaggauaagacggagaaug

SEQ ID NO: 1249715 - RNA, 19 nt, Homo sapiens
  misc_RNA (1)...(19): siRNA sense strand
gccaagcggcucaaugaca

SEQ ID NO: 1249716 - RNA, 19 nt, Homo sapiens
  misc_RNA (1)...(19): siRNA sense strand
ggaucuugaguucaugaaa

SEQ ID NO: 1249717 - RNA, 19 nt, Homo sapiens
  misc_RNA (1)...(19): siRNA sense strand
gcggcucaaugacaaugga

SEQ ID NO: 1249718 - RNA, 19 nt, Homo sapiens
  misc_RNA (1)...(19): siRNA sense strand
cuucgagacuuugucauca

SEQ ID NO: 1249719 - RNA, 19 nt, Homo sapiens
  misc_RNA (1)...(19): siRNA sense strand
aagaaacgcaucccugaca

SEQ ID NO: 1249720 - RNA, 19 nt, Homo sapiens
  misc_RNA (1)...(19): siRNA sense strand
guacgagaaguuccugaag

SEQ ID NO: 1249721 - RNA, 19 nt, Homo sapiens
  misc_RNA (1)...(19): siRNA sense strand
ggaccucaaggaagugaca

SEQ ID NO: 1249722 - RNA, 19 nt, Homo sapiens
  misc_RNA (1)...(19): siRNA sense strand
agccagcggugcccaugaa

SEQ ID NO: 1249723 - RNA, 19 nt, Homo sapiens
  misc_RNA (1)...(19): siRNA sense strand
ccagaaggaauuugaugag

SEQ ID NO: 1249724 - RNA, 19 nt, Homo sapiens
  misc_RNA (1)...(19): siRNA sense strand
gucaacaucgccaggaaga

SEQ ID NO: 1249725 - RNA, 19 nt, Homo sapiens
  misc_RNA (1)...(19): siRNA sense strand
acaaggaguaccaagugaa

SEQ ID NO: 1249726 - RNA, 19 nt, Homo sapiens
  misc_RNA (1)...(19): siRNA sense strand
ucaugaaacaccucagcaa

SEQ ID NO: 1249727 - RNA, 19 nt, Homo sapiens
  misc_RNA (1)...(19): siRNA sense strand
caggagagcaugccuuuug

SEQ ID NO: 1249728 - RNA, 19 nt, Homo sapiens
  misc_RNA (1)...(19): siRNA sense strand
ugcgaccucuggaucuuga

SEQ ID NO: 1249729 - RNA, 19 nt, Homo sapiens
  misc_RNA (1)...(19): siRNA sense strand
cccagaaggaauuugauga

SEQ ID NO: 1249730 - RNA, 19 nt, Homo sapiens
  misc_RNA (1)...(19): siRNA sense strand
gaaggaauuugaugaggau

SEQ ID NO: 1249731 - RNA, 19 nt, Homo sapiens
  misc_RNA (1)...(19): siRNA sense strand
ggaauuugaugaggauuug

SEQ ID NO: 1249732 - RNA, 19 nt, Homo sapiens
  misc_RNA (1)...(19): siRNA sense strand
gagcagaugcgcaagaaga

SEQ ID NO: 1249733 - RNA, 19 nt, Homo sapiens
  misc_RNA (1)...(19): siRNA sense strand
gggagcccauugagaagua

SEQ ID NO: 1249734 - RNA, 19 nt, Homo sapiens
  misc_RNA (1)...(19): siRNA sense strand
ccaagcggcucaaugacaa

SEQ ID NO: 1249735 - RNA, 19 nt, Homo sapiens
  misc_RNA (1)...(19): siRNA sense strand
gacaaggaguaccaaguga

SEQ ID NO: 1249736 - RNA, 19 nt, Homo sapiens
  misc_RNA (1)...(19): siRNA sense strand
caacaucgccaggaagaaa

SEQ ID NO: 1249737 - RNA, 19 nt, Homo sapiens
  misc_RNA (1)...(19): siRNA sense strand
ucaaggaagugacacacaa

SEQ ID NO: 1249738 - RNA, 19 nt, Homo sapiens
  misc_RNA (1)...(19): siRNA sense strand
ucaaugagcaguacgagaa

SEQ ID NO: 1249739 - RNA, 19 nt, Homo sapiens
  misc_RNA (1)...(19): siRNA sense strand
gcaagaagaccaugaagac

SEQ ID NO: 1249740 - RNA, 19 nt, Homo sapiens
  misc_RNA (1)...(19): siRNA sense strand
cacacaacauccacuauga

SEQ ID NO: 1249741 - RNA, 19 nt, Homo sapiens
  misc_RNA (1)...(19): siRNA sense strand
gaugaggauuuggaggaua

SEQ ID NO: 1249742 - RNA, 19 nt, Homo sapiens
  misc_RNA (1)...(19): siRNA sense strand
gggccaagcggcucaauga

SEQ ID NO: 1249743 - RNA, 19 nt, Homo sapiens
  misc_RNA (1)...(19): siRNA sense strand
gaucuugaguucaugaaac

SEQ ID NO: 1249744 - RNA, 19 nt, Homo sapiens
  misc_RNA (1)...(19): siRNA sense strand
ggaagugacacacaacauc

SEQ ID NO: 1249745 - RNA, 19 nt, Homo sapiens
  misc_RNA (1)...(19): siRNA sense strand
gaaggaggaggucaacauc

SEQ ID NO: 1249746 - RNA, 19 nt, Homo sapiens
  misc_RNA (1)...(19): siRNA sense strand
aggauaagacggagaauga

SEQ ID NO: 1249747 - RNA, 19 nt, Homo sapiens
  misc_RNA (1)...(19): siRNA sense strand
ugacaaggaguaccaagug

SEQ ID NO: 1249748 - RNA, 19 nt, Homo sapiens
  misc_RNA (1)...(19): siRNA sense strand
gguuucgacuucaacauca

SEQ ID NO: 1249749 - RNA, 19 nt, Homo sapiens
  misc_RNA (1)...(19): siRNA sense strand
gaagugacaaggaguacca

SEQ ID NO: 1249750 - RNA, 19 nt, Homo sapiens
  misc_RNA (1)...(19): siRNA sense strand
gauaagacggagaaugaca

SEQ ID NO: 1249751 - RNA, 19 nt, Homo sapiens
  misc_RNA (1)...(19): siRNA sense strand
caacauccacuaugagacu

SEQ ID NO: 1249752 - RNA, 19 nt, Homo sapiens
  misc_RNA (1)...(19): siRNA sense strand
caaggaguaccaagugaau

SEQ ID NO: 1249753 - RNA, 19 nt, Homo sapiens
  misc_RNA (1)...(19): siRNA sense strand
ugacacacaacauccacua

SEQ ID NO: 1249754 - RNA, 19 nt, Homo sapiens
  misc_RNA (1)...(19): siRNA sense strand
augaggauuuggaggauaa

SEQ ID NO: 1249755 - RNA, 19 nt, Homo sapiens
  misc_RNA (1)...(19): siRNA sense strand
ccacugcugccuuuacuuc

SEQ ID NO: 1249756 - RNA, 19 nt, Homo sapiens
  misc_RNA (1)...(19): siRNA sense strand
ccaugagcaucaacuccaa

SEQ ID NO: 1249757 - RNA, 19 nt, Homo sapiens
  misc_RNA (1)...(19): siRNA sense strand
uaagacggagaaugacaaa

SEQ ID NO: 1249758 - RNA, 19 nt, Homo sapiens
  misc_RNA (1)...(19): siRNA sense strand
cguguccacugcugccuuu

SEQ ID NO: 1249759 - RNA, 19 nt, Homo sapiens
  misc_RNA (1)...(19): siRNA sense strand
ucgagcagaugcgcaagaa

SEQ ID NO: 1249760 - RNA, 19 nt, Homo sapiens
  misc_RNA (1)...(19): siRNA sense strand
cacaacauccacuaugaga

SEQ ID NO: 1249761 - RNA, 19 nt, Homo sapiens
  misc_RNA (1)...(19): siRNA sense strand
acacacaacauccacuaug

SEQ ID NO: 1249762 - RNA, 19 nt, Homo sapiens
  misc_RNA (1)...(19): siRNA sense strand
ugaaggaggaggucaacau

SEQ ID NO: 1249763 - RNA, 19 nt, Homo sapiens
  misc_RNA (1)...(19): siRNA sense strand
uccaggaccucaaggaagu

SEQ ID NO: 1249764 - RNA, 19 nt, Homo sapiens
  misc_RNA (1)...(19): siRNA sense strand
gaggauaagacggagaaug

SEQ ID NO: 1249765 - RNA, 19 nt, Homo sapiens
  misc_RNA (1)...(19): siRNA sense strand
gccaagcggcucaaugaca

SEQ ID NO: 1249766 - RNA, 19 nt, Homo sapiens
  misc_RNA (1)...(19): siRNA sense strand
ggaucuugaguucaugaaa

SEQ ID NO: 1249767 - RNA, 19 nt, Homo sapiens
  misc_RNA (1)...(19): siRNA sense strand
gcggcucaaugacaaugga

SEQ ID NO: 1249768 - RNA, 19 nt, Homo sapiens
  misc_RNA (1)...(19): siRNA sense strand
cuucgagacuuugucauca

SEQ ID NO: 1249769 - RNA, 19 nt, Homo sapiens
  misc_RNA (1)...(19): siRNA sense strand
aagaaacgcaucccugaca

SEQ ID NO: 1249770 - RNA, 19 nt, Homo sapiens
  misc_RNA (1)...(19): siRNA sense strand
guacgagaaguuccugaag

SEQ ID NO: 1249771 - RNA, 19 nt, Homo sapiens
  misc_RNA (1)...(19): siRNA sense strand
ggaccucaaggaagugaca

SEQ ID NO: 1249772 - RNA, 19 nt, Homo sapiens
  misc_RNA (1)...(19): siRNA sense strand
agccagcggugcccaugaa

SEQ ID NO: 1249773 - RNA, 19 nt, Homo sapiens
  misc_RNA (1)...(19): siRNA sense strand
ccagaaggaauuugaugag

SEQ ID NO: 1249774 - RNA, 19 nt, Homo sapiens
  misc_RNA (1)...(19): siRNA sense strand
gucaacaucgccaggaaga

SEQ ID NO: 1249775 - RNA, 19 nt, Homo sapiens
  misc_RNA (1)...(19): siRNA sense strand
acaaggaguaccaagugaa

SEQ ID NO: 1249776 - RNA, 19 nt, Homo sapiens
  misc_RNA (1)...(19): siRNA sense strand
ucaugaaacaccucagcaa

SEQ ID NO: 1249777 - RNA, 19 nt, Homo sapiens
  misc_RNA (1)...(19): siRNA sense strand
caggagagcaugccuuuug

SEQ ID NO: 1249778 - RNA, 19 nt, Homo sapiens
  misc_RNA (1)...(19): siRNA sense strand
ugcgaccucuggaucuuga

SEQ ID NO: 1249779 - RNA, 19 nt, Homo sapiens
  misc_RNA (1)...(19): siRNA sense strand
cccagaaggaauuugauga

SEQ ID NO: 1249780 - RNA, 19 nt, Homo sapiens
  misc_RNA (1)...(19): siRNA sense strand
gagcagaugcgcaagaaga

SEQ ID NO: 1249781 - RNA, 19 nt, Homo sapiens
  misc_RNA (1)...(19): siRNA sense strand
gggagcccauugagaagua

SEQ ID NO: 1249782 - RNA, 19 nt, Homo sapiens
  misc_RNA (1)...(19): siRNA sense strand
ucaaugagcaguacgagaa

SEQ ID NO: 1249783 - RNA, 19 nt, Homo sapiens
  misc_RNA (1)...(19): siRNA sense strand
gcaagaagaccaugaagac

SEQ ID NO: 1249784 - RNA, 19 nt, Homo sapiens
  misc_RNA (1)...(19): siRNA sense strand
gguuucgacuucaacauca

SEQ ID NO: 1249785 - RNA, 19 nt, Homo sapiens
  misc_RNA (1)...(19): siRNA sense strand
ccaugagcaucaacuccaa

SEQ ID NO: 1249786 - RNA, 19 nt, Homo sapiens
  misc_RNA (1)...(19): siRNA sense strand
ucgagcagaugcgcaagaa

SEQ ID NO: 1249787 - RNA, 19 nt, Homo sapiens
  misc_RNA (1)...(19): siRNA sense strand
agccagcggugcccaugaa

SEQ ID NO: 1249788 - RNA, 19 nt, Homo sapiens
  misc_RNA (1)...(19): siRNA sense strand
gaaggaauuugaugaggau

SEQ ID NO: 1249789 - RNA, 19 nt, Homo sapiens
  misc_RNA (1)...(19): siRNA sense strand
ggaauuugaugaggauuug

SEQ ID NO: 1249790 - RNA, 19 nt, Homo sapiens
  misc_RNA (1)...(19): siRNA sense strand
gagcagaugcgcaagaaga

SEQ ID NO: 1249791 - RNA, 19 nt, Homo sapiens
  misc_RNA (1)...(19): siRNA sense strand
gggagcccauugagaagua

SEQ ID NO: 1249792 - RNA, 19 nt, Homo sapiens
  misc_RNA (1)...(19): siRNA sense strand
ccaagcggcucaaugacaa

SEQ ID NO: 1249793 - RNA, 19 nt, Homo sapiens
  misc_RNA (1)...(19): siRNA sense strand
gacaaggaguaccaaguga

SEQ ID NO: 1249794 - RNA, 19 nt, Homo sapiens
  misc_RNA (1)...(19): siRNA sense strand
caacaucgccaggaagaaa

SEQ ID NO: 1249795 - RNA, 19 nt, Homo sapiens
  misc_RNA (1)...(19): siRNA sense strand
ucaaggaagugacacacaa

SEQ ID NO: 1249796 - RNA, 19 nt, Homo sapiens
  misc_RNA (1)...(19): siRNA sense strand
ucaaugagcaguacgagaa

SEQ ID NO: 1249797 - RNA, 19 nt, Homo sapiens
  misc_RNA (1)...(19): siRNA sense strand
gcaagaagaccaugaagac

SEQ ID NO: 1249798 - RNA, 19 nt, Homo sapiens
  misc_RNA (1)...(19): siRNA sense strand
cacacaacauccacuauga

SEQ ID NO: 1249799 - RNA, 19 nt, Homo sapiens
  misc_RNA (1)...(19): siRNA sense strand
gaugaggauuuggaggaua

SEQ ID NO: 1249800 - RNA, 19 nt, Homo sapiens
  misc_RNA (1)...(19): siRNA sense strand
gggccaagcggcucaauga

SEQ ID NO: 1249801 - RNA, 19 nt, Homo sapiens
  misc_RNA (1)...(19): siRNA sense strand
gaucuugaguucaugaaac

SEQ ID NO: 1249802 - RNA, 19 nt, Homo sapiens
  misc_RNA (1)...(19): siRNA sense strand
ggaagugacacacaacauc

SEQ ID NO: 1249803 - RNA, 19 nt, Homo sapiens
  misc_RNA (1)...(19): siRNA sense strand
gaaggaggaggucaacauc

SEQ ID NO: 1249804 - RNA, 19 nt, Homo sapiens
  misc_RNA (1)...(19): siRNA sense strand
aggauaagacggagaauga

SEQ ID NO: 1249805 - RNA, 19 nt, Homo sapiens
  misc_RNA (1)...(19): siRNA sense strand
ugacaaggaguaccaagug

SEQ ID NO: 1249806 - RNA, 19 nt, Homo sapiens
  misc_RNA (1)...(19): siRNA sense strand
gguuucgacuucaacauca

SEQ ID NO: 1249807 - RNA, 19 nt, Homo sapiens
  misc_RNA (1)...(19): siRNA sense strand
gaagugacaaggaguacca

SEQ ID NO: 1249808 - RNA, 19 nt, Homo sapiens
  misc_RNA (1)...(19): siRNA sense strand
gauaagacggagaaugaca

SEQ ID NO: 1249809 - RNA, 19 nt, Homo sapiens
  misc_RNA (1)...(19): siRNA sense strand
caacauccacuaugagacu

SEQ ID NO: 1249810 - RNA, 19 nt, Homo sapiens
  misc_RNA (1)...(19): siRNA sense strand
caaggaguaccaagugaau

SEQ ID NO: 1249811 - RNA, 19 nt, Homo sapiens
  misc_RNA (1)...(19): siRNA sense strand
ugacacacaacauccacua

SEQ ID NO: 1249812 - RNA, 19 nt, Homo sapiens
  misc_RNA (1)...(19): siRNA sense strand
augaggauuuggaggauaa

SEQ ID NO: 1249813 - RNA, 19 nt, Homo sapiens
  misc_RNA (1)...(19): siRNA sense strand
ccacugcugccuuuacuuc

SEQ ID NO: 1249814 - RNA, 19 nt, Homo sapiens
  misc_RNA (1)...(19): siRNA sense strand
ccaugagcaucaacuccaa

SEQ ID NO: 1249815 - RNA, 19 nt, Homo sapiens
  misc_RNA (1)...(19): siRNA sense strand
uaagacggagaaugacaaa

SEQ ID NO: 1249816 - RNA, 19 nt, Homo sapiens
  misc_RNA (1)...(19): siRNA sense strand
cguguccacugcugccuuu

SEQ ID NO: 1249817 - RNA, 19 nt, Homo sapiens
  misc_RNA (1)...(19): siRNA sense strand
ucgagcagaugcgcaagaa

SEQ ID NO: 1249818 - RNA, 19 nt, Homo sapiens
  misc_RNA (1)...(19): siRNA sense strand
cacaacauccacuaugaga

SEQ ID NO: 1249819 - RNA, 19 nt, Homo sapiens
  misc_RNA (1)...(19): siRNA sense strand
acacacaacauccacuaug

SEQ ID NO: 1249820 - RNA, 19 nt, Homo sapiens
  misc_RNA (1)...(19): siRNA sense strand
ugaaggaggaggucaacau

SEQ ID NO: 1249821 - RNA, 19 nt, Homo sapiens
  misc_RNA (1)...(19): siRNA sense strand
uccaggaccucaaggaagu

SEQ ID NO: 1249822 - RNA, 19 nt, Homo sapiens
  misc_RNA (1)...(19): siRNA sense strand
gaggauaagacggagaaug

SEQ ID NO: 1249823 - RNA, 19 nt, Homo sapiens
  misc_RNA (1)...(19): siRNA sense strand
gccaagcggcucaaugaca

SEQ ID NO: 1249824 - RNA, 19 nt, Homo sapiens
  misc_RNA (1)...(19): siRNA sense strand
ggaucuugaguucaugaaa

SEQ ID NO: 1249825 - RNA, 19 nt, Homo sapiens
  misc_RNA (1)...(19): siRNA sense strand
gcggcucaaugacaaugga

SEQ ID NO: 1249826 - RNA, 19 nt, Homo sapiens
  misc_RNA (1)...(19): siRNA sense strand
cuucgagacuuugucauca

SEQ ID NO: 1249827 - RNA, 19 nt, Homo sapiens
  misc_RNA (1)...(19): siRNA sense strand
aagaaacgcaucccugaca

SEQ ID NO: 1249828 - RNA, 19 nt, Homo sapiens
  misc_RNA (1)...(19): siRNA sense strand
guacgagaaguuccugaag

SEQ ID NO: 1249829 - RNA, 19 nt, Homo sapiens
  misc_RNA (1)...(19): siRNA sense strand
ggaccucaaggaagugaca

SEQ ID NO: 1249830 - RNA, 19 nt, Homo sapiens
  misc_RNA (1)...(19): siRNA sense strand
agccagcggugcccaugaa

SEQ ID NO: 1249831 - RNA, 19 nt, Homo sapiens
  misc_RNA (1)...(19): siRNA sense strand
ccagaaggaauuugaugag

SEQ ID NO: 1249832 - RNA, 19 nt, Homo sapiens
  misc_RNA (1)...(19): siRNA sense strand
gucaacaucgccaggaaga

SEQ ID NO: 1249833 - RNA, 19 nt, Homo sapiens
  misc_RNA (1)...(19): siRNA sense strand
acaaggaguaccaagugaa

SEQ ID NO: 1249834 - RNA, 19 nt, Homo sapiens
  misc_RNA (1)...(19): siRNA sense strand
ucaugaaacaccucagcaa

SEQ ID NO: 1249835 - RNA, 19 nt, Homo sapiens
  misc_RNA (1)...(19): siRNA sense strand
caggagagcaugccuuuug

SEQ ID NO: 1249836 - RNA, 19 nt, Homo sapiens
  misc_RNA (1)...(19): siRNA sense strand
ugcgaccucuggaucuuga

SEQ ID NO: 1249837 - RNA, 19 nt, Homo sapiens
  misc_RNA (1)...(19): siRNA sense strand
cccagaaggaauuugauga

SEQ ID NO: 1249838 - RNA, 19 nt, Homo sapiens
  misc_RNA (1)...(19): siRNA sense strand
gaaggaauuugaugaggau

SEQ ID NO: 1249839 - RNA, 19 nt, Homo sapiens
  misc_RNA (1)...(19): siRNA sense strand
ggaauuugaugaggauuug

SEQ ID NO: 1249840 - RNA, 19 nt, Homo sapiens
  misc_RNA (1)...(19): siRNA sense strand
gagcagaugcgcaagaaga

SEQ ID NO: 1249841 - RNA, 19 nt, Homo sapiens
  misc_RNA (1)...(19): siRNA sense strand
gggagcccauugagaagua

SEQ ID NO: 1249842 - RNA, 19 nt, Homo sapiens
  misc_RNA (1)...(19): siRNA sense strand
ccaagcggcucaaugacaa

SEQ ID NO: 1249843 - RNA, 19 nt, Homo sapiens
  misc_RNA (1)...(19): siRNA sense strand
gacaaggaguaccaaguga

SEQ ID NO: 1249844 - RNA, 19 nt, Homo sapiens
  misc_RNA (1)...(19): siRNA sense strand
caacaucgccaggaagaaa

SEQ ID NO: 1249845 - RNA, 19 nt, Homo sapiens
  misc_RNA (1)...(19): siRNA sense strand
ucaaggaagugacacacaa

SEQ ID NO: 1249846 - RNA, 19 nt, Homo sapiens
  misc_RNA (1)...(19): siRNA sense strand
ucaaugagcaguacgagaa

SEQ ID NO: 1249847 - RNA, 19 nt, Homo sapiens
  misc_RNA (1)...(19): siRNA sense strand
gcaagaagaccaugaagac

SEQ ID NO: 1249848 - RNA, 19 nt, Homo sapiens
  misc_RNA (1)...(19): siRNA sense strand
cacacaacauccacuauga

SEQ ID NO: 1249849 - RNA, 19 nt, Homo sapiens
  misc_RNA (1)...(19): siRNA sense strand
gaugaggauuuggaggaua

SEQ ID NO: 1249850 - RNA, 19 nt, Homo sapiens
  misc_RNA (1)...(19): siRNA sense strand
gggccaagcggcucaauga

SEQ ID NO: 1249851 - RNA, 19 nt, Homo sapiens
  misc_RNA (1)...(19): siRNA sense strand
gaucuugaguucaugaaac

SEQ ID NO: 1249852 - RNA, 19 nt, Homo sapiens
  misc_RNA (1)...(19): siRNA sense strand
ggaagugacacacaacauc

SEQ ID NO: 1249853 - RNA, 19 nt, Homo sapiens
  misc_RNA (1)...(19): siRNA sense strand
gaaggaggaggucaacauc

SEQ ID NO: 1249854 - RNA, 19 nt, Homo sapiens
  misc_RNA (1)...(19): siRNA sense strand
aggauaagacggagaauga

SEQ ID NO: 1249855 - RNA, 19 nt, Homo sapiens
  misc_RNA (1)...(19): siRNA sense strand
ugacaaggaguaccaagug

SEQ ID NO: 1249856 - RNA, 19 nt, Homo sapiens
  misc_RNA (1)...(19): siRNA sense strand
gguuucgacuucaacauca

SEQ ID NO: 1249857 - RNA, 19 nt, Homo sapiens
  misc_RNA (1)...(19): siRNA sense strand
gaagugacaaggaguacca

SEQ ID NO: 1249858 - RNA, 19 nt, Homo sapiens
  misc_RNA (1)...(19): siRNA sense strand
gauaagacggagaaugaca

SEQ ID NO: 1249859 - RNA, 19 nt, Homo sapiens
  misc_RNA (1)...(19): siRNA sense strand
caacauccacuaugagacu

SEQ ID NO: 1249860 - RNA, 19 nt, Homo sapiens
  misc_RNA (1)...(19): siRNA sense strand
caaggaguaccaagugaau

SEQ ID NO: 1249861 - RNA, 19 nt, Homo sapiens
  misc_RNA (1)...(19): siRNA sense strand
ugacacacaacauccacua

SEQ ID NO: 1249862 - RNA, 19 nt, Homo sapiens
  misc_RNA (1)...(19): siRNA sense strand
augaggauuuggaggauaa

SEQ ID NO: 1249863 - RNA, 19 nt, Homo sapiens
  misc_RNA (1)...(19): siRNA sense strand
ccacugcugccuuuacuuc

SEQ ID NO: 1249864 - RNA, 19 nt, Homo sapiens
  misc_RNA (1)...(19): siRNA sense strand
ccaugagcaucaacuccaa

SEQ ID NO: 1249865 - RNA, 19 nt, Homo sapiens
  misc_RNA (1)...(19): siRNA sense strand
uaagacggagaaugacaaa

SEQ ID NO: 1249866 - RNA, 19 nt, Homo sapiens
  misc_RNA (1)...(19): siRNA sense strand
cguguccacugcugccuuu

SEQ ID NO: 1249867 - RNA, 19 nt, Homo sapiens
  misc_RNA (1)...(19): siRNA sense strand
ucgagcagaugcgcaagaa

SEQ ID NO: 1249868 - RNA, 19 nt, Homo sapiens
  misc_RNA (1)...(19): siRNA sense strand
cacaacauccacuaugaga

SEQ ID NO: 1249869 - RNA, 19 nt, Homo sapiens
  misc_RNA (1)...(19): siRNA sense strand
acacacaacauccacuaug

SEQ ID NO: 1249870 - RNA, 19 nt, Homo sapiens
  misc_RNA (1)...(19): siRNA sense strand
ugaaggaggaggucaacau

SEQ ID NO: 1249871 - RNA, 19 nt, Homo sapiens
  misc_RNA (1)...(19): siRNA sense strand
uccaggaccucaaggaagu

SEQ ID NO: 1249872 - RNA, 19 nt, Homo sapiens
  misc_RNA (1)...(19): siRNA sense strand
gaggauaagacggagaaug

SEQ ID NO: 1249873 - RNA, 19 nt, Homo sapiens
  misc_RNA (1)...(19): siRNA sense strand
gccaagcggcucaaugaca

SEQ ID NO: 1249874 - RNA, 19 nt, Homo sapiens
  misc_RNA (1)...(19): siRNA sense strand
ggaucuugaguucaugaaa

SEQ ID NO: 1249875 - RNA, 19 nt, Homo sapiens
  misc_RNA (1)...(19): siRNA sense strand
gcggcucaaugacaaugga

SEQ ID NO: 1249876 - RNA, 19 nt, Homo sapiens
  misc_RNA (1)...(19): siRNA sense strand
cuucgagacuuugucauca

SEQ ID NO: 1249877 - RNA, 19 nt, Homo sapiens
  misc_RNA (1)...(19): siRNA sense strand
aagaaacgcaucccugaca

SEQ ID NO: 1249878 - RNA, 19 nt, Homo sapiens
  misc_RNA (1)...(19): siRNA sense strand
guacgagaaguuccugaag

SEQ ID NO: 1249879 - RNA, 19 nt, Homo sapiens
  misc_RNA (1)...(19): siRNA sense strand
ggaccucaaggaagugaca

SEQ ID NO: 1249880 - RNA, 19 nt, Homo sapiens
  misc_RNA (1)...(19): siRNA sense strand
agccagcggugcccaugaa

SEQ ID NO: 1249881 - RNA, 19 nt, Homo sapiens
  misc_RNA (1)...(19): siRNA sense strand
ccagaaggaauuugaugag

SEQ ID NO: 1249882 - RNA, 19 nt, Homo sapiens
  misc_RNA (1)...(19): siRNA sense strand
gucaacaucgccaggaaga

SEQ ID NO: 1249883 - RNA, 19 nt, Homo sapiens
  misc_RNA (1)...(19): siRNA sense strand
acaaggaguaccaagugaa

SEQ ID NO: 1249884 - RNA, 19 nt, Homo sapiens
  misc_RNA (1)...(19): siRNA sense strand
ucaugaaacaccucagcaa

SEQ ID NO: 1249885 - RNA, 19 nt, Homo sapiens
  misc_RNA (1)...(19): siRNA sense strand
caggagagcaugccuuuug

SEQ ID NO: 1249886 - RNA, 19 nt, Homo sapiens
  misc_RNA (1)...(19): siRNA sense strand
ugcgaccucuggaucuuga

SEQ ID NO: 1249887 - RNA, 19 nt, Homo sapiens
  misc_RNA (1)...(19): siRNA sense strand
cccagaaggaauuugauga

SEQ ID NO: 1249888 - RNA, 19 nt, Homo sapiens
  misc_RNA (1)...(19): siRNA sense strand
gagcagaugcgcaagaaga

SEQ ID NO: 1249889 - RNA, 19 nt, Homo sapiens
  misc_RNA (1)...(19): siRNA sense strand
gggagcccauugagaagua

SEQ ID NO: 1249890 - RNA, 19 nt, Homo sapiens
  misc_RNA (1)...(19): siRNA sense strand
ucaaugagcaguacgagaa

SEQ ID NO: 1249891 - RNA, 19 nt, Homo sapiens
  misc_RNA (1)...(19): siRNA sense strand
gcaagaagaccaugaagac

SEQ ID NO: 1249892 - RNA, 19 nt, Homo sapiens
  misc_RNA (1)...(19): siRNA sense strand
gguuucgacuucaacauca

SEQ ID NO: 1249893 - RNA, 19 nt, Homo sapiens
  misc_RNA (1)...(19): siRNA sense strand
ccaugagcaucaacuccaa

SEQ ID NO: 1249894 - RNA, 19 nt, Homo sapiens
  misc_RNA (1)...(19): siRNA sense strand
ucgagcagaugcgcaagaa

SEQ ID NO: 1249895 - RNA, 19 nt, Homo sapiens
  misc_RNA (1)...(19): siRNA sense strand
agccagcggugcccaugaa

SEQ ID NO: 1249896 - RNA, 19 nt, Homo sapiens
  misc_RNA (1)...(19): siRNA sense strand
gggaggaguucugcaucua

SEQ ID NO: 1249897 - RNA, 19 nt, Homo sapiens
  misc_RNA (1)...(19): siRNA sense strand
ggacaacccacugaacgaa

SEQ ID NO: 1249898 - RNA, 19 nt, Homo sapiens
  misc_RNA (1)...(19): siRNA sense strand
gaggaguucugcaucuaca

SEQ ID NO: 1249899 - RNA, 19 nt, Homo sapiens
  misc_RNA (1)...(19): siRNA sense strand
cgucaaggaccgcaagaaa

SEQ ID NO: 1249900 - RNA, 19 nt, Homo sapiens
  misc_RNA (1)...(19): siRNA sense strand
cgccaucgccuucuccuuu

SEQ ID NO: 1249901 - RNA, 19 nt, Homo sapiens
  misc_RNA (1)...(19): siRNA sense strand
ccaaggacaacccacugaa

SEQ ID NO: 1249902 - RNA, 19 nt, Homo sapiens
  misc_RNA (1)...(19): siRNA sense strand
gcagaucagcagcgucaag

SEQ ID NO: 1249903 - RNA, 19 nt, Homo sapiens
  misc_RNA (1)...(19): siRNA sense strand
ucaaggaccgcaagaaagc

SEQ ID NO: 1249904 - RNA, 19 nt, Homo sapiens
  misc_RNA (1)...(19): siRNA sense strand
ucuccaagcccaaggacaa

SEQ ID NO: 1249905 - RNA, 19 nt, Homo sapiens
  misc_RNA (1)...(19): siRNA sense strand
ggaggaguucugcaucuac

SEQ ID NO: 1249906 - RNA, 19 nt, Homo sapiens
  misc_RNA (1)...(19): siRNA sense strand
cccaacgccugcagcuaug

SEQ ID NO: 1249907 - RNA, 19 nt, Homo sapiens
  misc_RNA (1)...(19): siRNA sense strand
gggaggaguucugcaucua

SEQ ID NO: 1249908 - RNA, 19 nt, Homo sapiens
  misc_RNA (1)...(19): siRNA sense strand
ggacaacccacugaacgaa

SEQ ID NO: 1249909 - RNA, 19 nt, Homo sapiens
  misc_RNA (1)...(19): siRNA sense strand
gaggaguucugcaucuaca

SEQ ID NO: 1249910 - RNA, 19 nt, Homo sapiens
  misc_RNA (1)...(19): siRNA sense strand
cgucaaggaccgcaagaaa

SEQ ID NO: 1249911 - RNA, 19 nt, Homo sapiens
  misc_RNA (1)...(19): siRNA sense strand
cgccaucgccuucuccuuu

SEQ ID NO: 1249912 - RNA, 19 nt, Homo sapiens
  misc_RNA (1)...(19): siRNA sense strand
ccaaggacaacccacugaa

SEQ ID NO: 1249913 - RNA, 19 nt, Homo sapiens
  misc_RNA (1)...(19): siRNA sense strand
gcagaucagcagcgucaag

SEQ ID NO: 1249914 - RNA, 19 nt, Homo sapiens
  misc_RNA (1)...(19): siRNA sense strand
ucaaggaccgcaagaaagc

SEQ ID NO: 1249915 - RNA, 19 nt, Homo sapiens
  misc_RNA (1)...(19): siRNA sense strand
ucuccaagcccaaggacaa

SEQ ID NO: 1249916 - RNA, 19 nt, Homo sapiens
  misc_RNA (1)...(19): siRNA sense strand
ggaggaguucugcaucuac

SEQ ID NO: 1249917 - RNA, 19 nt, Homo sapiens
  misc_RNA (1)...(19): siRNA sense strand
cccaacgccugcagcuaug

SEQ ID NO: 1249918 - RNA, 19 nt, Homo sapiens
  misc_RNA (1)...(19): siRNA sense strand
gggaggaguucugcaucua

SEQ ID NO: 1249919 - RNA, 19 nt, Homo sapiens
  misc_RNA (1)...(19): siRNA sense strand
ggacaacccacugaacgaa

SEQ ID NO: 1249920 - RNA, 19 nt, Homo sapiens
  misc_RNA (1)...(19): siRNA sense strand
gaggaguucugcaucuaca

SEQ ID NO: 1249921 - RNA, 19 nt, Homo sapiens
  misc_RNA (1)...(19): siRNA sense strand
cgucaaggaccgcaagaaa

SEQ ID NO: 1249922 - RNA, 19 nt, Homo sapiens
  misc_RNA (1)...(19): siRNA sense strand
ccaaggacaacccacugaa

SEQ ID NO: 1249923 - RNA, 19 nt, Homo sapiens
  misc_RNA (1)...(19): siRNA sense strand
gcagaucagcagcgucaag

SEQ ID NO: 1249924 - RNA, 19 nt, Homo sapiens
  misc_RNA (1)...(19): siRNA sense strand
ucaaggaccgcaagaaagc

SEQ ID NO: 1249925 - RNA, 19 nt, Homo sapiens
  misc_RNA (1)...(19): siRNA sense strand
ucuccaagcccaaggacaa

SEQ ID NO: 1249926 - RNA, 19 nt, Homo sapiens
  misc_RNA (1)...(19): siRNA sense strand
ggaggaguucugcaucuac

SEQ ID NO: 1249927 - RNA, 19 nt, Homo sapiens
  misc_RNA (1)...(19): siRNA sense strand
cccaacgccugcagcuaug

SEQ ID NO: 1249928 - RNA, 19 nt, Homo sapiens
  misc_RNA (1)...(19): siRNA sense strand
ggaauugacugcacuguug

SEQ ID NO: 1249929 - RNA, 19 nt, Homo sapiens
  misc_RNA (1)...(19): siRNA sense strand
gcgaagcgcuggugaguau

SEQ ID NO: 1249930 - RNA, 19 nt, Homo sapiens
  misc_RNA (1)...(19): siRNA sense strand
gcaaggccaugauugagaa

SEQ ID NO: 1249931 - RNA, 19 nt, Homo sapiens
  misc_RNA (1)...(19): siRNA sense strand
cagcggaccuuccucauuc

SEQ ID NO: 1249932 - RNA, 19 nt, Homo sapiens
  misc_RNA (1)...(19): siRNA sense strand
cugaggagcugaugacuau

SEQ ID NO: 1249933 - RNA, 19 nt, Homo sapiens
  misc_RNA (1)...(19): siRNA sense strand
ccaagugugucuucaccua

SEQ ID NO: 1249934 - RNA, 19 nt, Homo sapiens
  misc_RNA (1)...(19): siRNA sense strand
ugaacgauguggaggaauu

SEQ ID NO: 1249935 - RNA, 19 nt, Homo sapiens
  misc_RNA (1)...(19): siRNA sense strand
cgaggaggcugcagcauca

SEQ ID NO: 1249936 - RNA, 19 nt, Homo sapiens
  misc_RNA (1)...(19): siRNA sense strand
gaucagagcacggacuuug

SEQ ID NO: 1249937 - RNA, 19 nt, Homo sapiens
  misc_RNA (1)...(19): siRNA sense strand
gcugauggcucugcuguca

SEQ ID NO: 1249938 - RNA, 19 nt, Homo sapiens
  misc_RNA (1)...(19): siRNA sense strand
gcaccaugaugcaaaccaa

SEQ ID NO: 1249939 - RNA, 19 nt, Homo sapiens
  misc_RNA (1)...(19): siRNA sense strand
uugagaagcuggagaagga

SEQ ID NO: 1249940 - RNA, 19 nt, Homo sapiens
  misc_RNA (1)...(19): siRNA sense strand
gaacagcaggcagagguuu

SEQ ID NO: 1249941 - RNA, 19 nt, Homo sapiens
  misc_RNA (1)...(19): siRNA sense strand
gaagaaagagcugaugaag

SEQ ID NO: 1249942 - RNA, 19 nt, Homo sapiens
  misc_RNA (1)...(19): siRNA sense strand
agaacuggcugcacucuca

SEQ ID NO: 1249943 - RNA, 19 nt, Homo sapiens
  misc_RNA (1)...(19): siRNA sense strand
gcacuguuaccaagacuga

SEQ ID NO: 1249944 - RNA, 19 nt, Homo sapiens
  misc_RNA (1)...(19): siRNA sense strand
gcugaugacuauugaggau

SEQ ID NO: 1249945 - RNA, 19 nt, Homo sapiens
  misc_RNA (1)...(19): siRNA sense strand
ggagguggacgacaugaug

SEQ ID NO: 1249946 - RNA, 19 nt, Homo sapiens
  misc_RNA (1)...(19): siRNA sense strand
gggaucguguccacaaguu

SEQ ID NO: 1249947 - RNA, 19 nt, Homo sapiens
  misc_RNA (1)...(19): siRNA sense strand
gaggagcugaugacuauug

SEQ ID NO: 1249948 - RNA, 19 nt, Homo sapiens
  misc_RNA (1)...(19): siRNA sense strand
gaagcgcuggugaguauga

SEQ ID NO: 1249949 - RNA, 19 nt, Homo sapiens
  misc_RNA (1)...(19): siRNA sense strand
ugaugacuauugaggauga

SEQ ID NO: 1249950 - RNA, 19 nt, Homo sapiens
  misc_RNA (1)...(19): siRNA sense strand
gagguggccuucucaucug

SEQ ID NO: 1249951 - RNA, 19 nt, Homo sapiens
  misc_RNA (1)...(19): siRNA sense strand
gagcagacccgagugaaca

SEQ ID NO: 1249952 - RNA, 19 nt, Homo sapiens
  misc_RNA (1)...(19): siRNA sense strand
caugaacgauguggaggaa

SEQ ID NO: 1249953 - RNA, 19 nt, Homo sapiens
  misc_RNA (1)...(19): siRNA sense strand
ucacucaugucaccagcuu

SEQ ID NO: 1249954 - RNA, 19 nt, Homo sapiens
  misc_RNA (1)...(19): siRNA sense strand
ccaagaagaugggcagcau

SEQ ID NO: 1249955 - RNA, 19 nt, Homo sapiens
  misc_RNA (1)...(19): siRNA sense strand
ggccuuagcugggcuggau

SEQ ID NO: 1249956 - RNA, 19 nt, Homo sapiens
  misc_RNA (1)...(19): siRNA sense strand
gaaccgacgccagaacuuc

SEQ ID NO: 1249957 - RNA, 19 nt, Homo sapiens
  misc_RNA (1)...(19): siRNA sense strand
gaagaagaaagagcugaug

SEQ ID NO: 1249958 - RNA, 19 nt, Homo sapiens
  misc_RNA (1)...(19): siRNA sense strand
gcacacaggcuggaacagu

SEQ ID NO: 1249959 - RNA, 19 nt, Homo sapiens
  misc_RNA (1)...(19): siRNA sense strand
gaacgauguggaggaauug

SEQ ID NO: 1249960 - RNA, 19 nt, Homo sapiens
  misc_RNA (1)...(19): siRNA sense strand
gugaggcgcucggagaaug

SEQ ID NO: 1249961 - RNA, 19 nt, Homo sapiens
  misc_RNA (1)...(19): siRNA sense strand
uggacaagaugcuggauca

SEQ ID NO: 1249962 - RNA, 19 nt, Homo sapiens
  misc_RNA (1)...(19): siRNA sense strand
gacaagaugcuggaucaga

SEQ ID NO: 1249963 - RNA, 19 nt, Homo sapiens
  misc_RNA (1)...(19): siRNA sense strand
caaggagcaacgaggagua

SEQ ID NO: 1249964 - RNA, 19 nt, Homo sapiens
  misc_RNA (1)...(19): siRNA sense strand
ccaacagcaucaagcagau

SEQ ID NO: 1249965 - RNA, 19 nt, Homo sapiens
  misc_RNA (1)...(19): siRNA sense strand
gagaccagcgggacaagga

SEQ ID NO: 1249966 - RNA, 19 nt, Homo sapiens
  misc_RNA (1)...(19): siRNA sense strand
gaucguguccacaaguuca

SEQ ID NO: 1249967 - RNA, 19 nt, Homo sapiens
  misc_RNA (1)...(19): siRNA sense strand
gcugaggagcugaugacua

SEQ ID NO: 1249968 - RNA, 19 nt, Homo sapiens
  misc_RNA (1)...(19): siRNA sense strand
ccagagggcagaacugaca

SEQ ID NO: 1249969 - RNA, 19 nt, Homo sapiens
  misc_RNA (1)...(19): siRNA sense strand
ggcaguggcagcaccauga

SEQ ID NO: 1249970 - RNA, 19 nt, Homo sapiens
  misc_RNA (1)...(19): siRNA sense strand
ucagagcacggacuuugaa

SEQ ID NO: 1249971 - RNA, 19 nt, Homo sapiens
  misc_RNA (1)...(19): siRNA sense strand
gcagcaccaugaugcaaac

SEQ ID NO: 1249972 - RNA, 19 nt, Homo sapiens
  misc_RNA (1)...(19): siRNA sense strand
gcaggcagagguuucaaag

SEQ ID NO: 1249973 - RNA, 19 nt, Homo sapiens
  misc_RNA (1)...(19): siRNA sense strand
gagguggacgacaugauga

SEQ ID NO: 1249974 - RNA, 19 nt, Homo sapiens
  misc_RNA (1)...(19): siRNA sense strand
ucacaucugauucuccuau

SEQ ID NO: 1249975 - RNA, 19 nt, Homo sapiens
  misc_RNA (1)...(19): siRNA sense strand
caaguucacaucugauucu

SEQ ID NO: 1249976 - RNA, 19 nt, Homo sapiens
  misc_RNA (1)...(19): siRNA sense strand
uccacaaguucacaucuga

SEQ ID NO: 1249977 - RNA, 19 nt, Homo sapiens
  misc_RNA (1)...(19): siRNA sense strand
agaagaaagagcugaugaa

SEQ ID NO: 1249978 - RNA, 19 nt, Homo sapiens
  misc_RNA (1)...(19): siRNA sense strand
cgagguggccuucucaucu

SEQ ID NO: 1249979 - RNA, 19 nt, Homo sapiens
  misc_RNA (1)...(19): siRNA sense strand
gugaugggauggccuucug

SEQ ID NO: 1249980 - RNA, 19 nt, Homo sapiens
  misc_RNA (1)...(19): siRNA sense strand
ccagcggaccuuccucauu

SEQ ID NO: 1249981 - RNA, 19 nt, Homo sapiens
  misc_RNA (1)...(19): siRNA sense strand
uguacgggcucaggagauu

SEQ ID NO: 1249982 - RNA, 19 nt, Homo sapiens
  misc_RNA (1)...(19): siRNA sense strand
gagcuccgacaaaggaaga

SEQ ID NO: 1249983 - RNA, 19 nt, Homo sapiens
  misc_RNA (1)...(19): siRNA sense strand
ggaacagcaggcagagguu

SEQ ID NO: 1249984 - RNA, 19 nt, Homo sapiens
  misc_RNA (1)...(19): siRNA sense strand
gcacgucgacauccagaac

SEQ ID NO: 1249985 - RNA, 19 nt, Homo sapiens
  misc_RNA (1)...(19): siRNA sense strand
aagaagaaagagcugauga

SEQ ID NO: 1249986 - RNA, 19 nt, Homo sapiens
  misc_RNA (1)...(19): siRNA sense strand
ggaggcugcagcaucaaga

SEQ ID NO: 1249987 - RNA, 19 nt, Homo sapiens
  misc_RNA (1)...(19): siRNA sense strand
cacaaguucacaucugauu

SEQ ID NO: 1249988 - RNA, 19 nt, Homo sapiens
  misc_RNA (1)...(19): siRNA sense strand
ucccaacaguggcucaaga

SEQ ID NO: 1249989 - RNA, 19 nt, Homo sapiens
  misc_RNA (1)...(19): siRNA sense strand
guccacaaguucacaucug

SEQ ID NO: 1249990 - RNA, 19 nt, Homo sapiens
  misc_RNA (1)...(19): siRNA sense strand
ugauugagaagcuggagaa

SEQ ID NO: 1249991 - RNA, 19 nt, Homo sapiens
  misc_RNA (1)...(19): siRNA sense strand
ggaggucacagcagaucug

SEQ ID NO: 1249992 - RNA, 19 nt, Homo sapiens
  misc_RNA (1)...(19): siRNA sense strand
gauaccuccucccgguuca

SEQ ID NO: 1249993 - RNA, 19 nt, Homo sapiens
  misc_RNA (1)...(19): siRNA sense strand
cgugagcuccgacaaagga

SEQ ID NO: 1249994 - RNA, 19 nt, Homo sapiens
  misc_RNA (1)...(19): siRNA sense strand
caagugugucuucaccuau

SEQ ID NO: 1249995 - RNA, 19 nt, Homo sapiens
  misc_RNA (1)...(19): siRNA sense strand
gcucaagagaggacagcaa

SEQ ID NO: 1249996 - RNA, 19 nt, Homo sapiens
  misc_RNA (1)...(19): siRNA sense strand
gcgcgcaaggccaugauug

SEQ ID NO: 1249997 - RNA, 19 nt, Homo sapiens
  misc_RNA (1)...(19): siRNA sense strand
ggcagcaccaugaugcaaa

SEQ ID NO: 1249998 - RNA, 19 nt, Homo sapiens
  misc_RNA (1)...(19): siRNA sense strand
gcugagcagacccgaguga

SEQ ID NO: 1249999 - RNA, 19 nt, Homo sapiens
  misc_RNA (1)...(19): siRNA sense strand
ccacauucaccaucgagau

SEQ ID NO: 1250000 - RNA, 19 nt, Homo sapiens
  misc_RNA (1)...(19): siRNA sense strand
ugcagucgcucuacaacca

SEQ ID NO: 1250001 - RNA, 19 nt, Homo sapiens
  misc_RNA (1)...(19): siRNA sense strand
ggcaggacaacaaggagaa

SEQ ID NO: 1250002 - RNA, 19 nt, Homo sapiens
  misc_RNA (1)...(19): siRNA sense strand
cauccgggcugcacuucgu

SEQ ID NO: 1250003 - RNA, 19 nt, Homo sapiens
  misc_RNA (1)...(19): siRNA sense strand
gcagacccgagugaacaaa

SEQ ID NO: 1250004 - RNA, 19 nt, Homo sapiens
  misc_RNA (1)...(19): siRNA sense strand
ggucaacaagcuucugucu

SEQ ID NO: 1250005 - RNA, 19 nt, Homo sapiens
  misc_RNA (1)...(19): siRNA sense strand
aagugugucuucaccuaug

SEQ ID NO: 1250006 - RNA, 19 nt, Homo sapiens
  misc_RNA (1)...(19): siRNA sense strand
ccugaggccuucgacuaug

SEQ ID NO: 1250007 - RNA, 19 nt, Homo sapiens
  misc_RNA (1)...(19): siRNA sense strand
gcuacgagcacgucgacau

SEQ ID NO: 1250008 - RNA, 19 nt, Homo sapiens
  misc_RNA (1)...(19): siRNA sense strand
gaugacuauugaggaugaa

SEQ ID NO: 1250009 - RNA, 19 nt, Homo sapiens
  misc_RNA (1)...(19): siRNA sense strand
aggagcugaugacuauuga

SEQ ID NO: 1250010 - RNA, 19 nt, Homo sapiens
  misc_RNA (1)...(19): siRNA sense strand
aggaggcccuggcauccaa

SEQ ID NO: 1250011 - RNA, 19 nt, Homo sapiens
  misc_RNA (1)...(19): siRNA sense strand
gcucguccacuccaaugau

SEQ ID NO: 1250012 - RNA, 19 nt, Homo sapiens
  misc_RNA (1)...(19): siRNA sense strand
ggaauugacugcacuguug

SEQ ID NO: 1250013 - RNA, 19 nt, Homo sapiens
  misc_RNA (1)...(19): siRNA sense strand
gcgaagcgcuggugaguau

SEQ ID NO: 1250014 - RNA, 19 nt, Homo sapiens
  misc_RNA (1)...(19): siRNA sense strand
gcaaggccaugauugagaa

SEQ ID NO: 1250015 - RNA, 19 nt, Homo sapiens
  misc_RNA (1)...(19): siRNA sense strand
cagcggaccuuccucauuc

SEQ ID NO: 1250016 - RNA, 19 nt, Homo sapiens
  misc_RNA (1)...(19): siRNA sense strand
cugaggagcugaugacuau

SEQ ID NO: 1250017 - RNA, 19 nt, Homo sapiens
  misc_RNA (1)...(19): siRNA sense strand
ugaacgauguggaggaauu

SEQ ID NO: 1250018 - RNA, 19 nt, Homo sapiens
  misc_RNA (1)...(19): siRNA sense strand
cgaggaggcugcagcauca

SEQ ID NO: 1250019 - RNA, 19 nt, Homo sapiens
  misc_RNA (1)...(19): siRNA sense strand
gaucagagcacggacuuug

SEQ ID NO: 1250020 - RNA, 19 nt, Homo sapiens
  misc_RNA (1)...(19): siRNA sense strand
gcugauggcucugcuguca

SEQ ID NO: 1250021 - RNA, 19 nt, Homo sapiens
  misc_RNA (1)...(19): siRNA sense strand
gcaccaugaugcaaaccaa

SEQ ID NO: 1250022 - RNA, 19 nt, Homo sapiens
  misc_RNA (1)...(19): siRNA sense strand
uugagaagcuggagaagga

SEQ ID NO: 1250023 - RNA, 19 nt, Homo sapiens
  misc_RNA (1)...(19): siRNA sense strand
gaacagcaggcagagguuu

SEQ ID NO: 1250024 - RNA, 19 nt, Homo sapiens
  misc_RNA (1)...(19): siRNA sense strand
gaagaaagagcugaugaag

SEQ ID NO: 1250025 - RNA, 19 nt, Homo sapiens
  misc_RNA (1)...(19): siRNA sense strand
agaacuggcugcacucuca

SEQ ID NO: 1250026 - RNA, 19 nt, Homo sapiens
  misc_RNA (1)...(19): siRNA sense strand
gcacuguuaccaagacuga

SEQ ID NO: 1250027 - RNA, 19 nt, Homo sapiens
  misc_RNA (1)...(19): siRNA sense strand
gcugaugacuauugaggau

SEQ ID NO: 1250028 - RNA, 19 nt, Homo sapiens
  misc_RNA (1)...(19): siRNA sense strand
gggaucguguccacaaguu

SEQ ID NO: 1250029 - RNA, 19 nt, Homo sapiens
  misc_RNA (1)...(19): siRNA sense strand
gaggagcugaugacuauug

SEQ ID NO: 1250030 - RNA, 19 nt, Homo sapiens
  misc_RNA (1)...(19): siRNA sense strand
gaagcgcuggugaguauga

SEQ ID NO: 1250031 - RNA, 19 nt, Homo sapiens
  misc_RNA (1)...(19): siRNA sense strand
ugaugacuauugaggauga

SEQ ID NO: 1250032 - RNA, 19 nt, Homo sapiens
  misc_RNA (1)...(19): siRNA sense strand
gagguggccuucucaucug

SEQ ID NO: 1250033 - RNA, 19 nt, Homo sapiens
  misc_RNA (1)...(19): siRNA sense strand
gagcagacccgagugaaca

SEQ ID NO: 1250034 - RNA, 19 nt, Homo sapiens
  misc_RNA (1)...(19): siRNA sense strand
caugaacgauguggaggaa

SEQ ID NO: 1250035 - RNA, 19 nt, Homo sapiens
  misc_RNA (1)...(19): siRNA sense strand
ucacucaugucaccagcuu

SEQ ID NO: 1250036 - RNA, 19 nt, Homo sapiens
  misc_RNA (1)...(19): siRNA sense strand
ccaagaagaugggcagcau

SEQ ID NO: 1250037 - RNA, 19 nt, Homo sapiens
  misc_RNA (1)...(19): siRNA sense strand
ggccuuagcugggcuggau

SEQ ID NO: 1250038 - RNA, 19 nt, Homo sapiens
  misc_RNA (1)...(19): siRNA sense strand
gaaccgacgccagaacuuc

SEQ ID NO: 1250039 - RNA, 19 nt, Homo sapiens
  misc_RNA (1)...(19): siRNA sense strand
gaagaagaaagagcugaug

SEQ ID NO: 1250040 - RNA, 19 nt, Homo sapiens
  misc_RNA (1)...(19): siRNA sense strand
gaacgauguggaggaauug

SEQ ID NO: 1250041 - RNA, 19 nt, Homo sapiens
  misc_RNA (1)...(19): siRNA sense strand
gugaggcgcucggagaaug

SEQ ID NO: 1250042 - RNA, 19 nt, Homo sapiens
  misc_RNA (1)...(19): siRNA sense strand
uggacaagaugcuggauca

SEQ ID NO: 1250043 - RNA, 19 nt, Homo sapiens
  misc_RNA (1)...(19): siRNA sense strand
gcacacaggcuggaacagu

SEQ ID NO: 1250044 - RNA, 19 nt, Homo sapiens
  misc_RNA (1)...(19): siRNA sense strand
gacaagaugcuggaucaga

SEQ ID NO: 1250045 - RNA, 19 nt, Homo sapiens
  misc_RNA (1)...(19): siRNA sense strand
caaggagcaacgaggagua

SEQ ID NO: 1250046 - RNA, 19 nt, Homo sapiens
  misc_RNA (1)...(19): siRNA sense strand
ccaacagcaucaagcagau

SEQ ID NO: 1250047 - RNA, 19 nt, Homo sapiens
  misc_RNA (1)...(19): siRNA sense strand
gagaccagcgggacaagga

SEQ ID NO: 1250048 - RNA, 19 nt, Homo sapiens
  misc_RNA (1)...(19): siRNA sense strand
gaucguguccacaaguuca

SEQ ID NO: 1250049 - RNA, 19 nt, Homo sapiens
  misc_RNA (1)...(19): siRNA sense strand
gcugaggagcugaugacua

SEQ ID NO: 1250050 - RNA, 19 nt, Homo sapiens
  misc_RNA (1)...(19): siRNA sense strand
ccagagggcagaacugaca

SEQ ID NO: 1250051 - RNA, 19 nt, Homo sapiens
  misc_RNA (1)...(19): siRNA sense strand
ggcaguggcagcaccauga

SEQ ID NO: 1250052 - RNA, 19 nt, Homo sapiens
  misc_RNA (1)...(19): siRNA sense strand
ucagagcacggacuuugaa

SEQ ID NO: 1250053 - RNA, 19 nt, Homo sapiens
  misc_RNA (1)...(19): siRNA sense strand
gcagcaccaugaugcaaac

SEQ ID NO: 1250054 - RNA, 19 nt, Homo sapiens
  misc_RNA (1)...(19): siRNA sense strand
gcaggcagagguuucaaag

SEQ ID NO: 1250055 - RNA, 19 nt, Homo sapiens
  misc_RNA (1)...(19): siRNA sense strand
ucacaucugauucuccuau

SEQ ID NO: 1250056 - RNA, 19 nt, Homo sapiens
  misc_RNA (1)...(19): siRNA sense strand
caaguucacaucugauucu

SEQ ID NO: 1250057 - RNA, 19 nt, Homo sapiens
  misc_RNA (1)...(19): siRNA sense strand
uccacaaguucacaucuga

SEQ ID NO: 1250058 - RNA, 19 nt, Homo sapiens
  misc_RNA (1)...(19): siRNA sense strand
agaagaaagagcugaugaa

SEQ ID NO: 1250059 - RNA, 19 nt, Homo sapiens
  misc_RNA (1)...(19): siRNA sense strand
cgagguggccuucucaucu

SEQ ID NO: 1250060 - RNA, 19 nt, Homo sapiens
  misc_RNA (1)...(19): siRNA sense strand
gugaugggauggccuucug

SEQ ID NO: 1250061 - RNA, 19 nt, Homo sapiens
  misc_RNA (1)...(19): siRNA sense strand
uguacgggcucaggagauu

SEQ ID NO: 1250062 - RNA, 19 nt, Homo sapiens
  misc_RNA (1)...(19): siRNA sense strand
ccagcggaccuuccucauu

SEQ ID NO: 1250063 - RNA, 19 nt, Homo sapiens
  misc_RNA (1)...(19): siRNA sense strand
gagcuccgacaaaggaaga

SEQ ID NO: 1250064 - RNA, 19 nt, Homo sapiens
  misc_RNA (1)...(19): siRNA sense strand
ggaacagcaggcagagguu

SEQ ID NO: 1250065 - RNA, 19 nt, Homo sapiens
  misc_RNA (1)...(19): siRNA sense strand
gcacgucgacauccagaac

SEQ ID NO: 1250066 - RNA, 19 nt, Homo sapiens
  misc_RNA (1)...(19): siRNA sense strand
aagaagaaagagcugauga

SEQ ID NO: 1250067 - RNA, 19 nt, Homo sapiens
  misc_RNA (1)...(19): siRNA sense strand
ggaggcugcagcaucaaga

SEQ ID NO: 1250068 - RNA, 19 nt, Homo sapiens
  misc_RNA (1)...(19): siRNA sense strand
ucccaacaguggcucaaga

SEQ ID NO: 1250069 - RNA, 19 nt, Homo sapiens
  misc_RNA (1)...(19): siRNA sense strand
cacaaguucacaucugauu

SEQ ID NO: 1250070 - RNA, 19 nt, Homo sapiens
  misc_RNA (1)...(19): siRNA sense strand
guccacaaguucacaucug

SEQ ID NO: 1250071 - RNA, 19 nt, Homo sapiens
  misc_RNA (1)...(19): siRNA sense strand
ugauugagaagcuggagaa

SEQ ID NO: 1250072 - RNA, 19 nt, Homo sapiens
  misc_RNA (1)...(19): siRNA sense strand
ggaggucacagcagaucug

SEQ ID NO: 1250073 - RNA, 19 nt, Homo sapiens
  misc_RNA (1)...(19): siRNA sense strand
gauaccuccucccgguuca

SEQ ID NO: 1250074 - RNA, 19 nt, Homo sapiens
  misc_RNA (1)...(19): siRNA sense strand
cgugagcuccgacaaagga

SEQ ID NO: 1250075 - RNA, 19 nt, Homo sapiens
  misc_RNA (1)...(19): siRNA sense strand
gcugagcagacccgaguga

SEQ ID NO: 1250076 - RNA, 19 nt, Homo sapiens
  misc_RNA (1)...(19): siRNA sense strand
gcucaagagaggacagcaa

SEQ ID NO: 1250077 - RNA, 19 nt, Homo sapiens
  misc_RNA (1)...(19): siRNA sense strand
gcgcgcaaggccaugauug

SEQ ID NO: 1250078 - RNA, 19 nt, Homo sapiens
  misc_RNA (1)...(19): siRNA sense strand
ggcagcaccaugaugcaaa

SEQ ID NO: 1250079 - RNA, 19 nt, Homo sapiens
  misc_RNA (1)...(19): siRNA sense strand
ccacauucaccaucgagau

SEQ ID NO: 1250080 - RNA, 19 nt, Homo sapiens
  misc_RNA (1)...(19): siRNA sense strand
cauccgggcugcacuucgu

SEQ ID NO: 1250081 - RNA, 19 nt, Homo sapiens
  misc_RNA (1)...(19): siRNA sense strand
ggcaggacaacaaggagaa

SEQ ID NO: 1250082 - RNA, 19 nt, Homo sapiens
  misc_RNA (1)...(19): siRNA sense strand
gcagacccgagugaacaaa

SEQ ID NO: 1250083 - RNA, 19 nt, Homo sapiens
  misc_RNA (1)...(19): siRNA sense strand
ggucaacaagcuucugucu

SEQ ID NO: 1250084 - RNA, 19 nt, Homo sapiens
  misc_RNA (1)...(19): siRNA sense strand
ccugaggccuucgacuaug

SEQ ID NO: 1250085 - RNA, 19 nt, Homo sapiens
  misc_RNA (1)...(19): siRNA sense strand
gcuacgagcacgucgacau

SEQ ID NO: 1250086 - RNA, 19 nt, Homo sapiens
  misc_RNA (1)...(19): siRNA sense strand
gaugacuauugaggaugaa

SEQ ID NO: 1250087 - RNA, 19 nt, Homo sapiens
  misc_RNA (1)...(19): siRNA sense strand
aggagcugaugacuauuga

SEQ ID NO: 1250088 - RNA, 19 nt, Homo sapiens
  misc_RNA (1)...(19): siRNA sense strand
aggaggcccuggcauccaa

SEQ ID NO: 1250089 - RNA, 19 nt, Homo sapiens
  misc_RNA (1)...(19): siRNA sense strand
gcucguccacuccaaugau

SEQ ID NO: 1250090 - RNA, 19 nt, Homo sapiens
  misc_RNA (1)...(19): siRNA sense strand
ggaauugacugcacuguug

SEQ ID NO: 1250091 - RNA, 19 nt, Homo sapiens
  misc_RNA (1)...(19): siRNA sense strand
gcgaagcgcuggugaguau

SEQ ID NO: 1250092 - RNA, 19 nt, Homo sapiens
  misc_RNA (1)...(19): siRNA sense strand
gcaaggccaugauugagaa

SEQ ID NO: 1250093 - RNA, 19 nt, Homo sapiens
  misc_RNA (1)...(19): siRNA sense strand
cagcggaccuuccucauuc

SEQ ID NO: 1250094 - RNA, 19 nt, Homo sapiens
  misc_RNA (1)...(19): siRNA sense strand
cugaggagcugaugacuau

SEQ ID NO: 1250095 - RNA, 19 nt, Homo sapiens
  misc_RNA (1)...(19): siRNA sense strand
ccaagugugucuucaccua

SEQ ID NO: 1250096 - RNA, 19 nt, Homo sapiens
  misc_RNA (1)...(19): siRNA sense strand
ugaacgauguggaggaauu

SEQ ID NO: 1250097 - RNA, 19 nt, Homo sapiens
  misc_RNA (1)...(19): siRNA sense strand
cgaggaggcugcagcauca

SEQ ID NO: 1250098 - RNA, 19 nt, Homo sapiens
  misc_RNA (1)...(19): siRNA sense strand
gaucagagcacggacuuug

SEQ ID NO: 1250099 - RNA, 19 nt, Homo sapiens
  misc_RNA (1)...(19): siRNA sense strand
gcugauggcucugcuguca

SEQ ID NO: 1250100 - RNA, 19 nt, Homo sapiens
  misc_RNA (1)...(19): siRNA sense strand
gcaccaugaugcaaaccaa

SEQ ID NO: 1250101 - RNA, 19 nt, Homo sapiens
  misc_RNA (1)...(19): siRNA sense strand
uugagaagcuggagaagga

SEQ ID NO: 1250102 - RNA, 19 nt, Homo sapiens
  misc_RNA (1)...(19): siRNA sense strand
gaacagcaggcagagguuu

SEQ ID NO: 1250103 - RNA, 19 nt, Homo sapiens
  misc_RNA (1)...(19): siRNA sense strand
gaagaaagagcugaugaag

SEQ ID NO: 1250104 - RNA, 19 nt, Homo sapiens
  misc_RNA (1)...(19): siRNA sense strand
agaacuggcugcacucuca

SEQ ID NO: 1250105 - RNA, 19 nt, Homo sapiens
  misc_RNA (1)...(19): siRNA sense strand
gcacuguuaccaagacuga

SEQ ID NO: 1250106 - RNA, 19 nt, Homo sapiens
  misc_RNA (1)...(19): siRNA sense strand
gcugaugacuauugaggau

SEQ ID NO: 1250107 - RNA, 19 nt, Homo sapiens
  misc_RNA (1)...(19): siRNA sense strand
ggagguggacgacaugaug

SEQ ID NO: 1250108 - RNA, 19 nt, Homo sapiens
  misc_RNA (1)...(19): siRNA sense strand
gggaucguguccacaaguu

SEQ ID NO: 1250109 - RNA, 19 nt, Homo sapiens
  misc_RNA (1)...(19): siRNA sense strand
gaggagcugaugacuauug

SEQ ID NO: 1250110 - RNA, 19 nt, Homo sapiens
  misc_RNA (1)...(19): siRNA sense strand
gaagcgcuggugaguauga

SEQ ID NO: 1250111 - RNA, 19 nt, Homo sapiens
  misc_RNA (1)...(19): siRNA sense strand
ugaugacuauugaggauga

SEQ ID NO: 1250112 - RNA, 19 nt, Homo sapiens
  misc_RNA (1)...(19): siRNA sense strand
gagguggccuucucaucug

SEQ ID NO: 1250113 - RNA, 19 nt, Homo sapiens
  misc_RNA (1)...(19): siRNA sense strand
gagcagacccgagugaaca

SEQ ID NO: 1250114 - RNA, 19 nt, Homo sapiens
  misc_RNA (1)...(19): siRNA sense strand
caugaacgauguggaggaa

SEQ ID NO: 1250115 - RNA, 19 nt, Homo sapiens
  misc_RNA (1)...(19): siRNA sense strand
ucacucaugucaccagcuu

SEQ ID NO: 1250116 - RNA, 19 nt, Homo sapiens
  misc_RNA (1)...(19): siRNA sense strand
ccaagaagaugggcagcau

SEQ ID NO: 1250117 - RNA, 19 nt, Homo sapiens
  misc_RNA (1)...(19): siRNA sense strand
ggccuuagcugggcuggau

SEQ ID NO: 1250118 - RNA, 19 nt, Homo sapiens
  misc_RNA (1)...(19): siRNA sense strand
gaaccgacgccagaacuuc

SEQ ID NO: 1250119 - RNA, 19 nt, Homo sapiens
  misc_RNA (1)...(19): siRNA sense strand
gaagaagaaagagcugaug

SEQ ID NO: 1250120 - RNA, 19 nt, Homo sapiens
  misc_RNA (1)...(19): siRNA sense strand
gcacacaggcuggaacagu

SEQ ID NO: 1250121 - RNA, 19 nt, Homo sapiens
  misc_RNA (1)...(19): siRNA sense strand
gaacgauguggaggaauug

SEQ ID NO: 1250122 - RNA, 19 nt, Homo sapiens
  misc_RNA (1)...(19): siRNA sense strand
gugaggcgcucggagaaug

SEQ ID NO: 1250123 - RNA, 19 nt, Homo sapiens
  misc_RNA (1)...(19): siRNA sense strand
uggacaagaugcuggauca

SEQ ID NO: 1250124 - RNA, 19 nt, Homo sapiens
  misc_RNA (1)...(19): siRNA sense strand
gacaagaugcuggaucaga

SEQ ID NO: 1250125 - RNA, 19 nt, Homo sapiens
  misc_RNA (1)...(19): siRNA sense strand
caaggagcaacgaggagua

SEQ ID NO: 1250126 - RNA, 19 nt, Homo sapiens
  misc_RNA (1)...(19): siRNA sense strand
ccaacagcaucaagcagau

SEQ ID NO: 1250127 - RNA, 19 nt, Homo sapiens
  misc_RNA (1)...(19): siRNA sense strand
gagaccagcgggacaagga

SEQ ID NO: 1250128 - RNA, 19 nt, Homo sapiens
  misc_RNA (1)...(19): siRNA sense strand
gaucguguccacaaguuca

SEQ ID NO: 1250129 - RNA, 19 nt, Homo sapiens
  misc_RNA (1)...(19): siRNA sense strand
gcugaggagcugaugacua

SEQ ID NO: 1250130 - RNA, 19 nt, Homo sapiens
  misc_RNA (1)...(19): siRNA sense strand
ccagagggcagaacugaca

SEQ ID NO: 1250131 - RNA, 19 nt, Homo sapiens
  misc_RNA (1)...(19): siRNA sense strand
ggcaguggcagcaccauga

SEQ ID NO: 1250132 - RNA, 19 nt, Homo sapiens
  misc_RNA (1)...(19): siRNA sense strand
ucagagcacggacuuugaa

SEQ ID NO: 1250133 - RNA, 19 nt, Homo sapiens
  misc_RNA (1)...(19): siRNA sense strand
gcagcaccaugaugcaaac

SEQ ID NO: 1250134 - RNA, 19 nt, Homo sapiens
  misc_RNA (1)...(19): siRNA sense strand
gcaggcagagguuucaaag

SEQ ID NO: 1250135 - RNA, 19 nt, Homo sapiens
  misc_RNA (1)...(19): siRNA sense strand
gagguggacgacaugauga

SEQ ID NO: 1250136 - RNA, 19 nt, Homo sapiens
  misc_RNA (1)...(19): siRNA sense strand
ucacaucugauucuccuau

SEQ ID NO: 1250137 - RNA, 19 nt, Homo sapiens
  misc_RNA (1)...(19): siRNA sense strand
caaguucacaucugauucu

SEQ ID NO: 1250138 - RNA, 19 nt, Homo sapiens
  misc_RNA (1)...(19): siRNA sense strand
uccacaaguucacaucuga

SEQ ID NO: 1250139 - RNA, 19 nt, Homo sapiens
  misc_RNA (1)...(19): siRNA sense strand
agaagaaagagcugaugaa

SEQ ID NO: 1250140 - RNA, 19 nt, Homo sapiens
  misc_RNA (1)...(19): siRNA sense strand
cgagguggccuucucaucu

SEQ ID NO: 1250141 - RNA, 19 nt, Homo sapiens
  misc_RNA (1)...(19): siRNA sense strand
gugaugggauggccuucug

SEQ ID NO: 1250142 - RNA, 19 nt, Homo sapiens
  misc_RNA (1)...(19): siRNA sense strand
ccagcggaccuuccucauu

SEQ ID NO: 1250143 - RNA, 19 nt, Homo sapiens
  misc_RNA (1)...(19): siRNA sense strand
uguacgggcucaggagauu

SEQ ID NO: 1250144 - RNA, 19 nt, Homo sapiens
  misc_RNA (1)...(19): siRNA sense strand
gagcuccgacaaaggaaga

SEQ ID NO: 1250145 - RNA, 19 nt, Homo sapiens
  misc_RNA (1)...(19): siRNA sense strand
ggaacagcaggcagagguu

SEQ ID NO: 1250146 - RNA, 19 nt, Homo sapiens
  misc_RNA (1)...(19): siRNA sense strand
gcacgucgacauccagaac

SEQ ID NO: 1250147 - RNA, 19 nt, Homo sapiens
  misc_RNA (1)...(19): siRNA sense strand
aagaagaaagagcugauga

SEQ ID NO: 1250148 - RNA, 19 nt, Homo sapiens
  misc_RNA (1)...(19): siRNA sense strand
ggaggcugcagcaucaaga

SEQ ID NO: 1250149 - RNA, 19 nt, Homo sapiens
  misc_RNA (1)...(19): siRNA sense strand
cacaaguucacaucugauu

SEQ ID NO: 1250150 - RNA, 19 nt, Homo sapiens
  misc_RNA (1)...(19): siRNA sense strand
ucccaacaguggcucaaga

SEQ ID NO: 1250151 - RNA, 19 nt, Homo sapiens
  misc_RNA (1)...(19): siRNA sense strand
guccacaaguucacaucug

SEQ ID NO: 1250152 - RNA, 19 nt, Homo sapiens
  misc_RNA (1)...(19): siRNA sense strand
ugauugagaagcuggagaa

SEQ ID NO: 1250153 - RNA, 19 nt, Homo sapiens
  misc_RNA (1)...(19): siRNA sense strand
ggaggucacagcagaucug

SEQ ID NO: 1250154 - RNA, 19 nt, Homo sapiens
  misc_RNA (1)...(19): siRNA sense strand
gauaccuccucccgguuca

SEQ ID NO: 1250155 - RNA, 19 nt, Homo sapiens
  misc_RNA (1)...(19): siRNA sense strand
cgugagcuccgacaaagga

SEQ ID NO: 1250156 - RNA, 19 nt, Homo sapiens
  misc_RNA (1)...(19): siRNA sense strand
caagugugucuucaccuau

SEQ ID NO: 1250157 - RNA, 19 nt, Homo sapiens
  misc_RNA (1)...(19): siRNA sense strand
gcucaagagaggacagcaa

SEQ ID NO: 1250158 - RNA, 19 nt, Homo sapiens
  misc_RNA (1)...(19): siRNA sense strand
gcgcgcaaggccaugauug

SEQ ID NO: 1250159 - RNA, 19 nt, Homo sapiens
  misc_RNA (1)...(19): siRNA sense strand
ggcagcaccaugaugcaaa

SEQ ID NO: 1250160 - RNA, 19 nt, Homo sapiens
  misc_RNA (1)...(19): siRNA sense strand
gcugagcagacccgaguga

SEQ ID NO: 1250161 - RNA, 19 nt, Homo sapiens
  misc_RNA (1)...(19): siRNA sense strand
ccacauucaccaucgagau

SEQ ID NO: 1250162 - RNA, 19 nt, Homo sapiens
  misc_RNA (1)...(19): siRNA sense strand
ugcagucgcucuacaacca

SEQ ID NO: 1250163 - RNA, 19 nt, Homo sapiens
  misc_RNA (1)...(19): siRNA sense strand
ggcaggacaacaaggagaa

SEQ ID NO: 1250164 - RNA, 19 nt, Homo sapiens
  misc_RNA (1)...(19): siRNA sense strand
cauccgggcugcacuucgu

SEQ ID NO: 1250165 - RNA, 19 nt, Homo sapiens
  misc_RNA (1)...(19): siRNA sense strand
gcagacccgagugaacaaa

SEQ ID NO: 1250166 - RNA, 19 nt, Homo sapiens
  misc_RNA (1)...(19): siRNA sense strand
ggucaacaagcuucugucu

SEQ ID NO: 1250167 - RNA, 19 nt, Homo sapiens
  misc_RNA (1)...(19): siRNA sense strand
aagugugucuucaccuaug

SEQ ID NO: 1250168 - RNA, 19 nt, Homo sapiens
  misc_RNA (1)...(19): siRNA sense strand
ccugaggccuucgacuaug

SEQ ID NO: 1250169 - RNA, 19 nt, Homo sapiens
  misc_RNA (1)...(19): siRNA sense strand
gcuacgagcacgucgacau

SEQ ID NO: 1250170 - RNA, 19 nt, Homo sapiens
  misc_RNA (1)...(19): siRNA sense strand
gaugacuauugaggaugaa

SEQ ID NO: 1250171 - RNA, 19 nt, Homo sapiens
  misc_RNA (1)...(19): siRNA sense strand
aggagcugaugacuauuga

SEQ ID NO: 1250172 - RNA, 19 nt, Homo sapiens
  misc_RNA (1)...(19): siRNA sense strand
aggaggcccuggcauccaa

SEQ ID NO: 1250173 - RNA, 19 nt, Homo sapiens
  misc_RNA (1)...(19): siRNA sense strand
gcucguccacuccaaugau

SEQ ID NO: 1250174 - RNA, 19 nt, Homo sapiens
  misc_RNA (1)...(19): siRNA sense strand
ggaauugacugcacuguug

SEQ ID NO: 1250175 - RNA, 19 nt, Homo sapiens
  misc_RNA (1)...(19): siRNA sense strand
gcgaagcgcuggugaguau

SEQ ID NO: 1250176 - RNA, 19 nt, Homo sapiens
  misc_RNA (1)...(19): siRNA sense strand
gcaaggccaugauugagaa

SEQ ID NO: 1250177 - RNA, 19 nt, Homo sapiens
  misc_RNA (1)...(19): siRNA sense strand
cagcggaccuuccucauuc

SEQ ID NO: 1250178 - RNA, 19 nt, Homo sapiens
  misc_RNA (1)...(19): siRNA sense strand
cugaggagcugaugacuau

SEQ ID NO: 1250179 - RNA, 19 nt, Homo sapiens
  misc_RNA (1)...(19): siRNA sense strand
ccaagugugucuucaccua

SEQ ID NO: 1250180 - RNA, 19 nt, Homo sapiens
  misc_RNA (1)...(19): siRNA sense strand
ugaacgauguggaggaauu

SEQ ID NO: 1250181 - RNA, 19 nt, Homo sapiens
  misc_RNA (1)...(19): siRNA sense strand
cgaggaggcugcagcauca

SEQ ID NO: 1250182 - RNA, 19 nt, Homo sapiens
  misc_RNA (1)...(19): siRNA sense strand
gaucagagcacggacuuug

SEQ ID NO: 1250183 - RNA, 19 nt, Homo sapiens
  misc_RNA (1)...(19): siRNA sense strand
gcugauggcucugcuguca

SEQ ID NO: 1250184 - RNA, 19 nt, Homo sapiens
  misc_RNA (1)...(19): siRNA sense strand
gcaccaugaugcaaaccaa

SEQ ID NO: 1250185 - RNA, 19 nt, Homo sapiens
  misc_RNA (1)...(19): siRNA sense strand
uugagaagcuggagaagga

SEQ ID NO: 1250186 - RNA, 19 nt, Homo sapiens
  misc_RNA (1)...(19): siRNA sense strand
gaacagcaggcagagguuu

SEQ ID NO: 1250187 - RNA, 19 nt, Homo sapiens
  misc_RNA (1)...(19): siRNA sense strand
gaagaaagagcugaugaag

SEQ ID NO: 1250188 - RNA, 19 nt, Homo sapiens
  misc_RNA (1)...(19): siRNA sense strand
agaacuggcugcacucuca

SEQ ID NO: 1250189 - RNA, 19 nt, Homo sapiens
  misc_RNA (1)...(19): siRNA sense strand
gcacuguuaccaagacuga

SEQ ID NO: 1250190 - RNA, 19 nt, Homo sapiens
  misc_RNA (1)...(19): siRNA sense strand
gcugaugacuauugaggau

SEQ ID NO: 1250191 - RNA, 19 nt, Homo sapiens
  misc_RNA (1)...(19): siRNA sense strand
ggagguggacgacaugaug

SEQ ID NO: 1250192 - RNA, 19 nt, Homo sapiens
  misc_RNA (1)...(19): siRNA sense strand
gggaucguguccacaaguu

SEQ ID NO: 1250193 - RNA, 19 nt, Homo sapiens
  misc_RNA (1)...(19): siRNA sense strand
gaggagcugaugacuauug

SEQ ID NO: 1250194 - RNA, 19 nt, Homo sapiens
  misc_RNA (1)...(19): siRNA sense strand
gaagcgcuggugaguauga

SEQ ID NO: 1250195 - RNA, 19 nt, Homo sapiens
  misc_RNA (1)...(19): siRNA sense strand
ugaugacuauugaggauga

SEQ ID NO: 1250196 - RNA, 19 nt, Homo sapiens
  misc_RNA (1)...(19): siRNA sense strand
gagguggccuucucaucug

SEQ ID NO: 1250197 - RNA, 19 nt, Homo sapiens
  misc_RNA (1)...(19): siRNA sense strand
gagcagacccgagugaaca

SEQ ID NO: 1250198 - RNA, 19 nt, Homo sapiens
  misc_RNA (1)...(19): siRNA sense strand
caugaacgauguggaggaa

SEQ ID NO: 1250199 - RNA, 19 nt, Homo sapiens
  misc_RNA (1)...(19): siRNA sense strand
ucacucaugucaccagcuu

SEQ ID NO: 1250200 - RNA, 19 nt, Homo sapiens
  misc_RNA (1)...(19): siRNA sense strand
ccaagaagaugggcagcau

SEQ ID NO: 1250201 - RNA, 19 nt, Homo sapiens
  misc_RNA (1)...(19): siRNA sense strand
ggccuuagcugggcuggau

SEQ ID NO: 1250202 - RNA, 19 nt, Homo sapiens
  misc_RNA (1)...(19): siRNA sense strand
gaaccgacgccagaacuuc

SEQ ID NO: 1250203 - RNA, 19 nt, Homo sapiens
  misc_RNA (1)...(19): siRNA sense strand
gaagaagaaagagcugaug

SEQ ID NO: 1250204 - RNA, 19 nt, Homo sapiens
  misc_RNA (1)...(19): siRNA sense strand
gcacacaggcuggaacagu

SEQ ID NO: 1250205 - RNA, 19 nt, Homo sapiens
  misc_RNA (1)...(19): siRNA sense strand
gaacgauguggaggaauug

SEQ ID NO: 1250206 - RNA, 19 nt, Homo sapiens
  misc_RNA (1)...(19): siRNA sense strand
gugaggcgcucggagaaug

SEQ ID NO: 1250207 - RNA, 19 nt, Homo sapiens
  misc_RNA (1)...(19): siRNA sense strand
uggacaagaugcuggauca

SEQ ID NO: 1250208 - RNA, 19 nt, Homo sapiens
  misc_RNA (1)...(19): siRNA sense strand
gacaagaugcuggaucaga

SEQ ID NO: 1250209 - RNA, 19 nt, Homo sapiens
  misc_RNA (1)...(19): siRNA sense strand
caaggagcaacgaggagua

SEQ ID NO: 1250210 - RNA, 19 nt, Homo sapiens
  misc_RNA (1)...(19): siRNA sense strand
ccaacagcaucaagcagau

SEQ ID NO: 1250211 - RNA, 19 nt, Homo sapiens
  misc_RNA (1)...(19): siRNA sense strand
gagaccagcgggacaagga

SEQ ID NO: 1250212 - RNA, 19 nt, Homo sapiens
  misc_RNA (1)...(19): siRNA sense strand
gaucguguccacaaguuca

SEQ ID NO: 1250213 - RNA, 19 nt, Homo sapiens
  misc_RNA (1)...(19): siRNA sense strand
gcugaggagcugaugacua

SEQ ID NO: 1250214 - RNA, 19 nt, Homo sapiens
  misc_RNA (1)...(19): siRNA sense strand
ccagagggcagaacugaca

SEQ ID NO: 1250215 - RNA, 19 nt, Homo sapiens
  misc_RNA (1)...(19): siRNA sense strand
ggcaguggcagcaccauga

SEQ ID NO: 1250216 - RNA, 19 nt, Homo sapiens
  misc_RNA (1)...(19): siRNA sense strand
ucagagcacggacuuugaa

SEQ ID NO: 1250217 - RNA, 19 nt, Homo sapiens
  misc_RNA (1)...(19): siRNA sense strand
gcagcaccaugaugcaaac

SEQ ID NO: 1250218 - RNA, 19 nt, Homo sapiens
  misc_RNA (1)...(19): siRNA sense strand
gcaggcagagguuucaaag

SEQ ID NO: 1250219 - RNA, 19 nt, Homo sapiens
  misc_RNA (1)...(19): siRNA sense strand
gagguggacgacaugauga

SEQ ID NO: 1250220 - RNA, 19 nt, Homo sapiens
  misc_RNA (1)...(19): siRNA sense strand
ucacaucugauucuccuau

SEQ ID NO: 1250221 - RNA, 19 nt, Homo sapiens
  misc_RNA (1)...(19): siRNA sense strand
caaguucacaucugauucu

SEQ ID NO: 1250222 - RNA, 19 nt, Homo sapiens
  misc_RNA (1)...(19): siRNA sense strand
uccacaaguucacaucuga

SEQ ID NO: 1250223 - RNA, 19 nt, Homo sapiens
  misc_RNA (1)...(19): siRNA sense strand
agaagaaagagcugaugaa

SEQ ID NO: 1250224 - RNA, 19 nt, Homo sapiens
  misc_RNA (1)...(19): siRNA sense strand
cgagguggccuucucaucu

SEQ ID NO: 1250225 - RNA, 19 nt, Homo sapiens
  misc_RNA (1)...(19): siRNA sense strand
gugaugggauggccuucug

SEQ ID NO: 1250226 - RNA, 19 nt, Homo sapiens
  misc_RNA (1)...(19): siRNA sense strand
ccagcggaccuuccucauu

SEQ ID NO: 1250227 - RNA, 19 nt, Homo sapiens
  misc_RNA (1)...(19): siRNA sense strand
uguacgggcucaggagauu

SEQ ID NO: 1250228 - RNA, 19 nt, Homo sapiens
  misc_RNA (1)...(19): siRNA sense strand
gagcuccgacaaaggaaga

SEQ ID NO: 1250229 - RNA, 19 nt, Homo sapiens
  misc_RNA (1)...(19): siRNA sense strand
ggaacagcaggcagagguu

SEQ ID NO: 1250230 - RNA, 19 nt, Homo sapiens
  misc_RNA (1)...(19): siRNA sense strand
gcacgucgacauccagaac

SEQ ID NO: 1250231 - RNA, 19 nt, Homo sapiens
  misc_RNA (1)...(19): siRNA sense strand
aagaagaaagagcugauga

SEQ ID NO: 1250232 - RNA, 19 nt, Homo sapiens
  misc_RNA (1)...(19): siRNA sense strand
ggaggcugcagcaucaaga

SEQ ID NO: 1250233 - RNA, 19 nt, Homo sapiens
  misc_RNA (1)...(19): siRNA sense strand
cacaaguucacaucugauu

SEQ ID NO: 1250234 - RNA, 19 nt, Homo sapiens
  misc_RNA (1)...(19): siRNA sense strand
ucccaacaguggcucaaga

SEQ ID NO: 1250235 - RNA, 19 nt, Homo sapiens
  misc_RNA (1)...(19): siRNA sense strand
guccacaaguucacaucug

SEQ ID NO: 1250236 - RNA, 19 nt, Homo sapiens
  misc_RNA (1)...(19): siRNA sense strand
ugauugagaagcuggagaa

SEQ ID NO: 1250237 - RNA, 19 nt, Homo sapiens
  misc_RNA (1)...(19): siRNA sense strand
ggaggucacagcagaucug

SEQ ID NO: 1250238 - RNA, 19 nt, Homo sapiens
  misc_RNA (1)...(19): siRNA sense strand
gauaccuccucccgguuca

SEQ ID NO: 1250239 - RNA, 19 nt, Homo sapiens
  misc_RNA (1)...(19): siRNA sense strand
cgugagcuccgacaaagga

SEQ ID NO: 1250240 - RNA, 19 nt, Homo sapiens
  misc_RNA (1)...(19): siRNA sense strand
caagugugucuucaccuau

SEQ ID NO: 1250241 - RNA, 19 nt, Homo sapiens
  misc_RNA (1)...(19): siRNA sense strand
gcucaagagaggacagcaa

SEQ ID NO: 1250242 - RNA, 19 nt, Homo sapiens
  misc_RNA (1)...(19): siRNA sense strand
gcgcgcaaggccaugauug

SEQ ID NO: 1250243 - RNA, 19 nt, Homo sapiens
  misc_RNA (1)...(19): siRNA sense strand
ggcagcaccaugaugcaaa

SEQ ID NO: 1250244 - RNA, 19 nt, Homo sapiens
  misc_RNA (1)...(19): siRNA sense strand
gcugagcagacccgaguga

SEQ ID NO: 1250245 - RNA, 19 nt, Homo sapiens
  misc_RNA (1)...(19): siRNA sense strand
ccacauucaccaucgagau

SEQ ID NO: 1250246 - RNA, 19 nt, Homo sapiens
  misc_RNA (1)...(19): siRNA sense strand
ugcagucgcucuacaacca

SEQ ID NO: 1250247 - RNA, 19 nt, Homo sapiens
  misc_RNA (1)...(19): siRNA sense strand
ggcaggacaacaaggagaa

SEQ ID NO: 1250248 - RNA, 19 nt, Homo sapiens
  misc_RNA (1)...(19): siRNA sense strand
cauccgggcugcacuucgu

SEQ ID NO: 1250249 - RNA, 19 nt, Homo sapiens
  misc_RNA (1)...(19): siRNA sense strand
gcagacccgagugaacaaa

SEQ ID NO: 1250250 - RNA, 19 nt, Homo sapiens
  misc_RNA (1)...(19): siRNA sense strand
ggucaacaagcuucugucu

SEQ ID NO: 1250251 - RNA, 19 nt, Homo sapiens
  misc_RNA (1)...(19): siRNA sense strand
aagugugucuucaccuaug

SEQ ID NO: 1250252 - RNA, 19 nt, Homo sapiens
  misc_RNA (1)...(19): siRNA sense strand
ccugaggccuucgacuaug

SEQ ID NO: 1250253 - RNA, 19 nt, Homo sapiens
  misc_RNA (1)...(19): siRNA sense strand
gcuacgagcacgucgacau

SEQ ID NO: 1250254 - RNA, 19 nt, Homo sapiens
  misc_RNA (1)...(19): siRNA sense strand
gaugacuauugaggaugaa

SEQ ID NO: 1250255 - RNA, 19 nt, Homo sapiens
  misc_RNA (1)...(19): siRNA sense strand
aggagcugaugacuauuga

SEQ ID NO: 1250256 - RNA, 19 nt, Homo sapiens
  misc_RNA (1)...(19): siRNA sense strand
aggaggcccuggcauccaa

SEQ ID NO: 1250257 - RNA, 19 nt, Homo sapiens
  misc_RNA (1)...(19): siRNA sense strand
gcucguccacuccaaugau

SEQ ID NO: 1250258 - RNA, 19 nt, Homo sapiens
  misc_RNA (1)...(19): siRNA sense strand
ggaauugacugcacuguug

SEQ ID NO: 1250259 - RNA, 19 nt, Homo sapiens
  misc_RNA (1)...(19): siRNA sense strand
gcgaagcgcuggugaguau

SEQ ID NO: 1250260 - RNA, 19 nt, Homo sapiens
  misc_RNA (1)...(19): siRNA sense strand
gcaaggccaugauugagaa

SEQ ID NO: 1250261 - RNA, 19 nt, Homo sapiens
  misc_RNA (1)...(19): siRNA sense strand
cagcggaccuuccucauuc

SEQ ID NO: 1250262 - RNA, 19 nt, Homo sapiens
  misc_RNA (1)...(19): siRNA sense strand
cugaggagcugaugacuau

SEQ ID NO: 1250263 - RNA, 19 nt, Homo sapiens
  misc_RNA (1)...(19): siRNA sense strand
ugaacgauguggaggaauu

SEQ ID NO: 1250264 - RNA, 19 nt, Homo sapiens
  misc_RNA (1)...(19): siRNA sense strand
cgaggaggcugcagcauca

SEQ ID NO: 1250265 - RNA, 19 nt, Homo sapiens
  misc_RNA (1)...(19): siRNA sense strand
gaucagagcacggacuuug

SEQ ID NO: 1250266 - RNA, 19 nt, Homo sapiens
  misc_RNA (1)...(19): siRNA sense strand
gcugauggcucugcuguca

SEQ ID NO: 1250267 - RNA, 19 nt, Homo sapiens
  misc_RNA (1)...(19): siRNA sense strand
gcaccaugaugcaaaccaa

SEQ ID NO: 1250268 - RNA, 19 nt, Homo sapiens
  misc_RNA (1)...(19): siRNA sense strand
uugagaagcuggagaagga

SEQ ID NO: 1250269 - RNA, 19 nt, Homo sapiens
  misc_RNA (1)...(19): siRNA sense strand
gaacagcaggcagagguuu

SEQ ID NO: 1250270 - RNA, 19 nt, Homo sapiens
  misc_RNA (1)...(19): siRNA sense strand
gaagaaagagcugaugaag

SEQ ID NO: 1250271 - RNA, 19 nt, Homo sapiens
  misc_RNA (1)...(19): siRNA sense strand
agaacuggcugcacucuca

SEQ ID NO: 1250272 - RNA, 19 nt, Homo sapiens
  misc_RNA (1)...(19): siRNA sense strand
gcacuguuaccaagacuga

SEQ ID NO: 1250273 - RNA, 19 nt, Homo sapiens
  misc_RNA (1)...(19): siRNA sense strand
gcugaugacuauugaggau

SEQ ID NO: 1250274 - RNA, 19 nt, Homo sapiens
  misc_RNA (1)...(19): siRNA sense strand
gggaucguguccacaaguu

SEQ ID NO: 1250275 - RNA, 19 nt, Homo sapiens
  misc_RNA (1)...(19): siRNA sense strand
gaggagcugaugacuauug

SEQ ID NO: 1250276 - RNA, 19 nt, Homo sapiens
  misc_RNA (1)...(19): siRNA sense strand
gaagcgcuggugaguauga

SEQ ID NO: 1250277 - RNA, 19 nt, Homo sapiens
  misc_RNA (1)...(19): siRNA sense strand
ugaugacuauugaggauga

SEQ ID NO: 1250278 - RNA, 19 nt, Homo sapiens
  misc_RNA (1)...(19): siRNA sense strand
gagguggccuucucaucug

SEQ ID NO: 1250279 - RNA, 19 nt, Homo sapiens
  misc_RNA (1)...(19): siRNA sense strand
gagcagacccgagugaaca

SEQ ID NO: 1250280 - RNA, 19 nt, Homo sapiens
  misc_RNA (1)...(19): siRNA sense strand
caugaacgauguggaggaa

SEQ ID NO: 1250281 - RNA, 19 nt, Homo sapiens
  misc_RNA (1)...(19): siRNA sense strand
ucacucaugucaccagcuu

SEQ ID NO: 1250282 - RNA, 19 nt, Homo sapiens
  misc_RNA (1)...(19): siRNA sense strand
ccaagaagaugggcagcau

SEQ ID NO: 1250283 - RNA, 19 nt, Homo sapiens
  misc_RNA (1)...(19): siRNA sense strand
ggccuuagcugggcuggau

SEQ ID NO: 1250284 - RNA, 19 nt, Homo sapiens
  misc_RNA (1)...(19): siRNA sense strand
gaaccgacgccagaacuuc

SEQ ID NO: 1250285 - RNA, 19 nt, Homo sapiens
  misc_RNA (1)...(19): siRNA sense strand
gaagaagaaagagcugaug

SEQ ID NO: 1250286 - RNA, 19 nt, Homo sapiens
  misc_RNA (1)...(19): siRNA sense strand
gaacgauguggaggaauug

SEQ ID NO: 1250287 - RNA, 19 nt, Homo sapiens
  misc_RNA (1)...(19): siRNA sense strand
gugaggcgcucggagaaug

SEQ ID NO: 1250288 - RNA, 19 nt, Homo sapiens
  misc_RNA (1)...(19): siRNA sense strand
uggacaagaugcuggauca

SEQ ID NO: 1250289 - RNA, 19 nt, Homo sapiens
  misc_RNA (1)...(19): siRNA sense strand
gcacacaggcuggaacagu

SEQ ID NO: 1250290 - RNA, 19 nt, Homo sapiens
  misc_RNA (1)...(19): siRNA sense strand
gacaagaugcuggaucaga

SEQ ID NO: 1250291 - RNA, 19 nt, Homo sapiens
  misc_RNA (1)...(19): siRNA sense strand
caaggagcaacgaggagua

SEQ ID NO: 1250292 - RNA, 19 nt, Homo sapiens
  misc_RNA (1)...(19): siRNA sense strand
ccaacagcaucaagcagau

SEQ ID NO: 1250293 - RNA, 19 nt, Homo sapiens
  misc_RNA (1)...(19): siRNA sense strand
gagaccagcgggacaagga

SEQ ID NO: 1250294 - RNA, 19 nt, Homo sapiens
  misc_RNA (1)...(19): siRNA sense strand
gaucguguccacaaguuca

SEQ ID NO: 1250295 - RNA, 19 nt, Homo sapiens
  misc_RNA (1)...(19): siRNA sense strand
gcugaggagcugaugacua

SEQ ID NO: 1250296 - RNA, 19 nt, Homo sapiens
  misc_RNA (1)...(19): siRNA sense strand
ccagagggcagaacugaca

SEQ ID NO: 1250297 - RNA, 19 nt, Homo sapiens
  misc_RNA (1)...(19): siRNA sense strand
ggcaguggcagcaccauga

SEQ ID NO: 1250298 - RNA, 19 nt, Homo sapiens
  misc_RNA (1)...(19): siRNA sense strand
ucagagcacggacuuugaa

SEQ ID NO: 1250299 - RNA, 19 nt, Homo sapiens
  misc_RNA (1)...(19): siRNA sense strand
gcagcaccaugaugcaaac

SEQ ID NO: 1250300 - RNA, 19 nt, Homo sapiens
  misc_RNA (1)...(19): siRNA sense strand
gcaggcagagguuucaaag

SEQ ID NO: 1250301 - RNA, 19 nt, Homo sapiens
  misc_RNA (1)...(19): siRNA sense strand
ucacaucugauucuccuau

SEQ ID NO: 1250302 - RNA, 19 nt, Homo sapiens
  misc_RNA (1)...(19): siRNA sense strand
caaguucacaucugauucu

SEQ ID NO: 1250303 - RNA, 19 nt, Homo sapiens
  misc_RNA (1)...(19): siRNA sense strand
uccacaaguucacaucuga

SEQ ID NO: 1250304 - RNA, 19 nt, Homo sapiens
  misc_RNA (1)...(19): siRNA sense strand
agaagaaagagcugaugaa

SEQ ID NO: 1250305 - RNA, 19 nt, Homo sapiens
  misc_RNA (1)...(19): siRNA sense strand
cgagguggccuucucaucu

SEQ ID NO: 1250306 - RNA, 19 nt, Homo sapiens
  misc_RNA (1)...(19): siRNA sense strand
gugaugggauggccuucug

SEQ ID NO: 1250307 - RNA, 19 nt, Homo sapiens
  misc_RNA (1)...(19): siRNA sense strand
uguacgggcucaggagauu

SEQ ID NO: 1250308 - RNA, 19 nt, Homo sapiens
  misc_RNA (1)...(19): siRNA sense strand
ccagcggaccuuccucauu

SEQ ID NO: 1250309 - RNA, 19 nt, Homo sapiens
  misc_RNA (1)...(19): siRNA sense strand
gagcuccgacaaaggaaga

SEQ ID NO: 1250310 - RNA, 19 nt, Homo sapiens
  misc_RNA (1)...(19): siRNA sense strand
ggaacagcaggcagagguu

SEQ ID NO: 1250311 - RNA, 19 nt, Homo sapiens
  misc_RNA (1)...(19): siRNA sense strand
gcacgucgacauccagaac

SEQ ID NO: 1250312 - RNA, 19 nt, Homo sapiens
  misc_RNA (1)...(19): siRNA sense strand
aagaagaaagagcugauga

SEQ ID NO: 1250313 - RNA, 19 nt, Homo sapiens
  misc_RNA (1)...(19): siRNA sense strand
ggaggcugcagcaucaaga

SEQ ID NO: 1250314 - RNA, 19 nt, Homo sapiens
  misc_RNA (1)...(19): siRNA sense strand
ucccaacaguggcucaaga

SEQ ID NO: 1250315 - RNA, 19 nt, Homo sapiens
  misc_RNA (1)...(19): siRNA sense strand
cacaaguucacaucugauu

SEQ ID NO: 1250316 - RNA, 19 nt, Homo sapiens
  misc_RNA (1)...(19): siRNA sense strand
guccacaaguucacaucug

SEQ ID NO: 1250317 - RNA, 19 nt, Homo sapiens
  misc_RNA (1)...(19): siRNA sense strand
ugauugagaagcuggagaa

SEQ ID NO: 1250318 - RNA, 19 nt, Homo sapiens
  misc_RNA (1)...(19): siRNA sense strand
ggaggucacagcagaucug

SEQ ID NO: 1250319 - RNA, 19 nt, Homo sapiens
  misc_RNA (1)...(19): siRNA sense strand
gauaccuccucccgguuca

SEQ ID NO: 1250320 - RNA, 19 nt, Homo sapiens
  misc_RNA (1)...(19): siRNA sense strand
cgugagcuccgacaaagga

SEQ ID NO: 1250321 - RNA, 19 nt, Homo sapiens
  misc_RNA (1)...(19): siRNA sense strand
gcugagcagacccgaguga

SEQ ID NO: 1250322 - RNA, 19 nt, Homo sapiens
  misc_RNA (1)...(19): siRNA sense strand
gcucaagagaggacagcaa

SEQ ID NO: 1250323 - RNA, 19 nt, Homo sapiens
  misc_RNA (1)...(19): siRNA sense strand
gcgcgcaaggccaugauug

SEQ ID NO: 1250324 - RNA, 19 nt, Homo sapiens
  misc_RNA (1)...(19): siRNA sense strand
ggcagcaccaugaugcaaa

SEQ ID NO: 1250325 - RNA, 19 nt, Homo sapiens
  misc_RNA (1)...(19): siRNA sense strand
ccacauucaccaucgagau

SEQ ID NO: 1250326 - RNA, 19 nt, Homo sapiens
  misc_RNA (1)...(19): siRNA sense strand
cauccgggcugcacuucgu

SEQ ID NO: 1250327 - RNA, 19 nt, Homo sapiens
  misc_RNA (1)...(19): siRNA sense strand
ggcaggacaacaaggagaa

SEQ ID NO: 1250328 - RNA, 19 nt, Homo sapiens
  misc_RNA (1)...(19): siRNA sense strand
gcagacccgagugaacaaa

SEQ ID NO: 1250329 - RNA, 19 nt, Homo sapiens
  misc_RNA (1)...(19): siRNA sense strand
ggucaacaagcuucugucu

SEQ ID NO: 1250330 - RNA, 19 nt, Homo sapiens
  misc_RNA (1)...(19): siRNA sense strand
ccugaggccuucgacuaug

SEQ ID NO: 1250331 - RNA, 19 nt, Homo sapiens
  misc_RNA (1)...(19): siRNA sense strand
gcuacgagcacgucgacau

SEQ ID NO: 1250332 - RNA, 19 nt, Homo sapiens
  misc_RNA (1)...(19): siRNA sense strand
gaugacuauugaggaugaa

SEQ ID NO: 1250333 - RNA, 19 nt, Homo sapiens
  misc_RNA (1)...(19): siRNA sense strand
aggagcugaugacuauuga

SEQ ID NO: 1250334 - RNA, 19 nt, Homo sapiens
  misc_RNA (1)...(19): siRNA sense strand
aggaggcccuggcauccaa

SEQ ID NO: 1250335 - RNA, 19 nt, Homo sapiens
  misc_RNA (1)...(19): siRNA sense strand
gcucguccacuccaaugau

SEQ ID NO: 1250336 - RNA, 19 nt, Homo sapiens
  misc_RNA (1)...(19): siRNA sense strand
ggaauugacugcacuguug

SEQ ID NO: 1250337 - RNA, 19 nt, Homo sapiens
  misc_RNA (1)...(19): siRNA sense strand
gcgaagcgcuggugaguau

SEQ ID NO: 1250338 - RNA, 19 nt, Homo sapiens
  misc_RNA (1)...(19): siRNA sense strand
gcaaggccaugauugagaa

SEQ ID NO: 1250339 - RNA, 19 nt, Homo sapiens
  misc_RNA (1)...(19): siRNA sense strand
cagcggaccuuccucauuc

SEQ ID NO: 1250340 - RNA, 19 nt, Homo sapiens
  misc_RNA (1)...(19): siRNA sense strand
cugaggagcugaugacuau

SEQ ID NO: 1250341 - RNA, 19 nt, Homo sapiens
  misc_RNA (1)...(19): siRNA sense strand
ccaagugugucuucaccua

SEQ ID NO: 1250342 - RNA, 19 nt, Homo sapiens
  misc_RNA (1)...(19): siRNA sense strand
ugaacgauguggaggaauu

SEQ ID NO: 1250343 - RNA, 19 nt, Homo sapiens
  misc_RNA (1)...(19): siRNA sense strand
cgaggaggcugcagcauca

SEQ ID NO: 1250344 - RNA, 19 nt, Homo sapiens
  misc_RNA (1)...(19): siRNA sense strand
gaucagagcacggacuuug

SEQ ID NO: 1250345 - RNA, 19 nt, Homo sapiens
  misc_RNA (1)...(19): siRNA sense strand
gcugauggcucugcuguca

SEQ ID NO: 1250346 - RNA, 19 nt, Homo sapiens
  misc_RNA (1)...(19): siRNA sense strand
gcaccaugaugcaaaccaa

SEQ ID NO: 1250347 - RNA, 19 nt, Homo sapiens
  misc_RNA (1)...(19): siRNA sense strand
uugagaagcuggagaagga

SEQ ID NO: 1250348 - RNA, 19 nt, Homo sapiens
  misc_RNA (1)...(19): siRNA sense strand
gaacagcaggcagagguuu

SEQ ID NO: 1250349 - RNA, 19 nt, Homo sapiens
  misc_RNA (1)...(19): siRNA sense strand
gaagaaagagcugaugaag

SEQ ID NO: 1250350 - RNA, 19 nt, Homo sapiens
  misc_RNA (1)...(19): siRNA sense strand
agaacuggcugcacucuca

SEQ ID NO: 1250351 - RNA, 19 nt, Homo sapiens
  misc_RNA (1)...(19): siRNA sense strand
gcacuguuaccaagacuga

SEQ ID NO: 1250352 - RNA, 19 nt, Homo sapiens
  misc_RNA (1)...(19): siRNA sense strand
gcugaugacuauugaggau

SEQ ID NO: 1250353 - RNA, 19 nt, Homo sapiens
  misc_RNA (1)...(19): siRNA sense strand
ggagguggacgacaugaug

SEQ ID NO: 1250354 - RNA, 19 nt, Homo sapiens
  misc_RNA (1)...(19): siRNA sense strand
gggaucguguccacaaguu

SEQ ID NO: 1250355 - RNA, 19 nt, Homo sapiens
  misc_RNA (1)...(19): siRNA sense strand
gaggagcugaugacuauug

SEQ ID NO: 1250356 - RNA, 19 nt, Homo sapiens
  misc_RNA (1)...(19): siRNA sense strand
gaagcgcuggugaguauga

SEQ ID NO: 1250357 - RNA, 19 nt, Homo sapiens
  misc_RNA (1)...(19): siRNA sense strand
ugaugacuauugaggauga

SEQ ID NO: 1250358 - RNA, 19 nt, Homo sapiens
  misc_RNA (1)...(19): siRNA sense strand
gagguggccuucucaucug

SEQ ID NO: 1250359 - RNA, 19 nt, Homo sapiens
  misc_RNA (1)...(19): siRNA sense strand
gagcagacccgagugaaca

SEQ ID NO: 1250360 - RNA, 19 nt, Homo sapiens
  misc_RNA (1)...(19): siRNA sense strand
caugaacgauguggaggaa

SEQ ID NO: 1250361 - RNA, 19 nt, Homo sapiens
  misc_RNA (1)...(19): siRNA sense strand
ucacucaugucaccagcuu

SEQ ID NO: 1250362 - RNA, 19 nt, Homo sapiens
  misc_RNA (1)...(19): siRNA sense strand
ccaagaagaugggcagcau

SEQ ID NO: 1250363 - RNA, 19 nt, Homo sapiens
  misc_RNA (1)...(19): siRNA sense strand
ggccuuagcugggcuggau

SEQ ID NO: 1250364 - RNA, 19 nt, Homo sapiens
  misc_RNA (1)...(19): siRNA sense strand
gaaccgacgccagaacuuc

SEQ ID NO: 1250365 - RNA, 19 nt, Homo sapiens
  misc_RNA (1)...(19): siRNA sense strand
gaagaagaaagagcugaug

SEQ ID NO: 1250366 - RNA, 19 nt, Homo sapiens
  misc_RNA (1)...(19): siRNA sense strand
gcacacaggcuggaacagu

SEQ ID NO: 1250367 - RNA, 19 nt, Homo sapiens
  misc_RNA (1)...(19): siRNA sense strand
gaacgauguggaggaauug

SEQ ID NO: 1250368 - RNA, 19 nt, Homo sapiens
  misc_RNA (1)...(19): siRNA sense strand
gugaggcgcucggagaaug

SEQ ID NO: 1250369 - RNA, 19 nt, Homo sapiens
  misc_RNA (1)...(19): siRNA sense strand
uggacaagaugcuggauca

SEQ ID NO: 1250370 - RNA, 19 nt, Homo sapiens
  misc_RNA (1)...(19): siRNA sense strand
gacaagaugcuggaucaga

SEQ ID NO: 1250371 - RNA, 19 nt, Homo sapiens
  misc_RNA (1)...(19): siRNA sense strand
caaggagcaacgaggagua

SEQ ID NO: 1250372 - RNA, 19 nt, Homo sapiens
  misc_RNA (1)...(19): siRNA sense strand
ccaacagcaucaagcagau

SEQ ID NO: 1250373 - RNA, 19 nt, Homo sapiens
  misc_RNA (1)...(19): siRNA sense strand
gagaccagcgggacaagga

SEQ ID NO: 1250374 - RNA, 19 nt, Homo sapiens
  misc_RNA (1)...(19): siRNA sense strand
gaucguguccacaaguuca

SEQ ID NO: 1250375 - RNA, 19 nt, Homo sapiens
  misc_RNA (1)...(19): siRNA sense strand
gcugaggagcugaugacua

SEQ ID NO: 1250376 - RNA, 19 nt, Homo sapiens
  misc_RNA (1)...(19): siRNA sense strand
ccagagggcagaacugaca

SEQ ID NO: 1250377 - RNA, 19 nt, Homo sapiens
  misc_RNA (1)...(19): siRNA sense strand
ggcaguggcagcaccauga

SEQ ID NO: 1250378 - RNA, 19 nt, Homo sapiens
  misc_RNA (1)...(19): siRNA sense strand
ucagagcacggacuuugaa

SEQ ID NO: 1250379 - RNA, 19 nt, Homo sapiens
  misc_RNA (1)...(19): siRNA sense strand
gcagcaccaugaugcaaac

SEQ ID NO: 1250380 - RNA, 19 nt, Homo sapiens
  misc_RNA (1)...(19): siRNA sense strand
gcaggcagagguuucaaag

SEQ ID NO: 1250381 - RNA, 19 nt, Homo sapiens
  misc_RNA (1)...(19): siRNA sense strand
gagguggacgacaugauga

SEQ ID NO: 1250382 - RNA, 19 nt, Homo sapiens
  misc_RNA (1)...(19): siRNA sense strand
ucacaucugauucuccuau

SEQ ID NO: 1250383 - RNA, 19 nt, Homo sapiens
  misc_RNA (1)...(19): siRNA sense strand
caaguucacaucugauucu

SEQ ID NO: 1250384 - RNA, 19 nt, Homo sapiens
  misc_RNA (1)...(19): siRNA sense strand
uccacaaguucacaucuga

SEQ ID NO: 1250385 - RNA, 19 nt, Homo sapiens
  misc_RNA (1)...(19): siRNA sense strand
agaagaaagagcugaugaa

SEQ ID NO: 1250386 - RNA, 19 nt, Homo sapiens
  misc_RNA (1)...(19): siRNA sense strand
cgagguggccuucucaucu

SEQ ID NO: 1250387 - RNA, 19 nt, Homo sapiens
  misc_RNA (1)...(19): siRNA sense strand
gugaugggauggccuucug

SEQ ID NO: 1250388 - RNA, 19 nt, Homo sapiens
  misc_RNA (1)...(19): siRNA sense strand
ccagcggaccuuccucauu

SEQ ID NO: 1250389 - RNA, 19 nt, Homo sapiens
  misc_RNA (1)...(19): siRNA sense strand
uguacgggcucaggagauu

SEQ ID NO: 1250390 - RNA, 19 nt, Homo sapiens
  misc_RNA (1)...(19): siRNA sense strand
gagcuccgacaaaggaaga

SEQ ID NO: 1250391 - RNA, 19 nt, Homo sapiens
  misc_RNA (1)...(19): siRNA sense strand
ggaacagcaggcagagguu

SEQ ID NO: 1250392 - RNA, 19 nt, Homo sapiens
  misc_RNA (1)...(19): siRNA sense strand
gcacgucgacauccagaac

SEQ ID NO: 1250393 - RNA, 19 nt, Homo sapiens
  misc_RNA (1)...(19): siRNA sense strand
aagaagaaagagcugauga

SEQ ID NO: 1250394 - RNA, 19 nt, Homo sapiens
  misc_RNA (1)...(19): siRNA sense strand
ggaggcugcagcaucaaga

SEQ ID NO: 1250395 - RNA, 19 nt, Homo sapiens
  misc_RNA (1)...(19): siRNA sense strand
cacaaguucacaucugauu

SEQ ID NO: 1250396 - RNA, 19 nt, Homo sapiens
  misc_RNA (1)...(19): siRNA sense strand
ucccaacaguggcucaaga

SEQ ID NO: 1250397 - RNA, 19 nt, Homo sapiens
  misc_RNA (1)...(19): siRNA sense strand
guccacaaguucacaucug

SEQ ID NO: 1250398 - RNA, 19 nt, Homo sapiens
  misc_RNA (1)...(19): siRNA sense strand
ugauugagaagcuggagaa

SEQ ID NO: 1250399 - RNA, 19 nt, Homo sapiens
  misc_RNA (1)...(19): siRNA sense strand
ggaggucacagcagaucug

SEQ ID NO: 1250400 - RNA, 19 nt, Homo sapiens
  misc_RNA (1)...(19): siRNA sense strand
gauaccuccucccgguuca

SEQ ID NO: 1250401 - RNA, 19 nt, Homo sapiens
  misc_RNA (1)...(19): siRNA sense strand
cgugagcuccgacaaagga

SEQ ID NO: 1250402 - RNA, 19 nt, Homo sapiens
  misc_RNA (1)...(19): siRNA sense strand
caagugugucuucaccuau

SEQ ID NO: 1250403 - RNA, 19 nt, Homo sapiens
  misc_RNA (1)...(19): siRNA sense strand
gcucaagagaggacagcaa

SEQ ID NO: 1250404 - RNA, 19 nt, Homo sapiens
  misc_RNA (1)...(19): siRNA sense strand
gcgcgcaaggccaugauug

SEQ ID NO: 1250405 - RNA, 19 nt, Homo sapiens
  misc_RNA (1)...(19): siRNA sense strand
ggcagcaccaugaugcaaa

SEQ ID NO: 1250406 - RNA, 19 nt, Homo sapiens
  misc_RNA (1)...(19): siRNA sense strand
gcugagcagacccgaguga

SEQ ID NO: 1250407 - RNA, 19 nt, Homo sapiens
  misc_RNA (1)...(19): siRNA sense strand
ccacauucaccaucgagau

SEQ ID NO: 1250408 - RNA, 19 nt, Homo sapiens
  misc_RNA (1)...(19): siRNA sense strand
ugcagucgcucuacaacca

SEQ ID NO: 1250409 - RNA, 19 nt, Homo sapiens
  misc_RNA (1)...(19): siRNA sense strand
ggcaggacaacaaggagaa

SEQ ID NO: 1250410 - RNA, 19 nt, Homo sapiens
  misc_RNA (1)...(19): siRNA sense strand
cauccgggcugcacuucgu

SEQ ID NO: 1250411 - RNA, 19 nt, Homo sapiens
  misc_RNA (1)...(19): siRNA sense strand
gcagacccgagugaacaaa

SEQ ID NO: 1250412 - RNA, 19 nt, Homo sapiens
  misc_RNA (1)...(19): siRNA sense strand
ggucaacaagcuucugucu

SEQ ID NO: 1250413 - RNA, 19 nt, Homo sapiens
  misc_RNA (1)...(19): siRNA sense strand
aagugugucuucaccuaug

SEQ ID NO: 1250414 - RNA, 19 nt, Homo sapiens
  misc_RNA (1)...(19): siRNA sense strand
ccugaggccuucgacuaug

SEQ ID NO: 1250415 - RNA, 19 nt, Homo sapiens
  misc_RNA (1)...(19): siRNA sense strand
gcuacgagcacgucgacau

SEQ ID NO: 1250416 - RNA, 19 nt, Homo sapiens
  misc_RNA (1)...(19): siRNA sense strand
gaugacuauugaggaugaa

SEQ ID NO: 1250417 - RNA, 19 nt, Homo sapiens
  misc_RNA (1)...(19): siRNA sense strand
aggagcugaugacuauuga

SEQ ID NO: 1250418 - RNA, 19 nt, Homo sapiens
  misc_RNA (1)...(19): siRNA sense strand
aggaggcccuggcauccaa

SEQ ID NO: 1250419 - RNA, 19 nt, Homo sapiens
  misc_RNA (1)...(19): siRNA sense strand
gcucguccacuccaaugau

SEQ ID NO: 1250420 - RNA, 19 nt, Homo sapiens
  misc_RNA (1)...(19): siRNA sense strand
ggaagaagaugcucagauu

SEQ ID NO: 1250421 - RNA, 19 nt, Homo sapiens
  misc_RNA (1)...(19): siRNA sense strand
gaagagcccucccaaagga

SEQ ID NO: 1250422 - RNA, 19 nt, Homo sapiens
  misc_RNA (1)...(19): siRNA sense strand
ucaaagagcucgagagaca

SEQ ID NO: 1250423 - RNA, 19 nt, Homo sapiens
  misc_RNA (1)...(19): siRNA sense strand
ggagggcgaugacauuaaa

SEQ ID NO: 1250424 - RNA, 19 nt, Homo sapiens
  misc_RNA (1)...(19): siRNA sense strand
cuaaagaacuucagacugu

SEQ ID NO: 1250425 - RNA, 19 nt, Homo sapiens
  misc_RNA (1)...(19): siRNA sense strand
ugaaagucauugaagcuua

SEQ ID NO: 1250426 - RNA, 19 nt, Homo sapiens
  misc_RNA (1)...(19): siRNA sense strand
gcagaccagugagaaguua

SEQ ID NO: 1250427 - RNA, 19 nt, Homo sapiens
  misc_RNA (1)...(19): siRNA sense strand
guaguaagagcaaaguuua

SEQ ID NO: 1250428 - RNA, 19 nt, Homo sapiens
  misc_RNA (1)...(19): siRNA sense strand
agagacacauggaggauua

SEQ ID NO: 1250429 - RNA, 19 nt, Homo sapiens
  misc_RNA (1)...(19): siRNA sense strand
gaaguuaaguucagcaaac

SEQ ID NO: 1250430 - RNA, 19 nt, Homo sapiens
  misc_RNA (1)...(19): siRNA sense strand
aaacgaaggucacgucugu

SEQ ID NO: 1250431 - RNA, 19 nt, Homo sapiens
  misc_RNA (1)...(19): siRNA sense strand
agacugugcuuucaacgua

SEQ ID NO: 1250432 - RNA, 19 nt, Homo sapiens
  misc_RNA (1)...(19): siRNA sense strand
uagcaacaaucaacuggua

SEQ ID NO: 1250433 - RNA, 19 nt, Homo sapiens
  misc_RNA (1)...(19): siRNA sense strand
gaaagucauugaagcuuac

SEQ ID NO: 1250434 - RNA, 19 nt, Homo sapiens
  misc_RNA (1)...(19): siRNA sense strand
ggacgagcuuuccuucuca

SEQ ID NO: 1250435 - RNA, 19 nt, Homo sapiens
  misc_RNA (1)...(19): siRNA sense strand
gcacagcugcuuuggaaga

SEQ ID NO: 1250436 - RNA, 19 nt, Homo sapiens
  misc_RNA (1)...(19): siRNA sense strand
ucaugcgccuggauaaaua

SEQ ID NO: 1250437 - RNA, 19 nt, Homo sapiens
  misc_RNA (1)...(19): siRNA sense strand
gagcaugauugagcggaua

SEQ ID NO: 1250438 - RNA, 19 nt, Homo sapiens
  misc_RNA (1)...(19): siRNA sense strand
gguaguaagagcaaaguuu

SEQ ID NO: 1250439 - RNA, 19 nt, Homo sapiens
  misc_RNA (1)...(19): siRNA sense strand
acaaggaggaucuuaguaa

SEQ ID NO: 1250440 - RNA, 19 nt, Homo sapiens
  misc_RNA (1)...(19): siRNA sense strand
gauaauagcaacaaucaac

SEQ ID NO: 1250441 - RNA, 19 nt, Homo sapiens
  misc_RNA (1)...(19): siRNA sense strand
aaugggaaaucuagaagaa

SEQ ID NO: 1250442 - RNA, 19 nt, Homo sapiens
  misc_RNA (1)...(19): siRNA sense strand
gaaauaucagggagcauga

SEQ ID NO: 1250443 - RNA, 19 nt, Homo sapiens
  misc_RNA (1)...(19): siRNA sense strand
ggaacacagugaggaguug

SEQ ID NO: 1250444 - RNA, 19 nt, Homo sapiens
  misc_RNA (1)...(19): siRNA sense strand
gcccgaagcucagcagaga

SEQ ID NO: 1250445 - RNA, 19 nt, Homo sapiens
  misc_RNA (1)...(19): siRNA sense strand
ccauaaagccucauucagu

SEQ ID NO: 1250446 - RNA, 19 nt, Homo sapiens
  misc_RNA (1)...(19): siRNA sense strand
guucagcaaacauuucaua

SEQ ID NO: 1250447 - RNA, 19 nt, Homo sapiens
  misc_RNA (1)...(19): siRNA sense strand
ggaguucgcgucccggaaa

SEQ ID NO: 1250448 - RNA, 19 nt, Homo sapiens
  misc_RNA (1)...(19): siRNA sense strand
gaaugacaaucacaaagcu

SEQ ID NO: 1250449 - RNA, 19 nt, Homo sapiens
  misc_RNA (1)...(19): siRNA sense strand
gaugaguggcuuuaucuau

SEQ ID NO: 1250450 - RNA, 19 nt, Homo sapiens
  misc_RNA (1)...(19): siRNA sense strand
gaacuucagacugugcuuu

SEQ ID NO: 1250451 - RNA, 19 nt, Homo sapiens
  misc_RNA (1)...(19): siRNA sense strand
cuucuacucuucccaaaug

SEQ ID NO: 1250452 - RNA, 19 nt, Homo sapiens
  misc_RNA (1)...(19): siRNA sense strand
ggaggauuaucauacagau

SEQ ID NO: 1250453 - RNA, 19 nt, Homo sapiens
  misc_RNA (1)...(19): siRNA sense strand
ugggaaaucuagaagaaau

SEQ ID NO: 1250454 - RNA, 19 nt, Homo sapiens
  misc_RNA (1)...(19): siRNA sense strand
gcucguacagucuuuagaa

SEQ ID NO: 1250455 - RNA, 19 nt, Homo sapiens
  misc_RNA (1)...(19): siRNA sense strand
gaagaagaugcucagauuc

SEQ ID NO: 1250456 - RNA, 19 nt, Homo sapiens
  misc_RNA (1)...(19): siRNA sense strand
ggauauuagugucgugcaa

SEQ ID NO: 1250457 - RNA, 19 nt, Homo sapiens
  misc_RNA (1)...(19): siRNA sense strand
caaaagcuauuacaaugug

SEQ ID NO: 1250458 - RNA, 19 nt, Homo sapiens
  misc_RNA (1)...(19): siRNA sense strand
cauggaggauuaucauaca

SEQ ID NO: 1250459 - RNA, 19 nt, Homo sapiens
  misc_RNA (1)...(19): siRNA sense strand
gggaaaucuagaagaaaua

SEQ ID NO: 1250460 - RNA, 19 nt, Homo sapiens
  misc_RNA (1)...(19): siRNA sense strand
acaauguggugcuacagaa

SEQ ID NO: 1250461 - RNA, 19 nt, Homo sapiens
  misc_RNA (1)...(19): siRNA sense strand
gagagucggaggcugcuuu

SEQ ID NO: 1250462 - RNA, 19 nt, Homo sapiens
  misc_RNA (1)...(19): siRNA sense strand
acaaucaacugguaguaag

SEQ ID NO: 1250463 - RNA, 19 nt, Homo sapiens
  misc_RNA (1)...(19): siRNA sense strand
ugaguggcuuuaucuauca

SEQ ID NO: 1250464 - RNA, 19 nt, Homo sapiens
  misc_RNA (1)...(19): siRNA sense strand
ggaagaggaaagagcuuga

SEQ ID NO: 1250465 - RNA, 19 nt, Homo sapiens
  misc_RNA (1)...(19): siRNA sense strand
ucauacagauagacaagau

SEQ ID NO: 1250466 - RNA, 19 nt, Homo sapiens
  misc_RNA (1)...(19): siRNA sense strand
ccagugagaaguuaaguuc

SEQ ID NO: 1250467 - RNA, 19 nt, Homo sapiens
  misc_RNA (1)...(19): siRNA sense strand
gaagugaggaaaagaauga

SEQ ID NO: 1250468 - RNA, 19 nt, Homo sapiens
  misc_RNA (1)...(19): siRNA sense strand
caacaaucaacugguagua

SEQ ID NO: 1250469 - RNA, 19 nt, Homo sapiens
  misc_RNA (1)...(19): siRNA sense strand
cccuguaccucacguauug

SEQ ID NO: 1250470 - RNA, 19 nt, Homo sapiens
  misc_RNA (1)...(19): siRNA sense strand
ggagacgucauccauguca

SEQ ID NO: 1250471 - RNA, 19 nt, Homo sapiens
  misc_RNA (1)...(19): siRNA sense strand
cagcugcucucugcuacaa

SEQ ID NO: 1250472 - RNA, 19 nt, Homo sapiens
  misc_RNA (1)...(19): siRNA sense strand
aaggagacgucauccaugu

SEQ ID NO: 1250473 - RNA, 19 nt, Homo sapiens
  misc_RNA (1)...(19): siRNA sense strand
ugaauguccucacggaaca

SEQ ID NO: 1250474 - RNA, 19 nt, Homo sapiens
  misc_RNA (1)...(19): siRNA sense strand
gcaaaugcucguacagucu

SEQ ID NO: 1250475 - RNA, 19 nt, Homo sapiens
  misc_RNA (1)...(19): siRNA sense strand
gcaacaaccagcaggaucu

SEQ ID NO: 1250476 - RNA, 19 nt, Homo sapiens
  misc_RNA (1)...(19): siRNA sense strand
ggaaugacaaucacaaagc

SEQ ID NO: 1250477 - RNA, 19 nt, Homo sapiens
  misc_RNA (1)...(19): siRNA sense strand
auccauggcugccuucaaa

SEQ ID NO: 1250478 - RNA, 19 nt, Homo sapiens
  misc_RNA (1)...(19): siRNA sense strand
acccuacgcugcucaaaga

SEQ ID NO: 1250479 - RNA, 19 nt, Homo sapiens
  misc_RNA (1)...(19): siRNA sense strand
gccugugucucccaaauca

SEQ ID NO: 1250480 - RNA, 19 nt, Homo sapiens
  misc_RNA (1)...(19): siRNA sense strand
cagcugcuuuggaagaaga

SEQ ID NO: 1250481 - RNA, 19 nt, Homo sapiens
  misc_RNA (1)...(19): siRNA sense strand
caugauugagcggauauua

SEQ ID NO: 1250482 - RNA, 19 nt, Homo sapiens
  misc_RNA (1)...(19): siRNA sense strand
caaaugcucguacagucuu

SEQ ID NO: 1250483 - RNA, 19 nt, Homo sapiens
  misc_RNA (1)...(19): siRNA sense strand
ccaaugaggacgagcuuuc

SEQ ID NO: 1250484 - RNA, 19 nt, Homo sapiens
  misc_RNA (1)...(19): siRNA sense strand
guuaaguucagcaaacauu

SEQ ID NO: 1250485 - RNA, 19 nt, Homo sapiens
  misc_RNA (1)...(19): siRNA sense strand
caaggcaaacacucaauuc

SEQ ID NO: 1250486 - RNA, 19 nt, Homo sapiens
  misc_RNA (1)...(19): siRNA sense strand
aauauguucuuuccagcaa

SEQ ID NO: 1250487 - RNA, 19 nt, Homo sapiens
  misc_RNA (1)...(19): siRNA sense strand
guaagagcccuaagaccau

SEQ ID NO: 1250488 - RNA, 19 nt, Homo sapiens
  misc_RNA (1)...(19): siRNA sense strand
gggagggcgaugacauuaa

SEQ ID NO: 1250489 - RNA, 19 nt, Homo sapiens
  misc_RNA (1)...(19): siRNA sense strand
uuagaagaaugcaccaagu

SEQ ID NO: 1250490 - RNA, 19 nt, Homo sapiens
  misc_RNA (1)...(19): siRNA sense strand
aaacaaggcaaacacucaa

SEQ ID NO: 1250491 - RNA, 19 nt, Homo sapiens
  misc_RNA (1)...(19): siRNA sense strand
caacugguaguaagagcaa

SEQ ID NO: 1250492 - RNA, 19 nt, Homo sapiens
  misc_RNA (1)...(19): siRNA sense strand
uaggaugaguggcuuuauc

SEQ ID NO: 1250493 - RNA, 19 nt, Homo sapiens
  misc_RNA (1)...(19): siRNA sense strand
cuacucuucccaaauguuu

SEQ ID NO: 1250494 - RNA, 19 nt, Homo sapiens
  misc_RNA (1)...(19): siRNA sense strand
acagauagacaagauauuc

SEQ ID NO: 1250495 - RNA, 19 nt, Homo sapiens
  misc_RNA (1)...(19): siRNA sense strand
agaagaaugcaccaaguug

SEQ ID NO: 1250496 - RNA, 19 nt, Homo sapiens
  misc_RNA (1)...(19): siRNA sense strand
ggccauugcagaccaguga

SEQ ID NO: 1250497 - RNA, 19 nt, Homo sapiens
  misc_RNA (1)...(19): siRNA sense strand
ggucaaggccagcgagaag

SEQ ID NO: 1250498 - RNA, 19 nt, Homo sapiens
  misc_RNA (1)...(19): siRNA sense strand
cgacaggaaugacaaucac

SEQ ID NO: 1250499 - RNA, 19 nt, Homo sapiens
  misc_RNA (1)...(19): siRNA sense strand
uagaagaaugcaccaaguu

SEQ ID NO: 1250500 - RNA, 19 nt, Homo sapiens
  misc_RNA (1)...(19): siRNA sense strand
gggaguucauggagaccaa

SEQ ID NO: 1250501 - RNA, 19 nt, Homo sapiens
  misc_RNA (1)...(19): siRNA sense strand
ggaugaguggcuuuaucua

SEQ ID NO: 1250502 - RNA, 19 nt, Homo sapiens
  misc_RNA (1)...(19): siRNA sense strand
ugauacgacugccauaaac

SEQ ID NO: 1250503 - RNA, 19 nt, Homo sapiens
  misc_RNA (1)...(19): siRNA sense strand
ccgauaauagcaacaauca

SEQ ID NO: 1250504 - RNA, 19 nt, Homo sapiens
  misc_RNA (1)...(19): siRNA sense strand
gagcaccuacagaagcaaa

SEQ ID NO: 1250505 - RNA, 19 nt, Homo sapiens
  misc_RNA (1)...(19): siRNA sense strand
gaccgauaauagcaacaau

SEQ ID NO: 1250506 - RNA, 19 nt, Homo sapiens
  misc_RNA (1)...(19): siRNA sense strand
guggugcuacagaauauuu

SEQ ID NO: 1250507 - RNA, 19 nt, Homo sapiens
  misc_RNA (1)...(19): siRNA sense strand
gcaagcacgcagacagcaa

SEQ ID NO: 1250508 - RNA, 19 nt, Homo sapiens
  misc_RNA (1)...(19): siRNA sense strand
gcaacaaucaacugguagu

SEQ ID NO: 1250509 - RNA, 19 nt, Homo sapiens
  misc_RNA (1)...(19): siRNA sense strand
gagagacacauggaggauu

SEQ ID NO: 1250510 - RNA, 19 nt, Homo sapiens
  misc_RNA (1)...(19): siRNA sense strand
cugaagagcccucccaaag

SEQ ID NO: 1250511 - RNA, 19 nt, Homo sapiens
  misc_RNA (1)...(19): siRNA sense strand
gagaaguuaaguucagcaa

SEQ ID NO: 1250512 - RNA, 19 nt, Homo sapiens
  misc_RNA (1)...(19): siRNA sense strand
ugauugagcggauauuagu

SEQ ID NO: 1250513 - RNA, 19 nt, Homo sapiens
  misc_RNA (1)...(19): siRNA sense strand
gggcaacgucacuuacaug

SEQ ID NO: 1250514 - RNA, 19 nt, Homo sapiens
  misc_RNA (1)...(19): siRNA sense strand
gacgagcuuuccuucucaa

SEQ ID NO: 1250515 - RNA, 19 nt, Homo sapiens
  misc_RNA (1)...(19): siRNA sense strand
aauguggugcuacagaaua

SEQ ID NO: 1250516 - RNA, 19 nt, Homo sapiens
  misc_RNA (1)...(19): siRNA sense strand
uaaguucagcaaacauuuc

SEQ ID NO: 1250517 - RNA, 19 nt, Homo sapiens
  misc_RNA (1)...(19): siRNA sense strand
caccauaaagccucauuca

SEQ ID NO: 1250518 - RNA, 19 nt, Homo sapiens
  misc_RNA (1)...(19): siRNA sense strand
gaacugggagggcgaugac

SEQ ID NO: 1250519 - RNA, 19 nt, Homo sapiens
  misc_RNA (1)...(19): siRNA sense strand
acaaggcaaacacucaauu

SEQ ID NO: 1250520 - RNA, 19 nt, Homo sapiens
  misc_RNA (1)...(19): siRNA sense strand
ggaagaagaugcucagauu

SEQ ID NO: 1250521 - RNA, 19 nt, Homo sapiens
  misc_RNA (1)...(19): siRNA sense strand
gaagagcccucccaaagga

SEQ ID NO: 1250522 - RNA, 19 nt, Homo sapiens
  misc_RNA (1)...(19): siRNA sense strand
ucaaagagcucgagagaca

SEQ ID NO: 1250523 - RNA, 19 nt, Homo sapiens
  misc_RNA (1)...(19): siRNA sense strand
ggagggcgaugacauuaaa

SEQ ID NO: 1250524 - RNA, 19 nt, Homo sapiens
  misc_RNA (1)...(19): siRNA sense strand
cuaaagaacuucagacugu

SEQ ID NO: 1250525 - RNA, 19 nt, Homo sapiens
  misc_RNA (1)...(19): siRNA sense strand
ugaaagucauugaagcuua

SEQ ID NO: 1250526 - RNA, 19 nt, Homo sapiens
  misc_RNA (1)...(19): siRNA sense strand
gcagaccagugagaaguua

SEQ ID NO: 1250527 - RNA, 19 nt, Homo sapiens
  misc_RNA (1)...(19): siRNA sense strand
guaguaagagcaaaguuua

SEQ ID NO: 1250528 - RNA, 19 nt, Homo sapiens
  misc_RNA (1)...(19): siRNA sense strand
agagacacauggaggauua

SEQ ID NO: 1250529 - RNA, 19 nt, Homo sapiens
  misc_RNA (1)...(19): siRNA sense strand
gaaguuaaguucagcaaac

SEQ ID NO: 1250530 - RNA, 19 nt, Homo sapiens
  misc_RNA (1)...(19): siRNA sense strand
aaacgaaggucacgucugu

SEQ ID NO: 1250531 - RNA, 19 nt, Homo sapiens
  misc_RNA (1)...(19): siRNA sense strand
agacugugcuuucaacgua

SEQ ID NO: 1250532 - RNA, 19 nt, Homo sapiens
  misc_RNA (1)...(19): siRNA sense strand
uagcaacaaucaacuggua

SEQ ID NO: 1250533 - RNA, 19 nt, Homo sapiens
  misc_RNA (1)...(19): siRNA sense strand
gaaagucauugaagcuuac

SEQ ID NO: 1250534 - RNA, 19 nt, Homo sapiens
  misc_RNA (1)...(19): siRNA sense strand
ggacgagcuuuccuucuca

SEQ ID NO: 1250535 - RNA, 19 nt, Homo sapiens
  misc_RNA (1)...(19): siRNA sense strand
gcacagcugcuuuggaaga

SEQ ID NO: 1250536 - RNA, 19 nt, Homo sapiens
  misc_RNA (1)...(19): siRNA sense strand
ucaugcgccuggauaaaua

SEQ ID NO: 1250537 - RNA, 19 nt, Homo sapiens
  misc_RNA (1)...(19): siRNA sense strand
gagcaugauugagcggaua

SEQ ID NO: 1250538 - RNA, 19 nt, Homo sapiens
  misc_RNA (1)...(19): siRNA sense strand
gguaguaagagcaaaguuu

SEQ ID NO: 1250539 - RNA, 19 nt, Homo sapiens
  misc_RNA (1)...(19): siRNA sense strand
acaaggaggaucuuaguaa

SEQ ID NO: 1250540 - RNA, 19 nt, Homo sapiens
  misc_RNA (1)...(19): siRNA sense strand
gauaauagcaacaaucaac

SEQ ID NO: 1250541 - RNA, 19 nt, Homo sapiens
  misc_RNA (1)...(19): siRNA sense strand
guuuggacaugaccgauaa

SEQ ID NO: 1250542 - RNA, 19 nt, Homo sapiens
  misc_RNA (1)...(19): siRNA sense strand
gaaauaucagggagcauga

SEQ ID NO: 1250543 - RNA, 19 nt, Homo sapiens
  misc_RNA (1)...(19): siRNA sense strand
ggaacacagugaggaguug

SEQ ID NO: 1250544 - RNA, 19 nt, Homo sapiens
  misc_RNA (1)...(19): siRNA sense strand
gcccgaagcucagcagaga

SEQ ID NO: 1250545 - RNA, 19 nt, Homo sapiens
  misc_RNA (1)...(19): siRNA sense strand
aaugggaaaucuagaagaa

SEQ ID NO: 1250546 - RNA, 19 nt, Homo sapiens
  misc_RNA (1)...(19): siRNA sense strand
uuaacaagguccucaguuc

SEQ ID NO: 1250547 - RNA, 19 nt, Homo sapiens
  misc_RNA (1)...(19): siRNA sense strand
ccauaaagccucauucagu

SEQ ID NO: 1250548 - RNA, 19 nt, Homo sapiens
  misc_RNA (1)...(19): siRNA sense strand
uaaaguaacagcagacauc

SEQ ID NO: 1250549 - RNA, 19 nt, Homo sapiens
  misc_RNA (1)...(19): siRNA sense strand
guucagcaaacauuucaua

SEQ ID NO: 1250550 - RNA, 19 nt, Homo sapiens
  misc_RNA (1)...(19): siRNA sense strand
ggaguucgcgucccggaaa

SEQ ID NO: 1250551 - RNA, 19 nt, Homo sapiens
  misc_RNA (1)...(19): siRNA sense strand
gaaugacaaucacaaagcu

SEQ ID NO: 1250552 - RNA, 19 nt, Homo sapiens
  misc_RNA (1)...(19): siRNA sense strand
gaugaguggcuuuaucuau

SEQ ID NO: 1250553 - RNA, 19 nt, Homo sapiens
  misc_RNA (1)...(19): siRNA sense strand
ggacaugaccgauaauagc

SEQ ID NO: 1250554 - RNA, 19 nt, Homo sapiens
  misc_RNA (1)...(19): siRNA sense strand
cuucuacucuucccaaaug

SEQ ID NO: 1250555 - RNA, 19 nt, Homo sapiens
  misc_RNA (1)...(19): siRNA sense strand
ggaggauuaucauacagau

SEQ ID NO: 1250556 - RNA, 19 nt, Homo sapiens
  misc_RNA (1)...(19): siRNA sense strand
ugggaaaucuagaagaaau

SEQ ID NO: 1250557 - RNA, 19 nt, Homo sapiens
  misc_RNA (1)...(19): siRNA sense strand
gaacuucagacugugcuuu

SEQ ID NO: 1250558 - RNA, 19 nt, Homo sapiens
  misc_RNA (1)...(19): siRNA sense strand
gcccucgucucaccgcaua

SEQ ID NO: 1250559 - RNA, 19 nt, Homo sapiens
  misc_RNA (1)...(19): siRNA sense strand
gaagaagaugcucagauuc

SEQ ID NO: 1250560 - RNA, 19 nt, Homo sapiens
  misc_RNA (1)...(19): siRNA sense strand
ggauauuagugucgugcaa

SEQ ID NO: 1250561 - RNA, 19 nt, Homo sapiens
  misc_RNA (1)...(19): siRNA sense strand
gcucguacagucuuuagaa

SEQ ID NO: 1250562 - RNA, 19 nt, Homo sapiens
  misc_RNA (1)...(19): siRNA sense strand
uaucggaguuuggacauga

SEQ ID NO: 1250563 - RNA, 19 nt, Homo sapiens
  misc_RNA (1)...(19): siRNA sense strand
caaaagcuauuacaaugug

SEQ ID NO: 1250564 - RNA, 19 nt, Homo sapiens
  misc_RNA (1)...(19): siRNA sense strand
cauggaggauuaucauaca

SEQ ID NO: 1250565 - RNA, 19 nt, Homo sapiens
  misc_RNA (1)...(19): siRNA sense strand
gggaaaucuagaagaaaua

SEQ ID NO: 1250566 - RNA, 19 nt, Homo sapiens
  misc_RNA (1)...(19): siRNA sense strand
acaauguggugcuacagaa

SEQ ID NO: 1250567 - RNA, 19 nt, Homo sapiens
  misc_RNA (1)...(19): siRNA sense strand
acaaucaacugguaguaag

SEQ ID NO: 1250568 - RNA, 19 nt, Homo sapiens
  misc_RNA (1)...(19): siRNA sense strand
ugaguggcuuuaucuauca

SEQ ID NO: 1250569 - RNA, 19 nt, Homo sapiens
  misc_RNA (1)...(19): siRNA sense strand
ggaagaggaaagagcuuga

SEQ ID NO: 1250570 - RNA, 19 nt, Homo sapiens
  misc_RNA (1)...(19): siRNA sense strand
ucauacagauagacaagau

SEQ ID NO: 1250571 - RNA, 19 nt, Homo sapiens
  misc_RNA (1)...(19): siRNA sense strand
gagagucggaggcugcuuu

SEQ ID NO: 1250572 - RNA, 19 nt, Homo sapiens
  misc_RNA (1)...(19): siRNA sense strand
ccagugagaaguuaaguuc

SEQ ID NO: 1250573 - RNA, 19 nt, Homo sapiens
  misc_RNA (1)...(19): siRNA sense strand
gaagugaggaaaagaauga

SEQ ID NO: 1250574 - RNA, 19 nt, Homo sapiens
  misc_RNA (1)...(19): siRNA sense strand
caacaaucaacugguagua

SEQ ID NO: 1250575 - RNA, 19 nt, Homo sapiens
  misc_RNA (1)...(19): siRNA sense strand
cccuguaccucacguauug

SEQ ID NO: 1250576 - RNA, 19 nt, Homo sapiens
  misc_RNA (1)...(19): siRNA sense strand
aaggagacgucauccaugu

SEQ ID NO: 1250577 - RNA, 19 nt, Homo sapiens
  misc_RNA (1)...(19): siRNA sense strand
cagcugcucucugcuacaa

SEQ ID NO: 1250578 - RNA, 19 nt, Homo sapiens
  misc_RNA (1)...(19): siRNA sense strand
gguccucaguuccuuagug

SEQ ID NO: 1250579 - RNA, 19 nt, Homo sapiens
  misc_RNA (1)...(19): siRNA sense strand
ugaauguccucacggaaca

SEQ ID NO: 1250580 - RNA, 19 nt, Homo sapiens
  misc_RNA (1)...(19): siRNA sense strand
guccucaguuccuuaguga

SEQ ID NO: 1250581 - RNA, 19 nt, Homo sapiens
  misc_RNA (1)...(19): siRNA sense strand
ggagacgucauccauguca

SEQ ID NO: 1250582 - RNA, 19 nt, Homo sapiens
  misc_RNA (1)...(19): siRNA sense strand
gcaaaugcucguacagucu

SEQ ID NO: 1250583 - RNA, 19 nt, Homo sapiens
  misc_RNA (1)...(19): siRNA sense strand
gcaacaaccagcaggaucu

SEQ ID NO: 1250584 - RNA, 19 nt, Homo sapiens
  misc_RNA (1)...(19): siRNA sense strand
ggaaugacaaucacaaagc

SEQ ID NO: 1250585 - RNA, 19 nt, Homo sapiens
  misc_RNA (1)...(19): siRNA sense strand
auccauggcugccuucaaa

SEQ ID NO: 1250586 - RNA, 19 nt, Homo sapiens
  misc_RNA (1)...(19): siRNA sense strand
acccuacgcugcucaaaga

SEQ ID NO: 1250587 - RNA, 19 nt, Homo sapiens
  misc_RNA (1)...(19): siRNA sense strand
gccugugucucccaaauca

SEQ ID NO: 1250588 - RNA, 19 nt, Homo sapiens
  misc_RNA (1)...(19): siRNA sense strand
cagcugcuuuggaagaaga

SEQ ID NO: 1250589 - RNA, 19 nt, Homo sapiens
  misc_RNA (1)...(19): siRNA sense strand
caugauugagcggauauua

SEQ ID NO: 1250590 - RNA, 19 nt, Homo sapiens
  misc_RNA (1)...(19): siRNA sense strand
ccaaugaggacgagcuuuc

SEQ ID NO: 1250591 - RNA, 19 nt, Homo sapiens
  misc_RNA (1)...(19): siRNA sense strand
caaaugcucguacagucuu

SEQ ID NO: 1250592 - RNA, 19 nt, Homo sapiens
  misc_RNA (1)...(19): siRNA sense strand
guuaaguucagcaaacauu

SEQ ID NO: 1250593 - RNA, 19 nt, Homo sapiens
  misc_RNA (1)...(19): siRNA sense strand
caaggcaaacacucaauuc

SEQ ID NO: 1250594 - RNA, 19 nt, Homo sapiens
  misc_RNA (1)...(19): siRNA sense strand
aauauguucuuuccagcaa

SEQ ID NO: 1250595 - RNA, 19 nt, Homo sapiens
  misc_RNA (1)...(19): siRNA sense strand
gagcaacauccgcgaguuc

SEQ ID NO: 1250596 - RNA, 19 nt, Homo sapiens
  misc_RNA (1)...(19): siRNA sense strand
guaagagcccuaagaccau

SEQ ID NO: 1250597 - RNA, 19 nt, Homo sapiens
  misc_RNA (1)...(19): siRNA sense strand
gggagggcgaugacauuaa

SEQ ID NO: 1250598 - RNA, 19 nt, Homo sapiens
  misc_RNA (1)...(19): siRNA sense strand
caacugguaguaagagcaa

SEQ ID NO: 1250599 - RNA, 19 nt, Homo sapiens
  misc_RNA (1)...(19): siRNA sense strand
aaacaaggcaaacacucaa

SEQ ID NO: 1250600 - RNA, 19 nt, Homo sapiens
  misc_RNA (1)...(19): siRNA sense strand
uaggaugaguggcuuuauc

SEQ ID NO: 1250601 - RNA, 19 nt, Homo sapiens
  misc_RNA (1)...(19): siRNA sense strand
cuacucuucccaaauguuu

SEQ ID NO: 1250602 - RNA, 19 nt, Homo sapiens
  misc_RNA (1)...(19): siRNA sense strand
acagauagacaagauauuc

SEQ ID NO: 1250603 - RNA, 19 nt, Homo sapiens
  misc_RNA (1)...(19): siRNA sense strand
agaagaaugcaccaaguug

SEQ ID NO: 1250604 - RNA, 19 nt, Homo sapiens
  misc_RNA (1)...(19): siRNA sense strand
uuagaagaaugcaccaagu

SEQ ID NO: 1250605 - RNA, 19 nt, Homo sapiens
  misc_RNA (1)...(19): siRNA sense strand
ggucaaggccagcgagaag

SEQ ID NO: 1250606 - RNA, 19 nt, Homo sapiens
  misc_RNA (1)...(19): siRNA sense strand
cgacaggaaugacaaucac

SEQ ID NO: 1250607 - RNA, 19 nt, Homo sapiens
  misc_RNA (1)...(19): siRNA sense strand
gcgagugccugagcaacau

SEQ ID NO: 1250608 - RNA, 19 nt, Homo sapiens
  misc_RNA (1)...(19): siRNA sense strand
uagaagaaugcaccaaguu

SEQ ID NO: 1250609 - RNA, 19 nt, Homo sapiens
  misc_RNA (1)...(19): siRNA sense strand
ggccauugcagaccaguga

SEQ ID NO: 1250610 - RNA, 19 nt, Homo sapiens
  misc_RNA (1)...(19): siRNA sense strand
ccgauaauagcaacaauca

SEQ ID NO: 1250611 - RNA, 19 nt, Homo sapiens
  misc_RNA (1)...(19): siRNA sense strand
ggaugaguggcuuuaucua

SEQ ID NO: 1250612 - RNA, 19 nt, Homo sapiens
  misc_RNA (1)...(19): siRNA sense strand
gggaguucauggagaccaa

SEQ ID NO: 1250613 - RNA, 19 nt, Homo sapiens
  misc_RNA (1)...(19): siRNA sense strand
ugauacgacugccauaaac

SEQ ID NO: 1250614 - RNA, 19 nt, Homo sapiens
  misc_RNA (1)...(19): siRNA sense strand
gaccgauaauagcaacaau

SEQ ID NO: 1250615 - RNA, 19 nt, Homo sapiens
  misc_RNA (1)...(19): siRNA sense strand
gagcaccuacagaagcaaa

SEQ ID NO: 1250616 - RNA, 19 nt, Homo sapiens
  misc_RNA (1)...(19): siRNA sense strand
gacaugaccgauaauagca

SEQ ID NO: 1250617 - RNA, 19 nt, Homo sapiens
  misc_RNA (1)...(19): siRNA sense strand
gcaagcacgcagacagcaa

SEQ ID NO: 1250618 - RNA, 19 nt, Homo sapiens
  misc_RNA (1)...(19): siRNA sense strand
gagagacacauggaggauu

SEQ ID NO: 1250619 - RNA, 19 nt, Homo sapiens
  misc_RNA (1)...(19): siRNA sense strand
guggugcuacagaauauuu

SEQ ID NO: 1250620 - RNA, 19 nt, Homo sapiens
  misc_RNA (1)...(19): siRNA sense strand
gauaugcuagucuguauuu

SEQ ID NO: 1250621 - RNA, 19 nt, Homo sapiens
  misc_RNA (1)...(19): siRNA sense strand
cuaauuacccuggaaauaa

SEQ ID NO: 1250622 - RNA, 19 nt, Homo sapiens
  misc_RNA (1)...(19): siRNA sense strand
ucaggacaaugaacuaauu

SEQ ID NO: 1250623 - RNA, 19 nt, Homo sapiens
  misc_RNA (1)...(19): siRNA sense strand
gaacuaauuacccuggaaa

SEQ ID NO: 1250624 - RNA, 19 nt, Homo sapiens
  misc_RNA (1)...(19): siRNA sense strand
ggaaagcuucgacugcaaa

SEQ ID NO: 1250625 - RNA, 19 nt, Homo sapiens
  misc_RNA (1)...(19): siRNA sense strand
gaucaggacaaugaacuaa

SEQ ID NO: 1250626 - RNA, 19 nt, Homo sapiens
  misc_RNA (1)...(19): siRNA sense strand
ugaagaaauuggacugaca

SEQ ID NO: 1250627 - RNA, 19 nt, Homo sapiens
  misc_RNA (1)...(19): siRNA sense strand
ucaggaaacauccaagaaa

SEQ ID NO: 1250628 - RNA, 19 nt, Homo sapiens
  misc_RNA (1)...(19): siRNA sense strand
gcugugcuauugaggauca

SEQ ID NO: 1250629 - RNA, 19 nt, Homo sapiens
  misc_RNA (1)...(19): siRNA sense strand
aagauaugcuagucuguau

SEQ ID NO: 1250630 - RNA, 19 nt, Homo sapiens
  misc_RNA (1)...(19): siRNA sense strand
gggaaagcuucgacugcaa

SEQ ID NO: 1250631 - RNA, 19 nt, Homo sapiens
  misc_RNA (1)...(19): siRNA sense strand
gaagaaauuggacugacau

SEQ ID NO: 1250632 - RNA, 19 nt, Homo sapiens
  misc_RNA (1)...(19): siRNA sense strand
aaagauaugcuagucugua

SEQ ID NO: 1250633 - RNA, 19 nt, Homo sapiens
  misc_RNA (1)...(19): siRNA sense strand
ugagcaggcugaucuacug

SEQ ID NO: 1250634 - RNA, 19 nt, Homo sapiens
  misc_RNA (1)...(19): siRNA sense strand
caggacaaugaacuaauua

SEQ ID NO: 1250635 - RNA, 19 nt, Homo sapiens
  misc_RNA (1)...(19): siRNA sense strand
caggaaacauccaagaaaa

SEQ ID NO: 1250636 - RNA, 19 nt, Homo sapiens
  misc_RNA (1)...(19): siRNA sense strand
gcacggaaaccuaaaaugu

SEQ ID NO: 1250637 - RNA, 19 nt, Homo sapiens
  misc_RNA (1)...(19): siRNA sense strand
ugaacuaauuacccuggaa

SEQ ID NO: 1250638 - RNA, 19 nt, Homo sapiens
  misc_RNA (1)...(19): siRNA sense strand
ggaucaggacaaugaacua

SEQ ID NO: 1250639 - RNA, 19 nt, Homo sapiens
  misc_RNA (1)...(19): siRNA sense strand
caauugagcaggcugaucu

SEQ ID NO: 1250640 - RNA, 19 nt, Homo sapiens
  misc_RNA (1)...(19): siRNA sense strand
uaucagacaaagagaagaa

SEQ ID NO: 1250641 - RNA, 19 nt, Homo sapiens
  misc_RNA (1)...(19): siRNA sense strand
ucaucguuauguggaauua

SEQ ID NO: 1250642 - RNA, 19 nt, Homo sapiens
  misc_RNA (1)...(19): siRNA sense strand
ggcagugucugugaacuag

SEQ ID NO: 1250643 - RNA, 19 nt, Homo sapiens
  misc_RNA (1)...(19): siRNA sense strand
aaagaucacaagagaacuu

SEQ ID NO: 1250644 - RNA, 19 nt, Homo sapiens
  misc_RNA (1)...(19): siRNA sense strand
uauguggaauuacuugaca

SEQ ID NO: 1250645 - RNA, 19 nt, Homo sapiens
  misc_RNA (1)...(19): siRNA sense strand
aaaaugguaugucccacua

SEQ ID NO: 1250646 - RNA, 19 nt, Homo sapiens
  misc_RNA (1)...(19): siRNA sense strand
acuaauuacccuggaaaua

SEQ ID NO: 1250647 - RNA, 19 nt, Homo sapiens
  misc_RNA (1)...(19): siRNA sense strand
uugaggaucaggacaauga

SEQ ID NO: 1250648 - RNA, 19 nt, Homo sapiens
  misc_RNA (1)...(19): siRNA sense strand
acaaguauuucggcagugu

SEQ ID NO: 1250649 - RNA, 19 nt, Homo sapiens
  misc_RNA (1)...(19): siRNA sense strand
ccacguaguguucuugaag

SEQ ID NO: 1250650 - RNA, 19 nt, Homo sapiens
  misc_RNA (1)...(19): siRNA sense strand
agaaauuggacugacauaa

SEQ ID NO: 1250651 - RNA, 19 nt, Homo sapiens
  misc_RNA (1)...(19): siRNA sense strand
cagugucugugaacuagau

SEQ ID NO: 1250652 - RNA, 19 nt, Homo sapiens
  misc_RNA (1)...(19): siRNA sense strand
guucaggaaacauccaaga

SEQ ID NO: 1250653 - RNA, 19 nt, Homo sapiens
  misc_RNA (1)...(19): siRNA sense strand
ucugugaacuagauaucau

SEQ ID NO: 1250654 - RNA, 19 nt, Homo sapiens
  misc_RNA (1)...(19): siRNA sense strand
gggaaguucaggaaacauc

SEQ ID NO: 1250655 - RNA, 19 nt, Homo sapiens
  misc_RNA (1)...(19): siRNA sense strand
gguaugucccacuaucaga

SEQ ID NO: 1250656 - RNA, 19 nt, Homo sapiens
  misc_RNA (1)...(19): siRNA sense strand
aaugguaugucccacuauc

SEQ ID NO: 1250657 - RNA, 19 nt, Homo sapiens
  misc_RNA (1)...(19): siRNA sense strand
cggcagugucugugaacua

SEQ ID NO: 1250658 - RNA, 19 nt, Homo sapiens
  misc_RNA (1)...(19): siRNA sense strand
ggacaaugaacuaauuacc

SEQ ID NO: 1250659 - RNA, 19 nt, Homo sapiens
  misc_RNA (1)...(19): siRNA sense strand
cgaauucucuggugguuga

SEQ ID NO: 1250660 - RNA, 19 nt, Homo sapiens
  misc_RNA (1)...(19): siRNA sense strand
cguaugagcuucggauuga

SEQ ID NO: 1250661 - RNA, 19 nt, Homo sapiens
  misc_RNA (1)...(19): siRNA sense strand
gcagcugcauggcuacuug

SEQ ID NO: 1250662 - RNA, 19 nt, Homo sapiens
  misc_RNA (1)...(19): siRNA sense strand
cagaaacuccgacauugaa

SEQ ID NO: 1250663 - RNA, 19 nt, Homo sapiens
  misc_RNA (1)...(19): siRNA sense strand
gcagagcacggacagcuau

SEQ ID NO: 1250664 - RNA, 19 nt, Homo sapiens
  misc_RNA (1)...(19): siRNA sense strand
ucagaaacuccgacauuga

SEQ ID NO: 1250665 - RNA, 19 nt, Homo sapiens
  misc_RNA (1)...(19): siRNA sense strand
cgacauugaacuucggaaa

SEQ ID NO: 1250666 - RNA, 19 nt, Homo sapiens
  misc_RNA (1)...(19): siRNA sense strand
gaagccaguaccagcguuu

SEQ ID NO: 1250667 - RNA, 19 nt, Homo sapiens
  misc_RNA (1)...(19): siRNA sense strand
gaaaggagagacggacauc

SEQ ID NO: 1250668 - RNA, 19 nt, Homo sapiens
  misc_RNA (1)...(19): siRNA sense strand
gaacuucggaaaggagaga

SEQ ID NO: 1250669 - RNA, 19 nt, Homo sapiens
  misc_RNA (1)...(19): siRNA sense strand
agacggacaucgggaggaa

SEQ ID NO: 1250670 - RNA, 19 nt, Homo sapiens
  misc_RNA (1)...(19): siRNA sense strand
gcaggacuccaaggucauu

SEQ ID NO: 1250671 - RNA, 19 nt, Homo sapiens
  misc_RNA (1)...(19): siRNA sense strand
acaccaaaguccuggagau

SEQ ID NO: 1250672 - RNA, 19 nt, Homo sapiens
  misc_RNA (1)...(19): siRNA sense strand
agagaaagcgaagccagua

SEQ ID NO: 1250673 - RNA, 19 nt, Homo sapiens
  misc_RNA (1)...(19): siRNA sense strand
acucagaaacuccgacauu

SEQ ID NO: 1250674 - RNA, 19 nt, Homo sapiens
  misc_RNA (1)...(19): siRNA sense strand
gccggaauccugaaacuca

SEQ ID NO: 1250675 - RNA, 19 nt, Homo sapiens
  misc_RNA (1)...(19): siRNA sense strand
cucagaaacuccgacauug

SEQ ID NO: 1250676 - RNA, 19 nt, Homo sapiens
  misc_RNA (1)...(19): siRNA sense strand
ggaaaggagagacggacau

SEQ ID NO: 1250677 - RNA, 19 nt, Homo sapiens
  misc_RNA (1)...(19): siRNA sense strand
cagcaugcgagccgucauu

SEQ ID NO: 1250678 - RNA, 19 nt, Homo sapiens
  misc_RNA (1)...(19): siRNA sense strand
aaacuccgacauugaacuu

SEQ ID NO: 1250679 - RNA, 19 nt, Homo sapiens
  misc_RNA (1)...(19): siRNA sense strand
agaaugagccgcugaugcu

SEQ ID NO: 1250680 - RNA, 19 nt, Homo sapiens
  misc_RNA (1)...(19): siRNA sense strand
gccgaauucucuggugguu

SEQ ID NO: 1250681 - RNA, 19 nt, Homo sapiens
  misc_RNA (1)...(19): siRNA sense strand
acauugaacuucggaaagg

SEQ ID NO: 1250682 - RNA, 19 nt, Homo sapiens
  misc_RNA (1)...(19): siRNA sense strand
gacauugaacuucggaaag

SEQ ID NO: 1250683 - RNA, 19 nt, Homo sapiens
  misc_RNA (1)...(19): siRNA sense strand
gaaacuccgacauugaacu

SEQ ID NO: 1250684 - RNA, 19 nt, Homo sapiens
  misc_RNA (1)...(19): siRNA sense strand
gcaugcgagccgucauuga

SEQ ID NO: 1250685 - RNA, 19 nt, Homo sapiens
  misc_RNA (1)...(19): siRNA sense strand
gaccugugcaagccgaauu

SEQ ID NO: 1250686 - RNA, 19 nt, Homo sapiens
  misc_RNA (1)...(19): siRNA sense strand
gaaagcgaagccaguacca

SEQ ID NO: 1250687 - RNA, 19 nt, Homo sapiens
  misc_RNA (1)...(19): siRNA sense strand
ggagaaugagccgcugaug

SEQ ID NO: 1250688 - RNA, 19 nt, Homo sapiens
  misc_RNA (1)...(19): siRNA sense strand
cgaauucucuggugguuga

SEQ ID NO: 1250689 - RNA, 19 nt, Homo sapiens
  misc_RNA (1)...(19): siRNA sense strand
cguaugagcuucggauuga

SEQ ID NO: 1250690 - RNA, 19 nt, Homo sapiens
  misc_RNA (1)...(19): siRNA sense strand
gcagcugcauggcuacuug

SEQ ID NO: 1250691 - RNA, 19 nt, Homo sapiens
  misc_RNA (1)...(19): siRNA sense strand
cagaaacuccgacauugaa

SEQ ID NO: 1250692 - RNA, 19 nt, Homo sapiens
  misc_RNA (1)...(19): siRNA sense strand
gcagagcacggacagcuau

SEQ ID NO: 1250693 - RNA, 19 nt, Homo sapiens
  misc_RNA (1)...(19): siRNA sense strand
ucagaaacuccgacauuga

SEQ ID NO: 1250694 - RNA, 19 nt, Homo sapiens
  misc_RNA (1)...(19): siRNA sense strand
cgacauugaacuucggaaa

SEQ ID NO: 1250695 - RNA, 19 nt, Homo sapiens
  misc_RNA (1)...(19): siRNA sense strand
gaagccaguaccagcguuu

SEQ ID NO: 1250696 - RNA, 19 nt, Homo sapiens
  misc_RNA (1)...(19): siRNA sense strand
gaaaggagagacggacauc

SEQ ID NO: 1250697 - RNA, 19 nt, Homo sapiens
  misc_RNA (1)...(19): siRNA sense strand
gaacuucggaaaggagaga

SEQ ID NO: 1250698 - RNA, 19 nt, Homo sapiens
  misc_RNA (1)...(19): siRNA sense strand
agacggacaucgggaggaa

SEQ ID NO: 1250699 - RNA, 19 nt, Homo sapiens
  misc_RNA (1)...(19): siRNA sense strand
gcaggacuccaaggucauu

SEQ ID NO: 1250700 - RNA, 19 nt, Homo sapiens
  misc_RNA (1)...(19): siRNA sense strand
acaccaaaguccuggagau

SEQ ID NO: 1250701 - RNA, 19 nt, Homo sapiens
  misc_RNA (1)...(19): siRNA sense strand
agagaaagcgaagccagua

SEQ ID NO: 1250702 - RNA, 19 nt, Homo sapiens
  misc_RNA (1)...(19): siRNA sense strand
acucagaaacuccgacauu

SEQ ID NO: 1250703 - RNA, 19 nt, Homo sapiens
  misc_RNA (1)...(19): siRNA sense strand
gccggaauccugaaacuca

SEQ ID NO: 1250704 - RNA, 19 nt, Homo sapiens
  misc_RNA (1)...(19): siRNA sense strand
cucagaaacuccgacauug

SEQ ID NO: 1250705 - RNA, 19 nt, Homo sapiens
  misc_RNA (1)...(19): siRNA sense strand
ggaaaggagagacggacau

SEQ ID NO: 1250706 - RNA, 19 nt, Homo sapiens
  misc_RNA (1)...(19): siRNA sense strand
cagcaugcgagccgucauu

SEQ ID NO: 1250707 - RNA, 19 nt, Homo sapiens
  misc_RNA (1)...(19): siRNA sense strand
aaacuccgacauugaacuu

SEQ ID NO: 1250708 - RNA, 19 nt, Homo sapiens
  misc_RNA (1)...(19): siRNA sense strand
agaaugagccgcugaugcu

SEQ ID NO: 1250709 - RNA, 19 nt, Homo sapiens
  misc_RNA (1)...(19): siRNA sense strand
gccgaauucucuggugguu

SEQ ID NO: 1250710 - RNA, 19 nt, Homo sapiens
  misc_RNA (1)...(19): siRNA sense strand
acauugaacuucggaaagg

SEQ ID NO: 1250711 - RNA, 19 nt, Homo sapiens
  misc_RNA (1)...(19): siRNA sense strand
gacauugaacuucggaaag

SEQ ID NO: 1250712 - RNA, 19 nt, Homo sapiens
  misc_RNA (1)...(19): siRNA sense strand
gaaacuccgacauugaacu

SEQ ID NO: 1250713 - RNA, 19 nt, Homo sapiens
  misc_RNA (1)...(19): siRNA sense strand
gcaugcgagccgucauuga

SEQ ID NO: 1250714 - RNA, 19 nt, Homo sapiens
  misc_RNA (1)...(19): siRNA sense strand
gaccugugcaagccgaauu

SEQ ID NO: 1250715 - RNA, 19 nt, Homo sapiens
  misc_RNA (1)...(19): siRNA sense strand
gaaagcgaagccaguacca

SEQ ID NO: 1250716 - RNA, 19 nt, Homo sapiens
  misc_RNA (1)...(19): siRNA sense strand
ggagaaugagccgcugaug

SEQ ID NO: 1250717 - RNA, 19 nt, Homo sapiens
  misc_RNA (1)...(19): siRNA sense strand
cgaauucucuggugguuga

SEQ ID NO: 1250718 - RNA, 19 nt, Homo sapiens
  misc_RNA (1)...(19): siRNA sense strand
cagaaacuccgacauugaa

SEQ ID NO: 1250719 - RNA, 19 nt, Homo sapiens
  misc_RNA (1)...(19): siRNA sense strand
gcagagcacggacagcuau

SEQ ID NO: 1250720 - RNA, 19 nt, Homo sapiens
  misc_RNA (1)...(19): siRNA sense strand
ucagaaacuccgacauuga

SEQ ID NO: 1250721 - RNA, 19 nt, Homo sapiens
  misc_RNA (1)...(19): siRNA sense strand
cgacauugaacuucggaaa

SEQ ID NO: 1250722 - RNA, 19 nt, Homo sapiens
  misc_RNA (1)...(19): siRNA sense strand
gaagccaguaccagcguuu

SEQ ID NO: 1250723 - RNA, 19 nt, Homo sapiens
  misc_RNA (1)...(19): siRNA sense strand
gaaaggagagacggacauc

SEQ ID NO: 1250724 - RNA, 19 nt, Homo sapiens
  misc_RNA (1)...(19): siRNA sense strand
gaacuucggaaaggagaga

SEQ ID NO: 1250725 - RNA, 19 nt, Homo sapiens
  misc_RNA (1)...(19): siRNA sense strand
agacggacaucgggaggaa

SEQ ID NO: 1250726 - RNA, 19 nt, Homo sapiens
  misc_RNA (1)...(19): siRNA sense strand
gcaggacuccaaggucauu

SEQ ID NO: 1250727 - RNA, 19 nt, Homo sapiens
  misc_RNA (1)...(19): siRNA sense strand
gccggaauccugaaacuca

SEQ ID NO: 1250728 - RNA, 19 nt, Homo sapiens
  misc_RNA (1)...(19): siRNA sense strand
agagaaagcgaagccagua

SEQ ID NO: 1250729 - RNA, 19 nt, Homo sapiens
  misc_RNA (1)...(19): siRNA sense strand
acucagaaacuccgacauu

SEQ ID NO: 1250730 - RNA, 19 nt, Homo sapiens
  misc_RNA (1)...(19): siRNA sense strand
acaccaaaguccuggagau

SEQ ID NO: 1250731 - RNA, 19 nt, Homo sapiens
  misc_RNA (1)...(19): siRNA sense strand
cucagaaacuccgacauug

SEQ ID NO: 1250732 - RNA, 19 nt, Homo sapiens
  misc_RNA (1)...(19): siRNA sense strand
ggaaaggagagacggacau

SEQ ID NO: 1250733 - RNA, 19 nt, Homo sapiens
  misc_RNA (1)...(19): siRNA sense strand
cagcaugcgagccgucauu

SEQ ID NO: 1250734 - RNA, 19 nt, Homo sapiens
  misc_RNA (1)...(19): siRNA sense strand
aaacuccgacauugaacuu

SEQ ID NO: 1250735 - RNA, 19 nt, Homo sapiens
  misc_RNA (1)...(19): siRNA sense strand
gcaugcgagccgucauuga

SEQ ID NO: 1250736 - RNA, 19 nt, Homo sapiens
  misc_RNA (1)...(19): siRNA sense strand
gccgaauucucuggugguu

SEQ ID NO: 1250737 - RNA, 19 nt, Homo sapiens
  misc_RNA (1)...(19): siRNA sense strand
acauugaacuucggaaagg

SEQ ID NO: 1250738 - RNA, 19 nt, Homo sapiens
  misc_RNA (1)...(19): siRNA sense strand
gacauugaacuucggaaag

SEQ ID NO: 1250739 - RNA, 19 nt, Homo sapiens
  misc_RNA (1)...(19): siRNA sense strand
gaaacuccgacauugaacu

SEQ ID NO: 1250740 - RNA, 19 nt, Homo sapiens
  misc_RNA (1)...(19): siRNA sense strand
gaccugugcaagccgaauu

SEQ ID NO: 1250741 - RNA, 19 nt, Homo sapiens
  misc_RNA (1)...(19): siRNA sense strand
gaaagcgaagccaguacca

SEQ ID NO: 1250742 - RNA, 19 nt, Homo sapiens
  misc_RNA (1)...(19): siRNA sense strand
cgaauucucuggugguuga

SEQ ID NO: 1250743 - RNA, 19 nt, Homo sapiens
  misc_RNA (1)...(19): siRNA sense strand
cguaugagcuucggauuga

SEQ ID NO: 1250744 - RNA, 19 nt, Homo sapiens
  misc_RNA (1)...(19): siRNA sense strand
gcagcugcauggcuacuug

SEQ ID NO: 1250745 - RNA, 19 nt, Homo sapiens
  misc_RNA (1)...(19): siRNA sense strand
cagaaacuccgacauugaa

SEQ ID NO: 1250746 - RNA, 19 nt, Homo sapiens
  misc_RNA (1)...(19): siRNA sense strand
gcagagcacggacagcuau

SEQ ID NO: 1250747 - RNA, 19 nt, Homo sapiens
  misc_RNA (1)...(19): siRNA sense strand
ucagaaacuccgacauuga

SEQ ID NO: 1250748 - RNA, 19 nt, Homo sapiens
  misc_RNA (1)...(19): siRNA sense strand
cgacauugaacuucggaaa

SEQ ID NO: 1250749 - RNA, 19 nt, Homo sapiens
  misc_RNA (1)...(19): siRNA sense strand
gaagccaguaccagcguuu

SEQ ID NO: 1250750 - RNA, 19 nt, Homo sapiens
  misc_RNA (1)...(19): siRNA sense strand
gaaaggagagacggacauc

SEQ ID NO: 1250751 - RNA, 19 nt, Homo sapiens
  misc_RNA (1)...(19): siRNA sense strand
gaacuucggaaaggagaga

SEQ ID NO: 1250752 - RNA, 19 nt, Homo sapiens
  misc_RNA (1)...(19): siRNA sense strand
agacggacaucgggaggaa

SEQ ID NO: 1250753 - RNA, 19 nt, Homo sapiens
  misc_RNA (1)...(19): siRNA sense strand
gcaggacuccaaggucauu

SEQ ID NO: 1250754 - RNA, 19 nt, Homo sapiens
  misc_RNA (1)...(19): siRNA sense strand
acaccaaaguccuggagau

SEQ ID NO: 1250755 - RNA, 19 nt, Homo sapiens
  misc_RNA (1)...(19): siRNA sense strand
agagaaagcgaagccagua

SEQ ID NO: 1250756 - RNA, 19 nt, Homo sapiens
  misc_RNA (1)...(19): siRNA sense strand
acucagaaacuccgacauu

SEQ ID NO: 1250757 - RNA, 19 nt, Homo sapiens
  misc_RNA (1)...(19): siRNA sense strand
gccggaauccugaaacuca

SEQ ID NO: 1250758 - RNA, 19 nt, Homo sapiens
  misc_RNA (1)...(19): siRNA sense strand
cucagaaacuccgacauug

SEQ ID NO: 1250759 - RNA, 19 nt, Homo sapiens
  misc_RNA (1)...(19): siRNA sense strand
ggaaaggagagacggacau

SEQ ID NO: 1250760 - RNA, 19 nt, Homo sapiens
  misc_RNA (1)...(19): siRNA sense strand
cagcaugcgagccgucauu

SEQ ID NO: 1250761 - RNA, 19 nt, Homo sapiens
  misc_RNA (1)...(19): siRNA sense strand
aaacuccgacauugaacuu

SEQ ID NO: 1250762 - RNA, 19 nt, Homo sapiens
  misc_RNA (1)...(19): siRNA sense strand
agaaugagccgcugaugcu

SEQ ID NO: 1250763 - RNA, 19 nt, Homo sapiens
  misc_RNA (1)...(19): siRNA sense strand
gccgaauucucuggugguu

SEQ ID NO: 1250764 - RNA, 19 nt, Homo sapiens
  misc_RNA (1)...(19): siRNA sense strand
acauugaacuucggaaagg

SEQ ID NO: 1250765 - RNA, 19 nt, Homo sapiens
  misc_RNA (1)...(19): siRNA sense strand
gacauugaacuucggaaag

SEQ ID NO: 1250766 - RNA, 19 nt, Homo sapiens
  misc_RNA (1)...(19): siRNA sense strand
gaaacuccgacauugaacu

SEQ ID NO: 1250767 - RNA, 19 nt, Homo sapiens
  misc_RNA (1)...(19): siRNA sense strand
gcaugcgagccgucauuga

SEQ ID NO: 1250768 - RNA, 19 nt, Homo sapiens
  misc_RNA (1)...(19): siRNA sense strand
gaccugugcaagccgaauu

SEQ ID NO: 1250769 - RNA, 19 nt, Homo sapiens
  misc_RNA (1)...(19): siRNA sense strand
gaaagcgaagccaguacca

SEQ ID NO: 1250770 - RNA, 19 nt, Homo sapiens
  misc_RNA (1)...(19): siRNA sense strand
ggagaaugagccgcugaug

SEQ ID NO: 1250771 - RNA, 19 nt, Homo sapiens
  misc_RNA (1)...(19): siRNA sense strand
cgaauucucuggugguuga

SEQ ID NO: 1250772 - RNA, 19 nt, Homo sapiens
  misc_RNA (1)...(19): siRNA sense strand
cguaugagcuucggauuga

SEQ ID NO: 1250773 - RNA, 19 nt, Homo sapiens
  misc_RNA (1)...(19): siRNA sense strand
gcagcugcauggcuacuug

SEQ ID NO: 1250774 - RNA, 19 nt, Homo sapiens
  misc_RNA (1)...(19): siRNA sense strand
cagaaacuccgacauugaa

SEQ ID NO: 1250775 - RNA, 19 nt, Homo sapiens
  misc_RNA (1)...(19): siRNA sense strand
gcagagcacggacagcuau

SEQ ID NO: 1250776 - RNA, 19 nt, Homo sapiens
  misc_RNA (1)...(19): siRNA sense strand
ucagaaacuccgacauuga

SEQ ID NO: 1250777 - RNA, 19 nt, Homo sapiens
  misc_RNA (1)...(19): siRNA sense strand
cgacauugaacuucggaaa

SEQ ID NO: 1250778 - RNA, 19 nt, Homo sapiens
  misc_RNA (1)...(19): siRNA sense strand
gaagccaguaccagcguuu

SEQ ID NO: 1250779 - RNA, 19 nt, Homo sapiens
  misc_RNA (1)...(19): siRNA sense strand
gaaaggagagacggacauc

SEQ ID NO: 1250780 - RNA, 19 nt, Homo sapiens
  misc_RNA (1)...(19): siRNA sense strand
gaacuucggaaaggagaga

SEQ ID NO: 1250781 - RNA, 19 nt, Homo sapiens
  misc_RNA (1)...(19): siRNA sense strand
agacggacaucgggaggaa

SEQ ID NO: 1250782 - RNA, 19 nt, Homo sapiens
  misc_RNA (1)...(19): siRNA sense strand
gcaggacuccaaggucauu

SEQ ID NO: 1250783 - RNA, 19 nt, Homo sapiens
  misc_RNA (1)...(19): siRNA sense strand
acaccaaaguccuggagau

SEQ ID NO: 1250784 - RNA, 19 nt, Homo sapiens
  misc_RNA (1)...(19): siRNA sense strand
agagaaagcgaagccagua

SEQ ID NO: 1250785 - RNA, 19 nt, Homo sapiens
  misc_RNA (1)...(19): siRNA sense strand
acucagaaacuccgacauu

SEQ ID NO: 1250786 - RNA, 19 nt, Homo sapiens
  misc_RNA (1)...(19): siRNA sense strand
gccggaauccugaaacuca

SEQ ID NO: 1250787 - RNA, 19 nt, Homo sapiens
  misc_RNA (1)...(19): siRNA sense strand
cucagaaacuccgacauug

SEQ ID NO: 1250788 - RNA, 19 nt, Homo sapiens
  misc_RNA (1)...(19): siRNA sense strand
ggaaaggagagacggacau

SEQ ID NO: 1250789 - RNA, 19 nt, Homo sapiens
  misc_RNA (1)...(19): siRNA sense strand
cagcaugcgagccgucauu

SEQ ID NO: 1250790 - RNA, 19 nt, Homo sapiens
  misc_RNA (1)...(19): siRNA sense strand
aaacuccgacauugaacuu

SEQ ID NO: 1250791 - RNA, 19 nt, Homo sapiens
  misc_RNA (1)...(19): siRNA sense strand
agaaugagccgcugaugcu

SEQ ID NO: 1250792 - RNA, 19 nt, Homo sapiens
  misc_RNA (1)...(19): siRNA sense strand
gccgaauucucuggugguu

SEQ ID NO: 1250793 - RNA, 19 nt, Homo sapiens
  misc_RNA (1)...(19): siRNA sense strand
acauugaacuucggaaagg

SEQ ID NO: 1250794 - RNA, 19 nt, Homo sapiens
  misc_RNA (1)...(19): siRNA sense strand
gacauugaacuucggaaag

SEQ ID NO: 1250795 - RNA, 19 nt, Homo sapiens
  misc_RNA (1)...(19): siRNA sense strand
gaaacuccgacauugaacu

SEQ ID NO: 1250796 - RNA, 19 nt, Homo sapiens
  misc_RNA (1)...(19): siRNA sense strand
gcaugcgagccgucauuga

SEQ ID NO: 1250797 - RNA, 19 nt, Homo sapiens
  misc_RNA (1)...(19): siRNA sense strand
gaccugugcaagccgaauu

SEQ ID NO: 1250798 - RNA, 19 nt, Homo sapiens
  misc_RNA (1)...(19): siRNA sense strand
gaaagcgaagccaguacca

SEQ ID NO: 1250799 - RNA, 19 nt, Homo sapiens
  misc_RNA (1)...(19): siRNA sense strand
ggagaaugagccgcugaug

SEQ ID NO: 1250800 - RNA, 19 nt, Homo sapiens
  misc_RNA (1)...(19): siRNA sense strand
cgaauucucuggugguuga

SEQ ID NO: 1250801 - RNA, 19 nt, Homo sapiens
  misc_RNA (1)...(19): siRNA sense strand
cguaugagcuucggauuga

SEQ ID NO: 1250802 - RNA, 19 nt, Homo sapiens
  misc_RNA (1)...(19): siRNA sense strand
gcagcugcauggcuacuug

SEQ ID NO: 1250803 - RNA, 19 nt, Homo sapiens
  misc_RNA (1)...(19): siRNA sense strand
cagaaacuccgacauugaa

SEQ ID NO: 1250804 - RNA, 19 nt, Homo sapiens
  misc_RNA (1)...(19): siRNA sense strand
gcagagcacggacagcuau

SEQ ID NO: 1250805 - RNA, 19 nt, Homo sapiens
  misc_RNA (1)...(19): siRNA sense strand
ucagaaacuccgacauuga

SEQ ID NO: 1250806 - RNA, 19 nt, Homo sapiens
  misc_RNA (1)...(19): siRNA sense strand
cgacauugaacuucggaaa

SEQ ID NO: 1250807 - RNA, 19 nt, Homo sapiens
  misc_RNA (1)...(19): siRNA sense strand
gaagccaguaccagcguuu

SEQ ID NO: 1250808 - RNA, 19 nt, Homo sapiens
  misc_RNA (1)...(19): siRNA sense strand
gaaaggagagacggacauc

SEQ ID NO: 1250809 - RNA, 19 nt, Homo sapiens
  misc_RNA (1)...(19): siRNA sense strand
gaacuucggaaaggagaga

SEQ ID NO: 1250810 - RNA, 19 nt, Homo sapiens
  misc_RNA (1)...(19): siRNA sense strand
agacggacaucgggaggaa

SEQ ID NO: 1250811 - RNA, 19 nt, Homo sapiens
  misc_RNA (1)...(19): siRNA sense strand
gcaggacuccaaggucauu

SEQ ID NO: 1250812 - RNA, 19 nt, Homo sapiens
  misc_RNA (1)...(19): siRNA sense strand
acaccaaaguccuggagau

SEQ ID NO: 1250813 - RNA, 19 nt, Homo sapiens
  misc_RNA (1)...(19): siRNA sense strand
agagaaagcgaagccagua

SEQ ID NO: 1250814 - RNA, 19 nt, Homo sapiens
  misc_RNA (1)...(19): siRNA sense strand
acucagaaacuccgacauu

SEQ ID NO: 1250815 - RNA, 19 nt, Homo sapiens
  misc_RNA (1)...(19): siRNA sense strand
gccggaauccugaaacuca

SEQ ID NO: 1250816 - RNA, 19 nt, Homo sapiens
  misc_RNA (1)...(19): siRNA sense strand
cucagaaacuccgacauug

SEQ ID NO: 1250817 - RNA, 19 nt, Homo sapiens
  misc_RNA (1)...(19): siRNA sense strand
ggaaaggagagacggacau

SEQ ID NO: 1250818 - RNA, 19 nt, Homo sapiens
  misc_RNA (1)...(19): siRNA sense strand
cagcaugcgagccgucauu

SEQ ID NO: 1250819 - RNA, 19 nt, Homo sapiens
  misc_RNA (1)...(19): siRNA sense strand
aaacuccgacauugaacuu

SEQ ID NO: 1250820 - RNA, 19 nt, Homo sapiens
  misc_RNA (1)...(19): siRNA sense strand
agaaugagccgcugaugcu

SEQ ID NO: 1250821 - RNA, 19 nt, Homo sapiens
  misc_RNA (1)...(19): siRNA sense strand
gccgaauucucuggugguu

SEQ ID NO: 1250822 - RNA, 19 nt, Homo sapiens
  misc_RNA (1)...(19): siRNA sense strand
acauugaacuucggaaagg

SEQ ID NO: 1250823 - RNA, 19 nt, Homo sapiens
  misc_RNA (1)...(19): siRNA sense strand
gacauugaacuucggaaag

SEQ ID NO: 1250824 - RNA, 19 nt, Homo sapiens
  misc_RNA (1)...(19): siRNA sense strand
gaaacuccgacauugaacu

SEQ ID NO: 1250825 - RNA, 19 nt, Homo sapiens
  misc_RNA (1)...(19): siRNA sense strand
gcaugcgagccgucauuga

SEQ ID NO: 1250826 - RNA, 19 nt, Homo sapiens
  misc_RNA (1)...(19): siRNA sense strand
gaccugugcaagccgaauu

SEQ ID NO: 1250827 - RNA, 19 nt, Homo sapiens
  misc_RNA (1)...(19): siRNA sense strand
gaaagcgaagccaguacca

SEQ ID NO: 1250828 - RNA, 19 nt, Homo sapiens
  misc_RNA (1)...(19): siRNA sense strand
ggagaaugagccgcugaug

SEQ ID NO: 1250829 - RNA, 19 nt, Homo sapiens
  misc_RNA (1)...(19): siRNA sense strand
cgaauucucuggugguuga

SEQ ID NO: 1250830 - RNA, 19 nt, Homo sapiens
  misc_RNA (1)...(19): siRNA sense strand
cguaugagcuucggauuga

SEQ ID NO: 1250831 - RNA, 19 nt, Homo sapiens
  misc_RNA (1)...(19): siRNA sense strand
gcagcugcauggcuacuug

SEQ ID NO: 1250832 - RNA, 19 nt, Homo sapiens
  misc_RNA (1)...(19): siRNA sense strand
cagaaacuccgacauugaa

SEQ ID NO: 1250833 - RNA, 19 nt, Homo sapiens
  misc_RNA (1)...(19): siRNA sense strand
gcagagcacggacagcuau

SEQ ID NO: 1250834 - RNA, 19 nt, Homo sapiens
  misc_RNA (1)...(19): siRNA sense strand
ucagaaacuccgacauuga

SEQ ID NO: 1250835 - RNA, 19 nt, Homo sapiens
  misc_RNA (1)...(19): siRNA sense strand
cgacauugaacuucggaaa

SEQ ID NO: 1250836 - RNA, 19 nt, Homo sapiens
  misc_RNA (1)...(19): siRNA sense strand
gaagccaguaccagcguuu

SEQ ID NO: 1250837 - RNA, 19 nt, Homo sapiens
  misc_RNA (1)...(19): siRNA sense strand
gaaaggagagacggacauc

SEQ ID NO: 1250838 - RNA, 19 nt, Homo sapiens
  misc_RNA (1)...(19): siRNA sense strand
gaacuucggaaaggagaga

SEQ ID NO: 1250839 - RNA, 19 nt, Homo sapiens
  misc_RNA (1)...(19): siRNA sense strand
agacggacaucgggaggaa

SEQ ID NO: 1250840 - RNA, 19 nt, Homo sapiens
  misc_RNA (1)...(19): siRNA sense strand
gcaggacuccaaggucauu

SEQ ID NO: 1250841 - RNA, 19 nt, Homo sapiens
  misc_RNA (1)...(19): siRNA sense strand
acaccaaaguccuggagau

SEQ ID NO: 1250842 - RNA, 19 nt, Homo sapiens
  misc_RNA (1)...(19): siRNA sense strand
agagaaagcgaagccagua

SEQ ID NO: 1250843 - RNA, 19 nt, Homo sapiens
  misc_RNA (1)...(19): siRNA sense strand
acucagaaacuccgacauu

SEQ ID NO: 1250844 - RNA, 19 nt, Homo sapiens
  misc_RNA (1)...(19): siRNA sense strand
gccggaauccugaaacuca

SEQ ID NO: 1250845 - RNA, 19 nt, Homo sapiens
  misc_RNA (1)...(19): siRNA sense strand
cucagaaacuccgacauug

SEQ ID NO: 1250846 - RNA, 19 nt, Homo sapiens
  misc_RNA (1)...(19): siRNA sense strand
ggaaaggagagacggacau

SEQ ID NO: 1250847 - RNA, 19 nt, Homo sapiens
  misc_RNA (1)...(19): siRNA sense strand
cagcaugcgagccgucauu

SEQ ID NO: 1250848 - RNA, 19 nt, Homo sapiens
  misc_RNA (1)...(19): siRNA sense strand
aaacuccgacauugaacuu

SEQ ID NO: 1250849 - RNA, 19 nt, Homo sapiens
  misc_RNA (1)...(19): siRNA sense strand
agaaugagccgcugaugcu

SEQ ID NO: 1250850 - RNA, 19 nt, Homo sapiens
  misc_RNA (1)...(19): siRNA sense strand
gccgaauucucuggugguu

SEQ ID NO: 1250851 - RNA, 19 nt, Homo sapiens
  misc_RNA (1)...(19): siRNA sense strand
acauugaacuucggaaagg

SEQ ID NO: 1250852 - RNA, 19 nt, Homo sapiens
  misc_RNA (1)...(19): siRNA sense strand
gacauugaacuucggaaag

SEQ ID NO: 1250853 - RNA, 19 nt, Homo sapiens
  misc_RNA (1)...(19): siRNA sense strand
gaaacuccgacauugaacu

SEQ ID NO: 1250854 - RNA, 19 nt, Homo sapiens
  misc_RNA (1)...(19): siRNA sense strand
gcaugcgagccgucauuga

SEQ ID NO: 1250855 - RNA, 19 nt, Homo sapiens
  misc_RNA (1)...(19): siRNA sense strand
gaccugugcaagccgaauu

SEQ ID NO: 1250856 - RNA, 19 nt, Homo sapiens
  misc_RNA (1)...(19): siRNA sense strand
gaaagcgaagccaguacca

SEQ ID NO: 1250857 - RNA, 19 nt, Homo sapiens
  misc_RNA (1)...(19): siRNA sense strand
ggagaaugagccgcugaug

SEQ ID NO: 1250858 - RNA, 19 nt, Homo sapiens
  misc_RNA (1)...(19): siRNA sense strand
cgaauucucuggugguuga

SEQ ID NO: 1250859 - RNA, 19 nt, Homo sapiens
  misc_RNA (1)...(19): siRNA sense strand
cagaaacuccgacauugaa

SEQ ID NO: 1250860 - RNA, 19 nt, Homo sapiens
  misc_RNA (1)...(19): siRNA sense strand
gcagagcacggacagcuau

SEQ ID NO: 1250861 - RNA, 19 nt, Homo sapiens
  misc_RNA (1)...(19): siRNA sense strand
ucagaaacuccgacauuga

SEQ ID NO: 1250862 - RNA, 19 nt, Homo sapiens
  misc_RNA (1)...(19): siRNA sense strand
cgacauugaacuucggaaa

SEQ ID NO: 1250863 - RNA, 19 nt, Homo sapiens
  misc_RNA (1)...(19): siRNA sense strand
gaagccaguaccagcguuu

SEQ ID NO: 1250864 - RNA, 19 nt, Homo sapiens
  misc_RNA (1)...(19): siRNA sense strand
gaaaggagagacggacauc

SEQ ID NO: 1250865 - RNA, 19 nt, Homo sapiens
  misc_RNA (1)...(19): siRNA sense strand
gaacuucggaaaggagaga

SEQ ID NO: 1250866 - RNA, 19 nt, Homo sapiens
  misc_RNA (1)...(19): siRNA sense strand
agacggacaucgggaggaa

SEQ ID NO: 1250867 - RNA, 19 nt, Homo sapiens
  misc_RNA (1)...(19): siRNA sense strand
gcaggacuccaaggucauu

SEQ ID NO: 1250868 - RNA, 19 nt, Homo sapiens
  misc_RNA (1)...(19): siRNA sense strand
gccggaauccugaaacuca

SEQ ID NO: 1250869 - RNA, 19 nt, Homo sapiens
  misc_RNA (1)...(19): siRNA sense strand
agagaaagcgaagccagua

SEQ ID NO: 1250870 - RNA, 19 nt, Homo sapiens
  misc_RNA (1)...(19): siRNA sense strand
acucagaaacuccgacauu

SEQ ID NO: 1250871 - RNA, 19 nt, Homo sapiens
  misc_RNA (1)...(19): siRNA sense strand
acaccaaaguccuggagau

SEQ ID NO: 1250872 - RNA, 19 nt, Homo sapiens
  misc_RNA (1)...(19): siRNA sense strand
cucagaaacuccgacauug

SEQ ID NO: 1250873 - RNA, 19 nt, Homo sapiens
  misc_RNA (1)...(19): siRNA sense strand
ggaaaggagagacggacau

SEQ ID NO: 1250874 - RNA, 19 nt, Homo sapiens
  misc_RNA (1)...(19): siRNA sense strand
cagcaugcgagccgucauu

SEQ ID NO: 1250875 - RNA, 19 nt, Homo sapiens
  misc_RNA (1)...(19): siRNA sense strand
aaacuccgacauugaacuu

SEQ ID NO: 1250876 - RNA, 19 nt, Homo sapiens
  misc_RNA (1)...(19): siRNA sense strand
gcaugcgagccgucauuga

SEQ ID NO: 1250877 - RNA, 19 nt, Homo sapiens
  misc_RNA (1)...(19): siRNA sense strand
gccgaauucucuggugguu

SEQ ID NO: 1250878 - RNA, 19 nt, Homo sapiens
  misc_RNA (1)...(19): siRNA sense strand
acauugaacuucggaaagg

SEQ ID NO: 1250879 - RNA, 19 nt, Homo sapiens
  misc_RNA (1)...(19): siRNA sense strand
gacauugaacuucggaaag

SEQ ID NO: 1250880 - RNA, 19 nt, Homo sapiens
  misc_RNA (1)...(19): siRNA sense strand
gaaacuccgacauugaacu

SEQ ID NO: 1250881 - RNA, 19 nt, Homo sapiens
  misc_RNA (1)...(19): siRNA sense strand
gaccugugcaagccgaauu

SEQ ID NO: 1250882 - RNA, 19 nt, Homo sapiens
  misc_RNA (1)...(19): siRNA sense strand
gaaagcgaagccaguacca

SEQ ID NO: 1250883 - RNA, 19 nt, Homo sapiens
  misc_RNA (1)...(19): siRNA sense strand
cgaauucucuggugguuga

SEQ ID NO: 1250884 - RNA, 19 nt, Homo sapiens
  misc_RNA (1)...(19): siRNA sense strand
cguaugagcuucggauuga

SEQ ID NO: 1250885 - RNA, 19 nt, Homo sapiens
  misc_RNA (1)...(19): siRNA sense strand
gcagcugcauggcuacuug

SEQ ID NO: 1250886 - RNA, 19 nt, Homo sapiens
  misc_RNA (1)...(19): siRNA sense strand
cagaaacuccgacauugaa

SEQ ID NO: 1250887 - RNA, 19 nt, Homo sapiens
  misc_RNA (1)...(19): siRNA sense strand
gcagagcacggacagcuau

SEQ ID NO: 1250888 - RNA, 19 nt, Homo sapiens
  misc_RNA (1)...(19): siRNA sense strand
ucagaaacuccgacauuga

SEQ ID NO: 1250889 - RNA, 19 nt, Homo sapiens
  misc_RNA (1)...(19): siRNA sense strand
cgacauugaacuucggaaa

SEQ ID NO: 1250890 - RNA, 19 nt, Homo sapiens
  misc_RNA (1)...(19): siRNA sense strand
gaagccaguaccagcguuu

SEQ ID NO: 1250891 - RNA, 19 nt, Homo sapiens
  misc_RNA (1)...(19): siRNA sense strand
gaaaggagagacggacauc

SEQ ID NO: 1250892 - RNA, 19 nt, Homo sapiens
  misc_RNA (1)...(19): siRNA sense strand
gaacuucggaaaggagaga

SEQ ID NO: 1250893 - RNA, 19 nt, Homo sapiens
  misc_RNA (1)...(19): siRNA sense strand
agacggacaucgggaggaa

SEQ ID NO: 1250894 - RNA, 19 nt, Homo sapiens
  misc_RNA (1)...(19): siRNA sense strand
gcaggacuccaaggucauu

SEQ ID NO: 1250895 - RNA, 19 nt, Homo sapiens
  misc_RNA (1)...(19): siRNA sense strand
acaccaaaguccuggagau

SEQ ID NO: 1250896 - RNA, 19 nt, Homo sapiens
  misc_RNA (1)...(19): siRNA sense strand
agagaaagcgaagccagua

SEQ ID NO: 1250897 - RNA, 19 nt, Homo sapiens
  misc_RNA (1)...(19): siRNA sense strand
acucagaaacuccgacauu

SEQ ID NO: 1250898 - RNA, 19 nt, Homo sapiens
  misc_RNA (1)...(19): siRNA sense strand
gccggaauccugaaacuca

SEQ ID NO: 1250899 - RNA, 19 nt, Homo sapiens
  misc_RNA (1)...(19): siRNA sense strand
cucagaaacuccgacauug

SEQ ID NO: 1250900 - RNA, 19 nt, Homo sapiens
  misc_RNA (1)...(19): siRNA sense strand
ggaaaggagagacggacau

SEQ ID NO: 1250901 - RNA, 19 nt, Homo sapiens
  misc_RNA (1)...(19): siRNA sense strand
cagcaugcgagccgucauu

SEQ ID NO: 1250902 - RNA, 19 nt, Homo sapiens
  misc_RNA (1)...(19): siRNA sense strand
aaacuccgacauugaacuu

SEQ ID NO: 1250903 - RNA, 19 nt, Homo sapiens
  misc_RNA (1)...(19): siRNA sense strand
agaaugagccgcugaugcu

SEQ ID NO: 1250904 - RNA, 19 nt, Homo sapiens
  misc_RNA (1)...(19): siRNA sense strand
gccgaauucucuggugguu

SEQ ID NO: 1250905 - RNA, 19 nt, Homo sapiens
  misc_RNA (1)...(19): siRNA sense strand
acauugaacuucggaaagg

SEQ ID NO: 1250906 - RNA, 19 nt, Homo sapiens
  misc_RNA (1)...(19): siRNA sense strand
gacauugaacuucggaaag

SEQ ID NO: 1250907 - RNA, 19 nt, Homo sapiens
  misc_RNA (1)...(19): siRNA sense strand
gaaacuccgacauugaacu

SEQ ID NO: 1250908 - RNA, 19 nt, Homo sapiens
  misc_RNA (1)...(19): siRNA sense strand
gcaugcgagccgucauuga

SEQ ID NO: 1250909 - RNA, 19 nt, Homo sapiens
  misc_RNA (1)...(19): siRNA sense strand
gaccugugcaagccgaauu

SEQ ID NO: 1250910 - RNA, 19 nt, Homo sapiens
  misc_RNA (1)...(19): siRNA sense strand
gaaagcgaagccaguacca

SEQ ID NO: 1250911 - RNA, 19 nt, Homo sapiens
  misc_RNA (1)...(19): siRNA sense strand
ggagaaugagccgcugaug

SEQ ID NO: 1250912 - RNA, 19 nt, Homo sapiens
  misc_RNA (1)...(19): siRNA sense strand
cgaauucucuggugguuga

SEQ ID NO: 1250913 - RNA, 19 nt, Homo sapiens
  misc_RNA (1)...(19): siRNA sense strand
cguaugagcuucggauuga

SEQ ID NO: 1250914 - RNA, 19 nt, Homo sapiens
  misc_RNA (1)...(19): siRNA sense strand
gcagcugcauggcuacuug

SEQ ID NO: 1250915 - RNA, 19 nt, Homo sapiens
  misc_RNA (1)...(19): siRNA sense strand
cagaaacuccgacauugaa

SEQ ID NO: 1250916 - RNA, 19 nt, Homo sapiens
  misc_RNA (1)...(19): siRNA sense strand
gcagagcacggacagcuau

SEQ ID NO: 1250917 - RNA, 19 nt, Homo sapiens
  misc_RNA (1)...(19): siRNA sense strand
ucagaaacuccgacauuga

SEQ ID NO: 1250918 - RNA, 19 nt, Homo sapiens
  misc_RNA (1)...(19): siRNA sense strand
cgacauugaacuucggaaa

SEQ ID NO: 1250919 - RNA, 19 nt, Homo sapiens
  misc_RNA (1)...(19): siRNA sense strand
gaagccaguaccagcguuu

SEQ ID NO: 1250920 - RNA, 19 nt, Homo sapiens
  misc_RNA (1)...(19): siRNA sense strand
gaaaggagagacggacauc

SEQ ID NO: 1250921 - RNA, 19 nt, Homo sapiens
  misc_RNA (1)...(19): siRNA sense strand
gaacuucggaaaggagaga

SEQ ID NO: 1250922 - RNA, 19 nt, Homo sapiens
  misc_RNA (1)...(19): siRNA sense strand
agacggacaucgggaggaa

SEQ ID NO: 1250923 - RNA, 19 nt, Homo sapiens
  misc_RNA (1)...(19): siRNA sense strand
gcaggacuccaaggucauu

SEQ ID NO: 1250924 - RNA, 19 nt, Homo sapiens
  misc_RNA (1)...(19): siRNA sense strand
acaccaaaguccuggagau

SEQ ID NO: 1250925 - RNA, 19 nt, Homo sapiens
  misc_RNA (1)...(19): siRNA sense strand
agagaaagcgaagccagua

SEQ ID NO: 1250926 - RNA, 19 nt, Homo sapiens
  misc_RNA (1)...(19): siRNA sense strand
acucagaaacuccgacauu

SEQ ID NO: 1250927 - RNA, 19 nt, Homo sapiens
  misc_RNA (1)...(19): siRNA sense strand
gccggaauccugaaacuca

SEQ ID NO: 1250928 - RNA, 19 nt, Homo sapiens
  misc_RNA (1)...(19): siRNA sense strand
cucagaaacuccgacauug

SEQ ID NO: 1250929 - RNA, 19 nt, Homo sapiens
  misc_RNA (1)...(19): siRNA sense strand
ggaaaggagagacggacau

SEQ ID NO: 1250930 - RNA, 19 nt, Homo sapiens
  misc_RNA (1)...(19): siRNA sense strand
cagcaugcgagccgucauu

SEQ ID NO: 1250931 - RNA, 19 nt, Homo sapiens
  misc_RNA (1)...(19): siRNA sense strand
aaacuccgacauugaacuu

SEQ ID NO: 1250932 - RNA, 19 nt, Homo sapiens
  misc_RNA (1)...(19): siRNA sense strand
agaaugagccgcugaugcu

SEQ ID NO: 1250933 - RNA, 19 nt, Homo sapiens
  misc_RNA (1)...(19): siRNA sense strand
gccgaauucucuggugguu

SEQ ID NO: 1250934 - RNA, 19 nt, Homo sapiens
  misc_RNA (1)...(19): siRNA sense strand
acauugaacuucggaaagg

SEQ ID NO: 1250935 - RNA, 19 nt, Homo sapiens
  misc_RNA (1)...(19): siRNA sense strand
gacauugaacuucggaaag

SEQ ID NO: 1250936 - RNA, 19 nt, Homo sapiens
  misc_RNA (1)...(19): siRNA sense strand
gaaacuccgacauugaacu

SEQ ID NO: 1250937 - RNA, 19 nt, Homo sapiens
  misc_RNA (1)...(19): siRNA sense strand
gcaugcgagccgucauuga

SEQ ID NO: 1250938 - RNA, 19 nt, Homo sapiens
  misc_RNA (1)...(19): siRNA sense strand
gaccugugcaagccgaauu

SEQ ID NO: 1250939 - RNA, 19 nt, Homo sapiens
  misc_RNA (1)...(19): siRNA sense strand
gaaagcgaagccaguacca

SEQ ID NO: 1250940 - RNA, 19 nt, Homo sapiens
  misc_RNA (1)...(19): siRNA sense strand
ggagaaugagccgcugaug

SEQ ID NO: 1250941 - RNA, 19 nt, Homo sapiens
  misc_RNA (1)...(19): siRNA sense strand
cgaauucucuggugguuga

SEQ ID NO: 1250942 - RNA, 19 nt, Homo sapiens
  misc_RNA (1)...(19): siRNA sense strand
cguaugagcuucggauuga

SEQ ID NO: 1250943 - RNA, 19 nt, Homo sapiens
  misc_RNA (1)...(19): siRNA sense strand
gcagcugcauggcuacuug

SEQ ID NO: 1250944 - RNA, 19 nt, Homo sapiens
  misc_RNA (1)...(19): siRNA sense strand
cagaaacuccgacauugaa

SEQ ID NO: 1250945 - RNA, 19 nt, Homo sapiens
  misc_RNA (1)...(19): siRNA sense strand
gcagagcacggacagcuau

SEQ ID NO: 1250946 - RNA, 19 nt, Homo sapiens
  misc_RNA (1)...(19): siRNA sense strand
ucagaaacuccgacauuga

SEQ ID NO: 1250947 - RNA, 19 nt, Homo sapiens
  misc_RNA (1)...(19): siRNA sense strand
cgacauugaacuucggaaa

SEQ ID NO: 1250948 - RNA, 19 nt, Homo sapiens
  misc_RNA (1)...(19): siRNA sense strand
gaagccaguaccagcguuu

SEQ ID NO: 1250949 - RNA, 19 nt, Homo sapiens
  misc_RNA (1)...(19): siRNA sense strand
gaaaggagagacggacauc

SEQ ID NO: 1250950 - RNA, 19 nt, Homo sapiens
  misc_RNA (1)...(19): siRNA sense strand
gaacuucggaaaggagaga

SEQ ID NO: 1250951 - RNA, 19 nt, Homo sapiens
  misc_RNA (1)...(19): siRNA sense strand
agacggacaucgggaggaa

SEQ ID NO: 1250952 - RNA, 19 nt, Homo sapiens
  misc_RNA (1)...(19): siRNA sense strand
gcaggacuccaaggucauu

SEQ ID NO: 1250953 - RNA, 19 nt, Homo sapiens
  misc_RNA (1)...(19): siRNA sense strand
acaccaaaguccuggagau

SEQ ID NO: 1250954 - RNA, 19 nt, Homo sapiens
  misc_RNA (1)...(19): siRNA sense strand
agagaaagcgaagccagua

SEQ ID NO: 1250955 - RNA, 19 nt, Homo sapiens
  misc_RNA (1)...(19): siRNA sense strand
acucagaaacuccgacauu

SEQ ID NO: 1250956 - RNA, 19 nt, Homo sapiens
  misc_RNA (1)...(19): siRNA sense strand
gccggaauccugaaacuca

SEQ ID NO: 1250957 - RNA, 19 nt, Homo sapiens
  misc_RNA (1)...(19): siRNA sense strand
cucagaaacuccgacauug

SEQ ID NO: 1250958 - RNA, 19 nt, Homo sapiens
  misc_RNA (1)...(19): siRNA sense strand
ggaaaggagagacggacau

SEQ ID NO: 1250959 - RNA, 19 nt, Homo sapiens
  misc_RNA (1)...(19): siRNA sense strand
cagcaugcgagccgucauu

SEQ ID NO: 1250960 - RNA, 19 nt, Homo sapiens
  misc_RNA (1)...(19): siRNA sense strand
aaacuccgacauugaacuu

SEQ ID NO: 1250961 - RNA, 19 nt, Homo sapiens
  misc_RNA (1)...(19): siRNA sense strand
agaaugagccgcugaugcu

SEQ ID NO: 1250962 - RNA, 19 nt, Homo sapiens
  misc_RNA (1)...(19): siRNA sense strand
gccgaauucucuggugguu

SEQ ID NO: 1250963 - RNA, 19 nt, Homo sapiens
  misc_RNA (1)...(19): siRNA sense strand
acauugaacuucggaaagg

SEQ ID NO: 1250964 - RNA, 19 nt, Homo sapiens
  misc_RNA (1)...(19): siRNA sense strand
gacauugaacuucggaaag

SEQ ID NO: 1250965 - RNA, 19 nt, Homo sapiens
  misc_RNA (1)...(19): siRNA sense strand
gaaacuccgacauugaacu

SEQ ID NO: 1250966 - RNA, 19 nt, Homo sapiens
  misc_RNA (1)...(19): siRNA sense strand
gcaugcgagccgucauuga

SEQ ID NO: 1250967 - RNA, 19 nt, Homo sapiens
  misc_RNA (1)...(19): siRNA sense strand
gaccugugcaagccgaauu

SEQ ID NO: 1250968 - RNA, 19 nt, Homo sapiens
  misc_RNA (1)...(19): siRNA sense strand
gaaagcgaagccaguacca

SEQ ID NO: 1250969 - RNA, 19 nt, Homo sapiens
  misc_RNA (1)...(19): siRNA sense strand
ggagaaugagccgcugaug

SEQ ID NO: 1250970 - RNA, 19 nt, Homo sapiens
  misc_RNA (1)...(19): siRNA sense strand
cgaauucucuggugguuga

SEQ ID NO: 1250971 - RNA, 19 nt, Homo sapiens
  misc_RNA (1)...(19): siRNA sense strand
cguaugagcuucggauuga

SEQ ID NO: 1250972 - RNA, 19 nt, Homo sapiens
  misc_RNA (1)...(19): siRNA sense strand
gcagcugcauggcuacuug

SEQ ID NO: 1250973 - RNA, 19 nt, Homo sapiens
  misc_RNA (1)...(19): siRNA sense strand
cagaaacuccgacauugaa

SEQ ID NO: 1250974 - RNA, 19 nt, Homo sapiens
  misc_RNA (1)...(19): siRNA sense strand
gcagagcacggacagcuau

SEQ ID NO: 1250975 - RNA, 19 nt, Homo sapiens
  misc_RNA (1)...(19): siRNA sense strand
ucagaaacuccgacauuga

SEQ ID NO: 1250976 - RNA, 19 nt, Homo sapiens
  misc_RNA (1)...(19): siRNA sense strand
cgacauugaacuucggaaa

SEQ ID NO: 1250977 - RNA, 19 nt, Homo sapiens
  misc_RNA (1)...(19): siRNA sense strand
gaagccaguaccagcguuu

SEQ ID NO: 1250978 - RNA, 19 nt, Homo sapiens
  misc_RNA (1)...(19): siRNA sense strand
gaaaggagagacggacauc

SEQ ID NO: 1250979 - RNA, 19 nt, Homo sapiens
  misc_RNA (1)...(19): siRNA sense strand
gaacuucggaaaggagaga

SEQ ID NO: 1250980 - RNA, 19 nt, Homo sapiens
  misc_RNA (1)...(19): siRNA sense strand
agacggacaucgggaggaa

SEQ ID NO: 1250981 - RNA, 19 nt, Homo sapiens
  misc_RNA (1)...(19): siRNA sense strand
gcaggacuccaaggucauu

SEQ ID NO: 1250982 - RNA, 19 nt, Homo sapiens
  misc_RNA (1)...(19): siRNA sense strand
acaccaaaguccuggagau

SEQ ID NO: 1250983 - RNA, 19 nt, Homo sapiens
  misc_RNA (1)...(19): siRNA sense strand
agagaaagcgaagccagua

SEQ ID NO: 1250984 - RNA, 19 nt, Homo sapiens
  misc_RNA (1)...(19): siRNA sense strand
acucagaaacuccgacauu

SEQ ID NO: 1250985 - RNA, 19 nt, Homo sapiens
  misc_RNA (1)...(19): siRNA sense strand
gccggaauccugaaacuca

SEQ ID NO: 1250986 - RNA, 19 nt, Homo sapiens
  misc_RNA (1)...(19): siRNA sense strand
cucagaaacuccgacauug

SEQ ID NO: 1250987 - RNA, 19 nt, Homo sapiens
  misc_RNA (1)...(19): siRNA sense strand
ggaaaggagagacggacau

SEQ ID NO: 1250988 - RNA, 19 nt, Homo sapiens
  misc_RNA (1)...(19): siRNA sense strand
cagcaugcgagccgucauu

SEQ ID NO: 1250989 - RNA, 19 nt, Homo sapiens
  misc_RNA (1)...(19): siRNA sense strand
aaacuccgacauugaacuu

SEQ ID NO: 1250990 - RNA, 19 nt, Homo sapiens
  misc_RNA (1)...(19): siRNA sense strand
agaaugagccgcugaugcu

SEQ ID NO: 1250991 - RNA, 19 nt, Homo sapiens
  misc_RNA (1)...(19): siRNA sense strand
gccgaauucucuggugguu

SEQ ID NO: 1250992 - RNA, 19 nt, Homo sapiens
  misc_RNA (1)...(19): siRNA sense strand
acauugaacuucggaaagg

SEQ ID NO: 1250993 - RNA, 19 nt, Homo sapiens
  misc_RNA (1)...(19): siRNA sense strand
gacauugaacuucggaaag

SEQ ID NO: 1250994 - RNA, 19 nt, Homo sapiens
  misc_RNA (1)...(19): siRNA sense strand
gaaacuccgacauugaacu

SEQ ID NO: 1250995 - RNA, 19 nt, Homo sapiens
  misc_RNA (1)...(19): siRNA sense strand
gcaugcgagccgucauuga

SEQ ID NO: 1250996 - RNA, 19 nt, Homo sapiens
  misc_RNA (1)...(19): siRNA sense strand
gaccugugcaagccgaauu

SEQ ID NO: 1250997 - RNA, 19 nt, Homo sapiens
  misc_RNA (1)...(19): siRNA sense strand
gaaagcgaagccaguacca

SEQ ID NO: 1250998 - RNA, 19 nt, Homo sapiens
  misc_RNA (1)...(19): siRNA sense strand
ggagaaugagccgcugaug

SEQ ID NO: 1250999 - RNA, 19 nt, Homo sapiens
  misc_RNA (1)...(19): siRNA sense strand
cgaauucucuggugguuga

SEQ ID NO: 1251000 - RNA, 19 nt, Homo sapiens
  misc_RNA (1)...(19): siRNA sense strand
cagaaacuccgacauugaa

SEQ ID NO: 1251001 - RNA, 19 nt, Homo sapiens
  misc_RNA (1)...(19): siRNA sense strand
gcagagcacggacagcuau

SEQ ID NO: 1251002 - RNA, 19 nt, Homo sapiens
  misc_RNA (1)...(19): siRNA sense strand
ucagaaacuccgacauuga

SEQ ID NO: 1251003 - RNA, 19 nt, Homo sapiens
  misc_RNA (1)...(19): siRNA sense strand
cgacauugaacuucggaaa

SEQ ID NO: 1251004 - RNA, 19 nt, Homo sapiens
  misc_RNA (1)...(19): siRNA sense strand
gaagccaguaccagcguuu

SEQ ID NO: 1251005 - RNA, 19 nt, Homo sapiens
  misc_RNA (1)...(19): siRNA sense strand
gaaaggagagacggacauc

SEQ ID NO: 1251006 - RNA, 19 nt, Homo sapiens
  misc_RNA (1)...(19): siRNA sense strand
gaacuucggaaaggagaga

SEQ ID NO: 1251007 - RNA, 19 nt, Homo sapiens
  misc_RNA (1)...(19): siRNA sense strand
agacggacaucgggaggaa

SEQ ID NO: 1251008 - RNA, 19 nt, Homo sapiens
  misc_RNA (1)...(19): siRNA sense strand
gcaggacuccaaggucauu

SEQ ID NO: 1251009 - RNA, 19 nt, Homo sapiens
  misc_RNA (1)...(19): siRNA sense strand
gccggaauccugaaacuca

SEQ ID NO: 1251010 - RNA, 19 nt, Homo sapiens
  misc_RNA (1)...(19): siRNA sense strand
agagaaagcgaagccagua

SEQ ID NO: 1251011 - RNA, 19 nt, Homo sapiens
  misc_RNA (1)...(19): siRNA sense strand
acucagaaacuccgacauu

SEQ ID NO: 1251012 - RNA, 19 nt, Homo sapiens
  misc_RNA (1)...(19): siRNA sense strand
acaccaaaguccuggagau

SEQ ID NO: 1251013 - RNA, 19 nt, Homo sapiens
  misc_RNA (1)...(19): siRNA sense strand
cucagaaacuccgacauug

SEQ ID NO: 1251014 - RNA, 19 nt, Homo sapiens
  misc_RNA (1)...(19): siRNA sense strand
ggaaaggagagacggacau

SEQ ID NO: 1251015 - RNA, 19 nt, Homo sapiens
  misc_RNA (1)...(19): siRNA sense strand
cagcaugcgagccgucauu

SEQ ID NO: 1251016 - RNA, 19 nt, Homo sapiens
  misc_RNA (1)...(19): siRNA sense strand
aaacuccgacauugaacuu

SEQ ID NO: 1251017 - RNA, 19 nt, Homo sapiens
  misc_RNA (1)...(19): siRNA sense strand
gcaugcgagccgucauuga

SEQ ID NO: 1251018 - RNA, 19 nt, Homo sapiens
  misc_RNA (1)...(19): siRNA sense strand
gccgaauucucuggugguu

SEQ ID NO: 1251019 - RNA, 19 nt, Homo sapiens
  misc_RNA (1)...(19): siRNA sense strand
acauugaacuucggaaagg

SEQ ID NO: 1251020 - RNA, 19 nt, Homo sapiens
  misc_RNA (1)...(19): siRNA sense strand
gacauugaacuucggaaag

SEQ ID NO: 1251021 - RNA, 19 nt, Homo sapiens
  misc_RNA (1)...(19): siRNA sense strand
gaaacuccgacauugaacu

SEQ ID NO: 1251022 - RNA, 19 nt, Homo sapiens
  misc_RNA (1)...(19): siRNA sense strand
gaccugugcaagccgaauu

SEQ ID NO: 1251023 - RNA, 19 nt, Homo sapiens
  misc_RNA (1)...(19): siRNA sense strand
gaaagcgaagccaguacca

SEQ ID NO: 1251024 - RNA, 19 nt, Homo sapiens
  misc_RNA (1)...(19): siRNA sense strand
cgaauucucuggugguuga

SEQ ID NO: 1251025 - RNA, 19 nt, Homo sapiens
  misc_RNA (1)...(19): siRNA sense strand
cguaugagcuucggauuga

SEQ ID NO: 1251026 - RNA, 19 nt, Homo sapiens
  misc_RNA (1)...(19): siRNA sense strand
gcagcugcauggcuacuug

SEQ ID NO: 1251027 - RNA, 19 nt, Homo sapiens
  misc_RNA (1)...(19): siRNA sense strand
cagaaacuccgacauugaa

SEQ ID NO: 1251028 - RNA, 19 nt, Homo sapiens
  misc_RNA (1)...(19): siRNA sense strand
gcagagcacggacagcuau

SEQ ID NO: 1251029 - RNA, 19 nt, Homo sapiens
  misc_RNA (1)...(19): siRNA sense strand
ucagaaacuccgacauuga

SEQ ID NO: 1251030 - RNA, 19 nt, Homo sapiens
  misc_RNA (1)...(19): siRNA sense strand
cgacauugaacuucggaaa

SEQ ID NO: 1251031 - RNA, 19 nt, Homo sapiens
  misc_RNA (1)...(19): siRNA sense strand
gaagccaguaccagcguuu

SEQ ID NO: 1251032 - RNA, 19 nt, Homo sapiens
  misc_RNA (1)...(19): siRNA sense strand
gaaaggagagacggacauc

SEQ ID NO: 1251033 - RNA, 19 nt, Homo sapiens
  misc_RNA (1)...(19): siRNA sense strand
gaacuucggaaaggagaga

SEQ ID NO: 1251034 - RNA, 19 nt, Homo sapiens
  misc_RNA (1)...(19): siRNA sense strand
agacggacaucgggaggaa

SEQ ID NO: 1251035 - RNA, 19 nt, Homo sapiens
  misc_RNA (1)...(19): siRNA sense strand
gcaggacuccaaggucauu

SEQ ID NO: 1251036 - RNA, 19 nt, Homo sapiens
  misc_RNA (1)...(19): siRNA sense strand
acaccaaaguccuggagau

SEQ ID NO: 1251037 - RNA, 19 nt, Homo sapiens
  misc_RNA (1)...(19): siRNA sense strand
agagaaagcgaagccagua

SEQ ID NO: 1251038 - RNA, 19 nt, Homo sapiens
  misc_RNA (1)...(19): siRNA sense strand
acucagaaacuccgacauu

SEQ ID NO: 1251039 - RNA, 19 nt, Homo sapiens
  misc_RNA (1)...(19): siRNA sense strand
gccggaauccugaaacuca

SEQ ID NO: 1251040 - RNA, 19 nt, Homo sapiens
  misc_RNA (1)...(19): siRNA sense strand
cucagaaacuccgacauug

SEQ ID NO: 1251041 - RNA, 19 nt, Homo sapiens
  misc_RNA (1)...(19): siRNA sense strand
ggaaaggagagacggacau

SEQ ID NO: 1251042 - RNA, 19 nt, Homo sapiens
  misc_RNA (1)...(19): siRNA sense strand
cagcaugcgagccgucauu

SEQ ID NO: 1251043 - RNA, 19 nt, Homo sapiens
  misc_RNA (1)...(19): siRNA sense strand
aaacuccgacauugaacuu

SEQ ID NO: 1251044 - RNA, 19 nt, Homo sapiens
  misc_RNA (1)...(19): siRNA sense strand
agaaugagccgcugaugcu

SEQ ID NO: 1251045 - RNA, 19 nt, Homo sapiens
  misc_RNA (1)...(19): siRNA sense strand
gccgaauucucuggugguu

SEQ ID NO: 1251046 - RNA, 19 nt, Homo sapiens
  misc_RNA (1)...(19): siRNA sense strand
acauugaacuucggaaagg

SEQ ID NO: 1251047 - RNA, 19 nt, Homo sapiens
  misc_RNA (1)...(19): siRNA sense strand
gacauugaacuucggaaag

SEQ ID NO: 1251048 - RNA, 19 nt, Homo sapiens
  misc_RNA (1)...(19): siRNA sense strand
gaaacuccgacauugaacu

SEQ ID NO: 1251049 - RNA, 19 nt, Homo sapiens
  misc_RNA (1)...(19): siRNA sense strand
gcaugcgagccgucauuga

SEQ ID NO: 1251050 - RNA, 19 nt, Homo sapiens
  misc_RNA (1)...(19): siRNA sense strand
gaccugugcaagccgaauu

SEQ ID NO: 1251051 - RNA, 19 nt, Homo sapiens
  misc_RNA (1)...(19): siRNA sense strand
gaaagcgaagccaguacca

SEQ ID NO: 1251052 - RNA, 19 nt, Homo sapiens
  misc_RNA (1)...(19): siRNA sense strand
ggagaaugagccgcugaug

SEQ ID NO: 1251053 - RNA, 19 nt, Homo sapiens
  misc_RNA (1)...(19): siRNA sense strand
cgaauucucuggugguuga

SEQ ID NO: 1251054 - RNA, 19 nt, Homo sapiens
  misc_RNA (1)...(19): siRNA sense strand
cguaugagcuucggauuga

SEQ ID NO: 1251055 - RNA, 19 nt, Homo sapiens
  misc_RNA (1)...(19): siRNA sense strand
gcagcugcauggcuacuug

SEQ ID NO: 1251056 - RNA, 19 nt, Homo sapiens
  misc_RNA (1)...(19): siRNA sense strand
cagaaacuccgacauugaa

SEQ ID NO: 1251057 - RNA, 19 nt, Homo sapiens
  misc_RNA (1)...(19): siRNA sense strand
gcagagcacggacagcuau

SEQ ID NO: 1251058 - RNA, 19 nt, Homo sapiens
  misc_RNA (1)...(19): siRNA sense strand
ucagaaacuccgacauuga

SEQ ID NO: 1251059 - RNA, 19 nt, Homo sapiens
  misc_RNA (1)...(19): siRNA sense strand
cgacauugaacuucggaaa

SEQ ID NO: 1251060 - RNA, 19 nt, Homo sapiens
  misc_RNA (1)...(19): siRNA sense strand
gaagccaguaccagcguuu

SEQ ID NO: 1251061 - RNA, 19 nt, Homo sapiens
  misc_RNA (1)...(19): siRNA sense strand
gaaaggagagacggacauc

SEQ ID NO: 1251062 - RNA, 19 nt, Homo sapiens
  misc_RNA (1)...(19): siRNA sense strand
gaacuucggaaaggagaga

SEQ ID NO: 1251063 - RNA, 19 nt, Homo sapiens
  misc_RNA (1)...(19): siRNA sense strand
agacggacaucgggaggaa

SEQ ID NO: 1251064 - RNA, 19 nt, Homo sapiens
  misc_RNA (1)...(19): siRNA sense strand
gcaggacuccaaggucauu

SEQ ID NO: 1251065 - RNA, 19 nt, Homo sapiens
  misc_RNA (1)...(19): siRNA sense strand
acaccaaaguccuggagau

SEQ ID NO: 1251066 - RNA, 19 nt, Homo sapiens
  misc_RNA (1)...(19): siRNA sense strand
agagaaagcgaagccagua

SEQ ID NO: 1251067 - RNA, 19 nt, Homo sapiens
  misc_RNA (1)...(19): siRNA sense strand
acucagaaacuccgacauu

SEQ ID NO: 1251068 - RNA, 19 nt, Homo sapiens
  misc_RNA (1)...(19): siRNA sense strand
gccggaauccugaaacuca

SEQ ID NO: 1251069 - RNA, 19 nt, Homo sapiens
  misc_RNA (1)...(19): siRNA sense strand
cucagaaacuccgacauug

SEQ ID NO: 1251070 - RNA, 19 nt, Homo sapiens
  misc_RNA (1)...(19): siRNA sense strand
ggaaaggagagacggacau

SEQ ID NO: 1251071 - RNA, 19 nt, Homo sapiens
  misc_RNA (1)...(19): siRNA sense strand
cagcaugcgagccgucauu

SEQ ID NO: 1251072 - RNA, 19 nt, Homo sapiens
  misc_RNA (1)...(19): siRNA sense strand
aaacuccgacauugaacuu

SEQ ID NO: 1251073 - RNA, 19 nt, Homo sapiens
  misc_RNA (1)...(19): siRNA sense strand
agaaugagccgcugaugcu

SEQ ID NO: 1251074 - RNA, 19 nt, Homo sapiens
  misc_RNA (1)...(19): siRNA sense strand
gccgaauucucuggugguu

SEQ ID NO: 1251075 - RNA, 19 nt, Homo sapiens
  misc_RNA (1)...(19): siRNA sense strand
acauugaacuucggaaagg

SEQ ID NO: 1251076 - RNA, 19 nt, Homo sapiens
  misc_RNA (1)...(19): siRNA sense strand
gacauugaacuucggaaag

SEQ ID NO: 1251077 - RNA, 19 nt, Homo sapiens
  misc_RNA (1)...(19): siRNA sense strand
gaaacuccgacauugaacu

SEQ ID NO: 1251078 - RNA, 19 nt, Homo sapiens
  misc_RNA (1)...(19): siRNA sense strand
gcaugcgagccgucauuga

SEQ ID NO: 1251079 - RNA, 19 nt, Homo sapiens
  misc_RNA (1)...(19): siRNA sense strand
gaccugugcaagccgaauu

SEQ ID NO: 1251080 - RNA, 19 nt, Homo sapiens
  misc_RNA (1)...(19): siRNA sense strand
gaaagcgaagccaguacca

SEQ ID NO: 1251081 - RNA, 19 nt, Homo sapiens
  misc_RNA (1)...(19): siRNA sense strand
ggagaaugagccgcugaug

SEQ ID NO: 1251082 - RNA, 19 nt, Homo sapiens
  misc_RNA (1)...(19): siRNA sense strand
guacagggcuccagaagua

SEQ ID NO: 1251083 - RNA, 19 nt, Homo sapiens
  misc_RNA (1)...(19): siRNA sense strand
gcucaaccaugccaaugua

SEQ ID NO: 1251084 - RNA, 19 nt, Homo sapiens
  misc_RNA (1)...(19): siRNA sense strand
aaacacggcuucuuucauc

SEQ ID NO: 1251085 - RNA, 19 nt, Homo sapiens
  misc_RNA (1)...(19): siRNA sense strand
ucacaaacacggcuucuuu

SEQ ID NO: 1251086 - RNA, 19 nt, Homo sapiens
  misc_RNA (1)...(19): siRNA sense strand
ccugaaggcuaucaacuuu

SEQ ID NO: 1251087 - RNA, 19 nt, Homo sapiens
  misc_RNA (1)...(19): siRNA sense strand
gaaguacuccugaggucua

SEQ ID NO: 1251088 - RNA, 19 nt, Homo sapiens
  misc_RNA (1)...(19): siRNA sense strand
ggaauaucauguaucagau

SEQ ID NO: 1251089 - RNA, 19 nt, Homo sapiens
  misc_RNA (1)...(19): siRNA sense strand
gaccagaacuugugaaaau

SEQ ID NO: 1251090 - RNA, 19 nt, Homo sapiens
  misc_RNA (1)...(19): siRNA sense strand
uacaaggacucgcauuuau

SEQ ID NO: 1251091 - RNA, 19 nt, Homo sapiens
  misc_RNA (1)...(19): siRNA sense strand
ggacucgcauuuauucaca

SEQ ID NO: 1251092 - RNA, 19 nt, Homo sapiens
  misc_RNA (1)...(19): siRNA sense strand
gggagcugaucgcuauuaa

SEQ ID NO: 1251093 - RNA, 19 nt, Homo sapiens
  misc_RNA (1)...(19): siRNA sense strand
gaauagauacacaacaauc

SEQ ID NO: 1251094 - RNA, 19 nt, Homo sapiens
  misc_RNA (1)...(19): siRNA sense strand
uuacaaggacucgcauuua

SEQ ID NO: 1251095 - RNA, 19 nt, Homo sapiens
  misc_RNA (1)...(19): siRNA sense strand
caaggacucgcauuuauuc

SEQ ID NO: 1251096 - RNA, 19 nt, Homo sapiens
  misc_RNA (1)...(19): siRNA sense strand
ccaauaacuuaaagaccuu

SEQ ID NO: 1251097 - RNA, 19 nt, Homo sapiens
  misc_RNA (1)...(19): siRNA sense strand
gccaauguagucaaauuaa

SEQ ID NO: 1251098 - RNA, 19 nt, Homo sapiens
  misc_RNA (1)...(19): siRNA sense strand
guguguacccaauaacuua

SEQ ID NO: 1251099 - RNA, 19 nt, Homo sapiens
  misc_RNA (1)...(19): siRNA sense strand
aaaccuccauauacagauu

SEQ ID NO: 1251100 - RNA, 19 nt, Homo sapiens
  misc_RNA (1)...(19): siRNA sense strand
cuucuuucaucgagacuua

SEQ ID NO: 1251101 - RNA, 19 nt, Homo sapiens
  misc_RNA (1)...(19): siRNA sense strand
gagcugaucgcuauuaaaa

SEQ ID NO: 1251102 - RNA, 19 nt, Homo sapiens
  misc_RNA (1)...(19): siRNA sense strand
gaucaaaaccuccauauac

SEQ ID NO: 1251103 - RNA, 19 nt, Homo sapiens
  misc_RNA (1)...(19): siRNA sense strand
gcuauaaggaauaucaugu

SEQ ID NO: 1251104 - RNA, 19 nt, Homo sapiens
  misc_RNA (1)...(19): siRNA sense strand
gggaaaaugaucaucuuua

SEQ ID NO: 1251105 - RNA, 19 nt, Homo sapiens
  misc_RNA (1)...(19): siRNA sense strand
ccaugccaauguagucaaa

SEQ ID NO: 1251106 - RNA, 19 nt, Homo sapiens
  misc_RNA (1)...(19): siRNA sense strand
aagaaacgaccaacagcua

SEQ ID NO: 1251107 - RNA, 19 nt, Homo sapiens
  misc_RNA (1)...(19): siRNA sense strand
caucauggcagaaguuuac

SEQ ID NO: 1251108 - RNA, 19 nt, Homo sapiens
  misc_RNA (1)...(19): siRNA sense strand
ugguuuggcccgagaaaua

SEQ ID NO: 1251109 - RNA, 19 nt, Homo sapiens
  misc_RNA (1)...(19): siRNA sense strand
uucgggagguuaagucuuu

SEQ ID NO: 1251110 - RNA, 19 nt, Homo sapiens
  misc_RNA (1)...(19): siRNA sense strand
aaucuuuaccagcucauua

SEQ ID NO: 1251111 - RNA, 19 nt, Homo sapiens
  misc_RNA (1)...(19): siRNA sense strand
acaaggacucgcauuuauu

SEQ ID NO: 1251112 - RNA, 19 nt, Homo sapiens
  misc_RNA (1)...(19): siRNA sense strand
aggaauaucauguaucaga

SEQ ID NO: 1251113 - RNA, 19 nt, Homo sapiens
  misc_RNA (1)...(19): siRNA sense strand
gaaacgaccaacagcuagu

SEQ ID NO: 1251114 - RNA, 19 nt, Homo sapiens
  misc_RNA (1)...(19): siRNA sense strand
uaaguuguuuccugagucu

SEQ ID NO: 1251115 - RNA, 19 nt, Homo sapiens
  misc_RNA (1)...(19): siRNA sense strand
ggagcugaucgcuauuaaa

SEQ ID NO: 1251116 - RNA, 19 nt, Homo sapiens
  misc_RNA (1)...(19): siRNA sense strand
ucgcauuuauucacaaaca

SEQ ID NO: 1251117 - RNA, 19 nt, Homo sapiens
  misc_RNA (1)...(19): siRNA sense strand
caguccagcuccugagaga

SEQ ID NO: 1251118 - RNA, 19 nt, Homo sapiens
  misc_RNA (1)...(19): siRNA sense strand
gaaguuaucagggaaaaug

SEQ ID NO: 1251119 - RNA, 19 nt, Homo sapiens
  misc_RNA (1)...(19): siRNA sense strand
gaagcucaaccaugccaau

SEQ ID NO: 1251120 - RNA, 19 nt, Homo sapiens
  misc_RNA (1)...(19): siRNA sense strand
gggaccagaacuugugaaa

SEQ ID NO: 1251121 - RNA, 19 nt, Homo sapiens
  misc_RNA (1)...(19): siRNA sense strand
gcaucauggcagaaguuua

SEQ ID NO: 1251122 - RNA, 19 nt, Homo sapiens
  misc_RNA (1)...(19): siRNA sense strand
gggaagaagcauugagucu

SEQ ID NO: 1251123 - RNA, 19 nt, Homo sapiens
  misc_RNA (1)...(19): siRNA sense strand
caaacacggcuucuuucau

SEQ ID NO: 1251124 - RNA, 19 nt, Homo sapiens
  misc_RNA (1)...(19): siRNA sense strand
aauaaguuguuuccugagu

SEQ ID NO: 1251125 - RNA, 19 nt, Homo sapiens
  misc_RNA (1)...(19): siRNA sense strand
cugagaaccuccucugcau

SEQ ID NO: 1251126 - RNA, 19 nt, Homo sapiens
  misc_RNA (1)...(19): siRNA sense strand
ugccaauguagucaaauua

SEQ ID NO: 1251127 - RNA, 19 nt, Homo sapiens
  misc_RNA (1)...(19): siRNA sense strand
uaccagcucauuaaagaga

SEQ ID NO: 1251128 - RNA, 19 nt, Homo sapiens
  misc_RNA (1)...(19): siRNA sense strand
caaccaugccaauguaguc

SEQ ID NO: 1251129 - RNA, 19 nt, Homo sapiens
  misc_RNA (1)...(19): siRNA sense strand
ccugaggucuaccaacuac

SEQ ID NO: 1251130 - RNA, 19 nt, Homo sapiens
  misc_RNA (1)...(19): siRNA sense strand
gaaaauugcagacuuuggu

SEQ ID NO: 1251131 - RNA, 19 nt, Homo sapiens
  misc_RNA (1)...(19): siRNA sense strand
ugagucugcuauaaggaau

SEQ ID NO: 1251132 - RNA, 19 nt, Homo sapiens
  misc_RNA (1)...(19): siRNA sense strand
augccaauguagucaaauu

SEQ ID NO: 1251133 - RNA, 19 nt, Homo sapiens
  misc_RNA (1)...(19): siRNA sense strand
acaaacacggcuucuuuca

SEQ ID NO: 1251134 - RNA, 19 nt, Homo sapiens
  misc_RNA (1)...(19): siRNA sense strand
ucgaguacaugaaggaaaa

SEQ ID NO: 1251135 - RNA, 19 nt, Homo sapiens
  misc_RNA (1)...(19): siRNA sense strand
cccgagaaauacgaucaaa

SEQ ID NO: 1251136 - RNA, 19 nt, Homo sapiens
  misc_RNA (1)...(19): siRNA sense strand
ugugaaaauugcagacuuu

SEQ ID NO: 1251137 - RNA, 19 nt, Homo sapiens
  misc_RNA (1)...(19): siRNA sense strand
aaagaaguuaucagggaaa

SEQ ID NO: 1251138 - RNA, 19 nt, Homo sapiens
  misc_RNA (1)...(19): siRNA sense strand
ccagcucauuaaagagaga

SEQ ID NO: 1251139 - RNA, 19 nt, Homo sapiens
  misc_RNA (1)...(19): siRNA sense strand
ggaggaaugcaugaaccuu

SEQ ID NO: 1251140 - RNA, 19 nt, Homo sapiens
  misc_RNA (1)...(19): siRNA sense strand
uuuccugagucugcuauaa

SEQ ID NO: 1251141 - RNA, 19 nt, Homo sapiens
  misc_RNA (1)...(19): siRNA sense strand
gcaugggaccagaacuugu

SEQ ID NO: 1251142 - RNA, 19 nt, Homo sapiens
  misc_RNA (1)...(19): siRNA sense strand
acucgcauuuauucacaaa

SEQ ID NO: 1251143 - RNA, 19 nt, Homo sapiens
  misc_RNA (1)...(19): siRNA sense strand
cacaaacacggcuucuuuc

SEQ ID NO: 1251144 - RNA, 19 nt, Homo sapiens
  misc_RNA (1)...(19): siRNA sense strand
ucccaaugcuagcagugaa

SEQ ID NO: 1251145 - RNA, 19 nt, Homo sapiens
  misc_RNA (1)...(19): siRNA sense strand
aagacugacuggccugaag

SEQ ID NO: 1251146 - RNA, 19 nt, Homo sapiens
  misc_RNA (1)...(19): siRNA sense strand
caaaaccuccauauacaga

SEQ ID NO: 1251147 - RNA, 19 nt, Homo sapiens
  misc_RNA (1)...(19): siRNA sense strand
aaauugcagacuuugguuu

SEQ ID NO: 1251148 - RNA, 19 nt, Homo sapiens
  misc_RNA (1)...(19): siRNA sense strand
caugggaccagaacuugug

SEQ ID NO: 1251149 - RNA, 19 nt, Homo sapiens
  misc_RNA (1)...(19): siRNA sense strand
agaccuugauucccaaugc

SEQ ID NO: 1251150 - RNA, 19 nt, Homo sapiens
  misc_RNA (1)...(19): siRNA sense strand
guacagggcuccagaagua

SEQ ID NO: 1251151 - RNA, 19 nt, Homo sapiens
  misc_RNA (1)...(19): siRNA sense strand
gcucaaccaugccaaugua

SEQ ID NO: 1251152 - RNA, 19 nt, Homo sapiens
  misc_RNA (1)...(19): siRNA sense strand
aaacacggcuucuuucauc

SEQ ID NO: 1251153 - RNA, 19 nt, Homo sapiens
  misc_RNA (1)...(19): siRNA sense strand
ucacaaacacggcuucuuu

SEQ ID NO: 1251154 - RNA, 19 nt, Homo sapiens
  misc_RNA (1)...(19): siRNA sense strand
ccugaaggcuaucaacuuu

SEQ ID NO: 1251155 - RNA, 19 nt, Homo sapiens
  misc_RNA (1)...(19): siRNA sense strand
gaaguacuccugaggucua

SEQ ID NO: 1251156 - RNA, 19 nt, Homo sapiens
  misc_RNA (1)...(19): siRNA sense strand
ggaauaucauguaucagau

SEQ ID NO: 1251157 - RNA, 19 nt, Homo sapiens
  misc_RNA (1)...(19): siRNA sense strand
gaccagaacuugugaaaau

SEQ ID NO: 1251158 - RNA, 19 nt, Homo sapiens
  misc_RNA (1)...(19): siRNA sense strand
uacaaggacucgcauuuau

SEQ ID NO: 1251159 - RNA, 19 nt, Homo sapiens
  misc_RNA (1)...(19): siRNA sense strand
ggacucgcauuuauucaca

SEQ ID NO: 1251160 - RNA, 19 nt, Homo sapiens
  misc_RNA (1)...(19): siRNA sense strand
gggagcugaucgcuauuaa

SEQ ID NO: 1251161 - RNA, 19 nt, Homo sapiens
  misc_RNA (1)...(19): siRNA sense strand
gaauagauacacaacaauc

SEQ ID NO: 1251162 - RNA, 19 nt, Homo sapiens
  misc_RNA (1)...(19): siRNA sense strand
uuacaaggacucgcauuua

SEQ ID NO: 1251163 - RNA, 19 nt, Homo sapiens
  misc_RNA (1)...(19): siRNA sense strand
caaggacucgcauuuauuc

SEQ ID NO: 1251164 - RNA, 19 nt, Homo sapiens
  misc_RNA (1)...(19): siRNA sense strand
ccaauaacuuaaagaccuu

SEQ ID NO: 1251165 - RNA, 19 nt, Homo sapiens
  misc_RNA (1)...(19): siRNA sense strand
gccaauguagucaaauuaa

SEQ ID NO: 1251166 - RNA, 19 nt, Homo sapiens
  misc_RNA (1)...(19): siRNA sense strand
guguguacccaauaacuua

SEQ ID NO: 1251167 - RNA, 19 nt, Homo sapiens
  misc_RNA (1)...(19): siRNA sense strand
aaaccuccauauacagauu

SEQ ID NO: 1251168 - RNA, 19 nt, Homo sapiens
  misc_RNA (1)...(19): siRNA sense strand
cuucuuucaucgagacuua

SEQ ID NO: 1251169 - RNA, 19 nt, Homo sapiens
  misc_RNA (1)...(19): siRNA sense strand
gagcugaucgcuauuaaaa

SEQ ID NO: 1251170 - RNA, 19 nt, Homo sapiens
  misc_RNA (1)...(19): siRNA sense strand
gaucaaaaccuccauauac

SEQ ID NO: 1251171 - RNA, 19 nt, Homo sapiens
  misc_RNA (1)...(19): siRNA sense strand
gcuauaaggaauaucaugu

SEQ ID NO: 1251172 - RNA, 19 nt, Homo sapiens
  misc_RNA (1)...(19): siRNA sense strand
gggaaaaugaucaucuuua

SEQ ID NO: 1251173 - RNA, 19 nt, Homo sapiens
  misc_RNA (1)...(19): siRNA sense strand
ccaugccaauguagucaaa

SEQ ID NO: 1251174 - RNA, 19 nt, Homo sapiens
  misc_RNA (1)...(19): siRNA sense strand
aagaaacgaccaacagcua

SEQ ID NO: 1251175 - RNA, 19 nt, Homo sapiens
  misc_RNA (1)...(19): siRNA sense strand
caucauggcagaaguuuac

SEQ ID NO: 1251176 - RNA, 19 nt, Homo sapiens
  misc_RNA (1)...(19): siRNA sense strand
ugguuuggcccgagaaaua

SEQ ID NO: 1251177 - RNA, 19 nt, Homo sapiens
  misc_RNA (1)...(19): siRNA sense strand
uucgggagguuaagucuuu

SEQ ID NO: 1251178 - RNA, 19 nt, Homo sapiens
  misc_RNA (1)...(19): siRNA sense strand
aaucuuuaccagcucauua

SEQ ID NO: 1251179 - RNA, 19 nt, Homo sapiens
  misc_RNA (1)...(19): siRNA sense strand
acaaggacucgcauuuauu

SEQ ID NO: 1251180 - RNA, 19 nt, Homo sapiens
  misc_RNA (1)...(19): siRNA sense strand
aggaauaucauguaucaga

SEQ ID NO: 1251181 - RNA, 19 nt, Homo sapiens
  misc_RNA (1)...(19): siRNA sense strand
gaaacgaccaacagcuagu

SEQ ID NO: 1251182 - RNA, 19 nt, Homo sapiens
  misc_RNA (1)...(19): siRNA sense strand
uaaguuguuuccugagucu

SEQ ID NO: 1251183 - RNA, 19 nt, Homo sapiens
  misc_RNA (1)...(19): siRNA sense strand
ggagcugaucgcuauuaaa

SEQ ID NO: 1251184 - RNA, 19 nt, Homo sapiens
  misc_RNA (1)...(19): siRNA sense strand
ucgcauuuauucacaaaca

SEQ ID NO: 1251185 - RNA, 19 nt, Homo sapiens
  misc_RNA (1)...(19): siRNA sense strand
caguccagcuccugagaga

SEQ ID NO: 1251186 - RNA, 19 nt, Homo sapiens
  misc_RNA (1)...(19): siRNA sense strand
gaaguuaucagggaaaaug

SEQ ID NO: 1251187 - RNA, 19 nt, Homo sapiens
  misc_RNA (1)...(19): siRNA sense strand
gaagcucaaccaugccaau

SEQ ID NO: 1251188 - RNA, 19 nt, Homo sapiens
  misc_RNA (1)...(19): siRNA sense strand
gggaccagaacuugugaaa

SEQ ID NO: 1251189 - RNA, 19 nt, Homo sapiens
  misc_RNA (1)...(19): siRNA sense strand
gcaucauggcagaaguuua

SEQ ID NO: 1251190 - RNA, 19 nt, Homo sapiens
  misc_RNA (1)...(19): siRNA sense strand
gggaagaagcauugagucu

SEQ ID NO: 1251191 - RNA, 19 nt, Homo sapiens
  misc_RNA (1)...(19): siRNA sense strand
caaacacggcuucuuucau

SEQ ID NO: 1251192 - RNA, 19 nt, Homo sapiens
  misc_RNA (1)...(19): siRNA sense strand
aauaaguuguuuccugagu

SEQ ID NO: 1251193 - RNA, 19 nt, Homo sapiens
  misc_RNA (1)...(19): siRNA sense strand
cugagaaccuccucugcau

SEQ ID NO: 1251194 - RNA, 19 nt, Homo sapiens
  misc_RNA (1)...(19): siRNA sense strand
ugccaauguagucaaauua

SEQ ID NO: 1251195 - RNA, 19 nt, Homo sapiens
  misc_RNA (1)...(19): siRNA sense strand
uaccagcucauuaaagaga

SEQ ID NO: 1251196 - RNA, 19 nt, Homo sapiens
  misc_RNA (1)...(19): siRNA sense strand
caaccaugccaauguaguc

SEQ ID NO: 1251197 - RNA, 19 nt, Homo sapiens
  misc_RNA (1)...(19): siRNA sense strand
ccugaggucuaccaacuac

SEQ ID NO: 1251198 - RNA, 19 nt, Homo sapiens
  misc_RNA (1)...(19): siRNA sense strand
gaaaauugcagacuuuggu

SEQ ID NO: 1251199 - RNA, 19 nt, Homo sapiens
  misc_RNA (1)...(19): siRNA sense strand
ugagucugcuauaaggaau

SEQ ID NO: 1251200 - RNA, 19 nt, Homo sapiens
  misc_RNA (1)...(19): siRNA sense strand
augccaauguagucaaauu

SEQ ID NO: 1251201 - RNA, 19 nt, Homo sapiens
  misc_RNA (1)...(19): siRNA sense strand
acaaacacggcuucuuuca

SEQ ID NO: 1251202 - RNA, 19 nt, Homo sapiens
  misc_RNA (1)...(19): siRNA sense strand
ucgaguacaugaaggaaaa

SEQ ID NO: 1251203 - RNA, 19 nt, Homo sapiens
  misc_RNA (1)...(19): siRNA sense strand
cccgagaaauacgaucaaa

SEQ ID NO: 1251204 - RNA, 19 nt, Homo sapiens
  misc_RNA (1)...(19): siRNA sense strand
ugugaaaauugcagacuuu

SEQ ID NO: 1251205 - RNA, 19 nt, Homo sapiens
  misc_RNA (1)...(19): siRNA sense strand
aaagaaguuaucagggaaa

SEQ ID NO: 1251206 - RNA, 19 nt, Homo sapiens
  misc_RNA (1)...(19): siRNA sense strand
ccagcucauuaaagagaga

SEQ ID NO: 1251207 - RNA, 19 nt, Homo sapiens
  misc_RNA (1)...(19): siRNA sense strand
ggaggaaugcaugaaccuu

SEQ ID NO: 1251208 - RNA, 19 nt, Homo sapiens
  misc_RNA (1)...(19): siRNA sense strand
uuuccugagucugcuauaa

SEQ ID NO: 1251209 - RNA, 19 nt, Homo sapiens
  misc_RNA (1)...(19): siRNA sense strand
gcaugggaccagaacuugu

SEQ ID NO: 1251210 - RNA, 19 nt, Homo sapiens
  misc_RNA (1)...(19): siRNA sense strand
acucgcauuuauucacaaa

SEQ ID NO: 1251211 - RNA, 19 nt, Homo sapiens
  misc_RNA (1)...(19): siRNA sense strand
cacaaacacggcuucuuuc

SEQ ID NO: 1251212 - RNA, 19 nt, Homo sapiens
  misc_RNA (1)...(19): siRNA sense strand
ucccaaugcuagcagugaa

SEQ ID NO: 1251213 - RNA, 19 nt, Homo sapiens
  misc_RNA (1)...(19): siRNA sense strand
aagacugacuggccugaag

SEQ ID NO: 1251214 - RNA, 19 nt, Homo sapiens
  misc_RNA (1)...(19): siRNA sense strand
caaaaccuccauauacaga

SEQ ID NO: 1251215 - RNA, 19 nt, Homo sapiens
  misc_RNA (1)...(19): siRNA sense strand
aaauugcagacuuugguuu

SEQ ID NO: 1251216 - RNA, 19 nt, Homo sapiens
  misc_RNA (1)...(19): siRNA sense strand
caugggaccagaacuugug

SEQ ID NO: 1251217 - RNA, 19 nt, Homo sapiens
  misc_RNA (1)...(19): siRNA sense strand
agaccuugauucccaaugc

SEQ ID NO: 1251218 - RNA, 19 nt, Homo sapiens
  misc_RNA (1)...(19): siRNA sense strand
guacagggcuccagaagua

SEQ ID NO: 1251219 - RNA, 19 nt, Homo sapiens
  misc_RNA (1)...(19): siRNA sense strand
gcucaaccaugccaaugua

SEQ ID NO: 1251220 - RNA, 19 nt, Homo sapiens
  misc_RNA (1)...(19): siRNA sense strand
aaacacggcuucuuucauc

SEQ ID NO: 1251221 - RNA, 19 nt, Homo sapiens
  misc_RNA (1)...(19): siRNA sense strand
ucacaaacacggcuucuuu

SEQ ID NO: 1251222 - RNA, 19 nt, Homo sapiens
  misc_RNA (1)...(19): siRNA sense strand
ccugaaggcuaucaacuuu

SEQ ID NO: 1251223 - RNA, 19 nt, Homo sapiens
  misc_RNA (1)...(19): siRNA sense strand
gaaguacuccugaggucua

SEQ ID NO: 1251224 - RNA, 19 nt, Homo sapiens
  misc_RNA (1)...(19): siRNA sense strand
ggaauaucauguaucagau

SEQ ID NO: 1251225 - RNA, 19 nt, Homo sapiens
  misc_RNA (1)...(19): siRNA sense strand
gaccagaacuugugaaaau

SEQ ID NO: 1251226 - RNA, 19 nt, Homo sapiens
  misc_RNA (1)...(19): siRNA sense strand
uacaaggacucgcauuuau

SEQ ID NO: 1251227 - RNA, 19 nt, Homo sapiens
  misc_RNA (1)...(19): siRNA sense strand
ggacucgcauuuauucaca

SEQ ID NO: 1251228 - RNA, 19 nt, Homo sapiens
  misc_RNA (1)...(19): siRNA sense strand
gggagcugaucgcuauuaa

SEQ ID NO: 1251229 - RNA, 19 nt, Homo sapiens
  misc_RNA (1)...(19): siRNA sense strand
gaauagauacacaacaauc

SEQ ID NO: 1251230 - RNA, 19 nt, Homo sapiens
  misc_RNA (1)...(19): siRNA sense strand
uuacaaggacucgcauuua

SEQ ID NO: 1251231 - RNA, 19 nt, Homo sapiens
  misc_RNA (1)...(19): siRNA sense strand
caaggacucgcauuuauuc

SEQ ID NO: 1251232 - RNA, 19 nt, Homo sapiens
  misc_RNA (1)...(19): siRNA sense strand
ccaauaacuuaaagaccuu

SEQ ID NO: 1251233 - RNA, 19 nt, Homo sapiens
  misc_RNA (1)...(19): siRNA sense strand
gccaauguagucaaauuaa

SEQ ID NO: 1251234 - RNA, 19 nt, Homo sapiens
  misc_RNA (1)...(19): siRNA sense strand
guguguacccaauaacuua

SEQ ID NO: 1251235 - RNA, 19 nt, Homo sapiens
  misc_RNA (1)...(19): siRNA sense strand
aaaccuccauauacagauu

SEQ ID NO: 1251236 - RNA, 19 nt, Homo sapiens
  misc_RNA (1)...(19): siRNA sense strand
cuucuuucaucgagacuua

SEQ ID NO: 1251237 - RNA, 19 nt, Homo sapiens
  misc_RNA (1)...(19): siRNA sense strand
gagcugaucgcuauuaaaa

SEQ ID NO: 1251238 - RNA, 19 nt, Homo sapiens
  misc_RNA (1)...(19): siRNA sense strand
gaucaaaaccuccauauac

SEQ ID NO: 1251239 - RNA, 19 nt, Homo sapiens
  misc_RNA (1)...(19): siRNA sense strand
gcuauaaggaauaucaugu

SEQ ID NO: 1251240 - RNA, 19 nt, Homo sapiens
  misc_RNA (1)...(19): siRNA sense strand
gggaaaaugaucaucuuua

SEQ ID NO: 1251241 - RNA, 19 nt, Homo sapiens
  misc_RNA (1)...(19): siRNA sense strand
ccaugccaauguagucaaa

SEQ ID NO: 1251242 - RNA, 19 nt, Homo sapiens
  misc_RNA (1)...(19): siRNA sense strand
aagaaacgaccaacagcua

SEQ ID NO: 1251243 - RNA, 19 nt, Homo sapiens
  misc_RNA (1)...(19): siRNA sense strand
caucauggcagaaguuuac

SEQ ID NO: 1251244 - RNA, 19 nt, Homo sapiens
  misc_RNA (1)...(19): siRNA sense strand
ugguuuggcccgagaaaua

SEQ ID NO: 1251245 - RNA, 19 nt, Homo sapiens
  misc_RNA (1)...(19): siRNA sense strand
uucgggagguuaagucuuu

SEQ ID NO: 1251246 - RNA, 19 nt, Homo sapiens
  misc_RNA (1)...(19): siRNA sense strand
aaucuuuaccagcucauua

SEQ ID NO: 1251247 - RNA, 19 nt, Homo sapiens
  misc_RNA (1)...(19): siRNA sense strand
acaaggacucgcauuuauu

SEQ ID NO: 1251248 - RNA, 19 nt, Homo sapiens
  misc_RNA (1)...(19): siRNA sense strand
aggaauaucauguaucaga

SEQ ID NO: 1251249 - RNA, 19 nt, Homo sapiens
  misc_RNA (1)...(19): siRNA sense strand
gaaacgaccaacagcuagu

SEQ ID NO: 1251250 - RNA, 19 nt, Homo sapiens
  misc_RNA (1)...(19): siRNA sense strand
uaaguuguuuccugagucu

SEQ ID NO: 1251251 - RNA, 19 nt, Homo sapiens
  misc_RNA (1)...(19): siRNA sense strand
ggagcugaucgcuauuaaa

SEQ ID NO: 1251252 - RNA, 19 nt, Homo sapiens
  misc_RNA (1)...(19): siRNA sense strand
ucgcauuuauucacaaaca

SEQ ID NO: 1251253 - RNA, 19 nt, Homo sapiens
  misc_RNA (1)...(19): siRNA sense strand
caguccagcuccugagaga

SEQ ID NO: 1251254 - RNA, 19 nt, Homo sapiens
  misc_RNA (1)...(19): siRNA sense strand
gaaguuaucagggaaaaug

SEQ ID NO: 1251255 - RNA, 19 nt, Homo sapiens
  misc_RNA (1)...(19): siRNA sense strand
gaagcucaaccaugccaau

SEQ ID NO: 1251256 - RNA, 19 nt, Homo sapiens
  misc_RNA (1)...(19): siRNA sense strand
gggaccagaacuugugaaa

SEQ ID NO: 1251257 - RNA, 19 nt, Homo sapiens
  misc_RNA (1)...(19): siRNA sense strand
gcaucauggcagaaguuua

SEQ ID NO: 1251258 - RNA, 19 nt, Homo sapiens
  misc_RNA (1)...(19): siRNA sense strand
gggaagaagcauugagucu

SEQ ID NO: 1251259 - RNA, 19 nt, Homo sapiens
  misc_RNA (1)...(19): siRNA sense strand
caaacacggcuucuuucau

SEQ ID NO: 1251260 - RNA, 19 nt, Homo sapiens
  misc_RNA (1)...(19): siRNA sense strand
aauaaguuguuuccugagu

SEQ ID NO: 1251261 - RNA, 19 nt, Homo sapiens
  misc_RNA (1)...(19): siRNA sense strand
cugagaaccuccucugcau

SEQ ID NO: 1251262 - RNA, 19 nt, Homo sapiens
  misc_RNA (1)...(19): siRNA sense strand
ugccaauguagucaaauua

SEQ ID NO: 1251263 - RNA, 19 nt, Homo sapiens
  misc_RNA (1)...(19): siRNA sense strand
uaccagcucauuaaagaga

SEQ ID NO: 1251264 - RNA, 19 nt, Homo sapiens
  misc_RNA (1)...(19): siRNA sense strand
caaccaugccaauguaguc

SEQ ID NO: 1251265 - RNA, 19 nt, Homo sapiens
  misc_RNA (1)...(19): siRNA sense strand
ccugaggucuaccaacuac

SEQ ID NO: 1251266 - RNA, 19 nt, Homo sapiens
  misc_RNA (1)...(19): siRNA sense strand
gaaaauugcagacuuuggu

SEQ ID NO: 1251267 - RNA, 19 nt, Homo sapiens
  misc_RNA (1)...(19): siRNA sense strand
ugagucugcuauaaggaau

SEQ ID NO: 1251268 - RNA, 19 nt, Homo sapiens
  misc_RNA (1)...(19): siRNA sense strand
augccaauguagucaaauu

SEQ ID NO: 1251269 - RNA, 19 nt, Homo sapiens
  misc_RNA (1)...(19): siRNA sense strand
acaaacacggcuucuuuca

SEQ ID NO: 1251270 - RNA, 19 nt, Homo sapiens
  misc_RNA (1)...(19): siRNA sense strand
ucgaguacaugaaggaaaa

SEQ ID NO: 1251271 - RNA, 19 nt, Homo sapiens
  misc_RNA (1)...(19): siRNA sense strand
cccgagaaauacgaucaaa

SEQ ID NO: 1251272 - RNA, 19 nt, Homo sapiens
  misc_RNA (1)...(19): siRNA sense strand
ugugaaaauugcagacuuu

SEQ ID NO: 1251273 - RNA, 19 nt, Homo sapiens
  misc_RNA (1)...(19): siRNA sense strand
aaagaaguuaucagggaaa

SEQ ID NO: 1251274 - RNA, 19 nt, Homo sapiens
  misc_RNA (1)...(19): siRNA sense strand
ccagcucauuaaagagaga

SEQ ID NO: 1251275 - RNA, 19 nt, Homo sapiens
  misc_RNA (1)...(19): siRNA sense strand
ggaggaaugcaugaaccuu

SEQ ID NO: 1251276 - RNA, 19 nt, Homo sapiens
  misc_RNA (1)...(19): siRNA sense strand
uuuccugagucugcuauaa

SEQ ID NO: 1251277 - RNA, 19 nt, Homo sapiens
  misc_RNA (1)...(19): siRNA sense strand
gcaugggaccagaacuugu

SEQ ID NO: 1251278 - RNA, 19 nt, Homo sapiens
  misc_RNA (1)...(19): siRNA sense strand
acucgcauuuauucacaaa

SEQ ID NO: 1251279 - RNA, 19 nt, Homo sapiens
  misc_RNA (1)...(19): siRNA sense strand
cacaaacacggcuucuuuc

SEQ ID NO: 1251280 - RNA, 19 nt, Homo sapiens
  misc_RNA (1)...(19): siRNA sense strand
ucccaaugcuagcagugaa

SEQ ID NO: 1251281 - RNA, 19 nt, Homo sapiens
  misc_RNA (1)...(19): siRNA sense strand
aagacugacuggccugaag

SEQ ID NO: 1251282 - RNA, 19 nt, Homo sapiens
  misc_RNA (1)...(19): siRNA sense strand
caaaaccuccauauacaga

SEQ ID NO: 1251283 - RNA, 19 nt, Homo sapiens
  misc_RNA (1)...(19): siRNA sense strand
aaauugcagacuuugguuu

SEQ ID NO: 1251284 - RNA, 19 nt, Homo sapiens
  misc_RNA (1)...(19): siRNA sense strand
caugggaccagaacuugug

SEQ ID NO: 1251285 - RNA, 19 nt, Homo sapiens
  misc_RNA (1)...(19): siRNA sense strand
agaccuugauucccaaugc

SEQ ID NO: 1251286 - RNA, 19 nt, Homo sapiens
  misc_RNA (1)...(19): siRNA sense strand
caccagaccucagcccuuu

SEQ ID NO: 1251287 - RNA, 19 nt, Homo sapiens
  misc_RNA (1)...(19): siRNA sense strand
uaagcaguguccagcauug

SEQ ID NO: 1251288 - RNA, 19 nt, Homo sapiens
  misc_RNA (1)...(19): siRNA sense strand
gcuaagcaguguccagcau

SEQ ID NO: 1251289 - RNA, 19 nt, Homo sapiens
  misc_RNA (1)...(19): siRNA sense strand
ucaguuagaagcacaaagg

SEQ ID NO: 1251290 - RNA, 19 nt, Homo sapiens
  misc_RNA (1)...(19): siRNA sense strand
caccagaccucagcccuuu

SEQ ID NO: 1251291 - RNA, 19 nt, Homo sapiens
  misc_RNA (1)...(19): siRNA sense strand
uaagcaguguccagcauug

SEQ ID NO: 1251292 - RNA, 19 nt, Homo sapiens
  misc_RNA (1)...(19): siRNA sense strand
guccacagcagcaggguua

SEQ ID NO: 1251293 - RNA, 19 nt, Homo sapiens
  misc_RNA (1)...(19): siRNA sense strand
gcuaagcaguguccagcau

SEQ ID NO: 1251294 - RNA, 19 nt, Homo sapiens
  misc_RNA (1)...(19): siRNA sense strand
ucaguuagaagcacaaagg

SEQ ID NO: 1251295 - RNA, 19 nt, Homo sapiens
  misc_RNA (1)...(19): siRNA sense strand
gcagcaggguuaagacuca

SEQ ID NO: 1251296 - RNA, 19 nt, Homo sapiens
  misc_RNA (1)...(19): siRNA sense strand
caccagaccucagcccuuu

SEQ ID NO: 1251297 - RNA, 19 nt, Homo sapiens
  misc_RNA (1)...(19): siRNA sense strand
uaagcaguguccagcauug

SEQ ID NO: 1251298 - RNA, 19 nt, Homo sapiens
  misc_RNA (1)...(19): siRNA sense strand
guccacagcagcaggguua

SEQ ID NO: 1251299 - RNA, 19 nt, Homo sapiens
  misc_RNA (1)...(19): siRNA sense strand
gcuaagcaguguccagcau

SEQ ID NO: 1251300 - RNA, 19 nt, Homo sapiens
  misc_RNA (1)...(19): siRNA sense strand
ucaguuagaagcacaaagg

SEQ ID NO: 1251301 - RNA, 19 nt, Homo sapiens
  misc_RNA (1)...(19): siRNA sense strand
gcagcaggguuaagacuca

SEQ ID NO: 1251302 - RNA, 19 nt, Homo sapiens
  misc_RNA (1)...(19): siRNA sense strand
caccagaccucagcccuuu

SEQ ID NO: 1251303 - RNA, 19 nt, Homo sapiens
  misc_RNA (1)...(19): siRNA sense strand
uaagcaguguccagcauug

SEQ ID NO: 1251304 - RNA, 19 nt, Homo sapiens
  misc_RNA (1)...(19): siRNA sense strand
guccacagcagcaggguua

SEQ ID NO: 1251305 - RNA, 19 nt, Homo sapiens
  misc_RNA (1)...(19): siRNA sense strand
gcuaagcaguguccagcau

SEQ ID NO: 1251306 - RNA, 19 nt, Homo sapiens
  misc_RNA (1)...(19): siRNA sense strand
ucaguuagaagcacaaagg

SEQ ID NO: 1251307 - RNA, 19 nt, Homo sapiens
  misc_RNA (1)...(19): siRNA sense strand
caccagaccucagcccuuu

SEQ ID NO: 1251308 - RNA, 19 nt, Homo sapiens
  misc_RNA (1)...(19): siRNA sense strand
uaagcaguguccagcauug

SEQ ID NO: 1251309 - RNA, 19 nt, Homo sapiens
  misc_RNA (1)...(19): siRNA sense strand
gcuaagcaguguccagcau

SEQ ID NO: 1251310 - RNA, 19 nt, Homo sapiens
  misc_RNA (1)...(19): siRNA sense strand
ucaguuagaagcacaaagg

SEQ ID NO: 1251311 - RNA, 19 nt, Homo sapiens
  misc_RNA (1)...(19): siRNA sense strand
caccagaccucagcccuuu

SEQ ID NO: 1251312 - RNA, 19 nt, Homo sapiens
  misc_RNA (1)...(19): siRNA sense strand
uaagcaguguccagcauug

SEQ ID NO: 1251313 - RNA, 19 nt, Homo sapiens
  misc_RNA (1)...(19): siRNA sense strand
guccacagcagcaggguua

SEQ ID NO: 1251314 - RNA, 19 nt, Homo sapiens
  misc_RNA (1)...(19): siRNA sense strand
gcuaagcaguguccagcau

SEQ ID NO: 1251315 - RNA, 19 nt, Homo sapiens
  misc_RNA (1)...(19): siRNA sense strand
ucaguuagaagcacaaagg

SEQ ID NO: 1251316 - RNA, 19 nt, Homo sapiens
  misc_RNA (1)...(19): siRNA sense strand
gcagcaggguuaagacuca

SEQ ID NO: 1251317 - RNA, 19 nt, Homo sapiens
  misc_RNA (1)...(19): siRNA sense strand
caccagaccucagcccuuu

SEQ ID NO: 1251318 - RNA, 19 nt, Homo sapiens
  misc_RNA (1)...(19): siRNA sense strand
uaagcaguguccagcauug

SEQ ID NO: 1251319 - RNA, 19 nt, Homo sapiens
  misc_RNA (1)...(19): siRNA sense strand
guccacagcagcaggguua

SEQ ID NO: 1251320 - RNA, 19 nt, Homo sapiens
  misc_RNA (1)...(19): siRNA sense strand
gcuaagcaguguccagcau

SEQ ID NO: 1251321 - RNA, 19 nt, Homo sapiens
  misc_RNA (1)...(19): siRNA sense strand
ucaguuagaagcacaaagg

SEQ ID NO: 1251322 - RNA, 19 nt, Homo sapiens
  misc_RNA (1)...(19): siRNA sense strand
gcagcaggguuaagacuca

SEQ ID NO: 1251323 - RNA, 19 nt, Homo sapiens
  misc_RNA (1)...(19): siRNA sense strand
caccagaccucagcccuuu

SEQ ID NO: 1251324 - RNA, 19 nt, Homo sapiens
  misc_RNA (1)...(19): siRNA sense strand
uaagcaguguccagcauug

SEQ ID NO: 1251325 - RNA, 19 nt, Homo sapiens
  misc_RNA (1)...(19): siRNA sense strand
guccacagcagcaggguua

SEQ ID NO: 1251326 - RNA, 19 nt, Homo sapiens
  misc_RNA (1)...(19): siRNA sense strand
gcuaagcaguguccagcau

SEQ ID NO: 1251327 - RNA, 19 nt, Homo sapiens
  misc_RNA (1)...(19): siRNA sense strand
ucaguuagaagcacaaagg

SEQ ID NO: 1251328 - RNA, 19 nt, Homo sapiens
  misc_RNA (1)...(19): siRNA sense strand
caccagaccucagcccuuu

SEQ ID NO: 1251329 - RNA, 19 nt, Homo sapiens
  misc_RNA (1)...(19): siRNA sense strand
uaagcaguguccagcauug

SEQ ID NO: 1251330 - RNA, 19 nt, Homo sapiens
  misc_RNA (1)...(19): siRNA sense strand
gcuaagcaguguccagcau

SEQ ID NO: 1251331 - RNA, 19 nt, Homo sapiens
  misc_RNA (1)...(19): siRNA sense strand
ucaguuagaagcacaaagg

SEQ ID NO: 1251332 - RNA, 19 nt, Homo sapiens
  misc_RNA (1)...(19): siRNA sense strand
caccagaccucagcccuuu

SEQ ID NO: 1251333 - RNA, 19 nt, Homo sapiens
  misc_RNA (1)...(19): siRNA sense strand
uaagcaguguccagcauug

SEQ ID NO: 1251334 - RNA, 19 nt, Homo sapiens
  misc_RNA (1)...(19): siRNA sense strand
guccacagcagcaggguua

SEQ ID NO: 1251335 - RNA, 19 nt, Homo sapiens
  misc_RNA (1)...(19): siRNA sense strand
gcuaagcaguguccagcau

SEQ ID NO: 1251336 - RNA, 19 nt, Homo sapiens
  misc_RNA (1)...(19): siRNA sense strand
ucaguuagaagcacaaagg

SEQ ID NO: 1251337 - RNA, 19 nt, Homo sapiens
  misc_RNA (1)...(19): siRNA sense strand
gcagcaggguuaagacuca

SEQ ID NO: 1251338 - RNA, 19 nt, Homo sapiens
  misc_RNA (1)...(19): siRNA sense strand
caccagaccucagcccuuu

SEQ ID NO: 1251339 - RNA, 19 nt, Homo sapiens
  misc_RNA (1)...(19): siRNA sense strand
uaagcaguguccagcauug

SEQ ID NO: 1251340 - RNA, 19 nt, Homo sapiens
  misc_RNA (1)...(19): siRNA sense strand
guccacagcagcaggguua

SEQ ID NO: 1251341 - RNA, 19 nt, Homo sapiens
  misc_RNA (1)...(19): siRNA sense strand
gcuaagcaguguccagcau

SEQ ID NO: 1251342 - RNA, 19 nt, Homo sapiens
  misc_RNA (1)...(19): siRNA sense strand
ucaguuagaagcacaaagg

SEQ ID NO: 1251343 - RNA, 19 nt, Homo sapiens
  misc_RNA (1)...(19): siRNA sense strand
gcagcaggguuaagacuca

SEQ ID NO: 1251344 - RNA, 19 nt, Homo sapiens
  misc_RNA (1)...(19): siRNA sense strand
caccagaccucagcccuuu

SEQ ID NO: 1251345 - RNA, 19 nt, Homo sapiens
  misc_RNA (1)...(19): siRNA sense strand
uaagcaguguccagcauug

SEQ ID NO: 1251346 - RNA, 19 nt, Homo sapiens
  misc_RNA (1)...(19): siRNA sense strand
guccacagcagcaggguua

SEQ ID NO: 1251347 - RNA, 19 nt, Homo sapiens
  misc_RNA (1)...(19): siRNA sense strand
gcuaagcaguguccagcau

SEQ ID NO: 1251348 - RNA, 19 nt, Homo sapiens
  misc_RNA (1)...(19): siRNA sense strand
ucaguuagaagcacaaagg

SEQ ID NO: 1251349 - RNA, 19 nt, Homo sapiens
  misc_RNA (1)...(19): siRNA sense strand
caccagaccucagcccuuu

SEQ ID NO: 1251350 - RNA, 19 nt, Homo sapiens
  misc_RNA (1)...(19): siRNA sense strand
uaagcaguguccagcauug

SEQ ID NO: 1251351 - RNA, 19 nt, Homo sapiens
  misc_RNA (1)...(19): siRNA sense strand
gcuaagcaguguccagcau

SEQ ID NO: 1251352 - RNA, 19 nt, Homo sapiens
  misc_RNA (1)...(19): siRNA sense strand
ucaguuagaagcacaaagg

SEQ ID NO: 1251353 - RNA, 19 nt, Homo sapiens
  misc_RNA (1)...(19): siRNA sense strand
caccagaccucagcccuuu

SEQ ID NO: 1251354 - RNA, 19 nt, Homo sapiens
  misc_RNA (1)...(19): siRNA sense strand
uaagcaguguccagcauug

SEQ ID NO: 1251355 - RNA, 19 nt, Homo sapiens
  misc_RNA (1)...(19): siRNA sense strand
guccacagcagcaggguua

SEQ ID NO: 1251356 - RNA, 19 nt, Homo sapiens
  misc_RNA (1)...(19): siRNA sense strand
gcuaagcaguguccagcau

SEQ ID NO: 1251357 - RNA, 19 nt, Homo sapiens
  misc_RNA (1)...(19): siRNA sense strand
ucaguuagaagcacaaagg

SEQ ID NO: 1251358 - RNA, 19 nt, Homo sapiens
  misc_RNA (1)...(19): siRNA sense strand
gcagcaggguuaagacuca

SEQ ID NO: 1251359 - RNA, 19 nt, Homo sapiens
  misc_RNA (1)...(19): siRNA sense strand
caccagaccucagcccuuu

SEQ ID NO: 1251360 - RNA, 19 nt, Homo sapiens
  misc_RNA (1)...(19): siRNA sense strand
uaagcaguguccagcauug

SEQ ID NO: 1251361 - RNA, 19 nt, Homo sapiens
  misc_RNA (1)...(19): siRNA sense strand
guccacagcagcaggguua

SEQ ID NO: 1251362 - RNA, 19 nt, Homo sapiens
  misc_RNA (1)...(19): siRNA sense strand
gcuaagcaguguccagcau

SEQ ID NO: 1251363 - RNA, 19 nt, Homo sapiens
  misc_RNA (1)...(19): siRNA sense strand
ucaguuagaagcacaaagg

SEQ ID NO: 1251364 - RNA, 19 nt, Homo sapiens
  misc_RNA (1)...(19): siRNA sense strand
gcagcaggguuaagacuca

SEQ ID NO: 1251365 - RNA, 19 nt, Homo sapiens
  misc_RNA (1)...(19): siRNA sense strand
caccagaccucagcccuuu

SEQ ID NO: 1251366 - RNA, 19 nt, Homo sapiens
  misc_RNA (1)...(19): siRNA sense strand
uaagcaguguccagcauug

SEQ ID NO: 1251367 - RNA, 19 nt, Homo sapiens
  misc_RNA (1)...(19): siRNA sense strand
guccacagcagcaggguua

SEQ ID NO: 1251368 - RNA, 19 nt, Homo sapiens
  misc_RNA (1)...(19): siRNA sense strand
gcuaagcaguguccagcau

SEQ ID NO: 1251369 - RNA, 19 nt, Homo sapiens
  misc_RNA (1)...(19): siRNA sense strand
ucaguuagaagcacaaagg

SEQ ID NO: 1251370 - RNA, 19 nt, Homo sapiens
  misc_RNA (1)...(19): siRNA sense strand
caccagggcuuuggccuua

SEQ ID NO: 1251371 - RNA, 19 nt, Homo sapiens
  misc_RNA (1)...(19): siRNA sense strand
gugcagggaucccagagaa

SEQ ID NO: 1251372 - RNA, 19 nt, Homo sapiens
  misc_RNA (1)...(19): siRNA sense strand
gcagggaucccagagaaga

SEQ ID NO: 1251373 - RNA, 19 nt, Homo sapiens
  misc_RNA (1)...(19): siRNA sense strand
ccagggcuuuggccuuaaa

SEQ ID NO: 1251374 - RNA, 19 nt, Homo sapiens
  misc_RNA (1)...(19): siRNA sense strand
gaacuucaaccucuuucuc

SEQ ID NO: 1251375 - RNA, 19 nt, Homo sapiens
  misc_RNA (1)...(19): siRNA sense strand
caucugcaaugccaucauc

SEQ ID NO: 1251376 - RNA, 19 nt, Homo sapiens
  misc_RNA (1)...(19): siRNA sense strand
gaaccggaaccugcacuca

SEQ ID NO: 1251377 - RNA, 19 nt, Homo sapiens
  misc_RNA (1)...(19): siRNA sense strand
gcucauggccgugcuguac

SEQ ID NO: 1251378 - RNA, 19 nt, Homo sapiens
  misc_RNA (1)...(19): siRNA sense strand
aaccugcacucacccaugu

SEQ ID NO: 1251379 - RNA, 19 nt, Homo sapiens
  misc_RNA (1)...(19): siRNA sense strand
cuacaucuccaucuucuac

SEQ ID NO: 1251380 - RNA, 19 nt, Homo sapiens
  misc_RNA (1)...(19): siRNA sense strand
gguggccagugucgucuuc

SEQ ID NO: 1251381 - RNA, 19 nt, Homo sapiens
  misc_RNA (1)...(19): siRNA sense strand
gcccucaucaucugcaaug

SEQ ID NO: 1251382 - RNA, 19 nt, Homo sapiens
  misc_RNA (1)...(19): siRNA sense strand
cuucugggcucccucaacu

SEQ ID NO: 1251383 - RNA, 19 nt, Homo sapiens
  misc_RNA (1)...(19): siRNA sense strand
ucacccauguacugcuuca

SEQ ID NO: 1251384 - RNA, 19 nt, Homo sapiens
  misc_RNA (1)...(19): siRNA sense strand
ggacgaagcucuagaugug

SEQ ID NO: 1251385 - RNA, 19 nt, Homo sapiens
  misc_RNA (1)...(19): siRNA sense strand
ggaaggaccugaaccugaa

SEQ ID NO: 1251386 - RNA, 19 nt, Homo sapiens
  misc_RNA (1)...(19): siRNA sense strand
caaagaggauccacaaguu

SEQ ID NO: 1251387 - RNA, 19 nt, Homo sapiens
  misc_RNA (1)...(19): siRNA sense strand
guacaaaucugcgcuguuc

SEQ ID NO: 1251388 - RNA, 19 nt, Homo sapiens
  misc_RNA (1)...(19): siRNA sense strand
aaucugcgcuguucaauga

SEQ ID NO: 1251389 - RNA, 19 nt, Homo sapiens
  misc_RNA (1)...(19): siRNA sense strand
gauggaaucugaaaugaag

SEQ ID NO: 1251390 - RNA, 19 nt, Homo sapiens
  misc_RNA (1)...(19): siRNA sense strand
ccaagaagccuaugagaga

SEQ ID NO: 1251391 - RNA, 19 nt, Homo sapiens
  misc_RNA (1)...(19): siRNA sense strand
ggaaugagcccuucugucu

SEQ ID NO: 1251392 - RNA, 19 nt, Homo sapiens
  misc_RNA (1)...(19): siRNA sense strand
gaucauguuuggagcuaaa

SEQ ID NO: 1251393 - RNA, 19 nt, Homo sapiens
  misc_RNA (1)...(19): siRNA sense strand
gcucaugaguuuacagaga

SEQ ID NO: 1251394 - RNA, 19 nt, Homo sapiens
  misc_RNA (1)...(19): siRNA sense strand
gguauuggaugacagauca

SEQ ID NO: 1251395 - RNA, 19 nt, Homo sapiens
  misc_RNA (1)...(19): siRNA sense strand
ggacagggccuauguuugg

SEQ ID NO: 1251396 - RNA, 19 nt, Homo sapiens
  misc_RNA (1)...(19): siRNA sense strand
ccgcgucaaugcauauuua

SEQ ID NO: 1251397 - RNA, 19 nt, Homo sapiens
  misc_RNA (1)...(19): siRNA sense strand
gcagauaagcugugccaaa

SEQ ID NO: 1251398 - RNA, 19 nt, Homo sapiens
  misc_RNA (1)...(19): siRNA sense strand
cagaggagcugggcagaaa

SEQ ID NO: 1251399 - RNA, 19 nt, Homo sapiens
  misc_RNA (1)...(19): siRNA sense strand
gcagaaaggaguaggcauu

SEQ ID NO: 1251400 - RNA, 19 nt, Homo sapiens
  misc_RNA (1)...(19): siRNA sense strand
gcaacaugauaaagcauau

SEQ ID NO: 1251401 - RNA, 19 nt, Homo sapiens
  misc_RNA (1)...(19): siRNA sense strand
gcuuaacccuggaauguau

SEQ ID NO: 1251402 - RNA, 19 nt, Homo sapiens
  misc_RNA (1)...(19): siRNA sense strand
gcaucugucuggcucauga

SEQ ID NO: 1251403 - RNA, 19 nt, Homo sapiens
  misc_RNA (1)...(19): siRNA sense strand
gauaagcugugccaaagag

SEQ ID NO: 1251404 - RNA, 19 nt, Homo sapiens
  misc_RNA (1)...(19): siRNA sense strand
cauaugauguccacuuuua

SEQ ID NO: 1251405 - RNA, 19 nt, Homo sapiens
  misc_RNA (1)...(19): siRNA sense strand
guacuuugcuuucuaccau

SEQ ID NO: 1251406 - RNA, 19 nt, Homo sapiens
  misc_RNA (1)...(19): siRNA sense strand
caaaggaagccauggcaaa

SEQ ID NO: 1251407 - RNA, 19 nt, Homo sapiens
  misc_RNA (1)...(19): siRNA sense strand
ggaauggccgcuauuacaa

SEQ ID NO: 1251408 - RNA, 19 nt, Homo sapiens
  misc_RNA (1)...(19): siRNA sense strand
gcuaacaacgucucccuaa

SEQ ID NO: 1251409 - RNA, 19 nt, Homo sapiens
  misc_RNA (1)...(19): siRNA sense strand
aaaugaaguuugacaagga

SEQ ID NO: 1251410 - RNA, 19 nt, Homo sapiens
  misc_RNA (1)...(19): siRNA sense strand
gaccugaaccugaaguuug

SEQ ID NO: 1251411 - RNA, 19 nt, Homo sapiens
  misc_RNA (1)...(19): siRNA sense strand
gaucacugccugccuggua

SEQ ID NO: 1251412 - RNA, 19 nt, Homo sapiens
  misc_RNA (1)...(19): siRNA sense strand
gagcucagccuacaguaug

SEQ ID NO: 1251413 - RNA, 19 nt, Homo sapiens
  misc_RNA (1)...(19): siRNA sense strand
cagauaagcugugccaaag

SEQ ID NO: 1251414 - RNA, 19 nt, Homo sapiens
  misc_RNA (1)...(19): siRNA sense strand
ggacccagaugaugaacca

SEQ ID NO: 1251415 - RNA, 19 nt, Homo sapiens
  misc_RNA (1)...(19): siRNA sense strand
gggaagggcagacugugua

SEQ ID NO: 1251416 - RNA, 19 nt, Homo sapiens
  misc_RNA (1)...(19): siRNA sense strand
aaacagggcacaggacuaa

SEQ ID NO: 1251417 - RNA, 19 nt, Homo sapiens
  misc_RNA (1)...(19): siRNA sense strand
uaagcaacaugauaaagca

SEQ ID NO: 1251418 - RNA, 19 nt, Homo sapiens
  misc_RNA (1)...(19): siRNA sense strand
gagacggacugcugcaauc

SEQ ID NO: 1251419 - RNA, 19 nt, Homo sapiens
  misc_RNA (1)...(19): siRNA sense strand
aagaggauccacaaguuua

SEQ ID NO: 1251420 - RNA, 19 nt, Homo sapiens
  misc_RNA (1)...(19): siRNA sense strand
gugauggaaucugaaauga

SEQ ID NO: 1251421 - RNA, 19 nt, Homo sapiens
  misc_RNA (1)...(19): siRNA sense strand
gagcugggcagaaacaugu

SEQ ID NO: 1251422 - RNA, 19 nt, Homo sapiens
  misc_RNA (1)...(19): siRNA sense strand
cagcuaccaugauccaaga

SEQ ID NO: 1251423 - RNA, 19 nt, Homo sapiens
  misc_RNA (1)...(19): siRNA sense strand
uagcugugauggaaucuga

SEQ ID NO: 1251424 - RNA, 19 nt, Homo sapiens
  misc_RNA (1)...(19): siRNA sense strand
ccaaggaugugcagguuac

SEQ ID NO: 1251425 - RNA, 19 nt, Homo sapiens
  misc_RNA (1)...(19): siRNA sense strand
gaccagaccuaugauggau

SEQ ID NO: 1251426 - RNA, 19 nt, Homo sapiens
  misc_RNA (1)...(19): siRNA sense strand
ccaaagaggauccacaagu

SEQ ID NO: 1251427 - RNA, 19 nt, Homo sapiens
  misc_RNA (1)...(19): siRNA sense strand
gagccuggacugucuauca

SEQ ID NO: 1251428 - RNA, 19 nt, Homo sapiens
  misc_RNA (1)...(19): siRNA sense strand
ggacauguggccugugugu

SEQ ID NO: 1251429 - RNA, 19 nt, Homo sapiens
  misc_RNA (1)...(19): siRNA sense strand
aaagaggauccacaaguuu

SEQ ID NO: 1251430 - RNA, 19 nt, Homo sapiens
  misc_RNA (1)...(19): siRNA sense strand
guggguacuuugcuuucua

SEQ ID NO: 1251431 - RNA, 19 nt, Homo sapiens
  misc_RNA (1)...(19): siRNA sense strand
ggaccugaaccugaaguuu

SEQ ID NO: 1251432 - RNA, 19 nt, Homo sapiens
  misc_RNA (1)...(19): siRNA sense strand
gcugaccaauucacagugu

SEQ ID NO: 1251433 - RNA, 19 nt, Homo sapiens
  misc_RNA (1)...(19): siRNA sense strand
gcagguuuaucgggacuau

SEQ ID NO: 1251434 - RNA, 19 nt, Homo sapiens
  misc_RNA (1)...(19): siRNA sense strand
guaaagcuaugggcuacca

SEQ ID NO: 1251435 - RNA, 19 nt, Homo sapiens
  misc_RNA (1)...(19): siRNA sense strand
cccauggugucccugauaa

SEQ ID NO: 1251436 - RNA, 19 nt, Homo sapiens
  misc_RNA (1)...(19): siRNA sense strand
gagagacugcuguggaaug

SEQ ID NO: 1251437 - RNA, 19 nt, Homo sapiens
  misc_RNA (1)...(19): siRNA sense strand
gcagagcccgguauuggau

SEQ ID NO: 1251438 - RNA, 19 nt, Homo sapiens
  misc_RNA (1)...(19): siRNA sense strand
caggauaaguuuucuucua

SEQ ID NO: 1251439 - RNA, 19 nt, Homo sapiens
  misc_RNA (1)...(19): siRNA sense strand
cagcuuaacccuggaaugu

SEQ ID NO: 1251440 - RNA, 19 nt, Homo sapiens
  misc_RNA (1)...(19): siRNA sense strand
agguuuaucgggacuauua

SEQ ID NO: 1251441 - RNA, 19 nt, Homo sapiens
  misc_RNA (1)...(19): siRNA sense strand
gcugaugguuuccuaugag

SEQ ID NO: 1251442 - RNA, 19 nt, Homo sapiens
  misc_RNA (1)...(19): siRNA sense strand
gcuguggaauggccgcuau

SEQ ID NO: 1251443 - RNA, 19 nt, Homo sapiens
  misc_RNA (1)...(19): siRNA sense strand
cggcgacgguaccugauga

SEQ ID NO: 1251444 - RNA, 19 nt, Homo sapiens
  misc_RNA (1)...(19): siRNA sense strand
caccaaggaugugcagguu

SEQ ID NO: 1251445 - RNA, 19 nt, Homo sapiens
  misc_RNA (1)...(19): siRNA sense strand
ucaaugaacuauacuuccu

SEQ ID NO: 1251446 - RNA, 19 nt, Homo sapiens
  misc_RNA (1)...(19): siRNA sense strand
gggccuguguggguacuuu

SEQ ID NO: 1251447 - RNA, 19 nt, Homo sapiens
  misc_RNA (1)...(19): siRNA sense strand
cgacaugaucaauucugua

SEQ ID NO: 1251448 - RNA, 19 nt, Homo sapiens
  misc_RNA (1)...(19): siRNA sense strand
uaucagcaccggacaguca

SEQ ID NO: 1251449 - RNA, 19 nt, Homo sapiens
  misc_RNA (1)...(19): siRNA sense strand
caaacagggcacaggacua

SEQ ID NO: 1251450 - RNA, 19 nt, Homo sapiens
  misc_RNA (1)...(19): siRNA sense strand
aguuugugcugcagguuua

SEQ ID NO: 1251451 - RNA, 19 nt, Homo sapiens
  misc_RNA (1)...(19): siRNA sense strand
gaaaggaguaggcauugcu

SEQ ID NO: 1251452 - RNA, 19 nt, Homo sapiens
  misc_RNA (1)...(19): siRNA sense strand
gcacgagucacggcagcua

SEQ ID NO: 1251453 - RNA, 19 nt, Homo sapiens
  misc_RNA (1)...(19): siRNA sense strand
cucaugaguuuacagagaa

SEQ ID NO: 1251454 - RNA, 19 nt, Homo sapiens
  misc_RNA (1)...(19): siRNA sense strand
cgucaaugcauauuuaauc

SEQ ID NO: 1251455 - RNA, 19 nt, Homo sapiens
  misc_RNA (1)...(19): siRNA sense strand
ucccuaagcaacaugauaa

SEQ ID NO: 1251456 - RNA, 19 nt, Homo sapiens
  misc_RNA (1)...(19): siRNA sense strand
ccagugugcagucugauga

SEQ ID NO: 1251457 - RNA, 19 nt, Homo sapiens
  misc_RNA (1)...(19): siRNA sense strand
aaacuaucuuugagcugaa

SEQ ID NO: 1251458 - RNA, 19 nt, Homo sapiens
  misc_RNA (1)...(19): siRNA sense strand
cugucuggcucaugaguuu

SEQ ID NO: 1251459 - RNA, 19 nt, Homo sapiens
  misc_RNA (1)...(19): siRNA sense strand
gguccgugcucuccaaacu

SEQ ID NO: 1251460 - RNA, 19 nt, Homo sapiens
  misc_RNA (1)...(19): siRNA sense strand
uguuaugucugaccagugu

SEQ ID NO: 1251461 - RNA, 19 nt, Homo sapiens
  misc_RNA (1)...(19): siRNA sense strand
gaaucugaaaugaaguuug

SEQ ID NO: 1251462 - RNA, 19 nt, Homo sapiens
  misc_RNA (1)...(19): siRNA sense strand
ggaagacccauguggaaaa

SEQ ID NO: 1251463 - RNA, 19 nt, Homo sapiens
  misc_RNA (1)...(19): siRNA sense strand
aauccagugugcagucuga

SEQ ID NO: 1251464 - RNA, 19 nt, Homo sapiens
  misc_RNA (1)...(19): siRNA sense strand
gaacguccaggccuuugca

SEQ ID NO: 1251465 - RNA, 19 nt, Homo sapiens
  misc_RNA (1)...(19): siRNA sense strand
uggaauggccgcuauuaca

SEQ ID NO: 1251466 - RNA, 19 nt, Homo sapiens
  misc_RNA (1)...(19): siRNA sense strand
gugucuagcugugauggaa

SEQ ID NO: 1251467 - RNA, 19 nt, Homo sapiens
  misc_RNA (1)...(19): siRNA sense strand
acaaguuuauugcccugaa

SEQ ID NO: 1251468 - RNA, 19 nt, Homo sapiens
  misc_RNA (1)...(19): siRNA sense strand
ggcagcugaugguuuccua

SEQ ID NO: 1251469 - RNA, 19 nt, Homo sapiens
  misc_RNA (1)...(19): siRNA sense strand
ccuaugaggguaaagcuau

SEQ ID NO: 1251470 - RNA, 19 nt, Homo sapiens
  misc_RNA (1)...(19): siRNA sense strand
ccucagucucguaguguua

SEQ ID NO: 1251471 - RNA, 19 nt, Homo sapiens
  misc_RNA (1)...(19): siRNA sense strand
gcagaccagaccuaugaug

SEQ ID NO: 1251472 - RNA, 19 nt, Homo sapiens
  misc_RNA (1)...(19): siRNA sense strand
cuaaaggccaaguccacua

SEQ ID NO: 1251473 - RNA, 19 nt, Homo sapiens
  misc_RNA (1)...(19): siRNA sense strand
gacaugaucaauucuguac

SEQ ID NO: 1251474 - RNA, 19 nt, Homo sapiens
  misc_RNA (1)...(19): siRNA sense strand
uaacaacgucucccuaagc

SEQ ID NO: 1251475 - RNA, 19 nt, Homo sapiens
  misc_RNA (1)...(19): siRNA sense strand
gaggauccacaaguuuauu

SEQ ID NO: 1251476 - RNA, 19 nt, Homo sapiens
  misc_RNA (1)...(19): siRNA sense strand
gacagggccuauguuugga

SEQ ID NO: 1251477 - RNA, 19 nt, Homo sapiens
  misc_RNA (1)...(19): siRNA sense strand
augcagaccagaccuauga

SEQ ID NO: 1251478 - RNA, 19 nt, Homo sapiens
  misc_RNA (1)...(19): siRNA sense strand
ugaaaugaaguuugacaag

SEQ ID NO: 1251479 - RNA, 19 nt, Homo sapiens
  misc_RNA (1)...(19): siRNA sense strand
cauguggccugugugucua

SEQ ID NO: 1251480 - RNA, 19 nt, Homo sapiens
  misc_RNA (1)...(19): siRNA sense strand
ggccaggaguaccgcaugu

SEQ ID NO: 1251481 - RNA, 19 nt, Homo sapiens
  misc_RNA (1)...(19): siRNA sense strand
cagaaaggaguaggcauug

SEQ ID NO: 1251482 - RNA, 19 nt, Homo sapiens
  misc_RNA (1)...(19): siRNA sense strand
gggcugcuccugcaucauc

SEQ ID NO: 1251483 - RNA, 19 nt, Homo sapiens
  misc_RNA (1)...(19): siRNA sense strand
aaggacagggccuauguuu

SEQ ID NO: 1251484 - RNA, 19 nt, Homo sapiens
  misc_RNA (1)...(19): siRNA sense strand
gaagauggcuugcgcaugu

SEQ ID NO: 1251485 - RNA, 19 nt, Homo sapiens
  misc_RNA (1)...(19): siRNA sense strand
gcaaaucucucuacuucaa

SEQ ID NO: 1251486 - RNA, 19 nt, Homo sapiens
  misc_RNA (1)...(19): siRNA sense strand
cauauaagguuccgucuuu

SEQ ID NO: 1251487 - RNA, 19 nt, Homo sapiens
  misc_RNA (1)...(19): siRNA sense strand
gaauuuacaucagcaagua

SEQ ID NO: 1251488 - RNA, 19 nt, Homo sapiens
  misc_RNA (1)...(19): siRNA sense strand
ggagaucgauuugcaguaa

SEQ ID NO: 1251489 - RNA, 19 nt, Homo sapiens
  misc_RNA (1)...(19): siRNA sense strand
gaagauguaugggcuauug

SEQ ID NO: 1251490 - RNA, 19 nt, Homo sapiens
  misc_RNA (1)...(19): siRNA sense strand
gagacucacuguacuuuaa

SEQ ID NO: 1251491 - RNA, 19 nt, Homo sapiens
  misc_RNA (1)...(19): siRNA sense strand
ggacaagaauaccauguga

SEQ ID NO: 1251492 - RNA, 19 nt, Homo sapiens
  misc_RNA (1)...(19): siRNA sense strand
gaaaccaucucgaaagugu

SEQ ID NO: 1251493 - RNA, 19 nt, Homo sapiens
  misc_RNA (1)...(19): siRNA sense strand
caaauuugauggcucuaua

SEQ ID NO: 1251494 - RNA, 19 nt, Homo sapiens
  misc_RNA (1)...(19): siRNA sense strand
gcaauggucagaagaauuu

SEQ ID NO: 1251495 - RNA, 19 nt, Homo sapiens
  misc_RNA (1)...(19): siRNA sense strand
gaaggucacuuaggcgaua

SEQ ID NO: 1251496 - RNA, 19 nt, Homo sapiens
  misc_RNA (1)...(19): siRNA sense strand
uaacaucggucuuuauugu

SEQ ID NO: 1251497 - RNA, 19 nt, Homo sapiens
  misc_RNA (1)...(19): siRNA sense strand
ggaaacaugugggcaauug

SEQ ID NO: 1251498 - RNA, 19 nt, Homo sapiens
  misc_RNA (1)...(19): siRNA sense strand
aaagacagcuggugaguug

SEQ ID NO: 1251499 - RNA, 19 nt, Homo sapiens
  misc_RNA (1)...(19): siRNA sense strand
gaacaagggugugguguca

SEQ ID NO: 1251500 - RNA, 19 nt, Homo sapiens
  misc_RNA (1)...(19): siRNA sense strand
gcacagacguugccgugaa

SEQ ID NO: 1251501 - RNA, 19 nt, Homo sapiens
  misc_RNA (1)...(19): siRNA sense strand
ggugaugacugcucuguuu

SEQ ID NO: 1251502 - RNA, 19 nt, Homo sapiens
  misc_RNA (1)...(19): siRNA sense strand
gaaggaaacuccagagaac

SEQ ID NO: 1251503 - RNA, 19 nt, Homo sapiens
  misc_RNA (1)...(19): siRNA sense strand
ggaauuaccuggacuuugc

SEQ ID NO: 1251504 - RNA, 19 nt, Homo sapiens
  misc_RNA (1)...(19): siRNA sense strand
gaucuaaaccucacuaaug

SEQ ID NO: 1251505 - RNA, 19 nt, Homo sapiens
  misc_RNA (1)...(19): siRNA sense strand
gauauugacugucucucua

SEQ ID NO: 1251506 - RNA, 19 nt, Homo sapiens
  misc_RNA (1)...(19): siRNA sense strand
gauaacaggugcccagguu

SEQ ID NO: 1251507 - RNA, 19 nt, Homo sapiens
  misc_RNA (1)...(19): siRNA sense strand
gaaccugugugucaaaugu

SEQ ID NO: 1251508 - RNA, 19 nt, Homo sapiens
  misc_RNA (1)...(19): siRNA sense strand
ccacaauuaugucagauuu

SEQ ID NO: 1251509 - RNA, 19 nt, Homo sapiens
  misc_RNA (1)...(19): siRNA sense strand
aaacauagguugugccaau

SEQ ID NO: 1251510 - RNA, 19 nt, Homo sapiens
  misc_RNA (1)...(19): siRNA sense strand
guuccaggcucuccucuua

SEQ ID NO: 1251511 - RNA, 19 nt, Homo sapiens
  misc_RNA (1)...(19): siRNA sense strand
gaacaggucaugaucaaug

SEQ ID NO: 1251512 - RNA, 19 nt, Homo sapiens
  misc_RNA (1)...(19): siRNA sense strand
gaaauugaguacagugugu

SEQ ID NO: 1251513 - RNA, 19 nt, Homo sapiens
  misc_RNA (1)...(19): siRNA sense strand
ggaaauccgguaagguuua

SEQ ID NO: 1251514 - RNA, 19 nt, Homo sapiens
  misc_RNA (1)...(19): siRNA sense strand
gaaucaggcuuaucaaugg

SEQ ID NO: 1251515 - RNA, 19 nt, Homo sapiens
  misc_RNA (1)...(19): siRNA sense strand
ugagauggauuaccagaaa

SEQ ID NO: 1251516 - RNA, 19 nt, Homo sapiens
  misc_RNA (1)...(19): siRNA sense strand
caagagaucuagauuguac

SEQ ID NO: 1251517 - RNA, 19 nt, Homo sapiens
  misc_RNA (1)...(19): siRNA sense strand
gaaaugagcaugggcugua

SEQ ID NO: 1251518 - RNA, 19 nt, Homo sapiens
  misc_RNA (1)...(19): siRNA sense strand
gaagucagcuuugguugug

SEQ ID NO: 1251519 - RNA, 19 nt, Homo sapiens
  misc_RNA (1)...(19): siRNA sense strand
gaccuucccaguuauauua

SEQ ID NO: 1251520 - RNA, 19 nt, Homo sapiens
  misc_RNA (1)...(19): siRNA sense strand
aagcaaagcugggcaauug

SEQ ID NO: 1251521 - RNA, 19 nt, Homo sapiens
  misc_RNA (1)...(19): siRNA sense strand
gauacaugaugcaguuuaa

SEQ ID NO: 1251522 - RNA, 19 nt, Homo sapiens
  misc_RNA (1)...(19): siRNA sense strand
ggaauauucugucaaugga

SEQ ID NO: 1251523 - RNA, 19 nt, Homo sapiens
  misc_RNA (1)...(19): siRNA sense strand
gaauuuacauccugaccuu

SEQ ID NO: 1251524 - RNA, 19 nt, Homo sapiens
  misc_RNA (1)...(19): siRNA sense strand
ccucugcccucgauucuua

SEQ ID NO: 1251525 - RNA, 19 nt, Homo sapiens
  misc_RNA (1)...(19): siRNA sense strand
uaagugagcccaccaugua

SEQ ID NO: 1251526 - RNA, 19 nt, Homo sapiens
  misc_RNA (1)...(19): siRNA sense strand
gcccuuccguccacaauua

SEQ ID NO: 1251527 - RNA, 19 nt, Homo sapiens
  misc_RNA (1)...(19): siRNA sense strand
gagaugacuuugacuccua

SEQ ID NO: 1251528 - RNA, 19 nt, Homo sapiens
  misc_RNA (1)...(19): siRNA sense strand
ggacuuugcuccaugagau

SEQ ID NO: 1251529 - RNA, 19 nt, Homo sapiens
  misc_RNA (1)...(19): siRNA sense strand
gacaagcgguuacacaaga

SEQ ID NO: 1251530 - RNA, 19 nt, Homo sapiens
  misc_RNA (1)...(19): siRNA sense strand
ggagaugcauccagggaaa

SEQ ID NO: 1251531 - RNA, 19 nt, Homo sapiens
  misc_RNA (1)...(19): siRNA sense strand
caucaaaucuggaacaucu

SEQ ID NO: 1251532 - RNA, 19 nt, Homo sapiens
  misc_RNA (1)...(19): siRNA sense strand
gagcauauaacacuggaua

SEQ ID NO: 1251533 - RNA, 19 nt, Homo sapiens
  misc_RNA (1)...(19): siRNA sense strand
caacaugggcucagacauu

SEQ ID NO: 1251534 - RNA, 19 nt, Homo sapiens
  misc_RNA (1)...(19): siRNA sense strand
ucacaacccuugauaguag

SEQ ID NO: 1251535 - RNA, 19 nt, Homo sapiens
  misc_RNA (1)...(19): siRNA sense strand
ucucaaagaugauuucgaa

SEQ ID NO: 1251536 - RNA, 19 nt, Homo sapiens
  misc_RNA (1)...(19): siRNA sense strand
caacugcaauuaaauccaa

SEQ ID NO: 1251537 - RNA, 19 nt, Homo sapiens
  misc_RNA (1)...(19): siRNA sense strand
gaccaugucuccucuagug

SEQ ID NO: 1251538 - RNA, 19 nt, Homo sapiens
  misc_RNA (1)...(19): siRNA sense strand
gaacaccaucauacaauuu

SEQ ID NO: 1251539 - RNA, 19 nt, Homo sapiens
  misc_RNA (1)...(19): siRNA sense strand
ccacagaucauuuccauug

SEQ ID NO: 1251540 - RNA, 19 nt, Homo sapiens
  misc_RNA (1)...(19): siRNA sense strand
gauguuggcuaaugaagga

SEQ ID NO: 1251541 - RNA, 19 nt, Homo sapiens
  misc_RNA (1)...(19): siRNA sense strand
gaugggauguggccagaaa

SEQ ID NO: 1251542 - RNA, 19 nt, Homo sapiens
  misc_RNA (1)...(19): siRNA sense strand
gaacgcaucagccugguaa

SEQ ID NO: 1251543 - RNA, 19 nt, Homo sapiens
  misc_RNA (1)...(19): siRNA sense strand
ggagggaggucgugcacuu

SEQ ID NO: 1251544 - RNA, 19 nt, Homo sapiens
  misc_RNA (1)...(19): siRNA sense strand
ccaaauauauggguugaau

SEQ ID NO: 1251545 - RNA, 19 nt, Homo sapiens
  misc_RNA (1)...(19): siRNA sense strand
ccaaaggacuucacacaag

SEQ ID NO: 1251546 - RNA, 19 nt, Homo sapiens
  misc_RNA (1)...(19): siRNA sense strand
aaucaaaccugacuuaugg

SEQ ID NO: 1251547 - RNA, 19 nt, Homo sapiens
  misc_RNA (1)...(19): siRNA sense strand
acaaugagauguucgauag

SEQ ID NO: 1251548 - RNA, 19 nt, Homo sapiens
  misc_RNA (1)...(19): siRNA sense strand
gccaaucaauucagcagua

SEQ ID NO: 1251549 - RNA, 19 nt, Homo sapiens
  misc_RNA (1)...(19): siRNA sense strand
ucaugucgcuuuaguuauu

SEQ ID NO: 1251550 - RNA, 19 nt, Homo sapiens
  misc_RNA (1)...(19): siRNA sense strand
guucaugucgcuuuaguua

SEQ ID NO: 1251551 - RNA, 19 nt, Homo sapiens
  misc_RNA (1)...(19): siRNA sense strand
gucacgaccuucccaguua

SEQ ID NO: 1251552 - RNA, 19 nt, Homo sapiens
  misc_RNA (1)...(19): siRNA sense strand
ggacaagacucacaaugcu

SEQ ID NO: 1251553 - RNA, 19 nt, Homo sapiens
  misc_RNA (1)...(19): siRNA sense strand
ggaagcggaucacugucua

SEQ ID NO: 1251554 - RNA, 19 nt, Homo sapiens
  misc_RNA (1)...(19): siRNA sense strand
gaaaugaagggcuuauugu

SEQ ID NO: 1251555 - RNA, 19 nt, Homo sapiens
  misc_RNA (1)...(19): siRNA sense strand
gggagaauguccaauuuca

SEQ ID NO: 1251556 - RNA, 19 nt, Homo sapiens
  misc_RNA (1)...(19): siRNA sense strand
gauuugggaucaugucuga

SEQ ID NO: 1251557 - RNA, 19 nt, Homo sapiens
  misc_RNA (1)...(19): siRNA sense strand
ggacuacucuaccgaugga

SEQ ID NO: 1251558 - RNA, 19 nt, Homo sapiens
  misc_RNA (1)...(19): siRNA sense strand
gaaacugcgucugugauga

SEQ ID NO: 1251559 - RNA, 19 nt, Homo sapiens
  misc_RNA (1)...(19): siRNA sense strand
uggcaaaucucucuacuuc

SEQ ID NO: 1251560 - RNA, 19 nt, Homo sapiens
  misc_RNA (1)...(19): siRNA sense strand
ggucaucaauccugaacuu

SEQ ID NO: 1251561 - RNA, 19 nt, Homo sapiens
  misc_RNA (1)...(19): siRNA sense strand
caauucagcucacagacaa

SEQ ID NO: 1251562 - RNA, 19 nt, Homo sapiens
  misc_RNA (1)...(19): siRNA sense strand
acaaggagcuccaacagau

SEQ ID NO: 1251563 - RNA, 19 nt, Homo sapiens
  misc_RNA (1)...(19): siRNA sense strand
caacccaacucaaagacaa

SEQ ID NO: 1251564 - RNA, 19 nt, Homo sapiens
  misc_RNA (1)...(19): siRNA sense strand
ggaaguacuugcacugagu

SEQ ID NO: 1251565 - RNA, 19 nt, Homo sapiens
  misc_RNA (1)...(19): siRNA sense strand
gggccaaacugcuacuuga

SEQ ID NO: 1251566 - RNA, 19 nt, Homo sapiens
  misc_RNA (1)...(19): siRNA sense strand
gagcuacaguuaagcauag

SEQ ID NO: 1251567 - RNA, 19 nt, Homo sapiens
  misc_RNA (1)...(19): siRNA sense strand
gagagugucuuacaauguc

SEQ ID NO: 1251568 - RNA, 19 nt, Homo sapiens
  misc_RNA (1)...(19): siRNA sense strand
gccaauugguggacacuuu

SEQ ID NO: 1251569 - RNA, 19 nt, Homo sapiens
  misc_RNA (1)...(19): siRNA sense strand
ucagccaucuguauucuuu

SEQ ID NO: 1251570 - RNA, 19 nt, Homo sapiens
  misc_RNA (1)...(19): siRNA sense strand
ucuggaacaucucuaauuu

SEQ ID NO: 1251571 - RNA, 19 nt, Homo sapiens
  misc_RNA (1)...(19): siRNA sense strand
caacugguaucgaauccaa

SEQ ID NO: 1251572 - RNA, 19 nt, Homo sapiens
  misc_RNA (1)...(19): siRNA sense strand
caaacuggauuucaagaca

SEQ ID NO: 1251573 - RNA, 19 nt, Homo sapiens
  misc_RNA (1)...(19): siRNA sense strand
aagcagaucaucccaguua

SEQ ID NO: 1251574 - RNA, 19 nt, Homo sapiens
  misc_RNA (1)...(19): siRNA sense strand
aagaaugccuuccaaguau

SEQ ID NO: 1251575 - RNA, 19 nt, Homo sapiens
  misc_RNA (1)...(19): siRNA sense strand
gaaggcagcgaguucaauu

SEQ ID NO: 1251576 - RNA, 19 nt, Homo sapiens
  misc_RNA (1)...(19): siRNA sense strand
gaagaugcccucaccaaca

SEQ ID NO: 1251577 - RNA, 19 nt, Homo sapiens
  misc_RNA (1)...(19): siRNA sense strand
guacauugcccuggagaua

SEQ ID NO: 1251578 - RNA, 19 nt, Homo sapiens
  misc_RNA (1)...(19): siRNA sense strand
gguccaaccuguaaaauaa

SEQ ID NO: 1251579 - RNA, 19 nt, Homo sapiens
  misc_RNA (1)...(19): siRNA sense strand
gaaccaaauguauauguga

SEQ ID NO: 1251580 - RNA, 19 nt, Homo sapiens
  misc_RNA (1)...(19): siRNA sense strand
ggaaccaaauguauaugug

SEQ ID NO: 1251581 - RNA, 19 nt, Homo sapiens
  misc_RNA (1)...(19): siRNA sense strand
cgaggacacugcacucuau

SEQ ID NO: 1251582 - RNA, 19 nt, Homo sapiens
  misc_RNA (1)...(19): siRNA sense strand
caggauacaugaugcaguu

SEQ ID NO: 1251583 - RNA, 19 nt, Homo sapiens
  misc_RNA (1)...(19): siRNA sense strand
caaaguuccugcaauacug

SEQ ID NO: 1251584 - RNA, 19 nt, Homo sapiens
  misc_RNA (1)...(19): siRNA sense strand
gaagauggcuugcgcaugu

SEQ ID NO: 1251585 - RNA, 19 nt, Homo sapiens
  misc_RNA (1)...(19): siRNA sense strand
gcaaaucucucuacuucaa

SEQ ID NO: 1251586 - RNA, 19 nt, Homo sapiens
  misc_RNA (1)...(19): siRNA sense strand
cauauaagguuccgucuuu

SEQ ID NO: 1251587 - RNA, 19 nt, Homo sapiens
  misc_RNA (1)...(19): siRNA sense strand
gaauuuacaucagcaagua

SEQ ID NO: 1251588 - RNA, 19 nt, Homo sapiens
  misc_RNA (1)...(19): siRNA sense strand
ggagaucgauuugcaguaa

SEQ ID NO: 1251589 - RNA, 19 nt, Homo sapiens
  misc_RNA (1)...(19): siRNA sense strand
gaagauguaugggcuauug

SEQ ID NO: 1251590 - RNA, 19 nt, Homo sapiens
  misc_RNA (1)...(19): siRNA sense strand
gagacucacuguacuuuaa

SEQ ID NO: 1251591 - RNA, 19 nt, Homo sapiens
  misc_RNA (1)...(19): siRNA sense strand
ggacaagaauaccauguga

SEQ ID NO: 1251592 - RNA, 19 nt, Homo sapiens
  misc_RNA (1)...(19): siRNA sense strand
gaaaccaucucgaaagugu

SEQ ID NO: 1251593 - RNA, 19 nt, Homo sapiens
  misc_RNA (1)...(19): siRNA sense strand
caaauuugauggcucuaua

SEQ ID NO: 1251594 - RNA, 19 nt, Homo sapiens
  misc_RNA (1)...(19): siRNA sense strand
gcaauggucagaagaauuu

SEQ ID NO: 1251595 - RNA, 19 nt, Homo sapiens
  misc_RNA (1)...(19): siRNA sense strand
gaaggucacuuaggcgaua

SEQ ID NO: 1251596 - RNA, 19 nt, Homo sapiens
  misc_RNA (1)...(19): siRNA sense strand
uaacaucggucuuuauugu

SEQ ID NO: 1251597 - RNA, 19 nt, Homo sapiens
  misc_RNA (1)...(19): siRNA sense strand
ggaaacaugugggcaauug

SEQ ID NO: 1251598 - RNA, 19 nt, Homo sapiens
  misc_RNA (1)...(19): siRNA sense strand
aaagacagcuggugaguug

SEQ ID NO: 1251599 - RNA, 19 nt, Homo sapiens
  misc_RNA (1)...(19): siRNA sense strand
gaacaagggugugguguca

SEQ ID NO: 1251600 - RNA, 19 nt, Homo sapiens
  misc_RNA (1)...(19): siRNA sense strand
gcacagacguugccgugaa

SEQ ID NO: 1251601 - RNA, 19 nt, Homo sapiens
  misc_RNA (1)...(19): siRNA sense strand
ggugaugacugcucuguuu

SEQ ID NO: 1251602 - RNA, 19 nt, Homo sapiens
  misc_RNA (1)...(19): siRNA sense strand
gaaggaaacuccagagaac

SEQ ID NO: 1251603 - RNA, 19 nt, Homo sapiens
  misc_RNA (1)...(19): siRNA sense strand
ggaauuaccuggacuuugc

SEQ ID NO: 1251604 - RNA, 19 nt, Homo sapiens
  misc_RNA (1)...(19): siRNA sense strand
gaucuaaaccucacuaaug

SEQ ID NO: 1251605 - RNA, 19 nt, Homo sapiens
  misc_RNA (1)...(19): siRNA sense strand
gauauugacugucucucua

SEQ ID NO: 1251606 - RNA, 19 nt, Homo sapiens
  misc_RNA (1)...(19): siRNA sense strand
gauaacaggugcccagguu

SEQ ID NO: 1251607 - RNA, 19 nt, Homo sapiens
  misc_RNA (1)...(19): siRNA sense strand
gaaccugugugucaaaugu

SEQ ID NO: 1251608 - RNA, 19 nt, Homo sapiens
  misc_RNA (1)...(19): siRNA sense strand
ccacaauuaugucagauuu

SEQ ID NO: 1251609 - RNA, 19 nt, Homo sapiens
  misc_RNA (1)...(19): siRNA sense strand
aaacauagguugugccaau

SEQ ID NO: 1251610 - RNA, 19 nt, Homo sapiens
  misc_RNA (1)...(19): siRNA sense strand
guuccaggcucuccucuua

SEQ ID NO: 1251611 - RNA, 19 nt, Homo sapiens
  misc_RNA (1)...(19): siRNA sense strand
gaacaggucaugaucaaug

SEQ ID NO: 1251612 - RNA, 19 nt, Homo sapiens
  misc_RNA (1)...(19): siRNA sense strand
gaaauugaguacagugugu

SEQ ID NO: 1251613 - RNA, 19 nt, Homo sapiens
  misc_RNA (1)...(19): siRNA sense strand
ggaaauccgguaagguuua

SEQ ID NO: 1251614 - RNA, 19 nt, Homo sapiens
  misc_RNA (1)...(19): siRNA sense strand
gaaucaggcuuaucaaugg

SEQ ID NO: 1251615 - RNA, 19 nt, Homo sapiens
  misc_RNA (1)...(19): siRNA sense strand
ugagauggauuaccagaaa

SEQ ID NO: 1251616 - RNA, 19 nt, Homo sapiens
  misc_RNA (1)...(19): siRNA sense strand
caagagaucuagauuguac

SEQ ID NO: 1251617 - RNA, 19 nt, Homo sapiens
  misc_RNA (1)...(19): siRNA sense strand
gaaaugagcaugggcugua

SEQ ID NO: 1251618 - RNA, 19 nt, Homo sapiens
  misc_RNA (1)...(19): siRNA sense strand
gaagucagcuuugguugug

SEQ ID NO: 1251619 - RNA, 19 nt, Homo sapiens
  misc_RNA (1)...(19): siRNA sense strand
gaccuucccaguuauauua

SEQ ID NO: 1251620 - RNA, 19 nt, Homo sapiens
  misc_RNA (1)...(19): siRNA sense strand
aagcaaagcugggcaauug

SEQ ID NO: 1251621 - RNA, 19 nt, Homo sapiens
  misc_RNA (1)...(19): siRNA sense strand
gauacaugaugcaguuuaa

SEQ ID NO: 1251622 - RNA, 19 nt, Homo sapiens
  misc_RNA (1)...(19): siRNA sense strand
ggaauauucugucaaugga

SEQ ID NO: 1251623 - RNA, 19 nt, Homo sapiens
  misc_RNA (1)...(19): siRNA sense strand
gaauuuacauccugaccuu

SEQ ID NO: 1251624 - RNA, 19 nt, Homo sapiens
  misc_RNA (1)...(19): siRNA sense strand
ccucugcccucgauucuua

SEQ ID NO: 1251625 - RNA, 19 nt, Homo sapiens
  misc_RNA (1)...(19): siRNA sense strand
uaagugagcccaccaugua

SEQ ID NO: 1251626 - RNA, 19 nt, Homo sapiens
  misc_RNA (1)...(19): siRNA sense strand
gcccuuccguccacaauua

SEQ ID NO: 1251627 - RNA, 19 nt, Homo sapiens
  misc_RNA (1)...(19): siRNA sense strand
gagaugacuuugacuccua

SEQ ID NO: 1251628 - RNA, 19 nt, Homo sapiens
  misc_RNA (1)...(19): siRNA sense strand
ggacuuugcuccaugagau

SEQ ID NO: 1251629 - RNA, 19 nt, Homo sapiens
  misc_RNA (1)...(19): siRNA sense strand
gacaagcgguuacacaaga

SEQ ID NO: 1251630 - RNA, 19 nt, Homo sapiens
  misc_RNA (1)...(19): siRNA sense strand
ggagaugcauccagggaaa

SEQ ID NO: 1251631 - RNA, 19 nt, Homo sapiens
  misc_RNA (1)...(19): siRNA sense strand
caucaaaucuggaacaucu

SEQ ID NO: 1251632 - RNA, 19 nt, Homo sapiens
  misc_RNA (1)...(19): siRNA sense strand
gagcauauaacacuggaua

SEQ ID NO: 1251633 - RNA, 19 nt, Homo sapiens
  misc_RNA (1)...(19): siRNA sense strand
caacaugggcucagacauu

SEQ ID NO: 1251634 - RNA, 19 nt, Homo sapiens
  misc_RNA (1)...(19): siRNA sense strand
ucacaacccuugauaguag

SEQ ID NO: 1251635 - RNA, 19 nt, Homo sapiens
  misc_RNA (1)...(19): siRNA sense strand
ucucaaagaugauuucgaa

SEQ ID NO: 1251636 - RNA, 19 nt, Homo sapiens
  misc_RNA (1)...(19): siRNA sense strand
caacugcaauuaaauccaa

SEQ ID NO: 1251637 - RNA, 19 nt, Homo sapiens
  misc_RNA (1)...(19): siRNA sense strand
gaccaugucuccucuagug

SEQ ID NO: 1251638 - RNA, 19 nt, Homo sapiens
  misc_RNA (1)...(19): siRNA sense strand
gaacaccaucauacaauuu

SEQ ID NO: 1251639 - RNA, 19 nt, Homo sapiens
  misc_RNA (1)...(19): siRNA sense strand
ccacagaucauuuccauug

SEQ ID NO: 1251640 - RNA, 19 nt, Homo sapiens
  misc_RNA (1)...(19): siRNA sense strand
gauguuggcuaaugaagga

SEQ ID NO: 1251641 - RNA, 19 nt, Homo sapiens
  misc_RNA (1)...(19): siRNA sense strand
gaugggauguggccagaaa

SEQ ID NO: 1251642 - RNA, 19 nt, Homo sapiens
  misc_RNA (1)...(19): siRNA sense strand
gaacgcaucagccugguaa

SEQ ID NO: 1251643 - RNA, 19 nt, Homo sapiens
  misc_RNA (1)...(19): siRNA sense strand
ggagggaggucgugcacuu

SEQ ID NO: 1251644 - RNA, 19 nt, Homo sapiens
  misc_RNA (1)...(19): siRNA sense strand
ccaaauauauggguugaau

SEQ ID NO: 1251645 - RNA, 19 nt, Homo sapiens
  misc_RNA (1)...(19): siRNA sense strand
ccaaaggacuucacacaag

SEQ ID NO: 1251646 - RNA, 19 nt, Homo sapiens
  misc_RNA (1)...(19): siRNA sense strand
aaucaaaccugacuuaugg

SEQ ID NO: 1251647 - RNA, 19 nt, Homo sapiens
  misc_RNA (1)...(19): siRNA sense strand
acaaugagauguucgauag

SEQ ID NO: 1251648 - RNA, 19 nt, Homo sapiens
  misc_RNA (1)...(19): siRNA sense strand
gccaaucaauucagcagua

SEQ ID NO: 1251649 - RNA, 19 nt, Homo sapiens
  misc_RNA (1)...(19): siRNA sense strand
ucaugucgcuuuaguuauu

SEQ ID NO: 1251650 - RNA, 19 nt, Homo sapiens
  misc_RNA (1)...(19): siRNA sense strand
guucaugucgcuuuaguua

SEQ ID NO: 1251651 - RNA, 19 nt, Homo sapiens
  misc_RNA (1)...(19): siRNA sense strand
gucacgaccuucccaguua

SEQ ID NO: 1251652 - RNA, 19 nt, Homo sapiens
  misc_RNA (1)...(19): siRNA sense strand
ggacaagacucacaaugcu

SEQ ID NO: 1251653 - RNA, 19 nt, Homo sapiens
  misc_RNA (1)...(19): siRNA sense strand
ggaagcggaucacugucua

SEQ ID NO: 1251654 - RNA, 19 nt, Homo sapiens
  misc_RNA (1)...(19): siRNA sense strand
gaaaugaagggcuuauugu

SEQ ID NO: 1251655 - RNA, 19 nt, Homo sapiens
  misc_RNA (1)...(19): siRNA sense strand
gggagaauguccaauuuca

SEQ ID NO: 1251656 - RNA, 19 nt, Homo sapiens
  misc_RNA (1)...(19): siRNA sense strand
gauuugggaucaugucuga

SEQ ID NO: 1251657 - RNA, 19 nt, Homo sapiens
  misc_RNA (1)...(19): siRNA sense strand
ggacuacucuaccgaugga

SEQ ID NO: 1251658 - RNA, 19 nt, Homo sapiens
  misc_RNA (1)...(19): siRNA sense strand
gaaacugcgucugugauga

SEQ ID NO: 1251659 - RNA, 19 nt, Homo sapiens
  misc_RNA (1)...(19): siRNA sense strand
uggcaaaucucucuacuuc

SEQ ID NO: 1251660 - RNA, 19 nt, Homo sapiens
  misc_RNA (1)...(19): siRNA sense strand
ggucaucaauccugaacuu

SEQ ID NO: 1251661 - RNA, 19 nt, Homo sapiens
  misc_RNA (1)...(19): siRNA sense strand
caauucagcucacagacaa

SEQ ID NO: 1251662 - RNA, 19 nt, Homo sapiens
  misc_RNA (1)...(19): siRNA sense strand
acaaggagcuccaacagau

SEQ ID NO: 1251663 - RNA, 19 nt, Homo sapiens
  misc_RNA (1)...(19): siRNA sense strand
caacccaacucaaagacaa

SEQ ID NO: 1251664 - RNA, 19 nt, Homo sapiens
  misc_RNA (1)...(19): siRNA sense strand
ggaaguacuugcacugagu

SEQ ID NO: 1251665 - RNA, 19 nt, Homo sapiens
  misc_RNA (1)...(19): siRNA sense strand
gggccaaacugcuacuuga

SEQ ID NO: 1251666 - RNA, 19 nt, Homo sapiens
  misc_RNA (1)...(19): siRNA sense strand
gagcuacaguuaagcauag

SEQ ID NO: 1251667 - RNA, 19 nt, Homo sapiens
  misc_RNA (1)...(19): siRNA sense strand
gagagugucuuacaauguc

SEQ ID NO: 1251668 - RNA, 19 nt, Homo sapiens
  misc_RNA (1)...(19): siRNA sense strand
gccaauugguggacacuuu

SEQ ID NO: 1251669 - RNA, 19 nt, Homo sapiens
  misc_RNA (1)...(19): siRNA sense strand
ucagccaucuguauucuuu

SEQ ID NO: 1251670 - RNA, 19 nt, Homo sapiens
  misc_RNA (1)...(19): siRNA sense strand
ucuggaacaucucuaauuu

SEQ ID NO: 1251671 - RNA, 19 nt, Homo sapiens
  misc_RNA (1)...(19): siRNA sense strand
caacugguaucgaauccaa

SEQ ID NO: 1251672 - RNA, 19 nt, Homo sapiens
  misc_RNA (1)...(19): siRNA sense strand
caaacuggauuucaagaca

SEQ ID NO: 1251673 - RNA, 19 nt, Homo sapiens
  misc_RNA (1)...(19): siRNA sense strand
aagcagaucaucccaguua

SEQ ID NO: 1251674 - RNA, 19 nt, Homo sapiens
  misc_RNA (1)...(19): siRNA sense strand
aagaaugccuuccaaguau

SEQ ID NO: 1251675 - RNA, 19 nt, Homo sapiens
  misc_RNA (1)...(19): siRNA sense strand
gaaggcagcgaguucaauu

SEQ ID NO: 1251676 - RNA, 19 nt, Homo sapiens
  misc_RNA (1)...(19): siRNA sense strand
gaagaugcccucaccaaca

SEQ ID NO: 1251677 - RNA, 19 nt, Homo sapiens
  misc_RNA (1)...(19): siRNA sense strand
guacauugcccuggagaua

SEQ ID NO: 1251678 - RNA, 19 nt, Homo sapiens
  misc_RNA (1)...(19): siRNA sense strand
gguccaaccuguaaaauaa

SEQ ID NO: 1251679 - RNA, 19 nt, Homo sapiens
  misc_RNA (1)...(19): siRNA sense strand
gaaccaaauguauauguga

SEQ ID NO: 1251680 - RNA, 19 nt, Homo sapiens
  misc_RNA (1)...(19): siRNA sense strand
ggaaccaaauguauaugug

SEQ ID NO: 1251681 - RNA, 19 nt, Homo sapiens
  misc_RNA (1)...(19): siRNA sense strand
cgaggacacugcacucuau

SEQ ID NO: 1251682 - RNA, 19 nt, Homo sapiens
  misc_RNA (1)...(19): siRNA sense strand
caggauacaugaugcaguu

SEQ ID NO: 1251683 - RNA, 19 nt, Homo sapiens
  misc_RNA (1)...(19): siRNA sense strand
caaaguuccugcaauacug

SEQ ID NO: 1251684 - RNA, 19 nt, Homo sapiens
  misc_RNA (1)...(19): siRNA sense strand
gaaagaugauggaaacaug

SEQ ID NO: 1251685 - RNA, 19 nt, Homo sapiens
  misc_RNA (1)...(19): siRNA sense strand
ugugguagcuugugacuuu

SEQ ID NO: 1251686 - RNA, 19 nt, Homo sapiens
  misc_RNA (1)...(19): siRNA sense strand
ggauaaauacaccaugaua

SEQ ID NO: 1251687 - RNA, 19 nt, Homo sapiens
  misc_RNA (1)...(19): siRNA sense strand
gaguuucucucguaucgua

SEQ ID NO: 1251688 - RNA, 19 nt, Homo sapiens
  misc_RNA (1)...(19): siRNA sense strand
gcuacugcaucuuaugaua

SEQ ID NO: 1251689 - RNA, 19 nt, Homo sapiens
  misc_RNA (1)...(19): siRNA sense strand
ggucagagauuuaacuuuu

SEQ ID NO: 1251690 - RNA, 19 nt, Homo sapiens
  misc_RNA (1)...(19): siRNA sense strand
uaugggaccugaaagauga

SEQ ID NO: 1251691 - RNA, 19 nt, Homo sapiens
  misc_RNA (1)...(19): siRNA sense strand
gagaauugaugaggauuau

SEQ ID NO: 1251692 - RNA, 19 nt, Homo sapiens
  misc_RNA (1)...(19): siRNA sense strand
ggaaacaugaugaaaguau

SEQ ID NO: 1251693 - RNA, 19 nt, Homo sapiens
  misc_RNA (1)...(19): siRNA sense strand
ggagaauugaugaggauua

SEQ ID NO: 1251694 - RNA, 19 nt, Homo sapiens
  misc_RNA (1)...(19): siRNA sense strand
gaaguggucagagauuuaa

SEQ ID NO: 1251695 - RNA, 19 nt, Homo sapiens
  misc_RNA (1)...(19): siRNA sense strand
guacagcugugcauucucu

SEQ ID NO: 1251696 - RNA, 19 nt, Homo sapiens
  misc_RNA (1)...(19): siRNA sense strand
ggaauuugggcaccuguuu

SEQ ID NO: 1251697 - RNA, 19 nt, Homo sapiens
  misc_RNA (1)...(19): siRNA sense strand
gaaaacuccuccuuaacuu

SEQ ID NO: 1251698 - RNA, 19 nt, Homo sapiens
  misc_RNA (1)...(19): siRNA sense strand
ugaaguggucagagauuua

SEQ ID NO: 1251699 - RNA, 19 nt, Homo sapiens
  misc_RNA (1)...(19): siRNA sense strand
uaucugggauccacauaau

SEQ ID NO: 1251700 - RNA, 19 nt, Homo sapiens
  misc_RNA (1)...(19): siRNA sense strand
gaugauggaaacaugauga

SEQ ID NO: 1251701 - RNA, 19 nt, Homo sapiens
  misc_RNA (1)...(19): siRNA sense strand
gguacgaucuguaucuuuu

SEQ ID NO: 1251702 - RNA, 19 nt, Homo sapiens
  misc_RNA (1)...(19): siRNA sense strand
ucccuagccugcaacauuu

SEQ ID NO: 1251703 - RNA, 19 nt, Homo sapiens
  misc_RNA (1)...(19): siRNA sense strand
ccugaaagaugauggaaac

SEQ ID NO: 1251704 - RNA, 19 nt, Homo sapiens
  misc_RNA (1)...(19): siRNA sense strand
aagccuugcugaugauaaa

SEQ ID NO: 1251705 - RNA, 19 nt, Homo sapiens
  misc_RNA (1)...(19): siRNA sense strand
gauggaaacaugaugaaag

SEQ ID NO: 1251706 - RNA, 19 nt, Homo sapiens
  misc_RNA (1)...(19): siRNA sense strand
uagaaggacaucaccauga

SEQ ID NO: 1251707 - RNA, 19 nt, Homo sapiens
  misc_RNA (1)...(19): siRNA sense strand
gcugugccuucucuacuga

SEQ ID NO: 1251708 - RNA, 19 nt, Homo sapiens
  misc_RNA (1)...(19): siRNA sense strand
gaguaugggaccugaaaga

SEQ ID NO: 1251709 - RNA, 19 nt, Homo sapiens
  misc_RNA (1)...(19): siRNA sense strand
gauaaauacaccaugauac

SEQ ID NO: 1251710 - RNA, 19 nt, Homo sapiens
  misc_RNA (1)...(19): siRNA sense strand
cuugguagaucauacugaa

SEQ ID NO: 1251711 - RNA, 19 nt, Homo sapiens
  misc_RNA (1)...(19): siRNA sense strand
ccaccuacuccaauauuug

SEQ ID NO: 1251712 - RNA, 19 nt, Homo sapiens
  misc_RNA (1)...(19): siRNA sense strand
cagaguaugggaccugaaa

SEQ ID NO: 1251713 - RNA, 19 nt, Homo sapiens
  misc_RNA (1)...(19): siRNA sense strand
ccgauuccuuccaagcuuu

SEQ ID NO: 1251714 - RNA, 19 nt, Homo sapiens
  misc_RNA (1)...(19): siRNA sense strand
gucccuagccugcaacauu

SEQ ID NO: 1251715 - RNA, 19 nt, Homo sapiens
  misc_RNA (1)...(19): siRNA sense strand
guaugggaccugaaagaug

SEQ ID NO: 1251716 - RNA, 19 nt, Homo sapiens
  misc_RNA (1)...(19): siRNA sense strand
gguagaucauacugaagug

SEQ ID NO: 1251717 - RNA, 19 nt, Homo sapiens
  misc_RNA (1)...(19): siRNA sense strand
gauuauccagugcaaguug

SEQ ID NO: 1251718 - RNA, 19 nt, Homo sapiens
  misc_RNA (1)...(19): siRNA sense strand
gaauuugggcaccuguuuc

SEQ ID NO: 1251719 - RNA, 19 nt, Homo sapiens
  misc_RNA (1)...(19): siRNA sense strand
ugacggaaguguguauuuu

SEQ ID NO: 1251720 - RNA, 19 nt, Homo sapiens
  misc_RNA (1)...(19): siRNA sense strand
aaagaugauggaaacauga

SEQ ID NO: 1251721 - RNA, 19 nt, Homo sapiens
  misc_RNA (1)...(19): siRNA sense strand
gccgauuccuuccaagcuu

SEQ ID NO: 1251722 - RNA, 19 nt, Homo sapiens
  misc_RNA (1)...(19): siRNA sense strand
gaaacuagaaggacaucac

SEQ ID NO: 1251723 - RNA, 19 nt, Homo sapiens
  misc_RNA (1)...(19): siRNA sense strand
caugauacggaaacuagaa

SEQ ID NO: 1251724 - RNA, 19 nt, Homo sapiens
  misc_RNA (1)...(19): siRNA sense strand
ggaaaacuccuccuuaacu

SEQ ID NO: 1251725 - RNA, 19 nt, Homo sapiens
  misc_RNA (1)...(19): siRNA sense strand
auggaaacaugaugaaagu

SEQ ID NO: 1251726 - RNA, 19 nt, Homo sapiens
  misc_RNA (1)...(19): siRNA sense strand
gcaugucaauccgaagagu

SEQ ID NO: 1251727 - RNA, 19 nt, Homo sapiens
  misc_RNA (1)...(19): siRNA sense strand
cccaccuacuccaauauuu

SEQ ID NO: 1251728 - RNA, 19 nt, Homo sapiens
  misc_RNA (1)...(19): siRNA sense strand
caucagaauuggguguaca

SEQ ID NO: 1251729 - RNA, 19 nt, Homo sapiens
  misc_RNA (1)...(19): siRNA sense strand
acucuucuaugcuguguuc

SEQ ID NO: 1251730 - RNA, 19 nt, Homo sapiens
  misc_RNA (1)...(19): siRNA sense strand
gaugcccacccaagaaguu

SEQ ID NO: 1251731 - RNA, 19 nt, Homo sapiens
  misc_RNA (1)...(19): siRNA sense strand
ggaccugaaagaugaugga

SEQ ID NO: 1251732 - RNA, 19 nt, Homo sapiens
  misc_RNA (1)...(19): siRNA sense strand
gagugaugcccacccaaga

SEQ ID NO: 1251733 - RNA, 19 nt, Homo sapiens
  misc_RNA (1)...(19): siRNA sense strand
gauacggaaacuagaagga

SEQ ID NO: 1251734 - RNA, 19 nt, Homo sapiens
  misc_RNA (1)...(19): siRNA sense strand
guguacagcugugcauucu

SEQ ID NO: 1251735 - RNA, 19 nt, Homo sapiens
  misc_RNA (1)...(19): siRNA sense strand
guucaggagcugccgauuc

SEQ ID NO: 1251736 - RNA, 19 nt, Homo sapiens
  misc_RNA (1)...(19): siRNA sense strand
ggucuuugcugugccuucu

SEQ ID NO: 1251737 - RNA, 19 nt, Homo sapiens
  misc_RNA (1)...(19): siRNA sense strand
ggaauauggauaaauacac

SEQ ID NO: 1251738 - RNA, 19 nt, Homo sapiens
  misc_RNA (1)...(19): siRNA sense strand
ugaaagaugauggaaacau

SEQ ID NO: 1251739 - RNA, 19 nt, Homo sapiens
  misc_RNA (1)...(19): siRNA sense strand
ucucucguaucguauuuag

SEQ ID NO: 1251740 - RNA, 19 nt, Homo sapiens
  misc_RNA (1)...(19): siRNA sense strand
gguguacagcugugcauuc

SEQ ID NO: 1251741 - RNA, 19 nt, Homo sapiens
  misc_RNA (1)...(19): siRNA sense strand
ucuccugacucuucuaugc

SEQ ID NO: 1251742 - RNA, 19 nt, Homo sapiens
  misc_RNA (1)...(19): siRNA sense strand
auggagacauucugaugga

SEQ ID NO: 1251743 - RNA, 19 nt, Homo sapiens
  misc_RNA (1)...(19): siRNA sense strand
cuggagaauugaugaggau

SEQ ID NO: 1251744 - RNA, 19 nt, Homo sapiens
  misc_RNA (1)...(19): siRNA sense strand
ggguacgaucuguaucuuu

SEQ ID NO: 1251745 - RNA, 19 nt, Homo sapiens
  misc_RNA (1)...(19): siRNA sense strand
cuccuuaacuugguagauc

SEQ ID NO: 1251746 - RNA, 19 nt, Homo sapiens
  misc_RNA (1)...(19): siRNA sense strand
ugcauucucuccugacucu

SEQ ID NO: 1251747 - RNA, 19 nt, Homo sapiens
  misc_RNA (1)...(19): siRNA sense strand
gaaagaugauggaaacaug

SEQ ID NO: 1251748 - RNA, 19 nt, Homo sapiens
  misc_RNA (1)...(19): siRNA sense strand
ggucagagauuuaacuuuu

SEQ ID NO: 1251749 - RNA, 19 nt, Homo sapiens
  misc_RNA (1)...(19): siRNA sense strand
uaugggaccugaaagauga

SEQ ID NO: 1251750 - RNA, 19 nt, Homo sapiens
  misc_RNA (1)...(19): siRNA sense strand
ggaaacaugaugaaaguau

SEQ ID NO: 1251751 - RNA, 19 nt, Homo sapiens
  misc_RNA (1)...(19): siRNA sense strand
gaaguggucagagauuuaa

SEQ ID NO: 1251752 - RNA, 19 nt, Homo sapiens
  misc_RNA (1)...(19): siRNA sense strand
guacagcugugcauucucu

SEQ ID NO: 1251753 - RNA, 19 nt, Homo sapiens
  misc_RNA (1)...(19): siRNA sense strand
gaaaacuccuccuuaacuu

SEQ ID NO: 1251754 - RNA, 19 nt, Homo sapiens
  misc_RNA (1)...(19): siRNA sense strand
ugaaguggucagagauuua

SEQ ID NO: 1251755 - RNA, 19 nt, Homo sapiens
  misc_RNA (1)...(19): siRNA sense strand
gaugauggaaacaugauga

SEQ ID NO: 1251756 - RNA, 19 nt, Homo sapiens
  misc_RNA (1)...(19): siRNA sense strand
ccugaaagaugauggaaac

SEQ ID NO: 1251757 - RNA, 19 nt, Homo sapiens
  misc_RNA (1)...(19): siRNA sense strand
gauggaaacaugaugaaag

SEQ ID NO: 1251758 - RNA, 19 nt, Homo sapiens
  misc_RNA (1)...(19): siRNA sense strand
gaguaugggaccugaaaga

SEQ ID NO: 1251759 - RNA, 19 nt, Homo sapiens
  misc_RNA (1)...(19): siRNA sense strand
cuugguagaucauacugaa

SEQ ID NO: 1251760 - RNA, 19 nt, Homo sapiens
  misc_RNA (1)...(19): siRNA sense strand
cagaguaugggaccugaaa

SEQ ID NO: 1251761 - RNA, 19 nt, Homo sapiens
  misc_RNA (1)...(19): siRNA sense strand
gguagaucauacugaagug

SEQ ID NO: 1251762 - RNA, 19 nt, Homo sapiens
  misc_RNA (1)...(19): siRNA sense strand
guaugggaccugaaagaug

SEQ ID NO: 1251763 - RNA, 19 nt, Homo sapiens
  misc_RNA (1)...(19): siRNA sense strand
aaagaugauggaaacauga

SEQ ID NO: 1251764 - RNA, 19 nt, Homo sapiens
  misc_RNA (1)...(19): siRNA sense strand
ggaaaacuccuccuuaacu

SEQ ID NO: 1251765 - RNA, 19 nt, Homo sapiens
  misc_RNA (1)...(19): siRNA sense strand
auggaaacaugaugaaagu

SEQ ID NO: 1251766 - RNA, 19 nt, Homo sapiens
  misc_RNA (1)...(19): siRNA sense strand
caucagaauuggguguaca

SEQ ID NO: 1251767 - RNA, 19 nt, Homo sapiens
  misc_RNA (1)...(19): siRNA sense strand
acucuucuaugcuguguuc

SEQ ID NO: 1251768 - RNA, 19 nt, Homo sapiens
  misc_RNA (1)...(19): siRNA sense strand
ggaccugaaagaugaugga

SEQ ID NO: 1251769 - RNA, 19 nt, Homo sapiens
  misc_RNA (1)...(19): siRNA sense strand
guguacagcugugcauucu

SEQ ID NO: 1251770 - RNA, 19 nt, Homo sapiens
  misc_RNA (1)...(19): siRNA sense strand
ugaaagaugauggaaacau

SEQ ID NO: 1251771 - RNA, 19 nt, Homo sapiens
  misc_RNA (1)...(19): siRNA sense strand
gguguacagcugugcauuc

SEQ ID NO: 1251772 - RNA, 19 nt, Homo sapiens
  misc_RNA (1)...(19): siRNA sense strand
ucuccugacucuucuaugc

SEQ ID NO: 1251773 - RNA, 19 nt, Homo sapiens
  misc_RNA (1)...(19): siRNA sense strand
cuccuuaacuugguagauc

SEQ ID NO: 1251774 - RNA, 19 nt, Homo sapiens
  misc_RNA (1)...(19): siRNA sense strand
ugcauucucuccugacucu

SEQ ID NO: 1251775 - RNA, 19 nt, Homo sapiens
  misc_RNA (1)...(19): siRNA sense strand
gaaagaugauggaaacaug

SEQ ID NO: 1251776 - RNA, 19 nt, Homo sapiens
  misc_RNA (1)...(19): siRNA sense strand
ugugguagcuugugacuuu

SEQ ID NO: 1251777 - RNA, 19 nt, Homo sapiens
  misc_RNA (1)...(19): siRNA sense strand
ggauaaauacaccaugaua

SEQ ID NO: 1251778 - RNA, 19 nt, Homo sapiens
  misc_RNA (1)...(19): siRNA sense strand
gaguuucucucguaucgua

SEQ ID NO: 1251779 - RNA, 19 nt, Homo sapiens
  misc_RNA (1)...(19): siRNA sense strand
gcuacugcaucuuaugaua

SEQ ID NO: 1251780 - RNA, 19 nt, Homo sapiens
  misc_RNA (1)...(19): siRNA sense strand
ggucagagauuuaacuuuu

SEQ ID NO: 1251781 - RNA, 19 nt, Homo sapiens
  misc_RNA (1)...(19): siRNA sense strand
uaugggaccugaaagauga

SEQ ID NO: 1251782 - RNA, 19 nt, Homo sapiens
  misc_RNA (1)...(19): siRNA sense strand
gagaauugaugaggauuau

SEQ ID NO: 1251783 - RNA, 19 nt, Homo sapiens
  misc_RNA (1)...(19): siRNA sense strand
ggaaacaugaugaaaguau

SEQ ID NO: 1251784 - RNA, 19 nt, Homo sapiens
  misc_RNA (1)...(19): siRNA sense strand
ggagaauugaugaggauua

SEQ ID NO: 1251785 - RNA, 19 nt, Homo sapiens
  misc_RNA (1)...(19): siRNA sense strand
gaaguggucagagauuuaa

SEQ ID NO: 1251786 - RNA, 19 nt, Homo sapiens
  misc_RNA (1)...(19): siRNA sense strand
guacagcugugcauucucu

SEQ ID NO: 1251787 - RNA, 19 nt, Homo sapiens
  misc_RNA (1)...(19): siRNA sense strand
ggaauuugggcaccuguuu

SEQ ID NO: 1251788 - RNA, 19 nt, Homo sapiens
  misc_RNA (1)...(19): siRNA sense strand
gaaaacuccuccuuaacuu

SEQ ID NO: 1251789 - RNA, 19 nt, Homo sapiens
  misc_RNA (1)...(19): siRNA sense strand
ugaaguggucagagauuua

SEQ ID NO: 1251790 - RNA, 19 nt, Homo sapiens
  misc_RNA (1)...(19): siRNA sense strand
uaucugggauccacauaau

SEQ ID NO: 1251791 - RNA, 19 nt, Homo sapiens
  misc_RNA (1)...(19): siRNA sense strand
gaugauggaaacaugauga

SEQ ID NO: 1251792 - RNA, 19 nt, Homo sapiens
  misc_RNA (1)...(19): siRNA sense strand
gguacgaucuguaucuuuu

SEQ ID NO: 1251793 - RNA, 19 nt, Homo sapiens
  misc_RNA (1)...(19): siRNA sense strand
ucccuagccugcaacauuu

SEQ ID NO: 1251794 - RNA, 19 nt, Homo sapiens
  misc_RNA (1)...(19): siRNA sense strand
ccugaaagaugauggaaac

SEQ ID NO: 1251795 - RNA, 19 nt, Homo sapiens
  misc_RNA (1)...(19): siRNA sense strand
aagccuugcugaugauaaa

SEQ ID NO: 1251796 - RNA, 19 nt, Homo sapiens
  misc_RNA (1)...(19): siRNA sense strand
gauggaaacaugaugaaag

SEQ ID NO: 1251797 - RNA, 19 nt, Homo sapiens
  misc_RNA (1)...(19): siRNA sense strand
uagaaggacaucaccauga

SEQ ID NO: 1251798 - RNA, 19 nt, Homo sapiens
  misc_RNA (1)...(19): siRNA sense strand
gcugugccuucucuacuga

SEQ ID NO: 1251799 - RNA, 19 nt, Homo sapiens
  misc_RNA (1)...(19): siRNA sense strand
gaguaugggaccugaaaga

SEQ ID NO: 1251800 - RNA, 19 nt, Homo sapiens
  misc_RNA (1)...(19): siRNA sense strand
gauaaauacaccaugauac

SEQ ID NO: 1251801 - RNA, 19 nt, Homo sapiens
  misc_RNA (1)...(19): siRNA sense strand
cuugguagaucauacugaa

SEQ ID NO: 1251802 - RNA, 19 nt, Homo sapiens
  misc_RNA (1)...(19): siRNA sense strand
ccaccuacuccaauauuug

SEQ ID NO: 1251803 - RNA, 19 nt, Homo sapiens
  misc_RNA (1)...(19): siRNA sense strand
cagaguaugggaccugaaa

SEQ ID NO: 1251804 - RNA, 19 nt, Homo sapiens
  misc_RNA (1)...(19): siRNA sense strand
ccgauuccuuccaagcuuu

SEQ ID NO: 1251805 - RNA, 19 nt, Homo sapiens
  misc_RNA (1)...(19): siRNA sense strand
gucccuagccugcaacauu

SEQ ID NO: 1251806 - RNA, 19 nt, Homo sapiens
  misc_RNA (1)...(19): siRNA sense strand
guaugggaccugaaagaug

SEQ ID NO: 1251807 - RNA, 19 nt, Homo sapiens
  misc_RNA (1)...(19): siRNA sense strand
gauuauccagugcaaguug

SEQ ID NO: 1251808 - RNA, 19 nt, Homo sapiens
  misc_RNA (1)...(19): siRNA sense strand
gaauuugggcaccuguuuc

SEQ ID NO: 1251809 - RNA, 19 nt, Homo sapiens
  misc_RNA (1)...(19): siRNA sense strand
gguagaucauacugaagug

SEQ ID NO: 1251810 - RNA, 19 nt, Homo sapiens
  misc_RNA (1)...(19): siRNA sense strand
ugacggaaguguguauuuu

SEQ ID NO: 1251811 - RNA, 19 nt, Homo sapiens
  misc_RNA (1)...(19): siRNA sense strand
aaagaugauggaaacauga

SEQ ID NO: 1251812 - RNA, 19 nt, Homo sapiens
  misc_RNA (1)...(19): siRNA sense strand
gccgauuccuuccaagcuu

SEQ ID NO: 1251813 - RNA, 19 nt, Homo sapiens
  misc_RNA (1)...(19): siRNA sense strand
gaaacuagaaggacaucac

SEQ ID NO: 1251814 - RNA, 19 nt, Homo sapiens
  misc_RNA (1)...(19): siRNA sense strand
caugauacggaaacuagaa

SEQ ID NO: 1251815 - RNA, 19 nt, Homo sapiens
  misc_RNA (1)...(19): siRNA sense strand
ggaaaacuccuccuuaacu

SEQ ID NO: 1251816 - RNA, 19 nt, Homo sapiens
  misc_RNA (1)...(19): siRNA sense strand
auggaaacaugaugaaagu

SEQ ID NO: 1251817 - RNA, 19 nt, Homo sapiens
  misc_RNA (1)...(19): siRNA sense strand
gcaugucaauccgaagagu

SEQ ID NO: 1251818 - RNA, 19 nt, Homo sapiens
  misc_RNA (1)...(19): siRNA sense strand
cccaccuacuccaauauuu

SEQ ID NO: 1251819 - RNA, 19 nt, Homo sapiens
  misc_RNA (1)...(19): siRNA sense strand
caucagaauuggguguaca

SEQ ID NO: 1251820 - RNA, 19 nt, Homo sapiens
  misc_RNA (1)...(19): siRNA sense strand
acucuucuaugcuguguuc

SEQ ID NO: 1251821 - RNA, 19 nt, Homo sapiens
  misc_RNA (1)...(19): siRNA sense strand
gaugcccacccaagaaguu

SEQ ID NO: 1251822 - RNA, 19 nt, Homo sapiens
  misc_RNA (1)...(19): siRNA sense strand
ggaccugaaagaugaugga

SEQ ID NO: 1251823 - RNA, 19 nt, Homo sapiens
  misc_RNA (1)...(19): siRNA sense strand
gagugaugcccacccaaga

SEQ ID NO: 1251824 - RNA, 19 nt, Homo sapiens
  misc_RNA (1)...(19): siRNA sense strand
gauacggaaacuagaagga

SEQ ID NO: 1251825 - RNA, 19 nt, Homo sapiens
  misc_RNA (1)...(19): siRNA sense strand
ggucaacgagaaagagauc

SEQ ID NO: 1251826 - RNA, 19 nt, Homo sapiens
  misc_RNA (1)...(19): siRNA sense strand
guguacagcugugcauucu

SEQ ID NO: 1251827 - RNA, 19 nt, Homo sapiens
  misc_RNA (1)...(19): siRNA sense strand
guucaggagcugccgauuc

SEQ ID NO: 1251828 - RNA, 19 nt, Homo sapiens
  misc_RNA (1)...(19): siRNA sense strand
ggucuuugcugugccuucu

SEQ ID NO: 1251829 - RNA, 19 nt, Homo sapiens
  misc_RNA (1)...(19): siRNA sense strand
ggaauauggauaaauacac

SEQ ID NO: 1251830 - RNA, 19 nt, Homo sapiens
  misc_RNA (1)...(19): siRNA sense strand
ugaaagaugauggaaacau

SEQ ID NO: 1251831 - RNA, 19 nt, Homo sapiens
  misc_RNA (1)...(19): siRNA sense strand
ucucucguaucguauuuag

SEQ ID NO: 1251832 - RNA, 19 nt, Homo sapiens
  misc_RNA (1)...(19): siRNA sense strand
gguguacagcugugcauuc

SEQ ID NO: 1251833 - RNA, 19 nt, Homo sapiens
  misc_RNA (1)...(19): siRNA sense strand
ucuccugacucuucuaugc

SEQ ID NO: 1251834 - RNA, 19 nt, Homo sapiens
  misc_RNA (1)...(19): siRNA sense strand
auggagacauucugaugga

SEQ ID NO: 1251835 - RNA, 19 nt, Homo sapiens
  misc_RNA (1)...(19): siRNA sense strand
cuggagaauugaugaggau

SEQ ID NO: 1251836 - RNA, 19 nt, Homo sapiens
  misc_RNA (1)...(19): siRNA sense strand
ggguacgaucuguaucuuu

SEQ ID NO: 1251837 - RNA, 19 nt, Homo sapiens
  misc_RNA (1)...(19): siRNA sense strand
ugcauucucuccugacucu

SEQ ID NO: 1251838 - RNA, 19 nt, Homo sapiens
  misc_RNA (1)...(19): siRNA sense strand
cuccuuaacuugguagauc

SEQ ID NO: 1251839 - RNA, 19 nt, Homo sapiens
  misc_RNA (1)...(19): siRNA sense strand
uaccauagcuauagugaua

SEQ ID NO: 1251840 - RNA, 19 nt, Homo sapiens
  misc_RNA (1)...(19): siRNA sense strand
gaguguggauguauuguua

SEQ ID NO: 1251841 - RNA, 19 nt, Homo sapiens
  misc_RNA (1)...(19): siRNA sense strand
gauuauugcugcaucauuu

SEQ ID NO: 1251842 - RNA, 19 nt, Homo sapiens
  misc_RNA (1)...(19): siRNA sense strand
acagguggcuugucuaaua

SEQ ID NO: 1251843 - RNA, 19 nt, Homo sapiens
  misc_RNA (1)...(19): siRNA sense strand
gcaaugacguauuauggaa

SEQ ID NO: 1251844 - RNA, 19 nt, Homo sapiens
  misc_RNA (1)...(19): siRNA sense strand
ucaaauaucucuugggaau

SEQ ID NO: 1251845 - RNA, 19 nt, Homo sapiens
  misc_RNA (1)...(19): siRNA sense strand
gaacaaaacacauugcuua

SEQ ID NO: 1251846 - RNA, 19 nt, Homo sapiens
  misc_RNA (1)...(19): siRNA sense strand
uuaaagagcugaaugaaca

SEQ ID NO: 1251847 - RNA, 19 nt, Homo sapiens
  misc_RNA (1)...(19): siRNA sense strand
gcaaugacuguaaguauaa

SEQ ID NO: 1251848 - RNA, 19 nt, Homo sapiens
  misc_RNA (1)...(19): siRNA sense strand
agacagaaauggacaguga

SEQ ID NO: 1251849 - RNA, 19 nt, Homo sapiens
  misc_RNA (1)...(19): siRNA sense strand
ggaauucccucaccuagag

SEQ ID NO: 1251850 - RNA, 19 nt, Homo sapiens
  misc_RNA (1)...(19): siRNA sense strand
caauaggaccuuugcuuua

SEQ ID NO: 1251851 - RNA, 19 nt, Homo sapiens
  misc_RNA (1)...(19): siRNA sense strand
agaaguaguuggucauauu

SEQ ID NO: 1251852 - RNA, 19 nt, Homo sapiens
  misc_RNA (1)...(19): siRNA sense strand
ggaaaacacauauggauua

SEQ ID NO: 1251853 - RNA, 19 nt, Homo sapiens
  misc_RNA (1)...(19): siRNA sense strand
gcccauggccucagcaaua

SEQ ID NO: 1251854 - RNA, 19 nt, Homo sapiens
  misc_RNA (1)...(19): siRNA sense strand
ggacugaagggaaugcuaa

SEQ ID NO: 1251855 - RNA, 19 nt, Homo sapiens
  misc_RNA (1)...(19): siRNA sense strand
gcaggaguguggauguauu

SEQ ID NO: 1251856 - RNA, 19 nt, Homo sapiens
  misc_RNA (1)...(19): siRNA sense strand
aaauaucucuugggaauga

SEQ ID NO: 1251857 - RNA, 19 nt, Homo sapiens
  misc_RNA (1)...(19): siRNA sense strand
gcaauaagucauauccauu

SEQ ID NO: 1251858 - RNA, 19 nt, Homo sapiens
  misc_RNA (1)...(19): siRNA sense strand
ggacugcuguuugguguug

SEQ ID NO: 1251859 - RNA, 19 nt, Homo sapiens
  misc_RNA (1)...(19): siRNA sense strand
ccacuuggauucuuuuaua

SEQ ID NO: 1251860 - RNA, 19 nt, Homo sapiens
  misc_RNA (1)...(19): siRNA sense strand
ucacaguccugcccuaaug

SEQ ID NO: 1251861 - RNA, 19 nt, Homo sapiens
  misc_RNA (1)...(19): siRNA sense strand
uaaaguuguucuuccugua

SEQ ID NO: 1251862 - RNA, 19 nt, Homo sapiens
  misc_RNA (1)...(19): siRNA sense strand
ggugaucacugaagcuuuc

SEQ ID NO: 1251863 - RNA, 19 nt, Homo sapiens
  misc_RNA (1)...(19): siRNA sense strand
cuaauacaguuccgagauu

SEQ ID NO: 1251864 - RNA, 19 nt, Homo sapiens
  misc_RNA (1)...(19): siRNA sense strand
cugcaucauuugcuuguua

SEQ ID NO: 1251865 - RNA, 19 nt, Homo sapiens
  misc_RNA (1)...(19): siRNA sense strand
gagcaaugacuguaaguau

SEQ ID NO: 1251866 - RNA, 19 nt, Homo sapiens
  misc_RNA (1)...(19): siRNA sense strand
uaaaaucgauuggggaaua

SEQ ID NO: 1251867 - RNA, 19 nt, Homo sapiens
  misc_RNA (1)...(19): siRNA sense strand
gggcuuauccgacuuugaa

SEQ ID NO: 1251868 - RNA, 19 nt, Homo sapiens
  misc_RNA (1)...(19): siRNA sense strand
uaauacaguuccgagauuu

SEQ ID NO: 1251869 - RNA, 19 nt, Homo sapiens
  misc_RNA (1)...(19): siRNA sense strand
aaaccuagacucagagaaa

SEQ ID NO: 1251870 - RNA, 19 nt, Homo sapiens
  misc_RNA (1)...(19): siRNA sense strand
gcaccacauuacaaucuga

SEQ ID NO: 1251871 - RNA, 19 nt, Homo sapiens
  misc_RNA (1)...(19): siRNA sense strand
uuguacagcuuccuugaua

SEQ ID NO: 1251872 - RNA, 19 nt, Homo sapiens
  misc_RNA (1)...(19): siRNA sense strand
agcaaugacuguaaguaua

SEQ ID NO: 1251873 - RNA, 19 nt, Homo sapiens
  misc_RNA (1)...(19): siRNA sense strand
gcccuaaugagaaguguua

SEQ ID NO: 1251874 - RNA, 19 nt, Homo sapiens
  misc_RNA (1)...(19): siRNA sense strand
guacagcuuccuugauaaa

SEQ ID NO: 1251875 - RNA, 19 nt, Homo sapiens
  misc_RNA (1)...(19): siRNA sense strand
gcacccaguguuugguuua

SEQ ID NO: 1251876 - RNA, 19 nt, Homo sapiens
  misc_RNA (1)...(19): siRNA sense strand
gaaggcgacugcccauuuu

SEQ ID NO: 1251877 - RNA, 19 nt, Homo sapiens
  misc_RNA (1)...(19): siRNA sense strand
gaacggauugucccucaga

SEQ ID NO: 1251878 - RNA, 19 nt, Homo sapiens
  misc_RNA (1)...(19): siRNA sense strand
gccuugacauccuuaauau

SEQ ID NO: 1251879 - RNA, 19 nt, Homo sapiens
  misc_RNA (1)...(19): siRNA sense strand
gguaucugcugcaauaagu

SEQ ID NO: 1251880 - RNA, 19 nt, Homo sapiens
  misc_RNA (1)...(19): siRNA sense strand
caagagcaaugacuguaag

SEQ ID NO: 1251881 - RNA, 19 nt, Homo sapiens
  misc_RNA (1)...(19): siRNA sense strand
gauaggacgcuucccaaga

SEQ ID NO: 1251882 - RNA, 19 nt, Homo sapiens
  misc_RNA (1)...(19): siRNA sense strand
gggauaauguuggcaguuc

SEQ ID NO: 1251883 - RNA, 19 nt, Homo sapiens
  misc_RNA (1)...(19): siRNA sense strand
ggaaugaaaaugccauaua

SEQ ID NO: 1251884 - RNA, 19 nt, Homo sapiens
  misc_RNA (1)...(19): siRNA sense strand
caacugcaaugaagaagcu

SEQ ID NO: 1251885 - RNA, 19 nt, Homo sapiens
  misc_RNA (1)...(19): siRNA sense strand
gagcugaaugaacaguuua

SEQ ID NO: 1251886 - RNA, 19 nt, Homo sapiens
  misc_RNA (1)...(19): siRNA sense strand
ggauuggccuuugcuguuc

SEQ ID NO: 1251887 - RNA, 19 nt, Homo sapiens
  misc_RNA (1)...(19): siRNA sense strand
gaaguaguuggucauauuc

SEQ ID NO: 1251888 - RNA, 19 nt, Homo sapiens
  misc_RNA (1)...(19): siRNA sense strand
ggccuuugcuguucucuca

SEQ ID NO: 1251889 - RNA, 19 nt, Homo sapiens
  misc_RNA (1)...(19): siRNA sense strand
gcacaggagcgaagacaca

SEQ ID NO: 1251890 - RNA, 19 nt, Homo sapiens
  misc_RNA (1)...(19): siRNA sense strand
caauaagucauauccauuc

SEQ ID NO: 1251891 - RNA, 19 nt, Homo sapiens
  misc_RNA (1)...(19): siRNA sense strand
ugaagggaaugcuaauaca

SEQ ID NO: 1251892 - RNA, 19 nt, Homo sapiens
  misc_RNA (1)...(19): siRNA sense strand
ucucugcggugaucacuga

SEQ ID NO: 1251893 - RNA, 19 nt, Homo sapiens
  misc_RNA (1)...(19): siRNA sense strand
ccaagagcaaugacuguaa

SEQ ID NO: 1251894 - RNA, 19 nt, Homo sapiens
  misc_RNA (1)...(19): siRNA sense strand
uggcuugucuaauaucuug

SEQ ID NO: 1251895 - RNA, 19 nt, Homo sapiens
  misc_RNA (1)...(19): siRNA sense strand
agagcugaaugaacaguuu

SEQ ID NO: 1251896 - RNA, 19 nt, Homo sapiens
  misc_RNA (1)...(19): siRNA sense strand
ggauaauguuggcaguuca

SEQ ID NO: 1251897 - RNA, 19 nt, Homo sapiens
  misc_RNA (1)...(19): siRNA sense strand
gguccuuguucuuguuaaa

SEQ ID NO: 1251898 - RNA, 19 nt, Homo sapiens
  misc_RNA (1)...(19): siRNA sense strand
agaaggcgacugcccauuu

SEQ ID NO: 1251899 - RNA, 19 nt, Homo sapiens
  misc_RNA (1)...(19): siRNA sense strand
caaggaauucccucaccua

SEQ ID NO: 1251900 - RNA, 19 nt, Homo sapiens
  misc_RNA (1)...(19): siRNA sense strand
uuaauucccuauccaaugg

SEQ ID NO: 1251901 - RNA, 19 nt, Homo sapiens
  misc_RNA (1)...(19): siRNA sense strand
gaaggacggcuggccugua

SEQ ID NO: 1251902 - RNA, 19 nt, Homo sapiens
  misc_RNA (1)...(19): siRNA sense strand
ggccucagcaauauaguuu

SEQ ID NO: 1251903 - RNA, 19 nt, Homo sapiens
  misc_RNA (1)...(19): siRNA sense strand
gacguauuauggaaaccua

SEQ ID NO: 1251904 - RNA, 19 nt, Homo sapiens
  misc_RNA (1)...(19): siRNA sense strand
gcuguuugguguuguuugu

SEQ ID NO: 1251905 - RNA, 19 nt, Homo sapiens
  misc_RNA (1)...(19): siRNA sense strand
cagguggcuugucuaauau

SEQ ID NO: 1251906 - RNA, 19 nt, Homo sapiens
  misc_RNA (1)...(19): siRNA sense strand
ucuguuuccugccauaauu

SEQ ID NO: 1251907 - RNA, 19 nt, Homo sapiens
  misc_RNA (1)...(19): siRNA sense strand
ucagcaauauaguuucuuc

SEQ ID NO: 1251908 - RNA, 19 nt, Homo sapiens
  misc_RNA (1)...(19): siRNA sense strand
gauugucccucagaacaug

SEQ ID NO: 1251909 - RNA, 19 nt, Homo sapiens
  misc_RNA (1)...(19): siRNA sense strand
ugauucagguggccauguu

SEQ ID NO: 1251910 - RNA, 19 nt, Homo sapiens
  misc_RNA (1)...(19): siRNA sense strand
ccagugugaagacauuaua

SEQ ID NO: 1251911 - RNA, 19 nt, Homo sapiens
  misc_RNA (1)...(19): siRNA sense strand
cagaaucucaccacacaga

SEQ ID NO: 1251912 - RNA, 19 nt, Homo sapiens
  misc_RNA (1)...(19): siRNA sense strand
acacagguggcuugucuaa

SEQ ID NO: 1251913 - RNA, 19 nt, Homo sapiens
  misc_RNA (1)...(19): siRNA sense strand
gaaaacacauauggauuag

SEQ ID NO: 1251914 - RNA, 19 nt, Homo sapiens
  misc_RNA (1)...(19): siRNA sense strand
cuucacaagucaaauaucu

SEQ ID NO: 1251915 - RNA, 19 nt, Homo sapiens
  misc_RNA (1)...(19): siRNA sense strand
gcuaauacaguuccgagau

SEQ ID NO: 1251916 - RNA, 19 nt, Homo sapiens
  misc_RNA (1)...(19): siRNA sense strand
aucgguaucugcugcaaua

SEQ ID NO: 1251917 - RNA, 19 nt, Homo sapiens
  misc_RNA (1)...(19): siRNA sense strand
gagaaguguuauuuaaucc

SEQ ID NO: 1251918 - RNA, 19 nt, Homo sapiens
  misc_RNA (1)...(19): siRNA sense strand
uuauaugggucucuguuuc

SEQ ID NO: 1251919 - RNA, 19 nt, Homo sapiens
  misc_RNA (1)...(19): siRNA sense strand
ccaugcuuguugagguuua

SEQ ID NO: 1251920 - RNA, 19 nt, Homo sapiens
  misc_RNA (1)...(19): siRNA sense strand
gaacaugauccaaaaggaa

SEQ ID NO: 1251921 - RNA, 19 nt, Homo sapiens
  misc_RNA (1)...(19): siRNA sense strand
gguguuguuuguaccauag

SEQ ID NO: 1251922 - RNA, 19 nt, Homo sapiens
  misc_RNA (1)...(19): siRNA sense strand
ccacacagaguaacacaag

SEQ ID NO: 1251923 - RNA, 19 nt, Homo sapiens
  misc_RNA (1)...(19): siRNA sense strand
aauaggaccuuugcuuuac

SEQ ID NO: 1251924 - RNA, 19 nt, Homo sapiens
  misc_RNA (1)...(19): siRNA sense strand
uaaagugaagacagaaaug

SEQ ID NO: 1251925 - RNA, 19 nt, Homo sapiens
  misc_RNA (1)...(19): siRNA sense strand
uggauugggcaccacauua

SEQ ID NO: 1251926 - RNA, 19 nt, Homo sapiens
  misc_RNA (1)...(19): siRNA sense strand
cacauuacaaucugaaaga

SEQ ID NO: 1251927 - RNA, 19 nt, Homo sapiens
  misc_RNA (1)...(19): siRNA sense strand
ggaguguggauguauuguu

SEQ ID NO: 1251928 - RNA, 19 nt, Homo sapiens
  misc_RNA (1)...(19): siRNA sense strand
cccaguguuugguuuauau

SEQ ID NO: 1251929 - RNA, 19 nt, Homo sapiens
  misc_RNA (1)...(19): siRNA sense strand
gagucuccaugcuuguuga

SEQ ID NO: 1251930 - RNA, 19 nt, Homo sapiens
  misc_RNA (1)...(19): siRNA sense strand
acauauggauuagaaguag

SEQ ID NO: 1251931 - RNA, 19 nt, Homo sapiens
  misc_RNA (1)...(19): siRNA sense strand
uguucuuccuguagauuua

SEQ ID NO: 1251932 - RNA, 19 nt, Homo sapiens
  misc_RNA (1)...(19): siRNA sense strand
ugcagaaucucaccacaca

SEQ ID NO: 1251933 - RNA, 19 nt, Homo sapiens
  misc_RNA (1)...(19): siRNA sense strand
cuugacauccuuaauauca

SEQ ID NO: 1251934 - RNA, 19 nt, Homo sapiens
  misc_RNA (1)...(19): siRNA sense strand
ggaaaccuagacucagaga

SEQ ID NO: 1251935 - RNA, 19 nt, Homo sapiens
  misc_RNA (1)...(19): siRNA sense strand
gauguauuguuagcccauu

SEQ ID NO: 1251936 - RNA, 19 nt, Homo sapiens
  misc_RNA (1)...(19): siRNA sense strand
ggaauaugggucaguacau

SEQ ID NO: 1251937 - RNA, 19 nt, Homo sapiens
  misc_RNA (1)...(19): siRNA sense strand
gcucaaggaucugccaaaa

SEQ ID NO: 1251938 - RNA, 19 nt, Homo sapiens
  misc_RNA (1)...(19): siRNA sense strand
uagaaguaguuggucauau

SEQ ID NO: 1251939 - RNA, 19 nt, Homo sapiens
  misc_RNA (1)...(19): siRNA sense strand
uaccauagcuauagugaua

SEQ ID NO: 1251940 - RNA, 19 nt, Homo sapiens
  misc_RNA (1)...(19): siRNA sense strand
gaguguggauguauuguua

SEQ ID NO: 1251941 - RNA, 19 nt, Homo sapiens
  misc_RNA (1)...(19): siRNA sense strand
gauuauugcugcaucauuu

SEQ ID NO: 1251942 - RNA, 19 nt, Homo sapiens
  misc_RNA (1)...(19): siRNA sense strand
acagguggcuugucuaaua

SEQ ID NO: 1251943 - RNA, 19 nt, Homo sapiens
  misc_RNA (1)...(19): siRNA sense strand
gcaaugacguauuauggaa

SEQ ID NO: 1251944 - RNA, 19 nt, Homo sapiens
  misc_RNA (1)...(19): siRNA sense strand
ucaaauaucucuugggaau

SEQ ID NO: 1251945 - RNA, 19 nt, Homo sapiens
  misc_RNA (1)...(19): siRNA sense strand
gaacaaaacacauugcuua

SEQ ID NO: 1251946 - RNA, 19 nt, Homo sapiens
  misc_RNA (1)...(19): siRNA sense strand
uuaaagagcugaaugaaca

SEQ ID NO: 1251947 - RNA, 19 nt, Homo sapiens
  misc_RNA (1)...(19): siRNA sense strand
gcaaugacuguaaguauaa

SEQ ID NO: 1251948 - RNA, 19 nt, Homo sapiens
  misc_RNA (1)...(19): siRNA sense strand
agacagaaauggacaguga

SEQ ID NO: 1251949 - RNA, 19 nt, Homo sapiens
  misc_RNA (1)...(19): siRNA sense strand
ggaauucccucaccuagag

SEQ ID NO: 1251950 - RNA, 19 nt, Homo sapiens
  misc_RNA (1)...(19): siRNA sense strand
caauaggaccuuugcuuua

SEQ ID NO: 1251951 - RNA, 19 nt, Homo sapiens
  misc_RNA (1)...(19): siRNA sense strand
agaaguaguuggucauauu

SEQ ID NO: 1251952 - RNA, 19 nt, Homo sapiens
  misc_RNA (1)...(19): siRNA sense strand
ggaaaacacauauggauua

SEQ ID NO: 1251953 - RNA, 19 nt, Homo sapiens
  misc_RNA (1)...(19): siRNA sense strand
gcccauggccucagcaaua

SEQ ID NO: 1251954 - RNA, 19 nt, Homo sapiens
  misc_RNA (1)...(19): siRNA sense strand
ggacugaagggaaugcuaa

SEQ ID NO: 1251955 - RNA, 19 nt, Homo sapiens
  misc_RNA (1)...(19): siRNA sense strand
gcaggaguguggauguauu

SEQ ID NO: 1251956 - RNA, 19 nt, Homo sapiens
  misc_RNA (1)...(19): siRNA sense strand
aaauaucucuugggaauga

SEQ ID NO: 1251957 - RNA, 19 nt, Homo sapiens
  misc_RNA (1)...(19): siRNA sense strand
gcaauaagucauauccauu

SEQ ID NO: 1251958 - RNA, 19 nt, Homo sapiens
  misc_RNA (1)...(19): siRNA sense strand
ggacugcuguuugguguug

SEQ ID NO: 1251959 - RNA, 19 nt, Homo sapiens
  misc_RNA (1)...(19): siRNA sense strand
ccacuuggauucuuuuaua

SEQ ID NO: 1251960 - RNA, 19 nt, Homo sapiens
  misc_RNA (1)...(19): siRNA sense strand
ucacaguccugcccuaaug

SEQ ID NO: 1251961 - RNA, 19 nt, Homo sapiens
  misc_RNA (1)...(19): siRNA sense strand
uaaaguuguucuuccugua

SEQ ID NO: 1251962 - RNA, 19 nt, Homo sapiens
  misc_RNA (1)...(19): siRNA sense strand
ggugaucacugaagcuuuc

SEQ ID NO: 1251963 - RNA, 19 nt, Homo sapiens
  misc_RNA (1)...(19): siRNA sense strand
cuaauacaguuccgagauu

SEQ ID NO: 1251964 - RNA, 19 nt, Homo sapiens
  misc_RNA (1)...(19): siRNA sense strand
cugcaucauuugcuuguua

SEQ ID NO: 1251965 - RNA, 19 nt, Homo sapiens
  misc_RNA (1)...(19): siRNA sense strand
gagcaaugacuguaaguau

SEQ ID NO: 1251966 - RNA, 19 nt, Homo sapiens
  misc_RNA (1)...(19): siRNA sense strand
uaaaaucgauuggggaaua

SEQ ID NO: 1251967 - RNA, 19 nt, Homo sapiens
  misc_RNA (1)...(19): siRNA sense strand
gggcuuauccgacuuugaa

SEQ ID NO: 1251968 - RNA, 19 nt, Homo sapiens
  misc_RNA (1)...(19): siRNA sense strand
uaauacaguuccgagauuu

SEQ ID NO: 1251969 - RNA, 19 nt, Homo sapiens
  misc_RNA (1)...(19): siRNA sense strand
aaaccuagacucagagaaa

SEQ ID NO: 1251970 - RNA, 19 nt, Homo sapiens
  misc_RNA (1)...(19): siRNA sense strand
gcaccacauuacaaucuga

SEQ ID NO: 1251971 - RNA, 19 nt, Homo sapiens
  misc_RNA (1)...(19): siRNA sense strand
uuguacagcuuccuugaua

SEQ ID NO: 1251972 - RNA, 19 nt, Homo sapiens
  misc_RNA (1)...(19): siRNA sense strand
agcaaugacuguaaguaua

SEQ ID NO: 1251973 - RNA, 19 nt, Homo sapiens
  misc_RNA (1)...(19): siRNA sense strand
gcccuaaugagaaguguua

SEQ ID NO: 1251974 - RNA, 19 nt, Homo sapiens
  misc_RNA (1)...(19): siRNA sense strand
guacagcuuccuugauaaa

SEQ ID NO: 1251975 - RNA, 19 nt, Homo sapiens
  misc_RNA (1)...(19): siRNA sense strand
gcacccaguguuugguuua

SEQ ID NO: 1251976 - RNA, 19 nt, Homo sapiens
  misc_RNA (1)...(19): siRNA sense strand
gaaggcgacugcccauuuu

SEQ ID NO: 1251977 - RNA, 19 nt, Homo sapiens
  misc_RNA (1)...(19): siRNA sense strand
gaacggauugucccucaga

SEQ ID NO: 1251978 - RNA, 19 nt, Homo sapiens
  misc_RNA (1)...(19): siRNA sense strand
gccuugacauccuuaauau

SEQ ID NO: 1251979 - RNA, 19 nt, Homo sapiens
  misc_RNA (1)...(19): siRNA sense strand
gguaucugcugcaauaagu

SEQ ID NO: 1251980 - RNA, 19 nt, Homo sapiens
  misc_RNA (1)...(19): siRNA sense strand
caagagcaaugacuguaag

SEQ ID NO: 1251981 - RNA, 19 nt, Homo sapiens
  misc_RNA (1)...(19): siRNA sense strand
gauaggacgcuucccaaga

SEQ ID NO: 1251982 - RNA, 19 nt, Homo sapiens
  misc_RNA (1)...(19): siRNA sense strand
gggauaauguuggcaguuc

SEQ ID NO: 1251983 - RNA, 19 nt, Homo sapiens
  misc_RNA (1)...(19): siRNA sense strand
ggaaugaaaaugccauaua

SEQ ID NO: 1251984 - RNA, 19 nt, Homo sapiens
  misc_RNA (1)...(19): siRNA sense strand
caacugcaaugaagaagcu

SEQ ID NO: 1251985 - RNA, 19 nt, Homo sapiens
  misc_RNA (1)...(19): siRNA sense strand
gagcugaaugaacaguuua

SEQ ID NO: 1251986 - RNA, 19 nt, Homo sapiens
  misc_RNA (1)...(19): siRNA sense strand
ggauuggccuuugcuguuc

SEQ ID NO: 1251987 - RNA, 19 nt, Homo sapiens
  misc_RNA (1)...(19): siRNA sense strand
gaaguaguuggucauauuc

SEQ ID NO: 1251988 - RNA, 19 nt, Homo sapiens
  misc_RNA (1)...(19): siRNA sense strand
ggccuuugcuguucucuca

SEQ ID NO: 1251989 - RNA, 19 nt, Homo sapiens
  misc_RNA (1)...(19): siRNA sense strand
gcacaggagcgaagacaca

SEQ ID NO: 1251990 - RNA, 19 nt, Homo sapiens
  misc_RNA (1)...(19): siRNA sense strand
caauaagucauauccauuc

SEQ ID NO: 1251991 - RNA, 19 nt, Homo sapiens
  misc_RNA (1)...(19): siRNA sense strand
ugaagggaaugcuaauaca

SEQ ID NO: 1251992 - RNA, 19 nt, Homo sapiens
  misc_RNA (1)...(19): siRNA sense strand
ucucugcggugaucacuga

SEQ ID NO: 1251993 - RNA, 19 nt, Homo sapiens
  misc_RNA (1)...(19): siRNA sense strand
ccaagagcaaugacuguaa

SEQ ID NO: 1251994 - RNA, 19 nt, Homo sapiens
  misc_RNA (1)...(19): siRNA sense strand
uggcuugucuaauaucuug

SEQ ID NO: 1251995 - RNA, 19 nt, Homo sapiens
  misc_RNA (1)...(19): siRNA sense strand
agagcugaaugaacaguuu

SEQ ID NO: 1251996 - RNA, 19 nt, Homo sapiens
  misc_RNA (1)...(19): siRNA sense strand
ggauaauguuggcaguuca

SEQ ID NO: 1251997 - RNA, 19 nt, Homo sapiens
  misc_RNA (1)...(19): siRNA sense strand
gguccuuguucuuguuaaa

SEQ ID NO: 1251998 - RNA, 19 nt, Homo sapiens
  misc_RNA (1)...(19): siRNA sense strand
agaaggcgacugcccauuu

SEQ ID NO: 1251999 - RNA, 19 nt, Homo sapiens
  misc_RNA (1)...(19): siRNA sense strand
caaggaauucccucaccua

SEQ ID NO: 1252000 - RNA, 19 nt, Homo sapiens
  misc_RNA (1)...(19): siRNA sense strand
uuaauucccuauccaaugg

SEQ ID NO: 1252001 - RNA, 19 nt, Homo sapiens
  misc_RNA (1)...(19): siRNA sense strand
gaaggacggcuggccugua

SEQ ID NO: 1252002 - RNA, 19 nt, Homo sapiens
  misc_RNA (1)...(19): siRNA sense strand
ggccucagcaauauaguuu

SEQ ID NO: 1252003 - RNA, 19 nt, Homo sapiens
  misc_RNA (1)...(19): siRNA sense strand
gacguauuauggaaaccua

SEQ ID NO: 1252004 - RNA, 19 nt, Homo sapiens
  misc_RNA (1)...(19): siRNA sense strand
gcuguuugguguuguuugu

SEQ ID NO: 1252005 - RNA, 19 nt, Homo sapiens
  misc_RNA (1)...(19): siRNA sense strand
cagguggcuugucuaauau

SEQ ID NO: 1252006 - RNA, 19 nt, Homo sapiens
  misc_RNA (1)...(19): siRNA sense strand
ucuguuuccugccauaauu

SEQ ID NO: 1252007 - RNA, 19 nt, Homo sapiens
  misc_RNA (1)...(19): siRNA sense strand
ucagcaauauaguuucuuc

SEQ ID NO: 1252008 - RNA, 19 nt, Homo sapiens
  misc_RNA (1)...(19): siRNA sense strand
gauugucccucagaacaug

SEQ ID NO: 1252009 - RNA, 19 nt, Homo sapiens
  misc_RNA (1)...(19): siRNA sense strand
ugauucagguggccauguu

SEQ ID NO: 1252010 - RNA, 19 nt, Homo sapiens
  misc_RNA (1)...(19): siRNA sense strand
ccagugugaagacauuaua

SEQ ID NO: 1252011 - RNA, 19 nt, Homo sapiens
  misc_RNA (1)...(19): siRNA sense strand
cagaaucucaccacacaga

SEQ ID NO: 1252012 - RNA, 19 nt, Homo sapiens
  misc_RNA (1)...(19): siRNA sense strand
acacagguggcuugucuaa

SEQ ID NO: 1252013 - RNA, 19 nt, Homo sapiens
  misc_RNA (1)...(19): siRNA sense strand
gaaaacacauauggauuag

SEQ ID NO: 1252014 - RNA, 19 nt, Homo sapiens
  misc_RNA (1)...(19): siRNA sense strand
cuucacaagucaaauaucu

SEQ ID NO: 1252015 - RNA, 19 nt, Homo sapiens
  misc_RNA (1)...(19): siRNA sense strand
gcuaauacaguuccgagau

SEQ ID NO: 1252016 - RNA, 19 nt, Homo sapiens
  misc_RNA (1)...(19): siRNA sense strand
aucgguaucugcugcaaua

SEQ ID NO: 1252017 - RNA, 19 nt, Homo sapiens
  misc_RNA (1)...(19): siRNA sense strand
gagaaguguuauuuaaucc

SEQ ID NO: 1252018 - RNA, 19 nt, Homo sapiens
  misc_RNA (1)...(19): siRNA sense strand
uuauaugggucucuguuuc

SEQ ID NO: 1252019 - RNA, 19 nt, Homo sapiens
  misc_RNA (1)...(19): siRNA sense strand
ccaugcuuguugagguuua

SEQ ID NO: 1252020 - RNA, 19 nt, Homo sapiens
  misc_RNA (1)...(19): siRNA sense strand
gaacaugauccaaaaggaa

SEQ ID NO: 1252021 - RNA, 19 nt, Homo sapiens
  misc_RNA (1)...(19): siRNA sense strand
gguguuguuuguaccauag

SEQ ID NO: 1252022 - RNA, 19 nt, Homo sapiens
  misc_RNA (1)...(19): siRNA sense strand
ccacacagaguaacacaag

SEQ ID NO: 1252023 - RNA, 19 nt, Homo sapiens
  misc_RNA (1)...(19): siRNA sense strand
aauaggaccuuugcuuuac

SEQ ID NO: 1252024 - RNA, 19 nt, Homo sapiens
  misc_RNA (1)...(19): siRNA sense strand
uaaagugaagacagaaaug

SEQ ID NO: 1252025 - RNA, 19 nt, Homo sapiens
  misc_RNA (1)...(19): siRNA sense strand
uggauugggcaccacauua

SEQ ID NO: 1252026 - RNA, 19 nt, Homo sapiens
  misc_RNA (1)...(19): siRNA sense strand
cacauuacaaucugaaaga

SEQ ID NO: 1252027 - RNA, 19 nt, Homo sapiens
  misc_RNA (1)...(19): siRNA sense strand
ggaguguggauguauuguu

SEQ ID NO: 1252028 - RNA, 19 nt, Homo sapiens
  misc_RNA (1)...(19): siRNA sense strand
cccaguguuugguuuauau

SEQ ID NO: 1252029 - RNA, 19 nt, Homo sapiens
  misc_RNA (1)...(19): siRNA sense strand
gagucuccaugcuuguuga

SEQ ID NO: 1252030 - RNA, 19 nt, Homo sapiens
  misc_RNA (1)...(19): siRNA sense strand
acauauggauuagaaguag

SEQ ID NO: 1252031 - RNA, 19 nt, Homo sapiens
  misc_RNA (1)...(19): siRNA sense strand
uguucuuccuguagauuua

SEQ ID NO: 1252032 - RNA, 19 nt, Homo sapiens
  misc_RNA (1)...(19): siRNA sense strand
ugcagaaucucaccacaca

SEQ ID NO: 1252033 - RNA, 19 nt, Homo sapiens
  misc_RNA (1)...(19): siRNA sense strand
cuugacauccuuaauauca

SEQ ID NO: 1252034 - RNA, 19 nt, Homo sapiens
  misc_RNA (1)...(19): siRNA sense strand
ggaaaccuagacucagaga

SEQ ID NO: 1252035 - RNA, 19 nt, Homo sapiens
  misc_RNA (1)...(19): siRNA sense strand
gauguauuguuagcccauu

SEQ ID NO: 1252036 - RNA, 19 nt, Homo sapiens
  misc_RNA (1)...(19): siRNA sense strand
ggaauaugggucaguacau

SEQ ID NO: 1252037 - RNA, 19 nt, Homo sapiens
  misc_RNA (1)...(19): siRNA sense strand
gcucaaggaucugccaaaa

SEQ ID NO: 1252038 - RNA, 19 nt, Homo sapiens
  misc_RNA (1)...(19): siRNA sense strand
uagaaguaguuggucauau

SEQ ID NO: 1252039 - RNA, 19 nt, Homo sapiens
  misc_RNA (1)...(19): siRNA sense strand
ugaccaagauugucucaua

SEQ ID NO: 1252040 - RNA, 19 nt, Homo sapiens
  misc_RNA (1)...(19): siRNA sense strand
gcacuucuauagcgucaaa

SEQ ID NO: 1252041 - RNA, 19 nt, Homo sapiens
  misc_RNA (1)...(19): siRNA sense strand
gcacugcucaggcuggaua

SEQ ID NO: 1252042 - RNA, 19 nt, Homo sapiens
  misc_RNA (1)...(19): siRNA sense strand
gcacaucccaggcuucuca

SEQ ID NO: 1252043 - RNA, 19 nt, Homo sapiens
  misc_RNA (1)...(19): siRNA sense strand
cagagugccuggauggaaa

SEQ ID NO: 1252044 - RNA, 19 nt, Homo sapiens
  misc_RNA (1)...(19): siRNA sense strand
caacuccgauuccauguac

SEQ ID NO: 1252045 - RNA, 19 nt, Homo sapiens
  misc_RNA (1)...(19): siRNA sense strand
ggacucgccacccauguuu

SEQ ID NO: 1252046 - RNA, 19 nt, Homo sapiens
  misc_RNA (1)...(19): siRNA sense strand
ggaggccacuggagcaagu

SEQ ID NO: 1252047 - RNA, 19 nt, Homo sapiens
  misc_RNA (1)...(19): siRNA sense strand
gcaagcugcugcugacacu

SEQ ID NO: 1252048 - RNA, 19 nt, Homo sapiens
  misc_RNA (1)...(19): siRNA sense strand
gaccaagauugucucauac

SEQ ID NO: 1252049 - RNA, 19 nt, Homo sapiens
  misc_RNA (1)...(19): siRNA sense strand
gcaugugcauuuccuaacu

SEQ ID NO: 1252050 - RNA, 19 nt, Homo sapiens
  misc_RNA (1)...(19): siRNA sense strand
caagauugucucauaccua

SEQ ID NO: 1252051 - RNA, 19 nt, Homo sapiens
  misc_RNA (1)...(19): siRNA sense strand
ucaaggcccugaccacucu

SEQ ID NO: 1252052 - RNA, 19 nt, Homo sapiens
  misc_RNA (1)...(19): siRNA sense strand
gagcuuguggucaucauug

SEQ ID NO: 1252053 - RNA, 19 nt, Homo sapiens
  misc_RNA (1)...(19): siRNA sense strand
gcagagugccuggauggaa

SEQ ID NO: 1252054 - RNA, 19 nt, Homo sapiens
  misc_RNA (1)...(19): siRNA sense strand
caugaaaugccucaaagug

SEQ ID NO: 1252055 - RNA, 19 nt, Homo sapiens
  misc_RNA (1)...(19): siRNA sense strand
gagggcagguuggccaaga

SEQ ID NO: 1252056 - RNA, 19 nt, Homo sapiens
  misc_RNA (1)...(19): siRNA sense strand
agaggcagcaugugcauuu

SEQ ID NO: 1252057 - RNA, 19 nt, Homo sapiens
  misc_RNA (1)...(19): siRNA sense strand
guacaucgaggaucuagag

SEQ ID NO: 1252058 - RNA, 19 nt, Homo sapiens
  misc_RNA (1)...(19): siRNA sense strand
gagaaggaggaguuuguga

SEQ ID NO: 1252059 - RNA, 19 nt, Homo sapiens
  misc_RNA (1)...(19): siRNA sense strand
ucuagaggcuguccagaag

SEQ ID NO: 1252060 - RNA, 19 nt, Homo sapiens
  misc_RNA (1)...(19): siRNA sense strand
ccauguacaucgaggaucu

SEQ ID NO: 1252061 - RNA, 19 nt, Homo sapiens
  misc_RNA (1)...(19): siRNA sense strand
cagcaugugcauuuccuaa

SEQ ID NO: 1252062 - RNA, 19 nt, Homo sapiens
  misc_RNA (1)...(19): siRNA sense strand
gguguacgcugaggacuac

SEQ ID NO: 1252063 - RNA, 19 nt, Homo sapiens
  misc_RNA (1)...(19): siRNA sense strand
acgaggcacugcaggacua

SEQ ID NO: 1252064 - RNA, 19 nt, Homo sapiens
  misc_RNA (1)...(19): siRNA sense strand
gcagguacaagaagcucaa

SEQ ID NO: 1252065 - RNA, 19 nt, Homo sapiens
  misc_RNA (1)...(19): siRNA sense strand
ggagaaggaggaguuugug

SEQ ID NO: 1252066 - RNA, 19 nt, Homo sapiens
  misc_RNA (1)...(19): siRNA sense strand
ccaccaagaggcagcaugu

SEQ ID NO: 1252067 - RNA, 19 nt, Homo sapiens
  misc_RNA (1)...(19): siRNA sense strand
ccaacuccgauuccaugua

SEQ ID NO: 1252068 - RNA, 19 nt, Homo sapiens
  misc_RNA (1)...(19): siRNA sense strand
ggaggacucggccaucaag

SEQ ID NO: 1252069 - RNA, 19 nt, Homo sapiens
  misc_RNA (1)...(19): siRNA sense strand
caagagcuacgaggacugu

SEQ ID NO: 1252070 - RNA, 19 nt, Homo sapiens
  misc_RNA (1)...(19): siRNA sense strand
gaggcagcaugugcauuuc

SEQ ID NO: 1252071 - RNA, 19 nt, Homo sapiens
  misc_RNA (1)...(19): siRNA sense strand
gguacaagaagcucaaggu

SEQ ID NO: 1252072 - RNA, 19 nt, Homo sapiens
  misc_RNA (1)...(19): siRNA sense strand
caaacugcagggcaaagug

SEQ ID NO: 1252073 - RNA, 19 nt, Homo sapiens
  misc_RNA (1)...(19): siRNA sense strand
gauugucucauaccuacug

SEQ ID NO: 1252074 - RNA, 19 nt, Homo sapiens
  misc_RNA (1)...(19): siRNA sense strand
accgcucgcugcccuauga

SEQ ID NO: 1252075 - RNA, 19 nt, Homo sapiens
  misc_RNA (1)...(19): siRNA sense strand
ccaagauugucucauaccu

SEQ ID NO: 1252076 - RNA, 19 nt, Homo sapiens
  misc_RNA (1)...(19): siRNA sense strand
caucaagugcgaguacaug

SEQ ID NO: 1252077 - RNA, 19 nt, Homo sapiens
  misc_RNA (1)...(19): siRNA sense strand
gagagcuuguggucaucau

SEQ ID NO: 1252078 - RNA, 19 nt, Homo sapiens
  misc_RNA (1)...(19): siRNA sense strand
gaagauggauagaacauua

SEQ ID NO: 1252079 - RNA, 19 nt, Homo sapiens
  misc_RNA (1)...(19): siRNA sense strand
aaagaaagcucgaagaaua

SEQ ID NO: 1252080 - RNA, 19 nt, Homo sapiens
  misc_RNA (1)...(19): siRNA sense strand
gaaguaaccaucagaaaua

SEQ ID NO: 1252081 - RNA, 19 nt, Homo sapiens
  misc_RNA (1)...(19): siRNA sense strand
cagaagaucuugcacauug

SEQ ID NO: 1252082 - RNA, 19 nt, Homo sapiens
  misc_RNA (1)...(19): siRNA sense strand
gagcacaucuaucauuuga

SEQ ID NO: 1252083 - RNA, 19 nt, Homo sapiens
  misc_RNA (1)...(19): siRNA sense strand
gauagaacauuauggagaa

SEQ ID NO: 1252084 - RNA, 19 nt, Homo sapiens
  misc_RNA (1)...(19): siRNA sense strand
gcaccuaacuuuacugaca

SEQ ID NO: 1252085 - RNA, 19 nt, Homo sapiens
  misc_RNA (1)...(19): siRNA sense strand
auacaaagcugcaagaaga

SEQ ID NO: 1252086 - RNA, 19 nt, Homo sapiens
  misc_RNA (1)...(19): siRNA sense strand
ugaguuagauccaguacua

SEQ ID NO: 1252087 - RNA, 19 nt, Homo sapiens
  misc_RNA (1)...(19): siRNA sense strand
gcacaucuaucauuugaag

SEQ ID NO: 1252088 - RNA, 19 nt, Homo sapiens
  misc_RNA (1)...(19): siRNA sense strand
ggaaacugaugauccauau

SEQ ID NO: 1252089 - RNA, 19 nt, Homo sapiens
  misc_RNA (1)...(19): siRNA sense strand
gaagagcacaucuaucauu

SEQ ID NO: 1252090 - RNA, 19 nt, Homo sapiens
  misc_RNA (1)...(19): siRNA sense strand
gaaugaggcuucagaugau

SEQ ID NO: 1252091 - RNA, 19 nt, Homo sapiens
  misc_RNA (1)...(19): siRNA sense strand
ggacaggugugcagaagau

SEQ ID NO: 1252092 - RNA, 19 nt, Homo sapiens
  misc_RNA (1)...(19): siRNA sense strand
gaacuaaggagucgguuga

SEQ ID NO: 1252093 - RNA, 19 nt, Homo sapiens
  misc_RNA (1)...(19): siRNA sense strand
ggaacaacauugguaaaga

SEQ ID NO: 1252094 - RNA, 19 nt, Homo sapiens
  misc_RNA (1)...(19): siRNA sense strand
ucacaagguuugcuauuga

SEQ ID NO: 1252095 - RNA, 19 nt, Homo sapiens
  misc_RNA (1)...(19): siRNA sense strand
ggacaaggcuucggaaacu

SEQ ID NO: 1252096 - RNA, 19 nt, Homo sapiens
  misc_RNA (1)...(19): siRNA sense strand
ggaagaaggaaauuuagaa

SEQ ID NO: 1252097 - RNA, 19 nt, Homo sapiens
  misc_RNA (1)...(19): siRNA sense strand
uaaaguggcagccugguua

SEQ ID NO: 1252098 - RNA, 19 nt, Homo sapiens
  misc_RNA (1)...(19): siRNA sense strand
gaacaacauugguaaagac

SEQ ID NO: 1252099 - RNA, 19 nt, Homo sapiens
  misc_RNA (1)...(19): siRNA sense strand
gacaauauuucucggcaaa

SEQ ID NO: 1252100 - RNA, 19 nt, Homo sapiens
  misc_RNA (1)...(19): siRNA sense strand
caaccagaaugcugaacua

SEQ ID NO: 1252101 - RNA, 19 nt, Homo sapiens
  misc_RNA (1)...(19): siRNA sense strand
ccaaaccaauguccagaaa

SEQ ID NO: 1252102 - RNA, 19 nt, Homo sapiens
  misc_RNA (1)...(19): siRNA sense strand
gcacaacuggccagaguaa

SEQ ID NO: 1252103 - RNA, 19 nt, Homo sapiens
  misc_RNA (1)...(19): siRNA sense strand
cagagucuauuauuuguga

SEQ ID NO: 1252104 - RNA, 19 nt, Homo sapiens
  misc_RNA (1)...(19): siRNA sense strand
gcaaacuccugcaaaauuu

SEQ ID NO: 1252105 - RNA, 19 nt, Homo sapiens
  misc_RNA (1)...(19): siRNA sense strand
ggaaagaugcaaccaaaca

SEQ ID NO: 1252106 - RNA, 19 nt, Homo sapiens
  misc_RNA (1)...(19): siRNA sense strand
guauggagauuacuaugug

SEQ ID NO: 1252107 - RNA, 19 nt, Homo sapiens
  misc_RNA (1)...(19): siRNA sense strand
uuacugacaugcaggcuaa

SEQ ID NO: 1252108 - RNA, 19 nt, Homo sapiens
  misc_RNA (1)...(19): siRNA sense strand
gaacucagucagcaccuaa

SEQ ID NO: 1252109 - RNA, 19 nt, Homo sapiens
  misc_RNA (1)...(19): siRNA sense strand
ggauacugcuccaccuauu

SEQ ID NO: 1252110 - RNA, 19 nt, Homo sapiens
  misc_RNA (1)...(19): siRNA sense strand
uggaauaucuugaggaaca

SEQ ID NO: 1252111 - RNA, 19 nt, Homo sapiens
  misc_RNA (1)...(19): siRNA sense strand
agacaaacaugagggcuuu

SEQ ID NO: 1252112 - RNA, 19 nt, Homo sapiens
  misc_RNA (1)...(19): siRNA sense strand
ucagugaugugagugauaa

SEQ ID NO: 1252113 - RNA, 19 nt, Homo sapiens
  misc_RNA (1)...(19): siRNA sense strand
gaaugaaauugugagauca

SEQ ID NO: 1252114 - RNA, 19 nt, Homo sapiens
  misc_RNA (1)...(19): siRNA sense strand
aaacugaugauccauauga

SEQ ID NO: 1252115 - RNA, 19 nt, Homo sapiens
  misc_RNA (1)...(19): siRNA sense strand
aagagcacaucuaucauuu

SEQ ID NO: 1252116 - RNA, 19 nt, Homo sapiens
  misc_RNA (1)...(19): siRNA sense strand
acuaugagcuguacuaugg

SEQ ID NO: 1252117 - RNA, 19 nt, Homo sapiens
  misc_RNA (1)...(19): siRNA sense strand
caacaaacuaugagcugua

SEQ ID NO: 1252118 - RNA, 19 nt, Homo sapiens
  misc_RNA (1)...(19): siRNA sense strand
caaggugaauuauuggaau

SEQ ID NO: 1252119 - RNA, 19 nt, Homo sapiens
  misc_RNA (1)...(19): siRNA sense strand
gggagaagauggauagaac

SEQ ID NO: 1252120 - RNA, 19 nt, Homo sapiens
  misc_RNA (1)...(19): siRNA sense strand
ggagacuuaugaaugcauu

SEQ ID NO: 1252121 - RNA, 19 nt, Homo sapiens
  misc_RNA (1)...(19): siRNA sense strand
gcauagcuauagagaagga

SEQ ID NO: 1252122 - RNA, 19 nt, Homo sapiens
  misc_RNA (1)...(19): siRNA sense strand
acaagacgauggagaacaa

SEQ ID NO: 1252123 - RNA, 19 nt, Homo sapiens
  misc_RNA (1)...(19): siRNA sense strand
caggcuaacuguguagaua

SEQ ID NO: 1252124 - RNA, 19 nt, Homo sapiens
  misc_RNA (1)...(19): siRNA sense strand
agaaugaaauugugagauc

SEQ ID NO: 1252125 - RNA, 19 nt, Homo sapiens
  misc_RNA (1)...(19): siRNA sense strand
uguaauggauggaaagaug

SEQ ID NO: 1252126 - RNA, 19 nt, Homo sapiens
  misc_RNA (1)...(19): siRNA sense strand
agaaugaggcuucagauga

SEQ ID NO: 1252127 - RNA, 19 nt, Homo sapiens
  misc_RNA (1)...(19): siRNA sense strand
ccagaaugcugaacuaagg

SEQ ID NO: 1252128 - RNA, 19 nt, Homo sapiens
  misc_RNA (1)...(19): siRNA sense strand
ccgaagagcacaucuauca

SEQ ID NO: 1252129 - RNA, 19 nt, Homo sapiens
  misc_RNA (1)...(19): siRNA sense strand
uagaggaacuccagagauc

SEQ ID NO: 1252130 - RNA, 19 nt, Homo sapiens
  misc_RNA (1)...(19): siRNA sense strand
gaaaauaggccaaaccaau

SEQ ID NO: 1252131 - RNA, 19 nt, Homo sapiens
  misc_RNA (1)...(19): siRNA sense strand
caaccuuugugcagauauu

SEQ ID NO: 1252132 - RNA, 19 nt, Homo sapiens
  misc_RNA (1)...(19): siRNA sense strand
ggaaauacuucagagaacu

SEQ ID NO: 1252133 - RNA, 19 nt, Homo sapiens
  misc_RNA (1)...(19): siRNA sense strand
caaacuaugagcuguacua

SEQ ID NO: 1252134 - RNA, 19 nt, Homo sapiens
  misc_RNA (1)...(19): siRNA sense strand
uuuagaagcugcagcauca

SEQ ID NO: 1252135 - RNA, 19 nt, Homo sapiens
  misc_RNA (1)...(19): siRNA sense strand
ugacagcugggaaauuaua

SEQ ID NO: 1252136 - RNA, 19 nt, Homo sapiens
  misc_RNA (1)...(19): siRNA sense strand
ggaaaguucaacagauuau

SEQ ID NO: 1252137 - RNA, 19 nt, Homo sapiens
  misc_RNA (1)...(19): siRNA sense strand
gagaaguaaccaucagaaa

SEQ ID NO: 1252138 - RNA, 19 nt, Homo sapiens
  misc_RNA (1)...(19): siRNA sense strand
ggcaagauaucagauggaa

SEQ ID NO: 1252139 - RNA, 19 nt, Homo sapiens
  misc_RNA (1)...(19): siRNA sense strand
aacauuaaccuguggaaua

SEQ ID NO: 1252140 - RNA, 19 nt, Homo sapiens
  misc_RNA (1)...(19): siRNA sense strand
gaucagguugucaguguaa

SEQ ID NO: 1252141 - RNA, 19 nt, Homo sapiens
  misc_RNA (1)...(19): siRNA sense strand
gagacgauauauggaagaa

SEQ ID NO: 1252142 - RNA, 19 nt, Homo sapiens
  misc_RNA (1)...(19): siRNA sense strand
acauuaaccuguggaauau

SEQ ID NO: 1252143 - RNA, 19 nt, Homo sapiens
  misc_RNA (1)...(19): siRNA sense strand
ucaaaggcaccacucgaua

SEQ ID NO: 1252144 - RNA, 19 nt, Homo sapiens
  misc_RNA (1)...(19): siRNA sense strand
gaagaaggaaauuuagaag

SEQ ID NO: 1252145 - RNA, 19 nt, Homo sapiens
  misc_RNA (1)...(19): siRNA sense strand
gguugucaguguaaauauu

SEQ ID NO: 1252146 - RNA, 19 nt, Homo sapiens
  misc_RNA (1)...(19): siRNA sense strand
ggagucgguugaacagaau

SEQ ID NO: 1252147 - RNA, 19 nt, Homo sapiens
  misc_RNA (1)...(19): siRNA sense strand
cuggaaaguucaacagauu

SEQ ID NO: 1252148 - RNA, 19 nt, Homo sapiens
  misc_RNA (1)...(19): siRNA sense strand
ucagucagcaccuaacuuu

SEQ ID NO: 1252149 - RNA, 19 nt, Homo sapiens
  misc_RNA (1)...(19): siRNA sense strand
ucucagucaugucaauuaa

SEQ ID NO: 1252150 - RNA, 19 nt, Homo sapiens
  misc_RNA (1)...(19): siRNA sense strand
caaaggcaccacucgauau

SEQ ID NO: 1252151 - RNA, 19 nt, Homo sapiens
  misc_RNA (1)...(19): siRNA sense strand
gugaucagguugucagugu

SEQ ID NO: 1252152 - RNA, 19 nt, Homo sapiens
  misc_RNA (1)...(19): siRNA sense strand
gaacauuauggagaaguaa

SEQ ID NO: 1252153 - RNA, 19 nt, Homo sapiens
  misc_RNA (1)...(19): siRNA sense strand
ccuggauaauggaauguua

SEQ ID NO: 1252154 - RNA, 19 nt, Homo sapiens
  misc_RNA (1)...(19): siRNA sense strand
cagaacagguuagccauca

SEQ ID NO: 1252155 - RNA, 19 nt, Homo sapiens
  misc_RNA (1)...(19): siRNA sense strand
ccugacaccaguaacauua

SEQ ID NO: 1252156 - RNA, 19 nt, Homo sapiens
  misc_RNA (1)...(19): siRNA sense strand
cgagcaggaucacaguaaa

SEQ ID NO: 1252157 - RNA, 19 nt, Homo sapiens
  misc_RNA (1)...(19): siRNA sense strand
gacgauauauggaagaaaa

SEQ ID NO: 1252158 - RNA, 19 nt, Homo sapiens
  misc_RNA (1)...(19): siRNA sense strand
gaagcaaagaguagaggaa

SEQ ID NO: 1252159 - RNA, 19 nt, Homo sapiens
  misc_RNA (1)...(19): siRNA sense strand
ggagaaguaaccaucagaa

SEQ ID NO: 1252160 - RNA, 19 nt, Homo sapiens
  misc_RNA (1)...(19): siRNA sense strand
agaacauuauggagaagua

SEQ ID NO: 1252161 - RNA, 19 nt, Homo sapiens
  misc_RNA (1)...(19): siRNA sense strand
ggaagucgauggaaauccu

SEQ ID NO: 1252162 - RNA, 19 nt, Homo sapiens
  misc_RNA (1)...(19): siRNA sense strand
cuucagaugaugagucuua

SEQ ID NO: 1252163 - RNA, 19 nt, Homo sapiens
  misc_RNA (1)...(19): siRNA sense strand
gcaccgagcccucuguaag

SEQ ID NO: 1252164 - RNA, 19 nt, Homo sapiens
  misc_RNA (1)...(19): siRNA sense strand
gguuguaucgucagaauga

SEQ ID NO: 1252165 - RNA, 19 nt, Homo sapiens
  misc_RNA (1)...(19): siRNA sense strand
gugcacaacuggccagagu

SEQ ID NO: 1252166 - RNA, 19 nt, Homo sapiens
  misc_RNA (1)...(19): siRNA sense strand
cagguuccaugccaacaaa

SEQ ID NO: 1252167 - RNA, 19 nt, Homo sapiens
  misc_RNA (1)...(19): siRNA sense strand
gauacugcuccaccuauuu

SEQ ID NO: 1252168 - RNA, 19 nt, Homo sapiens
  misc_RNA (1)...(19): siRNA sense strand
cauuugcaguuucaggaua

SEQ ID NO: 1252169 - RNA, 19 nt, Homo sapiens
  misc_RNA (1)...(19): siRNA sense strand
gcaaguucgucagagaaug

SEQ ID NO: 1252170 - RNA, 19 nt, Homo sapiens
  misc_RNA (1)...(19): siRNA sense strand
aggagaagcugaagcagau

SEQ ID NO: 1252171 - RNA, 19 nt, Homo sapiens
  misc_RNA (1)...(19): siRNA sense strand
uuacaggacucggaagaga

SEQ ID NO: 1252172 - RNA, 19 nt, Homo sapiens
  misc_RNA (1)...(19): siRNA sense strand
caaagagaagccuggguuu

SEQ ID NO: 1252173 - RNA, 19 nt, Homo sapiens
  misc_RNA (1)...(19): siRNA sense strand
ugaaugucaugcuuccaaa

SEQ ID NO: 1252174 - RNA, 19 nt, Homo sapiens
  misc_RNA (1)...(19): siRNA sense strand
gacaagggauuccgcuuuu

SEQ ID NO: 1252175 - RNA, 19 nt, Homo sapiens
  misc_RNA (1)...(19): siRNA sense strand
caaguucgucagagaauga

SEQ ID NO: 1252176 - RNA, 19 nt, Homo sapiens
  misc_RNA (1)...(19): siRNA sense strand
ggcuaacuguguagauauu

SEQ ID NO: 1252177 - RNA, 19 nt, Homo sapiens
  misc_RNA (1)...(19): siRNA sense strand
agaaggaaauuuagaagcu

SEQ ID NO: 1252178 - RNA, 19 nt, Homo sapiens
  misc_RNA (1)...(19): siRNA sense strand
gaagauggauagaacauua

SEQ ID NO: 1252179 - RNA, 19 nt, Homo sapiens
  misc_RNA (1)...(19): siRNA sense strand
aaagaaagcucgaagaaua

SEQ ID NO: 1252180 - RNA, 19 nt, Homo sapiens
  misc_RNA (1)...(19): siRNA sense strand
gaaguaaccaucagaaaua

SEQ ID NO: 1252181 - RNA, 19 nt, Homo sapiens
  misc_RNA (1)...(19): siRNA sense strand
cagaagaucuugcacauug

SEQ ID NO: 1252182 - RNA, 19 nt, Homo sapiens
  misc_RNA (1)...(19): siRNA sense strand
gagcacaucuaucauuuga

SEQ ID NO: 1252183 - RNA, 19 nt, Homo sapiens
  misc_RNA (1)...(19): siRNA sense strand
gauagaacauuauggagaa

SEQ ID NO: 1252184 - RNA, 19 nt, Homo sapiens
  misc_RNA (1)...(19): siRNA sense strand
gcaccuaacuuuacugaca

SEQ ID NO: 1252185 - RNA, 19 nt, Homo sapiens
  misc_RNA (1)...(19): siRNA sense strand
auacaaagcugcaagaaga

SEQ ID NO: 1252186 - RNA, 19 nt, Homo sapiens
  misc_RNA (1)...(19): siRNA sense strand
ugaguuagauccaguacua

SEQ ID NO: 1252187 - RNA, 19 nt, Homo sapiens
  misc_RNA (1)...(19): siRNA sense strand
gcacaucuaucauuugaag

SEQ ID NO: 1252188 - RNA, 19 nt, Homo sapiens
  misc_RNA (1)...(19): siRNA sense strand
ggaaacugaugauccauau

SEQ ID NO: 1252189 - RNA, 19 nt, Homo sapiens
  misc_RNA (1)...(19): siRNA sense strand
gaagagcacaucuaucauu

SEQ ID NO: 1252190 - RNA, 19 nt, Homo sapiens
  misc_RNA (1)...(19): siRNA sense strand
gaaugaggcuucagaugau

SEQ ID NO: 1252191 - RNA, 19 nt, Homo sapiens
  misc_RNA (1)...(19): siRNA sense strand
ggacaggugugcagaagau

SEQ ID NO: 1252192 - RNA, 19 nt, Homo sapiens
  misc_RNA (1)...(19): siRNA sense strand
gaacuaaggagucgguuga

SEQ ID NO: 1252193 - RNA, 19 nt, Homo sapiens
  misc_RNA (1)...(19): siRNA sense strand
ggaacaacauugguaaaga

SEQ ID NO: 1252194 - RNA, 19 nt, Homo sapiens
  misc_RNA (1)...(19): siRNA sense strand
ucacaagguuugcuauuga

SEQ ID NO: 1252195 - RNA, 19 nt, Homo sapiens
  misc_RNA (1)...(19): siRNA sense strand
ggacaaggcuucggaaacu

SEQ ID NO: 1252196 - RNA, 19 nt, Homo sapiens
  misc_RNA (1)...(19): siRNA sense strand
ggaagaaggaaauuuagaa

SEQ ID NO: 1252197 - RNA, 19 nt, Homo sapiens
  misc_RNA (1)...(19): siRNA sense strand
uaaaguggcagccugguua

SEQ ID NO: 1252198 - RNA, 19 nt, Homo sapiens
  misc_RNA (1)...(19): siRNA sense strand
gaacaacauugguaaagac

SEQ ID NO: 1252199 - RNA, 19 nt, Homo sapiens
  misc_RNA (1)...(19): siRNA sense strand
gacaauauuucucggcaaa

SEQ ID NO: 1252200 - RNA, 19 nt, Homo sapiens
  misc_RNA (1)...(19): siRNA sense strand
caaccagaaugcugaacua

SEQ ID NO: 1252201 - RNA, 19 nt, Homo sapiens
  misc_RNA (1)...(19): siRNA sense strand
ccaaaccaauguccagaaa

SEQ ID NO: 1252202 - RNA, 19 nt, Homo sapiens
  misc_RNA (1)...(19): siRNA sense strand
gcacaacuggccagaguaa

SEQ ID NO: 1252203 - RNA, 19 nt, Homo sapiens
  misc_RNA (1)...(19): siRNA sense strand
cagagucuauuauuuguga

SEQ ID NO: 1252204 - RNA, 19 nt, Homo sapiens
  misc_RNA (1)...(19): siRNA sense strand
gcaaacuccugcaaaauuu

SEQ ID NO: 1252205 - RNA, 19 nt, Homo sapiens
  misc_RNA (1)...(19): siRNA sense strand
ggaaagaugcaaccaaaca

SEQ ID NO: 1252206 - RNA, 19 nt, Homo sapiens
  misc_RNA (1)...(19): siRNA sense strand
guauggagauuacuaugug

SEQ ID NO: 1252207 - RNA, 19 nt, Homo sapiens
  misc_RNA (1)...(19): siRNA sense strand
uuacugacaugcaggcuaa

SEQ ID NO: 1252208 - RNA, 19 nt, Homo sapiens
  misc_RNA (1)...(19): siRNA sense strand
gaacucagucagcaccuaa

SEQ ID NO: 1252209 - RNA, 19 nt, Homo sapiens
  misc_RNA (1)...(19): siRNA sense strand
ggauacugcuccaccuauu

SEQ ID NO: 1252210 - RNA, 19 nt, Homo sapiens
  misc_RNA (1)...(19): siRNA sense strand
uggaauaucuugaggaaca

SEQ ID NO: 1252211 - RNA, 19 nt, Homo sapiens
  misc_RNA (1)...(19): siRNA sense strand
agacaaacaugagggcuuu

SEQ ID NO: 1252212 - RNA, 19 nt, Homo sapiens
  misc_RNA (1)...(19): siRNA sense strand
ucagugaugugagugauaa

SEQ ID NO: 1252213 - RNA, 19 nt, Homo sapiens
  misc_RNA (1)...(19): siRNA sense strand
gaaugaaauugugagauca

SEQ ID NO: 1252214 - RNA, 19 nt, Homo sapiens
  misc_RNA (1)...(19): siRNA sense strand
aaacugaugauccauauga

SEQ ID NO: 1252215 - RNA, 19 nt, Homo sapiens
  misc_RNA (1)...(19): siRNA sense strand
aagagcacaucuaucauuu

SEQ ID NO: 1252216 - RNA, 19 nt, Homo sapiens
  misc_RNA (1)...(19): siRNA sense strand
acuaugagcuguacuaugg

SEQ ID NO: 1252217 - RNA, 19 nt, Homo sapiens
  misc_RNA (1)...(19): siRNA sense strand
caacaaacuaugagcugua

SEQ ID NO: 1252218 - RNA, 19 nt, Homo sapiens
  misc_RNA (1)...(19): siRNA sense strand
caaggugaauuauuggaau

SEQ ID NO: 1252219 - RNA, 19 nt, Homo sapiens
  misc_RNA (1)...(19): siRNA sense strand
gggagaagauggauagaac

SEQ ID NO: 1252220 - RNA, 19 nt, Homo sapiens
  misc_RNA (1)...(19): siRNA sense strand
ggagacuuaugaaugcauu

SEQ ID NO: 1252221 - RNA, 19 nt, Homo sapiens
  misc_RNA (1)...(19): siRNA sense strand
gcauagcuauagagaagga

SEQ ID NO: 1252222 - RNA, 19 nt, Homo sapiens
  misc_RNA (1)...(19): siRNA sense strand
acaagacgauggagaacaa

SEQ ID NO: 1252223 - RNA, 19 nt, Homo sapiens
  misc_RNA (1)...(19): siRNA sense strand
caggcuaacuguguagaua

SEQ ID NO: 1252224 - RNA, 19 nt, Homo sapiens
  misc_RNA (1)...(19): siRNA sense strand
agaaugaaauugugagauc

SEQ ID NO: 1252225 - RNA, 19 nt, Homo sapiens
  misc_RNA (1)...(19): siRNA sense strand
uguaauggauggaaagaug

SEQ ID NO: 1252226 - RNA, 19 nt, Homo sapiens
  misc_RNA (1)...(19): siRNA sense strand
agaaugaggcuucagauga

SEQ ID NO: 1252227 - RNA, 19 nt, Homo sapiens
  misc_RNA (1)...(19): siRNA sense strand
ccagaaugcugaacuaagg

SEQ ID NO: 1252228 - RNA, 19 nt, Homo sapiens
  misc_RNA (1)...(19): siRNA sense strand
ccgaagagcacaucuauca

SEQ ID NO: 1252229 - RNA, 19 nt, Homo sapiens
  misc_RNA (1)...(19): siRNA sense strand
uagaggaacuccagagauc

SEQ ID NO: 1252230 - RNA, 19 nt, Homo sapiens
  misc_RNA (1)...(19): siRNA sense strand
gaaaauaggccaaaccaau

SEQ ID NO: 1252231 - RNA, 19 nt, Homo sapiens
  misc_RNA (1)...(19): siRNA sense strand
caaccuuugugcagauauu

SEQ ID NO: 1252232 - RNA, 19 nt, Homo sapiens
  misc_RNA (1)...(19): siRNA sense strand
ggaaauacuucagagaacu

SEQ ID NO: 1252233 - RNA, 19 nt, Homo sapiens
  misc_RNA (1)...(19): siRNA sense strand
caaacuaugagcuguacua

SEQ ID NO: 1252234 - RNA, 19 nt, Homo sapiens
  misc_RNA (1)...(19): siRNA sense strand
uuuagaagcugcagcauca

SEQ ID NO: 1252235 - RNA, 19 nt, Homo sapiens
  misc_RNA (1)...(19): siRNA sense strand
ugacagcugggaaauuaua

SEQ ID NO: 1252236 - RNA, 19 nt, Homo sapiens
  misc_RNA (1)...(19): siRNA sense strand
ggaaaguucaacagauuau

SEQ ID NO: 1252237 - RNA, 19 nt, Homo sapiens
  misc_RNA (1)...(19): siRNA sense strand
gagaaguaaccaucagaaa

SEQ ID NO: 1252238 - RNA, 19 nt, Homo sapiens
  misc_RNA (1)...(19): siRNA sense strand
ggcaagauaucagauggaa

SEQ ID NO: 1252239 - RNA, 19 nt, Homo sapiens
  misc_RNA (1)...(19): siRNA sense strand
aacauuaaccuguggaaua

SEQ ID NO: 1252240 - RNA, 19 nt, Homo sapiens
  misc_RNA (1)...(19): siRNA sense strand
gaucagguugucaguguaa

SEQ ID NO: 1252241 - RNA, 19 nt, Homo sapiens
  misc_RNA (1)...(19): siRNA sense strand
gagacgauauauggaagaa

SEQ ID NO: 1252242 - RNA, 19 nt, Homo sapiens
  misc_RNA (1)...(19): siRNA sense strand
acauuaaccuguggaauau

SEQ ID NO: 1252243 - RNA, 19 nt, Homo sapiens
  misc_RNA (1)...(19): siRNA sense strand
ucaaaggcaccacucgaua

SEQ ID NO: 1252244 - RNA, 19 nt, Homo sapiens
  misc_RNA (1)...(19): siRNA sense strand
gaagaaggaaauuuagaag

SEQ ID NO: 1252245 - RNA, 19 nt, Homo sapiens
  misc_RNA (1)...(19): siRNA sense strand
gguugucaguguaaauauu

SEQ ID NO: 1252246 - RNA, 19 nt, Homo sapiens
  misc_RNA (1)...(19): siRNA sense strand
ggagucgguugaacagaau

SEQ ID NO: 1252247 - RNA, 19 nt, Homo sapiens
  misc_RNA (1)...(19): siRNA sense strand
cuggaaaguucaacagauu

SEQ ID NO: 1252248 - RNA, 19 nt, Homo sapiens
  misc_RNA (1)...(19): siRNA sense strand
ucagucagcaccuaacuuu

SEQ ID NO: 1252249 - RNA, 19 nt, Homo sapiens
  misc_RNA (1)...(19): siRNA sense strand
ucucagucaugucaauuaa

SEQ ID NO: 1252250 - RNA, 19 nt, Homo sapiens
  misc_RNA (1)...(19): siRNA sense strand
caaaggcaccacucgauau

SEQ ID NO: 1252251 - RNA, 19 nt, Homo sapiens
  misc_RNA (1)...(19): siRNA sense strand
gugaucagguugucagugu

SEQ ID NO: 1252252 - RNA, 19 nt, Homo sapiens
  misc_RNA (1)...(19): siRNA sense strand
gaacauuauggagaaguaa

SEQ ID NO: 1252253 - RNA, 19 nt, Homo sapiens
  misc_RNA (1)...(19): siRNA sense strand
ccuggauaauggaauguua

SEQ ID NO: 1252254 - RNA, 19 nt, Homo sapiens
  misc_RNA (1)...(19): siRNA sense strand
cagaacagguuagccauca

SEQ ID NO: 1252255 - RNA, 19 nt, Homo sapiens
  misc_RNA (1)...(19): siRNA sense strand
ccugacaccaguaacauua

SEQ ID NO: 1252256 - RNA, 19 nt, Homo sapiens
  misc_RNA (1)...(19): siRNA sense strand
cgagcaggaucacaguaaa

SEQ ID NO: 1252257 - RNA, 19 nt, Homo sapiens
  misc_RNA (1)...(19): siRNA sense strand
gacgauauauggaagaaaa

SEQ ID NO: 1252258 - RNA, 19 nt, Homo sapiens
  misc_RNA (1)...(19): siRNA sense strand
gaagcaaagaguagaggaa

SEQ ID NO: 1252259 - RNA, 19 nt, Homo sapiens
  misc_RNA (1)...(19): siRNA sense strand
ggagaaguaaccaucagaa

SEQ ID NO: 1252260 - RNA, 19 nt, Homo sapiens
  misc_RNA (1)...(19): siRNA sense strand
agaacauuauggagaagua

SEQ ID NO: 1252261 - RNA, 19 nt, Homo sapiens
  misc_RNA (1)...(19): siRNA sense strand
ggaagucgauggaaauccu

SEQ ID NO: 1252262 - RNA, 19 nt, Homo sapiens
  misc_RNA (1)...(19): siRNA sense strand
cuucagaugaugagucuua

SEQ ID NO: 1252263 - RNA, 19 nt, Homo sapiens
  misc_RNA (1)...(19): siRNA sense strand
gcaccgagcccucuguaag

SEQ ID NO: 1252264 - RNA, 19 nt, Homo sapiens
  misc_RNA (1)...(19): siRNA sense strand
gguuguaucgucagaauga

SEQ ID NO: 1252265 - RNA, 19 nt, Homo sapiens
  misc_RNA (1)...(19): siRNA sense strand
gugcacaacuggccagagu

SEQ ID NO: 1252266 - RNA, 19 nt, Homo sapiens
  misc_RNA (1)...(19): siRNA sense strand
cagguuccaugccaacaaa

SEQ ID NO: 1252267 - RNA, 19 nt, Homo sapiens
  misc_RNA (1)...(19): siRNA sense strand
gauacugcuccaccuauuu

SEQ ID NO: 1252268 - RNA, 19 nt, Homo sapiens
  misc_RNA (1)...(19): siRNA sense strand
cauuugcaguuucaggaua

SEQ ID NO: 1252269 - RNA, 19 nt, Homo sapiens
  misc_RNA (1)...(19): siRNA sense strand
gcaaguucgucagagaaug

SEQ ID NO: 1252270 - RNA, 19 nt, Homo sapiens
  misc_RNA (1)...(19): siRNA sense strand
aggagaagcugaagcagau

SEQ ID NO: 1252271 - RNA, 19 nt, Homo sapiens
  misc_RNA (1)...(19): siRNA sense strand
uuacaggacucggaagaga

SEQ ID NO: 1252272 - RNA, 19 nt, Homo sapiens
  misc_RNA (1)...(19): siRNA sense strand
caaagagaagccuggguuu

SEQ ID NO: 1252273 - RNA, 19 nt, Homo sapiens
  misc_RNA (1)...(19): siRNA sense strand
ugaaugucaugcuuccaaa

SEQ ID NO: 1252274 - RNA, 19 nt, Homo sapiens
  misc_RNA (1)...(19): siRNA sense strand
gacaagggauuccgcuuuu

SEQ ID NO: 1252275 - RNA, 19 nt, Homo sapiens
  misc_RNA (1)...(19): siRNA sense strand
caaguucgucagagaauga

SEQ ID NO: 1252276 - RNA, 19 nt, Homo sapiens
  misc_RNA (1)...(19): siRNA sense strand
ggcuaacuguguagauauu

SEQ ID NO: 1252277 - RNA, 19 nt, Homo sapiens
  misc_RNA (1)...(19): siRNA sense strand
agaaggaaauuuagaagcu

SEQ ID NO: 1252278 - RNA, 19 nt, Homo sapiens
  misc_RNA (1)...(19): siRNA sense strand
ggagagagcacgauuuauu

SEQ ID NO: 1252279 - RNA, 19 nt, Homo sapiens
  misc_RNA (1)...(19): siRNA sense strand
agagaaacauguccauaua

SEQ ID NO: 1252280 - RNA, 19 nt, Homo sapiens
  misc_RNA (1)...(19): siRNA sense strand
cagaugcacuuuauuugua

SEQ ID NO: 1252281 - RNA, 19 nt, Homo sapiens
  misc_RNA (1)...(19): siRNA sense strand
ggacuuacgaguuugguua

SEQ ID NO: 1252282 - RNA, 19 nt, Homo sapiens
  misc_RNA (1)...(19): siRNA sense strand
aaacagauaucaggauuug

SEQ ID NO: 1252283 - RNA, 19 nt, Homo sapiens
  misc_RNA (1)...(19): siRNA sense strand
cuauggagcucauugguaa

SEQ ID NO: 1252284 - RNA, 19 nt, Homo sapiens
  misc_RNA (1)...(19): siRNA sense strand
aaacacaccuuuagugaag

SEQ ID NO: 1252285 - RNA, 19 nt, Homo sapiens
  misc_RNA (1)...(19): siRNA sense strand
gaacuuaaaggaucaguag

SEQ ID NO: 1252286 - RNA, 19 nt, Homo sapiens
  misc_RNA (1)...(19): siRNA sense strand
gaaaacagauaucaggauu

SEQ ID NO: 1252287 - RNA, 19 nt, Homo sapiens
  misc_RNA (1)...(19): siRNA sense strand
uaaaggaucaguagcaauu

SEQ ID NO: 1252288 - RNA, 19 nt, Homo sapiens
  misc_RNA (1)...(19): siRNA sense strand
aaaugggacuuacgaguuu

SEQ ID NO: 1252289 - RNA, 19 nt, Homo sapiens
  misc_RNA (1)...(19): siRNA sense strand
guuaucagaugcacuuuau

SEQ ID NO: 1252290 - RNA, 19 nt, Homo sapiens
  misc_RNA (1)...(19): siRNA sense strand
ugagauuggugaacgagua

SEQ ID NO: 1252291 - RNA, 19 nt, Homo sapiens
  misc_RNA (1)...(19): siRNA sense strand
gugaacgaguagauuauaa

SEQ ID NO: 1252292 - RNA, 19 nt, Homo sapiens
  misc_RNA (1)...(19): siRNA sense strand
gagagagcacgauuuauug

SEQ ID NO: 1252293 - RNA, 19 nt, Homo sapiens
  misc_RNA (1)...(19): siRNA sense strand
caaaugggacuuacgaguu

SEQ ID NO: 1252294 - RNA, 19 nt, Homo sapiens
  misc_RNA (1)...(19): siRNA sense strand
ggucauugcugugauuguu

SEQ ID NO: 1252295 - RNA, 19 nt, Homo sapiens
  misc_RNA (1)...(19): siRNA sense strand
ccagauccauuuucacuua

SEQ ID NO: 1252296 - RNA, 19 nt, Homo sapiens
  misc_RNA (1)...(19): siRNA sense strand
gaaggaauacuugacaguu

SEQ ID NO: 1252297 - RNA, 19 nt, Homo sapiens
  misc_RNA (1)...(19): siRNA sense strand
aaggaauacuugacaguuu

SEQ ID NO: 1252298 - RNA, 19 nt, Homo sapiens
  misc_RNA (1)...(19): siRNA sense strand
ucagaugacgccuguuaua

SEQ ID NO: 1252299 - RNA, 19 nt, Homo sapiens
  misc_RNA (1)...(19): siRNA sense strand
gaaaacacaccuuuaguga

SEQ ID NO: 1252300 - RNA, 19 nt, Homo sapiens
  misc_RNA (1)...(19): siRNA sense strand
gaugacgccuguuauagag

SEQ ID NO: 1252301 - RNA, 19 nt, Homo sapiens
  misc_RNA (1)...(19): siRNA sense strand
gagaaacauguccauauau

SEQ ID NO: 1252302 - RNA, 19 nt, Homo sapiens
  misc_RNA (1)...(19): siRNA sense strand
acgaguagauuauaagugu

SEQ ID NO: 1252303 - RNA, 19 nt, Homo sapiens
  misc_RNA (1)...(19): siRNA sense strand
cuacaaagcaacaguuaug

SEQ ID NO: 1252304 - RNA, 19 nt, Homo sapiens
  misc_RNA (1)...(19): siRNA sense strand
ccaccaacauuugaagcua

SEQ ID NO: 1252305 - RNA, 19 nt, Homo sapiens
  misc_RNA (1)...(19): siRNA sense strand
uauacgggauccuuuaaau

SEQ ID NO: 1252306 - RNA, 19 nt, Homo sapiens
  misc_RNA (1)...(19): siRNA sense strand
cgaguuugguuaucagaug

SEQ ID NO: 1252307 - RNA, 19 nt, Homo sapiens
  misc_RNA (1)...(19): siRNA sense strand
gaacgaguagauuauaagu

SEQ ID NO: 1252308 - RNA, 19 nt, Homo sapiens
  misc_RNA (1)...(19): siRNA sense strand
gugaggagccaccaacauu

SEQ ID NO: 1252309 - RNA, 19 nt, Homo sapiens
  misc_RNA (1)...(19): siRNA sense strand
gauggcagcgacacaauug

SEQ ID NO: 1252310 - RNA, 19 nt, Homo sapiens
  misc_RNA (1)...(19): siRNA sense strand
gcuauggagcucauuggua

SEQ ID NO: 1252311 - RNA, 19 nt, Homo sapiens
  misc_RNA (1)...(19): siRNA sense strand
gaggagccaccaacauuug

SEQ ID NO: 1252312 - RNA, 19 nt, Homo sapiens
  misc_RNA (1)...(19): siRNA sense strand
acacaccuuuagugaagua

SEQ ID NO: 1252313 - RNA, 19 nt, Homo sapiens
  misc_RNA (1)...(19): siRNA sense strand
ucucagaugacgccuguua

SEQ ID NO: 1252314 - RNA, 19 nt, Homo sapiens
  misc_RNA (1)...(19): siRNA sense strand
uagagaaacauguccauau

SEQ ID NO: 1252315 - RNA, 19 nt, Homo sapiens
  misc_RNA (1)...(19): siRNA sense strand
guuccaaagugucuuaaag

SEQ ID NO: 1252316 - RNA, 19 nt, Homo sapiens
  misc_RNA (1)...(19): siRNA sense strand
ggugaacgaguagauuaua

SEQ ID NO: 1252317 - RNA, 19 nt, Homo sapiens
  misc_RNA (1)...(19): siRNA sense strand
gaaguagaaguauuugagu

SEQ ID NO: 1252318 - RNA, 19 nt, Homo sapiens
  misc_RNA (1)...(19): siRNA sense strand
gaaacauguccauauauac

SEQ ID NO: 1252319 - RNA, 19 nt, Homo sapiens
  misc_RNA (1)...(19): siRNA sense strand
ugacgccuguuauagagaa

SEQ ID NO: 1252320 - RNA, 19 nt, Homo sapiens
  misc_RNA (1)...(19): siRNA sense strand
cgaguagauuauaagugua

SEQ ID NO: 1252321 - RNA, 19 nt, Homo sapiens
  misc_RNA (1)...(19): siRNA sense strand
gcacuuuauuuguaaugag

SEQ ID NO: 1252322 - RNA, 19 nt, Homo sapiens
  misc_RNA (1)...(19): siRNA sense strand
guagaaguauuugaguauc

SEQ ID NO: 1252323 - RNA, 19 nt, Homo sapiens
  misc_RNA (1)...(19): siRNA sense strand
guauuugaguaucuugaug

SEQ ID NO: 1252324 - RNA, 19 nt, Homo sapiens
  misc_RNA (1)...(19): siRNA sense strand
aggaauacuugacaguuug

SEQ ID NO: 1252325 - RNA, 19 nt, Homo sapiens
  misc_RNA (1)...(19): siRNA sense strand
ccaaaacccuacuaugaga

SEQ ID NO: 1252326 - RNA, 19 nt, Homo sapiens
  misc_RNA (1)...(19): siRNA sense strand
aguguaaaguggucaaaug

SEQ ID NO: 1252327 - RNA, 19 nt, Homo sapiens
  misc_RNA (1)...(19): siRNA sense strand
ccacccauacuauuuguga

SEQ ID NO: 1252328 - RNA, 19 nt, Homo sapiens
  misc_RNA (1)...(19): siRNA sense strand
caccaacauuugaagcuau

SEQ ID NO: 1252329 - RNA, 19 nt, Homo sapiens
  misc_RNA (1)...(19): siRNA sense strand
uuggagagagcacgauuua

SEQ ID NO: 1252330 - RNA, 19 nt, Homo sapiens
  misc_RNA (1)...(19): siRNA sense strand
gguuaucagaugcacuuua

SEQ ID NO: 1252331 - RNA, 19 nt, Homo sapiens
  misc_RNA (1)...(19): siRNA sense strand
ugaggagccaccaacauuu

SEQ ID NO: 1252332 - RNA, 19 nt, Homo sapiens
  misc_RNA (1)...(19): siRNA sense strand
ggaaggaauacuugacagu

SEQ ID NO: 1252333 - RNA, 19 nt, Homo sapiens
  misc_RNA (1)...(19): siRNA sense strand
gaggaaggaauacuugaca

SEQ ID NO: 1252334 - RNA, 19 nt, Homo sapiens
  misc_RNA (1)...(19): siRNA sense strand
ccaguuccaaagugucuua

SEQ ID NO: 1252335 - RNA, 19 nt, Homo sapiens
  misc_RNA (1)...(19): siRNA sense strand
ugaguaucuugaugcagua

SEQ ID NO: 1252336 - RNA, 19 nt, Homo sapiens
  misc_RNA (1)...(19): siRNA sense strand
caccuuuagugaaguagaa

SEQ ID NO: 1252337 - RNA, 19 nt, Homo sapiens
  misc_RNA (1)...(19): siRNA sense strand
acagauaucaggauuugga

SEQ ID NO: 1252338 - RNA, 19 nt, Homo sapiens
  misc_RNA (1)...(19): siRNA sense strand
ucauugcugugauuguuau

SEQ ID NO: 1252339 - RNA, 19 nt, Homo sapiens
  misc_RNA (1)...(19): siRNA sense strand
ucagaugcacuuuauuugu

SEQ ID NO: 1252340 - RNA, 19 nt, Homo sapiens
  misc_RNA (1)...(19): siRNA sense strand
gugcugcuccagaguguaa

SEQ ID NO: 1252341 - RNA, 19 nt, Homo sapiens
  misc_RNA (1)...(19): siRNA sense strand
ggaaaacacaccuuuagug

SEQ ID NO: 1252342 - RNA, 19 nt, Homo sapiens
  misc_RNA (1)...(19): siRNA sense strand
aaggaucaguagcaauuug

SEQ ID NO: 1252343 - RNA, 19 nt, Homo sapiens
  misc_RNA (1)...(19): siRNA sense strand
uauauacgggauccuuuaa

SEQ ID NO: 1252344 - RNA, 19 nt, Homo sapiens
  misc_RNA (1)...(19): siRNA sense strand
ugaaguagaaguauuugag

SEQ ID NO: 1252345 - RNA, 19 nt, Homo sapiens
  misc_RNA (1)...(19): siRNA sense strand
cuugacaguuuggauguuu

SEQ ID NO: 1252346 - RNA, 19 nt, Homo sapiens
  misc_RNA (1)...(19): siRNA sense strand
cauauauacgggauccuuu

SEQ ID NO: 1252347 - RNA, 19 nt, Homo sapiens
  misc_RNA (1)...(19): siRNA sense strand
auauauacgggauccuuua

SEQ ID NO: 1252348 - RNA, 19 nt, Homo sapiens
  misc_RNA (1)...(19): siRNA sense strand
cuuaaaggaucaguagcaa

SEQ ID NO: 1252349 - RNA, 19 nt, Homo sapiens
  misc_RNA (1)...(19): siRNA sense strand
uaaaccugaggaaggaaua

SEQ ID NO: 1252350 - RNA, 19 nt, Homo sapiens
  misc_RNA (1)...(19): siRNA sense strand
agaugacgccuguuauaga

SEQ ID NO: 1252351 - RNA, 19 nt, Homo sapiens
  misc_RNA (1)...(19): siRNA sense strand
ugugauuguuauugccaua

SEQ ID NO: 1252352 - RNA, 19 nt, Homo sapiens
  misc_RNA (1)...(19): siRNA sense strand
gagagcacgauuuauugug

SEQ ID NO: 1252353 - RNA, 19 nt, Homo sapiens
  misc_RNA (1)...(19): siRNA sense strand
gaaguauuugaguaucuug

SEQ ID NO: 1252354 - RNA, 19 nt, Homo sapiens
  misc_RNA (1)...(19): siRNA sense strand
ggcuaccugucucagauga

SEQ ID NO: 1252355 - RNA, 19 nt, Homo sapiens
  misc_RNA (1)...(19): siRNA sense strand
gauaucaggauuuggaaaa

SEQ ID NO: 1252356 - RNA, 19 nt, Homo sapiens
  misc_RNA (1)...(19): siRNA sense strand
ccucuugccacccauacua

SEQ ID NO: 1252357 - RNA, 19 nt, Homo sapiens
  misc_RNA (1)...(19): siRNA sense strand
ccaugguguugcugcugua

SEQ ID NO: 1252358 - RNA, 19 nt, Homo sapiens
  misc_RNA (1)...(19): siRNA sense strand
cagaugacgccuguuauag

SEQ ID NO: 1252359 - RNA, 19 nt, Homo sapiens
  misc_RNA (1)...(19): siRNA sense strand
uuggugaacgaguagauua

SEQ ID NO: 1252360 - RNA, 19 nt, Homo sapiens
  misc_RNA (1)...(19): siRNA sense strand
gucauugcugugauuguua

SEQ ID NO: 1252361 - RNA, 19 nt, Homo sapiens
  misc_RNA (1)...(19): siRNA sense strand
ggagccaccaacauuugaa

SEQ ID NO: 1252362 - RNA, 19 nt, Homo sapiens
  misc_RNA (1)...(19): siRNA sense strand
gcgcuuuccuggguugcuu

SEQ ID NO: 1252363 - RNA, 19 nt, Homo sapiens
  misc_RNA (1)...(19): siRNA sense strand
uacuacaaagcaacaguua

SEQ ID NO: 1252364 - RNA, 19 nt, Homo sapiens
  misc_RNA (1)...(19): siRNA sense strand
cuugaugcaguaacuuaua

SEQ ID NO: 1252365 - RNA, 19 nt, Homo sapiens
  misc_RNA (1)...(19): siRNA sense strand
aaacauguccauauauacg

SEQ ID NO: 1252366 - RNA, 19 nt, Homo sapiens
  misc_RNA (1)...(19): siRNA sense strand
guguaaaguggucaaaugu

SEQ ID NO: 1252367 - RNA, 19 nt, Homo sapiens
  misc_RNA (1)...(19): siRNA sense strand
cuuacgaguuugguuauca

SEQ ID NO: 1252368 - RNA, 19 nt, Homo sapiens
  misc_RNA (1)...(19): siRNA sense strand
uacgggauccuuuaaaugg

SEQ ID NO: 1252369 - RNA, 19 nt, Homo sapiens
  misc_RNA (1)...(19): siRNA sense strand
aaccaaaacccuacuauga

SEQ ID NO: 1252370 - RNA, 19 nt, Homo sapiens
  misc_RNA (1)...(19): siRNA sense strand
cccaauaugugaaaagguu

SEQ ID NO: 1252371 - RNA, 19 nt, Homo sapiens
  misc_RNA (1)...(19): siRNA sense strand
cgauggcagcgacacaauu

SEQ ID NO: 1252372 - RNA, 19 nt, Homo sapiens
  misc_RNA (1)...(19): siRNA sense strand
gauccauuuucacuuauug

SEQ ID NO: 1252373 - RNA, 19 nt, Homo sapiens
  misc_RNA (1)...(19): siRNA sense strand
uugaugcaguaacuuauag

SEQ ID NO: 1252374 - RNA, 19 nt, Homo sapiens
  misc_RNA (1)...(19): siRNA sense strand
guaucuugaugcaguaacu

SEQ ID NO: 1252375 - RNA, 19 nt, Homo sapiens
  misc_RNA (1)...(19): siRNA sense strand
caacauuugaagcuaugga

SEQ ID NO: 1252376 - RNA, 19 nt, Homo sapiens
  misc_RNA (1)...(19): siRNA sense strand
gagauuggugaacgaguag

SEQ ID NO: 1252377 - RNA, 19 nt, Homo sapiens
  misc_RNA (1)...(19): siRNA sense strand
ggagagagcacgauuuauu

SEQ ID NO: 1252378 - RNA, 19 nt, Homo sapiens
  misc_RNA (1)...(19): siRNA sense strand
agagaaacauguccauaua

SEQ ID NO: 1252379 - RNA, 19 nt, Homo sapiens
  misc_RNA (1)...(19): siRNA sense strand
cagaugcacuuuauuugua

SEQ ID NO: 1252380 - RNA, 19 nt, Homo sapiens
  misc_RNA (1)...(19): siRNA sense strand
ggacuuacgaguuugguua

SEQ ID NO: 1252381 - RNA, 19 nt, Homo sapiens
  misc_RNA (1)...(19): siRNA sense strand
aaacagauaucaggauuug

SEQ ID NO: 1252382 - RNA, 19 nt, Homo sapiens
  misc_RNA (1)...(19): siRNA sense strand
cuauggagcucauugguaa

SEQ ID NO: 1252383 - RNA, 19 nt, Homo sapiens
  misc_RNA (1)...(19): siRNA sense strand
aaacacaccuuuagugaag

SEQ ID NO: 1252384 - RNA, 19 nt, Homo sapiens
  misc_RNA (1)...(19): siRNA sense strand
gaacuuaaaggaucaguag

SEQ ID NO: 1252385 - RNA, 19 nt, Homo sapiens
  misc_RNA (1)...(19): siRNA sense strand
gaaaacagauaucaggauu

SEQ ID NO: 1252386 - RNA, 19 nt, Homo sapiens
  misc_RNA (1)...(19): siRNA sense strand
uaaaggaucaguagcaauu

SEQ ID NO: 1252387 - RNA, 19 nt, Homo sapiens
  misc_RNA (1)...(19): siRNA sense strand
aaaugggacuuacgaguuu

SEQ ID NO: 1252388 - RNA, 19 nt, Homo sapiens
  misc_RNA (1)...(19): siRNA sense strand
guuaucagaugcacuuuau

SEQ ID NO: 1252389 - RNA, 19 nt, Homo sapiens
  misc_RNA (1)...(19): siRNA sense strand
gagcugaauaugccacuua

SEQ ID NO: 1252390 - RNA, 19 nt, Homo sapiens
  misc_RNA (1)...(19): siRNA sense strand
ugagauuggugaacgagua

SEQ ID NO: 1252391 - RNA, 19 nt, Homo sapiens
  misc_RNA (1)...(19): siRNA sense strand
gugaacgaguagauuauaa

SEQ ID NO: 1252392 - RNA, 19 nt, Homo sapiens
  misc_RNA (1)...(19): siRNA sense strand
gagagagcacgauuuauug

SEQ ID NO: 1252393 - RNA, 19 nt, Homo sapiens
  misc_RNA (1)...(19): siRNA sense strand
caaaugggacuuacgaguu

SEQ ID NO: 1252394 - RNA, 19 nt, Homo sapiens
  misc_RNA (1)...(19): siRNA sense strand
ggucauugcugugauuguu

SEQ ID NO: 1252395 - RNA, 19 nt, Homo sapiens
  misc_RNA (1)...(19): siRNA sense strand
ccagauccauuuucacuua

SEQ ID NO: 1252396 - RNA, 19 nt, Homo sapiens
  misc_RNA (1)...(19): siRNA sense strand
gaaggaauacuugacaguu

SEQ ID NO: 1252397 - RNA, 19 nt, Homo sapiens
  misc_RNA (1)...(19): siRNA sense strand
aaggaauacuugacaguuu

SEQ ID NO: 1252398 - RNA, 19 nt, Homo sapiens
  misc_RNA (1)...(19): siRNA sense strand
ucagaugacgccuguuaua

SEQ ID NO: 1252399 - RNA, 19 nt, Homo sapiens
  misc_RNA (1)...(19): siRNA sense strand
gaaaacacaccuuuaguga

SEQ ID NO: 1252400 - RNA, 19 nt, Homo sapiens
  misc_RNA (1)...(19): siRNA sense strand
gaugacgccuguuauagag

SEQ ID NO: 1252401 - RNA, 19 nt, Homo sapiens
  misc_RNA (1)...(19): siRNA sense strand
gagaaacauguccauauau

SEQ ID NO: 1252402 - RNA, 19 nt, Homo sapiens
  misc_RNA (1)...(19): siRNA sense strand
ccacuuaccagacuaaauc

SEQ ID NO: 1252403 - RNA, 19 nt, Homo sapiens
  misc_RNA (1)...(19): siRNA sense strand
acgaguagauuauaagugu

SEQ ID NO: 1252404 - RNA, 19 nt, Homo sapiens
  misc_RNA (1)...(19): siRNA sense strand
cuacaaagcaacaguuaug

SEQ ID NO: 1252405 - RNA, 19 nt, Homo sapiens
  misc_RNA (1)...(19): siRNA sense strand
ccaccaacauuugaagcua

SEQ ID NO: 1252406 - RNA, 19 nt, Homo sapiens
  misc_RNA (1)...(19): siRNA sense strand
uauacgggauccuuuaaau

SEQ ID NO: 1252407 - RNA, 19 nt, Homo sapiens
  misc_RNA (1)...(19): siRNA sense strand
cgaguuugguuaucagaug

SEQ ID NO: 1252408 - RNA, 19 nt, Homo sapiens
  misc_RNA (1)...(19): siRNA sense strand
gaacgaguagauuauaagu

SEQ ID NO: 1252409 - RNA, 19 nt, Homo sapiens
  misc_RNA (1)...(19): siRNA sense strand
gugaggagccaccaacauu

SEQ ID NO: 1252410 - RNA, 19 nt, Homo sapiens
  misc_RNA (1)...(19): siRNA sense strand
gauggcagcgacacaauug

SEQ ID NO: 1252411 - RNA, 19 nt, Homo sapiens
  misc_RNA (1)...(19): siRNA sense strand
ucucagaugacgccuguua

SEQ ID NO: 1252412 - RNA, 19 nt, Homo sapiens
  misc_RNA (1)...(19): siRNA sense strand
gaggagccaccaacauuug

SEQ ID NO: 1252413 - RNA, 19 nt, Homo sapiens
  misc_RNA (1)...(19): siRNA sense strand
gcuauggagcucauuggua

SEQ ID NO: 1252414 - RNA, 19 nt, Homo sapiens
  misc_RNA (1)...(19): siRNA sense strand
acacaccuuuagugaagua

SEQ ID NO: 1252415 - RNA, 19 nt, Homo sapiens
  misc_RNA (1)...(19): siRNA sense strand
uagagaaacauguccauau

SEQ ID NO: 1252416 - RNA, 19 nt, Homo sapiens
  misc_RNA (1)...(19): siRNA sense strand
ggugaacgaguagauuaua

SEQ ID NO: 1252417 - RNA, 19 nt, Homo sapiens
  misc_RNA (1)...(19): siRNA sense strand
gaaguagaaguauuugagu

SEQ ID NO: 1252418 - RNA, 19 nt, Homo sapiens
  misc_RNA (1)...(19): siRNA sense strand
gaaacauguccauauauac

SEQ ID NO: 1252419 - RNA, 19 nt, Homo sapiens
  misc_RNA (1)...(19): siRNA sense strand
ugacgccuguuauagagaa

SEQ ID NO: 1252420 - RNA, 19 nt, Homo sapiens
  misc_RNA (1)...(19): siRNA sense strand
cgaguagauuauaagugua

SEQ ID NO: 1252421 - RNA, 19 nt, Homo sapiens
  misc_RNA (1)...(19): siRNA sense strand
gcacuuuauuuguaaugag

SEQ ID NO: 1252422 - RNA, 19 nt, Homo sapiens
  misc_RNA (1)...(19): siRNA sense strand
guagaaguauuugaguauc

SEQ ID NO: 1252423 - RNA, 19 nt, Homo sapiens
  misc_RNA (1)...(19): siRNA sense strand
guauuugaguaucuugaug

SEQ ID NO: 1252424 - RNA, 19 nt, Homo sapiens
  misc_RNA (1)...(19): siRNA sense strand
aggaauacuugacaguuug

SEQ ID NO: 1252425 - RNA, 19 nt, Homo sapiens
  misc_RNA (1)...(19): siRNA sense strand
ccaaaacccuacuaugaga

SEQ ID NO: 1252426 - RNA, 19 nt, Homo sapiens
  misc_RNA (1)...(19): siRNA sense strand
aguguaaaguggucaaaug

SEQ ID NO: 1252427 - RNA, 19 nt, Homo sapiens
  misc_RNA (1)...(19): siRNA sense strand
ccacccauacuauuuguga

SEQ ID NO: 1252428 - RNA, 19 nt, Homo sapiens
  misc_RNA (1)...(19): siRNA sense strand
uuggagagagcacgauuua

SEQ ID NO: 1252429 - RNA, 19 nt, Homo sapiens
  misc_RNA (1)...(19): siRNA sense strand
gguuaucagaugcacuuua

SEQ ID NO: 1252430 - RNA, 19 nt, Homo sapiens
  misc_RNA (1)...(19): siRNA sense strand
caccaacauuugaagcuau

SEQ ID NO: 1252431 - RNA, 19 nt, Homo sapiens
  misc_RNA (1)...(19): siRNA sense strand
ugaggagccaccaacauuu

SEQ ID NO: 1252432 - RNA, 19 nt, Homo sapiens
  misc_RNA (1)...(19): siRNA sense strand
ggaaggaauacuugacagu

SEQ ID NO: 1252433 - RNA, 19 nt, Homo sapiens
  misc_RNA (1)...(19): siRNA sense strand
gaggaaggaauacuugaca

SEQ ID NO: 1252434 - RNA, 19 nt, Homo sapiens
  misc_RNA (1)...(19): siRNA sense strand
ugaguaucuugaugcagua

SEQ ID NO: 1252435 - RNA, 19 nt, Homo sapiens
  misc_RNA (1)...(19): siRNA sense strand
caccuuuagugaaguagaa

SEQ ID NO: 1252436 - RNA, 19 nt, Homo sapiens
  misc_RNA (1)...(19): siRNA sense strand
acagauaucaggauuugga

SEQ ID NO: 1252437 - RNA, 19 nt, Homo sapiens
  misc_RNA (1)...(19): siRNA sense strand
ucauugcugugauuguuau

SEQ ID NO: 1252438 - RNA, 19 nt, Homo sapiens
  misc_RNA (1)...(19): siRNA sense strand
ucagaugcacuuuauuugu

SEQ ID NO: 1252439 - RNA, 19 nt, Homo sapiens
  misc_RNA (1)...(19): siRNA sense strand
gugcugcuccagaguguaa

SEQ ID NO: 1252440 - RNA, 19 nt, Homo sapiens
  misc_RNA (1)...(19): siRNA sense strand
ggaaaacacaccuuuagug

SEQ ID NO: 1252441 - RNA, 19 nt, Homo sapiens
  misc_RNA (1)...(19): siRNA sense strand
aaggaucaguagcaauuug

SEQ ID NO: 1252442 - RNA, 19 nt, Homo sapiens
  misc_RNA (1)...(19): siRNA sense strand
uauauacgggauccuuuaa

SEQ ID NO: 1252443 - RNA, 19 nt, Homo sapiens
  misc_RNA (1)...(19): siRNA sense strand
ugaaguagaaguauuugag

SEQ ID NO: 1252444 - RNA, 19 nt, Homo sapiens
  misc_RNA (1)...(19): siRNA sense strand
cuugacaguuuggauguuu

SEQ ID NO: 1252445 - RNA, 19 nt, Homo sapiens
  misc_RNA (1)...(19): siRNA sense strand
cauauauacgggauccuuu

SEQ ID NO: 1252446 - RNA, 19 nt, Homo sapiens
  misc_RNA (1)...(19): siRNA sense strand
auauauacgggauccuuua

SEQ ID NO: 1252447 - RNA, 19 nt, Homo sapiens
  misc_RNA (1)...(19): siRNA sense strand
cuuaaaggaucaguagcaa

SEQ ID NO: 1252448 - RNA, 19 nt, Homo sapiens
  misc_RNA (1)...(19): siRNA sense strand
uaaaccugaggaaggaaua

SEQ ID NO: 1252449 - RNA, 19 nt, Homo sapiens
  misc_RNA (1)...(19): siRNA sense strand
agaugacgccuguuauaga

SEQ ID NO: 1252450 - RNA, 19 nt, Homo sapiens
  misc_RNA (1)...(19): siRNA sense strand
ugugauuguuauugccaua

SEQ ID NO: 1252451 - RNA, 19 nt, Homo sapiens
  misc_RNA (1)...(19): siRNA sense strand
gagagcacgauuuauugug

SEQ ID NO: 1252452 - RNA, 19 nt, Homo sapiens
  misc_RNA (1)...(19): siRNA sense strand
gaaguauuugaguaucuug

SEQ ID NO: 1252453 - RNA, 19 nt, Homo sapiens
  misc_RNA (1)...(19): siRNA sense strand
ggcuaccugucucagauga

SEQ ID NO: 1252454 - RNA, 19 nt, Homo sapiens
  misc_RNA (1)...(19): siRNA sense strand
gauaucaggauuuggaaaa

SEQ ID NO: 1252455 - RNA, 19 nt, Homo sapiens
  misc_RNA (1)...(19): siRNA sense strand
ccucuugccacccauacua

SEQ ID NO: 1252456 - RNA, 19 nt, Homo sapiens
  misc_RNA (1)...(19): siRNA sense strand
ccaugguguugcugcugua

SEQ ID NO: 1252457 - RNA, 19 nt, Homo sapiens
  misc_RNA (1)...(19): siRNA sense strand
cagaugacgccuguuauag

SEQ ID NO: 1252458 - RNA, 19 nt, Homo sapiens
  misc_RNA (1)...(19): siRNA sense strand
cagaugguggagcugaaua

SEQ ID NO: 1252459 - RNA, 19 nt, Homo sapiens
  misc_RNA (1)...(19): siRNA sense strand
uuggugaacgaguagauua

SEQ ID NO: 1252460 - RNA, 19 nt, Homo sapiens
  misc_RNA (1)...(19): siRNA sense strand
gucauugcugugauuguua

SEQ ID NO: 1252461 - RNA, 19 nt, Homo sapiens
  misc_RNA (1)...(19): siRNA sense strand
ggagccaccaacauuugaa

SEQ ID NO: 1252462 - RNA, 19 nt, Homo sapiens
  misc_RNA (1)...(19): siRNA sense strand
gcgcuuuccuggguugcuu

SEQ ID NO: 1252463 - RNA, 19 nt, Homo sapiens
  misc_RNA (1)...(19): siRNA sense strand
uacuacaaagcaacaguua

SEQ ID NO: 1252464 - RNA, 19 nt, Homo sapiens
  misc_RNA (1)...(19): siRNA sense strand
cuugaugcaguaacuuaua

SEQ ID NO: 1252465 - RNA, 19 nt, Homo sapiens
  misc_RNA (1)...(19): siRNA sense strand
aaacauguccauauauacg

SEQ ID NO: 1252466 - RNA, 19 nt, Homo sapiens
  misc_RNA (1)...(19): siRNA sense strand
guguaaaguggucaaaugu

SEQ ID NO: 1252467 - RNA, 19 nt, Homo sapiens
  misc_RNA (1)...(19): siRNA sense strand
cuuacgaguuugguuauca

SEQ ID NO: 1252468 - RNA, 19 nt, Homo sapiens
  misc_RNA (1)...(19): siRNA sense strand
uacgggauccuuuaaaugg

SEQ ID NO: 1252469 - RNA, 19 nt, Homo sapiens
  misc_RNA (1)...(19): siRNA sense strand
gcagaugguggagcugaau

SEQ ID NO: 1252470 - RNA, 19 nt, Homo sapiens
  misc_RNA (1)...(19): siRNA sense strand
aaccaaaacccuacuauga

SEQ ID NO: 1252471 - RNA, 19 nt, Homo sapiens
  misc_RNA (1)...(19): siRNA sense strand
cccaauaugugaaaagguu

SEQ ID NO: 1252472 - RNA, 19 nt, Homo sapiens
  misc_RNA (1)...(19): siRNA sense strand
ggagcugaauaugccacuu

SEQ ID NO: 1252473 - RNA, 19 nt, Homo sapiens
  misc_RNA (1)...(19): siRNA sense strand
cgauggcagcgacacaauu

SEQ ID NO: 1252474 - RNA, 19 nt, Homo sapiens
  misc_RNA (1)...(19): siRNA sense strand
gauccauuuucacuuauug

SEQ ID NO: 1252475 - RNA, 19 nt, Homo sapiens
  misc_RNA (1)...(19): siRNA sense strand
uugaugcaguaacuuauag

SEQ ID NO: 1252476 - RNA, 19 nt, Homo sapiens
  misc_RNA (1)...(19): siRNA sense strand
guaucuugaugcaguaacu

SEQ ID NO: 1252477 - RNA, 19 nt, Homo sapiens
  misc_RNA (1)...(19): siRNA sense strand
ggagagagcacgauuuauu

SEQ ID NO: 1252478 - RNA, 19 nt, Homo sapiens
  misc_RNA (1)...(19): siRNA sense strand
agagaaacauguccauaua

SEQ ID NO: 1252479 - RNA, 19 nt, Homo sapiens
  misc_RNA (1)...(19): siRNA sense strand
cagaugcacuuuauuugua

SEQ ID NO: 1252480 - RNA, 19 nt, Homo sapiens
  misc_RNA (1)...(19): siRNA sense strand
ggacuuacgaguuugguua

SEQ ID NO: 1252481 - RNA, 19 nt, Homo sapiens
  misc_RNA (1)...(19): siRNA sense strand
aaacagauaucaggauuug

SEQ ID NO: 1252482 - RNA, 19 nt, Homo sapiens
  misc_RNA (1)...(19): siRNA sense strand
cuauggagcucauugguaa

SEQ ID NO: 1252483 - RNA, 19 nt, Homo sapiens
  misc_RNA (1)...(19): siRNA sense strand
aaacacaccuuuagugaag

SEQ ID NO: 1252484 - RNA, 19 nt, Homo sapiens
  misc_RNA (1)...(19): siRNA sense strand
gaacuuaaaggaucaguag

SEQ ID NO: 1252485 - RNA, 19 nt, Homo sapiens
  misc_RNA (1)...(19): siRNA sense strand
gaaaacagauaucaggauu

SEQ ID NO: 1252486 - RNA, 19 nt, Homo sapiens
  misc_RNA (1)...(19): siRNA sense strand
uaaaggaucaguagcaauu

SEQ ID NO: 1252487 - RNA, 19 nt, Homo sapiens
  misc_RNA (1)...(19): siRNA sense strand
aaaugggacuuacgaguuu

SEQ ID NO: 1252488 - RNA, 19 nt, Homo sapiens
  misc_RNA (1)...(19): siRNA sense strand
guuaucagaugcacuuuau

SEQ ID NO: 1252489 - RNA, 19 nt, Homo sapiens
  misc_RNA (1)...(19): siRNA sense strand
gagcugaauaugccacuua

SEQ ID NO: 1252490 - RNA, 19 nt, Homo sapiens
  misc_RNA (1)...(19): siRNA sense strand
gagcagagaggcugaauag

SEQ ID NO: 1252491 - RNA, 19 nt, Homo sapiens
  misc_RNA (1)...(19): siRNA sense strand
ugagauuggugaacgagua

SEQ ID NO: 1252492 - RNA, 19 nt, Homo sapiens
  misc_RNA (1)...(19): siRNA sense strand
gugaacgaguagauuauaa

SEQ ID NO: 1252493 - RNA, 19 nt, Homo sapiens
  misc_RNA (1)...(19): siRNA sense strand
gagagagcacgauuuauug

SEQ ID NO: 1252494 - RNA, 19 nt, Homo sapiens
  misc_RNA (1)...(19): siRNA sense strand
caaaugggacuuacgaguu

SEQ ID NO: 1252495 - RNA, 19 nt, Homo sapiens
  misc_RNA (1)...(19): siRNA sense strand
ggucauugcugugauuguu

SEQ ID NO: 1252496 - RNA, 19 nt, Homo sapiens
  misc_RNA (1)...(19): siRNA sense strand
ccagauccauuuucacuua

SEQ ID NO: 1252497 - RNA, 19 nt, Homo sapiens
  misc_RNA (1)...(19): siRNA sense strand
gaaggaauacuugacaguu

SEQ ID NO: 1252498 - RNA, 19 nt, Homo sapiens
  misc_RNA (1)...(19): siRNA sense strand
aaggaauacuugacaguuu

SEQ ID NO: 1252499 - RNA, 19 nt, Homo sapiens
  misc_RNA (1)...(19): siRNA sense strand
ucagaugacgccuguuaua

SEQ ID NO: 1252500 - RNA, 19 nt, Homo sapiens
  misc_RNA (1)...(19): siRNA sense strand
gaaaacacaccuuuaguga

SEQ ID NO: 1252501 - RNA, 19 nt, Homo sapiens
  misc_RNA (1)...(19): siRNA sense strand
gaugacgccuguuauagag

SEQ ID NO: 1252502 - RNA, 19 nt, Homo sapiens
  misc_RNA (1)...(19): siRNA sense strand
gagaaacauguccauauau

SEQ ID NO: 1252503 - RNA, 19 nt, Homo sapiens
  misc_RNA (1)...(19): siRNA sense strand
ccacuuaccagacuaaauc

SEQ ID NO: 1252504 - RNA, 19 nt, Homo sapiens
  misc_RNA (1)...(19): siRNA sense strand
acgaguagauuauaagugu

SEQ ID NO: 1252505 - RNA, 19 nt, Homo sapiens
  misc_RNA (1)...(19): siRNA sense strand
cuacaaagcaacaguuaug

SEQ ID NO: 1252506 - RNA, 19 nt, Homo sapiens
  misc_RNA (1)...(19): siRNA sense strand
ccaccaacauuugaagcua

SEQ ID NO: 1252507 - RNA, 19 nt, Homo sapiens
  misc_RNA (1)...(19): siRNA sense strand
uauacgggauccuuuaaau

SEQ ID NO: 1252508 - RNA, 19 nt, Homo sapiens
  misc_RNA (1)...(19): siRNA sense strand
cgaguuugguuaucagaug

SEQ ID NO: 1252509 - RNA, 19 nt, Homo sapiens
  misc_RNA (1)...(19): siRNA sense strand
gaacgaguagauuauaagu

SEQ ID NO: 1252510 - RNA, 19 nt, Homo sapiens
  misc_RNA (1)...(19): siRNA sense strand
gugaggagccaccaacauu

SEQ ID NO: 1252511 - RNA, 19 nt, Homo sapiens
  misc_RNA (1)...(19): siRNA sense strand
gauggcagcgacacaauug

SEQ ID NO: 1252512 - RNA, 19 nt, Homo sapiens
  misc_RNA (1)...(19): siRNA sense strand
ucucagaugacgccuguua

SEQ ID NO: 1252513 - RNA, 19 nt, Homo sapiens
  misc_RNA (1)...(19): siRNA sense strand
acacaccuuuagugaagua

SEQ ID NO: 1252514 - RNA, 19 nt, Homo sapiens
  misc_RNA (1)...(19): siRNA sense strand
gcuauggagcucauuggua

SEQ ID NO: 1252515 - RNA, 19 nt, Homo sapiens
  misc_RNA (1)...(19): siRNA sense strand
gaggagccaccaacauuug

SEQ ID NO: 1252516 - RNA, 19 nt, Homo sapiens
  misc_RNA (1)...(19): siRNA sense strand
uagagaaacauguccauau

SEQ ID NO: 1252517 - RNA, 19 nt, Homo sapiens
  misc_RNA (1)...(19): siRNA sense strand
guuccaaagugucuuaaag

SEQ ID NO: 1252518 - RNA, 19 nt, Homo sapiens
  misc_RNA (1)...(19): siRNA sense strand
ggugaacgaguagauuaua

SEQ ID NO: 1252519 - RNA, 19 nt, Homo sapiens
  misc_RNA (1)...(19): siRNA sense strand
gaaguagaaguauuugagu

SEQ ID NO: 1252520 - RNA, 19 nt, Homo sapiens
  misc_RNA (1)...(19): siRNA sense strand
gaaacauguccauauauac

SEQ ID NO: 1252521 - RNA, 19 nt, Homo sapiens
  misc_RNA (1)...(19): siRNA sense strand
ugacgccuguuauagagaa

SEQ ID NO: 1252522 - RNA, 19 nt, Homo sapiens
  misc_RNA (1)...(19): siRNA sense strand
cgaguagauuauaagugua

SEQ ID NO: 1252523 - RNA, 19 nt, Homo sapiens
  misc_RNA (1)...(19): siRNA sense strand
gcacuuuauuuguaaugag

SEQ ID NO: 1252524 - RNA, 19 nt, Homo sapiens
  misc_RNA (1)...(19): siRNA sense strand
guagaaguauuugaguauc

SEQ ID NO: 1252525 - RNA, 19 nt, Homo sapiens
  misc_RNA (1)...(19): siRNA sense strand
guauuugaguaucuugaug

SEQ ID NO: 1252526 - RNA, 19 nt, Homo sapiens
  misc_RNA (1)...(19): siRNA sense strand
aggaauacuugacaguuug

SEQ ID NO: 1252527 - RNA, 19 nt, Homo sapiens
  misc_RNA (1)...(19): siRNA sense strand
ccaaaacccuacuaugaga

SEQ ID NO: 1252528 - RNA, 19 nt, Homo sapiens
  misc_RNA (1)...(19): siRNA sense strand
aguguaaaguggucaaaug

SEQ ID NO: 1252529 - RNA, 19 nt, Homo sapiens
  misc_RNA (1)...(19): siRNA sense strand
ccacccauacuauuuguga

SEQ ID NO: 1252530 - RNA, 19 nt, Homo sapiens
  misc_RNA (1)...(19): siRNA sense strand
uuggagagagcacgauuua

SEQ ID NO: 1252531 - RNA, 19 nt, Homo sapiens
  misc_RNA (1)...(19): siRNA sense strand
gguuaucagaugcacuuua

SEQ ID NO: 1252532 - RNA, 19 nt, Homo sapiens
  misc_RNA (1)...(19): siRNA sense strand
caccaacauuugaagcuau

SEQ ID NO: 1252533 - RNA, 19 nt, Homo sapiens
  misc_RNA (1)...(19): siRNA sense strand
ugaggagccaccaacauuu

SEQ ID NO: 1252534 - RNA, 19 nt, Homo sapiens
  misc_RNA (1)...(19): siRNA sense strand
ggaaggaauacuugacagu

SEQ ID NO: 1252535 - RNA, 19 nt, Homo sapiens
  misc_RNA (1)...(19): siRNA sense strand
gaggaaggaauacuugaca

SEQ ID NO: 1252536 - RNA, 19 nt, Homo sapiens
  misc_RNA (1)...(19): siRNA sense strand
ccaguuccaaagugucuua

SEQ ID NO: 1252537 - RNA, 19 nt, Homo sapiens
  misc_RNA (1)...(19): siRNA sense strand
ugaguaucuugaugcagua

SEQ ID NO: 1252538 - RNA, 19 nt, Homo sapiens
  misc_RNA (1)...(19): siRNA sense strand
caccuuuagugaaguagaa

SEQ ID NO: 1252539 - RNA, 19 nt, Homo sapiens
  misc_RNA (1)...(19): siRNA sense strand
acagauaucaggauuugga

SEQ ID NO: 1252540 - RNA, 19 nt, Homo sapiens
  misc_RNA (1)...(19): siRNA sense strand
ucauugcugugauuguuau

SEQ ID NO: 1252541 - RNA, 19 nt, Homo sapiens
  misc_RNA (1)...(19): siRNA sense strand
ucagaugcacuuuauuugu

SEQ ID NO: 1252542 - RNA, 19 nt, Homo sapiens
  misc_RNA (1)...(19): siRNA sense strand
gugcugcuccagaguguaa

SEQ ID NO: 1252543 - RNA, 19 nt, Homo sapiens
  misc_RNA (1)...(19): siRNA sense strand
ggaaaacacaccuuuagug

SEQ ID NO: 1252544 - RNA, 19 nt, Homo sapiens
  misc_RNA (1)...(19): siRNA sense strand
aaggaucaguagcaauuug

SEQ ID NO: 1252545 - RNA, 19 nt, Homo sapiens
  misc_RNA (1)...(19): siRNA sense strand
uauauacgggauccuuuaa

SEQ ID NO: 1252546 - RNA, 19 nt, Homo sapiens
  misc_RNA (1)...(19): siRNA sense strand
ugaaguagaaguauuugag

SEQ ID NO: 1252547 - RNA, 19 nt, Homo sapiens
  misc_RNA (1)...(19): siRNA sense strand
cuugacaguuuggauguuu

SEQ ID NO: 1252548 - RNA, 19 nt, Homo sapiens
  misc_RNA (1)...(19): siRNA sense strand
cauauauacgggauccuuu

SEQ ID NO: 1252549 - RNA, 19 nt, Homo sapiens
  misc_RNA (1)...(19): siRNA sense strand
auauauacgggauccuuua

SEQ ID NO: 1252550 - RNA, 19 nt, Homo sapiens
  misc_RNA (1)...(19): siRNA sense strand
cuuaaaggaucaguagcaa

SEQ ID NO: 1252551 - RNA, 19 nt, Homo sapiens
  misc_RNA (1)...(19): siRNA sense strand
uaaaccugaggaaggaaua

SEQ ID NO: 1252552 - RNA, 19 nt, Homo sapiens
  misc_RNA (1)...(19): siRNA sense strand
agaugacgccuguuauaga

SEQ ID NO: 1252553 - RNA, 19 nt, Homo sapiens
  misc_RNA (1)...(19): siRNA sense strand
ugugauuguuauugccaua

SEQ ID NO: 1252554 - RNA, 19 nt, Homo sapiens
  misc_RNA (1)...(19): siRNA sense strand
gagagcacgauuuauugug

SEQ ID NO: 1252555 - RNA, 19 nt, Homo sapiens
  misc_RNA (1)...(19): siRNA sense strand
gaaguauuugaguaucuug

SEQ ID NO: 1252556 - RNA, 19 nt, Homo sapiens
  misc_RNA (1)...(19): siRNA sense strand
ggcuaccugucucagauga

SEQ ID NO: 1252557 - RNA, 19 nt, Homo sapiens
  misc_RNA (1)...(19): siRNA sense strand
ccucuugccacccauacua

SEQ ID NO: 1252558 - RNA, 19 nt, Homo sapiens
  misc_RNA (1)...(19): siRNA sense strand
gauaucaggauuuggaaaa

SEQ ID NO: 1252559 - RNA, 19 nt, Homo sapiens
  misc_RNA (1)...(19): siRNA sense strand
ccaugguguugcugcugua

SEQ ID NO: 1252560 - RNA, 19 nt, Homo sapiens
  misc_RNA (1)...(19): siRNA sense strand
cagaugacgccuguuauag

SEQ ID NO: 1252561 - RNA, 19 nt, Homo sapiens
  misc_RNA (1)...(19): siRNA sense strand
cagaugguggagcugaaua

SEQ ID NO: 1252562 - RNA, 19 nt, Homo sapiens
  misc_RNA (1)...(19): siRNA sense strand
gucauugcugugauuguua

SEQ ID NO: 1252563 - RNA, 19 nt, Homo sapiens
  misc_RNA (1)...(19): siRNA sense strand
uuggugaacgaguagauua

SEQ ID NO: 1252564 - RNA, 19 nt, Homo sapiens
  misc_RNA (1)...(19): siRNA sense strand
ggagccaccaacauuugaa

SEQ ID NO: 1252565 - RNA, 19 nt, Homo sapiens
  misc_RNA (1)...(19): siRNA sense strand
gcgcuuuccuggguugcuu

SEQ ID NO: 1252566 - RNA, 19 nt, Homo sapiens
  misc_RNA (1)...(19): siRNA sense strand
uacuacaaagcaacaguua

SEQ ID NO: 1252567 - RNA, 19 nt, Homo sapiens
  misc_RNA (1)...(19): siRNA sense strand
cuugaugcaguaacuuaua

SEQ ID NO: 1252568 - RNA, 19 nt, Homo sapiens
  misc_RNA (1)...(19): siRNA sense strand
aaacauguccauauauacg

SEQ ID NO: 1252569 - RNA, 19 nt, Homo sapiens
  misc_RNA (1)...(19): siRNA sense strand
guguaaaguggucaaaugu

SEQ ID NO: 1252570 - RNA, 19 nt, Homo sapiens
  misc_RNA (1)...(19): siRNA sense strand
cuuacgaguuugguuauca

SEQ ID NO: 1252571 - RNA, 19 nt, Homo sapiens
  misc_RNA (1)...(19): siRNA sense strand
aaccaaaacccuacuauga

SEQ ID NO: 1252572 - RNA, 19 nt, Homo sapiens
  misc_RNA (1)...(19): siRNA sense strand
gcagaugguggagcugaau

SEQ ID NO: 1252573 - RNA, 19 nt, Homo sapiens
  misc_RNA (1)...(19): siRNA sense strand
uacgggauccuuuaaaugg

SEQ ID NO: 1252574 - RNA, 19 nt, Homo sapiens
  misc_RNA (1)...(19): siRNA sense strand
cgauggcagcgacacaauu

SEQ ID NO: 1252575 - RNA, 19 nt, Homo sapiens
  misc_RNA (1)...(19): siRNA sense strand
ggagcugaauaugccacuu

SEQ ID NO: 1252576 - RNA, 19 nt, Homo sapiens
  misc_RNA (1)...(19): siRNA sense strand
caacauuugaagcuaugga

SEQ ID NO: 1252577 - RNA, 19 nt, Homo sapiens
  misc_RNA (1)...(19): siRNA sense strand
ggagagagcacgauuuauu

SEQ ID NO: 1252578 - RNA, 19 nt, Homo sapiens
  misc_RNA (1)...(19): siRNA sense strand
agagaaacauguccauaua

SEQ ID NO: 1252579 - RNA, 19 nt, Homo sapiens
  misc_RNA (1)...(19): siRNA sense strand
cagaugcacuuuauuugua

SEQ ID NO: 1252580 - RNA, 19 nt, Homo sapiens
  misc_RNA (1)...(19): siRNA sense strand
ggacuuacgaguuugguua

SEQ ID NO: 1252581 - RNA, 19 nt, Homo sapiens
  misc_RNA (1)...(19): siRNA sense strand
aaacagauaucaggauuug

SEQ ID NO: 1252582 - RNA, 19 nt, Homo sapiens
  misc_RNA (1)...(19): siRNA sense strand
cuauggagcucauugguaa

SEQ ID NO: 1252583 - RNA, 19 nt, Homo sapiens
  misc_RNA (1)...(19): siRNA sense strand
aaacacaccuuuagugaag

SEQ ID NO: 1252584 - RNA, 19 nt, Homo sapiens
  misc_RNA (1)...(19): siRNA sense strand
gaacuuaaaggaucaguag

SEQ ID NO: 1252585 - RNA, 19 nt, Homo sapiens
  misc_RNA (1)...(19): siRNA sense strand
gaaaacagauaucaggauu

SEQ ID NO: 1252586 - RNA, 19 nt, Homo sapiens
  misc_RNA (1)...(19): siRNA sense strand
uaaaggaucaguagcaauu

SEQ ID NO: 1252587 - RNA, 19 nt, Homo sapiens
  misc_RNA (1)...(19): siRNA sense strand
aaaugggacuuacgaguuu

SEQ ID NO: 1252588 - RNA, 19 nt, Homo sapiens
  misc_RNA (1)...(19): siRNA sense strand
guuaucagaugcacuuuau

SEQ ID NO: 1252589 - RNA, 19 nt, Homo sapiens
  misc_RNA (1)...(19): siRNA sense strand
ugagauuggugaacgagua

SEQ ID NO: 1252590 - RNA, 19 nt, Homo sapiens
  misc_RNA (1)...(19): siRNA sense strand
gugaacgaguagauuauaa

SEQ ID NO: 1252591 - RNA, 19 nt, Homo sapiens
  misc_RNA (1)...(19): siRNA sense strand
gagagagcacgauuuauug

SEQ ID NO: 1252592 - RNA, 19 nt, Homo sapiens
  misc_RNA (1)...(19): siRNA sense strand
caaaugggacuuacgaguu

SEQ ID NO: 1252593 - RNA, 19 nt, Homo sapiens
  misc_RNA (1)...(19): siRNA sense strand
ggucauugcugugauuguu

SEQ ID NO: 1252594 - RNA, 19 nt, Homo sapiens
  misc_RNA (1)...(19): siRNA sense strand
ccagauccauuuucacuua

SEQ ID NO: 1252595 - RNA, 19 nt, Homo sapiens
  misc_RNA (1)...(19): siRNA sense strand
gaaggaauacuugacaguu

SEQ ID NO: 1252596 - RNA, 19 nt, Homo sapiens
  misc_RNA (1)...(19): siRNA sense strand
aaggaauacuugacaguuu

SEQ ID NO: 1252597 - RNA, 19 nt, Homo sapiens
  misc_RNA (1)...(19): siRNA sense strand
ucagaugacgccuguuaua

SEQ ID NO: 1252598 - RNA, 19 nt, Homo sapiens
  misc_RNA (1)...(19): siRNA sense strand
gaaaacacaccuuuaguga

SEQ ID NO: 1252599 - RNA, 19 nt, Homo sapiens
  misc_RNA (1)...(19): siRNA sense strand
gaugacgccuguuauagag

SEQ ID NO: 1252600 - RNA, 19 nt, Homo sapiens
  misc_RNA (1)...(19): siRNA sense strand
gagaaacauguccauauau

SEQ ID NO: 1252601 - RNA, 19 nt, Homo sapiens
  misc_RNA (1)...(19): siRNA sense strand
acgaguagauuauaagugu

SEQ ID NO: 1252602 - RNA, 19 nt, Homo sapiens
  misc_RNA (1)...(19): siRNA sense strand
cuacaaagcaacaguuaug

SEQ ID NO: 1252603 - RNA, 19 nt, Homo sapiens
  misc_RNA (1)...(19): siRNA sense strand
ccaccaacauuugaagcua

SEQ ID NO: 1252604 - RNA, 19 nt, Homo sapiens
  misc_RNA (1)...(19): siRNA sense strand
uauacgggauccuuuaaau

SEQ ID NO: 1252605 - RNA, 19 nt, Homo sapiens
  misc_RNA (1)...(19): siRNA sense strand
cgaguuugguuaucagaug

SEQ ID NO: 1252606 - RNA, 19 nt, Homo sapiens
  misc_RNA (1)...(19): siRNA sense strand
gaacgaguagauuauaagu

SEQ ID NO: 1252607 - RNA, 19 nt, Homo sapiens
  misc_RNA (1)...(19): siRNA sense strand
gugaggagccaccaacauu

SEQ ID NO: 1252608 - RNA, 19 nt, Homo sapiens
  misc_RNA (1)...(19): siRNA sense strand
gauggcagcgacacaauug

SEQ ID NO: 1252609 - RNA, 19 nt, Homo sapiens
  misc_RNA (1)...(19): siRNA sense strand
gcuauggagcucauuggua

SEQ ID NO: 1252610 - RNA, 19 nt, Homo sapiens
  misc_RNA (1)...(19): siRNA sense strand
gaggagccaccaacauuug

SEQ ID NO: 1252611 - RNA, 19 nt, Homo sapiens
  misc_RNA (1)...(19): siRNA sense strand
acacaccuuuagugaagua

SEQ ID NO: 1252612 - RNA, 19 nt, Homo sapiens
  misc_RNA (1)...(19): siRNA sense strand
ucucagaugacgccuguua

SEQ ID NO: 1252613 - RNA, 19 nt, Homo sapiens
  misc_RNA (1)...(19): siRNA sense strand
uagagaaacauguccauau

SEQ ID NO: 1252614 - RNA, 19 nt, Homo sapiens
  misc_RNA (1)...(19): siRNA sense strand
ggugaacgaguagauuaua

SEQ ID NO: 1252615 - RNA, 19 nt, Homo sapiens
  misc_RNA (1)...(19): siRNA sense strand
gaaguagaaguauuugagu

SEQ ID NO: 1252616 - RNA, 19 nt, Homo sapiens
  misc_RNA (1)...(19): siRNA sense strand
gaaacauguccauauauac

SEQ ID NO: 1252617 - RNA, 19 nt, Homo sapiens
  misc_RNA (1)...(19): siRNA sense strand
ugacgccuguuauagagaa

SEQ ID NO: 1252618 - RNA, 19 nt, Homo sapiens
  misc_RNA (1)...(19): siRNA sense strand
cgaguagauuauaagugua

SEQ ID NO: 1252619 - RNA, 19 nt, Homo sapiens
  misc_RNA (1)...(19): siRNA sense strand
gcacuuuauuuguaaugag

SEQ ID NO: 1252620 - RNA, 19 nt, Homo sapiens
  misc_RNA (1)...(19): siRNA sense strand
guagaaguauuugaguauc

SEQ ID NO: 1252621 - RNA, 19 nt, Homo sapiens
  misc_RNA (1)...(19): siRNA sense strand
guauuugaguaucuugaug

SEQ ID NO: 1252622 - RNA, 19 nt, Homo sapiens
  misc_RNA (1)...(19): siRNA sense strand
aggaauacuugacaguuug

SEQ ID NO: 1252623 - RNA, 19 nt, Homo sapiens
  misc_RNA (1)...(19): siRNA sense strand
aguguaaaguggucaaaug

SEQ ID NO: 1252624 - RNA, 19 nt, Homo sapiens
  misc_RNA (1)...(19): siRNA sense strand
ccaaaacccuacuaugaga

SEQ ID NO: 1252625 - RNA, 19 nt, Homo sapiens
  misc_RNA (1)...(19): siRNA sense strand
ccacccauacuauuuguga

SEQ ID NO: 1252626 - RNA, 19 nt, Homo sapiens
  misc_RNA (1)...(19): siRNA sense strand
caccaacauuugaagcuau

SEQ ID NO: 1252627 - RNA, 19 nt, Homo sapiens
  misc_RNA (1)...(19): siRNA sense strand
uuggagagagcacgauuua

SEQ ID NO: 1252628 - RNA, 19 nt, Homo sapiens
  misc_RNA (1)...(19): siRNA sense strand
gguuaucagaugcacuuua

SEQ ID NO: 1252629 - RNA, 19 nt, Homo sapiens
  misc_RNA (1)...(19): siRNA sense strand
ugaggagccaccaacauuu

SEQ ID NO: 1252630 - RNA, 19 nt, Homo sapiens
  misc_RNA (1)...(19): siRNA sense strand
ggaaggaauacuugacagu

SEQ ID NO: 1252631 - RNA, 19 nt, Homo sapiens
  misc_RNA (1)...(19): siRNA sense strand
gaggaaggaauacuugaca

SEQ ID NO: 1252632 - RNA, 19 nt, Homo sapiens
  misc_RNA (1)...(19): siRNA sense strand
ugaguaucuugaugcagua

SEQ ID NO: 1252633 - RNA, 19 nt, Homo sapiens
  misc_RNA (1)...(19): siRNA sense strand
caccuuuagugaaguagaa

SEQ ID NO: 1252634 - RNA, 19 nt, Homo sapiens
  misc_RNA (1)...(19): siRNA sense strand
acagauaucaggauuugga

SEQ ID NO: 1252635 - RNA, 19 nt, Homo sapiens
  misc_RNA (1)...(19): siRNA sense strand
ucauugcugugauuguuau

SEQ ID NO: 1252636 - RNA, 19 nt, Homo sapiens
  misc_RNA (1)...(19): siRNA sense strand
ucagaugcacuuuauuugu

SEQ ID NO: 1252637 - RNA, 19 nt, Homo sapiens
  misc_RNA (1)...(19): siRNA sense strand
gugcugcuccagaguguaa

SEQ ID NO: 1252638 - RNA, 19 nt, Homo sapiens
  misc_RNA (1)...(19): siRNA sense strand
ggaaaacacaccuuuagug

SEQ ID NO: 1252639 - RNA, 19 nt, Homo sapiens
  misc_RNA (1)...(19): siRNA sense strand
aaggaucaguagcaauuug

SEQ ID NO: 1252640 - RNA, 19 nt, Homo sapiens
  misc_RNA (1)...(19): siRNA sense strand
uauauacgggauccuuuaa

SEQ ID NO: 1252641 - RNA, 19 nt, Homo sapiens
  misc_RNA (1)...(19): siRNA sense strand
ugaaguagaaguauuugag

SEQ ID NO: 1252642 - RNA, 19 nt, Homo sapiens
  misc_RNA (1)...(19): siRNA sense strand
cuugacaguuuggauguuu

SEQ ID NO: 1252643 - RNA, 19 nt, Homo sapiens
  misc_RNA (1)...(19): siRNA sense strand
cauauauacgggauccuuu

SEQ ID NO: 1252644 - RNA, 19 nt, Homo sapiens
  misc_RNA (1)...(19): siRNA sense strand
auauauacgggauccuuua

SEQ ID NO: 1252645 - RNA, 19 nt, Homo sapiens
  misc_RNA (1)...(19): siRNA sense strand
cuuaaaggaucaguagcaa

SEQ ID NO: 1252646 - RNA, 19 nt, Homo sapiens
  misc_RNA (1)...(19): siRNA sense strand
uaaaccugaggaaggaaua

SEQ ID NO: 1252647 - RNA, 19 nt, Homo sapiens
  misc_RNA (1)...(19): siRNA sense strand
agaugacgccuguuauaga

SEQ ID NO: 1252648 - RNA, 19 nt, Homo sapiens
  misc_RNA (1)...(19): siRNA sense strand
ugugauuguuauugccaua

SEQ ID NO: 1252649 - RNA, 19 nt, Homo sapiens
  misc_RNA (1)...(19): siRNA sense strand
gagagcacgauuuauugug

SEQ ID NO: 1252650 - RNA, 19 nt, Homo sapiens
  misc_RNA (1)...(19): siRNA sense strand
gaaguauuugaguaucuug

SEQ ID NO: 1252651 - RNA, 19 nt, Homo sapiens
  misc_RNA (1)...(19): siRNA sense strand
ccucuugccacccauacua

SEQ ID NO: 1252652 - RNA, 19 nt, Homo sapiens
  misc_RNA (1)...(19): siRNA sense strand
gauaucaggauuuggaaaa

SEQ ID NO: 1252653 - RNA, 19 nt, Homo sapiens
  misc_RNA (1)...(19): siRNA sense strand
ggcuaccugucucagauga

SEQ ID NO: 1252654 - RNA, 19 nt, Homo sapiens
  misc_RNA (1)...(19): siRNA sense strand
ccaugguguugcugcugua

SEQ ID NO: 1252655 - RNA, 19 nt, Homo sapiens
  misc_RNA (1)...(19): siRNA sense strand
cagaugacgccuguuauag

SEQ ID NO: 1252656 - RNA, 19 nt, Homo sapiens
  misc_RNA (1)...(19): siRNA sense strand
gucauugcugugauuguua

SEQ ID NO: 1252657 - RNA, 19 nt, Homo sapiens
  misc_RNA (1)...(19): siRNA sense strand
uuggugaacgaguagauua

SEQ ID NO: 1252658 - RNA, 19 nt, Homo sapiens
  misc_RNA (1)...(19): siRNA sense strand
ggagccaccaacauuugaa

SEQ ID NO: 1252659 - RNA, 19 nt, Homo sapiens
  misc_RNA (1)...(19): siRNA sense strand
gcgcuuuccuggguugcuu

SEQ ID NO: 1252660 - RNA, 19 nt, Homo sapiens
  misc_RNA (1)...(19): siRNA sense strand
uacuacaaagcaacaguua

SEQ ID NO: 1252661 - RNA, 19 nt, Homo sapiens
  misc_RNA (1)...(19): siRNA sense strand
cuugaugcaguaacuuaua

SEQ ID NO: 1252662 - RNA, 19 nt, Homo sapiens
  misc_RNA (1)...(19): siRNA sense strand
aaacauguccauauauacg

SEQ ID NO: 1252663 - RNA, 19 nt, Homo sapiens
  misc_RNA (1)...(19): siRNA sense strand
guguaaaguggucaaaugu

SEQ ID NO: 1252664 - RNA, 19 nt, Homo sapiens
  misc_RNA (1)...(19): siRNA sense strand
cuuacgaguuugguuauca

SEQ ID NO: 1252665 - RNA, 19 nt, Homo sapiens
  misc_RNA (1)...(19): siRNA sense strand
uacgggauccuuuaaaugg

SEQ ID NO: 1252666 - RNA, 19 nt, Homo sapiens
  misc_RNA (1)...(19): siRNA sense strand
aaccaaaacccuacuauga

SEQ ID NO: 1252667 - RNA, 19 nt, Homo sapiens
  misc_RNA (1)...(19): siRNA sense strand
cccaauaugugaaaagguu

SEQ ID NO: 1252668 - RNA, 19 nt, Homo sapiens
  misc_RNA (1)...(19): siRNA sense strand
cgauggcagcgacacaauu

SEQ ID NO: 1252669 - RNA, 19 nt, Homo sapiens
  misc_RNA (1)...(19): siRNA sense strand
gauccauuuucacuuauug

SEQ ID NO: 1252670 - RNA, 19 nt, Homo sapiens
  misc_RNA (1)...(19): siRNA sense strand
uugaugcaguaacuuauag

SEQ ID NO: 1252671 - RNA, 19 nt, Homo sapiens
  misc_RNA (1)...(19): siRNA sense strand
guaucuugaugcaguaacu

SEQ ID NO: 1252672 - RNA, 19 nt, Homo sapiens
  misc_RNA (1)...(19): siRNA sense strand
caacauuugaagcuaugga

SEQ ID NO: 1252673 - RNA, 19 nt, Homo sapiens
  misc_RNA (1)...(19): siRNA sense strand
gagauuggugaacgaguag

SEQ ID NO: 1252674 - RNA, 19 nt, Homo sapiens
  misc_RNA (1)...(19): siRNA sense strand
ggagagagcacgauuuauu

SEQ ID NO: 1252675 - RNA, 19 nt, Homo sapiens
  misc_RNA (1)...(19): siRNA sense strand
agagaaacauguccauaua

SEQ ID NO: 1252676 - RNA, 19 nt, Homo sapiens
  misc_RNA (1)...(19): siRNA sense strand
cagaugcacuuuauuugua

SEQ ID NO: 1252677 - RNA, 19 nt, Homo sapiens
  misc_RNA (1)...(19): siRNA sense strand
ggacuuacgaguuugguua

SEQ ID NO: 1252678 - RNA, 19 nt, Homo sapiens
  misc_RNA (1)...(19): siRNA sense strand
aaacagauaucaggauuug

SEQ ID NO: 1252679 - RNA, 19 nt, Homo sapiens
  misc_RNA (1)...(19): siRNA sense strand
cuauggagcucauugguaa

SEQ ID NO: 1252680 - RNA, 19 nt, Homo sapiens
  misc_RNA (1)...(19): siRNA sense strand
aaacacaccuuuagugaag

SEQ ID NO: 1252681 - RNA, 19 nt, Homo sapiens
  misc_RNA (1)...(19): siRNA sense strand
gaacuuaaaggaucaguag

SEQ ID NO: 1252682 - RNA, 19 nt, Homo sapiens
  misc_RNA (1)...(19): siRNA sense strand
gaaaacagauaucaggauu

SEQ ID NO: 1252683 - RNA, 19 nt, Homo sapiens
  misc_RNA (1)...(19): siRNA sense strand
uaaaggaucaguagcaauu

SEQ ID NO: 1252684 - RNA, 19 nt, Homo sapiens
  misc_RNA (1)...(19): siRNA sense strand
aaaugggacuuacgaguuu

SEQ ID NO: 1252685 - RNA, 19 nt, Homo sapiens
  misc_RNA (1)...(19): siRNA sense strand
guuaucagaugcacuuuau

SEQ ID NO: 1252686 - RNA, 19 nt, Homo sapiens
  misc_RNA (1)...(19): siRNA sense strand
ugagauuggugaacgagua

SEQ ID NO: 1252687 - RNA, 19 nt, Homo sapiens
  misc_RNA (1)...(19): siRNA sense strand
gugaacgaguagauuauaa

SEQ ID NO: 1252688 - RNA, 19 nt, Homo sapiens
  misc_RNA (1)...(19): siRNA sense strand
gagagagcacgauuuauug

SEQ ID NO: 1252689 - RNA, 19 nt, Homo sapiens
  misc_RNA (1)...(19): siRNA sense strand
caaaugggacuuacgaguu

SEQ ID NO: 1252690 - RNA, 19 nt, Homo sapiens
  misc_RNA (1)...(19): siRNA sense strand
ggucauugcugugauuguu

SEQ ID NO: 1252691 - RNA, 19 nt, Homo sapiens
  misc_RNA (1)...(19): siRNA sense strand
ccagauccauuuucacuua

SEQ ID NO: 1252692 - RNA, 19 nt, Homo sapiens
  misc_RNA (1)...(19): siRNA sense strand
gaaggaauacuugacaguu

SEQ ID NO: 1252693 - RNA, 19 nt, Homo sapiens
  misc_RNA (1)...(19): siRNA sense strand
aaggaauacuugacaguuu

SEQ ID NO: 1252694 - RNA, 19 nt, Homo sapiens
  misc_RNA (1)...(19): siRNA sense strand
ucagaugacgccuguuaua

SEQ ID NO: 1252695 - RNA, 19 nt, Homo sapiens
  misc_RNA (1)...(19): siRNA sense strand
gaaaacacaccuuuaguga

SEQ ID NO: 1252696 - RNA, 19 nt, Homo sapiens
  misc_RNA (1)...(19): siRNA sense strand
gaugacgccuguuauagag

SEQ ID NO: 1252697 - RNA, 19 nt, Homo sapiens
  misc_RNA (1)...(19): siRNA sense strand
gagaaacauguccauauau

SEQ ID NO: 1252698 - RNA, 19 nt, Homo sapiens
  misc_RNA (1)...(19): siRNA sense strand
acgaguagauuauaagugu

SEQ ID NO: 1252699 - RNA, 19 nt, Homo sapiens
  misc_RNA (1)...(19): siRNA sense strand
cuacaaagcaacaguuaug

SEQ ID NO: 1252700 - RNA, 19 nt, Homo sapiens
  misc_RNA (1)...(19): siRNA sense strand
ccaccaacauuugaagcua

SEQ ID NO: 1252701 - RNA, 19 nt, Homo sapiens
  misc_RNA (1)...(19): siRNA sense strand
uauacgggauccuuuaaau

SEQ ID NO: 1252702 - RNA, 19 nt, Homo sapiens
  misc_RNA (1)...(19): siRNA sense strand
cgaguuugguuaucagaug

SEQ ID NO: 1252703 - RNA, 19 nt, Homo sapiens
  misc_RNA (1)...(19): siRNA sense strand
gaacgaguagauuauaagu

SEQ ID NO: 1252704 - RNA, 19 nt, Homo sapiens
  misc_RNA (1)...(19): siRNA sense strand
gugaggagccaccaacauu

SEQ ID NO: 1252705 - RNA, 19 nt, Homo sapiens
  misc_RNA (1)...(19): siRNA sense strand
gauggcagcgacacaauug

SEQ ID NO: 1252706 - RNA, 19 nt, Homo sapiens
  misc_RNA (1)...(19): siRNA sense strand
gcuauggagcucauuggua

SEQ ID NO: 1252707 - RNA, 19 nt, Homo sapiens
  misc_RNA (1)...(19): siRNA sense strand
gaggagccaccaacauuug

SEQ ID NO: 1252708 - RNA, 19 nt, Homo sapiens
  misc_RNA (1)...(19): siRNA sense strand
acacaccuuuagugaagua

SEQ ID NO: 1252709 - RNA, 19 nt, Homo sapiens
  misc_RNA (1)...(19): siRNA sense strand
ucucagaugacgccuguua

SEQ ID NO: 1252710 - RNA, 19 nt, Homo sapiens
  misc_RNA (1)...(19): siRNA sense strand
uagagaaacauguccauau

SEQ ID NO: 1252711 - RNA, 19 nt, Homo sapiens
  misc_RNA (1)...(19): siRNA sense strand
guuccaaagugucuuaaag

SEQ ID NO: 1252712 - RNA, 19 nt, Homo sapiens
  misc_RNA (1)...(19): siRNA sense strand
ggugaacgaguagauuaua

SEQ ID NO: 1252713 - RNA, 19 nt, Homo sapiens
  misc_RNA (1)...(19): siRNA sense strand
gaaguagaaguauuugagu

SEQ ID NO: 1252714 - RNA, 19 nt, Homo sapiens
  misc_RNA (1)...(19): siRNA sense strand
gaaacauguccauauauac

SEQ ID NO: 1252715 - RNA, 19 nt, Homo sapiens
  misc_RNA (1)...(19): siRNA sense strand
ugacgccuguuauagagaa

SEQ ID NO: 1252716 - RNA, 19 nt, Homo sapiens
  misc_RNA (1)...(19): siRNA sense strand
cgaguagauuauaagugua

SEQ ID NO: 1252717 - RNA, 19 nt, Homo sapiens
  misc_RNA (1)...(19): siRNA sense strand
gcacuuuauuuguaaugag

SEQ ID NO: 1252718 - RNA, 19 nt, Homo sapiens
  misc_RNA (1)...(19): siRNA sense strand
guagaaguauuugaguauc

SEQ ID NO: 1252719 - RNA, 19 nt, Homo sapiens
  misc_RNA (1)...(19): siRNA sense strand
guauuugaguaucuugaug

SEQ ID NO: 1252720 - RNA, 19 nt, Homo sapiens
  misc_RNA (1)...(19): siRNA sense strand
aggaauacuugacaguuug

SEQ ID NO: 1252721 - RNA, 19 nt, Homo sapiens
  misc_RNA (1)...(19): siRNA sense strand
ccaaaacccuacuaugaga

SEQ ID NO: 1252722 - RNA, 19 nt, Homo sapiens
  misc_RNA (1)...(19): siRNA sense strand
aguguaaaguggucaaaug

SEQ ID NO: 1252723 - RNA, 19 nt, Homo sapiens
  misc_RNA (1)...(19): siRNA sense strand
ccacccauacuauuuguga

SEQ ID NO: 1252724 - RNA, 19 nt, Homo sapiens
  misc_RNA (1)...(19): siRNA sense strand
caccaacauuugaagcuau

SEQ ID NO: 1252725 - RNA, 19 nt, Homo sapiens
  misc_RNA (1)...(19): siRNA sense strand
uuggagagagcacgauuua

SEQ ID NO: 1252726 - RNA, 19 nt, Homo sapiens
  misc_RNA (1)...(19): siRNA sense strand
gguuaucagaugcacuuua

SEQ ID NO: 1252727 - RNA, 19 nt, Homo sapiens
  misc_RNA (1)...(19): siRNA sense strand
ugaggagccaccaacauuu

SEQ ID NO: 1252728 - RNA, 19 nt, Homo sapiens
  misc_RNA (1)...(19): siRNA sense strand
ggaaggaauacuugacagu

SEQ ID NO: 1252729 - RNA, 19 nt, Homo sapiens
  misc_RNA (1)...(19): siRNA sense strand
gaggaaggaauacuugaca

SEQ ID NO: 1252730 - RNA, 19 nt, Homo sapiens
  misc_RNA (1)...(19): siRNA sense strand
ccaguuccaaagugucuua

SEQ ID NO: 1252731 - RNA, 19 nt, Homo sapiens
  misc_RNA (1)...(19): siRNA sense strand
ugaguaucuugaugcagua

SEQ ID NO: 1252732 - RNA, 19 nt, Homo sapiens
  misc_RNA (1)...(19): siRNA sense strand
caccuuuagugaaguagaa

SEQ ID NO: 1252733 - RNA, 19 nt, Homo sapiens
  misc_RNA (1)...(19): siRNA sense strand
acagauaucaggauuugga

SEQ ID NO: 1252734 - RNA, 19 nt, Homo sapiens
  misc_RNA (1)...(19): siRNA sense strand
ucauugcugugauuguuau

SEQ ID NO: 1252735 - RNA, 19 nt, Homo sapiens
  misc_RNA (1)...(19): siRNA sense strand
ucagaugcacuuuauuugu

SEQ ID NO: 1252736 - RNA, 19 nt, Homo sapiens
  misc_RNA (1)...(19): siRNA sense strand
gugcugcuccagaguguaa

SEQ ID NO: 1252737 - RNA, 19 nt, Homo sapiens
  misc_RNA (1)...(19): siRNA sense strand
ggaaaacacaccuuuagug

SEQ ID NO: 1252738 - RNA, 19 nt, Homo sapiens
  misc_RNA (1)...(19): siRNA sense strand
aaggaucaguagcaauuug

SEQ ID NO: 1252739 - RNA, 19 nt, Homo sapiens
  misc_RNA (1)...(19): siRNA sense strand
uauauacgggauccuuuaa

SEQ ID NO: 1252740 - RNA, 19 nt, Homo sapiens
  misc_RNA (1)...(19): siRNA sense strand
ugaaguagaaguauuugag

SEQ ID NO: 1252741 - RNA, 19 nt, Homo sapiens
  misc_RNA (1)...(19): siRNA sense strand
cuugacaguuuggauguuu

SEQ ID NO: 1252742 - RNA, 19 nt, Homo sapiens
  misc_RNA (1)...(19): siRNA sense strand
cauauauacgggauccuuu

SEQ ID NO: 1252743 - RNA, 19 nt, Homo sapiens
  misc_RNA (1)...(19): siRNA sense strand
auauauacgggauccuuua

SEQ ID NO: 1252744 - RNA, 19 nt, Homo sapiens
  misc_RNA (1)...(19): siRNA sense strand
cuuaaaggaucaguagcaa

SEQ ID NO: 1252745 - RNA, 19 nt, Homo sapiens
  misc_RNA (1)...(19): siRNA sense strand
uaaaccugaggaaggaaua

SEQ ID NO: 1252746 - RNA, 19 nt, Homo sapiens
  misc_RNA (1)...(19): siRNA sense strand
agaugacgccuguuauaga

SEQ ID NO: 1252747 - RNA, 19 nt, Homo sapiens
  misc_RNA (1)...(19): siRNA sense strand
ugugauuguuauugccaua

SEQ ID NO: 1252748 - RNA, 19 nt, Homo sapiens
  misc_RNA (1)...(19): siRNA sense strand
gagagcacgauuuauugug

SEQ ID NO: 1252749 - RNA, 19 nt, Homo sapiens
  misc_RNA (1)...(19): siRNA sense strand
gaaguauuugaguaucuug

SEQ ID NO: 1252750 - RNA, 19 nt, Homo sapiens
  misc_RNA (1)...(19): siRNA sense strand
ggcuaccugucucagauga

SEQ ID NO: 1252751 - RNA, 19 nt, Homo sapiens
  misc_RNA (1)...(19): siRNA sense strand
gauaucaggauuuggaaaa

SEQ ID NO: 1252752 - RNA, 19 nt, Homo sapiens
  misc_RNA (1)...(19): siRNA sense strand
ccucuugccacccauacua

SEQ ID NO: 1252753 - RNA, 19 nt, Homo sapiens
  misc_RNA (1)...(19): siRNA sense strand
ccaugguguugcugcugua

SEQ ID NO: 1252754 - RNA, 19 nt, Homo sapiens
  misc_RNA (1)...(19): siRNA sense strand
cagaugacgccuguuauag

SEQ ID NO: 1252755 - RNA, 19 nt, Homo sapiens
  misc_RNA (1)...(19): siRNA sense strand
uuggugaacgaguagauua

SEQ ID NO: 1252756 - RNA, 19 nt, Homo sapiens
  misc_RNA (1)...(19): siRNA sense strand
gucauugcugugauuguua

SEQ ID NO: 1252757 - RNA, 19 nt, Homo sapiens
  misc_RNA (1)...(19): siRNA sense strand
ggagccaccaacauuugaa

SEQ ID NO: 1252758 - RNA, 19 nt, Homo sapiens
  misc_RNA (1)...(19): siRNA sense strand
gcgcuuuccuggguugcuu

SEQ ID NO: 1252759 - RNA, 19 nt, Homo sapiens
  misc_RNA (1)...(19): siRNA sense strand
uacuacaaagcaacaguua

SEQ ID NO: 1252760 - RNA, 19 nt, Homo sapiens
  misc_RNA (1)...(19): siRNA sense strand
cuugaugcaguaacuuaua

SEQ ID NO: 1252761 - RNA, 19 nt, Homo sapiens
  misc_RNA (1)...(19): siRNA sense strand
aaacauguccauauauacg

SEQ ID NO: 1252762 - RNA, 19 nt, Homo sapiens
  misc_RNA (1)...(19): siRNA sense strand
guguaaaguggucaaaugu

SEQ ID NO: 1252763 - RNA, 19 nt, Homo sapiens
  misc_RNA (1)...(19): siRNA sense strand
cuuacgaguuugguuauca

SEQ ID NO: 1252764 - RNA, 19 nt, Homo sapiens
  misc_RNA (1)...(19): siRNA sense strand
uacgggauccuuuaaaugg

SEQ ID NO: 1252765 - RNA, 19 nt, Homo sapiens
  misc_RNA (1)...(19): siRNA sense strand
aaccaaaacccuacuauga

SEQ ID NO: 1252766 - RNA, 19 nt, Homo sapiens
  misc_RNA (1)...(19): siRNA sense strand
cccaauaugugaaaagguu

SEQ ID NO: 1252767 - RNA, 19 nt, Homo sapiens
  misc_RNA (1)...(19): siRNA sense strand
cgauggcagcgacacaauu

SEQ ID NO: 1252768 - RNA, 19 nt, Homo sapiens
  misc_RNA (1)...(19): siRNA sense strand
gauccauuuucacuuauug

SEQ ID NO: 1252769 - RNA, 19 nt, Homo sapiens
  misc_RNA (1)...(19): siRNA sense strand
uugaugcaguaacuuauag

SEQ ID NO: 1252770 - RNA, 19 nt, Homo sapiens
  misc_RNA (1)...(19): siRNA sense strand
guaucuugaugcaguaacu

SEQ ID NO: 1252771 - RNA, 19 nt, Homo sapiens
  misc_RNA (1)...(19): siRNA sense strand
caacauuugaagcuaugga

SEQ ID NO: 1252772 - RNA, 19 nt, Homo sapiens
  misc_RNA (1)...(19): siRNA sense strand
gagauuggugaacgaguag

SEQ ID NO: 1252773 - RNA, 19 nt, Homo sapiens
  misc_RNA (1)...(19): siRNA sense strand
ggagagagcacgauuuauu

SEQ ID NO: 1252774 - RNA, 19 nt, Homo sapiens
  misc_RNA (1)...(19): siRNA sense strand
agagaaacauguccauaua

SEQ ID NO: 1252775 - RNA, 19 nt, Homo sapiens
  misc_RNA (1)...(19): siRNA sense strand
cagaugcacuuuauuugua

SEQ ID NO: 1252776 - RNA, 19 nt, Homo sapiens
  misc_RNA (1)...(19): siRNA sense strand
ggacuuacgaguuugguua

SEQ ID NO: 1252777 - RNA, 19 nt, Homo sapiens
  misc_RNA (1)...(19): siRNA sense strand
aaacagauaucaggauuug

SEQ ID NO: 1252778 - RNA, 19 nt, Homo sapiens
  misc_RNA (1)...(19): siRNA sense strand
cuauggagcucauugguaa

SEQ ID NO: 1252779 - RNA, 19 nt, Homo sapiens
  misc_RNA (1)...(19): siRNA sense strand
aaacacaccuuuagugaag

SEQ ID NO: 1252780 - RNA, 19 nt, Homo sapiens
  misc_RNA (1)...(19): siRNA sense strand
gaacuuaaaggaucaguag

SEQ ID NO: 1252781 - RNA, 19 nt, Homo sapiens
  misc_RNA (1)...(19): siRNA sense strand
gaaaacagauaucaggauu

SEQ ID NO: 1252782 - RNA, 19 nt, Homo sapiens
  misc_RNA (1)...(19): siRNA sense strand
uaaaggaucaguagcaauu

SEQ ID NO: 1252783 - RNA, 19 nt, Homo sapiens
  misc_RNA (1)...(19): siRNA sense strand
aaaugggacuuacgaguuu

SEQ ID NO: 1252784 - RNA, 19 nt, Homo sapiens
  misc_RNA (1)...(19): siRNA sense strand
guuaucagaugcacuuuau

SEQ ID NO: 1252785 - RNA, 19 nt, Homo sapiens
  misc_RNA (1)...(19): siRNA sense strand
gagcugaauaugccacuua

SEQ ID NO: 1252786 - RNA, 19 nt, Homo sapiens
  misc_RNA (1)...(19): siRNA sense strand
ugagauuggugaacgagua

SEQ ID NO: 1252787 - RNA, 19 nt, Homo sapiens
  misc_RNA (1)...(19): siRNA sense strand
gugaacgaguagauuauaa

SEQ ID NO: 1252788 - RNA, 19 nt, Homo sapiens
  misc_RNA (1)...(19): siRNA sense strand
gagagagcacgauuuauug

SEQ ID NO: 1252789 - RNA, 19 nt, Homo sapiens
  misc_RNA (1)...(19): siRNA sense strand
caaaugggacuuacgaguu

SEQ ID NO: 1252790 - RNA, 19 nt, Homo sapiens
  misc_RNA (1)...(19): siRNA sense strand
ggucauugcugugauuguu

SEQ ID NO: 1252791 - RNA, 19 nt, Homo sapiens
  misc_RNA (1)...(19): siRNA sense strand
ccagauccauuuucacuua

SEQ ID NO: 1252792 - RNA, 19 nt, Homo sapiens
  misc_RNA (1)...(19): siRNA sense strand
gaaggaauacuugacaguu

SEQ ID NO: 1252793 - RNA, 19 nt, Homo sapiens
  misc_RNA (1)...(19): siRNA sense strand
aaggaauacuugacaguuu

SEQ ID NO: 1252794 - RNA, 19 nt, Homo sapiens
  misc_RNA (1)...(19): siRNA sense strand
ucagaugacgccuguuaua

SEQ ID NO: 1252795 - RNA, 19 nt, Homo sapiens
  misc_RNA (1)...(19): siRNA sense strand
gaaaacacaccuuuaguga

SEQ ID NO: 1252796 - RNA, 19 nt, Homo sapiens
  misc_RNA (1)...(19): siRNA sense strand
gaugacgccuguuauagag

SEQ ID NO: 1252797 - RNA, 19 nt, Homo sapiens
  misc_RNA (1)...(19): siRNA sense strand
gagaaacauguccauauau

SEQ ID NO: 1252798 - RNA, 19 nt, Homo sapiens
  misc_RNA (1)...(19): siRNA sense strand
ccacuuaccagacuaaauc

SEQ ID NO: 1252799 - RNA, 19 nt, Homo sapiens
  misc_RNA (1)...(19): siRNA sense strand
acgaguagauuauaagugu

SEQ ID NO: 1252800 - RNA, 19 nt, Homo sapiens
  misc_RNA (1)...(19): siRNA sense strand
cuacaaagcaacaguuaug

SEQ ID NO: 1252801 - RNA, 19 nt, Homo sapiens
  misc_RNA (1)...(19): siRNA sense strand
ccaccaacauuugaagcua

SEQ ID NO: 1252802 - RNA, 19 nt, Homo sapiens
  misc_RNA (1)...(19): siRNA sense strand
uauacgggauccuuuaaau

SEQ ID NO: 1252803 - RNA, 19 nt, Homo sapiens
  misc_RNA (1)...(19): siRNA sense strand
cgaguuugguuaucagaug

SEQ ID NO: 1252804 - RNA, 19 nt, Homo sapiens
  misc_RNA (1)...(19): siRNA sense strand
gaacgaguagauuauaagu

SEQ ID NO: 1252805 - RNA, 19 nt, Homo sapiens
  misc_RNA (1)...(19): siRNA sense strand
gugaggagccaccaacauu

SEQ ID NO: 1252806 - RNA, 19 nt, Homo sapiens
  misc_RNA (1)...(19): siRNA sense strand
gauggcagcgacacaauug

SEQ ID NO: 1252807 - RNA, 19 nt, Homo sapiens
  misc_RNA (1)...(19): siRNA sense strand
ucucagaugacgccuguua

SEQ ID NO: 1252808 - RNA, 19 nt, Homo sapiens
  misc_RNA (1)...(19): siRNA sense strand
gaggagccaccaacauuug

SEQ ID NO: 1252809 - RNA, 19 nt, Homo sapiens
  misc_RNA (1)...(19): siRNA sense strand
gcuauggagcucauuggua

SEQ ID NO: 1252810 - RNA, 19 nt, Homo sapiens
  misc_RNA (1)...(19): siRNA sense strand
acacaccuuuagugaagua

SEQ ID NO: 1252811 - RNA, 19 nt, Homo sapiens
  misc_RNA (1)...(19): siRNA sense strand
uagagaaacauguccauau

SEQ ID NO: 1252812 - RNA, 19 nt, Homo sapiens
  misc_RNA (1)...(19): siRNA sense strand
guuccaaagugucuuaaag

SEQ ID NO: 1252813 - RNA, 19 nt, Homo sapiens
  misc_RNA (1)...(19): siRNA sense strand
ggugaacgaguagauuaua

SEQ ID NO: 1252814 - RNA, 19 nt, Homo sapiens
  misc_RNA (1)...(19): siRNA sense strand
gaaguagaaguauuugagu

SEQ ID NO: 1252815 - RNA, 19 nt, Homo sapiens
  misc_RNA (1)...(19): siRNA sense strand
gaaacauguccauauauac

SEQ ID NO: 1252816 - RNA, 19 nt, Homo sapiens
  misc_RNA (1)...(19): siRNA sense strand
ugacgccuguuauagagaa

SEQ ID NO: 1252817 - RNA, 19 nt, Homo sapiens
  misc_RNA (1)...(19): siRNA sense strand
cgaguagauuauaagugua

SEQ ID NO: 1252818 - RNA, 19 nt, Homo sapiens
  misc_RNA (1)...(19): siRNA sense strand
gcacuuuauuuguaaugag

SEQ ID NO: 1252819 - RNA, 19 nt, Homo sapiens
  misc_RNA (1)...(19): siRNA sense strand
guagaaguauuugaguauc

SEQ ID NO: 1252820 - RNA, 19 nt, Homo sapiens
  misc_RNA (1)...(19): siRNA sense strand
guauuugaguaucuugaug

SEQ ID NO: 1252821 - RNA, 19 nt, Homo sapiens
  misc_RNA (1)...(19): siRNA sense strand
aggaauacuugacaguuug

SEQ ID NO: 1252822 - RNA, 19 nt, Homo sapiens
  misc_RNA (1)...(19): siRNA sense strand
ccaaaacccuacuaugaga

SEQ ID NO: 1252823 - RNA, 19 nt, Homo sapiens
  misc_RNA (1)...(19): siRNA sense strand
aguguaaaguggucaaaug

SEQ ID NO: 1252824 - RNA, 19 nt, Homo sapiens
  misc_RNA (1)...(19): siRNA sense strand
ccacccauacuauuuguga

SEQ ID NO: 1252825 - RNA, 19 nt, Homo sapiens
  misc_RNA (1)...(19): siRNA sense strand
uuggagagagcacgauuua

SEQ ID NO: 1252826 - RNA, 19 nt, Homo sapiens
  misc_RNA (1)...(19): siRNA sense strand
gguuaucagaugcacuuua

SEQ ID NO: 1252827 - RNA, 19 nt, Homo sapiens
  misc_RNA (1)...(19): siRNA sense strand
caccaacauuugaagcuau

SEQ ID NO: 1252828 - RNA, 19 nt, Homo sapiens
  misc_RNA (1)...(19): siRNA sense strand
ugaggagccaccaacauuu

SEQ ID NO: 1252829 - RNA, 19 nt, Homo sapiens
  misc_RNA (1)...(19): siRNA sense strand
ggaaggaauacuugacagu

SEQ ID NO: 1252830 - RNA, 19 nt, Homo sapiens
  misc_RNA (1)...(19): siRNA sense strand
gaggaaggaauacuugaca

SEQ ID NO: 1252831 - RNA, 19 nt, Homo sapiens
  misc_RNA (1)...(19): siRNA sense strand
ccaguuccaaagugucuua

SEQ ID NO: 1252832 - RNA, 19 nt, Homo sapiens
  misc_RNA (1)...(19): siRNA sense strand
ugaguaucuugaugcagua

SEQ ID NO: 1252833 - RNA, 19 nt, Homo sapiens
  misc_RNA (1)...(19): siRNA sense strand
caccuuuagugaaguagaa

SEQ ID NO: 1252834 - RNA, 19 nt, Homo sapiens
  misc_RNA (1)...(19): siRNA sense strand
acagauaucaggauuugga

SEQ ID NO: 1252835 - RNA, 19 nt, Homo sapiens
  misc_RNA (1)...(19): siRNA sense strand
ucauugcugugauuguuau

SEQ ID NO: 1252836 - RNA, 19 nt, Homo sapiens
  misc_RNA (1)...(19): siRNA sense strand
ucagaugcacuuuauuugu

SEQ ID NO: 1252837 - RNA, 19 nt, Homo sapiens
  misc_RNA (1)...(19): siRNA sense strand
gugcugcuccagaguguaa

SEQ ID NO: 1252838 - RNA, 19 nt, Homo sapiens
  misc_RNA (1)...(19): siRNA sense strand
ggaaaacacaccuuuagug

SEQ ID NO: 1252839 - RNA, 19 nt, Homo sapiens
  misc_RNA (1)...(19): siRNA sense strand
aaggaucaguagcaauuug

SEQ ID NO: 1252840 - RNA, 19 nt, Homo sapiens
  misc_RNA (1)...(19): siRNA sense strand
uauauacgggauccuuuaa

SEQ ID NO: 1252841 - RNA, 19 nt, Homo sapiens
  misc_RNA (1)...(19): siRNA sense strand
ugaaguagaaguauuugag

SEQ ID NO: 1252842 - RNA, 19 nt, Homo sapiens
  misc_RNA (1)...(19): siRNA sense strand
cuugacaguuuggauguuu

SEQ ID NO: 1252843 - RNA, 19 nt, Homo sapiens
  misc_RNA (1)...(19): siRNA sense strand
cauauauacgggauccuuu

SEQ ID NO: 1252844 - RNA, 19 nt, Homo sapiens
  misc_RNA (1)...(19): siRNA sense strand
auauauacgggauccuuua

SEQ ID NO: 1252845 - RNA, 19 nt, Homo sapiens
  misc_RNA (1)...(19): siRNA sense strand
cuuaaaggaucaguagcaa

SEQ ID NO: 1252846 - RNA, 19 nt, Homo sapiens
  misc_RNA (1)...(19): siRNA sense strand
uaaaccugaggaaggaaua

SEQ ID NO: 1252847 - RNA, 19 nt, Homo sapiens
  misc_RNA (1)...(19): siRNA sense strand
agaugacgccuguuauaga

SEQ ID NO: 1252848 - RNA, 19 nt, Homo sapiens
  misc_RNA (1)...(19): siRNA sense strand
ugugauuguuauugccaua

SEQ ID NO: 1252849 - RNA, 19 nt, Homo sapiens
  misc_RNA (1)...(19): siRNA sense strand
gagagcacgauuuauugug

SEQ ID NO: 1252850 - RNA, 19 nt, Homo sapiens
  misc_RNA (1)...(19): siRNA sense strand
gaaguauuugaguaucuug

SEQ ID NO: 1252851 - RNA, 19 nt, Homo sapiens
  misc_RNA (1)...(19): siRNA sense strand
ggcuaccugucucagauga

SEQ ID NO: 1252852 - RNA, 19 nt, Homo sapiens
  misc_RNA (1)...(19): siRNA sense strand
gauaucaggauuuggaaaa

SEQ ID NO: 1252853 - RNA, 19 nt, Homo sapiens
  misc_RNA (1)...(19): siRNA sense strand
ccucuugccacccauacua

SEQ ID NO: 1252854 - RNA, 19 nt, Homo sapiens
  misc_RNA (1)...(19): siRNA sense strand
ccaugguguugcugcugua

SEQ ID NO: 1252855 - RNA, 19 nt, Homo sapiens
  misc_RNA (1)...(19): siRNA sense strand
cagaugacgccuguuauag

SEQ ID NO: 1252856 - RNA, 19 nt, Homo sapiens
  misc_RNA (1)...(19): siRNA sense strand
cagaugguggagcugaaua

SEQ ID NO: 1252857 - RNA, 19 nt, Homo sapiens
  misc_RNA (1)...(19): siRNA sense strand
gucauugcugugauuguua

SEQ ID NO: 1252858 - RNA, 19 nt, Homo sapiens
  misc_RNA (1)...(19): siRNA sense strand
ggagccaccaacauuugaa

SEQ ID NO: 1252859 - RNA, 19 nt, Homo sapiens
  misc_RNA (1)...(19): siRNA sense strand
uuggugaacgaguagauua

SEQ ID NO: 1252860 - RNA, 19 nt, Homo sapiens
  misc_RNA (1)...(19): siRNA sense strand
gcgcuuuccuggguugcuu

SEQ ID NO: 1252861 - RNA, 19 nt, Homo sapiens
  misc_RNA (1)...(19): siRNA sense strand
uacuacaaagcaacaguua

SEQ ID NO: 1252862 - RNA, 19 nt, Homo sapiens
  misc_RNA (1)...(19): siRNA sense strand
cuugaugcaguaacuuaua

SEQ ID NO: 1252863 - RNA, 19 nt, Homo sapiens
  misc_RNA (1)...(19): siRNA sense strand
aaacauguccauauauacg

SEQ ID NO: 1252864 - RNA, 19 nt, Homo sapiens
  misc_RNA (1)...(19): siRNA sense strand
guguaaaguggucaaaugu

SEQ ID NO: 1252865 - RNA, 19 nt, Homo sapiens
  misc_RNA (1)...(19): siRNA sense strand
cuuacgaguuugguuauca

SEQ ID NO: 1252866 - RNA, 19 nt, Homo sapiens
  misc_RNA (1)...(19): siRNA sense strand
uacgggauccuuuaaaugg

SEQ ID NO: 1252867 - RNA, 19 nt, Homo sapiens
  misc_RNA (1)...(19): siRNA sense strand
gcagaugguggagcugaau

SEQ ID NO: 1252868 - RNA, 19 nt, Homo sapiens
  misc_RNA (1)...(19): siRNA sense strand
aaccaaaacccuacuauga

SEQ ID NO: 1252869 - RNA, 19 nt, Homo sapiens
  misc_RNA (1)...(19): siRNA sense strand
uugaugcaguaacuuauag

SEQ ID NO: 1252870 - RNA, 19 nt, Homo sapiens
  misc_RNA (1)...(19): siRNA sense strand
ggagcugaauaugccacuu

SEQ ID NO: 1252871 - RNA, 19 nt, Homo sapiens
  misc_RNA (1)...(19): siRNA sense strand
cgauggcagcgacacaauu

SEQ ID NO: 1252872 - RNA, 19 nt, Homo sapiens
  misc_RNA (1)...(19): siRNA sense strand
gauccauuuucacuuauug

SEQ ID NO: 1252873 - RNA, 19 nt, Homo sapiens
  misc_RNA (1)...(19): siRNA sense strand
ggagagagcacgauuuauu

SEQ ID NO: 1252874 - RNA, 19 nt, Homo sapiens
  misc_RNA (1)...(19): siRNA sense strand
agagaaacauguccauaua

SEQ ID NO: 1252875 - RNA, 19 nt, Homo sapiens
  misc_RNA (1)...(19): siRNA sense strand
cagaugcacuuuauuugua

SEQ ID NO: 1252876 - RNA, 19 nt, Homo sapiens
  misc_RNA (1)...(19): siRNA sense strand
ggacuuacgaguuugguua

SEQ ID NO: 1252877 - RNA, 19 nt, Homo sapiens
  misc_RNA (1)...(19): siRNA sense strand
aaacagauaucaggauuug

SEQ ID NO: 1252878 - RNA, 19 nt, Homo sapiens
  misc_RNA (1)...(19): siRNA sense strand
cuauggagcucauugguaa

SEQ ID NO: 1252879 - RNA, 19 nt, Homo sapiens
  misc_RNA (1)...(19): siRNA sense strand
aaacacaccuuuagugaag

SEQ ID NO: 1252880 - RNA, 19 nt, Homo sapiens
  misc_RNA (1)...(19): siRNA sense strand
gaacuuaaaggaucaguag

SEQ ID NO: 1252881 - RNA, 19 nt, Homo sapiens
  misc_RNA (1)...(19): siRNA sense strand
gaaaacagauaucaggauu

SEQ ID NO: 1252882 - RNA, 19 nt, Homo sapiens
  misc_RNA (1)...(19): siRNA sense strand
uaaaggaucaguagcaauu

SEQ ID NO: 1252883 - RNA, 19 nt, Homo sapiens
  misc_RNA (1)...(19): siRNA sense strand
aaaugggacuuacgaguuu

SEQ ID NO: 1252884 - RNA, 19 nt, Homo sapiens
  misc_RNA (1)...(19): siRNA sense strand
guuaucagaugcacuuuau

SEQ ID NO: 1252885 - RNA, 19 nt, Homo sapiens
  misc_RNA (1)...(19): siRNA sense strand
ugagauuggugaacgagua

SEQ ID NO: 1252886 - RNA, 19 nt, Homo sapiens
  misc_RNA (1)...(19): siRNA sense strand
gugaacgaguagauuauaa

SEQ ID NO: 1252887 - RNA, 19 nt, Homo sapiens
  misc_RNA (1)...(19): siRNA sense strand
gagagagcacgauuuauug

SEQ ID NO: 1252888 - RNA, 19 nt, Homo sapiens
  misc_RNA (1)...(19): siRNA sense strand
caaaugggacuuacgaguu

SEQ ID NO: 1252889 - RNA, 19 nt, Homo sapiens
  misc_RNA (1)...(19): siRNA sense strand
ggucauugcugugauuguu

SEQ ID NO: 1252890 - RNA, 19 nt, Homo sapiens
  misc_RNA (1)...(19): siRNA sense strand
ccagauccauuuucacuua

SEQ ID NO: 1252891 - RNA, 19 nt, Homo sapiens
  misc_RNA (1)...(19): siRNA sense strand
gaaggaauacuugacaguu

SEQ ID NO: 1252892 - RNA, 19 nt, Homo sapiens
  misc_RNA (1)...(19): siRNA sense strand
aaggaauacuugacaguuu

SEQ ID NO: 1252893 - RNA, 19 nt, Homo sapiens
  misc_RNA (1)...(19): siRNA sense strand
ucagaugacgccuguuaua

SEQ ID NO: 1252894 - RNA, 19 nt, Homo sapiens
  misc_RNA (1)...(19): siRNA sense strand
gaaaacacaccuuuaguga

SEQ ID NO: 1252895 - RNA, 19 nt, Homo sapiens
  misc_RNA (1)...(19): siRNA sense strand
gaugacgccuguuauagag

SEQ ID NO: 1252896 - RNA, 19 nt, Homo sapiens
  misc_RNA (1)...(19): siRNA sense strand
gagaaacauguccauauau

SEQ ID NO: 1252897 - RNA, 19 nt, Homo sapiens
  misc_RNA (1)...(19): siRNA sense strand
acgaguagauuauaagugu

SEQ ID NO: 1252898 - RNA, 19 nt, Homo sapiens
  misc_RNA (1)...(19): siRNA sense strand
cuacaaagcaacaguuaug

SEQ ID NO: 1252899 - RNA, 19 nt, Homo sapiens
  misc_RNA (1)...(19): siRNA sense strand
ccaccaacauuugaagcua

SEQ ID NO: 1252900 - RNA, 19 nt, Homo sapiens
  misc_RNA (1)...(19): siRNA sense strand
uauacgggauccuuuaaau

SEQ ID NO: 1252901 - RNA, 19 nt, Homo sapiens
  misc_RNA (1)...(19): siRNA sense strand
cgaguuugguuaucagaug

SEQ ID NO: 1252902 - RNA, 19 nt, Homo sapiens
  misc_RNA (1)...(19): siRNA sense strand
gaacgaguagauuauaagu

SEQ ID NO: 1252903 - RNA, 19 nt, Homo sapiens
  misc_RNA (1)...(19): siRNA sense strand
gugaggagccaccaacauu

SEQ ID NO: 1252904 - RNA, 19 nt, Homo sapiens
  misc_RNA (1)...(19): siRNA sense strand
gauggcagcgacacaauug

SEQ ID NO: 1252905 - RNA, 19 nt, Homo sapiens
  misc_RNA (1)...(19): siRNA sense strand
gcuauggagcucauuggua

SEQ ID NO: 1252906 - RNA, 19 nt, Homo sapiens
  misc_RNA (1)...(19): siRNA sense strand
gaggagccaccaacauuug

SEQ ID NO: 1252907 - RNA, 19 nt, Homo sapiens
  misc_RNA (1)...(19): siRNA sense strand
acacaccuuuagugaagua

SEQ ID NO: 1252908 - RNA, 19 nt, Homo sapiens
  misc_RNA (1)...(19): siRNA sense strand
ucucagaugacgccuguua

SEQ ID NO: 1252909 - RNA, 19 nt, Homo sapiens
  misc_RNA (1)...(19): siRNA sense strand
uagagaaacauguccauau

SEQ ID NO: 1252910 - RNA, 19 nt, Homo sapiens
  misc_RNA (1)...(19): siRNA sense strand
guuccaaagugucuuaaag

SEQ ID NO: 1252911 - RNA, 19 nt, Homo sapiens
  misc_RNA (1)...(19): siRNA sense strand
ggugaacgaguagauuaua

SEQ ID NO: 1252912 - RNA, 19 nt, Homo sapiens
  misc_RNA (1)...(19): siRNA sense strand
gaaguagaaguauuugagu

SEQ ID NO: 1252913 - RNA, 19 nt, Homo sapiens
  misc_RNA (1)...(19): siRNA sense strand
gaaacauguccauauauac

SEQ ID NO: 1252914 - RNA, 19 nt, Homo sapiens
  misc_RNA (1)...(19): siRNA sense strand
ugacgccuguuauagagaa

SEQ ID NO: 1252915 - RNA, 19 nt, Homo sapiens
  misc_RNA (1)...(19): siRNA sense strand
cgaguagauuauaagugua

SEQ ID NO: 1252916 - RNA, 19 nt, Homo sapiens
  misc_RNA (1)...(19): siRNA sense strand
gcacuuuauuuguaaugag

SEQ ID NO: 1252917 - RNA, 19 nt, Homo sapiens
  misc_RNA (1)...(19): siRNA sense strand
guagaaguauuugaguauc

SEQ ID NO: 1252918 - RNA, 19 nt, Homo sapiens
  misc_RNA (1)...(19): siRNA sense strand
guauuugaguaucuugaug

SEQ ID NO: 1252919 - RNA, 19 nt, Homo sapiens
  misc_RNA (1)...(19): siRNA sense strand
aggaauacuugacaguuug

SEQ ID NO: 1252920 - RNA, 19 nt, Homo sapiens
  misc_RNA (1)...(19): siRNA sense strand
ccaaaacccuacuaugaga

SEQ ID NO: 1252921 - RNA, 19 nt, Homo sapiens
  misc_RNA (1)...(19): siRNA sense strand
aguguaaaguggucaaaug

SEQ ID NO: 1252922 - RNA, 19 nt, Homo sapiens
  misc_RNA (1)...(19): siRNA sense strand
ccacccauacuauuuguga

SEQ ID NO: 1252923 - RNA, 19 nt, Homo sapiens
  misc_RNA (1)...(19): siRNA sense strand
caccaacauuugaagcuau

SEQ ID NO: 1252924 - RNA, 19 nt, Homo sapiens
  misc_RNA (1)...(19): siRNA sense strand
uuggagagagcacgauuua

SEQ ID NO: 1252925 - RNA, 19 nt, Homo sapiens
  misc_RNA (1)...(19): siRNA sense strand
gguuaucagaugcacuuua

SEQ ID NO: 1252926 - RNA, 19 nt, Homo sapiens
  misc_RNA (1)...(19): siRNA sense strand
ugaggagccaccaacauuu

SEQ ID NO: 1252927 - RNA, 19 nt, Homo sapiens
  misc_RNA (1)...(19): siRNA sense strand
ggaaggaauacuugacagu

SEQ ID NO: 1252928 - RNA, 19 nt, Homo sapiens
  misc_RNA (1)...(19): siRNA sense strand
gaggaaggaauacuugaca

SEQ ID NO: 1252929 - RNA, 19 nt, Homo sapiens
  misc_RNA (1)...(19): siRNA sense strand
ccaguuccaaagugucuua

SEQ ID NO: 1252930 - RNA, 19 nt, Homo sapiens
  misc_RNA (1)...(19): siRNA sense strand
ugaguaucuugaugcagua

SEQ ID NO: 1252931 - RNA, 19 nt, Homo sapiens
  misc_RNA (1)...(19): siRNA sense strand
caccuuuagugaaguagaa

SEQ ID NO: 1252932 - RNA, 19 nt, Homo sapiens
  misc_RNA (1)...(19): siRNA sense strand
acagauaucaggauuugga

SEQ ID NO: 1252933 - RNA, 19 nt, Homo sapiens
  misc_RNA (1)...(19): siRNA sense strand
ucauugcugugauuguuau

SEQ ID NO: 1252934 - RNA, 19 nt, Homo sapiens
  misc_RNA (1)...(19): siRNA sense strand
ucagaugcacuuuauuugu

SEQ ID NO: 1252935 - RNA, 19 nt, Homo sapiens
  misc_RNA (1)...(19): siRNA sense strand
gugcugcuccagaguguaa

SEQ ID NO: 1252936 - RNA, 19 nt, Homo sapiens
  misc_RNA (1)...(19): siRNA sense strand
ggaaaacacaccuuuagug

SEQ ID NO: 1252937 - RNA, 19 nt, Homo sapiens
  misc_RNA (1)...(19): siRNA sense strand
aaggaucaguagcaauuug

SEQ ID NO: 1252938 - RNA, 19 nt, Homo sapiens
  misc_RNA (1)...(19): siRNA sense strand
uauauacgggauccuuuaa

SEQ ID NO: 1252939 - RNA, 19 nt, Homo sapiens
  misc_RNA (1)...(19): siRNA sense strand
ugaaguagaaguauuugag

SEQ ID NO: 1252940 - RNA, 19 nt, Homo sapiens
  misc_RNA (1)...(19): siRNA sense strand
cuugacaguuuggauguuu

SEQ ID NO: 1252941 - RNA, 19 nt, Homo sapiens
  misc_RNA (1)...(19): siRNA sense strand
cauauauacgggauccuuu

SEQ ID NO: 1252942 - RNA, 19 nt, Homo sapiens
  misc_RNA (1)...(19): siRNA sense strand
auauauacgggauccuuua

SEQ ID NO: 1252943 - RNA, 19 nt, Homo sapiens
  misc_RNA (1)...(19): siRNA sense strand
cuuaaaggaucaguagcaa

SEQ ID NO: 1252944 - RNA, 19 nt, Homo sapiens
  misc_RNA (1)...(19): siRNA sense strand
uaaaccugaggaaggaaua

SEQ ID NO: 1252945 - RNA, 19 nt, Homo sapiens
  misc_RNA (1)...(19): siRNA sense strand
agaugacgccuguuauaga

SEQ ID NO: 1252946 - RNA, 19 nt, Homo sapiens
  misc_RNA (1)...(19): siRNA sense strand
ugugauuguuauugccaua

SEQ ID NO: 1252947 - RNA, 19 nt, Homo sapiens
  misc_RNA (1)...(19): siRNA sense strand
gagagcacgauuuauugug

SEQ ID NO: 1252948 - RNA, 19 nt, Homo sapiens
  misc_RNA (1)...(19): siRNA sense strand
gaaguauuugaguaucuug

SEQ ID NO: 1252949 - RNA, 19 nt, Homo sapiens
  misc_RNA (1)...(19): siRNA sense strand
ggcuaccugucucagauga

SEQ ID NO: 1252950 - RNA, 19 nt, Homo sapiens
  misc_RNA (1)...(19): siRNA sense strand
gauaucaggauuuggaaaa

SEQ ID NO: 1252951 - RNA, 19 nt, Homo sapiens
  misc_RNA (1)...(19): siRNA sense strand
ccucuugccacccauacua

SEQ ID NO: 1252952 - RNA, 19 nt, Homo sapiens
  misc_RNA (1)...(19): siRNA sense strand
ccaugguguugcugcugua

SEQ ID NO: 1252953 - RNA, 19 nt, Homo sapiens
  misc_RNA (1)...(19): siRNA sense strand
cagaugacgccuguuauag

SEQ ID NO: 1252954 - RNA, 19 nt, Homo sapiens
  misc_RNA (1)...(19): siRNA sense strand
uuggugaacgaguagauua

SEQ ID NO: 1252955 - RNA, 19 nt, Homo sapiens
  misc_RNA (1)...(19): siRNA sense strand
gucauugcugugauuguua

SEQ ID NO: 1252956 - RNA, 19 nt, Homo sapiens
  misc_RNA (1)...(19): siRNA sense strand
ggagccaccaacauuugaa

SEQ ID NO: 1252957 - RNA, 19 nt, Homo sapiens
  misc_RNA (1)...(19): siRNA sense strand
gcgcuuuccuggguugcuu

SEQ ID NO: 1252958 - RNA, 19 nt, Homo sapiens
  misc_RNA (1)...(19): siRNA sense strand
uacuacaaagcaacaguua

SEQ ID NO: 1252959 - RNA, 19 nt, Homo sapiens
  misc_RNA (1)...(19): siRNA sense strand
cuugaugcaguaacuuaua

SEQ ID NO: 1252960 - RNA, 19 nt, Homo sapiens
  misc_RNA (1)...(19): siRNA sense strand
aaacauguccauauauacg

SEQ ID NO: 1252961 - RNA, 19 nt, Homo sapiens
  misc_RNA (1)...(19): siRNA sense strand
guguaaaguggucaaaugu

SEQ ID NO: 1252962 - RNA, 19 nt, Homo sapiens
  misc_RNA (1)...(19): siRNA sense strand
cuuacgaguuugguuauca

SEQ ID NO: 1252963 - RNA, 19 nt, Homo sapiens
  misc_RNA (1)...(19): siRNA sense strand
uacgggauccuuuaaaugg

SEQ ID NO: 1252964 - RNA, 19 nt, Homo sapiens
  misc_RNA (1)...(19): siRNA sense strand
aaccaaaacccuacuauga

SEQ ID NO: 1252965 - RNA, 19 nt, Homo sapiens
  misc_RNA (1)...(19): siRNA sense strand
cccaauaugugaaaagguu

SEQ ID NO: 1252966 - RNA, 19 nt, Homo sapiens
  misc_RNA (1)...(19): siRNA sense strand
cgauggcagcgacacaauu

SEQ ID NO: 1252967 - RNA, 19 nt, Homo sapiens
  misc_RNA (1)...(19): siRNA sense strand
gauccauuuucacuuauug

SEQ ID NO: 1252968 - RNA, 19 nt, Homo sapiens
  misc_RNA (1)...(19): siRNA sense strand
uugaugcaguaacuuauag

SEQ ID NO: 1252969 - RNA, 19 nt, Homo sapiens
  misc_RNA (1)...(19): siRNA sense strand
guaucuugaugcaguaacu

SEQ ID NO: 1252970 - RNA, 19 nt, Homo sapiens
  misc_RNA (1)...(19): siRNA sense strand
caacauuugaagcuaugga

SEQ ID NO: 1252971 - RNA, 19 nt, Homo sapiens
  misc_RNA (1)...(19): siRNA sense strand
gagauuggugaacgaguag

SEQ ID NO: 1252972 - RNA, 19 nt, Homo sapiens
  misc_RNA (1)...(19): siRNA sense strand
ggagagagcacgauuuauu

SEQ ID NO: 1252973 - RNA, 19 nt, Homo sapiens
  misc_RNA (1)...(19): siRNA sense strand
agagaaacauguccauaua

SEQ ID NO: 1252974 - RNA, 19 nt, Homo sapiens
  misc_RNA (1)...(19): siRNA sense strand
cagaugcacuuuauuugua

SEQ ID NO: 1252975 - RNA, 19 nt, Homo sapiens
  misc_RNA (1)...(19): siRNA sense strand
ggacuuacgaguuugguua

SEQ ID NO: 1252976 - RNA, 19 nt, Homo sapiens
  misc_RNA (1)...(19): siRNA sense strand
aaacagauaucaggauuug

SEQ ID NO: 1252977 - RNA, 19 nt, Homo sapiens
  misc_RNA (1)...(19): siRNA sense strand
cuauggagcucauugguaa

SEQ ID NO: 1252978 - RNA, 19 nt, Homo sapiens
  misc_RNA (1)...(19): siRNA sense strand
aaacacaccuuuagugaag

SEQ ID NO: 1252979 - RNA, 19 nt, Homo sapiens
  misc_RNA (1)...(19): siRNA sense strand
gaacuuaaaggaucaguag

SEQ ID NO: 1252980 - RNA, 19 nt, Homo sapiens
  misc_RNA (1)...(19): siRNA sense strand
gaaaacagauaucaggauu

SEQ ID NO: 1252981 - RNA, 19 nt, Homo sapiens
  misc_RNA (1)...(19): siRNA sense strand
uaaaggaucaguagcaauu

SEQ ID NO: 1252982 - RNA, 19 nt, Homo sapiens
  misc_RNA (1)...(19): siRNA sense strand
aaaugggacuuacgaguuu

SEQ ID NO: 1252983 - RNA, 19 nt, Homo sapiens
  misc_RNA (1)...(19): siRNA sense strand
guuaucagaugcacuuuau

SEQ ID NO: 1252984 - RNA, 19 nt, Homo sapiens
  misc_RNA (1)...(19): siRNA sense strand
ugagauuggugaacgagua

SEQ ID NO: 1252985 - RNA, 19 nt, Homo sapiens
  misc_RNA (1)...(19): siRNA sense strand
gugaacgaguagauuauaa

SEQ ID NO: 1252986 - RNA, 19 nt, Homo sapiens
  misc_RNA (1)...(19): siRNA sense strand
gagagagcacgauuuauug

SEQ ID NO: 1252987 - RNA, 19 nt, Homo sapiens
  misc_RNA (1)...(19): siRNA sense strand
caaaugggacuuacgaguu

SEQ ID NO: 1252988 - RNA, 19 nt, Homo sapiens
  misc_RNA (1)...(19): siRNA sense strand
ggucauugcugugauuguu

SEQ ID NO: 1252989 - RNA, 19 nt, Homo sapiens
  misc_RNA (1)...(19): siRNA sense strand
ccagauccauuuucacuua

SEQ ID NO: 1252990 - RNA, 19 nt, Homo sapiens
  misc_RNA (1)...(19): siRNA sense strand
gaaggaauacuugacaguu

SEQ ID NO: 1252991 - RNA, 19 nt, Homo sapiens
  misc_RNA (1)...(19): siRNA sense strand
aaggaauacuugacaguuu

SEQ ID NO: 1252992 - RNA, 19 nt, Homo sapiens
  misc_RNA (1)...(19): siRNA sense strand
ucagaugacgccuguuaua

SEQ ID NO: 1252993 - RNA, 19 nt, Homo sapiens
  misc_RNA (1)...(19): siRNA sense strand
gaaaacacaccuuuaguga

SEQ ID NO: 1252994 - RNA, 19 nt, Homo sapiens
  misc_RNA (1)...(19): siRNA sense strand
gaugacgccuguuauagag

SEQ ID NO: 1252995 - RNA, 19 nt, Homo sapiens
  misc_RNA (1)...(19): siRNA sense strand
gagaaacauguccauauau

SEQ ID NO: 1252996 - RNA, 19 nt, Homo sapiens
  misc_RNA (1)...(19): siRNA sense strand
acgaguagauuauaagugu

SEQ ID NO: 1252997 - RNA, 19 nt, Homo sapiens
  misc_RNA (1)...(19): siRNA sense strand
cuacaaagcaacaguuaug

SEQ ID NO: 1252998 - RNA, 19 nt, Homo sapiens
  misc_RNA (1)...(19): siRNA sense strand
ccaccaacauuugaagcua

SEQ ID NO: 1252999 - RNA, 19 nt, Homo sapiens
  misc_RNA (1)...(19): siRNA sense strand
uauacgggauccuuuaaau

SEQ ID NO: 1253000 - RNA, 19 nt, Homo sapiens
  misc_RNA (1)...(19): siRNA sense strand
cgaguuugguuaucagaug

SEQ ID NO: 1253001 - RNA, 19 nt, Homo sapiens
  misc_RNA (1)...(19): siRNA sense strand
gaacgaguagauuauaagu

SEQ ID NO: 1253002 - RNA, 19 nt, Homo sapiens
  misc_RNA (1)...(19): siRNA sense strand
gugaggagccaccaacauu

SEQ ID NO: 1253003 - RNA, 19 nt, Homo sapiens
  misc_RNA (1)...(19): siRNA sense strand
gauggcagcgacacaauug

SEQ ID NO: 1253004 - RNA, 19 nt, Homo sapiens
  misc_RNA (1)...(19): siRNA sense strand
gcuauggagcucauuggua

SEQ ID NO: 1253005 - RNA, 19 nt, Homo sapiens
  misc_RNA (1)...(19): siRNA sense strand
gaggagccaccaacauuug

SEQ ID NO: 1253006 - RNA, 19 nt, Homo sapiens
  misc_RNA (1)...(19): siRNA sense strand
acacaccuuuagugaagua

SEQ ID NO: 1253007 - RNA, 19 nt, Homo sapiens
  misc_RNA (1)...(19): siRNA sense strand
ucucagaugacgccuguua

SEQ ID NO: 1253008 - RNA, 19 nt, Homo sapiens
  misc_RNA (1)...(19): siRNA sense strand
uagagaaacauguccauau

SEQ ID NO: 1253009 - RNA, 19 nt, Homo sapiens
  misc_RNA (1)...(19): siRNA sense strand
ggugaacgaguagauuaua

SEQ ID NO: 1253010 - RNA, 19 nt, Homo sapiens
  misc_RNA (1)...(19): siRNA sense strand
gaaguagaaguauuugagu

SEQ ID NO: 1253011 - RNA, 19 nt, Homo sapiens
  misc_RNA (1)...(19): siRNA sense strand
gaaacauguccauauauac

SEQ ID NO: 1253012 - RNA, 19 nt, Homo sapiens
  misc_RNA (1)...(19): siRNA sense strand
ugacgccuguuauagagaa

SEQ ID NO: 1253013 - RNA, 19 nt, Homo sapiens
  misc_RNA (1)...(19): siRNA sense strand
cgaguagauuauaagugua

SEQ ID NO: 1253014 - RNA, 19 nt, Homo sapiens
  misc_RNA (1)...(19): siRNA sense strand
gcacuuuauuuguaaugag

SEQ ID NO: 1253015 - RNA, 19 nt, Homo sapiens
  misc_RNA (1)...(19): siRNA sense strand
guagaaguauuugaguauc

SEQ ID NO: 1253016 - RNA, 19 nt, Homo sapiens
  misc_RNA (1)...(19): siRNA sense strand
guauuugaguaucuugaug

SEQ ID NO: 1253017 - RNA, 19 nt, Homo sapiens
  misc_RNA (1)...(19): siRNA sense strand
aggaauacuugacaguuug

SEQ ID NO: 1253018 - RNA, 19 nt, Homo sapiens
  misc_RNA (1)...(19): siRNA sense strand
aguguaaaguggucaaaug

SEQ ID NO: 1253019 - RNA, 19 nt, Homo sapiens
  misc_RNA (1)...(19): siRNA sense strand
ccaaaacccuacuaugaga

SEQ ID NO: 1253020 - RNA, 19 nt, Homo sapiens
  misc_RNA (1)...(19): siRNA sense strand
ccacccauacuauuuguga

SEQ ID NO: 1253021 - RNA, 19 nt, Homo sapiens
  misc_RNA (1)...(19): siRNA sense strand
caccaacauuugaagcuau

SEQ ID NO: 1253022 - RNA, 19 nt, Homo sapiens
  misc_RNA (1)...(19): siRNA sense strand
uuggagagagcacgauuua

SEQ ID NO: 1253023 - RNA, 19 nt, Homo sapiens
  misc_RNA (1)...(19): siRNA sense strand
gguuaucagaugcacuuua

SEQ ID NO: 1253024 - RNA, 19 nt, Homo sapiens
  misc_RNA (1)...(19): siRNA sense strand
ugaggagccaccaacauuu

SEQ ID NO: 1253025 - RNA, 19 nt, Homo sapiens
  misc_RNA (1)...(19): siRNA sense strand
ggaaggaauacuugacagu

SEQ ID NO: 1253026 - RNA, 19 nt, Homo sapiens
  misc_RNA (1)...(19): siRNA sense strand
gaggaaggaauacuugaca

SEQ ID NO: 1253027 - RNA, 19 nt, Homo sapiens
  misc_RNA (1)...(19): siRNA sense strand
ugaguaucuugaugcagua

SEQ ID NO: 1253028 - RNA, 19 nt, Homo sapiens
  misc_RNA (1)...(19): siRNA sense strand
caccuuuagugaaguagaa

SEQ ID NO: 1253029 - RNA, 19 nt, Homo sapiens
  misc_RNA (1)...(19): siRNA sense strand
acagauaucaggauuugga

SEQ ID NO: 1253030 - RNA, 19 nt, Homo sapiens
  misc_RNA (1)...(19): siRNA sense strand
ucauugcugugauuguuau

SEQ ID NO: 1253031 - RNA, 19 nt, Homo sapiens
  misc_RNA (1)...(19): siRNA sense strand
ucagaugcacuuuauuugu

SEQ ID NO: 1253032 - RNA, 19 nt, Homo sapiens
  misc_RNA (1)...(19): siRNA sense strand
gugcugcuccagaguguaa

SEQ ID NO: 1253033 - RNA, 19 nt, Homo sapiens
  misc_RNA (1)...(19): siRNA sense strand
ggaaaacacaccuuuagug

SEQ ID NO: 1253034 - RNA, 19 nt, Homo sapiens
  misc_RNA (1)...(19): siRNA sense strand
aaggaucaguagcaauuug

SEQ ID NO: 1253035 - RNA, 19 nt, Homo sapiens
  misc_RNA (1)...(19): siRNA sense strand
uauauacgggauccuuuaa

SEQ ID NO: 1253036 - RNA, 19 nt, Homo sapiens
  misc_RNA (1)...(19): siRNA sense strand
ugaaguagaaguauuugag

SEQ ID NO: 1253037 - RNA, 19 nt, Homo sapiens
  misc_RNA (1)...(19): siRNA sense strand
cuugacaguuuggauguuu

SEQ ID NO: 1253038 - RNA, 19 nt, Homo sapiens
  misc_RNA (1)...(19): siRNA sense strand
cauauauacgggauccuuu

SEQ ID NO: 1253039 - RNA, 19 nt, Homo sapiens
  misc_RNA (1)...(19): siRNA sense strand
auauauacgggauccuuua

SEQ ID NO: 1253040 - RNA, 19 nt, Homo sapiens
  misc_RNA (1)...(19): siRNA sense strand
cuuaaaggaucaguagcaa

SEQ ID NO: 1253041 - RNA, 19 nt, Homo sapiens
  misc_RNA (1)...(19): siRNA sense strand
uaaaccugaggaaggaaua

SEQ ID NO: 1253042 - RNA, 19 nt, Homo sapiens
  misc_RNA (1)...(19): siRNA sense strand
agaugacgccuguuauaga

SEQ ID NO: 1253043 - RNA, 19 nt, Homo sapiens
  misc_RNA (1)...(19): siRNA sense strand
ugugauuguuauugccaua

SEQ ID NO: 1253044 - RNA, 19 nt, Homo sapiens
  misc_RNA (1)...(19): siRNA sense strand
gagagcacgauuuauugug

SEQ ID NO: 1253045 - RNA, 19 nt, Homo sapiens
  misc_RNA (1)...(19): siRNA sense strand
gaaguauuugaguaucuug

SEQ ID NO: 1253046 - RNA, 19 nt, Homo sapiens
  misc_RNA (1)...(19): siRNA sense strand
ccucuugccacccauacua

SEQ ID NO: 1253047 - RNA, 19 nt, Homo sapiens
  misc_RNA (1)...(19): siRNA sense strand
gauaucaggauuuggaaaa

SEQ ID NO: 1253048 - RNA, 19 nt, Homo sapiens
  misc_RNA (1)...(19): siRNA sense strand
ggcuaccugucucagauga

SEQ ID NO: 1253049 - RNA, 19 nt, Homo sapiens
  misc_RNA (1)...(19): siRNA sense strand
ccaugguguugcugcugua

SEQ ID NO: 1253050 - RNA, 19 nt, Homo sapiens
  misc_RNA (1)...(19): siRNA sense strand
cagaugacgccuguuauag

SEQ ID NO: 1253051 - RNA, 19 nt, Homo sapiens
  misc_RNA (1)...(19): siRNA sense strand
gucauugcugugauuguua

SEQ ID NO: 1253052 - RNA, 19 nt, Homo sapiens
  misc_RNA (1)...(19): siRNA sense strand
uuggugaacgaguagauua

SEQ ID NO: 1253053 - RNA, 19 nt, Homo sapiens
  misc_RNA (1)...(19): siRNA sense strand
ggagccaccaacauuugaa

SEQ ID NO: 1253054 - RNA, 19 nt, Homo sapiens
  misc_RNA (1)...(19): siRNA sense strand
gcgcuuuccuggguugcuu

SEQ ID NO: 1253055 - RNA, 19 nt, Homo sapiens
  misc_RNA (1)...(19): siRNA sense strand
uacuacaaagcaacaguua

SEQ ID NO: 1253056 - RNA, 19 nt, Homo sapiens
  misc_RNA (1)...(19): siRNA sense strand
cuugaugcaguaacuuaua

SEQ ID NO: 1253057 - RNA, 19 nt, Homo sapiens
  misc_RNA (1)...(19): siRNA sense strand
aaacauguccauauauacg

SEQ ID NO: 1253058 - RNA, 19 nt, Homo sapiens
  misc_RNA (1)...(19): siRNA sense strand
guguaaaguggucaaaugu

SEQ ID NO: 1253059 - RNA, 19 nt, Homo sapiens
  misc_RNA (1)...(19): siRNA sense strand
cuuacgaguuugguuauca

SEQ ID NO: 1253060 - RNA, 19 nt, Homo sapiens
  misc_RNA (1)...(19): siRNA sense strand
uacgggauccuuuaaaugg

SEQ ID NO: 1253061 - RNA, 19 nt, Homo sapiens
  misc_RNA (1)...(19): siRNA sense strand
aaccaaaacccuacuauga

SEQ ID NO: 1253062 - RNA, 19 nt, Homo sapiens
  misc_RNA (1)...(19): siRNA sense strand
cccaauaugugaaaagguu

SEQ ID NO: 1253063 - RNA, 19 nt, Homo sapiens
  misc_RNA (1)...(19): siRNA sense strand
cgauggcagcgacacaauu

SEQ ID NO: 1253064 - RNA, 19 nt, Homo sapiens
  misc_RNA (1)...(19): siRNA sense strand
gauccauuuucacuuauug

SEQ ID NO: 1253065 - RNA, 19 nt, Homo sapiens
  misc_RNA (1)...(19): siRNA sense strand
uugaugcaguaacuuauag

SEQ ID NO: 1253066 - RNA, 19 nt, Homo sapiens
  misc_RNA (1)...(19): siRNA sense strand
guaucuugaugcaguaacu

SEQ ID NO: 1253067 - RNA, 19 nt, Homo sapiens
  misc_RNA (1)...(19): siRNA sense strand
caacauuugaagcuaugga

SEQ ID NO: 1253068 - RNA, 19 nt, Homo sapiens
  misc_RNA (1)...(19): siRNA sense strand
gagauuggugaacgaguag

SEQ ID NO: 1253069 - RNA, 19 nt, Homo sapiens
  misc_RNA (1)...(19): siRNA sense strand
ggagagagcacgauuuauu

SEQ ID NO: 1253070 - RNA, 19 nt, Homo sapiens
  misc_RNA (1)...(19): siRNA sense strand
agagaaacauguccauaua

SEQ ID NO: 1253071 - RNA, 19 nt, Homo sapiens
  misc_RNA (1)...(19): siRNA sense strand
cagaugcacuuuauuugua

SEQ ID NO: 1253072 - RNA, 19 nt, Homo sapiens
  misc_RNA (1)...(19): siRNA sense strand
ggacuuacgaguuugguua

SEQ ID NO: 1253073 - RNA, 19 nt, Homo sapiens
  misc_RNA (1)...(19): siRNA sense strand
aaacagauaucaggauuug

SEQ ID NO: 1253074 - RNA, 19 nt, Homo sapiens
  misc_RNA (1)...(19): siRNA sense strand
cuauggagcucauugguaa

SEQ ID NO: 1253075 - RNA, 19 nt, Homo sapiens
  misc_RNA (1)...(19): siRNA sense strand
aaacacaccuuuagugaag

SEQ ID NO: 1253076 - RNA, 19 nt, Homo sapiens
  misc_RNA (1)...(19): siRNA sense strand
gaacuuaaaggaucaguag

SEQ ID NO: 1253077 - RNA, 19 nt, Homo sapiens
  misc_RNA (1)...(19): siRNA sense strand
gaaaacagauaucaggauu

SEQ ID NO: 1253078 - RNA, 19 nt, Homo sapiens
  misc_RNA (1)...(19): siRNA sense strand
uaaaggaucaguagcaauu

SEQ ID NO: 1253079 - RNA, 19 nt, Homo sapiens
  misc_RNA (1)...(19): siRNA sense strand
aaaugggacuuacgaguuu

SEQ ID NO: 1253080 - RNA, 19 nt, Homo sapiens
  misc_RNA (1)...(19): siRNA sense strand
guuaucagaugcacuuuau

SEQ ID NO: 1253081 - RNA, 19 nt, Homo sapiens
  misc_RNA (1)...(19): siRNA sense strand
gagcugaauaugccacuua

SEQ ID NO: 1253082 - RNA, 19 nt, Homo sapiens
  misc_RNA (1)...(19): siRNA sense strand
ugagauuggugaacgagua

SEQ ID NO: 1253083 - RNA, 19 nt, Homo sapiens
  misc_RNA (1)...(19): siRNA sense strand
gugaacgaguagauuauaa

SEQ ID NO: 1253084 - RNA, 19 nt, Homo sapiens
  misc_RNA (1)...(19): siRNA sense strand
gagagagcacgauuuauug

SEQ ID NO: 1253085 - RNA, 19 nt, Homo sapiens
  misc_RNA (1)...(19): siRNA sense strand
caaaugggacuuacgaguu

SEQ ID NO: 1253086 - RNA, 19 nt, Homo sapiens
  misc_RNA (1)...(19): siRNA sense strand
ggucauugcugugauuguu

SEQ ID NO: 1253087 - RNA, 19 nt, Homo sapiens
  misc_RNA (1)...(19): siRNA sense strand
ccagauccauuuucacuua

SEQ ID NO: 1253088 - RNA, 19 nt, Homo sapiens
  misc_RNA (1)...(19): siRNA sense strand
gaaggaauacuugacaguu

SEQ ID NO: 1253089 - RNA, 19 nt, Homo sapiens
  misc_RNA (1)...(19): siRNA sense strand
aaggaauacuugacaguuu

SEQ ID NO: 1253090 - RNA, 19 nt, Homo sapiens
  misc_RNA (1)...(19): siRNA sense strand
ucagaugacgccuguuaua

SEQ ID NO: 1253091 - RNA, 19 nt, Homo sapiens
  misc_RNA (1)...(19): siRNA sense strand
gaaaacacaccuuuaguga

SEQ ID NO: 1253092 - RNA, 19 nt, Homo sapiens
  misc_RNA (1)...(19): siRNA sense strand
gaugacgccuguuauagag

SEQ ID NO: 1253093 - RNA, 19 nt, Homo sapiens
  misc_RNA (1)...(19): siRNA sense strand
gagaaacauguccauauau

SEQ ID NO: 1253094 - RNA, 19 nt, Homo sapiens
  misc_RNA (1)...(19): siRNA sense strand
ccacuuaccagacuaaauc

SEQ ID NO: 1253095 - RNA, 19 nt, Homo sapiens
  misc_RNA (1)...(19): siRNA sense strand
acgaguagauuauaagugu

SEQ ID NO: 1253096 - RNA, 19 nt, Homo sapiens
  misc_RNA (1)...(19): siRNA sense strand
cuacaaagcaacaguuaug

SEQ ID NO: 1253097 - RNA, 19 nt, Homo sapiens
  misc_RNA (1)...(19): siRNA sense strand
ccaccaacauuugaagcua

SEQ ID NO: 1253098 - RNA, 19 nt, Homo sapiens
  misc_RNA (1)...(19): siRNA sense strand
uauacgggauccuuuaaau

SEQ ID NO: 1253099 - RNA, 19 nt, Homo sapiens
  misc_RNA (1)...(19): siRNA sense strand
cgaguuugguuaucagaug

SEQ ID NO: 1253100 - RNA, 19 nt, Homo sapiens
  misc_RNA (1)...(19): siRNA sense strand
gaacgaguagauuauaagu

SEQ ID NO: 1253101 - RNA, 19 nt, Homo sapiens
  misc_RNA (1)...(19): siRNA sense strand
gugaggagccaccaacauu

SEQ ID NO: 1253102 - RNA, 19 nt, Homo sapiens
  misc_RNA (1)...(19): siRNA sense strand
gauggcagcgacacaauug

SEQ ID NO: 1253103 - RNA, 19 nt, Homo sapiens
  misc_RNA (1)...(19): siRNA sense strand
ucucagaugacgccuguua

SEQ ID NO: 1253104 - RNA, 19 nt, Homo sapiens
  misc_RNA (1)...(19): siRNA sense strand
gaggagccaccaacauuug

SEQ ID NO: 1253105 - RNA, 19 nt, Homo sapiens
  misc_RNA (1)...(19): siRNA sense strand
gcuauggagcucauuggua

SEQ ID NO: 1253106 - RNA, 19 nt, Homo sapiens
  misc_RNA (1)...(19): siRNA sense strand
acacaccuuuagugaagua

SEQ ID NO: 1253107 - RNA, 19 nt, Homo sapiens
  misc_RNA (1)...(19): siRNA sense strand
uagagaaacauguccauau

SEQ ID NO: 1253108 - RNA, 19 nt, Homo sapiens
  misc_RNA (1)...(19): siRNA sense strand
ggugaacgaguagauuaua

SEQ ID NO: 1253109 - RNA, 19 nt, Homo sapiens
  misc_RNA (1)...(19): siRNA sense strand
gaaguagaaguauuugagu

SEQ ID NO: 1253110 - RNA, 19 nt, Homo sapiens
  misc_RNA (1)...(19): siRNA sense strand
gaaacauguccauauauac

SEQ ID NO: 1253111 - RNA, 19 nt, Homo sapiens
  misc_RNA (1)...(19): siRNA sense strand
ugacgccuguuauagagaa

SEQ ID NO: 1253112 - RNA, 19 nt, Homo sapiens
  misc_RNA (1)...(19): siRNA sense strand
cgaguagauuauaagugua

SEQ ID NO: 1253113 - RNA, 19 nt, Homo sapiens
  misc_RNA (1)...(19): siRNA sense strand
gcacuuuauuuguaaugag

SEQ ID NO: 1253114 - RNA, 19 nt, Homo sapiens
  misc_RNA (1)...(19): siRNA sense strand
guagaaguauuugaguauc

SEQ ID NO: 1253115 - RNA, 19 nt, Homo sapiens
  misc_RNA (1)...(19): siRNA sense strand
guauuugaguaucuugaug

SEQ ID NO: 1253116 - RNA, 19 nt, Homo sapiens
  misc_RNA (1)...(19): siRNA sense strand
aggaauacuugacaguuug

SEQ ID NO: 1253117 - RNA, 19 nt, Homo sapiens
  misc_RNA (1)...(19): siRNA sense strand
ccaaaacccuacuaugaga

SEQ ID NO: 1253118 - RNA, 19 nt, Homo sapiens
  misc_RNA (1)...(19): siRNA sense strand
aguguaaaguggucaaaug

SEQ ID NO: 1253119 - RNA, 19 nt, Homo sapiens
  misc_RNA (1)...(19): siRNA sense strand
ccacccauacuauuuguga

SEQ ID NO: 1253120 - RNA, 19 nt, Homo sapiens
  misc_RNA (1)...(19): siRNA sense strand
uuggagagagcacgauuua

SEQ ID NO: 1253121 - RNA, 19 nt, Homo sapiens
  misc_RNA (1)...(19): siRNA sense strand
gguuaucagaugcacuuua

SEQ ID NO: 1253122 - RNA, 19 nt, Homo sapiens
  misc_RNA (1)...(19): siRNA sense strand
caccaacauuugaagcuau

SEQ ID NO: 1253123 - RNA, 19 nt, Homo sapiens
  misc_RNA (1)...(19): siRNA sense strand
ugaggagccaccaacauuu

SEQ ID NO: 1253124 - RNA, 19 nt, Homo sapiens
  misc_RNA (1)...(19): siRNA sense strand
ggaaggaauacuugacagu

SEQ ID NO: 1253125 - RNA, 19 nt, Homo sapiens
  misc_RNA (1)...(19): siRNA sense strand
gaggaaggaauacuugaca

SEQ ID NO: 1253126 - RNA, 19 nt, Homo sapiens
  misc_RNA (1)...(19): siRNA sense strand
ugaguaucuugaugcagua

SEQ ID NO: 1253127 - RNA, 19 nt, Homo sapiens
  misc_RNA (1)...(19): siRNA sense strand
caccuuuagugaaguagaa

SEQ ID NO: 1253128 - RNA, 19 nt, Homo sapiens
  misc_RNA (1)...(19): siRNA sense strand
acagauaucaggauuugga

SEQ ID NO: 1253129 - RNA, 19 nt, Homo sapiens
  misc_RNA (1)...(19): siRNA sense strand
ucauugcugugauuguuau

SEQ ID NO: 1253130 - RNA, 19 nt, Homo sapiens
  misc_RNA (1)...(19): siRNA sense strand
ucagaugcacuuuauuugu

SEQ ID NO: 1253131 - RNA, 19 nt, Homo sapiens
  misc_RNA (1)...(19): siRNA sense strand
gugcugcuccagaguguaa

SEQ ID NO: 1253132 - RNA, 19 nt, Homo sapiens
  misc_RNA (1)...(19): siRNA sense strand
ggaaaacacaccuuuagug

SEQ ID NO: 1253133 - RNA, 19 nt, Homo sapiens
  misc_RNA (1)...(19): siRNA sense strand
aaggaucaguagcaauuug

SEQ ID NO: 1253134 - RNA, 19 nt, Homo sapiens
  misc_RNA (1)...(19): siRNA sense strand
uauauacgggauccuuuaa

SEQ ID NO: 1253135 - RNA, 19 nt, Homo sapiens
  misc_RNA (1)...(19): siRNA sense strand
ugaaguagaaguauuugag

SEQ ID NO: 1253136 - RNA, 19 nt, Homo sapiens
  misc_RNA (1)...(19): siRNA sense strand
cuugacaguuuggauguuu

SEQ ID NO: 1253137 - RNA, 19 nt, Homo sapiens
  misc_RNA (1)...(19): siRNA sense strand
cauauauacgggauccuuu

SEQ ID NO: 1253138 - RNA, 19 nt, Homo sapiens
  misc_RNA (1)...(19): siRNA sense strand
auauauacgggauccuuua

SEQ ID NO: 1253139 - RNA, 19 nt, Homo sapiens
  misc_RNA (1)...(19): siRNA sense strand
cuuaaaggaucaguagcaa

SEQ ID NO: 1253140 - RNA, 19 nt, Homo sapiens
  misc_RNA (1)...(19): siRNA sense strand
uaaaccugaggaaggaaua

SEQ ID NO: 1253141 - RNA, 19 nt, Homo sapiens
  misc_RNA (1)...(19): siRNA sense strand
agaugacgccuguuauaga

SEQ ID NO: 1253142 - RNA, 19 nt, Homo sapiens
  misc_RNA (1)...(19): siRNA sense strand
ugugauuguuauugccaua

SEQ ID NO: 1253143 - RNA, 19 nt, Homo sapiens
  misc_RNA (1)...(19): siRNA sense strand
gagagcacgauuuauugug

SEQ ID NO: 1253144 - RNA, 19 nt, Homo sapiens
  misc_RNA (1)...(19): siRNA sense strand
gaaguauuugaguaucuug

SEQ ID NO: 1253145 - RNA, 19 nt, Homo sapiens
  misc_RNA (1)...(19): siRNA sense strand
ggcuaccugucucagauga

SEQ ID NO: 1253146 - RNA, 19 nt, Homo sapiens
  misc_RNA (1)...(19): siRNA sense strand
gauaucaggauuuggaaaa

SEQ ID NO: 1253147 - RNA, 19 nt, Homo sapiens
  misc_RNA (1)...(19): siRNA sense strand
ccucuugccacccauacua

SEQ ID NO: 1253148 - RNA, 19 nt, Homo sapiens
  misc_RNA (1)...(19): siRNA sense strand
ccaugguguugcugcugua

SEQ ID NO: 1253149 - RNA, 19 nt, Homo sapiens
  misc_RNA (1)...(19): siRNA sense strand
cagaugacgccuguuauag

SEQ ID NO: 1253150 - RNA, 19 nt, Homo sapiens
  misc_RNA (1)...(19): siRNA sense strand
cagaugguggagcugaaua

SEQ ID NO: 1253151 - RNA, 19 nt, Homo sapiens
  misc_RNA (1)...(19): siRNA sense strand
uuggugaacgaguagauua

SEQ ID NO: 1253152 - RNA, 19 nt, Homo sapiens
  misc_RNA (1)...(19): siRNA sense strand
gucauugcugugauuguua

SEQ ID NO: 1253153 - RNA, 19 nt, Homo sapiens
  misc_RNA (1)...(19): siRNA sense strand
ggagccaccaacauuugaa

SEQ ID NO: 1253154 - RNA, 19 nt, Homo sapiens
  misc_RNA (1)...(19): siRNA sense strand
gcgcuuuccuggguugcuu

SEQ ID NO: 1253155 - RNA, 19 nt, Homo sapiens
  misc_RNA (1)...(19): siRNA sense strand
uacuacaaagcaacaguua

SEQ ID NO: 1253156 - RNA, 19 nt, Homo sapiens
  misc_RNA (1)...(19): siRNA sense strand
cuugaugcaguaacuuaua

SEQ ID NO: 1253157 - RNA, 19 nt, Homo sapiens
  misc_RNA (1)...(19): siRNA sense strand
aaacauguccauauauacg

SEQ ID NO: 1253158 - RNA, 19 nt, Homo sapiens
  misc_RNA (1)...(19): siRNA sense strand
guguaaaguggucaaaugu

SEQ ID NO: 1253159 - RNA, 19 nt, Homo sapiens
  misc_RNA (1)...(19): siRNA sense strand
cuuacgaguuugguuauca

SEQ ID NO: 1253160 - RNA, 19 nt, Homo sapiens
  misc_RNA (1)...(19): siRNA sense strand
uacgggauccuuuaaaugg

SEQ ID NO: 1253161 - RNA, 19 nt, Homo sapiens
  misc_RNA (1)...(19): siRNA sense strand
gcagaugguggagcugaau

SEQ ID NO: 1253162 - RNA, 19 nt, Homo sapiens
  misc_RNA (1)...(19): siRNA sense strand
aaccaaaacccuacuauga

SEQ ID NO: 1253163 - RNA, 19 nt, Homo sapiens
  misc_RNA (1)...(19): siRNA sense strand
cccaauaugugaaaagguu

SEQ ID NO: 1253164 - RNA, 19 nt, Homo sapiens
  misc_RNA (1)...(19): siRNA sense strand
ggagcugaauaugccacuu

SEQ ID NO: 1253165 - RNA, 19 nt, Homo sapiens
  misc_RNA (1)...(19): siRNA sense strand
cgauggcagcgacacaauu

SEQ ID NO: 1253166 - RNA, 19 nt, Homo sapiens
  misc_RNA (1)...(19): siRNA sense strand
gauccauuuucacuuauug

SEQ ID NO: 1253167 - RNA, 19 nt, Homo sapiens
  misc_RNA (1)...(19): siRNA sense strand
uugaugcaguaacuuauag

SEQ ID NO: 1253168 - RNA, 19 nt, Homo sapiens
  misc_RNA (1)...(19): siRNA sense strand
guaucuugaugcaguaacu

SEQ ID NO: 1253169 - RNA, 19 nt, Homo sapiens
  misc_RNA (1)...(19): siRNA sense strand
ggagagagcacgauuuauu

SEQ ID NO: 1253170 - RNA, 19 nt, Homo sapiens
  misc_RNA (1)...(19): siRNA sense strand
agagaaacauguccauaua

SEQ ID NO: 1253171 - RNA, 19 nt, Homo sapiens
  misc_RNA (1)...(19): siRNA sense strand
cagaugcacuuuauuugua

SEQ ID NO: 1253172 - RNA, 19 nt, Homo sapiens
  misc_RNA (1)...(19): siRNA sense strand
ggacuuacgaguuugguua

SEQ ID NO: 1253173 - RNA, 19 nt, Homo sapiens
  misc_RNA (1)...(19): siRNA sense strand
aaacagauaucaggauuug

SEQ ID NO: 1253174 - RNA, 19 nt, Homo sapiens
  misc_RNA (1)...(19): siRNA sense strand
cuauggagcucauugguaa

SEQ ID NO: 1253175 - RNA, 19 nt, Homo sapiens
  misc_RNA (1)...(19): siRNA sense strand
aaacacaccuuuagugaag

SEQ ID NO: 1253176 - RNA, 19 nt, Homo sapiens
  misc_RNA (1)...(19): siRNA sense strand
gaacuuaaaggaucaguag

SEQ ID NO: 1253177 - RNA, 19 nt, Homo sapiens
  misc_RNA (1)...(19): siRNA sense strand
gaaaacagauaucaggauu

SEQ ID NO: 1253178 - RNA, 19 nt, Homo sapiens
  misc_RNA (1)...(19): siRNA sense strand
uaaaggaucaguagcaauu

SEQ ID NO: 1253179 - RNA, 19 nt, Homo sapiens
  misc_RNA (1)...(19): siRNA sense strand
aaaugggacuuacgaguuu

SEQ ID NO: 1253180 - RNA, 19 nt, Homo sapiens
  misc_RNA (1)...(19): siRNA sense strand
guuaucagaugcacuuuau

SEQ ID NO: 1253181 - RNA, 19 nt, Homo sapiens
  misc_RNA (1)...(19): siRNA sense strand
ugagauuggugaacgagua

SEQ ID NO: 1253182 - RNA, 19 nt, Homo sapiens
  misc_RNA (1)...(19): siRNA sense strand
gugaacgaguagauuauaa

SEQ ID NO: 1253183 - RNA, 19 nt, Homo sapiens
  misc_RNA (1)...(19): siRNA sense strand
gagagagcacgauuuauug

SEQ ID NO: 1253184 - RNA, 19 nt, Homo sapiens
  misc_RNA (1)...(19): siRNA sense strand
caaaugggacuuacgaguu

SEQ ID NO: 1253185 - RNA, 19 nt, Homo sapiens
  misc_RNA (1)...(19): siRNA sense strand
ggucauugcugugauuguu

SEQ ID NO: 1253186 - RNA, 19 nt, Homo sapiens
  misc_RNA (1)...(19): siRNA sense strand
ccagauccauuuucacuua

SEQ ID NO: 1253187 - RNA, 19 nt, Homo sapiens
  misc_RNA (1)...(19): siRNA sense strand
gaaggaauacuugacaguu

SEQ ID NO: 1253188 - RNA, 19 nt, Homo sapiens
  misc_RNA (1)...(19): siRNA sense strand
aaggaauacuugacaguuu

SEQ ID NO: 1253189 - RNA, 19 nt, Homo sapiens
  misc_RNA (1)...(19): siRNA sense strand
ucagaugacgccuguuaua

SEQ ID NO: 1253190 - RNA, 19 nt, Homo sapiens
  misc_RNA (1)...(19): siRNA sense strand
gaaaacacaccuuuaguga

SEQ ID NO: 1253191 - RNA, 19 nt, Homo sapiens
  misc_RNA (1)...(19): siRNA sense strand
gaugacgccuguuauagag

SEQ ID NO: 1253192 - RNA, 19 nt, Homo sapiens
  misc_RNA (1)...(19): siRNA sense strand
gagaaacauguccauauau

SEQ ID NO: 1253193 - RNA, 19 nt, Homo sapiens
  misc_RNA (1)...(19): siRNA sense strand
acgaguagauuauaagugu

SEQ ID NO: 1253194 - RNA, 19 nt, Homo sapiens
  misc_RNA (1)...(19): siRNA sense strand
cuacaaagcaacaguuaug

SEQ ID NO: 1253195 - RNA, 19 nt, Homo sapiens
  misc_RNA (1)...(19): siRNA sense strand
ccaccaacauuugaagcua

SEQ ID NO: 1253196 - RNA, 19 nt, Homo sapiens
  misc_RNA (1)...(19): siRNA sense strand
uauacgggauccuuuaaau

SEQ ID NO: 1253197 - RNA, 19 nt, Homo sapiens
  misc_RNA (1)...(19): siRNA sense strand
cgaguuugguuaucagaug

SEQ ID NO: 1253198 - RNA, 19 nt, Homo sapiens
  misc_RNA (1)...(19): siRNA sense strand
gaacgaguagauuauaagu

SEQ ID NO: 1253199 - RNA, 19 nt, Homo sapiens
  misc_RNA (1)...(19): siRNA sense strand
gugaggagccaccaacauu

SEQ ID NO: 1253200 - RNA, 19 nt, Homo sapiens
  misc_RNA (1)...(19): siRNA sense strand
gauggcagcgacacaauug

SEQ ID NO: 1253201 - RNA, 19 nt, Homo sapiens
  misc_RNA (1)...(19): siRNA sense strand
gcuauggagcucauuggua

SEQ ID NO: 1253202 - RNA, 19 nt, Homo sapiens
  misc_RNA (1)...(19): siRNA sense strand
gaggagccaccaacauuug

SEQ ID NO: 1253203 - RNA, 19 nt, Homo sapiens
  misc_RNA (1)...(19): siRNA sense strand
acacaccuuuagugaagua

SEQ ID NO: 1253204 - RNA, 19 nt, Homo sapiens
  misc_RNA (1)...(19): siRNA sense strand
ucucagaugacgccuguua

SEQ ID NO: 1253205 - RNA, 19 nt, Homo sapiens
  misc_RNA (1)...(19): siRNA sense strand
uagagaaacauguccauau

SEQ ID NO: 1253206 - RNA, 19 nt, Homo sapiens
  misc_RNA (1)...(19): siRNA sense strand
guuccaaagugucuuaaag

SEQ ID NO: 1253207 - RNA, 19 nt, Homo sapiens
  misc_RNA (1)...(19): siRNA sense strand
ggugaacgaguagauuaua

SEQ ID NO: 1253208 - RNA, 19 nt, Homo sapiens
  misc_RNA (1)...(19): siRNA sense strand
gaaguagaaguauuugagu

SEQ ID NO: 1253209 - RNA, 19 nt, Homo sapiens
  misc_RNA (1)...(19): siRNA sense strand
gaaacauguccauauauac

SEQ ID NO: 1253210 - RNA, 19 nt, Homo sapiens
  misc_RNA (1)...(19): siRNA sense strand
ugacgccuguuauagagaa

SEQ ID NO: 1253211 - RNA, 19 nt, Homo sapiens
  misc_RNA (1)...(19): siRNA sense strand
cgaguagauuauaagugua

SEQ ID NO: 1253212 - RNA, 19 nt, Homo sapiens
  misc_RNA (1)...(19): siRNA sense strand
gcacuuuauuuguaaugag

SEQ ID NO: 1253213 - RNA, 19 nt, Homo sapiens
  misc_RNA (1)...(19): siRNA sense strand
guagaaguauuugaguauc

SEQ ID NO: 1253214 - RNA, 19 nt, Homo sapiens
  misc_RNA (1)...(19): siRNA sense strand
guauuugaguaucuugaug

SEQ ID NO: 1253215 - RNA, 19 nt, Homo sapiens
  misc_RNA (1)...(19): siRNA sense strand
aggaauacuugacaguuug

SEQ ID NO: 1253216 - RNA, 19 nt, Homo sapiens
  misc_RNA (1)...(19): siRNA sense strand
ccaaaacccuacuaugaga

SEQ ID NO: 1253217 - RNA, 19 nt, Homo sapiens
  misc_RNA (1)...(19): siRNA sense strand
aguguaaaguggucaaaug

SEQ ID NO: 1253218 - RNA, 19 nt, Homo sapiens
  misc_RNA (1)...(19): siRNA sense strand
ccacccauacuauuuguga

SEQ ID NO: 1253219 - RNA, 19 nt, Homo sapiens
  misc_RNA (1)...(19): siRNA sense strand
caccaacauuugaagcuau

SEQ ID NO: 1253220 - RNA, 19 nt, Homo sapiens
  misc_RNA (1)...(19): siRNA sense strand
uuggagagagcacgauuua

SEQ ID NO: 1253221 - RNA, 19 nt, Homo sapiens
  misc_RNA (1)...(19): siRNA sense strand
gguuaucagaugcacuuua

SEQ ID NO: 1253222 - RNA, 19 nt, Homo sapiens
  misc_RNA (1)...(19): siRNA sense strand
ugaggagccaccaacauuu

SEQ ID NO: 1253223 - RNA, 19 nt, Homo sapiens
  misc_RNA (1)...(19): siRNA sense strand
ggaaggaauacuugacagu

SEQ ID NO: 1253224 - RNA, 19 nt, Homo sapiens
  misc_RNA (1)...(19): siRNA sense strand
gaggaaggaauacuugaca

SEQ ID NO: 1253225 - RNA, 19 nt, Homo sapiens
  misc_RNA (1)...(19): siRNA sense strand
ccaguuccaaagugucuua

SEQ ID NO: 1253226 - RNA, 19 nt, Homo sapiens
  misc_RNA (1)...(19): siRNA sense strand
ugaguaucuugaugcagua

SEQ ID NO: 1253227 - RNA, 19 nt, Homo sapiens
  misc_RNA (1)...(19): siRNA sense strand
caccuuuagugaaguagaa

SEQ ID NO: 1253228 - RNA, 19 nt, Homo sapiens
  misc_RNA (1)...(19): siRNA sense strand
acagauaucaggauuugga

SEQ ID NO: 1253229 - RNA, 19 nt, Homo sapiens
  misc_RNA (1)...(19): siRNA sense strand
ucauugcugugauuguuau

SEQ ID NO: 1253230 - RNA, 19 nt, Homo sapiens
  misc_RNA (1)...(19): siRNA sense strand
ucagaugcacuuuauuugu

SEQ ID NO: 1253231 - RNA, 19 nt, Homo sapiens
  misc_RNA (1)...(19): siRNA sense strand
gugcugcuccagaguguaa

SEQ ID NO: 1253232 - RNA, 19 nt, Homo sapiens
  misc_RNA (1)...(19): siRNA sense strand
ggaaaacacaccuuuagug

SEQ ID NO: 1253233 - RNA, 19 nt, Homo sapiens
  misc_RNA (1)...(19): siRNA sense strand
aaggaucaguagcaauuug

SEQ ID NO: 1253234 - RNA, 19 nt, Homo sapiens
  misc_RNA (1)...(19): siRNA sense strand
uauauacgggauccuuuaa

SEQ ID NO: 1253235 - RNA, 19 nt, Homo sapiens
  misc_RNA (1)...(19): siRNA sense strand
ugaaguagaaguauuugag

SEQ ID NO: 1253236 - RNA, 19 nt, Homo sapiens
  misc_RNA (1)...(19): siRNA sense strand
cuugacaguuuggauguuu

SEQ ID NO: 1253237 - RNA, 19 nt, Homo sapiens
  misc_RNA (1)...(19): siRNA sense strand
cauauauacgggauccuuu

SEQ ID NO: 1253238 - RNA, 19 nt, Homo sapiens
  misc_RNA (1)...(19): siRNA sense strand
auauauacgggauccuuua

SEQ ID NO: 1253239 - RNA, 19 nt, Homo sapiens
  misc_RNA (1)...(19): siRNA sense strand
cuuaaaggaucaguagcaa

SEQ ID NO: 1253240 - RNA, 19 nt, Homo sapiens
  misc_RNA (1)...(19): siRNA sense strand
uaaaccugaggaaggaaua

SEQ ID NO: 1253241 - RNA, 19 nt, Homo sapiens
  misc_RNA (1)...(19): siRNA sense strand
agaugacgccuguuauaga

SEQ ID NO: 1253242 - RNA, 19 nt, Homo sapiens
  misc_RNA (1)...(19): siRNA sense strand
ugugauuguuauugccaua

SEQ ID NO: 1253243 - RNA, 19 nt, Homo sapiens
  misc_RNA (1)...(19): siRNA sense strand
gagagcacgauuuauugug

SEQ ID NO: 1253244 - RNA, 19 nt, Homo sapiens
  misc_RNA (1)...(19): siRNA sense strand
gaaguauuugaguaucuug

SEQ ID NO: 1253245 - RNA, 19 nt, Homo sapiens
  misc_RNA (1)...(19): siRNA sense strand
ggcuaccugucucagauga

SEQ ID NO: 1253246 - RNA, 19 nt, Homo sapiens
  misc_RNA (1)...(19): siRNA sense strand
gauaucaggauuuggaaaa

SEQ ID NO: 1253247 - RNA, 19 nt, Homo sapiens
  misc_RNA (1)...(19): siRNA sense strand
ccucuugccacccauacua

SEQ ID NO: 1253248 - RNA, 19 nt, Homo sapiens
  misc_RNA (1)...(19): siRNA sense strand
ccaugguguugcugcugua

SEQ ID NO: 1253249 - RNA, 19 nt, Homo sapiens
  misc_RNA (1)...(19): siRNA sense strand
cagaugacgccuguuauag

SEQ ID NO: 1253250 - RNA, 19 nt, Homo sapiens
  misc_RNA (1)...(19): siRNA sense strand
uuggugaacgaguagauua

SEQ ID NO: 1253251 - RNA, 19 nt, Homo sapiens
  misc_RNA (1)...(19): siRNA sense strand
gucauugcugugauuguua

SEQ ID NO: 1253252 - RNA, 19 nt, Homo sapiens
  misc_RNA (1)...(19): siRNA sense strand
ggagccaccaacauuugaa

SEQ ID NO: 1253253 - RNA, 19 nt, Homo sapiens
  misc_RNA (1)...(19): siRNA sense strand
gcgcuuuccuggguugcuu

SEQ ID NO: 1253254 - RNA, 19 nt, Homo sapiens
  misc_RNA (1)...(19): siRNA sense strand
uacuacaaagcaacaguua

SEQ ID NO: 1253255 - RNA, 19 nt, Homo sapiens
  misc_RNA (1)...(19): siRNA sense strand
cuugaugcaguaacuuaua

SEQ ID NO: 1253256 - RNA, 19 nt, Homo sapiens
  misc_RNA (1)...(19): siRNA sense strand
aaacauguccauauauacg

SEQ ID NO: 1253257 - RNA, 19 nt, Homo sapiens
  misc_RNA (1)...(19): siRNA sense strand
guguaaaguggucaaaugu

SEQ ID NO: 1253258 - RNA, 19 nt, Homo sapiens
  misc_RNA (1)...(19): siRNA sense strand
cuuacgaguuugguuauca

SEQ ID NO: 1253259 - RNA, 19 nt, Homo sapiens
  misc_RNA (1)...(19): siRNA sense strand
uacgggauccuuuaaaugg

SEQ ID NO: 1253260 - RNA, 19 nt, Homo sapiens
  misc_RNA (1)...(19): siRNA sense strand
aaccaaaacccuacuauga

SEQ ID NO: 1253261 - RNA, 19 nt, Homo sapiens
  misc_RNA (1)...(19): siRNA sense strand
cccaauaugugaaaagguu

SEQ ID NO: 1253262 - RNA, 19 nt, Homo sapiens
  misc_RNA (1)...(19): siRNA sense strand
cgauggcagcgacacaauu

SEQ ID NO: 1253263 - RNA, 19 nt, Homo sapiens
  misc_RNA (1)...(19): siRNA sense strand
gauccauuuucacuuauug

SEQ ID NO: 1253264 - RNA, 19 nt, Homo sapiens
  misc_RNA (1)...(19): siRNA sense strand
uugaugcaguaacuuauag

SEQ ID NO: 1253265 - RNA, 19 nt, Homo sapiens
  misc_RNA (1)...(19): siRNA sense strand
guaucuugaugcaguaacu

SEQ ID NO: 1253266 - RNA, 19 nt, Homo sapiens
  misc_RNA (1)...(19): siRNA sense strand
caacauuugaagcuaugga

SEQ ID NO: 1253267 - RNA, 19 nt, Homo sapiens
  misc_RNA (1)...(19): siRNA sense strand
gagauuggugaacgaguag

SEQ ID NO: 1253268 - RNA, 19 nt, Homo sapiens
  misc_RNA (1)...(19): siRNA sense strand
ggagagagcacgauuuauu

SEQ ID NO: 1253269 - RNA, 19 nt, Homo sapiens
  misc_RNA (1)...(19): siRNA sense strand
agagaaacauguccauaua

SEQ ID NO: 1253270 - RNA, 19 nt, Homo sapiens
  misc_RNA (1)...(19): siRNA sense strand
cagaugcacuuuauuugua

SEQ ID NO: 1253271 - RNA, 19 nt, Homo sapiens
  misc_RNA (1)...(19): siRNA sense strand
ggacuuacgaguuugguua

SEQ ID NO: 1253272 - RNA, 19 nt, Homo sapiens
  misc_RNA (1)...(19): siRNA sense strand
aaacagauaucaggauuug

SEQ ID NO: 1253273 - RNA, 19 nt, Homo sapiens
  misc_RNA (1)...(19): siRNA sense strand
cuauggagcucauugguaa

SEQ ID NO: 1253274 - RNA, 19 nt, Homo sapiens
  misc_RNA (1)...(19): siRNA sense strand
aaacacaccuuuagugaag

SEQ ID NO: 1253275 - RNA, 19 nt, Homo sapiens
  misc_RNA (1)...(19): siRNA sense strand
gaacuuaaaggaucaguag

SEQ ID NO: 1253276 - RNA, 19 nt, Homo sapiens
  misc_RNA (1)...(19): siRNA sense strand
gaaaacagauaucaggauu

SEQ ID NO: 1253277 - RNA, 19 nt, Homo sapiens
  misc_RNA (1)...(19): siRNA sense strand
uaaaggaucaguagcaauu

SEQ ID NO: 1253278 - RNA, 19 nt, Homo sapiens
  misc_RNA (1)...(19): siRNA sense strand
aaaugggacuuacgaguuu

SEQ ID NO: 1253279 - RNA, 19 nt, Homo sapiens
  misc_RNA (1)...(19): siRNA sense strand
guuaucagaugcacuuuau

SEQ ID NO: 1253280 - RNA, 19 nt, Homo sapiens
  misc_RNA (1)...(19): siRNA sense strand
gagcugaauaugccacuua

SEQ ID NO: 1253281 - RNA, 19 nt, Homo sapiens
  misc_RNA (1)...(19): siRNA sense strand
gagcagagaggcugaauag

SEQ ID NO: 1253282 - RNA, 19 nt, Homo sapiens
  misc_RNA (1)...(19): siRNA sense strand
ugagauuggugaacgagua

SEQ ID NO: 1253283 - RNA, 19 nt, Homo sapiens
  misc_RNA (1)...(19): siRNA sense strand
gugaacgaguagauuauaa

SEQ ID NO: 1253284 - RNA, 19 nt, Homo sapiens
  misc_RNA (1)...(19): siRNA sense strand
gagagagcacgauuuauug

SEQ ID NO: 1253285 - RNA, 19 nt, Homo sapiens
  misc_RNA (1)...(19): siRNA sense strand
caaaugggacuuacgaguu

SEQ ID NO: 1253286 - RNA, 19 nt, Homo sapiens
  misc_RNA (1)...(19): siRNA sense strand
ggucauugcugugauuguu

SEQ ID NO: 1253287 - RNA, 19 nt, Homo sapiens
  misc_RNA (1)...(19): siRNA sense strand
ccagauccauuuucacuua

SEQ ID NO: 1253288 - RNA, 19 nt, Homo sapiens
  misc_RNA (1)...(19): siRNA sense strand
gaaggaauacuugacaguu

SEQ ID NO: 1253289 - RNA, 19 nt, Homo sapiens
  misc_RNA (1)...(19): siRNA sense strand
aaggaauacuugacaguuu

SEQ ID NO: 1253290 - RNA, 19 nt, Homo sapiens
  misc_RNA (1)...(19): siRNA sense strand
ucagaugacgccuguuaua

SEQ ID NO: 1253291 - RNA, 19 nt, Homo sapiens
  misc_RNA (1)...(19): siRNA sense strand
gaaaacacaccuuuaguga

SEQ ID NO: 1253292 - RNA, 19 nt, Homo sapiens
  misc_RNA (1)...(19): siRNA sense strand
gaugacgccuguuauagag

SEQ ID NO: 1253293 - RNA, 19 nt, Homo sapiens
  misc_RNA (1)...(19): siRNA sense strand
gagaaacauguccauauau

SEQ ID NO: 1253294 - RNA, 19 nt, Homo sapiens
  misc_RNA (1)...(19): siRNA sense strand
ccacuuaccagacuaaauc

SEQ ID NO: 1253295 - RNA, 19 nt, Homo sapiens
  misc_RNA (1)...(19): siRNA sense strand
acgaguagauuauaagugu

SEQ ID NO: 1253296 - RNA, 19 nt, Homo sapiens
  misc_RNA (1)...(19): siRNA sense strand
cuacaaagcaacaguuaug

SEQ ID NO: 1253297 - RNA, 19 nt, Homo sapiens
  misc_RNA (1)...(19): siRNA sense strand
ccaccaacauuugaagcua

SEQ ID NO: 1253298 - RNA, 19 nt, Homo sapiens
  misc_RNA (1)...(19): siRNA sense strand
uauacgggauccuuuaaau

SEQ ID NO: 1253299 - RNA, 19 nt, Homo sapiens
  misc_RNA (1)...(19): siRNA sense strand
cgaguuugguuaucagaug

SEQ ID NO: 1253300 - RNA, 19 nt, Homo sapiens
  misc_RNA (1)...(19): siRNA sense strand
gaacgaguagauuauaagu

SEQ ID NO: 1253301 - RNA, 19 nt, Homo sapiens
  misc_RNA (1)...(19): siRNA sense strand
gugaggagccaccaacauu

SEQ ID NO: 1253302 - RNA, 19 nt, Homo sapiens
  misc_RNA (1)...(19): siRNA sense strand
gauggcagcgacacaauug

SEQ ID NO: 1253303 - RNA, 19 nt, Homo sapiens
  misc_RNA (1)...(19): siRNA sense strand
ucucagaugacgccuguua

SEQ ID NO: 1253304 - RNA, 19 nt, Homo sapiens
  misc_RNA (1)...(19): siRNA sense strand
acacaccuuuagugaagua

SEQ ID NO: 1253305 - RNA, 19 nt, Homo sapiens
  misc_RNA (1)...(19): siRNA sense strand
gcuauggagcucauuggua

SEQ ID NO: 1253306 - RNA, 19 nt, Homo sapiens
  misc_RNA (1)...(19): siRNA sense strand
gaggagccaccaacauuug

SEQ ID NO: 1253307 - RNA, 19 nt, Homo sapiens
  misc_RNA (1)...(19): siRNA sense strand
uagagaaacauguccauau

SEQ ID NO: 1253308 - RNA, 19 nt, Homo sapiens
  misc_RNA (1)...(19): siRNA sense strand
ggugaacgaguagauuaua

SEQ ID NO: 1253309 - RNA, 19 nt, Homo sapiens
  misc_RNA (1)...(19): siRNA sense strand
gaaguagaaguauuugagu

SEQ ID NO: 1253310 - RNA, 19 nt, Homo sapiens
  misc_RNA (1)...(19): siRNA sense strand
gaaacauguccauauauac

SEQ ID NO: 1253311 - RNA, 19 nt, Homo sapiens
  misc_RNA (1)...(19): siRNA sense strand
ugacgccuguuauagagaa

SEQ ID NO: 1253312 - RNA, 19 nt, Homo sapiens
  misc_RNA (1)...(19): siRNA sense strand
cgaguagauuauaagugua

SEQ ID NO: 1253313 - RNA, 19 nt, Homo sapiens
  misc_RNA (1)...(19): siRNA sense strand
gcacuuuauuuguaaugag

SEQ ID NO: 1253314 - RNA, 19 nt, Homo sapiens
  misc_RNA (1)...(19): siRNA sense strand
guagaaguauuugaguauc

SEQ ID NO: 1253315 - RNA, 19 nt, Homo sapiens
  misc_RNA (1)...(19): siRNA sense strand
guauuugaguaucuugaug

SEQ ID NO: 1253316 - RNA, 19 nt, Homo sapiens
  misc_RNA (1)...(19): siRNA sense strand
aggaauacuugacaguuug

SEQ ID NO: 1253317 - RNA, 19 nt, Homo sapiens
  misc_RNA (1)...(19): siRNA sense strand
ccaaaacccuacuaugaga

SEQ ID NO: 1253318 - RNA, 19 nt, Homo sapiens
  misc_RNA (1)...(19): siRNA sense strand
aguguaaaguggucaaaug

SEQ ID NO: 1253319 - RNA, 19 nt, Homo sapiens
  misc_RNA (1)...(19): siRNA sense strand
ccacccauacuauuuguga

SEQ ID NO: 1253320 - RNA, 19 nt, Homo sapiens
  misc_RNA (1)...(19): siRNA sense strand
uuggagagagcacgauuua

SEQ ID NO: 1253321 - RNA, 19 nt, Homo sapiens
  misc_RNA (1)...(19): siRNA sense strand
gguuaucagaugcacuuua

SEQ ID NO: 1253322 - RNA, 19 nt, Homo sapiens
  misc_RNA (1)...(19): siRNA sense strand
caccaacauuugaagcuau

SEQ ID NO: 1253323 - RNA, 19 nt, Homo sapiens
  misc_RNA (1)...(19): siRNA sense strand
ugaggagccaccaacauuu

SEQ ID NO: 1253324 - RNA, 19 nt, Homo sapiens
  misc_RNA (1)...(19): siRNA sense strand
ggaaggaauacuugacagu

SEQ ID NO: 1253325 - RNA, 19 nt, Homo sapiens
  misc_RNA (1)...(19): siRNA sense strand
gaggaaggaauacuugaca

SEQ ID NO: 1253326 - RNA, 19 nt, Homo sapiens
  misc_RNA (1)...(19): siRNA sense strand
ugaguaucuugaugcagua

SEQ ID NO: 1253327 - RNA, 19 nt, Homo sapiens
  misc_RNA (1)...(19): siRNA sense strand
caccuuuagugaaguagaa

SEQ ID NO: 1253328 - RNA, 19 nt, Homo sapiens
  misc_RNA (1)...(19): siRNA sense strand
acagauaucaggauuugga

SEQ ID NO: 1253329 - RNA, 19 nt, Homo sapiens
  misc_RNA (1)...(19): siRNA sense strand
ucauugcugugauuguuau

SEQ ID NO: 1253330 - RNA, 19 nt, Homo sapiens
  misc_RNA (1)...(19): siRNA sense strand
ucagaugcacuuuauuugu

SEQ ID NO: 1253331 - RNA, 19 nt, Homo sapiens
  misc_RNA (1)...(19): siRNA sense strand
gugcugcuccagaguguaa

SEQ ID NO: 1253332 - RNA, 19 nt, Homo sapiens
  misc_RNA (1)...(19): siRNA sense strand
ggaaaacacaccuuuagug

SEQ ID NO: 1253333 - RNA, 19 nt, Homo sapiens
  misc_RNA (1)...(19): siRNA sense strand
aaggaucaguagcaauuug

SEQ ID NO: 1253334 - RNA, 19 nt, Homo sapiens
  misc_RNA (1)...(19): siRNA sense strand
uauauacgggauccuuuaa

SEQ ID NO: 1253335 - RNA, 19 nt, Homo sapiens
  misc_RNA (1)...(19): siRNA sense strand
ugaaguagaaguauuugag

SEQ ID NO: 1253336 - RNA, 19 nt, Homo sapiens
  misc_RNA (1)...(19): siRNA sense strand
cuugacaguuuggauguuu

SEQ ID NO: 1253337 - RNA, 19 nt, Homo sapiens
  misc_RNA (1)...(19): siRNA sense strand
cauauauacgggauccuuu

SEQ ID NO: 1253338 - RNA, 19 nt, Homo sapiens
  misc_RNA (1)...(19): siRNA sense strand
auauauacgggauccuuua

SEQ ID NO: 1253339 - RNA, 19 nt, Homo sapiens
  misc_RNA (1)...(19): siRNA sense strand
cuuaaaggaucaguagcaa

SEQ ID NO: 1253340 - RNA, 19 nt, Homo sapiens
  misc_RNA (1)...(19): siRNA sense strand
uaaaccugaggaaggaaua

SEQ ID NO: 1253341 - RNA, 19 nt, Homo sapiens
  misc_RNA (1)...(19): siRNA sense strand
agaugacgccuguuauaga

SEQ ID NO: 1253342 - RNA, 19 nt, Homo sapiens
  misc_RNA (1)...(19): siRNA sense strand
ugugauuguuauugccaua

SEQ ID NO: 1253343 - RNA, 19 nt, Homo sapiens
  misc_RNA (1)...(19): siRNA sense strand
gagagcacgauuuauugug

SEQ ID NO: 1253344 - RNA, 19 nt, Homo sapiens
  misc_RNA (1)...(19): siRNA sense strand
gaaguauuugaguaucuug

SEQ ID NO: 1253345 - RNA, 19 nt, Homo sapiens
  misc_RNA (1)...(19): siRNA sense strand
ggcuaccugucucagauga

SEQ ID NO: 1253346 - RNA, 19 nt, Homo sapiens
  misc_RNA (1)...(19): siRNA sense strand
gauaucaggauuuggaaaa

SEQ ID NO: 1253347 - RNA, 19 nt, Homo sapiens
  misc_RNA (1)...(19): siRNA sense strand
ccucuugccacccauacua

SEQ ID NO: 1253348 - RNA, 19 nt, Homo sapiens
  misc_RNA (1)...(19): siRNA sense strand
ccaugguguugcugcugua

SEQ ID NO: 1253349 - RNA, 19 nt, Homo sapiens
  misc_RNA (1)...(19): siRNA sense strand
cagaugacgccuguuauag

SEQ ID NO: 1253350 - RNA, 19 nt, Homo sapiens
  misc_RNA (1)...(19): siRNA sense strand
cagaugguggagcugaaua

SEQ ID NO: 1253351 - RNA, 19 nt, Homo sapiens
  misc_RNA (1)...(19): siRNA sense strand
gucauugcugugauuguua

SEQ ID NO: 1253352 - RNA, 19 nt, Homo sapiens
  misc_RNA (1)...(19): siRNA sense strand
ggagccaccaacauuugaa

SEQ ID NO: 1253353 - RNA, 19 nt, Homo sapiens
  misc_RNA (1)...(19): siRNA sense strand
uuggugaacgaguagauua

SEQ ID NO: 1253354 - RNA, 19 nt, Homo sapiens
  misc_RNA (1)...(19): siRNA sense strand
gcgcuuuccuggguugcuu

SEQ ID NO: 1253355 - RNA, 19 nt, Homo sapiens
  misc_RNA (1)...(19): siRNA sense strand
uacuacaaagcaacaguua

SEQ ID NO: 1253356 - RNA, 19 nt, Homo sapiens
  misc_RNA (1)...(19): siRNA sense strand
cuugaugcaguaacuuaua

SEQ ID NO: 1253357 - RNA, 19 nt, Homo sapiens
  misc_RNA (1)...(19): siRNA sense strand
aaacauguccauauauacg

SEQ ID NO: 1253358 - RNA, 19 nt, Homo sapiens
  misc_RNA (1)...(19): siRNA sense strand
guguaaaguggucaaaugu

SEQ ID NO: 1253359 - RNA, 19 nt, Homo sapiens
  misc_RNA (1)...(19): siRNA sense strand
cuuacgaguuugguuauca

SEQ ID NO: 1253360 - RNA, 19 nt, Homo sapiens
  misc_RNA (1)...(19): siRNA sense strand
uacgggauccuuuaaaugg

SEQ ID NO: 1253361 - RNA, 19 nt, Homo sapiens
  misc_RNA (1)...(19): siRNA sense strand
gcagaugguggagcugaau

SEQ ID NO: 1253362 - RNA, 19 nt, Homo sapiens
  misc_RNA (1)...(19): siRNA sense strand
aaccaaaacccuacuauga

SEQ ID NO: 1253363 - RNA, 19 nt, Homo sapiens
  misc_RNA (1)...(19): siRNA sense strand
uugaugcaguaacuuauag

SEQ ID NO: 1253364 - RNA, 19 nt, Homo sapiens
  misc_RNA (1)...(19): siRNA sense strand
ggagcugaauaugccacuu

SEQ ID NO: 1253365 - RNA, 19 nt, Homo sapiens
  misc_RNA (1)...(19): siRNA sense strand
caacauuugaagcuaugga

SEQ ID NO: 1253366 - RNA, 19 nt, Homo sapiens
  misc_RNA (1)...(19): siRNA sense strand
cgauggcagcgacacaauu

SEQ ID NO: 1253367 - RNA, 19 nt, Homo sapiens
  misc_RNA (1)...(19): siRNA sense strand
gauccauuuucacuuauug

SEQ ID NO: 1253368 - RNA, 19 nt, Homo sapiens
  misc_RNA (1)...(19): siRNA sense strand
ggagagagcacgauuuauu

SEQ ID NO: 1253369 - RNA, 19 nt, Homo sapiens
  misc_RNA (1)...(19): siRNA sense strand
agagaaacauguccauaua

SEQ ID NO: 1253370 - RNA, 19 nt, Homo sapiens
  misc_RNA (1)...(19): siRNA sense strand
cagaugcacuuuauuugua

SEQ ID NO: 1253371 - RNA, 19 nt, Homo sapiens
  misc_RNA (1)...(19): siRNA sense strand
ggacuuacgaguuugguua

SEQ ID NO: 1253372 - RNA, 19 nt, Homo sapiens
  misc_RNA (1)...(19): siRNA sense strand
aaacagauaucaggauuug

SEQ ID NO: 1253373 - RNA, 19 nt, Homo sapiens
  misc_RNA (1)...(19): siRNA sense strand
cuauggagcucauugguaa

SEQ ID NO: 1253374 - RNA, 19 nt, Homo sapiens
  misc_RNA (1)...(19): siRNA sense strand
aaacacaccuuuagugaag

SEQ ID NO: 1253375 - RNA, 19 nt, Homo sapiens
  misc_RNA (1)...(19): siRNA sense strand
gaacuuaaaggaucaguag

SEQ ID NO: 1253376 - RNA, 19 nt, Homo sapiens
  misc_RNA (1)...(19): siRNA sense strand
gaaaacagauaucaggauu

SEQ ID NO: 1253377 - RNA, 19 nt, Homo sapiens
  misc_RNA (1)...(19): siRNA sense strand
uaaaggaucaguagcaauu

SEQ ID NO: 1253378 - RNA, 19 nt, Homo sapiens
  misc_RNA (1)...(19): siRNA sense strand
aaaugggacuuacgaguuu

SEQ ID NO: 1253379 - RNA, 19 nt, Homo sapiens
  misc_RNA (1)...(19): siRNA sense strand
guuaucagaugcacuuuau

SEQ ID NO: 1253380 - RNA, 19 nt, Homo sapiens
  misc_RNA (1)...(19): siRNA sense strand
gagcugaauaugccacuua

SEQ ID NO: 1253381 - RNA, 19 nt, Homo sapiens
  misc_RNA (1)...(19): siRNA sense strand
ugagauuggugaacgagua

SEQ ID NO: 1253382 - RNA, 19 nt, Homo sapiens
  misc_RNA (1)...(19): siRNA sense strand
gugaacgaguagauuauaa

SEQ ID NO: 1253383 - RNA, 19 nt, Homo sapiens
  misc_RNA (1)...(19): siRNA sense strand
gagagagcacgauuuauug

SEQ ID NO: 1253384 - RNA, 19 nt, Homo sapiens
  misc_RNA (1)...(19): siRNA sense strand
caaaugggacuuacgaguu

SEQ ID NO: 1253385 - RNA, 19 nt, Homo sapiens
  misc_RNA (1)...(19): siRNA sense strand
ggucauugcugugauuguu

SEQ ID NO: 1253386 - RNA, 19 nt, Homo sapiens
  misc_RNA (1)...(19): siRNA sense strand
ccagauccauuuucacuua

SEQ ID NO: 1253387 - RNA, 19 nt, Homo sapiens
  misc_RNA (1)...(19): siRNA sense strand
gaaggaauacuugacaguu

SEQ ID NO: 1253388 - RNA, 19 nt, Homo sapiens
  misc_RNA (1)...(19): siRNA sense strand
aaggaauacuugacaguuu

SEQ ID NO: 1253389 - RNA, 19 nt, Homo sapiens
  misc_RNA (1)...(19): siRNA sense strand
ucagaugacgccuguuaua

SEQ ID NO: 1253390 - RNA, 19 nt, Homo sapiens
  misc_RNA (1)...(19): siRNA sense strand
gaaaacacaccuuuaguga

SEQ ID NO: 1253391 - RNA, 19 nt, Homo sapiens
  misc_RNA (1)...(19): siRNA sense strand
gaugacgccuguuauagag

SEQ ID NO: 1253392 - RNA, 19 nt, Homo sapiens
  misc_RNA (1)...(19): siRNA sense strand
gagaaacauguccauauau

SEQ ID NO: 1253393 - RNA, 19 nt, Homo sapiens
  misc_RNA (1)...(19): siRNA sense strand
ccacuuaccagacuaaauc

SEQ ID NO: 1253394 - RNA, 19 nt, Homo sapiens
  misc_RNA (1)...(19): siRNA sense strand
acgaguagauuauaagugu

SEQ ID NO: 1253395 - RNA, 19 nt, Homo sapiens
  misc_RNA (1)...(19): siRNA sense strand
cuacaaagcaacaguuaug

SEQ ID NO: 1253396 - RNA, 19 nt, Homo sapiens
  misc_RNA (1)...(19): siRNA sense strand
ccaccaacauuugaagcua

SEQ ID NO: 1253397 - RNA, 19 nt, Homo sapiens
  misc_RNA (1)...(19): siRNA sense strand
uauacgggauccuuuaaau

SEQ ID NO: 1253398 - RNA, 19 nt, Homo sapiens
  misc_RNA (1)...(19): siRNA sense strand
cgaguuugguuaucagaug

SEQ ID NO: 1253399 - RNA, 19 nt, Homo sapiens
  misc_RNA (1)...(19): siRNA sense strand
gaacgaguagauuauaagu

SEQ ID NO: 1253400 - RNA, 19 nt, Homo sapiens
  misc_RNA (1)...(19): siRNA sense strand
gugaggagccaccaacauu

SEQ ID NO: 1253401 - RNA, 19 nt, Homo sapiens
  misc_RNA (1)...(19): siRNA sense strand
gauggcagcgacacaauug

SEQ ID NO: 1253402 - RNA, 19 nt, Homo sapiens
  misc_RNA (1)...(19): siRNA sense strand
ucucagaugacgccuguua

SEQ ID NO: 1253403 - RNA, 19 nt, Homo sapiens
  misc_RNA (1)...(19): siRNA sense strand
gaggagccaccaacauuug

SEQ ID NO: 1253404 - RNA, 19 nt, Homo sapiens
  misc_RNA (1)...(19): siRNA sense strand
gcuauggagcucauuggua

SEQ ID NO: 1253405 - RNA, 19 nt, Homo sapiens
  misc_RNA (1)...(19): siRNA sense strand
acacaccuuuagugaagua

SEQ ID NO: 1253406 - RNA, 19 nt, Homo sapiens
  misc_RNA (1)...(19): siRNA sense strand
uagagaaacauguccauau

SEQ ID NO: 1253407 - RNA, 19 nt, Homo sapiens
  misc_RNA (1)...(19): siRNA sense strand
guuccaaagugucuuaaag

SEQ ID NO: 1253408 - RNA, 19 nt, Homo sapiens
  misc_RNA (1)...(19): siRNA sense strand
ggugaacgaguagauuaua

SEQ ID NO: 1253409 - RNA, 19 nt, Homo sapiens
  misc_RNA (1)...(19): siRNA sense strand
gaaguagaaguauuugagu

SEQ ID NO: 1253410 - RNA, 19 nt, Homo sapiens
  misc_RNA (1)...(19): siRNA sense strand
gaaacauguccauauauac

SEQ ID NO: 1253411 - RNA, 19 nt, Homo sapiens
  misc_RNA (1)...(19): siRNA sense strand
ugacgccuguuauagagaa

SEQ ID NO: 1253412 - RNA, 19 nt, Homo sapiens
  misc_RNA (1)...(19): siRNA sense strand
cgaguagauuauaagugua

SEQ ID NO: 1253413 - RNA, 19 nt, Homo sapiens
  misc_RNA (1)...(19): siRNA sense strand
gcacuuuauuuguaaugag

SEQ ID NO: 1253414 - RNA, 19 nt, Homo sapiens
  misc_RNA (1)...(19): siRNA sense strand
guagaaguauuugaguauc

SEQ ID NO: 1253415 - RNA, 19 nt, Homo sapiens
  misc_RNA (1)...(19): siRNA sense strand
guauuugaguaucuugaug

SEQ ID NO: 1253416 - RNA, 19 nt, Homo sapiens
  misc_RNA (1)...(19): siRNA sense strand
aggaauacuugacaguuug

SEQ ID NO: 1253417 - RNA, 19 nt, Homo sapiens
  misc_RNA (1)...(19): siRNA sense strand
ccaaaacccuacuaugaga

SEQ ID NO: 1253418 - RNA, 19 nt, Homo sapiens
  misc_RNA (1)...(19): siRNA sense strand
aguguaaaguggucaaaug

SEQ ID NO: 1253419 - RNA, 19 nt, Homo sapiens
  misc_RNA (1)...(19): siRNA sense strand
ccacccauacuauuuguga

SEQ ID NO: 1253420 - RNA, 19 nt, Homo sapiens
  misc_RNA (1)...(19): siRNA sense strand
uuggagagagcacgauuua

SEQ ID NO: 1253421 - RNA, 19 nt, Homo sapiens
  misc_RNA (1)...(19): siRNA sense strand
gguuaucagaugcacuuua

SEQ ID NO: 1253422 - RNA, 19 nt, Homo sapiens
  misc_RNA (1)...(19): siRNA sense strand
caccaacauuugaagcuau

SEQ ID NO: 1253423 - RNA, 19 nt, Homo sapiens
  misc_RNA (1)...(19): siRNA sense strand
ugaggagccaccaacauuu

SEQ ID NO: 1253424 - RNA, 19 nt, Homo sapiens
  misc_RNA (1)...(19): siRNA sense strand
ggaaggaauacuugacagu

SEQ ID NO: 1253425 - RNA, 19 nt, Homo sapiens
  misc_RNA (1)...(19): siRNA sense strand
gaggaaggaauacuugaca

SEQ ID NO: 1253426 - RNA, 19 nt, Homo sapiens
  misc_RNA (1)...(19): siRNA sense strand
ccaguuccaaagugucuua

SEQ ID NO: 1253427 - RNA, 19 nt, Homo sapiens
  misc_RNA (1)...(19): siRNA sense strand
ugaguaucuugaugcagua

SEQ ID NO: 1253428 - RNA, 19 nt, Homo sapiens
  misc_RNA (1)...(19): siRNA sense strand
caccuuuagugaaguagaa

SEQ ID NO: 1253429 - RNA, 19 nt, Homo sapiens
  misc_RNA (1)...(19): siRNA sense strand
acagauaucaggauuugga

SEQ ID NO: 1253430 - RNA, 19 nt, Homo sapiens
  misc_RNA (1)...(19): siRNA sense strand
ucauugcugugauuguuau

SEQ ID NO: 1253431 - RNA, 19 nt, Homo sapiens
  misc_RNA (1)...(19): siRNA sense strand
ucagaugcacuuuauuugu

SEQ ID NO: 1253432 - RNA, 19 nt, Homo sapiens
  misc_RNA (1)...(19): siRNA sense strand
gugcugcuccagaguguaa

SEQ ID NO: 1253433 - RNA, 19 nt, Homo sapiens
  misc_RNA (1)...(19): siRNA sense strand
ggaaaacacaccuuuagug

SEQ ID NO: 1253434 - RNA, 19 nt, Homo sapiens
  misc_RNA (1)...(19): siRNA sense strand
aaggaucaguagcaauuug

SEQ ID NO: 1253435 - RNA, 19 nt, Homo sapiens
  misc_RNA (1)...(19): siRNA sense strand
uauauacgggauccuuuaa

SEQ ID NO: 1253436 - RNA, 19 nt, Homo sapiens
  misc_RNA (1)...(19): siRNA sense strand
ugaaguagaaguauuugag

SEQ ID NO: 1253437 - RNA, 19 nt, Homo sapiens
  misc_RNA (1)...(19): siRNA sense strand
cuugacaguuuggauguuu

SEQ ID NO: 1253438 - RNA, 19 nt, Homo sapiens
  misc_RNA (1)...(19): siRNA sense strand
cauauauacgggauccuuu

SEQ ID NO: 1253439 - RNA, 19 nt, Homo sapiens
  misc_RNA (1)...(19): siRNA sense strand
auauauacgggauccuuua

SEQ ID NO: 1253440 - RNA, 19 nt, Homo sapiens
  misc_RNA (1)...(19): siRNA sense strand
cuuaaaggaucaguagcaa

SEQ ID NO: 1253441 - RNA, 19 nt, Homo sapiens
  misc_RNA (1)...(19): siRNA sense strand
uaaaccugaggaaggaaua

SEQ ID NO: 1253442 - RNA, 19 nt, Homo sapiens
  misc_RNA (1)...(19): siRNA sense strand
agaugacgccuguuauaga

SEQ ID NO: 1253443 - RNA, 19 nt, Homo sapiens
  misc_RNA (1)...(19): siRNA sense strand
ugugauuguuauugccaua

SEQ ID NO: 1253444 - RNA, 19 nt, Homo sapiens
  misc_RNA (1)...(19): siRNA sense strand
gagagcacgauuuauugug

SEQ ID NO: 1253445 - RNA, 19 nt, Homo sapiens
  misc_RNA (1)...(19): siRNA sense strand
gaaguauuugaguaucuug

SEQ ID NO: 1253446 - RNA, 19 nt, Homo sapiens
  misc_RNA (1)...(19): siRNA sense strand
ggcuaccugucucagauga

SEQ ID NO: 1253447 - RNA, 19 nt, Homo sapiens
  misc_RNA (1)...(19): siRNA sense strand
gauaucaggauuuggaaaa

SEQ ID NO: 1253448 - RNA, 19 nt, Homo sapiens
  misc_RNA (1)...(19): siRNA sense strand
ccucuugccacccauacua

SEQ ID NO: 1253449 - RNA, 19 nt, Homo sapiens
  misc_RNA (1)...(19): siRNA sense strand
ccaugguguugcugcugua

SEQ ID NO: 1253450 - RNA, 19 nt, Homo sapiens
  misc_RNA (1)...(19): siRNA sense strand
cagaugacgccuguuauag

SEQ ID NO: 1253451 - RNA, 19 nt, Homo sapiens
  misc_RNA (1)...(19): siRNA sense strand
cagaugguggagcugaaua

SEQ ID NO: 1253452 - RNA, 19 nt, Homo sapiens
  misc_RNA (1)...(19): siRNA sense strand
gucauugcugugauuguua

SEQ ID NO: 1253453 - RNA, 19 nt, Homo sapiens
  misc_RNA (1)...(19): siRNA sense strand
ggagccaccaacauuugaa

SEQ ID NO: 1253454 - RNA, 19 nt, Homo sapiens
  misc_RNA (1)...(19): siRNA sense strand
uuggugaacgaguagauua

SEQ ID NO: 1253455 - RNA, 19 nt, Homo sapiens
  misc_RNA (1)...(19): siRNA sense strand
gcgcuuuccuggguugcuu

SEQ ID NO: 1253456 - RNA, 19 nt, Homo sapiens
  misc_RNA (1)...(19): siRNA sense strand
uacuacaaagcaacaguua

SEQ ID NO: 1253457 - RNA, 19 nt, Homo sapiens
  misc_RNA (1)...(19): siRNA sense strand
cuugaugcaguaacuuaua

SEQ ID NO: 1253458 - RNA, 19 nt, Homo sapiens
  misc_RNA (1)...(19): siRNA sense strand
aaacauguccauauauacg

SEQ ID NO: 1253459 - RNA, 19 nt, Homo sapiens
  misc_RNA (1)...(19): siRNA sense strand
guguaaaguggucaaaugu

SEQ ID NO: 1253460 - RNA, 19 nt, Homo sapiens
  misc_RNA (1)...(19): siRNA sense strand
cuuacgaguuugguuauca

SEQ ID NO: 1253461 - RNA, 19 nt, Homo sapiens
  misc_RNA (1)...(19): siRNA sense strand
uacgggauccuuuaaaugg

SEQ ID NO: 1253462 - RNA, 19 nt, Homo sapiens
  misc_RNA (1)...(19): siRNA sense strand
gcagaugguggagcugaau

SEQ ID NO: 1253463 - RNA, 19 nt, Homo sapiens
  misc_RNA (1)...(19): siRNA sense strand
aaccaaaacccuacuauga

SEQ ID NO: 1253464 - RNA, 19 nt, Homo sapiens
  misc_RNA (1)...(19): siRNA sense strand
uugaugcaguaacuuauag

SEQ ID NO: 1253465 - RNA, 19 nt, Homo sapiens
  misc_RNA (1)...(19): siRNA sense strand
ggagcugaauaugccacuu

SEQ ID NO: 1253466 - RNA, 19 nt, Homo sapiens
  misc_RNA (1)...(19): siRNA sense strand
cgauggcagcgacacaauu

SEQ ID NO: 1253467 - RNA, 19 nt, Homo sapiens
  misc_RNA (1)...(19): siRNA sense strand
gauccauuuucacuuauug

SEQ ID NO: 1253468 - RNA, 19 nt, Homo sapiens
  misc_RNA (1)...(19): siRNA sense strand
ggagagagcacgauuuauu

SEQ ID NO: 1253469 - RNA, 19 nt, Homo sapiens
  misc_RNA (1)...(19): siRNA sense strand
agagaaacauguccauaua

SEQ ID NO: 1253470 - RNA, 19 nt, Homo sapiens
  misc_RNA (1)...(19): siRNA sense strand
cagaugcacuuuauuugua

SEQ ID NO: 1253471 - RNA, 19 nt, Homo sapiens
  misc_RNA (1)...(19): siRNA sense strand
ggacuuacgaguuugguua

SEQ ID NO: 1253472 - RNA, 19 nt, Homo sapiens
  misc_RNA (1)...(19): siRNA sense strand
aaacagauaucaggauuug

SEQ ID NO: 1253473 - RNA, 19 nt, Homo sapiens
  misc_RNA (1)...(19): siRNA sense strand
cuauggagcucauugguaa

SEQ ID NO: 1253474 - RNA, 19 nt, Homo sapiens
  misc_RNA (1)...(19): siRNA sense strand
aaacacaccuuuagugaag

SEQ ID NO: 1253475 - RNA, 19 nt, Homo sapiens
  misc_RNA (1)...(19): siRNA sense strand
gaacuuaaaggaucaguag

SEQ ID NO: 1253476 - RNA, 19 nt, Homo sapiens
  misc_RNA (1)...(19): siRNA sense strand
gaaaacagauaucaggauu

SEQ ID NO: 1253477 - RNA, 19 nt, Homo sapiens
  misc_RNA (1)...(19): siRNA sense strand
uaaaggaucaguagcaauu

SEQ ID NO: 1253478 - RNA, 19 nt, Homo sapiens
  misc_RNA (1)...(19): siRNA sense strand
aaaugggacuuacgaguuu

SEQ ID NO: 1253479 - RNA, 19 nt, Homo sapiens
  misc_RNA (1)...(19): siRNA sense strand
guuaucagaugcacuuuau

SEQ ID NO: 1253480 - RNA, 19 nt, Homo sapiens
  misc_RNA (1)...(19): siRNA sense strand
gagcugaauaugccacuua

SEQ ID NO: 1253481 - RNA, 19 nt, Homo sapiens
  misc_RNA (1)...(19): siRNA sense strand
ugagauuggugaacgagua

SEQ ID NO: 1253482 - RNA, 19 nt, Homo sapiens
  misc_RNA (1)...(19): siRNA sense strand
gugaacgaguagauuauaa

SEQ ID NO: 1253483 - RNA, 19 nt, Homo sapiens
  misc_RNA (1)...(19): siRNA sense strand
gagagagcacgauuuauug

SEQ ID NO: 1253484 - RNA, 19 nt, Homo sapiens
  misc_RNA (1)...(19): siRNA sense strand
caaaugggacuuacgaguu

SEQ ID NO: 1253485 - RNA, 19 nt, Homo sapiens
  misc_RNA (1)...(19): siRNA sense strand
ggucauugcugugauuguu

SEQ ID NO: 1253486 - RNA, 19 nt, Homo sapiens
  misc_RNA (1)...(19): siRNA sense strand
ccagauccauuuucacuua

SEQ ID NO: 1253487 - RNA, 19 nt, Homo sapiens
  misc_RNA (1)...(19): siRNA sense strand
gaaggaauacuugacaguu

SEQ ID NO: 1253488 - RNA, 19 nt, Homo sapiens
  misc_RNA (1)...(19): siRNA sense strand
aaggaauacuugacaguuu

SEQ ID NO: 1253489 - RNA, 19 nt, Homo sapiens
  misc_RNA (1)...(19): siRNA sense strand
ucagaugacgccuguuaua

SEQ ID NO: 1253490 - RNA, 19 nt, Homo sapiens
  misc_RNA (1)...(19): siRNA sense strand
gaaaacacaccuuuaguga

SEQ ID NO: 1253491 - RNA, 19 nt, Homo sapiens
  misc_RNA (1)...(19): siRNA sense strand
gaugacgccuguuauagag

SEQ ID NO: 1253492 - RNA, 19 nt, Homo sapiens
  misc_RNA (1)...(19): siRNA sense strand
gagaaacauguccauauau

SEQ ID NO: 1253493 - RNA, 19 nt, Homo sapiens
  misc_RNA (1)...(19): siRNA sense strand
ccacuuaccagacuaaauc

SEQ ID NO: 1253494 - RNA, 19 nt, Homo sapiens
  misc_RNA (1)...(19): siRNA sense strand
acgaguagauuauaagugu

SEQ ID NO: 1253495 - RNA, 19 nt, Homo sapiens
  misc_RNA (1)...(19): siRNA sense strand
cuacaaagcaacaguuaug

SEQ ID NO: 1253496 - RNA, 19 nt, Homo sapiens
  misc_RNA (1)...(19): siRNA sense strand
ccaccaacauuugaagcua

SEQ ID NO: 1253497 - RNA, 19 nt, Homo sapiens
  misc_RNA (1)...(19): siRNA sense strand
uauacgggauccuuuaaau

SEQ ID NO: 1253498 - RNA, 19 nt, Homo sapiens
  misc_RNA (1)...(19): siRNA sense strand
cgaguuugguuaucagaug

SEQ ID NO: 1253499 - RNA, 19 nt, Homo sapiens
  misc_RNA (1)...(19): siRNA sense strand
gaacgaguagauuauaagu

SEQ ID NO: 1253500 - RNA, 19 nt, Homo sapiens
  misc_RNA (1)...(19): siRNA sense strand
gugaggagccaccaacauu

SEQ ID NO: 1253501 - RNA, 19 nt, Homo sapiens
  misc_RNA (1)...(19): siRNA sense strand
gauggcagcgacacaauug

SEQ ID NO: 1253502 - RNA, 19 nt, Homo sapiens
  misc_RNA (1)...(19): siRNA sense strand
ucucagaugacgccuguua

SEQ ID NO: 1253503 - RNA, 19 nt, Homo sapiens
  misc_RNA (1)...(19): siRNA sense strand
gaggagccaccaacauuug

SEQ ID NO: 1253504 - RNA, 19 nt, Homo sapiens
  misc_RNA (1)...(19): siRNA sense strand
gcuauggagcucauuggua

SEQ ID NO: 1253505 - RNA, 19 nt, Homo sapiens
  misc_RNA (1)...(19): siRNA sense strand
acacaccuuuagugaagua

SEQ ID NO: 1253506 - RNA, 19 nt, Homo sapiens
  misc_RNA (1)...(19): siRNA sense strand
uagagaaacauguccauau

SEQ ID NO: 1253507 - RNA, 19 nt, Homo sapiens
  misc_RNA (1)...(19): siRNA sense strand
guuccaaagugucuuaaag

SEQ ID NO: 1253508 - RNA, 19 nt, Homo sapiens
  misc_RNA (1)...(19): siRNA sense strand
ggugaacgaguagauuaua

SEQ ID NO: 1253509 - RNA, 19 nt, Homo sapiens
  misc_RNA (1)...(19): siRNA sense strand
gaaguagaaguauuugagu

SEQ ID NO: 1253510 - RNA, 19 nt, Homo sapiens
  misc_RNA (1)...(19): siRNA sense strand
gaaacauguccauauauac

SEQ ID NO: 1253511 - RNA, 19 nt, Homo sapiens
  misc_RNA (1)...(19): siRNA sense strand
ugacgccuguuauagagaa

SEQ ID NO: 1253512 - RNA, 19 nt, Homo sapiens
  misc_RNA (1)...(19): siRNA sense strand
cgaguagauuauaagugua

SEQ ID NO: 1253513 - RNA, 19 nt, Homo sapiens
  misc_RNA (1)...(19): siRNA sense strand
gcacuuuauuuguaaugag

SEQ ID NO: 1253514 - RNA, 19 nt, Homo sapiens
  misc_RNA (1)...(19): siRNA sense strand
guagaaguauuugaguauc

SEQ ID NO: 1253515 - RNA, 19 nt, Homo sapiens
  misc_RNA (1)...(19): siRNA sense strand
guauuugaguaucuugaug

SEQ ID NO: 1253516 - RNA, 19 nt, Homo sapiens
  misc_RNA (1)...(19): siRNA sense strand
aggaauacuugacaguuug

SEQ ID NO: 1253517 - RNA, 19 nt, Homo sapiens
  misc_RNA (1)...(19): siRNA sense strand
ccaaaacccuacuaugaga

SEQ ID NO: 1253518 - RNA, 19 nt, Homo sapiens
  misc_RNA (1)...(19): siRNA sense strand
aguguaaaguggucaaaug

SEQ ID NO: 1253519 - RNA, 19 nt, Homo sapiens
  misc_RNA (1)...(19): siRNA sense strand
ccacccauacuauuuguga

SEQ ID NO: 1253520 - RNA, 19 nt, Homo sapiens
  misc_RNA (1)...(19): siRNA sense strand
uuggagagagcacgauuua

SEQ ID NO: 1253521 - RNA, 19 nt, Homo sapiens
  misc_RNA (1)...(19): siRNA sense strand
gguuaucagaugcacuuua

SEQ ID NO: 1253522 - RNA, 19 nt, Homo sapiens
  misc_RNA (1)...(19): siRNA sense strand
caccaacauuugaagcuau

SEQ ID NO: 1253523 - RNA, 19 nt, Homo sapiens
  misc_RNA (1)...(19): siRNA sense strand
ugaggagccaccaacauuu

SEQ ID NO: 1253524 - RNA, 19 nt, Homo sapiens
  misc_RNA (1)...(19): siRNA sense strand
ggaaggaauacuugacagu

SEQ ID NO: 1253525 - RNA, 19 nt, Homo sapiens
  misc_RNA (1)...(19): siRNA sense strand
gaggaaggaauacuugaca

SEQ ID NO: 1253526 - RNA, 19 nt, Homo sapiens
  misc_RNA (1)...(19): siRNA sense strand
ccaguuccaaagugucuua

SEQ ID NO: 1253527 - RNA, 19 nt, Homo sapiens
  misc_RNA (1)...(19): siRNA sense strand
ugaguaucuugaugcagua

SEQ ID NO: 1253528 - RNA, 19 nt, Homo sapiens
  misc_RNA (1)...(19): siRNA sense strand
caccuuuagugaaguagaa

SEQ ID NO: 1253529 - RNA, 19 nt, Homo sapiens
  misc_RNA (1)...(19): siRNA sense strand
acagauaucaggauuugga

SEQ ID NO: 1253530 - RNA, 19 nt, Homo sapiens
  misc_RNA (1)...(19): siRNA sense strand
ucauugcugugauuguuau

SEQ ID NO: 1253531 - RNA, 19 nt, Homo sapiens
  misc_RNA (1)...(19): siRNA sense strand
ucagaugcacuuuauuugu

SEQ ID NO: 1253532 - RNA, 19 nt, Homo sapiens
  misc_RNA (1)...(19): siRNA sense strand
gugcugcuccagaguguaa

SEQ ID NO: 1253533 - RNA, 19 nt, Homo sapiens
  misc_RNA (1)...(19): siRNA sense strand
ggaaaacacaccuuuagug

SEQ ID NO: 1253534 - RNA, 19 nt, Homo sapiens
  misc_RNA (1)...(19): siRNA sense strand
aaggaucaguagcaauuug

SEQ ID NO: 1253535 - RNA, 19 nt, Homo sapiens
  misc_RNA (1)...(19): siRNA sense strand
uauauacgggauccuuuaa

SEQ ID NO: 1253536 - RNA, 19 nt, Homo sapiens
  misc_RNA (1)...(19): siRNA sense strand
ugaaguagaaguauuugag

SEQ ID NO: 1253537 - RNA, 19 nt, Homo sapiens
  misc_RNA (1)...(19): siRNA sense strand
cuugacaguuuggauguuu

SEQ ID NO: 1253538 - RNA, 19 nt, Homo sapiens
  misc_RNA (1)...(19): siRNA sense strand
cauauauacgggauccuuu

SEQ ID NO: 1253539 - RNA, 19 nt, Homo sapiens
  misc_RNA (1)...(19): siRNA sense strand
auauauacgggauccuuua

SEQ ID NO: 1253540 - RNA, 19 nt, Homo sapiens
  misc_RNA (1)...(19): siRNA sense strand
cuuaaaggaucaguagcaa

SEQ ID NO: 1253541 - RNA, 19 nt, Homo sapiens
  misc_RNA (1)...(19): siRNA sense strand
uaaaccugaggaaggaaua

SEQ ID NO: 1253542 - RNA, 19 nt, Homo sapiens
  misc_RNA (1)...(19): siRNA sense strand
agaugacgccuguuauaga

SEQ ID NO: 1253543 - RNA, 19 nt, Homo sapiens
  misc_RNA (1)...(19): siRNA sense strand
ugugauuguuauugccaua

SEQ ID NO: 1253544 - RNA, 19 nt, Homo sapiens
  misc_RNA (1)...(19): siRNA sense strand
gagagcacgauuuauugug

SEQ ID NO: 1253545 - RNA, 19 nt, Homo sapiens
  misc_RNA (1)...(19): siRNA sense strand
gaaguauuugaguaucuug

SEQ ID NO: 1253546 - RNA, 19 nt, Homo sapiens
  misc_RNA (1)...(19): siRNA sense strand
ggcuaccugucucagauga

SEQ ID NO: 1253547 - RNA, 19 nt, Homo sapiens
  misc_RNA (1)...(19): siRNA sense strand
gauaucaggauuuggaaaa

SEQ ID NO: 1253548 - RNA, 19 nt, Homo sapiens
  misc_RNA (1)...(19): siRNA sense strand
ccucuugccacccauacua

SEQ ID NO: 1253549 - RNA, 19 nt, Homo sapiens
  misc_RNA (1)...(19): siRNA sense strand
ccaugguguugcugcugua

SEQ ID NO: 1253550 - RNA, 19 nt, Homo sapiens
  misc_RNA (1)...(19): siRNA sense strand
cagaugacgccuguuauag

SEQ ID NO: 1253551 - RNA, 19 nt, Homo sapiens
  misc_RNA (1)...(19): siRNA sense strand
cagaugguggagcugaaua

SEQ ID NO: 1253552 - RNA, 19 nt, Homo sapiens
  misc_RNA (1)...(19): siRNA sense strand
gucauugcugugauuguua

SEQ ID NO: 1253553 - RNA, 19 nt, Homo sapiens
  misc_RNA (1)...(19): siRNA sense strand
ggagccaccaacauuugaa

SEQ ID NO: 1253554 - RNA, 19 nt, Homo sapiens
  misc_RNA (1)...(19): siRNA sense strand
uuggugaacgaguagauua

SEQ ID NO: 1253555 - RNA, 19 nt, Homo sapiens
  misc_RNA (1)...(19): siRNA sense strand
gcgcuuuccuggguugcuu

SEQ ID NO: 1253556 - RNA, 19 nt, Homo sapiens
  misc_RNA (1)...(19): siRNA sense strand
uacuacaaagcaacaguua

SEQ ID NO: 1253557 - RNA, 19 nt, Homo sapiens
  misc_RNA (1)...(19): siRNA sense strand
cuugaugcaguaacuuaua

SEQ ID NO: 1253558 - RNA, 19 nt, Homo sapiens
  misc_RNA (1)...(19): siRNA sense strand
aaacauguccauauauacg

SEQ ID NO: 1253559 - RNA, 19 nt, Homo sapiens
  misc_RNA (1)...(19): siRNA sense strand
guguaaaguggucaaaugu

SEQ ID NO: 1253560 - RNA, 19 nt, Homo sapiens
  misc_RNA (1)...(19): siRNA sense strand
cuuacgaguuugguuauca

SEQ ID NO: 1253561 - RNA, 19 nt, Homo sapiens
  misc_RNA (1)...(19): siRNA sense strand
uacgggauccuuuaaaugg

SEQ ID NO: 1253562 - RNA, 19 nt, Homo sapiens
  misc_RNA (1)...(19): siRNA sense strand
gcagaugguggagcugaau

SEQ ID NO: 1253563 - RNA, 19 nt, Homo sapiens
  misc_RNA (1)...(19): siRNA sense strand
aaccaaaacccuacuauga

SEQ ID NO: 1253564 - RNA, 19 nt, Homo sapiens
  misc_RNA (1)...(19): siRNA sense strand
uugaugcaguaacuuauag

SEQ ID NO: 1253565 - RNA, 19 nt, Homo sapiens
  misc_RNA (1)...(19): siRNA sense strand
ggagcugaauaugccacuu

SEQ ID NO: 1253566 - RNA, 19 nt, Homo sapiens
  misc_RNA (1)...(19): siRNA sense strand
cgauggcagcgacacaauu

SEQ ID NO: 1253567 - RNA, 19 nt, Homo sapiens
  misc_RNA (1)...(19): siRNA sense strand
gauccauuuucacuuauug

SEQ ID NO: 1253568 - RNA, 19 nt, Homo sapiens
  misc_RNA (1)...(19): siRNA sense strand
ggagagagcacgauuuauu

SEQ ID NO: 1253569 - RNA, 19 nt, Homo sapiens
  misc_RNA (1)...(19): siRNA sense strand
agagaaacauguccauaua

SEQ ID NO: 1253570 - RNA, 19 nt, Homo sapiens
  misc_RNA (1)...(19): siRNA sense strand
cagaugcacuuuauuugua

SEQ ID NO: 1253571 - RNA, 19 nt, Homo sapiens
  misc_RNA (1)...(19): siRNA sense strand
ggacuuacgaguuugguua

SEQ ID NO: 1253572 - RNA, 19 nt, Homo sapiens
  misc_RNA (1)...(19): siRNA sense strand
aaacagauaucaggauuug

SEQ ID NO: 1253573 - RNA, 19 nt, Homo sapiens
  misc_RNA (1)...(19): siRNA sense strand
cuauggagcucauugguaa

SEQ ID NO: 1253574 - RNA, 19 nt, Homo sapiens
  misc_RNA (1)...(19): siRNA sense strand
aaacacaccuuuagugaag

SEQ ID NO: 1253575 - RNA, 19 nt, Homo sapiens
  misc_RNA (1)...(19): siRNA sense strand
gaacuuaaaggaucaguag

SEQ ID NO: 1253576 - RNA, 19 nt, Homo sapiens
  misc_RNA (1)...(19): siRNA sense strand
gaaaacagauaucaggauu

SEQ ID NO: 1253577 - RNA, 19 nt, Homo sapiens
  misc_RNA (1)...(19): siRNA sense strand
uaaaggaucaguagcaauu

SEQ ID NO: 1253578 - RNA, 19 nt, Homo sapiens
  misc_RNA (1)...(19): siRNA sense strand
aaaugggacuuacgaguuu

SEQ ID NO: 1253579 - RNA, 19 nt, Homo sapiens
  misc_RNA (1)...(19): siRNA sense strand
guuaucagaugcacuuuau

SEQ ID NO: 1253580 - RNA, 19 nt, Homo sapiens
  misc_RNA (1)...(19): siRNA sense strand
gagcugaauaugccacuua

SEQ ID NO: 1253581 - RNA, 19 nt, Homo sapiens
  misc_RNA (1)...(19): siRNA sense strand
ugagauuggugaacgagua

SEQ ID NO: 1253582 - RNA, 19 nt, Homo sapiens
  misc_RNA (1)...(19): siRNA sense strand
gugaacgaguagauuauaa

SEQ ID NO: 1253583 - RNA, 19 nt, Homo sapiens
  misc_RNA (1)...(19): siRNA sense strand
gagagagcacgauuuauug

SEQ ID NO: 1253584 - RNA, 19 nt, Homo sapiens
  misc_RNA (1)...(19): siRNA sense strand
caaaugggacuuacgaguu

SEQ ID NO: 1253585 - RNA, 19 nt, Homo sapiens
  misc_RNA (1)...(19): siRNA sense strand
ggucauugcugugauuguu

SEQ ID NO: 1253586 - RNA, 19 nt, Homo sapiens
  misc_RNA (1)...(19): siRNA sense strand
ccagauccauuuucacuua

SEQ ID NO: 1253587 - RNA, 19 nt, Homo sapiens
  misc_RNA (1)...(19): siRNA sense strand
gaaggaauacuugacaguu

SEQ ID NO: 1253588 - RNA, 19 nt, Homo sapiens
  misc_RNA (1)...(19): siRNA sense strand
aaggaauacuugacaguuu

SEQ ID NO: 1253589 - RNA, 19 nt, Homo sapiens
  misc_RNA (1)...(19): siRNA sense strand
ucagaugacgccuguuaua

SEQ ID NO: 1253590 - RNA, 19 nt, Homo sapiens
  misc_RNA (1)...(19): siRNA sense strand
gaaaacacaccuuuaguga

SEQ ID NO: 1253591 - RNA, 19 nt, Homo sapiens
  misc_RNA (1)...(19): siRNA sense strand
gaugacgccuguuauagag

SEQ ID NO: 1253592 - RNA, 19 nt, Homo sapiens
  misc_RNA (1)...(19): siRNA sense strand
gagaaacauguccauauau

SEQ ID NO: 1253593 - RNA, 19 nt, Homo sapiens
  misc_RNA (1)...(19): siRNA sense strand
ccacuuaccagacuaaauc

SEQ ID NO: 1253594 - RNA, 19 nt, Homo sapiens
  misc_RNA (1)...(19): siRNA sense strand
acgaguagauuauaagugu

SEQ ID NO: 1253595 - RNA, 19 nt, Homo sapiens
  misc_RNA (1)...(19): siRNA sense strand
cuacaaagcaacaguuaug

SEQ ID NO: 1253596 - RNA, 19 nt, Homo sapiens
  misc_RNA (1)...(19): siRNA sense strand
ccaccaacauuugaagcua

SEQ ID NO: 1253597 - RNA, 19 nt, Homo sapiens
  misc_RNA (1)...(19): siRNA sense strand
uauacgggauccuuuaaau

SEQ ID NO: 1253598 - RNA, 19 nt, Homo sapiens
  misc_RNA (1)...(19): siRNA sense strand
cgaguuugguuaucagaug

SEQ ID NO: 1253599 - RNA, 19 nt, Homo sapiens
  misc_RNA (1)...(19): siRNA sense strand
gaacgaguagauuauaagu

SEQ ID NO: 1253600 - RNA, 19 nt, Homo sapiens
  misc_RNA (1)...(19): siRNA sense strand
gugaggagccaccaacauu

SEQ ID NO: 1253601 - RNA, 19 nt, Homo sapiens
  misc_RNA (1)...(19): siRNA sense strand
gauggcagcgacacaauug

SEQ ID NO: 1253602 - RNA, 19 nt, Homo sapiens
  misc_RNA (1)...(19): siRNA sense strand
ucucagaugacgccuguua

SEQ ID NO: 1253603 - RNA, 19 nt, Homo sapiens
  misc_RNA (1)...(19): siRNA sense strand
gaggagccaccaacauuug

SEQ ID NO: 1253604 - RNA, 19 nt, Homo sapiens
  misc_RNA (1)...(19): siRNA sense strand
gcuauggagcucauuggua

SEQ ID NO: 1253605 - RNA, 19 nt, Homo sapiens
  misc_RNA (1)...(19): siRNA sense strand
acacaccuuuagugaagua

SEQ ID NO: 1253606 - RNA, 19 nt, Homo sapiens
  misc_RNA (1)...(19): siRNA sense strand
uagagaaacauguccauau

SEQ ID NO: 1253607 - RNA, 19 nt, Homo sapiens
  misc_RNA (1)...(19): siRNA sense strand
guuccaaagugucuuaaag

SEQ ID NO: 1253608 - RNA, 19 nt, Homo sapiens
  misc_RNA (1)...(19): siRNA sense strand
ggugaacgaguagauuaua

SEQ ID NO: 1253609 - RNA, 19 nt, Homo sapiens
  misc_RNA (1)...(19): siRNA sense strand
gaaguagaaguauuugagu

SEQ ID NO: 1253610 - RNA, 19 nt, Homo sapiens
  misc_RNA (1)...(19): siRNA sense strand
gaaacauguccauauauac

SEQ ID NO: 1253611 - RNA, 19 nt, Homo sapiens
  misc_RNA (1)...(19): siRNA sense strand
ugacgccuguuauagagaa

SEQ ID NO: 1253612 - RNA, 19 nt, Homo sapiens
  misc_RNA (1)...(19): siRNA sense strand
cgaguagauuauaagugua

SEQ ID NO: 1253613 - RNA, 19 nt, Homo sapiens
  misc_RNA (1)...(19): siRNA sense strand
gcacuuuauuuguaaugag

SEQ ID NO: 1253614 - RNA, 19 nt, Homo sapiens
  misc_RNA (1)...(19): siRNA sense strand
guagaaguauuugaguauc

SEQ ID NO: 1253615 - RNA, 19 nt, Homo sapiens
  misc_RNA (1)...(19): siRNA sense strand
guauuugaguaucuugaug

SEQ ID NO: 1253616 - RNA, 19 nt, Homo sapiens
  misc_RNA (1)...(19): siRNA sense strand
aggaauacuugacaguuug

SEQ ID NO: 1253617 - RNA, 19 nt, Homo sapiens
  misc_RNA (1)...(19): siRNA sense strand
ccaaaacccuacuaugaga

SEQ ID NO: 1253618 - RNA, 19 nt, Homo sapiens
  misc_RNA (1)...(19): siRNA sense strand
aguguaaaguggucaaaug

SEQ ID NO: 1253619 - RNA, 19 nt, Homo sapiens
  misc_RNA (1)...(19): siRNA sense strand
ccacccauacuauuuguga

SEQ ID NO: 1253620 - RNA, 19 nt, Homo sapiens
  misc_RNA (1)...(19): siRNA sense strand
uuggagagagcacgauuua

SEQ ID NO: 1253621 - RNA, 19 nt, Homo sapiens
  misc_RNA (1)...(19): siRNA sense strand
gguuaucagaugcacuuua

SEQ ID NO: 1253622 - RNA, 19 nt, Homo sapiens
  misc_RNA (1)...(19): siRNA sense strand
caccaacauuugaagcuau

SEQ ID NO: 1253623 - RNA, 19 nt, Homo sapiens
  misc_RNA (1)...(19): siRNA sense strand
ugaggagccaccaacauuu

SEQ ID NO: 1253624 - RNA, 19 nt, Homo sapiens
  misc_RNA (1)...(19): siRNA sense strand
ggaaggaauacuugacagu

SEQ ID NO: 1253625 - RNA, 19 nt, Homo sapiens
  misc_RNA (1)...(19): siRNA sense strand
gaggaaggaauacuugaca

SEQ ID NO: 1253626 - RNA, 19 nt, Homo sapiens
  misc_RNA (1)...(19): siRNA sense strand
ccaguuccaaagugucuua

SEQ ID NO: 1253627 - RNA, 19 nt, Homo sapiens
  misc_RNA (1)...(19): siRNA sense strand
ugaguaucuugaugcagua

SEQ ID NO: 1253628 - RNA, 19 nt, Homo sapiens
  misc_RNA (1)...(19): siRNA sense strand
caccuuuagugaaguagaa

SEQ ID NO: 1253629 - RNA, 19 nt, Homo sapiens
  misc_RNA (1)...(19): siRNA sense strand
acagauaucaggauuugga

SEQ ID NO: 1253630 - RNA, 19 nt, Homo sapiens
  misc_RNA (1)...(19): siRNA sense strand
ucauugcugugauuguuau

SEQ ID NO: 1253631 - RNA, 19 nt, Homo sapiens
  misc_RNA (1)...(19): siRNA sense strand
ucagaugcacuuuauuugu

SEQ ID NO: 1253632 - RNA, 19 nt, Homo sapiens
  misc_RNA (1)...(19): siRNA sense strand
gugcugcuccagaguguaa

SEQ ID NO: 1253633 - RNA, 19 nt, Homo sapiens
  misc_RNA (1)...(19): siRNA sense strand
ggaaaacacaccuuuagug

SEQ ID NO: 1253634 - RNA, 19 nt, Homo sapiens
  misc_RNA (1)...(19): siRNA sense strand
aaggaucaguagcaauuug

SEQ ID NO: 1253635 - RNA, 19 nt, Homo sapiens
  misc_RNA (1)...(19): siRNA sense strand
uauauacgggauccuuuaa

SEQ ID NO: 1253636 - RNA, 19 nt, Homo sapiens
  misc_RNA (1)...(19): siRNA sense strand
ugaaguagaaguauuugag

SEQ ID NO: 1253637 - RNA, 19 nt, Homo sapiens
  misc_RNA (1)...(19): siRNA sense strand
cuugacaguuuggauguuu

SEQ ID NO: 1253638 - RNA, 19 nt, Homo sapiens
  misc_RNA (1)...(19): siRNA sense strand
cauauauacgggauccuuu

SEQ ID NO: 1253639 - RNA, 19 nt, Homo sapiens
  misc_RNA (1)...(19): siRNA sense strand
auauauacgggauccuuua

SEQ ID NO: 1253640 - RNA, 19 nt, Homo sapiens
  misc_RNA (1)...(19): siRNA sense strand
cuuaaaggaucaguagcaa

SEQ ID NO: 1253641 - RNA, 19 nt, Homo sapiens
  misc_RNA (1)...(19): siRNA sense strand
uaaaccugaggaaggaaua

SEQ ID NO: 1253642 - RNA, 19 nt, Homo sapiens
  misc_RNA (1)...(19): siRNA sense strand
agaugacgccuguuauaga

SEQ ID NO: 1253643 - RNA, 19 nt, Homo sapiens
  misc_RNA (1)...(19): siRNA sense strand
ugugauuguuauugccaua

SEQ ID NO: 1253644 - RNA, 19 nt, Homo sapiens
  misc_RNA (1)...(19): siRNA sense strand
gagagcacgauuuauugug

SEQ ID NO: 1253645 - RNA, 19 nt, Homo sapiens
  misc_RNA (1)...(19): siRNA sense strand
gaaguauuugaguaucuug

SEQ ID NO: 1253646 - RNA, 19 nt, Homo sapiens
  misc_RNA (1)...(19): siRNA sense strand
ggcuaccugucucagauga

SEQ ID NO: 1253647 - RNA, 19 nt, Homo sapiens
  misc_RNA (1)...(19): siRNA sense strand
gauaucaggauuuggaaaa

SEQ ID NO: 1253648 - RNA, 19 nt, Homo sapiens
  misc_RNA (1)...(19): siRNA sense strand
ccucuugccacccauacua

SEQ ID NO: 1253649 - RNA, 19 nt, Homo sapiens
  misc_RNA (1)...(19): siRNA sense strand
ccaugguguugcugcugua

SEQ ID NO: 1253650 - RNA, 19 nt, Homo sapiens
  misc_RNA (1)...(19): siRNA sense strand
cagaugacgccuguuauag

SEQ ID NO: 1253651 - RNA, 19 nt, Homo sapiens
  misc_RNA (1)...(19): siRNA sense strand
cagaugguggagcugaaua

SEQ ID NO: 1253652 - RNA, 19 nt, Homo sapiens
  misc_RNA (1)...(19): siRNA sense strand
gucauugcugugauuguua

SEQ ID NO: 1253653 - RNA, 19 nt, Homo sapiens
  misc_RNA (1)...(19): siRNA sense strand
ggagccaccaacauuugaa

SEQ ID NO: 1253654 - RNA, 19 nt, Homo sapiens
  misc_RNA (1)...(19): siRNA sense strand
uuggugaacgaguagauua

SEQ ID NO: 1253655 - RNA, 19 nt, Homo sapiens
  misc_RNA (1)...(19): siRNA sense strand
gcgcuuuccuggguugcuu

SEQ ID NO: 1253656 - RNA, 19 nt, Homo sapiens
  misc_RNA (1)...(19): siRNA sense strand
uacuacaaagcaacaguua

SEQ ID NO: 1253657 - RNA, 19 nt, Homo sapiens
  misc_RNA (1)...(19): siRNA sense strand
cuugaugcaguaacuuaua

SEQ ID NO: 1253658 - RNA, 19 nt, Homo sapiens
  misc_RNA (1)...(19): siRNA sense strand
aaacauguccauauauacg

SEQ ID NO: 1253659 - RNA, 19 nt, Homo sapiens
  misc_RNA (1)...(19): siRNA sense strand
guguaaaguggucaaaugu

SEQ ID NO: 1253660 - RNA, 19 nt, Homo sapiens
  misc_RNA (1)...(19): siRNA sense strand
cuuacgaguuugguuauca

SEQ ID NO: 1253661 - RNA, 19 nt, Homo sapiens
  misc_RNA (1)...(19): siRNA sense strand
uacgggauccuuuaaaugg

SEQ ID NO: 1253662 - RNA, 19 nt, Homo sapiens
  misc_RNA (1)...(19): siRNA sense strand
gcagaugguggagcugaau

SEQ ID NO: 1253663 - RNA, 19 nt, Homo sapiens
  misc_RNA (1)...(19): siRNA sense strand
aaccaaaacccuacuauga

SEQ ID NO: 1253664 - RNA, 19 nt, Homo sapiens
  misc_RNA (1)...(19): siRNA sense strand
uugaugcaguaacuuauag

SEQ ID NO: 1253665 - RNA, 19 nt, Homo sapiens
  misc_RNA (1)...(19): siRNA sense strand
ggagcugaauaugccacuu

SEQ ID NO: 1253666 - RNA, 19 nt, Homo sapiens
  misc_RNA (1)...(19): siRNA sense strand
cgauggcagcgacacaauu

SEQ ID NO: 1253667 - RNA, 19 nt, Homo sapiens
  misc_RNA (1)...(19): siRNA sense strand
gauccauuuucacuuauug

SEQ ID NO: 1253668 - RNA, 19 nt, Homo sapiens
  misc_RNA (1)...(19): siRNA sense strand
ggagagagcacgauuuauu

SEQ ID NO: 1253669 - RNA, 19 nt, Homo sapiens
  misc_RNA (1)...(19): siRNA sense strand
agagaaacauguccauaua

SEQ ID NO: 1253670 - RNA, 19 nt, Homo sapiens
  misc_RNA (1)...(19): siRNA sense strand
cagaugcacuuuauuugua

SEQ ID NO: 1253671 - RNA, 19 nt, Homo sapiens
  misc_RNA (1)...(19): siRNA sense strand
ggacuuacgaguuugguua

SEQ ID NO: 1253672 - RNA, 19 nt, Homo sapiens
  misc_RNA (1)...(19): siRNA sense strand
aaacagauaucaggauuug

SEQ ID NO: 1253673 - RNA, 19 nt, Homo sapiens
  misc_RNA (1)...(19): siRNA sense strand
cuauggagcucauugguaa

SEQ ID NO: 1253674 - RNA, 19 nt, Homo sapiens
  misc_RNA (1)...(19): siRNA sense strand
aaacacaccuuuagugaag

SEQ ID NO: 1253675 - RNA, 19 nt, Homo sapiens
  misc_RNA (1)...(19): siRNA sense strand
gaacuuaaaggaucaguag

SEQ ID NO: 1253676 - RNA, 19 nt, Homo sapiens
  misc_RNA (1)...(19): siRNA sense strand
gaaaacagauaucaggauu

SEQ ID NO: 1253677 - RNA, 19 nt, Homo sapiens
  misc_RNA (1)...(19): siRNA sense strand
uaaaggaucaguagcaauu

SEQ ID NO: 1253678 - RNA, 19 nt, Homo sapiens
  misc_RNA (1)...(19): siRNA sense strand
aaaugggacuuacgaguuu

SEQ ID NO: 1253679 - RNA, 19 nt, Homo sapiens
  misc_RNA (1)...(19): siRNA sense strand
guuaucagaugcacuuuau

SEQ ID NO: 1253680 - RNA, 19 nt, Homo sapiens
  misc_RNA (1)...(19): siRNA sense strand
ugagauuggugaacgagua

SEQ ID NO: 1253681 - RNA, 19 nt, Homo sapiens
  misc_RNA (1)...(19): siRNA sense strand
gugaacgaguagauuauaa

SEQ ID NO: 1253682 - RNA, 19 nt, Homo sapiens
  misc_RNA (1)...(19): siRNA sense strand
gagagagcacgauuuauug

SEQ ID NO: 1253683 - RNA, 19 nt, Homo sapiens
  misc_RNA (1)...(19): siRNA sense strand
caaaugggacuuacgaguu

SEQ ID NO: 1253684 - RNA, 19 nt, Homo sapiens
  misc_RNA (1)...(19): siRNA sense strand
ggucauugcugugauuguu

SEQ ID NO: 1253685 - RNA, 19 nt, Homo sapiens
  misc_RNA (1)...(19): siRNA sense strand
ccagauccauuuucacuua

SEQ ID NO: 1253686 - RNA, 19 nt, Homo sapiens
  misc_RNA (1)...(19): siRNA sense strand
gaaggaauacuugacaguu

SEQ ID NO: 1253687 - RNA, 19 nt, Homo sapiens
  misc_RNA (1)...(19): siRNA sense strand
aaggaauacuugacaguuu

SEQ ID NO: 1253688 - RNA, 19 nt, Homo sapiens
  misc_RNA (1)...(19): siRNA sense strand
ucagaugacgccuguuaua

SEQ ID NO: 1253689 - RNA, 19 nt, Homo sapiens
  misc_RNA (1)...(19): siRNA sense strand
gaaaacacaccuuuaguga

SEQ ID NO: 1253690 - RNA, 19 nt, Homo sapiens
  misc_RNA (1)...(19): siRNA sense strand
gaugacgccuguuauagag

SEQ ID NO: 1253691 - RNA, 19 nt, Homo sapiens
  misc_RNA (1)...(19): siRNA sense strand
gagaaacauguccauauau

SEQ ID NO: 1253692 - RNA, 19 nt, Homo sapiens
  misc_RNA (1)...(19): siRNA sense strand
acgaguagauuauaagugu

SEQ ID NO: 1253693 - RNA, 19 nt, Homo sapiens
  misc_RNA (1)...(19): siRNA sense strand
cuacaaagcaacaguuaug

SEQ ID NO: 1253694 - RNA, 19 nt, Homo sapiens
  misc_RNA (1)...(19): siRNA sense strand
ccaccaacauuugaagcua

SEQ ID NO: 1253695 - RNA, 19 nt, Homo sapiens
  misc_RNA (1)...(19): siRNA sense strand
uauacgggauccuuuaaau

SEQ ID NO: 1253696 - RNA, 19 nt, Homo sapiens
  misc_RNA (1)...(19): siRNA sense strand
cgaguuugguuaucagaug

SEQ ID NO: 1253697 - RNA, 19 nt, Homo sapiens
  misc_RNA (1)...(19): siRNA sense strand
gaacgaguagauuauaagu

SEQ ID NO: 1253698 - RNA, 19 nt, Homo sapiens
  misc_RNA (1)...(19): siRNA sense strand
gugaggagccaccaacauu

SEQ ID NO: 1253699 - RNA, 19 nt, Homo sapiens
  misc_RNA (1)...(19): siRNA sense strand
gauggcagcgacacaauug

SEQ ID NO: 1253700 - RNA, 19 nt, Homo sapiens
  misc_RNA (1)...(19): siRNA sense strand
gcuauggagcucauuggua

SEQ ID NO: 1253701 - RNA, 19 nt, Homo sapiens
  misc_RNA (1)...(19): siRNA sense strand
gaggagccaccaacauuug

SEQ ID NO: 1253702 - RNA, 19 nt, Homo sapiens
  misc_RNA (1)...(19): siRNA sense strand
acacaccuuuagugaagua

SEQ ID NO: 1253703 - RNA, 19 nt, Homo sapiens
  misc_RNA (1)...(19): siRNA sense strand
ucucagaugacgccuguua

SEQ ID NO: 1253704 - RNA, 19 nt, Homo sapiens
  misc_RNA (1)...(19): siRNA sense strand
uagagaaacauguccauau

SEQ ID NO: 1253705 - RNA, 19 nt, Homo sapiens
  misc_RNA (1)...(19): siRNA sense strand
guuccaaagugucuuaaag

SEQ ID NO: 1253706 - RNA, 19 nt, Homo sapiens
  misc_RNA (1)...(19): siRNA sense strand
ggugaacgaguagauuaua

SEQ ID NO: 1253707 - RNA, 19 nt, Homo sapiens
  misc_RNA (1)...(19): siRNA sense strand
gaaguagaaguauuugagu

SEQ ID NO: 1253708 - RNA, 19 nt, Homo sapiens
  misc_RNA (1)...(19): siRNA sense strand
gaaacauguccauauauac

SEQ ID NO: 1253709 - RNA, 19 nt, Homo sapiens
  misc_RNA (1)...(19): siRNA sense strand
ugacgccuguuauagagaa

SEQ ID NO: 1253710 - RNA, 19 nt, Homo sapiens
  misc_RNA (1)...(19): siRNA sense strand
cgaguagauuauaagugua

SEQ ID NO: 1253711 - RNA, 19 nt, Homo sapiens
  misc_RNA (1)...(19): siRNA sense strand
gcacuuuauuuguaaugag

SEQ ID NO: 1253712 - RNA, 19 nt, Homo sapiens
  misc_RNA (1)...(19): siRNA sense strand
guagaaguauuugaguauc

SEQ ID NO: 1253713 - RNA, 19 nt, Homo sapiens
  misc_RNA (1)...(19): siRNA sense strand
guauuugaguaucuugaug

SEQ ID NO: 1253714 - RNA, 19 nt, Homo sapiens
  misc_RNA (1)...(19): siRNA sense strand
aggaauacuugacaguuug

SEQ ID NO: 1253715 - RNA, 19 nt, Homo sapiens
  misc_RNA (1)...(19): siRNA sense strand
ccaaaacccuacuaugaga

SEQ ID NO: 1253716 - RNA, 19 nt, Homo sapiens
  misc_RNA (1)...(19): siRNA sense strand
aguguaaaguggucaaaug

SEQ ID NO: 1253717 - RNA, 19 nt, Homo sapiens
  misc_RNA (1)...(19): siRNA sense strand
ccacccauacuauuuguga

SEQ ID NO: 1253718 - RNA, 19 nt, Homo sapiens
  misc_RNA (1)...(19): siRNA sense strand
caccaacauuugaagcuau

SEQ ID NO: 1253719 - RNA, 19 nt, Homo sapiens
  misc_RNA (1)...(19): siRNA sense strand
uuggagagagcacgauuua

SEQ ID NO: 1253720 - RNA, 19 nt, Homo sapiens
  misc_RNA (1)...(19): siRNA sense strand
gguuaucagaugcacuuua

SEQ ID NO: 1253721 - RNA, 19 nt, Homo sapiens
  misc_RNA (1)...(19): siRNA sense strand
ugaggagccaccaacauuu

SEQ ID NO: 1253722 - RNA, 19 nt, Homo sapiens
  misc_RNA (1)...(19): siRNA sense strand
ggaaggaauacuugacagu

SEQ ID NO: 1253723 - RNA, 19 nt, Homo sapiens
  misc_RNA (1)...(19): siRNA sense strand
gaggaaggaauacuugaca

SEQ ID NO: 1253724 - RNA, 19 nt, Homo sapiens
  misc_RNA (1)...(19): siRNA sense strand
ccaguuccaaagugucuua

SEQ ID NO: 1253725 - RNA, 19 nt, Homo sapiens
  misc_RNA (1)...(19): siRNA sense strand
ugaguaucuugaugcagua

SEQ ID NO: 1253726 - RNA, 19 nt, Homo sapiens
  misc_RNA (1)...(19): siRNA sense strand
caccuuuagugaaguagaa

SEQ ID NO: 1253727 - RNA, 19 nt, Homo sapiens
  misc_RNA (1)...(19): siRNA sense strand
acagauaucaggauuugga

SEQ ID NO: 1253728 - RNA, 19 nt, Homo sapiens
  misc_RNA (1)...(19): siRNA sense strand
ucauugcugugauuguuau

SEQ ID NO: 1253729 - RNA, 19 nt, Homo sapiens
  misc_RNA (1)...(19): siRNA sense strand
ucagaugcacuuuauuugu

SEQ ID NO: 1253730 - RNA, 19 nt, Homo sapiens
  misc_RNA (1)...(19): siRNA sense strand
gugcugcuccagaguguaa

SEQ ID NO: 1253731 - RNA, 19 nt, Homo sapiens
  misc_RNA (1)...(19): siRNA sense strand
ggaaaacacaccuuuagug

SEQ ID NO: 1253732 - RNA, 19 nt, Homo sapiens
  misc_RNA (1)...(19): siRNA sense strand
aaggaucaguagcaauuug

SEQ ID NO: 1253733 - RNA, 19 nt, Homo sapiens
  misc_RNA (1)...(19): siRNA sense strand
uauauacgggauccuuuaa

SEQ ID NO: 1253734 - RNA, 19 nt, Homo sapiens
  misc_RNA (1)...(19): siRNA sense strand
ugaaguagaaguauuugag

SEQ ID NO: 1253735 - RNA, 19 nt, Homo sapiens
  misc_RNA (1)...(19): siRNA sense strand
cuugacaguuuggauguuu

SEQ ID NO: 1253736 - RNA, 19 nt, Homo sapiens
  misc_RNA (1)...(19): siRNA sense strand
cauauauacgggauccuuu

SEQ ID NO: 1253737 - RNA, 19 nt, Homo sapiens
  misc_RNA (1)...(19): siRNA sense strand
auauauacgggauccuuua

SEQ ID NO: 1253738 - RNA, 19 nt, Homo sapiens
  misc_RNA (1)...(19): siRNA sense strand
cuuaaaggaucaguagcaa

SEQ ID NO: 1253739 - RNA, 19 nt, Homo sapiens
  misc_RNA (1)...(19): siRNA sense strand
uaaaccugaggaaggaaua

SEQ ID NO: 1253740 - RNA, 19 nt, Homo sapiens
  misc_RNA (1)...(19): siRNA sense strand
agaugacgccuguuauaga

SEQ ID NO: 1253741 - RNA, 19 nt, Homo sapiens
  misc_RNA (1)...(19): siRNA sense strand
ugugauuguuauugccaua

SEQ ID NO: 1253742 - RNA, 19 nt, Homo sapiens
  misc_RNA (1)...(19): siRNA sense strand
gagagcacgauuuauugug

SEQ ID NO: 1253743 - RNA, 19 nt, Homo sapiens
  misc_RNA (1)...(19): siRNA sense strand
gaaguauuugaguaucuug

SEQ ID NO: 1253744 - RNA, 19 nt, Homo sapiens
  misc_RNA (1)...(19): siRNA sense strand
ggcuaccugucucagauga

SEQ ID NO: 1253745 - RNA, 19 nt, Homo sapiens
  misc_RNA (1)...(19): siRNA sense strand
gauaucaggauuuggaaaa

SEQ ID NO: 1253746 - RNA, 19 nt, Homo sapiens
  misc_RNA (1)...(19): siRNA sense strand
ccucuugccacccauacua

SEQ ID NO: 1253747 - RNA, 19 nt, Homo sapiens
  misc_RNA (1)...(19): siRNA sense strand
ccaugguguugcugcugua

SEQ ID NO: 1253748 - RNA, 19 nt, Homo sapiens
  misc_RNA (1)...(19): siRNA sense strand
cagaugacgccuguuauag

SEQ ID NO: 1253749 - RNA, 19 nt, Homo sapiens
  misc_RNA (1)...(19): siRNA sense strand
uuggugaacgaguagauua

SEQ ID NO: 1253750 - RNA, 19 nt, Homo sapiens
  misc_RNA (1)...(19): siRNA sense strand
gucauugcugugauuguua

SEQ ID NO: 1253751 - RNA, 19 nt, Homo sapiens
  misc_RNA (1)...(19): siRNA sense strand
ggagccaccaacauuugaa

SEQ ID NO: 1253752 - RNA, 19 nt, Homo sapiens
  misc_RNA (1)...(19): siRNA sense strand
gcgcuuuccuggguugcuu

SEQ ID NO: 1253753 - RNA, 19 nt, Homo sapiens
  misc_RNA (1)...(19): siRNA sense strand
uacuacaaagcaacaguua

SEQ ID NO: 1253754 - RNA, 19 nt, Homo sapiens
  misc_RNA (1)...(19): siRNA sense strand
cuugaugcaguaacuuaua

SEQ ID NO: 1253755 - RNA, 19 nt, Homo sapiens
  misc_RNA (1)...(19): siRNA sense strand
aaacauguccauauauacg

SEQ ID NO: 1253756 - RNA, 19 nt, Homo sapiens
  misc_RNA (1)...(19): siRNA sense strand
guguaaaguggucaaaugu

SEQ ID NO: 1253757 - RNA, 19 nt, Homo sapiens
  misc_RNA (1)...(19): siRNA sense strand
cuuacgaguuugguuauca

SEQ ID NO: 1253758 - RNA, 19 nt, Homo sapiens
  misc_RNA (1)...(19): siRNA sense strand
uacgggauccuuuaaaugg

SEQ ID NO: 1253759 - RNA, 19 nt, Homo sapiens
  misc_RNA (1)...(19): siRNA sense strand
aaccaaaacccuacuauga

SEQ ID NO: 1253760 - RNA, 19 nt, Homo sapiens
  misc_RNA (1)...(19): siRNA sense strand
cccaauaugugaaaagguu

SEQ ID NO: 1253761 - RNA, 19 nt, Homo sapiens
  misc_RNA (1)...(19): siRNA sense strand
cgauggcagcgacacaauu

SEQ ID NO: 1253762 - RNA, 19 nt, Homo sapiens
  misc_RNA (1)...(19): siRNA sense strand
gauccauuuucacuuauug

SEQ ID NO: 1253763 - RNA, 19 nt, Homo sapiens
  misc_RNA (1)...(19): siRNA sense strand
uugaugcaguaacuuauag

SEQ ID NO: 1253764 - RNA, 19 nt, Homo sapiens
  misc_RNA (1)...(19): siRNA sense strand
guaucuugaugcaguaacu

SEQ ID NO: 1253765 - RNA, 19 nt, Homo sapiens
  misc_RNA (1)...(19): siRNA sense strand
caacauuugaagcuaugga

SEQ ID NO: 1253766 - RNA, 19 nt, Homo sapiens
  misc_RNA (1)...(19): siRNA sense strand
gagauuggugaacgaguag

SEQ ID NO: 1253767 - RNA, 19 nt, Homo sapiens
  misc_RNA (1)...(19): siRNA sense strand
ggagagagcacgauuuauu

SEQ ID NO: 1253768 - RNA, 19 nt, Homo sapiens
  misc_RNA (1)...(19): siRNA sense strand
agagaaacauguccauaua

SEQ ID NO: 1253769 - RNA, 19 nt, Homo sapiens
  misc_RNA (1)...(19): siRNA sense strand
cagaugcacuuuauuugua

SEQ ID NO: 1253770 - RNA, 19 nt, Homo sapiens
  misc_RNA (1)...(19): siRNA sense strand
ggacuuacgaguuugguua

SEQ ID NO: 1253771 - RNA, 19 nt, Homo sapiens
  misc_RNA (1)...(19): siRNA sense strand
aaacagauaucaggauuug

SEQ ID NO: 1253772 - RNA, 19 nt, Homo sapiens
  misc_RNA (1)...(19): siRNA sense strand
cuauggagcucauugguaa

SEQ ID NO: 1253773 - RNA, 19 nt, Homo sapiens
  misc_RNA (1)...(19): siRNA sense strand
aaacacaccuuuagugaag

SEQ ID NO: 1253774 - RNA, 19 nt, Homo sapiens
  misc_RNA (1)...(19): siRNA sense strand
gaacuuaaaggaucaguag

SEQ ID NO: 1253775 - RNA, 19 nt, Homo sapiens
  misc_RNA (1)...(19): siRNA sense strand
gaaaacagauaucaggauu

SEQ ID NO: 1253776 - RNA, 19 nt, Homo sapiens
  misc_RNA (1)...(19): siRNA sense strand
uaaaggaucaguagcaauu

SEQ ID NO: 1253777 - RNA, 19 nt, Homo sapiens
  misc_RNA (1)...(19): siRNA sense strand
aaaugggacuuacgaguuu

SEQ ID NO: 1253778 - RNA, 19 nt, Homo sapiens
  misc_RNA (1)...(19): siRNA sense strand
guuaucagaugcacuuuau

SEQ ID NO: 1253779 - RNA, 19 nt, Homo sapiens
  misc_RNA (1)...(19): siRNA sense strand
gagcugaauaugccacuua

SEQ ID NO: 1253780 - RNA, 19 nt, Homo sapiens
  misc_RNA (1)...(19): siRNA sense strand
ugagauuggugaacgagua

SEQ ID NO: 1253781 - RNA, 19 nt, Homo sapiens
  misc_RNA (1)...(19): siRNA sense strand
gugaacgaguagauuauaa

SEQ ID NO: 1253782 - RNA, 19 nt, Homo sapiens
  misc_RNA (1)...(19): siRNA sense strand
gagagagcacgauuuauug

SEQ ID NO: 1253783 - RNA, 19 nt, Homo sapiens
  misc_RNA (1)...(19): siRNA sense strand
caaaugggacuuacgaguu

SEQ ID NO: 1253784 - RNA, 19 nt, Homo sapiens
  misc_RNA (1)...(19): siRNA sense strand
ggucauugcugugauuguu

SEQ ID NO: 1253785 - RNA, 19 nt, Homo sapiens
  misc_RNA (1)...(19): siRNA sense strand
ccagauccauuuucacuua

SEQ ID NO: 1253786 - RNA, 19 nt, Homo sapiens
  misc_RNA (1)...(19): siRNA sense strand
gaaggaauacuugacaguu

SEQ ID NO: 1253787 - RNA, 19 nt, Homo sapiens
  misc_RNA (1)...(19): siRNA sense strand
aaggaauacuugacaguuu

SEQ ID NO: 1253788 - RNA, 19 nt, Homo sapiens
  misc_RNA (1)...(19): siRNA sense strand
ucagaugacgccuguuaua

SEQ ID NO: 1253789 - RNA, 19 nt, Homo sapiens
  misc_RNA (1)...(19): siRNA sense strand
gaaaacacaccuuuaguga

SEQ ID NO: 1253790 - RNA, 19 nt, Homo sapiens
  misc_RNA (1)...(19): siRNA sense strand
gaugacgccuguuauagag

SEQ ID NO: 1253791 - RNA, 19 nt, Homo sapiens
  misc_RNA (1)...(19): siRNA sense strand
gagaaacauguccauauau

SEQ ID NO: 1253792 - RNA, 19 nt, Homo sapiens
  misc_RNA (1)...(19): siRNA sense strand
ccacuuaccagacuaaauc

SEQ ID NO: 1253793 - RNA, 19 nt, Homo sapiens
  misc_RNA (1)...(19): siRNA sense strand
acgaguagauuauaagugu

SEQ ID NO: 1253794 - RNA, 19 nt, Homo sapiens
  misc_RNA (1)...(19): siRNA sense strand
cuacaaagcaacaguuaug

SEQ ID NO: 1253795 - RNA, 19 nt, Homo sapiens
  misc_RNA (1)...(19): siRNA sense strand
ccaccaacauuugaagcua

SEQ ID NO: 1253796 - RNA, 19 nt, Homo sapiens
  misc_RNA (1)...(19): siRNA sense strand
uauacgggauccuuuaaau

SEQ ID NO: 1253797 - RNA, 19 nt, Homo sapiens
  misc_RNA (1)...(19): siRNA sense strand
cgaguuugguuaucagaug

SEQ ID NO: 1253798 - RNA, 19 nt, Homo sapiens
  misc_RNA (1)...(19): siRNA sense strand
gaacgaguagauuauaagu

SEQ ID NO: 1253799 - RNA, 19 nt, Homo sapiens
  misc_RNA (1)...(19): siRNA sense strand
gugaggagccaccaacauu

SEQ ID NO: 1253800 - RNA, 19 nt, Homo sapiens
  misc_RNA (1)...(19): siRNA sense strand
gauggcagcgacacaauug

SEQ ID NO: 1253801 - RNA, 19 nt, Homo sapiens
  misc_RNA (1)...(19): siRNA sense strand
ucucagaugacgccuguua

SEQ ID NO: 1253802 - RNA, 19 nt, Homo sapiens
  misc_RNA (1)...(19): siRNA sense strand
gaggagccaccaacauuug

SEQ ID NO: 1253803 - RNA, 19 nt, Homo sapiens
  misc_RNA (1)...(19): siRNA sense strand
gcuauggagcucauuggua

SEQ ID NO: 1253804 - RNA, 19 nt, Homo sapiens
  misc_RNA (1)...(19): siRNA sense strand
acacaccuuuagugaagua

SEQ ID NO: 1253805 - RNA, 19 nt, Homo sapiens
  misc_RNA (1)...(19): siRNA sense strand
uagagaaacauguccauau

SEQ ID NO: 1253806 - RNA, 19 nt, Homo sapiens
  misc_RNA (1)...(19): siRNA sense strand
ggugaacgaguagauuaua

SEQ ID NO: 1253807 - RNA, 19 nt, Homo sapiens
  misc_RNA (1)...(19): siRNA sense strand
gaaguagaaguauuugagu

SEQ ID NO: 1253808 - RNA, 19 nt, Homo sapiens
  misc_RNA (1)...(19): siRNA sense strand
gaaacauguccauauauac

SEQ ID NO: 1253809 - RNA, 19 nt, Homo sapiens
  misc_RNA (1)...(19): siRNA sense strand
ugacgccuguuauagagaa

SEQ ID NO: 1253810 - RNA, 19 nt, Homo sapiens
  misc_RNA (1)...(19): siRNA sense strand
cgaguagauuauaagugua

SEQ ID NO: 1253811 - RNA, 19 nt, Homo sapiens
  misc_RNA (1)...(19): siRNA sense strand
gcacuuuauuuguaaugag

SEQ ID NO: 1253812 - RNA, 19 nt, Homo sapiens
  misc_RNA (1)...(19): siRNA sense strand
guagaaguauuugaguauc

SEQ ID NO: 1253813 - RNA, 19 nt, Homo sapiens
  misc_RNA (1)...(19): siRNA sense strand
guauuugaguaucuugaug

SEQ ID NO: 1253814 - RNA, 19 nt, Homo sapiens
  misc_RNA (1)...(19): siRNA sense strand
aggaauacuugacaguuug

SEQ ID NO: 1253815 - RNA, 19 nt, Homo sapiens
  misc_RNA (1)...(19): siRNA sense strand
ccaaaacccuacuaugaga

SEQ ID NO: 1253816 - RNA, 19 nt, Homo sapiens
  misc_RNA (1)...(19): siRNA sense strand
aguguaaaguggucaaaug

SEQ ID NO: 1253817 - RNA, 19 nt, Homo sapiens
  misc_RNA (1)...(19): siRNA sense strand
ccacccauacuauuuguga

SEQ ID NO: 1253818 - RNA, 19 nt, Homo sapiens
  misc_RNA (1)...(19): siRNA sense strand
uuggagagagcacgauuua

SEQ ID NO: 1253819 - RNA, 19 nt, Homo sapiens
  misc_RNA (1)...(19): siRNA sense strand
gguuaucagaugcacuuua

SEQ ID NO: 1253820 - RNA, 19 nt, Homo sapiens
  misc_RNA (1)...(19): siRNA sense strand
caccaacauuugaagcuau

SEQ ID NO: 1253821 - RNA, 19 nt, Homo sapiens
  misc_RNA (1)...(19): siRNA sense strand
ugaggagccaccaacauuu

SEQ ID NO: 1253822 - RNA, 19 nt, Homo sapiens
  misc_RNA (1)...(19): siRNA sense strand
ggaaggaauacuugacagu

SEQ ID NO: 1253823 - RNA, 19 nt, Homo sapiens
  misc_RNA (1)...(19): siRNA sense strand
gaggaaggaauacuugaca

SEQ ID NO: 1253824 - RNA, 19 nt, Homo sapiens
  misc_RNA (1)...(19): siRNA sense strand
ugaguaucuugaugcagua

SEQ ID NO: 1253825 - RNA, 19 nt, Homo sapiens
  misc_RNA (1)...(19): siRNA sense strand
caccuuuagugaaguagaa

SEQ ID NO: 1253826 - RNA, 19 nt, Homo sapiens
  misc_RNA (1)...(19): siRNA sense strand
acagauaucaggauuugga

SEQ ID NO: 1253827 - RNA, 19 nt, Homo sapiens
  misc_RNA (1)...(19): siRNA sense strand
ucauugcugugauuguuau

SEQ ID NO: 1253828 - RNA, 19 nt, Homo sapiens
  misc_RNA (1)...(19): siRNA sense strand
ucagaugcacuuuauuugu

SEQ ID NO: 1253829 - RNA, 19 nt, Homo sapiens
  misc_RNA (1)...(19): siRNA sense strand
gugcugcuccagaguguaa

SEQ ID NO: 1253830 - RNA, 19 nt, Homo sapiens
  misc_RNA (1)...(19): siRNA sense strand
ggaaaacacaccuuuagug

SEQ ID NO: 1253831 - RNA, 19 nt, Homo sapiens
  misc_RNA (1)...(19): siRNA sense strand
aaggaucaguagcaauuug

SEQ ID NO: 1253832 - RNA, 19 nt, Homo sapiens
  misc_RNA (1)...(19): siRNA sense strand
uauauacgggauccuuuaa

SEQ ID NO: 1253833 - RNA, 19 nt, Homo sapiens
  misc_RNA (1)...(19): siRNA sense strand
ugaaguagaaguauuugag

SEQ ID NO: 1253834 - RNA, 19 nt, Homo sapiens
  misc_RNA (1)...(19): siRNA sense strand
cuugacaguuuggauguuu

SEQ ID NO: 1253835 - RNA, 19 nt, Homo sapiens
  misc_RNA (1)...(19): siRNA sense strand
cauauauacgggauccuuu

SEQ ID NO: 1253836 - RNA, 19 nt, Homo sapiens
  misc_RNA (1)...(19): siRNA sense strand
auauauacgggauccuuua

SEQ ID NO: 1253837 - RNA, 19 nt, Homo sapiens
  misc_RNA (1)...(19): siRNA sense strand
cuuaaaggaucaguagcaa

SEQ ID NO: 1253838 - RNA, 19 nt, Homo sapiens
  misc_RNA (1)...(19): siRNA sense strand
uaaaccugaggaaggaaua

SEQ ID NO: 1253839 - RNA, 19 nt, Homo sapiens
  misc_RNA (1)...(19): siRNA sense strand
agaugacgccuguuauaga

SEQ ID NO: 1253840 - RNA, 19 nt, Homo sapiens
  misc_RNA (1)...(19): siRNA sense strand
ugugauuguuauugccaua

SEQ ID NO: 1253841 - RNA, 19 nt, Homo sapiens
  misc_RNA (1)...(19): siRNA sense strand
gagagcacgauuuauugug

SEQ ID NO: 1253842 - RNA, 19 nt, Homo sapiens
  misc_RNA (1)...(19): siRNA sense strand
gaaguauuugaguaucuug

SEQ ID NO: 1253843 - RNA, 19 nt, Homo sapiens
  misc_RNA (1)...(19): siRNA sense strand
ggcuaccugucucagauga

SEQ ID NO: 1253844 - RNA, 19 nt, Homo sapiens
  misc_RNA (1)...(19): siRNA sense strand
gauaucaggauuuggaaaa

SEQ ID NO: 1253845 - RNA, 19 nt, Homo sapiens
  misc_RNA (1)...(19): siRNA sense strand
ccucuugccacccauacua

SEQ ID NO: 1253846 - RNA, 19 nt, Homo sapiens
  misc_RNA (1)...(19): siRNA sense strand
ccaugguguugcugcugua

SEQ ID NO: 1253847 - RNA, 19 nt, Homo sapiens
  misc_RNA (1)...(19): siRNA sense strand
cagaugacgccuguuauag

SEQ ID NO: 1253848 - RNA, 19 nt, Homo sapiens
  misc_RNA (1)...(19): siRNA sense strand
cagaugguggagcugaaua

SEQ ID NO: 1253849 - RNA, 19 nt, Homo sapiens
  misc_RNA (1)...(19): siRNA sense strand
uuggugaacgaguagauua

SEQ ID NO: 1253850 - RNA, 19 nt, Homo sapiens
  misc_RNA (1)...(19): siRNA sense strand
gucauugcugugauuguua

SEQ ID NO: 1253851 - RNA, 19 nt, Homo sapiens
  misc_RNA (1)...(19): siRNA sense strand
ggagccaccaacauuugaa

SEQ ID NO: 1253852 - RNA, 19 nt, Homo sapiens
  misc_RNA (1)...(19): siRNA sense strand
gcgcuuuccuggguugcuu

SEQ ID NO: 1253853 - RNA, 19 nt, Homo sapiens
  misc_RNA (1)...(19): siRNA sense strand
uacuacaaagcaacaguua

SEQ ID NO: 1253854 - RNA, 19 nt, Homo sapiens
  misc_RNA (1)...(19): siRNA sense strand
cuugaugcaguaacuuaua

SEQ ID NO: 1253855 - RNA, 19 nt, Homo sapiens
  misc_RNA (1)...(19): siRNA sense strand
aaacauguccauauauacg

SEQ ID NO: 1253856 - RNA, 19 nt, Homo sapiens
  misc_RNA (1)...(19): siRNA sense strand
guguaaaguggucaaaugu

SEQ ID NO: 1253857 - RNA, 19 nt, Homo sapiens
  misc_RNA (1)...(19): siRNA sense strand
cuuacgaguuugguuauca

SEQ ID NO: 1253858 - RNA, 19 nt, Homo sapiens
  misc_RNA (1)...(19): siRNA sense strand
uacgggauccuuuaaaugg

SEQ ID NO: 1253859 - RNA, 19 nt, Homo sapiens
  misc_RNA (1)...(19): siRNA sense strand
gcagaugguggagcugaau

SEQ ID NO: 1253860 - RNA, 19 nt, Homo sapiens
  misc_RNA (1)...(19): siRNA sense strand
aaccaaaacccuacuauga

SEQ ID NO: 1253861 - RNA, 19 nt, Homo sapiens
  misc_RNA (1)...(19): siRNA sense strand
cccaauaugugaaaagguu

SEQ ID NO: 1253862 - RNA, 19 nt, Homo sapiens
  misc_RNA (1)...(19): siRNA sense strand
ggagcugaauaugccacuu

SEQ ID NO: 1253863 - RNA, 19 nt, Homo sapiens
  misc_RNA (1)...(19): siRNA sense strand
cgauggcagcgacacaauu

SEQ ID NO: 1253864 - RNA, 19 nt, Homo sapiens
  misc_RNA (1)...(19): siRNA sense strand
gauccauuuucacuuauug

SEQ ID NO: 1253865 - RNA, 19 nt, Homo sapiens
  misc_RNA (1)...(19): siRNA sense strand
uugaugcaguaacuuauag

SEQ ID NO: 1253866 - RNA, 19 nt, Homo sapiens
  misc_RNA (1)...(19): siRNA sense strand
guaucuugaugcaguaacu

SEQ ID NO: 1253867 - RNA, 19 nt, Homo sapiens
  misc_RNA (1)...(19): siRNA sense strand
ggagagagcacgauuuauu

SEQ ID NO: 1253868 - RNA, 19 nt, Homo sapiens
  misc_RNA (1)...(19): siRNA sense strand
agagaaacauguccauaua

SEQ ID NO: 1253869 - RNA, 19 nt, Homo sapiens
  misc_RNA (1)...(19): siRNA sense strand
cagaugcacuuuauuugua

SEQ ID NO: 1253870 - RNA, 19 nt, Homo sapiens
  misc_RNA (1)...(19): siRNA sense strand
ggacuuacgaguuugguua

SEQ ID NO: 1253871 - RNA, 19 nt, Homo sapiens
  misc_RNA (1)...(19): siRNA sense strand
aaacagauaucaggauuug

SEQ ID NO: 1253872 - RNA, 19 nt, Homo sapiens
  misc_RNA (1)...(19): siRNA sense strand
cuauggagcucauugguaa

SEQ ID NO: 1253873 - RNA, 19 nt, Homo sapiens
  misc_RNA (1)...(19): siRNA sense strand
aaacacaccuuuagugaag

SEQ ID NO: 1253874 - RNA, 19 nt, Homo sapiens
  misc_RNA (1)...(19): siRNA sense strand
gaacuuaaaggaucaguag

SEQ ID NO: 1253875 - RNA, 19 nt, Homo sapiens
  misc_RNA (1)...(19): siRNA sense strand
gaaaacagauaucaggauu

SEQ ID NO: 1253876 - RNA, 19 nt, Homo sapiens
  misc_RNA (1)...(19): siRNA sense strand
uaaaggaucaguagcaauu

SEQ ID NO: 1253877 - RNA, 19 nt, Homo sapiens
  misc_RNA (1)...(19): siRNA sense strand
aaaugggacuuacgaguuu

SEQ ID NO: 1253878 - RNA, 19 nt, Homo sapiens
  misc_RNA (1)...(19): siRNA sense strand
guuaucagaugcacuuuau

SEQ ID NO: 1253879 - RNA, 19 nt, Homo sapiens
  misc_RNA (1)...(19): siRNA sense strand
gagcugaauaugccacuua

SEQ ID NO: 1253880 - RNA, 19 nt, Homo sapiens
  misc_RNA (1)...(19): siRNA sense strand
gagcagagaggcugaauag

SEQ ID NO: 1253881 - RNA, 19 nt, Homo sapiens
  misc_RNA (1)...(19): siRNA sense strand
ugagauuggugaacgagua

SEQ ID NO: 1253882 - RNA, 19 nt, Homo sapiens
  misc_RNA (1)...(19): siRNA sense strand
gugaacgaguagauuauaa

SEQ ID NO: 1253883 - RNA, 19 nt, Homo sapiens
  misc_RNA (1)...(19): siRNA sense strand
gagagagcacgauuuauug

SEQ ID NO: 1253884 - RNA, 19 nt, Homo sapiens
  misc_RNA (1)...(19): siRNA sense strand
caaaugggacuuacgaguu

SEQ ID NO: 1253885 - RNA, 19 nt, Homo sapiens
  misc_RNA (1)...(19): siRNA sense strand
ggucauugcugugauuguu

SEQ ID NO: 1253886 - RNA, 19 nt, Homo sapiens
  misc_RNA (1)...(19): siRNA sense strand
ccagauccauuuucacuua

SEQ ID NO: 1253887 - RNA, 19 nt, Homo sapiens
  misc_RNA (1)...(19): siRNA sense strand
gaaggaauacuugacaguu

SEQ ID NO: 1253888 - RNA, 19 nt, Homo sapiens
  misc_RNA (1)...(19): siRNA sense strand
aaggaauacuugacaguuu

SEQ ID NO: 1253889 - RNA, 19 nt, Homo sapiens
  misc_RNA (1)...(19): siRNA sense strand
ucagaugacgccuguuaua

SEQ ID NO: 1253890 - RNA, 19 nt, Homo sapiens
  misc_RNA (1)...(19): siRNA sense strand
gaaaacacaccuuuaguga

SEQ ID NO: 1253891 - RNA, 19 nt, Homo sapiens
  misc_RNA (1)...(19): siRNA sense strand
gaugacgccuguuauagag

SEQ ID NO: 1253892 - RNA, 19 nt, Homo sapiens
  misc_RNA (1)...(19): siRNA sense strand
gagaaacauguccauauau

SEQ ID NO: 1253893 - RNA, 19 nt, Homo sapiens
  misc_RNA (1)...(19): siRNA sense strand
ccacuuaccagacuaaauc

SEQ ID NO: 1253894 - RNA, 19 nt, Homo sapiens
  misc_RNA (1)...(19): siRNA sense strand
acgaguagauuauaagugu

SEQ ID NO: 1253895 - RNA, 19 nt, Homo sapiens
  misc_RNA (1)...(19): siRNA sense strand
cuacaaagcaacaguuaug

SEQ ID NO: 1253896 - RNA, 19 nt, Homo sapiens
  misc_RNA (1)...(19): siRNA sense strand
ccaccaacauuugaagcua

SEQ ID NO: 1253897 - RNA, 19 nt, Homo sapiens
  misc_RNA (1)...(19): siRNA sense strand
uauacgggauccuuuaaau

SEQ ID NO: 1253898 - RNA, 19 nt, Homo sapiens
  misc_RNA (1)...(19): siRNA sense strand
cgaguuugguuaucagaug

SEQ ID NO: 1253899 - RNA, 19 nt, Homo sapiens
  misc_RNA (1)...(19): siRNA sense strand
gaacgaguagauuauaagu

SEQ ID NO: 1253900 - RNA, 19 nt, Homo sapiens
  misc_RNA (1)...(19): siRNA sense strand
gugaggagccaccaacauu

SEQ ID NO: 1253901 - RNA, 19 nt, Homo sapiens
  misc_RNA (1)...(19): siRNA sense strand
gauggcagcgacacaauug

SEQ ID NO: 1253902 - RNA, 19 nt, Homo sapiens
  misc_RNA (1)...(19): siRNA sense strand
ucucagaugacgccuguua

SEQ ID NO: 1253903 - RNA, 19 nt, Homo sapiens
  misc_RNA (1)...(19): siRNA sense strand
acacaccuuuagugaagua

SEQ ID NO: 1253904 - RNA, 19 nt, Homo sapiens
  misc_RNA (1)...(19): siRNA sense strand
gcuauggagcucauuggua

SEQ ID NO: 1253905 - RNA, 19 nt, Homo sapiens
  misc_RNA (1)...(19): siRNA sense strand
gaggagccaccaacauuug

SEQ ID NO: 1253906 - RNA, 19 nt, Homo sapiens
  misc_RNA (1)...(19): siRNA sense strand
uagagaaacauguccauau

SEQ ID NO: 1253907 - RNA, 19 nt, Homo sapiens
  misc_RNA (1)...(19): siRNA sense strand
guuccaaagugucuuaaag

SEQ ID NO: 1253908 - RNA, 19 nt, Homo sapiens
  misc_RNA (1)...(19): siRNA sense strand
ggugaacgaguagauuaua

SEQ ID NO: 1253909 - RNA, 19 nt, Homo sapiens
  misc_RNA (1)...(19): siRNA sense strand
gaaguagaaguauuugagu

SEQ ID NO: 1253910 - RNA, 19 nt, Homo sapiens
  misc_RNA (1)...(19): siRNA sense strand
gaaacauguccauauauac

SEQ ID NO: 1253911 - RNA, 19 nt, Homo sapiens
  misc_RNA (1)...(19): siRNA sense strand
ugacgccuguuauagagaa

SEQ ID NO: 1253912 - RNA, 19 nt, Homo sapiens
  misc_RNA (1)...(19): siRNA sense strand
cgaguagauuauaagugua

SEQ ID NO: 1253913 - RNA, 19 nt, Homo sapiens
  misc_RNA (1)...(19): siRNA sense strand
gcacuuuauuuguaaugag

SEQ ID NO: 1253914 - RNA, 19 nt, Homo sapiens
  misc_RNA (1)...(19): siRNA sense strand
guagaaguauuugaguauc

SEQ ID NO: 1253915 - RNA, 19 nt, Homo sapiens
  misc_RNA (1)...(19): siRNA sense strand
guauuugaguaucuugaug

SEQ ID NO: 1253916 - RNA, 19 nt, Homo sapiens
  misc_RNA (1)...(19): siRNA sense strand
aggaauacuugacaguuug

SEQ ID NO: 1253917 - RNA, 19 nt, Homo sapiens
  misc_RNA (1)...(19): siRNA sense strand
ccaaaacccuacuaugaga

SEQ ID NO: 1253918 - RNA, 19 nt, Homo sapiens
  misc_RNA (1)...(19): siRNA sense strand
aguguaaaguggucaaaug

SEQ ID NO: 1253919 - RNA, 19 nt, Homo sapiens
  misc_RNA (1)...(19): siRNA sense strand
ccacccauacuauuuguga

SEQ ID NO: 1253920 - RNA, 19 nt, Homo sapiens
  misc_RNA (1)...(19): siRNA sense strand
uuggagagagcacgauuua

SEQ ID NO: 1253921 - RNA, 19 nt, Homo sapiens
  misc_RNA (1)...(19): siRNA sense strand
gguuaucagaugcacuuua

SEQ ID NO: 1253922 - RNA, 19 nt, Homo sapiens
  misc_RNA (1)...(19): siRNA sense strand
caccaacauuugaagcuau

SEQ ID NO: 1253923 - RNA, 19 nt, Homo sapiens
  misc_RNA (1)...(19): siRNA sense strand
ugaggagccaccaacauuu

SEQ ID NO: 1253924 - RNA, 19 nt, Homo sapiens
  misc_RNA (1)...(19): siRNA sense strand
ggaaggaauacuugacagu

SEQ ID NO: 1253925 - RNA, 19 nt, Homo sapiens
  misc_RNA (1)...(19): siRNA sense strand
gaggaaggaauacuugaca

SEQ ID NO: 1253926 - RNA, 19 nt, Homo sapiens
  misc_RNA (1)...(19): siRNA sense strand
ccaguuccaaagugucuua

SEQ ID NO: 1253927 - RNA, 19 nt, Homo sapiens
  misc_RNA (1)...(19): siRNA sense strand
ugaguaucuugaugcagua

SEQ ID NO: 1253928 - RNA, 19 nt, Homo sapiens
  misc_RNA (1)...(19): siRNA sense strand
caccuuuagugaaguagaa

SEQ ID NO: 1253929 - RNA, 19 nt, Homo sapiens
  misc_RNA (1)...(19): siRNA sense strand
acagauaucaggauuugga

SEQ ID NO: 1253930 - RNA, 19 nt, Homo sapiens
  misc_RNA (1)...(19): siRNA sense strand
ucauugcugugauuguuau

SEQ ID NO: 1253931 - RNA, 19 nt, Homo sapiens
  misc_RNA (1)...(19): siRNA sense strand
ucagaugcacuuuauuugu

SEQ ID NO: 1253932 - RNA, 19 nt, Homo sapiens
  misc_RNA (1)...(19): siRNA sense strand
gugcugcuccagaguguaa

SEQ ID NO: 1253933 - RNA, 19 nt, Homo sapiens
  misc_RNA (1)...(19): siRNA sense strand
ggaaaacacaccuuuagug

SEQ ID NO: 1253934 - RNA, 19 nt, Homo sapiens
  misc_RNA (1)...(19): siRNA sense strand
aaggaucaguagcaauuug

SEQ ID NO: 1253935 - RNA, 19 nt, Homo sapiens
  misc_RNA (1)...(19): siRNA sense strand
uauauacgggauccuuuaa

SEQ ID NO: 1253936 - RNA, 19 nt, Homo sapiens
  misc_RNA (1)...(19): siRNA sense strand
ugaaguagaaguauuugag

SEQ ID NO: 1253937 - RNA, 19 nt, Homo sapiens
  misc_RNA (1)...(19): siRNA sense strand
cuugacaguuuggauguuu

SEQ ID NO: 1253938 - RNA, 19 nt, Homo sapiens
  misc_RNA (1)...(19): siRNA sense strand
cauauauacgggauccuuu

SEQ ID NO: 1253939 - RNA, 19 nt, Homo sapiens
  misc_RNA (1)...(19): siRNA sense strand
auauauacgggauccuuua

SEQ ID NO: 1253940 - RNA, 19 nt, Homo sapiens
  misc_RNA (1)...(19): siRNA sense strand
cuuaaaggaucaguagcaa

SEQ ID NO: 1253941 - RNA, 19 nt, Homo sapiens
  misc_RNA (1)...(19): siRNA sense strand
uaaaccugaggaaggaaua

SEQ ID NO: 1253942 - RNA, 19 nt, Homo sapiens
  misc_RNA (1)...(19): siRNA sense strand
agaugacgccuguuauaga

SEQ ID NO: 1253943 - RNA, 19 nt, Homo sapiens
  misc_RNA (1)...(19): siRNA sense strand
ugugauuguuauugccaua

SEQ ID NO: 1253944 - RNA, 19 nt, Homo sapiens
  misc_RNA (1)...(19): siRNA sense strand
gagagcacgauuuauugug

SEQ ID NO: 1253945 - RNA, 19 nt, Homo sapiens
  misc_RNA (1)...(19): siRNA sense strand
gaaguauuugaguaucuug

SEQ ID NO: 1253946 - RNA, 19 nt, Homo sapiens
  misc_RNA (1)...(19): siRNA sense strand
ggcuaccugucucagauga

SEQ ID NO: 1253947 - RNA, 19 nt, Homo sapiens
  misc_RNA (1)...(19): siRNA sense strand
ccucuugccacccauacua

SEQ ID NO: 1253948 - RNA, 19 nt, Homo sapiens
  misc_RNA (1)...(19): siRNA sense strand
gauaucaggauuuggaaaa

SEQ ID NO: 1253949 - RNA, 19 nt, Homo sapiens
  misc_RNA (1)...(19): siRNA sense strand
ccaugguguugcugcugua

SEQ ID NO: 1253950 - RNA, 19 nt, Homo sapiens
  misc_RNA (1)...(19): siRNA sense strand
cagaugacgccuguuauag

SEQ ID NO: 1253951 - RNA, 19 nt, Homo sapiens
  misc_RNA (1)...(19): siRNA sense strand
cagaugguggagcugaaua

SEQ ID NO: 1253952 - RNA, 19 nt, Homo sapiens
  misc_RNA (1)...(19): siRNA sense strand
gucauugcugugauuguua

SEQ ID NO: 1253953 - RNA, 19 nt, Homo sapiens
  misc_RNA (1)...(19): siRNA sense strand
uuggugaacgaguagauua

SEQ ID NO: 1253954 - RNA, 19 nt, Homo sapiens
  misc_RNA (1)...(19): siRNA sense strand
ggagccaccaacauuugaa

SEQ ID NO: 1253955 - RNA, 19 nt, Homo sapiens
  misc_RNA (1)...(19): siRNA sense strand
gcgcuuuccuggguugcuu

SEQ ID NO: 1253956 - RNA, 19 nt, Homo sapiens
  misc_RNA (1)...(19): siRNA sense strand
uacuacaaagcaacaguua

SEQ ID NO: 1253957 - RNA, 19 nt, Homo sapiens
  misc_RNA (1)...(19): siRNA sense strand
cuugaugcaguaacuuaua

SEQ ID NO: 1253958 - RNA, 19 nt, Homo sapiens
  misc_RNA (1)...(19): siRNA sense strand
aaacauguccauauauacg

SEQ ID NO: 1253959 - RNA, 19 nt, Homo sapiens
  misc_RNA (1)...(19): siRNA sense strand
guguaaaguggucaaaugu

SEQ ID NO: 1253960 - RNA, 19 nt, Homo sapiens
  misc_RNA (1)...(19): siRNA sense strand
cuuacgaguuugguuauca

SEQ ID NO: 1253961 - RNA, 19 nt, Homo sapiens
  misc_RNA (1)...(19): siRNA sense strand
aaccaaaacccuacuauga

SEQ ID NO: 1253962 - RNA, 19 nt, Homo sapiens
  misc_RNA (1)...(19): siRNA sense strand
gcagaugguggagcugaau

SEQ ID NO: 1253963 - RNA, 19 nt, Homo sapiens
  misc_RNA (1)...(19): siRNA sense strand
uacgggauccuuuaaaugg

SEQ ID NO: 1253964 - RNA, 19 nt, Homo sapiens
  misc_RNA (1)...(19): siRNA sense strand
cgauggcagcgacacaauu

SEQ ID NO: 1253965 - RNA, 19 nt, Homo sapiens
  misc_RNA (1)...(19): siRNA sense strand
ggagcugaauaugccacuu

SEQ ID NO: 1253966 - RNA, 19 nt, Homo sapiens
  misc_RNA (1)...(19): siRNA sense strand
caacauuugaagcuaugga

SEQ ID NO: 1253967 - RNA, 19 nt, Homo sapiens
  misc_RNA (1)...(19): siRNA sense strand
ggagagagcacgauuuauu

SEQ ID NO: 1253968 - RNA, 19 nt, Homo sapiens
  misc_RNA (1)...(19): siRNA sense strand
agagaaacauguccauaua

SEQ ID NO: 1253969 - RNA, 19 nt, Homo sapiens
  misc_RNA (1)...(19): siRNA sense strand
cagaugcacuuuauuugua

SEQ ID NO: 1253970 - RNA, 19 nt, Homo sapiens
  misc_RNA (1)...(19): siRNA sense strand
ggacuuacgaguuugguua

SEQ ID NO: 1253971 - RNA, 19 nt, Homo sapiens
  misc_RNA (1)...(19): siRNA sense strand
aaacagauaucaggauuug

SEQ ID NO: 1253972 - RNA, 19 nt, Homo sapiens
  misc_RNA (1)...(19): siRNA sense strand
cuauggagcucauugguaa

SEQ ID NO: 1253973 - RNA, 19 nt, Homo sapiens
  misc_RNA (1)...(19): siRNA sense strand
aaacacaccuuuagugaag

SEQ ID NO: 1253974 - RNA, 19 nt, Homo sapiens
  misc_RNA (1)...(19): siRNA sense strand
gaacuuaaaggaucaguag

SEQ ID NO: 1253975 - RNA, 19 nt, Homo sapiens
  misc_RNA (1)...(19): siRNA sense strand
gaaaacagauaucaggauu

SEQ ID NO: 1253976 - RNA, 19 nt, Homo sapiens
  misc_RNA (1)...(19): siRNA sense strand
uaaaggaucaguagcaauu

SEQ ID NO: 1253977 - RNA, 19 nt, Homo sapiens
  misc_RNA (1)...(19): siRNA sense strand
aaaugggacuuacgaguuu

SEQ ID NO: 1253978 - RNA, 19 nt, Homo sapiens
  misc_RNA (1)...(19): siRNA sense strand
guuaucagaugcacuuuau

SEQ ID NO: 1253979 - RNA, 19 nt, Homo sapiens
  misc_RNA (1)...(19): siRNA sense strand
ugagauuggugaacgagua

SEQ ID NO: 1253980 - RNA, 19 nt, Homo sapiens
  misc_RNA (1)...(19): siRNA sense strand
gugaacgaguagauuauaa

SEQ ID NO: 1253981 - RNA, 19 nt, Homo sapiens
  misc_RNA (1)...(19): siRNA sense strand
gagagagcacgauuuauug

SEQ ID NO: 1253982 - RNA, 19 nt, Homo sapiens
  misc_RNA (1)...(19): siRNA sense strand
caaaugggacuuacgaguu

SEQ ID NO: 1253983 - RNA, 19 nt, Homo sapiens
  misc_RNA (1)...(19): siRNA sense strand
ggucauugcugugauuguu

SEQ ID NO: 1253984 - RNA, 19 nt, Homo sapiens
  misc_RNA (1)...(19): siRNA sense strand
ccagauccauuuucacuua

SEQ ID NO: 1253985 - RNA, 19 nt, Homo sapiens
  misc_RNA (1)...(19): siRNA sense strand
gaaggaauacuugacaguu

SEQ ID NO: 1253986 - RNA, 19 nt, Homo sapiens
  misc_RNA (1)...(19): siRNA sense strand
aaggaauacuugacaguuu

SEQ ID NO: 1253987 - RNA, 19 nt, Homo sapiens
  misc_RNA (1)...(19): siRNA sense strand
ucagaugacgccuguuaua

SEQ ID NO: 1253988 - RNA, 19 nt, Homo sapiens
  misc_RNA (1)...(19): siRNA sense strand
gaaaacacaccuuuaguga

SEQ ID NO: 1253989 - RNA, 19 nt, Homo sapiens
  misc_RNA (1)...(19): siRNA sense strand
gaugacgccuguuauagag

SEQ ID NO: 1253990 - RNA, 19 nt, Homo sapiens
  misc_RNA (1)...(19): siRNA sense strand
gagaaacauguccauauau

SEQ ID NO: 1253991 - RNA, 19 nt, Homo sapiens
  misc_RNA (1)...(19): siRNA sense strand
acgaguagauuauaagugu

SEQ ID NO: 1253992 - RNA, 19 nt, Homo sapiens
  misc_RNA (1)...(19): siRNA sense strand
cuacaaagcaacaguuaug

SEQ ID NO: 1253993 - RNA, 19 nt, Homo sapiens
  misc_RNA (1)...(19): siRNA sense strand
ccaccaacauuugaagcua

SEQ ID NO: 1253994 - RNA, 19 nt, Homo sapiens
  misc_RNA (1)...(19): siRNA sense strand
uauacgggauccuuuaaau

SEQ ID NO: 1253995 - RNA, 19 nt, Homo sapiens
  misc_RNA (1)...(19): siRNA sense strand
cgaguuugguuaucagaug

SEQ ID NO: 1253996 - RNA, 19 nt, Homo sapiens
  misc_RNA (1)...(19): siRNA sense strand
gaacgaguagauuauaagu

SEQ ID NO: 1253997 - RNA, 19 nt, Homo sapiens
  misc_RNA (1)...(19): siRNA sense strand
gugaggagccaccaacauu

SEQ ID NO: 1253998 - RNA, 19 nt, Homo sapiens
  misc_RNA (1)...(19): siRNA sense strand
gauggcagcgacacaauug

SEQ ID NO: 1253999 - RNA, 19 nt, Homo sapiens
  misc_RNA (1)...(19): siRNA sense strand
gcuauggagcucauuggua

SEQ ID NO: 1254000 - RNA, 19 nt, Homo sapiens
  misc_RNA (1)...(19): siRNA sense strand
gaggagccaccaacauuug

SEQ ID NO: 1254001 - RNA, 19 nt, Homo sapiens
  misc_RNA (1)...(19): siRNA sense strand
acacaccuuuagugaagua

SEQ ID NO: 1254002 - RNA, 19 nt, Homo sapiens
  misc_RNA (1)...(19): siRNA sense strand
ucucagaugacgccuguua

SEQ ID NO: 1254003 - RNA, 19 nt, Homo sapiens
  misc_RNA (1)...(19): siRNA sense strand
uagagaaacauguccauau

SEQ ID NO: 1254004 - RNA, 19 nt, Homo sapiens
  misc_RNA (1)...(19): siRNA sense strand
ggugaacgaguagauuaua

SEQ ID NO: 1254005 - RNA, 19 nt, Homo sapiens
  misc_RNA (1)...(19): siRNA sense strand
gaaguagaaguauuugagu

SEQ ID NO: 1254006 - RNA, 19 nt, Homo sapiens
  misc_RNA (1)...(19): siRNA sense strand
gaaacauguccauauauac

SEQ ID NO: 1254007 - RNA, 19 nt, Homo sapiens
  misc_RNA (1)...(19): siRNA sense strand
ugacgccuguuauagagaa

SEQ ID NO: 1254008 - RNA, 19 nt, Homo sapiens
  misc_RNA (1)...(19): siRNA sense strand
cgaguagauuauaagugua

SEQ ID NO: 1254009 - RNA, 19 nt, Homo sapiens
  misc_RNA (1)...(19): siRNA sense strand
gcacuuuauuuguaaugag

SEQ ID NO: 1254010 - RNA, 19 nt, Homo sapiens
  misc_RNA (1)...(19): siRNA sense strand
guagaaguauuugaguauc

SEQ ID NO: 1254011 - RNA, 19 nt, Homo sapiens
  misc_RNA (1)...(19): siRNA sense strand
guauuugaguaucuugaug

SEQ ID NO: 1254012 - RNA, 19 nt, Homo sapiens
  misc_RNA (1)...(19): siRNA sense strand
aggaauacuugacaguuug

SEQ ID NO: 1254013 - RNA, 19 nt, Homo sapiens
  misc_RNA (1)...(19): siRNA sense strand
aguguaaaguggucaaaug

SEQ ID NO: 1254014 - RNA, 19 nt, Homo sapiens
  misc_RNA (1)...(19): siRNA sense strand
ccaaaacccuacuaugaga

SEQ ID NO: 1254015 - RNA, 19 nt, Homo sapiens
  misc_RNA (1)...(19): siRNA sense strand
ccacccauacuauuuguga

SEQ ID NO: 1254016 - RNA, 19 nt, Homo sapiens
  misc_RNA (1)...(19): siRNA sense strand
caccaacauuugaagcuau

SEQ ID NO: 1254017 - RNA, 19 nt, Homo sapiens
  misc_RNA (1)...(19): siRNA sense strand
uuggagagagcacgauuua

SEQ ID NO: 1254018 - RNA, 19 nt, Homo sapiens
  misc_RNA (1)...(19): siRNA sense strand
gguuaucagaugcacuuua

SEQ ID NO: 1254019 - RNA, 19 nt, Homo sapiens
  misc_RNA (1)...(19): siRNA sense strand
ugaggagccaccaacauuu

SEQ ID NO: 1254020 - RNA, 19 nt, Homo sapiens
  misc_RNA (1)...(19): siRNA sense strand
ggaaggaauacuugacagu

SEQ ID NO: 1254021 - RNA, 19 nt, Homo sapiens
  misc_RNA (1)...(19): siRNA sense strand
gaggaaggaauacuugaca

SEQ ID NO: 1254022 - RNA, 19 nt, Homo sapiens
  misc_RNA (1)...(19): siRNA sense strand
ugaguaucuugaugcagua

SEQ ID NO: 1254023 - RNA, 19 nt, Homo sapiens
  misc_RNA (1)...(19): siRNA sense strand
caccuuuagugaaguagaa

SEQ ID NO: 1254024 - RNA, 19 nt, Homo sapiens
  misc_RNA (1)...(19): siRNA sense strand
acagauaucaggauuugga

SEQ ID NO: 1254025 - RNA, 19 nt, Homo sapiens
  misc_RNA (1)...(19): siRNA sense strand
ucauugcugugauuguuau

SEQ ID NO: 1254026 - RNA, 19 nt, Homo sapiens
  misc_RNA (1)...(19): siRNA sense strand
ucagaugcacuuuauuugu

SEQ ID NO: 1254027 - RNA, 19 nt, Homo sapiens
  misc_RNA (1)...(19): siRNA sense strand
gugcugcuccagaguguaa

SEQ ID NO: 1254028 - RNA, 19 nt, Homo sapiens
  misc_RNA (1)...(19): siRNA sense strand
ggaaaacacaccuuuagug

SEQ ID NO: 1254029 - RNA, 19 nt, Homo sapiens
  misc_RNA (1)...(19): siRNA sense strand
aaggaucaguagcaauuug

SEQ ID NO: 1254030 - RNA, 19 nt, Homo sapiens
  misc_RNA (1)...(19): siRNA sense strand
uauauacgggauccuuuaa

SEQ ID NO: 1254031 - RNA, 19 nt, Homo sapiens
  misc_RNA (1)...(19): siRNA sense strand
ugaaguagaaguauuugag

SEQ ID NO: 1254032 - RNA, 19 nt, Homo sapiens
  misc_RNA (1)...(19): siRNA sense strand
cuugacaguuuggauguuu

SEQ ID NO: 1254033 - RNA, 19 nt, Homo sapiens
  misc_RNA (1)...(19): siRNA sense strand
cauauauacgggauccuuu

SEQ ID NO: 1254034 - RNA, 19 nt, Homo sapiens
  misc_RNA (1)...(19): siRNA sense strand
auauauacgggauccuuua

SEQ ID NO: 1254035 - RNA, 19 nt, Homo sapiens
  misc_RNA (1)...(19): siRNA sense strand
cuuaaaggaucaguagcaa

SEQ ID NO: 1254036 - RNA, 19 nt, Homo sapiens
  misc_RNA (1)...(19): siRNA sense strand
uaaaccugaggaaggaaua

SEQ ID NO: 1254037 - RNA, 19 nt, Homo sapiens
  misc_RNA (1)...(19): siRNA sense strand
agaugacgccuguuauaga

SEQ ID NO: 1254038 - RNA, 19 nt, Homo sapiens
  misc_RNA (1)...(19): siRNA sense strand
ugugauuguuauugccaua

SEQ ID NO: 1254039 - RNA, 19 nt, Homo sapiens
  misc_RNA (1)...(19): siRNA sense strand
gagagcacgauuuauugug

SEQ ID NO: 1254040 - RNA, 19 nt, Homo sapiens
  misc_RNA (1)...(19): siRNA sense strand
gaaguauuugaguaucuug

SEQ ID NO: 1254041 - RNA, 19 nt, Homo sapiens
  misc_RNA (1)...(19): siRNA sense strand
ccucuugccacccauacua

SEQ ID NO: 1254042 - RNA, 19 nt, Homo sapiens
  misc_RNA (1)...(19): siRNA sense strand
gauaucaggauuuggaaaa

SEQ ID NO: 1254043 - RNA, 19 nt, Homo sapiens
  misc_RNA (1)...(19): siRNA sense strand
ggcuaccugucucagauga

SEQ ID NO: 1254044 - RNA, 19 nt, Homo sapiens
  misc_RNA (1)...(19): siRNA sense strand
ccaugguguugcugcugua

SEQ ID NO: 1254045 - RNA, 19 nt, Homo sapiens
  misc_RNA (1)...(19): siRNA sense strand
cagaugacgccuguuauag

SEQ ID NO: 1254046 - RNA, 19 nt, Homo sapiens
  misc_RNA (1)...(19): siRNA sense strand
gucauugcugugauuguua

SEQ ID NO: 1254047 - RNA, 19 nt, Homo sapiens
  misc_RNA (1)...(19): siRNA sense strand
uuggugaacgaguagauua

SEQ ID NO: 1254048 - RNA, 19 nt, Homo sapiens
  misc_RNA (1)...(19): siRNA sense strand
ggagccaccaacauuugaa

SEQ ID NO: 1254049 - RNA, 19 nt, Homo sapiens
  misc_RNA (1)...(19): siRNA sense strand
gcgcuuuccuggguugcuu

SEQ ID NO: 1254050 - RNA, 19 nt, Homo sapiens
  misc_RNA (1)...(19): siRNA sense strand
uacuacaaagcaacaguua

SEQ ID NO: 1254051 - RNA, 19 nt, Homo sapiens
  misc_RNA (1)...(19): siRNA sense strand
cuugaugcaguaacuuaua

SEQ ID NO: 1254052 - RNA, 19 nt, Homo sapiens
  misc_RNA (1)...(19): siRNA sense strand
aaacauguccauauauacg

SEQ ID NO: 1254053 - RNA, 19 nt, Homo sapiens
  misc_RNA (1)...(19): siRNA sense strand
guguaaaguggucaaaugu

SEQ ID NO: 1254054 - RNA, 19 nt, Homo sapiens
  misc_RNA (1)...(19): siRNA sense strand
cuuacgaguuugguuauca

SEQ ID NO: 1254055 - RNA, 19 nt, Homo sapiens
  misc_RNA (1)...(19): siRNA sense strand
uacgggauccuuuaaaugg

SEQ ID NO: 1254056 - RNA, 19 nt, Homo sapiens
  misc_RNA (1)...(19): siRNA sense strand
aaccaaaacccuacuauga

SEQ ID NO: 1254057 - RNA, 19 nt, Homo sapiens
  misc_RNA (1)...(19): siRNA sense strand
cccaauaugugaaaagguu

SEQ ID NO: 1254058 - RNA, 19 nt, Homo sapiens
  misc_RNA (1)...(19): siRNA sense strand
cgauggcagcgacacaauu

SEQ ID NO: 1254059 - RNA, 19 nt, Homo sapiens
  misc_RNA (1)...(19): siRNA sense strand
gauccauuuucacuuauug

SEQ ID NO: 1254060 - RNA, 19 nt, Homo sapiens
  misc_RNA (1)...(19): siRNA sense strand
uugaugcaguaacuuauag

SEQ ID NO: 1254061 - RNA, 19 nt, Homo sapiens
  misc_RNA (1)...(19): siRNA sense strand
guaucuugaugcaguaacu

SEQ ID NO: 1254062 - RNA, 19 nt, Homo sapiens
  misc_RNA (1)...(19): siRNA sense strand
caacauuugaagcuaugga

SEQ ID NO: 1254063 - RNA, 19 nt, Homo sapiens
  misc_RNA (1)...(19): siRNA sense strand
gagauuggugaacgaguag

SEQ ID NO: 1254064 - RNA, 19 nt, Homo sapiens
  misc_RNA (1)...(19): siRNA sense strand
ggagagagcacgauuuauu

SEQ ID NO: 1254065 - RNA, 19 nt, Homo sapiens
  misc_RNA (1)...(19): siRNA sense strand
agagaaacauguccauaua

SEQ ID NO: 1254066 - RNA, 19 nt, Homo sapiens
  misc_RNA (1)...(19): siRNA sense strand
cagaugcacuuuauuugua

SEQ ID NO: 1254067 - RNA, 19 nt, Homo sapiens
  misc_RNA (1)...(19): siRNA sense strand
ggacuuacgaguuugguua

SEQ ID NO: 1254068 - RNA, 19 nt, Homo sapiens
  misc_RNA (1)...(19): siRNA sense strand
aaacagauaucaggauuug

SEQ ID NO: 1254069 - RNA, 19 nt, Homo sapiens
  misc_RNA (1)...(19): siRNA sense strand
cuauggagcucauugguaa

SEQ ID NO: 1254070 - RNA, 19 nt, Homo sapiens
  misc_RNA (1)...(19): siRNA sense strand
aaacacaccuuuagugaag

SEQ ID NO: 1254071 - RNA, 19 nt, Homo sapiens
  misc_RNA (1)...(19): siRNA sense strand
gaacuuaaaggaucaguag

SEQ ID NO: 1254072 - RNA, 19 nt, Homo sapiens
  misc_RNA (1)...(19): siRNA sense strand
gaaaacagauaucaggauu

SEQ ID NO: 1254073 - RNA, 19 nt, Homo sapiens
  misc_RNA (1)...(19): siRNA sense strand
uaaaggaucaguagcaauu

SEQ ID NO: 1254074 - RNA, 19 nt, Homo sapiens
  misc_RNA (1)...(19): siRNA sense strand
aaaugggacuuacgaguuu

SEQ ID NO: 1254075 - RNA, 19 nt, Homo sapiens
  misc_RNA (1)...(19): siRNA sense strand
guuaucagaugcacuuuau

SEQ ID NO: 1254076 - RNA, 19 nt, Homo sapiens
  misc_RNA (1)...(19): siRNA sense strand
ugagauuggugaacgagua

SEQ ID NO: 1254077 - RNA, 19 nt, Homo sapiens
  misc_RNA (1)...(19): siRNA sense strand
gugaacgaguagauuauaa

SEQ ID NO: 1254078 - RNA, 19 nt, Homo sapiens
  misc_RNA (1)...(19): siRNA sense strand
gagagagcacgauuuauug

SEQ ID NO: 1254079 - RNA, 19 nt, Homo sapiens
  misc_RNA (1)...(19): siRNA sense strand
caaaugggacuuacgaguu

SEQ ID NO: 1254080 - RNA, 19 nt, Homo sapiens
  misc_RNA (1)...(19): siRNA sense strand
ggucauugcugugauuguu

SEQ ID NO: 1254081 - RNA, 19 nt, Homo sapiens
  misc_RNA (1)...(19): siRNA sense strand
ccagauccauuuucacuua

SEQ ID NO: 1254082 - RNA, 19 nt, Homo sapiens
  misc_RNA (1)...(19): siRNA sense strand
gaaggaauacuugacaguu

SEQ ID NO: 1254083 - RNA, 19 nt, Homo sapiens
  misc_RNA (1)...(19): siRNA sense strand
aaggaauacuugacaguuu

SEQ ID NO: 1254084 - RNA, 19 nt, Homo sapiens
  misc_RNA (1)...(19): siRNA sense strand
ucagaugacgccuguuaua

SEQ ID NO: 1254085 - RNA, 19 nt, Homo sapiens
  misc_RNA (1)...(19): siRNA sense strand
gaaaacacaccuuuaguga

SEQ ID NO: 1254086 - RNA, 19 nt, Homo sapiens
  misc_RNA (1)...(19): siRNA sense strand
gaugacgccuguuauagag

SEQ ID NO: 1254087 - RNA, 19 nt, Homo sapiens
  misc_RNA (1)...(19): siRNA sense strand
gagaaacauguccauauau

SEQ ID NO: 1254088 - RNA, 19 nt, Homo sapiens
  misc_RNA (1)...(19): siRNA sense strand
acgaguagauuauaagugu

SEQ ID NO: 1254089 - RNA, 19 nt, Homo sapiens
  misc_RNA (1)...(19): siRNA sense strand
cuacaaagcaacaguuaug

SEQ ID NO: 1254090 - RNA, 19 nt, Homo sapiens
  misc_RNA (1)...(19): siRNA sense strand
ccaccaacauuugaagcua

SEQ ID NO: 1254091 - RNA, 19 nt, Homo sapiens
  misc_RNA (1)...(19): siRNA sense strand
uauacgggauccuuuaaau

SEQ ID NO: 1254092 - RNA, 19 nt, Homo sapiens
  misc_RNA (1)...(19): siRNA sense strand
cgaguuugguuaucagaug

SEQ ID NO: 1254093 - RNA, 19 nt, Homo sapiens
  misc_RNA (1)...(19): siRNA sense strand
gaacgaguagauuauaagu

SEQ ID NO: 1254094 - RNA, 19 nt, Homo sapiens
  misc_RNA (1)...(19): siRNA sense strand
gugaggagccaccaacauu

SEQ ID NO: 1254095 - RNA, 19 nt, Homo sapiens
  misc_RNA (1)...(19): siRNA sense strand
gauggcagcgacacaauug

SEQ ID NO: 1254096 - RNA, 19 nt, Homo sapiens
  misc_RNA (1)...(19): siRNA sense strand
gcuauggagcucauuggua

SEQ ID NO: 1254097 - RNA, 19 nt, Homo sapiens
  misc_RNA (1)...(19): siRNA sense strand
gaggagccaccaacauuug

SEQ ID NO: 1254098 - RNA, 19 nt, Homo sapiens
  misc_RNA (1)...(19): siRNA sense strand
acacaccuuuagugaagua

SEQ ID NO: 1254099 - RNA, 19 nt, Homo sapiens
  misc_RNA (1)...(19): siRNA sense strand
ucucagaugacgccuguua

SEQ ID NO: 1254100 - RNA, 19 nt, Homo sapiens
  misc_RNA (1)...(19): siRNA sense strand
uagagaaacauguccauau

SEQ ID NO: 1254101 - RNA, 19 nt, Homo sapiens
  misc_RNA (1)...(19): siRNA sense strand
guuccaaagugucuuaaag

SEQ ID NO: 1254102 - RNA, 19 nt, Homo sapiens
  misc_RNA (1)...(19): siRNA sense strand
ggugaacgaguagauuaua

SEQ ID NO: 1254103 - RNA, 19 nt, Homo sapiens
  misc_RNA (1)...(19): siRNA sense strand
gaaguagaaguauuugagu

SEQ ID NO: 1254104 - RNA, 19 nt, Homo sapiens
  misc_RNA (1)...(19): siRNA sense strand
gaaacauguccauauauac

SEQ ID NO: 1254105 - RNA, 19 nt, Homo sapiens
  misc_RNA (1)...(19): siRNA sense strand
ugacgccuguuauagagaa

SEQ ID NO: 1254106 - RNA, 19 nt, Homo sapiens
  misc_RNA (1)...(19): siRNA sense strand
cgaguagauuauaagugua

SEQ ID NO: 1254107 - RNA, 19 nt, Homo sapiens
  misc_RNA (1)...(19): siRNA sense strand
gcacuuuauuuguaaugag

SEQ ID NO: 1254108 - RNA, 19 nt, Homo sapiens
  misc_RNA (1)...(19): siRNA sense strand
guagaaguauuugaguauc

SEQ ID NO: 1254109 - RNA, 19 nt, Homo sapiens
  misc_RNA (1)...(19): siRNA sense strand
guauuugaguaucuugaug

SEQ ID NO: 1254110 - RNA, 19 nt, Homo sapiens
  misc_RNA (1)...(19): siRNA sense strand
aggaauacuugacaguuug

SEQ ID NO: 1254111 - RNA, 19 nt, Homo sapiens
  misc_RNA (1)...(19): siRNA sense strand
ccaaaacccuacuaugaga

SEQ ID NO: 1254112 - RNA, 19 nt, Homo sapiens
  misc_RNA (1)...(19): siRNA sense strand
aguguaaaguggucaaaug

SEQ ID NO: 1254113 - RNA, 19 nt, Homo sapiens
  misc_RNA (1)...(19): siRNA sense strand
ccacccauacuauuuguga

SEQ ID NO: 1254114 - RNA, 19 nt, Homo sapiens
  misc_RNA (1)...(19): siRNA sense strand
caccaacauuugaagcuau

SEQ ID NO: 1254115 - RNA, 19 nt, Homo sapiens
  misc_RNA (1)...(19): siRNA sense strand
uuggagagagcacgauuua

SEQ ID NO: 1254116 - RNA, 19 nt, Homo sapiens
  misc_RNA (1)...(19): siRNA sense strand
gguuaucagaugcacuuua

SEQ ID NO: 1254117 - RNA, 19 nt, Homo sapiens
  misc_RNA (1)...(19): siRNA sense strand
ugaggagccaccaacauuu

SEQ ID NO: 1254118 - RNA, 19 nt, Homo sapiens
  misc_RNA (1)...(19): siRNA sense strand
ggaaggaauacuugacagu

SEQ ID NO: 1254119 - RNA, 19 nt, Homo sapiens
  misc_RNA (1)...(19): siRNA sense strand
gaggaaggaauacuugaca

SEQ ID NO: 1254120 - RNA, 19 nt, Homo sapiens
  misc_RNA (1)...(19): siRNA sense strand
ccaguuccaaagugucuua

SEQ ID NO: 1254121 - RNA, 19 nt, Homo sapiens
  misc_RNA (1)...(19): siRNA sense strand
ugaguaucuugaugcagua

SEQ ID NO: 1254122 - RNA, 19 nt, Homo sapiens
  misc_RNA (1)...(19): siRNA sense strand
caccuuuagugaaguagaa

SEQ ID NO: 1254123 - RNA, 19 nt, Homo sapiens
  misc_RNA (1)...(19): siRNA sense strand
acagauaucaggauuugga

SEQ ID NO: 1254124 - RNA, 19 nt, Homo sapiens
  misc_RNA (1)...(19): siRNA sense strand
ucauugcugugauuguuau

SEQ ID NO: 1254125 - RNA, 19 nt, Homo sapiens
  misc_RNA (1)...(19): siRNA sense strand
ucagaugcacuuuauuugu

SEQ ID NO: 1254126 - RNA, 19 nt, Homo sapiens
  misc_RNA (1)...(19): siRNA sense strand
gugcugcuccagaguguaa

SEQ ID NO: 1254127 - RNA, 19 nt, Homo sapiens
  misc_RNA (1)...(19): siRNA sense strand
ggaaaacacaccuuuagug

SEQ ID NO: 1254128 - RNA, 19 nt, Homo sapiens
  misc_RNA (1)...(19): siRNA sense strand
aaggaucaguagcaauuug

SEQ ID NO: 1254129 - RNA, 19 nt, Homo sapiens
  misc_RNA (1)...(19): siRNA sense strand
uauauacgggauccuuuaa

SEQ ID NO: 1254130 - RNA, 19 nt, Homo sapiens
  misc_RNA (1)...(19): siRNA sense strand
ugaaguagaaguauuugag

SEQ ID NO: 1254131 - RNA, 19 nt, Homo sapiens
  misc_RNA (1)...(19): siRNA sense strand
cuugacaguuuggauguuu

SEQ ID NO: 1254132 - RNA, 19 nt, Homo sapiens
  misc_RNA (1)...(19): siRNA sense strand
cauauauacgggauccuuu

SEQ ID NO: 1254133 - RNA, 19 nt, Homo sapiens
  misc_RNA (1)...(19): siRNA sense strand
auauauacgggauccuuua

SEQ ID NO: 1254134 - RNA, 19 nt, Homo sapiens
  misc_RNA (1)...(19): siRNA sense strand
cuuaaaggaucaguagcaa

SEQ ID NO: 1254135 - RNA, 19 nt, Homo sapiens
  misc_RNA (1)...(19): siRNA sense strand
uaaaccugaggaaggaaua

SEQ ID NO: 1254136 - RNA, 19 nt, Homo sapiens
  misc_RNA (1)...(19): siRNA sense strand
agaugacgccuguuauaga

SEQ ID NO: 1254137 - RNA, 19 nt, Homo sapiens
  misc_RNA (1)...(19): siRNA sense strand
ugugauuguuauugccaua

SEQ ID NO: 1254138 - RNA, 19 nt, Homo sapiens
  misc_RNA (1)...(19): siRNA sense strand
gagagcacgauuuauugug

SEQ ID NO: 1254139 - RNA, 19 nt, Homo sapiens
  misc_RNA (1)...(19): siRNA sense strand
gaaguauuugaguaucuug

SEQ ID NO: 1254140 - RNA, 19 nt, Homo sapiens
  misc_RNA (1)...(19): siRNA sense strand
ggcuaccugucucagauga

SEQ ID NO: 1254141 - RNA, 19 nt, Homo sapiens
  misc_RNA (1)...(19): siRNA sense strand
gauaucaggauuuggaaaa

SEQ ID NO: 1254142 - RNA, 19 nt, Homo sapiens
  misc_RNA (1)...(19): siRNA sense strand
ccucuugccacccauacua

SEQ ID NO: 1254143 - RNA, 19 nt, Homo sapiens
  misc_RNA (1)...(19): siRNA sense strand
ccaugguguugcugcugua

SEQ ID NO: 1254144 - RNA, 19 nt, Homo sapiens
  misc_RNA (1)...(19): siRNA sense strand
cagaugacgccuguuauag

SEQ ID NO: 1254145 - RNA, 19 nt, Homo sapiens
  misc_RNA (1)...(19): siRNA sense strand
uuggugaacgaguagauua

SEQ ID NO: 1254146 - RNA, 19 nt, Homo sapiens
  misc_RNA (1)...(19): siRNA sense strand
gucauugcugugauuguua

SEQ ID NO: 1254147 - RNA, 19 nt, Homo sapiens
  misc_RNA (1)...(19): siRNA sense strand
ggagccaccaacauuugaa

SEQ ID NO: 1254148 - RNA, 19 nt, Homo sapiens
  misc_RNA (1)...(19): siRNA sense strand
gcgcuuuccuggguugcuu

SEQ ID NO: 1254149 - RNA, 19 nt, Homo sapiens
  misc_RNA (1)...(19): siRNA sense strand
uacuacaaagcaacaguua

SEQ ID NO: 1254150 - RNA, 19 nt, Homo sapiens
  misc_RNA (1)...(19): siRNA sense strand
cuugaugcaguaacuuaua

SEQ ID NO: 1254151 - RNA, 19 nt, Homo sapiens
  misc_RNA (1)...(19): siRNA sense strand
aaacauguccauauauacg

SEQ ID NO: 1254152 - RNA, 19 nt, Homo sapiens
  misc_RNA (1)...(19): siRNA sense strand
guguaaaguggucaaaugu

SEQ ID NO: 1254153 - RNA, 19 nt, Homo sapiens
  misc_RNA (1)...(19): siRNA sense strand
cuuacgaguuugguuauca

SEQ ID NO: 1254154 - RNA, 19 nt, Homo sapiens
  misc_RNA (1)...(19): siRNA sense strand
uacgggauccuuuaaaugg

SEQ ID NO: 1254155 - RNA, 19 nt, Homo sapiens
  misc_RNA (1)...(19): siRNA sense strand
aaccaaaacccuacuauga

SEQ ID NO: 1254156 - RNA, 19 nt, Homo sapiens
  misc_RNA (1)...(19): siRNA sense strand
cccaauaugugaaaagguu

SEQ ID NO: 1254157 - RNA, 19 nt, Homo sapiens
  misc_RNA (1)...(19): siRNA sense strand
cgauggcagcgacacaauu

SEQ ID NO: 1254158 - RNA, 19 nt, Homo sapiens
  misc_RNA (1)...(19): siRNA sense strand
gauccauuuucacuuauug

SEQ ID NO: 1254159 - RNA, 19 nt, Homo sapiens
  misc_RNA (1)...(19): siRNA sense strand
uugaugcaguaacuuauag

SEQ ID NO: 1254160 - RNA, 19 nt, Homo sapiens
  misc_RNA (1)...(19): siRNA sense strand
guaucuugaugcaguaacu

SEQ ID NO: 1254161 - RNA, 19 nt, Homo sapiens
  misc_RNA (1)...(19): siRNA sense strand
caacauuugaagcuaugga

SEQ ID NO: 1254162 - RNA, 19 nt, Homo sapiens
  misc_RNA (1)...(19): siRNA sense strand
gagauuggugaacgaguag

SEQ ID NO: 1254163 - RNA, 19 nt, Homo sapiens
  misc_RNA (1)...(19): siRNA sense strand
ggagagagcacgauuuauu

SEQ ID NO: 1254164 - RNA, 19 nt, Homo sapiens
  misc_RNA (1)...(19): siRNA sense strand
agagaaacauguccauaua

SEQ ID NO: 1254165 - RNA, 19 nt, Homo sapiens
  misc_RNA (1)...(19): siRNA sense strand
cagaugcacuuuauuugua

SEQ ID NO: 1254166 - RNA, 19 nt, Homo sapiens
  misc_RNA (1)...(19): siRNA sense strand
ggacuuacgaguuugguua

SEQ ID NO: 1254167 - RNA, 19 nt, Homo sapiens
  misc_RNA (1)...(19): siRNA sense strand
aaacagauaucaggauuug

SEQ ID NO: 1254168 - RNA, 19 nt, Homo sapiens
  misc_RNA (1)...(19): siRNA sense strand
cuauggagcucauugguaa

SEQ ID NO: 1254169 - RNA, 19 nt, Homo sapiens
  misc_RNA (1)...(19): siRNA sense strand
aaacacaccuuuagugaag

SEQ ID NO: 1254170 - RNA, 19 nt, Homo sapiens
  misc_RNA (1)...(19): siRNA sense strand
gaacuuaaaggaucaguag

SEQ ID NO: 1254171 - RNA, 19 nt, Homo sapiens
  misc_RNA (1)...(19): siRNA sense strand
gaaaacagauaucaggauu

SEQ ID NO: 1254172 - RNA, 19 nt, Homo sapiens
  misc_RNA (1)...(19): siRNA sense strand
uaaaggaucaguagcaauu

SEQ ID NO: 1254173 - RNA, 19 nt, Homo sapiens
  misc_RNA (1)...(19): siRNA sense strand
aaaugggacuuacgaguuu

SEQ ID NO: 1254174 - RNA, 19 nt, Homo sapiens
  misc_RNA (1)...(19): siRNA sense strand
guuaucagaugcacuuuau

SEQ ID NO: 1254175 - RNA, 19 nt, Homo sapiens
  misc_RNA (1)...(19): siRNA sense strand
gagcugaauaugccacuua

SEQ ID NO: 1254176 - RNA, 19 nt, Homo sapiens
  misc_RNA (1)...(19): siRNA sense strand
ugagauuggugaacgagua

SEQ ID NO: 1254177 - RNA, 19 nt, Homo sapiens
  misc_RNA (1)...(19): siRNA sense strand
gugaacgaguagauuauaa

SEQ ID NO: 1254178 - RNA, 19 nt, Homo sapiens
  misc_RNA (1)...(19): siRNA sense strand
gagagagcacgauuuauug

SEQ ID NO: 1254179 - RNA, 19 nt, Homo sapiens
  misc_RNA (1)...(19): siRNA sense strand
caaaugggacuuacgaguu

SEQ ID NO: 1254180 - RNA, 19 nt, Homo sapiens
  misc_RNA (1)...(19): siRNA sense strand
ggucauugcugugauuguu

SEQ ID NO: 1254181 - RNA, 19 nt, Homo sapiens
  misc_RNA (1)...(19): siRNA sense strand
ccagauccauuuucacuua

SEQ ID NO: 1254182 - RNA, 19 nt, Homo sapiens
  misc_RNA (1)...(19): siRNA sense strand
gaaggaauacuugacaguu

SEQ ID NO: 1254183 - RNA, 19 nt, Homo sapiens
  misc_RNA (1)...(19): siRNA sense strand
aaggaauacuugacaguuu

SEQ ID NO: 1254184 - RNA, 19 nt, Homo sapiens
  misc_RNA (1)...(19): siRNA sense strand
ucagaugacgccuguuaua

SEQ ID NO: 1254185 - RNA, 19 nt, Homo sapiens
  misc_RNA (1)...(19): siRNA sense strand
gaaaacacaccuuuaguga

SEQ ID NO: 1254186 - RNA, 19 nt, Homo sapiens
  misc_RNA (1)...(19): siRNA sense strand
gaugacgccuguuauagag

SEQ ID NO: 1254187 - RNA, 19 nt, Homo sapiens
  misc_RNA (1)...(19): siRNA sense strand
gagaaacauguccauauau

SEQ ID NO: 1254188 - RNA, 19 nt, Homo sapiens
  misc_RNA (1)...(19): siRNA sense strand
ccacuuaccagacuaaauc

SEQ ID NO: 1254189 - RNA, 19 nt, Homo sapiens
  misc_RNA (1)...(19): siRNA sense strand
acgaguagauuauaagugu

SEQ ID NO: 1254190 - RNA, 19 nt, Homo sapiens
  misc_RNA (1)...(19): siRNA sense strand
cuacaaagcaacaguuaug

SEQ ID NO: 1254191 - RNA, 19 nt, Homo sapiens
  misc_RNA (1)...(19): siRNA sense strand
ccaccaacauuugaagcua

SEQ ID NO: 1254192 - RNA, 19 nt, Homo sapiens
  misc_RNA (1)...(19): siRNA sense strand
uauacgggauccuuuaaau

SEQ ID NO: 1254193 - RNA, 19 nt, Homo sapiens
  misc_RNA (1)...(19): siRNA sense strand
cgaguuugguuaucagaug

SEQ ID NO: 1254194 - RNA, 19 nt, Homo sapiens
  misc_RNA (1)...(19): siRNA sense strand
gaacgaguagauuauaagu

SEQ ID NO: 1254195 - RNA, 19 nt, Homo sapiens
  misc_RNA (1)...(19): siRNA sense strand
gugaggagccaccaacauu

SEQ ID NO: 1254196 - RNA, 19 nt, Homo sapiens
  misc_RNA (1)...(19): siRNA sense strand
gauggcagcgacacaauug

SEQ ID NO: 1254197 - RNA, 19 nt, Homo sapiens
  misc_RNA (1)...(19): siRNA sense strand
ucucagaugacgccuguua

SEQ ID NO: 1254198 - RNA, 19 nt, Homo sapiens
  misc_RNA (1)...(19): siRNA sense strand
gaggagccaccaacauuug

SEQ ID NO: 1254199 - RNA, 19 nt, Homo sapiens
  misc_RNA (1)...(19): siRNA sense strand
gcuauggagcucauuggua

SEQ ID NO: 1254200 - RNA, 19 nt, Homo sapiens
  misc_RNA (1)...(19): siRNA sense strand
acacaccuuuagugaagua

SEQ ID NO: 1254201 - RNA, 19 nt, Homo sapiens
  misc_RNA (1)...(19): siRNA sense strand
uagagaaacauguccauau

SEQ ID NO: 1254202 - RNA, 19 nt, Homo sapiens
  misc_RNA (1)...(19): siRNA sense strand
guuccaaagugucuuaaag

SEQ ID NO: 1254203 - RNA, 19 nt, Homo sapiens
  misc_RNA (1)...(19): siRNA sense strand
ggugaacgaguagauuaua

SEQ ID NO: 1254204 - RNA, 19 nt, Homo sapiens
  misc_RNA (1)...(19): siRNA sense strand
gaaguagaaguauuugagu

SEQ ID NO: 1254205 - RNA, 19 nt, Homo sapiens
  misc_RNA (1)...(19): siRNA sense strand
gaaacauguccauauauac

SEQ ID NO: 1254206 - RNA, 19 nt, Homo sapiens
  misc_RNA (1)...(19): siRNA sense strand
ugacgccuguuauagagaa

SEQ ID NO: 1254207 - RNA, 19 nt, Homo sapiens
  misc_RNA (1)...(19): siRNA sense strand
cgaguagauuauaagugua

SEQ ID NO: 1254208 - RNA, 19 nt, Homo sapiens
  misc_RNA (1)...(19): siRNA sense strand
gcacuuuauuuguaaugag

SEQ ID NO: 1254209 - RNA, 19 nt, Homo sapiens
  misc_RNA (1)...(19): siRNA sense strand
guagaaguauuugaguauc

SEQ ID NO: 1254210 - RNA, 19 nt, Homo sapiens
  misc_RNA (1)...(19): siRNA sense strand
guauuugaguaucuugaug

SEQ ID NO: 1254211 - RNA, 19 nt, Homo sapiens
  misc_RNA (1)...(19): siRNA sense strand
aggaauacuugacaguuug

SEQ ID NO: 1254212 - RNA, 19 nt, Homo sapiens
  misc_RNA (1)...(19): siRNA sense strand
ccaaaacccuacuaugaga

SEQ ID NO: 1254213 - RNA, 19 nt, Homo sapiens
  misc_RNA (1)...(19): siRNA sense strand
aguguaaaguggucaaaug

SEQ ID NO: 1254214 - RNA, 19 nt, Homo sapiens
  misc_RNA (1)...(19): siRNA sense strand
ccacccauacuauuuguga

SEQ ID NO: 1254215 - RNA, 19 nt, Homo sapiens
  misc_RNA (1)...(19): siRNA sense strand
uuggagagagcacgauuua

SEQ ID NO: 1254216 - RNA, 19 nt, Homo sapiens
  misc_RNA (1)...(19): siRNA sense strand
gguuaucagaugcacuuua

SEQ ID NO: 1254217 - RNA, 19 nt, Homo sapiens
  misc_RNA (1)...(19): siRNA sense strand
caccaacauuugaagcuau

SEQ ID NO: 1254218 - RNA, 19 nt, Homo sapiens
  misc_RNA (1)...(19): siRNA sense strand
ugaggagccaccaacauuu

SEQ ID NO: 1254219 - RNA, 19 nt, Homo sapiens
  misc_RNA (1)...(19): siRNA sense strand
ggaaggaauacuugacagu

SEQ ID NO: 1254220 - RNA, 19 nt, Homo sapiens
  misc_RNA (1)...(19): siRNA sense strand
gaggaaggaauacuugaca

SEQ ID NO: 1254221 - RNA, 19 nt, Homo sapiens
  misc_RNA (1)...(19): siRNA sense strand
ccaguuccaaagugucuua

SEQ ID NO: 1254222 - RNA, 19 nt, Homo sapiens
  misc_RNA (1)...(19): siRNA sense strand
ugaguaucuugaugcagua

SEQ ID NO: 1254223 - RNA, 19 nt, Homo sapiens
  misc_RNA (1)...(19): siRNA sense strand
caccuuuagugaaguagaa

SEQ ID NO: 1254224 - RNA, 19 nt, Homo sapiens
  misc_RNA (1)...(19): siRNA sense strand
acagauaucaggauuugga

SEQ ID NO: 1254225 - RNA, 19 nt, Homo sapiens
  misc_RNA (1)...(19): siRNA sense strand
ucauugcugugauuguuau

SEQ ID NO: 1254226 - RNA, 19 nt, Homo sapiens
  misc_RNA (1)...(19): siRNA sense strand
ucagaugcacuuuauuugu

SEQ ID NO: 1254227 - RNA, 19 nt, Homo sapiens
  misc_RNA (1)...(19): siRNA sense strand
gugcugcuccagaguguaa

SEQ ID NO: 1254228 - RNA, 19 nt, Homo sapiens
  misc_RNA (1)...(19): siRNA sense strand
ggaaaacacaccuuuagug

SEQ ID NO: 1254229 - RNA, 19 nt, Homo sapiens
  misc_RNA (1)...(19): siRNA sense strand
aaggaucaguagcaauuug

SEQ ID NO: 1254230 - RNA, 19 nt, Homo sapiens
  misc_RNA (1)...(19): siRNA sense strand
uauauacgggauccuuuaa

SEQ ID NO: 1254231 - RNA, 19 nt, Homo sapiens
  misc_RNA (1)...(19): siRNA sense strand
ugaaguagaaguauuugag

SEQ ID NO: 1254232 - RNA, 19 nt, Homo sapiens
  misc_RNA (1)...(19): siRNA sense strand
cuugacaguuuggauguuu

SEQ ID NO: 1254233 - RNA, 19 nt, Homo sapiens
  misc_RNA (1)...(19): siRNA sense strand
cauauauacgggauccuuu

SEQ ID NO: 1254234 - RNA, 19 nt, Homo sapiens
  misc_RNA (1)...(19): siRNA sense strand
auauauacgggauccuuua

SEQ ID NO: 1254235 - RNA, 19 nt, Homo sapiens
  misc_RNA (1)...(19): siRNA sense strand
cuuaaaggaucaguagcaa

SEQ ID NO: 1254236 - RNA, 19 nt, Homo sapiens
  misc_RNA (1)...(19): siRNA sense strand
uaaaccugaggaaggaaua

SEQ ID NO: 1254237 - RNA, 19 nt, Homo sapiens
  misc_RNA (1)...(19): siRNA sense strand
agaugacgccuguuauaga

SEQ ID NO: 1254238 - RNA, 19 nt, Homo sapiens
  misc_RNA (1)...(19): siRNA sense strand
ugugauuguuauugccaua

SEQ ID NO: 1254239 - RNA, 19 nt, Homo sapiens
  misc_RNA (1)...(19): siRNA sense strand
gagagcacgauuuauugug

SEQ ID NO: 1254240 - RNA, 19 nt, Homo sapiens
  misc_RNA (1)...(19): siRNA sense strand
gaaguauuugaguaucuug

SEQ ID NO: 1254241 - RNA, 19 nt, Homo sapiens
  misc_RNA (1)...(19): siRNA sense strand
ggcuaccugucucagauga

SEQ ID NO: 1254242 - RNA, 19 nt, Homo sapiens
  misc_RNA (1)...(19): siRNA sense strand
gauaucaggauuuggaaaa

SEQ ID NO: 1254243 - RNA, 19 nt, Homo sapiens
  misc_RNA (1)...(19): siRNA sense strand
ccucuugccacccauacua

SEQ ID NO: 1254244 - RNA, 19 nt, Homo sapiens
  misc_RNA (1)...(19): siRNA sense strand
ccaugguguugcugcugua

SEQ ID NO: 1254245 - RNA, 19 nt, Homo sapiens
  misc_RNA (1)...(19): siRNA sense strand
cagaugacgccuguuauag

SEQ ID NO: 1254246 - RNA, 19 nt, Homo sapiens
  misc_RNA (1)...(19): siRNA sense strand
cagaugguggagcugaaua

SEQ ID NO: 1254247 - RNA, 19 nt, Homo sapiens
  misc_RNA (1)...(19): siRNA sense strand
gucauugcugugauuguua

SEQ ID NO: 1254248 - RNA, 19 nt, Homo sapiens
  misc_RNA (1)...(19): siRNA sense strand
ggagccaccaacauuugaa

SEQ ID NO: 1254249 - RNA, 19 nt, Homo sapiens
  misc_RNA (1)...(19): siRNA sense strand
uuggugaacgaguagauua

SEQ ID NO: 1254250 - RNA, 19 nt, Homo sapiens
  misc_RNA (1)...(19): siRNA sense strand
gcgcuuuccuggguugcuu

SEQ ID NO: 1254251 - RNA, 19 nt, Homo sapiens
  misc_RNA (1)...(19): siRNA sense strand
uacuacaaagcaacaguua

SEQ ID NO: 1254252 - RNA, 19 nt, Homo sapiens
  misc_RNA (1)...(19): siRNA sense strand
cuugaugcaguaacuuaua

SEQ ID NO: 1254253 - RNA, 19 nt, Homo sapiens
  misc_RNA (1)...(19): siRNA sense strand
aaacauguccauauauacg

SEQ ID NO: 1254254 - RNA, 19 nt, Homo sapiens
  misc_RNA (1)...(19): siRNA sense strand
guguaaaguggucaaaugu

SEQ ID NO: 1254255 - RNA, 19 nt, Homo sapiens
  misc_RNA (1)...(19): siRNA sense strand
cuuacgaguuugguuauca

SEQ ID NO: 1254256 - RNA, 19 nt, Homo sapiens
  misc_RNA (1)...(19): siRNA sense strand
uacgggauccuuuaaaugg

SEQ ID NO: 1254257 - RNA, 19 nt, Homo sapiens
  misc_RNA (1)...(19): siRNA sense strand
gcagaugguggagcugaau

SEQ ID NO: 1254258 - RNA, 19 nt, Homo sapiens
  misc_RNA (1)...(19): siRNA sense strand
aaccaaaacccuacuauga

SEQ ID NO: 1254259 - RNA, 19 nt, Homo sapiens
  misc_RNA (1)...(19): siRNA sense strand
uugaugcaguaacuuauag

SEQ ID NO: 1254260 - RNA, 19 nt, Homo sapiens
  misc_RNA (1)...(19): siRNA sense strand
ggagcugaauaugccacuu

SEQ ID NO: 1254261 - RNA, 19 nt, Homo sapiens
  misc_RNA (1)...(19): siRNA sense strand
cgauggcagcgacacaauu

SEQ ID NO: 1254262 - RNA, 19 nt, Homo sapiens
  misc_RNA (1)...(19): siRNA sense strand
gauccauuuucacuuauug

SEQ ID NO: 1254263 - RNA, 19 nt, Homo sapiens
  misc_RNA (1)...(19): siRNA sense strand
ggagagagcacgauuuauu

SEQ ID NO: 1254264 - RNA, 19 nt, Homo sapiens
  misc_RNA (1)...(19): siRNA sense strand
agagaaacauguccauaua

SEQ ID NO: 1254265 - RNA, 19 nt, Homo sapiens
  misc_RNA (1)...(19): siRNA sense strand
cagaugcacuuuauuugua

SEQ ID NO: 1254266 - RNA, 19 nt, Homo sapiens
  misc_RNA (1)...(19): siRNA sense strand
ggacuuacgaguuugguua

SEQ ID NO: 1254267 - RNA, 19 nt, Homo sapiens
  misc_RNA (1)...(19): siRNA sense strand
aaacagauaucaggauuug

SEQ ID NO: 1254268 - RNA, 19 nt, Homo sapiens
  misc_RNA (1)...(19): siRNA sense strand
cuauggagcucauugguaa

SEQ ID NO: 1254269 - RNA, 19 nt, Homo sapiens
  misc_RNA (1)...(19): siRNA sense strand
aaacacaccuuuagugaag

SEQ ID NO: 1254270 - RNA, 19 nt, Homo sapiens
  misc_RNA (1)...(19): siRNA sense strand
gaacuuaaaggaucaguag

SEQ ID NO: 1254271 - RNA, 19 nt, Homo sapiens
  misc_RNA (1)...(19): siRNA sense strand
gaaaacagauaucaggauu

SEQ ID NO: 1254272 - RNA, 19 nt, Homo sapiens
  misc_RNA (1)...(19): siRNA sense strand
uaaaggaucaguagcaauu

SEQ ID NO: 1254273 - RNA, 19 nt, Homo sapiens
  misc_RNA (1)...(19): siRNA sense strand
aaaugggacuuacgaguuu

SEQ ID NO: 1254274 - RNA, 19 nt, Homo sapiens
  misc_RNA (1)...(19): siRNA sense strand
guuaucagaugcacuuuau

SEQ ID NO: 1254275 - RNA, 19 nt, Homo sapiens
  misc_RNA (1)...(19): siRNA sense strand
ugagauuggugaacgagua

SEQ ID NO: 1254276 - RNA, 19 nt, Homo sapiens
  misc_RNA (1)...(19): siRNA sense strand
gugaacgaguagauuauaa

SEQ ID NO: 1254277 - RNA, 19 nt, Homo sapiens
  misc_RNA (1)...(19): siRNA sense strand
gagagagcacgauuuauug

SEQ ID NO: 1254278 - RNA, 19 nt, Homo sapiens
  misc_RNA (1)...(19): siRNA sense strand
caaaugggacuuacgaguu

SEQ ID NO: 1254279 - RNA, 19 nt, Homo sapiens
  misc_RNA (1)...(19): siRNA sense strand
ggucauugcugugauuguu

SEQ ID NO: 1254280 - RNA, 19 nt, Homo sapiens
  misc_RNA (1)...(19): siRNA sense strand
ccagauccauuuucacuua

SEQ ID NO: 1254281 - RNA, 19 nt, Homo sapiens
  misc_RNA (1)...(19): siRNA sense strand
gaaggaauacuugacaguu

SEQ ID NO: 1254282 - RNA, 19 nt, Homo sapiens
  misc_RNA (1)...(19): siRNA sense strand
aaggaauacuugacaguuu

SEQ ID NO: 1254283 - RNA, 19 nt, Homo sapiens
  misc_RNA (1)...(19): siRNA sense strand
ucagaugacgccuguuaua

SEQ ID NO: 1254284 - RNA, 19 nt, Homo sapiens
  misc_RNA (1)...(19): siRNA sense strand
gaaaacacaccuuuaguga

SEQ ID NO: 1254285 - RNA, 19 nt, Homo sapiens
  misc_RNA (1)...(19): siRNA sense strand
gaugacgccuguuauagag

SEQ ID NO: 1254286 - RNA, 19 nt, Homo sapiens
  misc_RNA (1)...(19): siRNA sense strand
gagaaacauguccauauau

SEQ ID NO: 1254287 - RNA, 19 nt, Homo sapiens
  misc_RNA (1)...(19): siRNA sense strand
acgaguagauuauaagugu

SEQ ID NO: 1254288 - RNA, 19 nt, Homo sapiens
  misc_RNA (1)...(19): siRNA sense strand
cuacaaagcaacaguuaug

SEQ ID NO: 1254289 - RNA, 19 nt, Homo sapiens
  misc_RNA (1)...(19): siRNA sense strand
ccaccaacauuugaagcua

SEQ ID NO: 1254290 - RNA, 19 nt, Homo sapiens
  misc_RNA (1)...(19): siRNA sense strand
uauacgggauccuuuaaau

SEQ ID NO: 1254291 - RNA, 19 nt, Homo sapiens
  misc_RNA (1)...(19): siRNA sense strand
cgaguuugguuaucagaug

SEQ ID NO: 1254292 - RNA, 19 nt, Homo sapiens
  misc_RNA (1)...(19): siRNA sense strand
gaacgaguagauuauaagu

SEQ ID NO: 1254293 - RNA, 19 nt, Homo sapiens
  misc_RNA (1)...(19): siRNA sense strand
gugaggagccaccaacauu

SEQ ID NO: 1254294 - RNA, 19 nt, Homo sapiens
  misc_RNA (1)...(19): siRNA sense strand
gauggcagcgacacaauug

SEQ ID NO: 1254295 - RNA, 19 nt, Homo sapiens
  misc_RNA (1)...(19): siRNA sense strand
gcuauggagcucauuggua

SEQ ID NO: 1254296 - RNA, 19 nt, Homo sapiens
  misc_RNA (1)...(19): siRNA sense strand
gaggagccaccaacauuug

SEQ ID NO: 1254297 - RNA, 19 nt, Homo sapiens
  misc_RNA (1)...(19): siRNA sense strand
acacaccuuuagugaagua

SEQ ID NO: 1254298 - RNA, 19 nt, Homo sapiens
  misc_RNA (1)...(19): siRNA sense strand
ucucagaugacgccuguua

SEQ ID NO: 1254299 - RNA, 19 nt, Homo sapiens
  misc_RNA (1)...(19): siRNA sense strand
uagagaaacauguccauau

SEQ ID NO: 1254300 - RNA, 19 nt, Homo sapiens
  misc_RNA (1)...(19): siRNA sense strand
guuccaaagugucuuaaag

SEQ ID NO: 1254301 - RNA, 19 nt, Homo sapiens
  misc_RNA (1)...(19): siRNA sense strand
ggugaacgaguagauuaua

SEQ ID NO: 1254302 - RNA, 19 nt, Homo sapiens
  misc_RNA (1)...(19): siRNA sense strand
gaaguagaaguauuugagu

SEQ ID NO: 1254303 - RNA, 19 nt, Homo sapiens
  misc_RNA (1)...(19): siRNA sense strand
gaaacauguccauauauac

SEQ ID NO: 1254304 - RNA, 19 nt, Homo sapiens
  misc_RNA (1)...(19): siRNA sense strand
ugacgccuguuauagagaa

SEQ ID NO: 1254305 - RNA, 19 nt, Homo sapiens
  misc_RNA (1)...(19): siRNA sense strand
cgaguagauuauaagugua

SEQ ID NO: 1254306 - RNA, 19 nt, Homo sapiens
  misc_RNA (1)...(19): siRNA sense strand
gcacuuuauuuguaaugag

SEQ ID NO: 1254307 - RNA, 19 nt, Homo sapiens
  misc_RNA (1)...(19): siRNA sense strand
guagaaguauuugaguauc

SEQ ID NO: 1254308 - RNA, 19 nt, Homo sapiens
  misc_RNA (1)...(19): siRNA sense strand
guauuugaguaucuugaug

SEQ ID NO: 1254309 - RNA, 19 nt, Homo sapiens
  misc_RNA (1)...(19): siRNA sense strand
aggaauacuugacaguuug

SEQ ID NO: 1254310 - RNA, 19 nt, Homo sapiens
  misc_RNA (1)...(19): siRNA sense strand
ccaaaacccuacuaugaga

SEQ ID NO: 1254311 - RNA, 19 nt, Homo sapiens
  misc_RNA (1)...(19): siRNA sense strand
aguguaaaguggucaaaug

SEQ ID NO: 1254312 - RNA, 19 nt, Homo sapiens
  misc_RNA (1)...(19): siRNA sense strand
ccacccauacuauuuguga

SEQ ID NO: 1254313 - RNA, 19 nt, Homo sapiens
  misc_RNA (1)...(19): siRNA sense strand
caccaacauuugaagcuau

SEQ ID NO: 1254314 - RNA, 19 nt, Homo sapiens
  misc_RNA (1)...(19): siRNA sense strand
uuggagagagcacgauuua

SEQ ID NO: 1254315 - RNA, 19 nt, Homo sapiens
  misc_RNA (1)...(19): siRNA sense strand
gguuaucagaugcacuuua

SEQ ID NO: 1254316 - RNA, 19 nt, Homo sapiens
  misc_RNA (1)...(19): siRNA sense strand
ugaggagccaccaacauuu

SEQ ID NO: 1254317 - RNA, 19 nt, Homo sapiens
  misc_RNA (1)...(19): siRNA sense strand
ggaaggaauacuugacagu

SEQ ID NO: 1254318 - RNA, 19 nt, Homo sapiens
  misc_RNA (1)...(19): siRNA sense strand
gaggaaggaauacuugaca

SEQ ID NO: 1254319 - RNA, 19 nt, Homo sapiens
  misc_RNA (1)...(19): siRNA sense strand
ccaguuccaaagugucuua

SEQ ID NO: 1254320 - RNA, 19 nt, Homo sapiens
  misc_RNA (1)...(19): siRNA sense strand
ugaguaucuugaugcagua

SEQ ID NO: 1254321 - RNA, 19 nt, Homo sapiens
  misc_RNA (1)...(19): siRNA sense strand
caccuuuagugaaguagaa

SEQ ID NO: 1254322 - RNA, 19 nt, Homo sapiens
  misc_RNA (1)...(19): siRNA sense strand
acagauaucaggauuugga

SEQ ID NO: 1254323 - RNA, 19 nt, Homo sapiens
  misc_RNA (1)...(19): siRNA sense strand
ucauugcugugauuguuau

SEQ ID NO: 1254324 - RNA, 19 nt, Homo sapiens
  misc_RNA (1)...(19): siRNA sense strand
ucagaugcacuuuauuugu

SEQ ID NO: 1254325 - RNA, 19 nt, Homo sapiens
  misc_RNA (1)...(19): siRNA sense strand
gugcugcuccagaguguaa

SEQ ID NO: 1254326 - RNA, 19 nt, Homo sapiens
  misc_RNA (1)...(19): siRNA sense strand
ggaaaacacaccuuuagug

SEQ ID NO: 1254327 - RNA, 19 nt, Homo sapiens
  misc_RNA (1)...(19): siRNA sense strand
aaggaucaguagcaauuug

SEQ ID NO: 1254328 - RNA, 19 nt, Homo sapiens
  misc_RNA (1)...(19): siRNA sense strand
uauauacgggauccuuuaa

SEQ ID NO: 1254329 - RNA, 19 nt, Homo sapiens
  misc_RNA (1)...(19): siRNA sense strand
ugaaguagaaguauuugag

SEQ ID NO: 1254330 - RNA, 19 nt, Homo sapiens
  misc_RNA (1)...(19): siRNA sense strand
cuugacaguuuggauguuu

SEQ ID NO: 1254331 - RNA, 19 nt, Homo sapiens
  misc_RNA (1)...(19): siRNA sense strand
cauauauacgggauccuuu

SEQ ID NO: 1254332 - RNA, 19 nt, Homo sapiens
  misc_RNA (1)...(19): siRNA sense strand
auauauacgggauccuuua

SEQ ID NO: 1254333 - RNA, 19 nt, Homo sapiens
  misc_RNA (1)...(19): siRNA sense strand
cuuaaaggaucaguagcaa

SEQ ID NO: 1254334 - RNA, 19 nt, Homo sapiens
  misc_RNA (1)...(19): siRNA sense strand
uaaaccugaggaaggaaua

SEQ ID NO: 1254335 - RNA, 19 nt, Homo sapiens
  misc_RNA (1)...(19): siRNA sense strand
agaugacgccuguuauaga

SEQ ID NO: 1254336 - RNA, 19 nt, Homo sapiens
  misc_RNA (1)...(19): siRNA sense strand
ugugauuguuauugccaua

SEQ ID NO: 1254337 - RNA, 19 nt, Homo sapiens
  misc_RNA (1)...(19): siRNA sense strand
gagagcacgauuuauugug

SEQ ID NO: 1254338 - RNA, 19 nt, Homo sapiens
  misc_RNA (1)...(19): siRNA sense strand
gaaguauuugaguaucuug

SEQ ID NO: 1254339 - RNA, 19 nt, Homo sapiens
  misc_RNA (1)...(19): siRNA sense strand
ggcuaccugucucagauga

SEQ ID NO: 1254340 - RNA, 19 nt, Homo sapiens
  misc_RNA (1)...(19): siRNA sense strand
gauaucaggauuuggaaaa

SEQ ID NO: 1254341 - RNA, 19 nt, Homo sapiens
  misc_RNA (1)...(19): siRNA sense strand
ccucuugccacccauacua

SEQ ID NO: 1254342 - RNA, 19 nt, Homo sapiens
  misc_RNA (1)...(19): siRNA sense strand
ccaugguguugcugcugua

SEQ ID NO: 1254343 - RNA, 19 nt, Homo sapiens
  misc_RNA (1)...(19): siRNA sense strand
cagaugacgccuguuauag

SEQ ID NO: 1254344 - RNA, 19 nt, Homo sapiens
  misc_RNA (1)...(19): siRNA sense strand
uuggugaacgaguagauua

SEQ ID NO: 1254345 - RNA, 19 nt, Homo sapiens
  misc_RNA (1)...(19): siRNA sense strand
gucauugcugugauuguua

SEQ ID NO: 1254346 - RNA, 19 nt, Homo sapiens
  misc_RNA (1)...(19): siRNA sense strand
ggagccaccaacauuugaa

SEQ ID NO: 1254347 - RNA, 19 nt, Homo sapiens
  misc_RNA (1)...(19): siRNA sense strand
gcgcuuuccuggguugcuu

SEQ ID NO: 1254348 - RNA, 19 nt, Homo sapiens
  misc_RNA (1)...(19): siRNA sense strand
uacuacaaagcaacaguua

SEQ ID NO: 1254349 - RNA, 19 nt, Homo sapiens
  misc_RNA (1)...(19): siRNA sense strand
cuugaugcaguaacuuaua

SEQ ID NO: 1254350 - RNA, 19 nt, Homo sapiens
  misc_RNA (1)...(19): siRNA sense strand
aaacauguccauauauacg

SEQ ID NO: 1254351 - RNA, 19 nt, Homo sapiens
  misc_RNA (1)...(19): siRNA sense strand
guguaaaguggucaaaugu

SEQ ID NO: 1254352 - RNA, 19 nt, Homo sapiens
  misc_RNA (1)...(19): siRNA sense strand
cuuacgaguuugguuauca

SEQ ID NO: 1254353 - RNA, 19 nt, Homo sapiens
  misc_RNA (1)...(19): siRNA sense strand
uacgggauccuuuaaaugg

SEQ ID NO: 1254354 - RNA, 19 nt, Homo sapiens
  misc_RNA (1)...(19): siRNA sense strand
aaccaaaacccuacuauga

SEQ ID NO: 1254355 - RNA, 19 nt, Homo sapiens
  misc_RNA (1)...(19): siRNA sense strand
cccaauaugugaaaagguu

SEQ ID NO: 1254356 - RNA, 19 nt, Homo sapiens
  misc_RNA (1)...(19): siRNA sense strand
cgauggcagcgacacaauu

SEQ ID NO: 1254357 - RNA, 19 nt, Homo sapiens
  misc_RNA (1)...(19): siRNA sense strand
gauccauuuucacuuauug

SEQ ID NO: 1254358 - RNA, 19 nt, Homo sapiens
  misc_RNA (1)...(19): siRNA sense strand
uugaugcaguaacuuauag

SEQ ID NO: 1254359 - RNA, 19 nt, Homo sapiens
  misc_RNA (1)...(19): siRNA sense strand
guaucuugaugcaguaacu

SEQ ID NO: 1254360 - RNA, 19 nt, Homo sapiens
  misc_RNA (1)...(19): siRNA sense strand
caacauuugaagcuaugga

SEQ ID NO: 1254361 - RNA, 19 nt, Homo sapiens
  misc_RNA (1)...(19): siRNA sense strand
gagauuggugaacgaguag

SEQ ID NO: 1254362 - RNA, 19 nt, Homo sapiens
  misc_RNA (1)...(19): siRNA sense strand
ggagagagcacgauuuauu

SEQ ID NO: 1254363 - RNA, 19 nt, Homo sapiens
  misc_RNA (1)...(19): siRNA sense strand
agagaaacauguccauaua

SEQ ID NO: 1254364 - RNA, 19 nt, Homo sapiens
  misc_RNA (1)...(19): siRNA sense strand
cagaugcacuuuauuugua

SEQ ID NO: 1254365 - RNA, 19 nt, Homo sapiens
  misc_RNA (1)...(19): siRNA sense strand
ggacuuacgaguuugguua

SEQ ID NO: 1254366 - RNA, 19 nt, Homo sapiens
  misc_RNA (1)...(19): siRNA sense strand
aaacagauaucaggauuug

SEQ ID NO: 1254367 - RNA, 19 nt, Homo sapiens
  misc_RNA (1)...(19): siRNA sense strand
cuauggagcucauugguaa

SEQ ID NO: 1254368 - RNA, 19 nt, Homo sapiens
  misc_RNA (1)...(19): siRNA sense strand
aaacacaccuuuagugaag

SEQ ID NO: 1254369 - RNA, 19 nt, Homo sapiens
  misc_RNA (1)...(19): siRNA sense strand
gaacuuaaaggaucaguag

SEQ ID NO: 1254370 - RNA, 19 nt, Homo sapiens
  misc_RNA (1)...(19): siRNA sense strand
gaaaacagauaucaggauu

SEQ ID NO: 1254371 - RNA, 19 nt, Homo sapiens
  misc_RNA (1)...(19): siRNA sense strand
uaaaggaucaguagcaauu

SEQ ID NO: 1254372 - RNA, 19 nt, Homo sapiens
  misc_RNA (1)...(19): siRNA sense strand
aaaugggacuuacgaguuu

SEQ ID NO: 1254373 - RNA, 19 nt, Homo sapiens
  misc_RNA (1)...(19): siRNA sense strand
guuaucagaugcacuuuau

SEQ ID NO: 1254374 - RNA, 19 nt, Homo sapiens
  misc_RNA (1)...(19): siRNA sense strand
ugagauuggugaacgagua

SEQ ID NO: 1254375 - RNA, 19 nt, Homo sapiens
  misc_RNA (1)...(19): siRNA sense strand
gugaacgaguagauuauaa

SEQ ID NO: 1254376 - RNA, 19 nt, Homo sapiens
  misc_RNA (1)...(19): siRNA sense strand
gagagagcacgauuuauug

SEQ ID NO: 1254377 - RNA, 19 nt, Homo sapiens
  misc_RNA (1)...(19): siRNA sense strand
caaaugggacuuacgaguu

SEQ ID NO: 1254378 - RNA, 19 nt, Homo sapiens
  misc_RNA (1)...(19): siRNA sense strand
ggucauugcugugauuguu

SEQ ID NO: 1254379 - RNA, 19 nt, Homo sapiens
  misc_RNA (1)...(19): siRNA sense strand
ccagauccauuuucacuua

SEQ ID NO: 1254380 - RNA, 19 nt, Homo sapiens
  misc_RNA (1)...(19): siRNA sense strand
gaaggaauacuugacaguu

SEQ ID NO: 1254381 - RNA, 19 nt, Homo sapiens
  misc_RNA (1)...(19): siRNA sense strand
aaggaauacuugacaguuu

SEQ ID NO: 1254382 - RNA, 19 nt, Homo sapiens
  misc_RNA (1)...(19): siRNA sense strand
ucagaugacgccuguuaua

SEQ ID NO: 1254383 - RNA, 19 nt, Homo sapiens
  misc_RNA (1)...(19): siRNA sense strand
gaaaacacaccuuuaguga

SEQ ID NO: 1254384 - RNA, 19 nt, Homo sapiens
  misc_RNA (1)...(19): siRNA sense strand
gaugacgccuguuauagag

SEQ ID NO: 1254385 - RNA, 19 nt, Homo sapiens
  misc_RNA (1)...(19): siRNA sense strand
gagaaacauguccauauau

SEQ ID NO: 1254386 - RNA, 19 nt, Homo sapiens
  misc_RNA (1)...(19): siRNA sense strand
acgaguagauuauaagugu

SEQ ID NO: 1254387 - RNA, 19 nt, Homo sapiens
  misc_RNA (1)...(19): siRNA sense strand
cuacaaagcaacaguuaug

SEQ ID NO: 1254388 - RNA, 19 nt, Homo sapiens
  misc_RNA (1)...(19): siRNA sense strand
ccaccaacauuugaagcua

SEQ ID NO: 1254389 - RNA, 19 nt, Homo sapiens
  misc_RNA (1)...(19): siRNA sense strand
uauacgggauccuuuaaau

SEQ ID NO: 1254390 - RNA, 19 nt, Homo sapiens
  misc_RNA (1)...(19): siRNA sense strand
cgaguuugguuaucagaug

SEQ ID NO: 1254391 - RNA, 19 nt, Homo sapiens
  misc_RNA (1)...(19): siRNA sense strand
gaacgaguagauuauaagu

SEQ ID NO: 1254392 - RNA, 19 nt, Homo sapiens
  misc_RNA (1)...(19): siRNA sense strand
gugaggagccaccaacauu

SEQ ID NO: 1254393 - RNA, 19 nt, Homo sapiens
  misc_RNA (1)...(19): siRNA sense strand
gauggcagcgacacaauug

SEQ ID NO: 1254394 - RNA, 19 nt, Homo sapiens
  misc_RNA (1)...(19): siRNA sense strand
gcuauggagcucauuggua

SEQ ID NO: 1254395 - RNA, 19 nt, Homo sapiens
  misc_RNA (1)...(19): siRNA sense strand
gaggagccaccaacauuug

SEQ ID NO: 1254396 - RNA, 19 nt, Homo sapiens
  misc_RNA (1)...(19): siRNA sense strand
acacaccuuuagugaagua

SEQ ID NO: 1254397 - RNA, 19 nt, Homo sapiens
  misc_RNA (1)...(19): siRNA sense strand
ucucagaugacgccuguua

SEQ ID NO: 1254398 - RNA, 19 nt, Homo sapiens
  misc_RNA (1)...(19): siRNA sense strand
uagagaaacauguccauau

SEQ ID NO: 1254399 - RNA, 19 nt, Homo sapiens
  misc_RNA (1)...(19): siRNA sense strand
ggugaacgaguagauuaua

SEQ ID NO: 1254400 - RNA, 19 nt, Homo sapiens
  misc_RNA (1)...(19): siRNA sense strand
gaaguagaaguauuugagu

SEQ ID NO: 1254401 - RNA, 19 nt, Homo sapiens
  misc_RNA (1)...(19): siRNA sense strand
gaaacauguccauauauac

SEQ ID NO: 1254402 - RNA, 19 nt, Homo sapiens
  misc_RNA (1)...(19): siRNA sense strand
ugacgccuguuauagagaa

SEQ ID NO: 1254403 - RNA, 19 nt, Homo sapiens
  misc_RNA (1)...(19): siRNA sense strand
cgaguagauuauaagugua

SEQ ID NO: 1254404 - RNA, 19 nt, Homo sapiens
  misc_RNA (1)...(19): siRNA sense strand
gcacuuuauuuguaaugag

SEQ ID NO: 1254405 - RNA, 19 nt, Homo sapiens
  misc_RNA (1)...(19): siRNA sense strand
guagaaguauuugaguauc

SEQ ID NO: 1254406 - RNA, 19 nt, Homo sapiens
  misc_RNA (1)...(19): siRNA sense strand
guauuugaguaucuugaug

SEQ ID NO: 1254407 - RNA, 19 nt, Homo sapiens
  misc_RNA (1)...(19): siRNA sense strand
aggaauacuugacaguuug

SEQ ID NO: 1254408 - RNA, 19 nt, Homo sapiens
  misc_RNA (1)...(19): siRNA sense strand
aguguaaaguggucaaaug

SEQ ID NO: 1254409 - RNA, 19 nt, Homo sapiens
  misc_RNA (1)...(19): siRNA sense strand
ccaaaacccuacuaugaga

SEQ ID NO: 1254410 - RNA, 19 nt, Homo sapiens
  misc_RNA (1)...(19): siRNA sense strand
ccacccauacuauuuguga

SEQ ID NO: 1254411 - RNA, 19 nt, Homo sapiens
  misc_RNA (1)...(19): siRNA sense strand
caccaacauuugaagcuau

SEQ ID NO: 1254412 - RNA, 19 nt, Homo sapiens
  misc_RNA (1)...(19): siRNA sense strand
uuggagagagcacgauuua

SEQ ID NO: 1254413 - RNA, 19 nt, Homo sapiens
  misc_RNA (1)...(19): siRNA sense strand
gguuaucagaugcacuuua

SEQ ID NO: 1254414 - RNA, 19 nt, Homo sapiens
  misc_RNA (1)...(19): siRNA sense strand
ugaggagccaccaacauuu

SEQ ID NO: 1254415 - RNA, 19 nt, Homo sapiens
  misc_RNA (1)...(19): siRNA sense strand
ggaaggaauacuugacagu

SEQ ID NO: 1254416 - RNA, 19 nt, Homo sapiens
  misc_RNA (1)...(19): siRNA sense strand
gaggaaggaauacuugaca

SEQ ID NO: 1254417 - RNA, 19 nt, Homo sapiens
  misc_RNA (1)...(19): siRNA sense strand
ugaguaucuugaugcagua

SEQ ID NO: 1254418 - RNA, 19 nt, Homo sapiens
  misc_RNA (1)...(19): siRNA sense strand
caccuuuagugaaguagaa

SEQ ID NO: 1254419 - RNA, 19 nt, Homo sapiens
  misc_RNA (1)...(19): siRNA sense strand
acagauaucaggauuugga

SEQ ID NO: 1254420 - RNA, 19 nt, Homo sapiens
  misc_RNA (1)...(19): siRNA sense strand
ucauugcugugauuguuau

SEQ ID NO: 1254421 - RNA, 19 nt, Homo sapiens
  misc_RNA (1)...(19): siRNA sense strand
ucagaugcacuuuauuugu

SEQ ID NO: 1254422 - RNA, 19 nt, Homo sapiens
  misc_RNA (1)...(19): siRNA sense strand
gugcugcuccagaguguaa

SEQ ID NO: 1254423 - RNA, 19 nt, Homo sapiens
  misc_RNA (1)...(19): siRNA sense strand
ggaaaacacaccuuuagug

SEQ ID NO: 1254424 - RNA, 19 nt, Homo sapiens
  misc_RNA (1)...(19): siRNA sense strand
aaggaucaguagcaauuug

SEQ ID NO: 1254425 - RNA, 19 nt, Homo sapiens
  misc_RNA (1)...(19): siRNA sense strand
uauauacgggauccuuuaa

SEQ ID NO: 1254426 - RNA, 19 nt, Homo sapiens
  misc_RNA (1)...(19): siRNA sense strand
ugaaguagaaguauuugag

SEQ ID NO: 1254427 - RNA, 19 nt, Homo sapiens
  misc_RNA (1)...(19): siRNA sense strand
cuugacaguuuggauguuu

SEQ ID NO: 1254428 - RNA, 19 nt, Homo sapiens
  misc_RNA (1)...(19): siRNA sense strand
cauauauacgggauccuuu

SEQ ID NO: 1254429 - RNA, 19 nt, Homo sapiens
  misc_RNA (1)...(19): siRNA sense strand
auauauacgggauccuuua

SEQ ID NO: 1254430 - RNA, 19 nt, Homo sapiens
  misc_RNA (1)...(19): siRNA sense strand
cuuaaaggaucaguagcaa

SEQ ID NO: 1254431 - RNA, 19 nt, Homo sapiens
  misc_RNA (1)...(19): siRNA sense strand
uaaaccugaggaaggaaua

SEQ ID NO: 1254432 - RNA, 19 nt, Homo sapiens
  misc_RNA (1)...(19): siRNA sense strand
agaugacgccuguuauaga

SEQ ID NO: 1254433 - RNA, 19 nt, Homo sapiens
  misc_RNA (1)...(19): siRNA sense strand
ugugauuguuauugccaua

SEQ ID NO: 1254434 - RNA, 19 nt, Homo sapiens
  misc_RNA (1)...(19): siRNA sense strand
gagagcacgauuuauugug

SEQ ID NO: 1254435 - RNA, 19 nt, Homo sapiens
  misc_RNA (1)...(19): siRNA sense strand
gaaguauuugaguaucuug

SEQ ID NO: 1254436 - RNA, 19 nt, Homo sapiens
  misc_RNA (1)...(19): siRNA sense strand
ccucuugccacccauacua

SEQ ID NO: 1254437 - RNA, 19 nt, Homo sapiens
  misc_RNA (1)...(19): siRNA sense strand
gauaucaggauuuggaaaa

SEQ ID NO: 1254438 - RNA, 19 nt, Homo sapiens
  misc_RNA (1)...(19): siRNA sense strand
ggcuaccugucucagauga

SEQ ID NO: 1254439 - RNA, 19 nt, Homo sapiens
  misc_RNA (1)...(19): siRNA sense strand
ccaugguguugcugcugua

SEQ ID NO: 1254440 - RNA, 19 nt, Homo sapiens
  misc_RNA (1)...(19): siRNA sense strand
cagaugacgccuguuauag

SEQ ID NO: 1254441 - RNA, 19 nt, Homo sapiens
  misc_RNA (1)...(19): siRNA sense strand
gucauugcugugauuguua

SEQ ID NO: 1254442 - RNA, 19 nt, Homo sapiens
  misc_RNA (1)...(19): siRNA sense strand
uuggugaacgaguagauua

SEQ ID NO: 1254443 - RNA, 19 nt, Homo sapiens
  misc_RNA (1)...(19): siRNA sense strand
ggagccaccaacauuugaa

SEQ ID NO: 1254444 - RNA, 19 nt, Homo sapiens
  misc_RNA (1)...(19): siRNA sense strand
gcgcuuuccuggguugcuu

SEQ ID NO: 1254445 - RNA, 19 nt, Homo sapiens
  misc_RNA (1)...(19): siRNA sense strand
uacuacaaagcaacaguua

SEQ ID NO: 1254446 - RNA, 19 nt, Homo sapiens
  misc_RNA (1)...(19): siRNA sense strand
cuugaugcaguaacuuaua

SEQ ID NO: 1254447 - RNA, 19 nt, Homo sapiens
  misc_RNA (1)...(19): siRNA sense strand
aaacauguccauauauacg

SEQ ID NO: 1254448 - RNA, 19 nt, Homo sapiens
  misc_RNA (1)...(19): siRNA sense strand
guguaaaguggucaaaugu

SEQ ID NO: 1254449 - RNA, 19 nt, Homo sapiens
  misc_RNA (1)...(19): siRNA sense strand
cuuacgaguuugguuauca

SEQ ID NO: 1254450 - RNA, 19 nt, Homo sapiens
  misc_RNA (1)...(19): siRNA sense strand
uacgggauccuuuaaaugg

SEQ ID NO: 1254451 - RNA, 19 nt, Homo sapiens
  misc_RNA (1)...(19): siRNA sense strand
aaccaaaacccuacuauga

SEQ ID NO: 1254452 - RNA, 19 nt, Homo sapiens
  misc_RNA (1)...(19): siRNA sense strand
cccaauaugugaaaagguu

SEQ ID NO: 1254453 - RNA, 19 nt, Homo sapiens
  misc_RNA (1)...(19): siRNA sense strand
cgauggcagcgacacaauu

SEQ ID NO: 1254454 - RNA, 19 nt, Homo sapiens
  misc_RNA (1)...(19): siRNA sense strand
gauccauuuucacuuauug

SEQ ID NO: 1254455 - RNA, 19 nt, Homo sapiens
  misc_RNA (1)...(19): siRNA sense strand
uugaugcaguaacuuauag

SEQ ID NO: 1254456 - RNA, 19 nt, Homo sapiens
  misc_RNA (1)...(19): siRNA sense strand
guaucuugaugcaguaacu

SEQ ID NO: 1254457 - RNA, 19 nt, Homo sapiens
  misc_RNA (1)...(19): siRNA sense strand
caacauuugaagcuaugga

SEQ ID NO: 1254458 - RNA, 19 nt, Homo sapiens
  misc_RNA (1)...(19): siRNA sense strand
gagauuggugaacgaguag

SEQ ID NO: 1254459 - RNA, 19 nt, Homo sapiens
  misc_RNA (1)...(19): siRNA sense strand
ggagagagcacgauuuauu

SEQ ID NO: 1254460 - RNA, 19 nt, Homo sapiens
  misc_RNA (1)...(19): siRNA sense strand
agagaaacauguccauaua

SEQ ID NO: 1254461 - RNA, 19 nt, Homo sapiens
  misc_RNA (1)...(19): siRNA sense strand
cagaugcacuuuauuugua

SEQ ID NO: 1254462 - RNA, 19 nt, Homo sapiens
  misc_RNA (1)...(19): siRNA sense strand
ggacuuacgaguuugguua

SEQ ID NO: 1254463 - RNA, 19 nt, Homo sapiens
  misc_RNA (1)...(19): siRNA sense strand
aaacagauaucaggauuug

SEQ ID NO: 1254464 - RNA, 19 nt, Homo sapiens
  misc_RNA (1)...(19): siRNA sense strand
cuauggagcucauugguaa

SEQ ID NO: 1254465 - RNA, 19 nt, Homo sapiens
  misc_RNA (1)...(19): siRNA sense strand
aaacacaccuuuagugaag

SEQ ID NO: 1254466 - RNA, 19 nt, Homo sapiens
  misc_RNA (1)...(19): siRNA sense strand
gaacuuaaaggaucaguag

SEQ ID NO: 1254467 - RNA, 19 nt, Homo sapiens
  misc_RNA (1)...(19): siRNA sense strand
gaaaacagauaucaggauu

SEQ ID NO: 1254468 - RNA, 19 nt, Homo sapiens
  misc_RNA (1)...(19): siRNA sense strand
uaaaggaucaguagcaauu

SEQ ID NO: 1254469 - RNA, 19 nt, Homo sapiens
  misc_RNA (1)...(19): siRNA sense strand
aaaugggacuuacgaguuu

SEQ ID NO: 1254470 - RNA, 19 nt, Homo sapiens
  misc_RNA (1)...(19): siRNA sense strand
guuaucagaugcacuuuau

SEQ ID NO: 1254471 - RNA, 19 nt, Homo sapiens
  misc_RNA (1)...(19): siRNA sense strand
gagcugaauaugccacuua

SEQ ID NO: 1254472 - RNA, 19 nt, Homo sapiens
  misc_RNA (1)...(19): siRNA sense strand
ugagauuggugaacgagua

SEQ ID NO: 1254473 - RNA, 19 nt, Homo sapiens
  misc_RNA (1)...(19): siRNA sense strand
gugaacgaguagauuauaa

SEQ ID NO: 1254474 - RNA, 19 nt, Homo sapiens
  misc_RNA (1)...(19): siRNA sense strand
gagagagcacgauuuauug

SEQ ID NO: 1254475 - RNA, 19 nt, Homo sapiens
  misc_RNA (1)...(19): siRNA sense strand
caaaugggacuuacgaguu

SEQ ID NO: 1254476 - RNA, 19 nt, Homo sapiens
  misc_RNA (1)...(19): siRNA sense strand
ggucauugcugugauuguu

SEQ ID NO: 1254477 - RNA, 19 nt, Homo sapiens
  misc_RNA (1)...(19): siRNA sense strand
ccagauccauuuucacuua

SEQ ID NO: 1254478 - RNA, 19 nt, Homo sapiens
  misc_RNA (1)...(19): siRNA sense strand
gaaggaauacuugacaguu

SEQ ID NO: 1254479 - RNA, 19 nt, Homo sapiens
  misc_RNA (1)...(19): siRNA sense strand
aaggaauacuugacaguuu

SEQ ID NO: 1254480 - RNA, 19 nt, Homo sapiens
  misc_RNA (1)...(19): siRNA sense strand
ucagaugacgccuguuaua

SEQ ID NO: 1254481 - RNA, 19 nt, Homo sapiens
  misc_RNA (1)...(19): siRNA sense strand
gaaaacacaccuuuaguga

SEQ ID NO: 1254482 - RNA, 19 nt, Homo sapiens
  misc_RNA (1)...(19): siRNA sense strand
gaugacgccuguuauagag

SEQ ID NO: 1254483 - RNA, 19 nt, Homo sapiens
  misc_RNA (1)...(19): siRNA sense strand
gagaaacauguccauauau

SEQ ID NO: 1254484 - RNA, 19 nt, Homo sapiens
  misc_RNA (1)...(19): siRNA sense strand
ccacuuaccagacuaaauc

SEQ ID NO: 1254485 - RNA, 19 nt, Homo sapiens
  misc_RNA (1)...(19): siRNA sense strand
acgaguagauuauaagugu

SEQ ID NO: 1254486 - RNA, 19 nt, Homo sapiens
  misc_RNA (1)...(19): siRNA sense strand
cuacaaagcaacaguuaug

SEQ ID NO: 1254487 - RNA, 19 nt, Homo sapiens
  misc_RNA (1)...(19): siRNA sense strand
ccaccaacauuugaagcua

SEQ ID NO: 1254488 - RNA, 19 nt, Homo sapiens
  misc_RNA (1)...(19): siRNA sense strand
uauacgggauccuuuaaau

SEQ ID NO: 1254489 - RNA, 19 nt, Homo sapiens
  misc_RNA (1)...(19): siRNA sense strand
cgaguuugguuaucagaug

SEQ ID NO: 1254490 - RNA, 19 nt, Homo sapiens
  misc_RNA (1)...(19): siRNA sense strand
gaacgaguagauuauaagu

SEQ ID NO: 1254491 - RNA, 19 nt, Homo sapiens
  misc_RNA (1)...(19): siRNA sense strand
gugaggagccaccaacauu

SEQ ID NO: 1254492 - RNA, 19 nt, Homo sapiens
  misc_RNA (1)...(19): siRNA sense strand
gauggcagcgacacaauug

SEQ ID NO: 1254493 - RNA, 19 nt, Homo sapiens
  misc_RNA (1)...(19): siRNA sense strand
ucucagaugacgccuguua

SEQ ID NO: 1254494 - RNA, 19 nt, Homo sapiens
  misc_RNA (1)...(19): siRNA sense strand
gaggagccaccaacauuug

SEQ ID NO: 1254495 - RNA, 19 nt, Homo sapiens
  misc_RNA (1)...(19): siRNA sense strand
gcuauggagcucauuggua

SEQ ID NO: 1254496 - RNA, 19 nt, Homo sapiens
  misc_RNA (1)...(19): siRNA sense strand
acacaccuuuagugaagua

SEQ ID NO: 1254497 - RNA, 19 nt, Homo sapiens
  misc_RNA (1)...(19): siRNA sense strand
uagagaaacauguccauau

SEQ ID NO: 1254498 - RNA, 19 nt, Homo sapiens
  misc_RNA (1)...(19): siRNA sense strand
ggugaacgaguagauuaua

SEQ ID NO: 1254499 - RNA, 19 nt, Homo sapiens
  misc_RNA (1)...(19): siRNA sense strand
gaaguagaaguauuugagu

SEQ ID NO: 1254500 - RNA, 19 nt, Homo sapiens
  misc_RNA (1)...(19): siRNA sense strand
gaaacauguccauauauac

SEQ ID NO: 1254501 - RNA, 19 nt, Homo sapiens
  misc_RNA (1)...(19): siRNA sense strand
ugacgccuguuauagagaa

SEQ ID NO: 1254502 - RNA, 19 nt, Homo sapiens
  misc_RNA (1)...(19): siRNA sense strand
cgaguagauuauaagugua

SEQ ID NO: 1254503 - RNA, 19 nt, Homo sapiens
  misc_RNA (1)...(19): siRNA sense strand
gcacuuuauuuguaaugag

SEQ ID NO: 1254504 - RNA, 19 nt, Homo sapiens
  misc_RNA (1)...(19): siRNA sense strand
guagaaguauuugaguauc

SEQ ID NO: 1254505 - RNA, 19 nt, Homo sapiens
  misc_RNA (1)...(19): siRNA sense strand
guauuugaguaucuugaug

SEQ ID NO: 1254506 - RNA, 19 nt, Homo sapiens
  misc_RNA (1)...(19): siRNA sense strand
aggaauacuugacaguuug

SEQ ID NO: 1254507 - RNA, 19 nt, Homo sapiens
  misc_RNA (1)...(19): siRNA sense strand
ccaaaacccuacuaugaga

SEQ ID NO: 1254508 - RNA, 19 nt, Homo sapiens
  misc_RNA (1)...(19): siRNA sense strand
aguguaaaguggucaaaug

SEQ ID NO: 1254509 - RNA, 19 nt, Homo sapiens
  misc_RNA (1)...(19): siRNA sense strand
ccacccauacuauuuguga

SEQ ID NO: 1254510 - RNA, 19 nt, Homo sapiens
  misc_RNA (1)...(19): siRNA sense strand
uuggagagagcacgauuua

SEQ ID NO: 1254511 - RNA, 19 nt, Homo sapiens
  misc_RNA (1)...(19): siRNA sense strand
gguuaucagaugcacuuua

SEQ ID NO: 1254512 - RNA, 19 nt, Homo sapiens
  misc_RNA (1)...(19): siRNA sense strand
caccaacauuugaagcuau

SEQ ID NO: 1254513 - RNA, 19 nt, Homo sapiens
  misc_RNA (1)...(19): siRNA sense strand
ugaggagccaccaacauuu

SEQ ID NO: 1254514 - RNA, 19 nt, Homo sapiens
  misc_RNA (1)...(19): siRNA sense strand
ggaaggaauacuugacagu

SEQ ID NO: 1254515 - RNA, 19 nt, Homo sapiens
  misc_RNA (1)...(19): siRNA sense strand
gaggaaggaauacuugaca

SEQ ID NO: 1254516 - RNA, 19 nt, Homo sapiens
  misc_RNA (1)...(19): siRNA sense strand
ugaguaucuugaugcagua

SEQ ID NO: 1254517 - RNA, 19 nt, Homo sapiens
  misc_RNA (1)...(19): siRNA sense strand
caccuuuagugaaguagaa

SEQ ID NO: 1254518 - RNA, 19 nt, Homo sapiens
  misc_RNA (1)...(19): siRNA sense strand
acagauaucaggauuugga

SEQ ID NO: 1254519 - RNA, 19 nt, Homo sapiens
  misc_RNA (1)...(19): siRNA sense strand
ucauugcugugauuguuau

SEQ ID NO: 1254520 - RNA, 19 nt, Homo sapiens
  misc_RNA (1)...(19): siRNA sense strand
ucagaugcacuuuauuugu

SEQ ID NO: 1254521 - RNA, 19 nt, Homo sapiens
  misc_RNA (1)...(19): siRNA sense strand
gugcugcuccagaguguaa

SEQ ID NO: 1254522 - RNA, 19 nt, Homo sapiens
  misc_RNA (1)...(19): siRNA sense strand
ggaaaacacaccuuuagug

SEQ ID NO: 1254523 - RNA, 19 nt, Homo sapiens
  misc_RNA (1)...(19): siRNA sense strand
aaggaucaguagcaauuug

SEQ ID NO: 1254524 - RNA, 19 nt, Homo sapiens
  misc_RNA (1)...(19): siRNA sense strand
uauauacgggauccuuuaa

SEQ ID NO: 1254525 - RNA, 19 nt, Homo sapiens
  misc_RNA (1)...(19): siRNA sense strand
ugaaguagaaguauuugag

SEQ ID NO: 1254526 - RNA, 19 nt, Homo sapiens
  misc_RNA (1)...(19): siRNA sense strand
cuugacaguuuggauguuu

SEQ ID NO: 1254527 - RNA, 19 nt, Homo sapiens
  misc_RNA (1)...(19): siRNA sense strand
cauauauacgggauccuuu

SEQ ID NO: 1254528 - RNA, 19 nt, Homo sapiens
  misc_RNA (1)...(19): siRNA sense strand
auauauacgggauccuuua

SEQ ID NO: 1254529 - RNA, 19 nt, Homo sapiens
  misc_RNA (1)...(19): siRNA sense strand
cuuaaaggaucaguagcaa

SEQ ID NO: 1254530 - RNA, 19 nt, Homo sapiens
  misc_RNA (1)...(19): siRNA sense strand
uaaaccugaggaaggaaua

SEQ ID NO: 1254531 - RNA, 19 nt, Homo sapiens
  misc_RNA (1)...(19): siRNA sense strand
agaugacgccuguuauaga

SEQ ID NO: 1254532 - RNA, 19 nt, Homo sapiens
  misc_RNA (1)...(19): siRNA sense strand
ugugauuguuauugccaua

SEQ ID NO: 1254533 - RNA, 19 nt, Homo sapiens
  misc_RNA (1)...(19): siRNA sense strand
gagagcacgauuuauugug

SEQ ID NO: 1254534 - RNA, 19 nt, Homo sapiens
  misc_RNA (1)...(19): siRNA sense strand
gaaguauuugaguaucuug

SEQ ID NO: 1254535 - RNA, 19 nt, Homo sapiens
  misc_RNA (1)...(19): siRNA sense strand
ggcuaccugucucagauga

SEQ ID NO: 1254536 - RNA, 19 nt, Homo sapiens
  misc_RNA (1)...(19): siRNA sense strand
gauaucaggauuuggaaaa

SEQ ID NO: 1254537 - RNA, 19 nt, Homo sapiens
  misc_RNA (1)...(19): siRNA sense strand
ccucuugccacccauacua

SEQ ID NO: 1254538 - RNA, 19 nt, Homo sapiens
  misc_RNA (1)...(19): siRNA sense strand
ccaugguguugcugcugua

SEQ ID NO: 1254539 - RNA, 19 nt, Homo sapiens
  misc_RNA (1)...(19): siRNA sense strand
cagaugacgccuguuauag

SEQ ID NO: 1254540 - RNA, 19 nt, Homo sapiens
  misc_RNA (1)...(19): siRNA sense strand
cagaugguggagcugaaua

SEQ ID NO: 1254541 - RNA, 19 nt, Homo sapiens
  misc_RNA (1)...(19): siRNA sense strand
uuggugaacgaguagauua

SEQ ID NO: 1254542 - RNA, 19 nt, Homo sapiens
  misc_RNA (1)...(19): siRNA sense strand
gucauugcugugauuguua

SEQ ID NO: 1254543 - RNA, 19 nt, Homo sapiens
  misc_RNA (1)...(19): siRNA sense strand
ggagccaccaacauuugaa

SEQ ID NO: 1254544 - RNA, 19 nt, Homo sapiens
  misc_RNA (1)...(19): siRNA sense strand
gcgcuuuccuggguugcuu

SEQ ID NO: 1254545 - RNA, 19 nt, Homo sapiens
  misc_RNA (1)...(19): siRNA sense strand
uacuacaaagcaacaguua

SEQ ID NO: 1254546 - RNA, 19 nt, Homo sapiens
  misc_RNA (1)...(19): siRNA sense strand
cuugaugcaguaacuuaua

SEQ ID NO: 1254547 - RNA, 19 nt, Homo sapiens
  misc_RNA (1)...(19): siRNA sense strand
aaacauguccauauauacg

SEQ ID NO: 1254548 - RNA, 19 nt, Homo sapiens
  misc_RNA (1)...(19): siRNA sense strand
guguaaaguggucaaaugu

SEQ ID NO: 1254549 - RNA, 19 nt, Homo sapiens
  misc_RNA (1)...(19): siRNA sense strand
cuuacgaguuugguuauca

SEQ ID NO: 1254550 - RNA, 19 nt, Homo sapiens
  misc_RNA (1)...(19): siRNA sense strand
uacgggauccuuuaaaugg

SEQ ID NO: 1254551 - RNA, 19 nt, Homo sapiens
  misc_RNA (1)...(19): siRNA sense strand
gcagaugguggagcugaau

SEQ ID NO: 1254552 - RNA, 19 nt, Homo sapiens
  misc_RNA (1)...(19): siRNA sense strand
aaccaaaacccuacuauga

SEQ ID NO: 1254553 - RNA, 19 nt, Homo sapiens
  misc_RNA (1)...(19): siRNA sense strand
cccaauaugugaaaagguu

SEQ ID NO: 1254554 - RNA, 19 nt, Homo sapiens
  misc_RNA (1)...(19): siRNA sense strand
ggagcugaauaugccacuu

SEQ ID NO: 1254555 - RNA, 19 nt, Homo sapiens
  misc_RNA (1)...(19): siRNA sense strand
cgauggcagcgacacaauu

SEQ ID NO: 1254556 - RNA, 19 nt, Homo sapiens
  misc_RNA (1)...(19): siRNA sense strand
gauccauuuucacuuauug

SEQ ID NO: 1254557 - RNA, 19 nt, Homo sapiens
  misc_RNA (1)...(19): siRNA sense strand
uugaugcaguaacuuauag

SEQ ID NO: 1254558 - RNA, 19 nt, Homo sapiens
  misc_RNA (1)...(19): siRNA sense strand
guaucuugaugcaguaacu

SEQ ID NO: 1254559 - RNA, 19 nt, Homo sapiens
  misc_RNA (1)...(19): siRNA sense strand
ggagagagcacgauuuauu

SEQ ID NO: 1254560 - RNA, 19 nt, Homo sapiens
  misc_RNA (1)...(19): siRNA sense strand
agagaaacauguccauaua

SEQ ID NO: 1254561 - RNA, 19 nt, Homo sapiens
  misc_RNA (1)...(19): siRNA sense strand
cagaugcacuuuauuugua

SEQ ID NO: 1254562 - RNA, 19 nt, Homo sapiens
  misc_RNA (1)...(19): siRNA sense strand
ggacuuacgaguuugguua

SEQ ID NO: 1254563 - RNA, 19 nt, Homo sapiens
  misc_RNA (1)...(19): siRNA sense strand
aaacagauaucaggauuug

SEQ ID NO: 1254564 - RNA, 19 nt, Homo sapiens
  misc_RNA (1)...(19): siRNA sense strand
cuauggagcucauugguaa

SEQ ID NO: 1254565 - RNA, 19 nt, Homo sapiens
  misc_RNA (1)...(19): siRNA sense strand
aaacacaccuuuagugaag

SEQ ID NO: 1254566 - RNA, 19 nt, Homo sapiens
  misc_RNA (1)...(19): siRNA sense strand
gaacuuaaaggaucaguag

SEQ ID NO: 1254567 - RNA, 19 nt, Homo sapiens
  misc_RNA (1)...(19): siRNA sense strand
gaaaacagauaucaggauu

SEQ ID NO: 1254568 - RNA, 19 nt, Homo sapiens
  misc_RNA (1)...(19): siRNA sense strand
uaaaggaucaguagcaauu

SEQ ID NO: 1254569 - RNA, 19 nt, Homo sapiens
  misc_RNA (1)...(19): siRNA sense strand
aaaugggacuuacgaguuu

SEQ ID NO: 1254570 - RNA, 19 nt, Homo sapiens
  misc_RNA (1)...(19): siRNA sense strand
guuaucagaugcacuuuau

SEQ ID NO: 1254571 - RNA, 19 nt, Homo sapiens
  misc_RNA (1)...(19): siRNA sense strand
ugagauuggugaacgagua

SEQ ID NO: 1254572 - RNA, 19 nt, Homo sapiens
  misc_RNA (1)...(19): siRNA sense strand
gugaacgaguagauuauaa

SEQ ID NO: 1254573 - RNA, 19 nt, Homo sapiens
  misc_RNA (1)...(19): siRNA sense strand
gagagagcacgauuuauug

SEQ ID NO: 1254574 - RNA, 19 nt, Homo sapiens
  misc_RNA (1)...(19): siRNA sense strand
caaaugggacuuacgaguu

SEQ ID NO: 1254575 - RNA, 19 nt, Homo sapiens
  misc_RNA (1)...(19): siRNA sense strand
ggucauugcugugauuguu

SEQ ID NO: 1254576 - RNA, 19 nt, Homo sapiens
  misc_RNA (1)...(19): siRNA sense strand
ccagauccauuuucacuua

SEQ ID NO: 1254577 - RNA, 19 nt, Homo sapiens
  misc_RNA (1)...(19): siRNA sense strand
gaaggaauacuugacaguu

SEQ ID NO: 1254578 - RNA, 19 nt, Homo sapiens
  misc_RNA (1)...(19): siRNA sense strand
aaggaauacuugacaguuu

SEQ ID NO: 1254579 - RNA, 19 nt, Homo sapiens
  misc_RNA (1)...(19): siRNA sense strand
ucagaugacgccuguuaua

SEQ ID NO: 1254580 - RNA, 19 nt, Homo sapiens
  misc_RNA (1)...(19): siRNA sense strand
gaaaacacaccuuuaguga

SEQ ID NO: 1254581 - RNA, 19 nt, Homo sapiens
  misc_RNA (1)...(19): siRNA sense strand
gaugacgccuguuauagag

SEQ ID NO: 1254582 - RNA, 19 nt, Homo sapiens
  misc_RNA (1)...(19): siRNA sense strand
gagaaacauguccauauau

SEQ ID NO: 1254583 - RNA, 19 nt, Homo sapiens
  misc_RNA (1)...(19): siRNA sense strand
acgaguagauuauaagugu

SEQ ID NO: 1254584 - RNA, 19 nt, Homo sapiens
  misc_RNA (1)...(19): siRNA sense strand
cuacaaagcaacaguuaug

SEQ ID NO: 1254585 - RNA, 19 nt, Homo sapiens
  misc_RNA (1)...(19): siRNA sense strand
ccaccaacauuugaagcua

SEQ ID NO: 1254586 - RNA, 19 nt, Homo sapiens
  misc_RNA (1)...(19): siRNA sense strand
uauacgggauccuuuaaau

SEQ ID NO: 1254587 - RNA, 19 nt, Homo sapiens
  misc_RNA (1)...(19): siRNA sense strand
cgaguuugguuaucagaug

SEQ ID NO: 1254588 - RNA, 19 nt, Homo sapiens
  misc_RNA (1)...(19): siRNA sense strand
gaacgaguagauuauaagu

SEQ ID NO: 1254589 - RNA, 19 nt, Homo sapiens
  misc_RNA (1)...(19): siRNA sense strand
gugaggagccaccaacauu

SEQ ID NO: 1254590 - RNA, 19 nt, Homo sapiens
  misc_RNA (1)...(19): siRNA sense strand
gauggcagcgacacaauug

SEQ ID NO: 1254591 - RNA, 19 nt, Homo sapiens
  misc_RNA (1)...(19): siRNA sense strand
gcuauggagcucauuggua

SEQ ID NO: 1254592 - RNA, 19 nt, Homo sapiens
  misc_RNA (1)...(19): siRNA sense strand
gaggagccaccaacauuug

SEQ ID NO: 1254593 - RNA, 19 nt, Homo sapiens
  misc_RNA (1)...(19): siRNA sense strand
acacaccuuuagugaagua

SEQ ID NO: 1254594 - RNA, 19 nt, Homo sapiens
  misc_RNA (1)...(19): siRNA sense strand
ucucagaugacgccuguua

SEQ ID NO: 1254595 - RNA, 19 nt, Homo sapiens
  misc_RNA (1)...(19): siRNA sense strand
uagagaaacauguccauau

SEQ ID NO: 1254596 - RNA, 19 nt, Homo sapiens
  misc_RNA (1)...(19): siRNA sense strand
guuccaaagugucuuaaag

SEQ ID NO: 1254597 - RNA, 19 nt, Homo sapiens
  misc_RNA (1)...(19): siRNA sense strand
ggugaacgaguagauuaua

SEQ ID NO: 1254598 - RNA, 19 nt, Homo sapiens
  misc_RNA (1)...(19): siRNA sense strand
gaaguagaaguauuugagu

SEQ ID NO: 1254599 - RNA, 19 nt, Homo sapiens
  misc_RNA (1)...(19): siRNA sense strand
gaaacauguccauauauac

SEQ ID NO: 1254600 - RNA, 19 nt, Homo sapiens
  misc_RNA (1)...(19): siRNA sense strand
ugacgccuguuauagagaa

SEQ ID NO: 1254601 - RNA, 19 nt, Homo sapiens
  misc_RNA (1)...(19): siRNA sense strand
cgaguagauuauaagugua

SEQ ID NO: 1254602 - RNA, 19 nt, Homo sapiens
  misc_RNA (1)...(19): siRNA sense strand
gcacuuuauuuguaaugag

SEQ ID NO: 1254603 - RNA, 19 nt, Homo sapiens
  misc_RNA (1)...(19): siRNA sense strand
guagaaguauuugaguauc

SEQ ID NO: 1254604 - RNA, 19 nt, Homo sapiens
  misc_RNA (1)...(19): siRNA sense strand
guauuugaguaucuugaug

SEQ ID NO: 1254605 - RNA, 19 nt, Homo sapiens
  misc_RNA (1)...(19): siRNA sense strand
aggaauacuugacaguuug

SEQ ID NO: 1254606 - RNA, 19 nt, Homo sapiens
  misc_RNA (1)...(19): siRNA sense strand
ccaaaacccuacuaugaga

SEQ ID NO: 1254607 - RNA, 19 nt, Homo sapiens
  misc_RNA (1)...(19): siRNA sense strand
aguguaaaguggucaaaug

SEQ ID NO: 1254608 - RNA, 19 nt, Homo sapiens
  misc_RNA (1)...(19): siRNA sense strand
ccacccauacuauuuguga

SEQ ID NO: 1254609 - RNA, 19 nt, Homo sapiens
  misc_RNA (1)...(19): siRNA sense strand
caccaacauuugaagcuau

SEQ ID NO: 1254610 - RNA, 19 nt, Homo sapiens
  misc_RNA (1)...(19): siRNA sense strand
uuggagagagcacgauuua

SEQ ID NO: 1254611 - RNA, 19 nt, Homo sapiens
  misc_RNA (1)...(19): siRNA sense strand
gguuaucagaugcacuuua

SEQ ID NO: 1254612 - RNA, 19 nt, Homo sapiens
  misc_RNA (1)...(19): siRNA sense strand
ugaggagccaccaacauuu

SEQ ID NO: 1254613 - RNA, 19 nt, Homo sapiens
  misc_RNA (1)...(19): siRNA sense strand
ggaaggaauacuugacagu

SEQ ID NO: 1254614 - RNA, 19 nt, Homo sapiens
  misc_RNA (1)...(19): siRNA sense strand
gaggaaggaauacuugaca

SEQ ID NO: 1254615 - RNA, 19 nt, Homo sapiens
  misc_RNA (1)...(19): siRNA sense strand
ccaguuccaaagugucuua

SEQ ID NO: 1254616 - RNA, 19 nt, Homo sapiens
  misc_RNA (1)...(19): siRNA sense strand
ugaguaucuugaugcagua

SEQ ID NO: 1254617 - RNA, 19 nt, Homo sapiens
  misc_RNA (1)...(19): siRNA sense strand
caccuuuagugaaguagaa

SEQ ID NO: 1254618 - RNA, 19 nt, Homo sapiens
  misc_RNA (1)...(19): siRNA sense strand
acagauaucaggauuugga

SEQ ID NO: 1254619 - RNA, 19 nt, Homo sapiens
  misc_RNA (1)...(19): siRNA sense strand
ucauugcugugauuguuau

SEQ ID NO: 1254620 - RNA, 19 nt, Homo sapiens
  misc_RNA (1)...(19): siRNA sense strand
ucagaugcacuuuauuugu

SEQ ID NO: 1254621 - RNA, 19 nt, Homo sapiens
  misc_RNA (1)...(19): siRNA sense strand
gugcugcuccagaguguaa

SEQ ID NO: 1254622 - RNA, 19 nt, Homo sapiens
  misc_RNA (1)...(19): siRNA sense strand
ggaaaacacaccuuuagug

SEQ ID NO: 1254623 - RNA, 19 nt, Homo sapiens
  misc_RNA (1)...(19): siRNA sense strand
aaggaucaguagcaauuug

SEQ ID NO: 1254624 - RNA, 19 nt, Homo sapiens
  misc_RNA (1)...(19): siRNA sense strand
uauauacgggauccuuuaa

SEQ ID NO: 1254625 - RNA, 19 nt, Homo sapiens
  misc_RNA (1)...(19): siRNA sense strand
ugaaguagaaguauuugag

SEQ ID NO: 1254626 - RNA, 19 nt, Homo sapiens
  misc_RNA (1)...(19): siRNA sense strand
cuugacaguuuggauguuu

SEQ ID NO: 1254627 - RNA, 19 nt, Homo sapiens
  misc_RNA (1)...(19): siRNA sense strand
cauauauacgggauccuuu

SEQ ID NO: 1254628 - RNA, 19 nt, Homo sapiens
  misc_RNA (1)...(19): siRNA sense strand
auauauacgggauccuuua

SEQ ID NO: 1254629 - RNA, 19 nt, Homo sapiens
  misc_RNA (1)...(19): siRNA sense strand
cuuaaaggaucaguagcaa

SEQ ID NO: 1254630 - RNA, 19 nt, Homo sapiens
  misc_RNA (1)...(19): siRNA sense strand
uaaaccugaggaaggaaua

SEQ ID NO: 1254631 - RNA, 19 nt, Homo sapiens
  misc_RNA (1)...(19): siRNA sense strand
agaugacgccuguuauaga

SEQ ID NO: 1254632 - RNA, 19 nt, Homo sapiens
  misc_RNA (1)...(19): siRNA sense strand
ugugauuguuauugccaua

SEQ ID NO: 1254633 - RNA, 19 nt, Homo sapiens
  misc_RNA (1)...(19): siRNA sense strand
gagagcacgauuuauugug

SEQ ID NO: 1254634 - RNA, 19 nt, Homo sapiens
  misc_RNA (1)...(19): siRNA sense strand
gaaguauuugaguaucuug

SEQ ID NO: 1254635 - RNA, 19 nt, Homo sapiens
  misc_RNA (1)...(19): siRNA sense strand
ggcuaccugucucagauga

SEQ ID NO: 1254636 - RNA, 19 nt, Homo sapiens
  misc_RNA (1)...(19): siRNA sense strand
gauaucaggauuuggaaaa

SEQ ID NO: 1254637 - RNA, 19 nt, Homo sapiens
  misc_RNA (1)...(19): siRNA sense strand
ccucuugccacccauacua

SEQ ID NO: 1254638 - RNA, 19 nt, Homo sapiens
  misc_RNA (1)...(19): siRNA sense strand
ccaugguguugcugcugua

SEQ ID NO: 1254639 - RNA, 19 nt, Homo sapiens
  misc_RNA (1)...(19): siRNA sense strand
cagaugacgccuguuauag

SEQ ID NO: 1254640 - RNA, 19 nt, Homo sapiens
  misc_RNA (1)...(19): siRNA sense strand
uuggugaacgaguagauua

SEQ ID NO: 1254641 - RNA, 19 nt, Homo sapiens
  misc_RNA (1)...(19): siRNA sense strand
gucauugcugugauuguua

SEQ ID NO: 1254642 - RNA, 19 nt, Homo sapiens
  misc_RNA (1)...(19): siRNA sense strand
ggagccaccaacauuugaa

SEQ ID NO: 1254643 - RNA, 19 nt, Homo sapiens
  misc_RNA (1)...(19): siRNA sense strand
gcgcuuuccuggguugcuu

SEQ ID NO: 1254644 - RNA, 19 nt, Homo sapiens
  misc_RNA (1)...(19): siRNA sense strand
uacuacaaagcaacaguua

SEQ ID NO: 1254645 - RNA, 19 nt, Homo sapiens
  misc_RNA (1)...(19): siRNA sense strand
cuugaugcaguaacuuaua

SEQ ID NO: 1254646 - RNA, 19 nt, Homo sapiens
  misc_RNA (1)...(19): siRNA sense strand
aaacauguccauauauacg

SEQ ID NO: 1254647 - RNA, 19 nt, Homo sapiens
  misc_RNA (1)...(19): siRNA sense strand
guguaaaguggucaaaugu

SEQ ID NO: 1254648 - RNA, 19 nt, Homo sapiens
  misc_RNA (1)...(19): siRNA sense strand
cuuacgaguuugguuauca

SEQ ID NO: 1254649 - RNA, 19 nt, Homo sapiens
  misc_RNA (1)...(19): siRNA sense strand
uacgggauccuuuaaaugg

SEQ ID NO: 1254650 - RNA, 19 nt, Homo sapiens
  misc_RNA (1)...(19): siRNA sense strand
aaccaaaacccuacuauga

SEQ ID NO: 1254651 - RNA, 19 nt, Homo sapiens
  misc_RNA (1)...(19): siRNA sense strand
cccaauaugugaaaagguu

SEQ ID NO: 1254652 - RNA, 19 nt, Homo sapiens
  misc_RNA (1)...(19): siRNA sense strand
cgauggcagcgacacaauu

SEQ ID NO: 1254653 - RNA, 19 nt, Homo sapiens
  misc_RNA (1)...(19): siRNA sense strand
gauccauuuucacuuauug

SEQ ID NO: 1254654 - RNA, 19 nt, Homo sapiens
  misc_RNA (1)...(19): siRNA sense strand
uugaugcaguaacuuauag

SEQ ID NO: 1254655 - RNA, 19 nt, Homo sapiens
  misc_RNA (1)...(19): siRNA sense strand
guaucuugaugcaguaacu

SEQ ID NO: 1254656 - RNA, 19 nt, Homo sapiens
  misc_RNA (1)...(19): siRNA sense strand
caacauuugaagcuaugga

SEQ ID NO: 1254657 - RNA, 19 nt, Homo sapiens
  misc_RNA (1)...(19): siRNA sense strand
gagauuggugaacgaguag

SEQ ID NO: 1254658 - RNA, 19 nt, Homo sapiens
  misc_RNA (1)...(19): siRNA sense strand
ggagagagcacgauuuauu

SEQ ID NO: 1254659 - RNA, 19 nt, Homo sapiens
  misc_RNA (1)...(19): siRNA sense strand
agagaaacauguccauaua

SEQ ID NO: 1254660 - RNA, 19 nt, Homo sapiens
  misc_RNA (1)...(19): siRNA sense strand
cagaugcacuuuauuugua

SEQ ID NO: 1254661 - RNA, 19 nt, Homo sapiens
  misc_RNA (1)...(19): siRNA sense strand
ggacuuacgaguuugguua

SEQ ID NO: 1254662 - RNA, 19 nt, Homo sapiens
  misc_RNA (1)...(19): siRNA sense strand
aaacagauaucaggauuug

SEQ ID NO: 1254663 - RNA, 19 nt, Homo sapiens
  misc_RNA (1)...(19): siRNA sense strand
cuauggagcucauugguaa

SEQ ID NO: 1254664 - RNA, 19 nt, Homo sapiens
  misc_RNA (1)...(19): siRNA sense strand
aaacacaccuuuagugaag

SEQ ID NO: 1254665 - RNA, 19 nt, Homo sapiens
  misc_RNA (1)...(19): siRNA sense strand
gaacuuaaaggaucaguag

SEQ ID NO: 1254666 - RNA, 19 nt, Homo sapiens
  misc_RNA (1)...(19): siRNA sense strand
gaaaacagauaucaggauu

SEQ ID NO: 1254667 - RNA, 19 nt, Homo sapiens
  misc_RNA (1)...(19): siRNA sense strand
uaaaggaucaguagcaauu

SEQ ID NO: 1254668 - RNA, 19 nt, Homo sapiens
  misc_RNA (1)...(19): siRNA sense strand
aaaugggacuuacgaguuu

SEQ ID NO: 1254669 - RNA, 19 nt, Homo sapiens
  misc_RNA (1)...(19): siRNA sense strand
guuaucagaugcacuuuau

SEQ ID NO: 1254670 - RNA, 19 nt, Homo sapiens
  misc_RNA (1)...(19): siRNA sense strand
gagcugaauaugccacuua

SEQ ID NO: 1254671 - RNA, 19 nt, Homo sapiens
  misc_RNA (1)...(19): siRNA sense strand
gagcagagaggcugaauag

SEQ ID NO: 1254672 - RNA, 19 nt, Homo sapiens
  misc_RNA (1)...(19): siRNA sense strand
ugagauuggugaacgagua

SEQ ID NO: 1254673 - RNA, 19 nt, Homo sapiens
  misc_RNA (1)...(19): siRNA sense strand
gugaacgaguagauuauaa

SEQ ID NO: 1254674 - RNA, 19 nt, Homo sapiens
  misc_RNA (1)...(19): siRNA sense strand
gagagagcacgauuuauug

SEQ ID NO: 1254675 - RNA, 19 nt, Homo sapiens
  misc_RNA (1)...(19): siRNA sense strand
caaaugggacuuacgaguu

SEQ ID NO: 1254676 - RNA, 19 nt, Homo sapiens
  misc_RNA (1)...(19): siRNA sense strand
ggucauugcugugauuguu

SEQ ID NO: 1254677 - RNA, 19 nt, Homo sapiens
  misc_RNA (1)...(19): siRNA sense strand
ccagauccauuuucacuua

SEQ ID NO: 1254678 - RNA, 19 nt, Homo sapiens
  misc_RNA (1)...(19): siRNA sense strand
gaaggaauacuugacaguu

SEQ ID NO: 1254679 - RNA, 19 nt, Homo sapiens
  misc_RNA (1)...(19): siRNA sense strand
aaggaauacuugacaguuu

SEQ ID NO: 1254680 - RNA, 19 nt, Homo sapiens
  misc_RNA (1)...(19): siRNA sense strand
ucagaugacgccuguuaua

SEQ ID NO: 1254681 - RNA, 19 nt, Homo sapiens
  misc_RNA (1)...(19): siRNA sense strand
gaaaacacaccuuuaguga

SEQ ID NO: 1254682 - RNA, 19 nt, Homo sapiens
  misc_RNA (1)...(19): siRNA sense strand
gaugacgccuguuauagag

SEQ ID NO: 1254683 - RNA, 19 nt, Homo sapiens
  misc_RNA (1)...(19): siRNA sense strand
gagaaacauguccauauau

SEQ ID NO: 1254684 - RNA, 19 nt, Homo sapiens
  misc_RNA (1)...(19): siRNA sense strand
ccacuuaccagacuaaauc

SEQ ID NO: 1254685 - RNA, 19 nt, Homo sapiens
  misc_RNA (1)...(19): siRNA sense strand
acgaguagauuauaagugu

SEQ ID NO: 1254686 - RNA, 19 nt, Homo sapiens
  misc_RNA (1)...(19): siRNA sense strand
cuacaaagcaacaguuaug

SEQ ID NO: 1254687 - RNA, 19 nt, Homo sapiens
  misc_RNA (1)...(19): siRNA sense strand
ccaccaacauuugaagcua

SEQ ID NO: 1254688 - RNA, 19 nt, Homo sapiens
  misc_RNA (1)...(19): siRNA sense strand
uauacgggauccuuuaaau

SEQ ID NO: 1254689 - RNA, 19 nt, Homo sapiens
  misc_RNA (1)...(19): siRNA sense strand
cgaguuugguuaucagaug

SEQ ID NO: 1254690 - RNA, 19 nt, Homo sapiens
  misc_RNA (1)...(19): siRNA sense strand
gaacgaguagauuauaagu

SEQ ID NO: 1254691 - RNA, 19 nt, Homo sapiens
  misc_RNA (1)...(19): siRNA sense strand
gugaggagccaccaacauu

SEQ ID NO: 1254692 - RNA, 19 nt, Homo sapiens
  misc_RNA (1)...(19): siRNA sense strand
gauggcagcgacacaauug

SEQ ID NO: 1254693 - RNA, 19 nt, Homo sapiens
  misc_RNA (1)...(19): siRNA sense strand
ucucagaugacgccuguua

SEQ ID NO: 1254694 - RNA, 19 nt, Homo sapiens
  misc_RNA (1)...(19): siRNA sense strand
acacaccuuuagugaagua

SEQ ID NO: 1254695 - RNA, 19 nt, Homo sapiens
  misc_RNA (1)...(19): siRNA sense strand
gcuauggagcucauuggua

SEQ ID NO: 1254696 - RNA, 19 nt, Homo sapiens
  misc_RNA (1)...(19): siRNA sense strand
gaggagccaccaacauuug

SEQ ID NO: 1254697 - RNA, 19 nt, Homo sapiens
  misc_RNA (1)...(19): siRNA sense strand
uagagaaacauguccauau

SEQ ID NO: 1254698 - RNA, 19 nt, Homo sapiens
  misc_RNA (1)...(19): siRNA sense strand
ggugaacgaguagauuaua

SEQ ID NO: 1254699 - RNA, 19 nt, Homo sapiens
  misc_RNA (1)...(19): siRNA sense strand
gaaguagaaguauuugagu

SEQ ID NO: 1254700 - RNA, 19 nt, Homo sapiens
  misc_RNA (1)...(19): siRNA sense strand
gaaacauguccauauauac

SEQ ID NO: 1254701 - RNA, 19 nt, Homo sapiens
  misc_RNA (1)...(19): siRNA sense strand
ugacgccuguuauagagaa

SEQ ID NO: 1254702 - RNA, 19 nt, Homo sapiens
  misc_RNA (1)...(19): siRNA sense strand
cgaguagauuauaagugua

SEQ ID NO: 1254703 - RNA, 19 nt, Homo sapiens
  misc_RNA (1)...(19): siRNA sense strand
gcacuuuauuuguaaugag

SEQ ID NO: 1254704 - RNA, 19 nt, Homo sapiens
  misc_RNA (1)...(19): siRNA sense strand
guagaaguauuugaguauc

SEQ ID NO: 1254705 - RNA, 19 nt, Homo sapiens
  misc_RNA (1)...(19): siRNA sense strand
guauuugaguaucuugaug

SEQ ID NO: 1254706 - RNA, 19 nt, Homo sapiens
  misc_RNA (1)...(19): siRNA sense strand
aggaauacuugacaguuug

SEQ ID NO: 1254707 - RNA, 19 nt, Homo sapiens
  misc_RNA (1)...(19): siRNA sense strand
ccaaaacccuacuaugaga

SEQ ID NO: 1254708 - RNA, 19 nt, Homo sapiens
  misc_RNA (1)...(19): siRNA sense strand
aguguaaaguggucaaaug

SEQ ID NO: 1254709 - RNA, 19 nt, Homo sapiens
  misc_RNA (1)...(19): siRNA sense strand
ccacccauacuauuuguga

SEQ ID NO: 1254710 - RNA, 19 nt, Homo sapiens
  misc_RNA (1)...(19): siRNA sense strand
uuggagagagcacgauuua

SEQ ID NO: 1254711 - RNA, 19 nt, Homo sapiens
  misc_RNA (1)...(19): siRNA sense strand
gguuaucagaugcacuuua

SEQ ID NO: 1254712 - RNA, 19 nt, Homo sapiens
  misc_RNA (1)...(19): siRNA sense strand
caccaacauuugaagcuau

SEQ ID NO: 1254713 - RNA, 19 nt, Homo sapiens
  misc_RNA (1)...(19): siRNA sense strand
ugaggagccaccaacauuu

SEQ ID NO: 1254714 - RNA, 19 nt, Homo sapiens
  misc_RNA (1)...(19): siRNA sense strand
ggaaggaauacuugacagu

SEQ ID NO: 1254715 - RNA, 19 nt, Homo sapiens
  misc_RNA (1)...(19): siRNA sense strand
gaggaaggaauacuugaca

SEQ ID NO: 1254716 - RNA, 19 nt, Homo sapiens
  misc_RNA (1)...(19): siRNA sense strand
ugaguaucuugaugcagua

SEQ ID NO: 1254717 - RNA, 19 nt, Homo sapiens
  misc_RNA (1)...(19): siRNA sense strand
caccuuuagugaaguagaa

SEQ ID NO: 1254718 - RNA, 19 nt, Homo sapiens
  misc_RNA (1)...(19): siRNA sense strand
acagauaucaggauuugga

SEQ ID NO: 1254719 - RNA, 19 nt, Homo sapiens
  misc_RNA (1)...(19): siRNA sense strand
ucauugcugugauuguuau

SEQ ID NO: 1254720 - RNA, 19 nt, Homo sapiens
  misc_RNA (1)...(19): siRNA sense strand
ucagaugcacuuuauuugu

SEQ ID NO: 1254721 - RNA, 19 nt, Homo sapiens
  misc_RNA (1)...(19): siRNA sense strand
gugcugcuccagaguguaa

SEQ ID NO: 1254722 - RNA, 19 nt, Homo sapiens
  misc_RNA (1)...(19): siRNA sense strand
ggaaaacacaccuuuagug

SEQ ID NO: 1254723 - RNA, 19 nt, Homo sapiens
  misc_RNA (1)...(19): siRNA sense strand
aaggaucaguagcaauuug

SEQ ID NO: 1254724 - RNA, 19 nt, Homo sapiens
  misc_RNA (1)...(19): siRNA sense strand
uauauacgggauccuuuaa

SEQ ID NO: 1254725 - RNA, 19 nt, Homo sapiens
  misc_RNA (1)...(19): siRNA sense strand
ugaaguagaaguauuugag

SEQ ID NO: 1254726 - RNA, 19 nt, Homo sapiens
  misc_RNA (1)...(19): siRNA sense strand
cuugacaguuuggauguuu

SEQ ID NO: 1254727 - RNA, 19 nt, Homo sapiens
  misc_RNA (1)...(19): siRNA sense strand
cauauauacgggauccuuu

SEQ ID NO: 1254728 - RNA, 19 nt, Homo sapiens
  misc_RNA (1)...(19): siRNA sense strand
auauauacgggauccuuua

SEQ ID NO: 1254729 - RNA, 19 nt, Homo sapiens
  misc_RNA (1)...(19): siRNA sense strand
cuuaaaggaucaguagcaa

SEQ ID NO: 1254730 - RNA, 19 nt, Homo sapiens
  misc_RNA (1)...(19): siRNA sense strand
uaaaccugaggaaggaaua

SEQ ID NO: 1254731 - RNA, 19 nt, Homo sapiens
  misc_RNA (1)...(19): siRNA sense strand
agaugacgccuguuauaga

SEQ ID NO: 1254732 - RNA, 19 nt, Homo sapiens
  misc_RNA (1)...(19): siRNA sense strand
ugugauuguuauugccaua

SEQ ID NO: 1254733 - RNA, 19 nt, Homo sapiens
  misc_RNA (1)...(19): siRNA sense strand
gagagcacgauuuauugug

SEQ ID NO: 1254734 - RNA, 19 nt, Homo sapiens
  misc_RNA (1)...(19): siRNA sense strand
gaaguauuugaguaucuug

SEQ ID NO: 1254735 - RNA, 19 nt, Homo sapiens
  misc_RNA (1)...(19): siRNA sense strand
ggcuaccugucucagauga

SEQ ID NO: 1254736 - RNA, 19 nt, Homo sapiens
  misc_RNA (1)...(19): siRNA sense strand
gauaucaggauuuggaaaa

SEQ ID NO: 1254737 - RNA, 19 nt, Homo sapiens
  misc_RNA (1)...(19): siRNA sense strand
ccucuugccacccauacua

SEQ ID NO: 1254738 - RNA, 19 nt, Homo sapiens
  misc_RNA (1)...(19): siRNA sense strand
ccaugguguugcugcugua

SEQ ID NO: 1254739 - RNA, 19 nt, Homo sapiens
  misc_RNA (1)...(19): siRNA sense strand
cagaugacgccuguuauag

SEQ ID NO: 1254740 - RNA, 19 nt, Homo sapiens
  misc_RNA (1)...(19): siRNA sense strand
cagaugguggagcugaaua

SEQ ID NO: 1254741 - RNA, 19 nt, Homo sapiens
  misc_RNA (1)...(19): siRNA sense strand
gucauugcugugauuguua

SEQ ID NO: 1254742 - RNA, 19 nt, Homo sapiens
  misc_RNA (1)...(19): siRNA sense strand
ggagccaccaacauuugaa

SEQ ID NO: 1254743 - RNA, 19 nt, Homo sapiens
  misc_RNA (1)...(19): siRNA sense strand
uuggugaacgaguagauua

SEQ ID NO: 1254744 - RNA, 19 nt, Homo sapiens
  misc_RNA (1)...(19): siRNA sense strand
gcgcuuuccuggguugcuu

SEQ ID NO: 1254745 - RNA, 19 nt, Homo sapiens
  misc_RNA (1)...(19): siRNA sense strand
uacuacaaagcaacaguua

SEQ ID NO: 1254746 - RNA, 19 nt, Homo sapiens
  misc_RNA (1)...(19): siRNA sense strand
cuugaugcaguaacuuaua

SEQ ID NO: 1254747 - RNA, 19 nt, Homo sapiens
  misc_RNA (1)...(19): siRNA sense strand
aaacauguccauauauacg

SEQ ID NO: 1254748 - RNA, 19 nt, Homo sapiens
  misc_RNA (1)...(19): siRNA sense strand
guguaaaguggucaaaugu

SEQ ID NO: 1254749 - RNA, 19 nt, Homo sapiens
  misc_RNA (1)...(19): siRNA sense strand
cuuacgaguuugguuauca

SEQ ID NO: 1254750 - RNA, 19 nt, Homo sapiens
  misc_RNA (1)...(19): siRNA sense strand
uacgggauccuuuaaaugg

SEQ ID NO: 1254751 - RNA, 19 nt, Homo sapiens
  misc_RNA (1)...(19): siRNA sense strand
gcagaugguggagcugaau

SEQ ID NO: 1254752 - RNA, 19 nt, Homo sapiens
  misc_RNA (1)...(19): siRNA sense strand
aaccaaaacccuacuauga

SEQ ID NO: 1254753 - RNA, 19 nt, Homo sapiens
  misc_RNA (1)...(19): siRNA sense strand
uugaugcaguaacuuauag

SEQ ID NO: 1254754 - RNA, 19 nt, Homo sapiens
  misc_RNA (1)...(19): siRNA sense strand
ggagcugaauaugccacuu

SEQ ID NO: 1254755 - RNA, 19 nt, Homo sapiens
  misc_RNA (1)...(19): siRNA sense strand
caacauuugaagcuaugga

SEQ ID NO: 1254756 - RNA, 19 nt, Homo sapiens
  misc_RNA (1)...(19): siRNA sense strand
cgauggcagcgacacaauu

SEQ ID NO: 1254757 - RNA, 19 nt, Homo sapiens
  misc_RNA (1)...(19): siRNA sense strand
gauccauuuucacuuauug

SEQ ID NO: 1254758 - RNA, 19 nt, Homo sapiens
  misc_RNA (1)...(19): siRNA sense strand
ggagagagcacgauuuauu

SEQ ID NO: 1254759 - RNA, 19 nt, Homo sapiens
  misc_RNA (1)...(19): siRNA sense strand
agagaaacauguccauaua

SEQ ID NO: 1254760 - RNA, 19 nt, Homo sapiens
  misc_RNA (1)...(19): siRNA sense strand
cagaugcacuuuauuugua

SEQ ID NO: 1254761 - RNA, 19 nt, Homo sapiens
  misc_RNA (1)...(19): siRNA sense strand
ggacuuacgaguuugguua

SEQ ID NO: 1254762 - RNA, 19 nt, Homo sapiens
  misc_RNA (1)...(19): siRNA sense strand
aaacagauaucaggauuug

SEQ ID NO: 1254763 - RNA, 19 nt, Homo sapiens
  misc_RNA (1)...(19): siRNA sense strand
cuauggagcucauugguaa

SEQ ID NO: 1254764 - RNA, 19 nt, Homo sapiens
  misc_RNA (1)...(19): siRNA sense strand
aaacacaccuuuagugaag

SEQ ID NO: 1254765 - RNA, 19 nt, Homo sapiens
  misc_RNA (1)...(19): siRNA sense strand
gaacuuaaaggaucaguag

SEQ ID NO: 1254766 - RNA, 19 nt, Homo sapiens
  misc_RNA (1)...(19): siRNA sense strand
gaaaacagauaucaggauu

SEQ ID NO: 1254767 - RNA, 19 nt, Homo sapiens
  misc_RNA (1)...(19): siRNA sense strand
uaaaggaucaguagcaauu

SEQ ID NO: 1254768 - RNA, 19 nt, Homo sapiens
  misc_RNA (1)...(19): siRNA sense strand
aaaugggacuuacgaguuu

SEQ ID NO: 1254769 - RNA, 19 nt, Homo sapiens
  misc_RNA (1)...(19): siRNA sense strand
guuaucagaugcacuuuau

SEQ ID NO: 1254770 - RNA, 19 nt, Homo sapiens
  misc_RNA (1)...(19): siRNA sense strand
gagcugaauaugccacuua

SEQ ID NO: 1254771 - RNA, 19 nt, Homo sapiens
  misc_RNA (1)...(19): siRNA sense strand
ugagauuggugaacgagua

SEQ ID NO: 1254772 - RNA, 19 nt, Homo sapiens
  misc_RNA (1)...(19): siRNA sense strand
gugaacgaguagauuauaa

SEQ ID NO: 1254773 - RNA, 19 nt, Homo sapiens
  misc_RNA (1)...(19): siRNA sense strand
gagagagcacgauuuauug

SEQ ID NO: 1254774 - RNA, 19 nt, Homo sapiens
  misc_RNA (1)...(19): siRNA sense strand
caaaugggacuuacgaguu

SEQ ID NO: 1254775 - RNA, 19 nt, Homo sapiens
  misc_RNA (1)...(19): siRNA sense strand
ggucauugcugugauuguu

SEQ ID NO: 1254776 - RNA, 19 nt, Homo sapiens
  misc_RNA (1)...(19): siRNA sense strand
ccagauccauuuucacuua

SEQ ID NO: 1254777 - RNA, 19 nt, Homo sapiens
  misc_RNA (1)...(19): siRNA sense strand
gaaggaauacuugacaguu

SEQ ID NO: 1254778 - RNA, 19 nt, Homo sapiens
  misc_RNA (1)...(19): siRNA sense strand
aaggaauacuugacaguuu

SEQ ID NO: 1254779 - RNA, 19 nt, Homo sapiens
  misc_RNA (1)...(19): siRNA sense strand
ucagaugacgccuguuaua

SEQ ID NO: 1254780 - RNA, 19 nt, Homo sapiens
  misc_RNA (1)...(19): siRNA sense strand
gaaaacacaccuuuaguga

SEQ ID NO: 1254781 - RNA, 19 nt, Homo sapiens
  misc_RNA (1)...(19): siRNA sense strand
gaugacgccuguuauagag

SEQ ID NO: 1254782 - RNA, 19 nt, Homo sapiens
  misc_RNA (1)...(19): siRNA sense strand
gagaaacauguccauauau

SEQ ID NO: 1254783 - RNA, 19 nt, Homo sapiens
  misc_RNA (1)...(19): siRNA sense strand
ccacuuaccagacuaaauc

SEQ ID NO: 1254784 - RNA, 19 nt, Homo sapiens
  misc_RNA (1)...(19): siRNA sense strand
acgaguagauuauaagugu

SEQ ID NO: 1254785 - RNA, 19 nt, Homo sapiens
  misc_RNA (1)...(19): siRNA sense strand
cuacaaagcaacaguuaug

SEQ ID NO: 1254786 - RNA, 19 nt, Homo sapiens
  misc_RNA (1)...(19): siRNA sense strand
ccaccaacauuugaagcua

SEQ ID NO: 1254787 - RNA, 19 nt, Homo sapiens
  misc_RNA (1)...(19): siRNA sense strand
uauacgggauccuuuaaau

SEQ ID NO: 1254788 - RNA, 19 nt, Homo sapiens
  misc_RNA (1)...(19): siRNA sense strand
cgaguuugguuaucagaug

SEQ ID NO: 1254789 - RNA, 19 nt, Homo sapiens
  misc_RNA (1)...(19): siRNA sense strand
gaacgaguagauuauaagu

SEQ ID NO: 1254790 - RNA, 19 nt, Homo sapiens
  misc_RNA (1)...(19): siRNA sense strand
gugaggagccaccaacauu

SEQ ID NO: 1254791 - RNA, 19 nt, Homo sapiens
  misc_RNA (1)...(19): siRNA sense strand
gauggcagcgacacaauug

SEQ ID NO: 1254792 - RNA, 19 nt, Homo sapiens
  misc_RNA (1)...(19): siRNA sense strand
ucucagaugacgccuguua

SEQ ID NO: 1254793 - RNA, 19 nt, Homo sapiens
  misc_RNA (1)...(19): siRNA sense strand
gaggagccaccaacauuug

SEQ ID NO: 1254794 - RNA, 19 nt, Homo sapiens
  misc_RNA (1)...(19): siRNA sense strand
gcuauggagcucauuggua

SEQ ID NO: 1254795 - RNA, 19 nt, Homo sapiens
  misc_RNA (1)...(19): siRNA sense strand
acacaccuuuagugaagua

SEQ ID NO: 1254796 - RNA, 19 nt, Homo sapiens
  misc_RNA (1)...(19): siRNA sense strand
uagagaaacauguccauau

SEQ ID NO: 1254797 - RNA, 19 nt, Homo sapiens
  misc_RNA (1)...(19): siRNA sense strand
guuccaaagugucuuaaag

SEQ ID NO: 1254798 - RNA, 19 nt, Homo sapiens
  misc_RNA (1)...(19): siRNA sense strand
ggugaacgaguagauuaua

SEQ ID NO: 1254799 - RNA, 19 nt, Homo sapiens
  misc_RNA (1)...(19): siRNA sense strand
gaaguagaaguauuugagu

SEQ ID NO: 1254800 - RNA, 19 nt, Homo sapiens
  misc_RNA (1)...(19): siRNA sense strand
gaaacauguccauauauac

SEQ ID NO: 1254801 - RNA, 19 nt, Homo sapiens
  misc_RNA (1)...(19): siRNA sense strand
ugacgccuguuauagagaa

SEQ ID NO: 1254802 - RNA, 19 nt, Homo sapiens
  misc_RNA (1)...(19): siRNA sense strand
cgaguagauuauaagugua

SEQ ID NO: 1254803 - RNA, 19 nt, Homo sapiens
  misc_RNA (1)...(19): siRNA sense strand
gcacuuuauuuguaaugag

SEQ ID NO: 1254804 - RNA, 19 nt, Homo sapiens
  misc_RNA (1)...(19): siRNA sense strand
guagaaguauuugaguauc

SEQ ID NO: 1254805 - RNA, 19 nt, Homo sapiens
  misc_RNA (1)...(19): siRNA sense strand
guauuugaguaucuugaug

SEQ ID NO: 1254806 - RNA, 19 nt, Homo sapiens
  misc_RNA (1)...(19): siRNA sense strand
aggaauacuugacaguuug

SEQ ID NO: 1254807 - RNA, 19 nt, Homo sapiens
  misc_RNA (1)...(19): siRNA sense strand
ccaaaacccuacuaugaga

SEQ ID NO: 1254808 - RNA, 19 nt, Homo sapiens
  misc_RNA (1)...(19): siRNA sense strand
aguguaaaguggucaaaug

SEQ ID NO: 1254809 - RNA, 19 nt, Homo sapiens
  misc_RNA (1)...(19): siRNA sense strand
ccacccauacuauuuguga

SEQ ID NO: 1254810 - RNA, 19 nt, Homo sapiens
  misc_RNA (1)...(19): siRNA sense strand
uuggagagagcacgauuua

SEQ ID NO: 1254811 - RNA, 19 nt, Homo sapiens
  misc_RNA (1)...(19): siRNA sense strand
gguuaucagaugcacuuua

SEQ ID NO: 1254812 - RNA, 19 nt, Homo sapiens
  misc_RNA (1)...(19): siRNA sense strand
caccaacauuugaagcuau

SEQ ID NO: 1254813 - RNA, 19 nt, Homo sapiens
  misc_RNA (1)...(19): siRNA sense strand
ugaggagccaccaacauuu

SEQ ID NO: 1254814 - RNA, 19 nt, Homo sapiens
  misc_RNA (1)...(19): siRNA sense strand
ggaaggaauacuugacagu

SEQ ID NO: 1254815 - RNA, 19 nt, Homo sapiens
  misc_RNA (1)...(19): siRNA sense strand
gaggaaggaauacuugaca

SEQ ID NO: 1254816 - RNA, 19 nt, Homo sapiens
  misc_RNA (1)...(19): siRNA sense strand
ccaguuccaaagugucuua

SEQ ID NO: 1254817 - RNA, 19 nt, Homo sapiens
  misc_RNA (1)...(19): siRNA sense strand
ugaguaucuugaugcagua

SEQ ID NO: 1254818 - RNA, 19 nt, Homo sapiens
  misc_RNA (1)...(19): siRNA sense strand
caccuuuagugaaguagaa

SEQ ID NO: 1254819 - RNA, 19 nt, Homo sapiens
  misc_RNA (1)...(19): siRNA sense strand
acagauaucaggauuugga

SEQ ID NO: 1254820 - RNA, 19 nt, Homo sapiens
  misc_RNA (1)...(19): siRNA sense strand
ucauugcugugauuguuau

SEQ ID NO: 1254821 - RNA, 19 nt, Homo sapiens
  misc_RNA (1)...(19): siRNA sense strand
ucagaugcacuuuauuugu

SEQ ID NO: 1254822 - RNA, 19 nt, Homo sapiens
  misc_RNA (1)...(19): siRNA sense strand
gugcugcuccagaguguaa

SEQ ID NO: 1254823 - RNA, 19 nt, Homo sapiens
  misc_RNA (1)...(19): siRNA sense strand
ggaaaacacaccuuuagug

SEQ ID NO: 1254824 - RNA, 19 nt, Homo sapiens
  misc_RNA (1)...(19): siRNA sense strand
aaggaucaguagcaauuug

SEQ ID NO: 1254825 - RNA, 19 nt, Homo sapiens
  misc_RNA (1)...(19): siRNA sense strand
uauauacgggauccuuuaa

SEQ ID NO: 1254826 - RNA, 19 nt, Homo sapiens
  misc_RNA (1)...(19): siRNA sense strand
ugaaguagaaguauuugag

SEQ ID NO: 1254827 - RNA, 19 nt, Homo sapiens
  misc_RNA (1)...(19): siRNA sense strand
cuugacaguuuggauguuu

SEQ ID NO: 1254828 - RNA, 19 nt, Homo sapiens
  misc_RNA (1)...(19): siRNA sense strand
cauauauacgggauccuuu

SEQ ID NO: 1254829 - RNA, 19 nt, Homo sapiens
  misc_RNA (1)...(19): siRNA sense strand
auauauacgggauccuuua

SEQ ID NO: 1254830 - RNA, 19 nt, Homo sapiens
  misc_RNA (1)...(19): siRNA sense strand
cuuaaaggaucaguagcaa

SEQ ID NO: 1254831 - RNA, 19 nt, Homo sapiens
  misc_RNA (1)...(19): siRNA sense strand
uaaaccugaggaaggaaua

SEQ ID NO: 1254832 - RNA, 19 nt, Homo sapiens
  misc_RNA (1)...(19): siRNA sense strand
agaugacgccuguuauaga

SEQ ID NO: 1254833 - RNA, 19 nt, Homo sapiens
  misc_RNA (1)...(19): siRNA sense strand
ugugauuguuauugccaua

SEQ ID NO: 1254834 - RNA, 19 nt, Homo sapiens
  misc_RNA (1)...(19): siRNA sense strand
gagagcacgauuuauugug

SEQ ID NO: 1254835 - RNA, 19 nt, Homo sapiens
  misc_RNA (1)...(19): siRNA sense strand
gaaguauuugaguaucuug

SEQ ID NO: 1254836 - RNA, 19 nt, Homo sapiens
  misc_RNA (1)...(19): siRNA sense strand
ggcuaccugucucagauga

SEQ ID NO: 1254837 - RNA, 19 nt, Homo sapiens
  misc_RNA (1)...(19): siRNA sense strand
gauaucaggauuuggaaaa

SEQ ID NO: 1254838 - RNA, 19 nt, Homo sapiens
  misc_RNA (1)...(19): siRNA sense strand
ccucuugccacccauacua

SEQ ID NO: 1254839 - RNA, 19 nt, Homo sapiens
  misc_RNA (1)...(19): siRNA sense strand
ccaugguguugcugcugua

SEQ ID NO: 1254840 - RNA, 19 nt, Homo sapiens
  misc_RNA (1)...(19): siRNA sense strand
cagaugacgccuguuauag

SEQ ID NO: 1254841 - RNA, 19 nt, Homo sapiens
  misc_RNA (1)...(19): siRNA sense strand
cagaugguggagcugaaua

SEQ ID NO: 1254842 - RNA, 19 nt, Homo sapiens
  misc_RNA (1)...(19): siRNA sense strand
gucauugcugugauuguua

SEQ ID NO: 1254843 - RNA, 19 nt, Homo sapiens
  misc_RNA (1)...(19): siRNA sense strand
ggagccaccaacauuugaa

SEQ ID NO: 1254844 - RNA, 19 nt, Homo sapiens
  misc_RNA (1)...(19): siRNA sense strand
uuggugaacgaguagauua

SEQ ID NO: 1254845 - RNA, 19 nt, Homo sapiens
  misc_RNA (1)...(19): siRNA sense strand
gcgcuuuccuggguugcuu

SEQ ID NO: 1254846 - RNA, 19 nt, Homo sapiens
  misc_RNA (1)...(19): siRNA sense strand
uacuacaaagcaacaguua

SEQ ID NO: 1254847 - RNA, 19 nt, Homo sapiens
  misc_RNA (1)...(19): siRNA sense strand
cuugaugcaguaacuuaua

SEQ ID NO: 1254848 - RNA, 19 nt, Homo sapiens
  misc_RNA (1)...(19): siRNA sense strand
aaacauguccauauauacg

SEQ ID NO: 1254849 - RNA, 19 nt, Homo sapiens
  misc_RNA (1)...(19): siRNA sense strand
guguaaaguggucaaaugu

SEQ ID NO: 1254850 - RNA, 19 nt, Homo sapiens
  misc_RNA (1)...(19): siRNA sense strand
cuuacgaguuugguuauca

SEQ ID NO: 1254851 - RNA, 19 nt, Homo sapiens
  misc_RNA (1)...(19): siRNA sense strand
uacgggauccuuuaaaugg

SEQ ID NO: 1254852 - RNA, 19 nt, Homo sapiens
  misc_RNA (1)...(19): siRNA sense strand
gcagaugguggagcugaau

SEQ ID NO: 1254853 - RNA, 19 nt, Homo sapiens
  misc_RNA (1)...(19): siRNA sense strand
aaccaaaacccuacuauga

SEQ ID NO: 1254854 - RNA, 19 nt, Homo sapiens
  misc_RNA (1)...(19): siRNA sense strand
uugaugcaguaacuuauag

SEQ ID NO: 1254855 - RNA, 19 nt, Homo sapiens
  misc_RNA (1)...(19): siRNA sense strand
ggagcugaauaugccacuu

SEQ ID NO: 1254856 - RNA, 19 nt, Homo sapiens
  misc_RNA (1)...(19): siRNA sense strand
cgauggcagcgacacaauu

SEQ ID NO: 1254857 - RNA, 19 nt, Homo sapiens
  misc_RNA (1)...(19): siRNA sense strand
gauccauuuucacuuauug

SEQ ID NO: 1254858 - RNA, 19 nt, Homo sapiens
  misc_RNA (1)...(19): siRNA sense strand
ggagagagcacgauuuauu

SEQ ID NO: 1254859 - RNA, 19 nt, Homo sapiens
  misc_RNA (1)...(19): siRNA sense strand
agagaaacauguccauaua

SEQ ID NO: 1254860 - RNA, 19 nt, Homo sapiens
  misc_RNA (1)...(19): siRNA sense strand
cagaugcacuuuauuugua

SEQ ID NO: 1254861 - RNA, 19 nt, Homo sapiens
  misc_RNA (1)...(19): siRNA sense strand
ggacuuacgaguuugguua

SEQ ID NO: 1254862 - RNA, 19 nt, Homo sapiens
  misc_RNA (1)...(19): siRNA sense strand
aaacagauaucaggauuug

SEQ ID NO: 1254863 - RNA, 19 nt, Homo sapiens
  misc_RNA (1)...(19): siRNA sense strand
cuauggagcucauugguaa

SEQ ID NO: 1254864 - RNA, 19 nt, Homo sapiens
  misc_RNA (1)...(19): siRNA sense strand
aaacacaccuuuagugaag

SEQ ID NO: 1254865 - RNA, 19 nt, Homo sapiens
  misc_RNA (1)...(19): siRNA sense strand
gaacuuaaaggaucaguag

SEQ ID NO: 1254866 - RNA, 19 nt, Homo sapiens
  misc_RNA (1)...(19): siRNA sense strand
gaaaacagauaucaggauu

SEQ ID NO: 1254867 - RNA, 19 nt, Homo sapiens
  misc_RNA (1)...(19): siRNA sense strand
uaaaggaucaguagcaauu

SEQ ID NO: 1254868 - RNA, 19 nt, Homo sapiens
  misc_RNA (1)...(19): siRNA sense strand
aaaugggacuuacgaguuu

SEQ ID NO: 1254869 - RNA, 19 nt, Homo sapiens
  misc_RNA (1)...(19): siRNA sense strand
guuaucagaugcacuuuau

SEQ ID NO: 1254870 - RNA, 19 nt, Homo sapiens
  misc_RNA (1)...(19): siRNA sense strand
gagcugaauaugccacuua

SEQ ID NO: 1254871 - RNA, 19 nt, Homo sapiens
  misc_RNA (1)...(19): siRNA sense strand
ugagauuggugaacgagua

SEQ ID NO: 1254872 - RNA, 19 nt, Homo sapiens
  misc_RNA (1)...(19): siRNA sense strand
gugaacgaguagauuauaa

SEQ ID NO: 1254873 - RNA, 19 nt, Homo sapiens
  misc_RNA (1)...(19): siRNA sense strand
gagagagcacgauuuauug

SEQ ID NO: 1254874 - RNA, 19 nt, Homo sapiens
  misc_RNA (1)...(19): siRNA sense strand
caaaugggacuuacgaguu

SEQ ID NO: 1254875 - RNA, 19 nt, Homo sapiens
  misc_RNA (1)...(19): siRNA sense strand
ggucauugcugugauuguu

SEQ ID NO: 1254876 - RNA, 19 nt, Homo sapiens
  misc_RNA (1)...(19): siRNA sense strand
ccagauccauuuucacuua

SEQ ID NO: 1254877 - RNA, 19 nt, Homo sapiens
  misc_RNA (1)...(19): siRNA sense strand
gaaggaauacuugacaguu

SEQ ID NO: 1254878 - RNA, 19 nt, Homo sapiens
  misc_RNA (1)...(19): siRNA sense strand
aaggaauacuugacaguuu

SEQ ID NO: 1254879 - RNA, 19 nt, Homo sapiens
  misc_RNA (1)...(19): siRNA sense strand
ucagaugacgccuguuaua

SEQ ID NO: 1254880 - RNA, 19 nt, Homo sapiens
  misc_RNA (1)...(19): siRNA sense strand
gaaaacacaccuuuaguga

SEQ ID NO: 1254881 - RNA, 19 nt, Homo sapiens
  misc_RNA (1)...(19): siRNA sense strand
gaugacgccuguuauagag

SEQ ID NO: 1254882 - RNA, 19 nt, Homo sapiens
  misc_RNA (1)...(19): siRNA sense strand
gagaaacauguccauauau

SEQ ID NO: 1254883 - RNA, 19 nt, Homo sapiens
  misc_RNA (1)...(19): siRNA sense strand
ccacuuaccagacuaaauc

SEQ ID NO: 1254884 - RNA, 19 nt, Homo sapiens
  misc_RNA (1)...(19): siRNA sense strand
acgaguagauuauaagugu

SEQ ID NO: 1254885 - RNA, 19 nt, Homo sapiens
  misc_RNA (1)...(19): siRNA sense strand
cuacaaagcaacaguuaug

SEQ ID NO: 1254886 - RNA, 19 nt, Homo sapiens
  misc_RNA (1)...(19): siRNA sense strand
ccaccaacauuugaagcua

SEQ ID NO: 1254887 - RNA, 19 nt, Homo sapiens
  misc_RNA (1)...(19): siRNA sense strand
uauacgggauccuuuaaau

SEQ ID NO: 1254888 - RNA, 19 nt, Homo sapiens
  misc_RNA (1)...(19): siRNA sense strand
cgaguuugguuaucagaug

SEQ ID NO: 1254889 - RNA, 19 nt, Homo sapiens
  misc_RNA (1)...(19): siRNA sense strand
gaacgaguagauuauaagu

SEQ ID NO: 1254890 - RNA, 19 nt, Homo sapiens
  misc_RNA (1)...(19): siRNA sense strand
gugaggagccaccaacauu

SEQ ID NO: 1254891 - RNA, 19 nt, Homo sapiens
  misc_RNA (1)...(19): siRNA sense strand
gauggcagcgacacaauug

SEQ ID NO: 1254892 - RNA, 19 nt, Homo sapiens
  misc_RNA (1)...(19): siRNA sense strand
ucucagaugacgccuguua

SEQ ID NO: 1254893 - RNA, 19 nt, Homo sapiens
  misc_RNA (1)...(19): siRNA sense strand
gaggagccaccaacauuug

SEQ ID NO: 1254894 - RNA, 19 nt, Homo sapiens
  misc_RNA (1)...(19): siRNA sense strand
gcuauggagcucauuggua

SEQ ID NO: 1254895 - RNA, 19 nt, Homo sapiens
  misc_RNA (1)...(19): siRNA sense strand
acacaccuuuagugaagua

SEQ ID NO: 1254896 - RNA, 19 nt, Homo sapiens
  misc_RNA (1)...(19): siRNA sense strand
uagagaaacauguccauau

SEQ ID NO: 1254897 - RNA, 19 nt, Homo sapiens
  misc_RNA (1)...(19): siRNA sense strand
guuccaaagugucuuaaag

SEQ ID NO: 1254898 - RNA, 19 nt, Homo sapiens
  misc_RNA (1)...(19): siRNA sense strand
ggugaacgaguagauuaua

SEQ ID NO: 1254899 - RNA, 19 nt, Homo sapiens
  misc_RNA (1)...(19): siRNA sense strand
gaaguagaaguauuugagu

SEQ ID NO: 1254900 - RNA, 19 nt, Homo sapiens
  misc_RNA (1)...(19): siRNA sense strand
gaaacauguccauauauac

SEQ ID NO: 1254901 - RNA, 19 nt, Homo sapiens
  misc_RNA (1)...(19): siRNA sense strand
ugacgccuguuauagagaa

SEQ ID NO: 1254902 - RNA, 19 nt, Homo sapiens
  misc_RNA (1)...(19): siRNA sense strand
cgaguagauuauaagugua

SEQ ID NO: 1254903 - RNA, 19 nt, Homo sapiens
  misc_RNA (1)...(19): siRNA sense strand
gcacuuuauuuguaaugag

SEQ ID NO: 1254904 - RNA, 19 nt, Homo sapiens
  misc_RNA (1)...(19): siRNA sense strand
guagaaguauuugaguauc

SEQ ID NO: 1254905 - RNA, 19 nt, Homo sapiens
  misc_RNA (1)...(19): siRNA sense strand
guauuugaguaucuugaug

SEQ ID NO: 1254906 - RNA, 19 nt, Homo sapiens
  misc_RNA (1)...(19): siRNA sense strand
aggaauacuugacaguuug

SEQ ID NO: 1254907 - RNA, 19 nt, Homo sapiens
  misc_RNA (1)...(19): siRNA sense strand
ccaaaacccuacuaugaga

SEQ ID NO: 1254908 - RNA, 19 nt, Homo sapiens
  misc_RNA (1)...(19): siRNA sense strand
aguguaaaguggucaaaug

SEQ ID NO: 1254909 - RNA, 19 nt, Homo sapiens
  misc_RNA (1)...(19): siRNA sense strand
ccacccauacuauuuguga

SEQ ID NO: 1254910 - RNA, 19 nt, Homo sapiens
  misc_RNA (1)...(19): siRNA sense strand
uuggagagagcacgauuua

SEQ ID NO: 1254911 - RNA, 19 nt, Homo sapiens
  misc_RNA (1)...(19): siRNA sense strand
gguuaucagaugcacuuua

SEQ ID NO: 1254912 - RNA, 19 nt, Homo sapiens
  misc_RNA (1)...(19): siRNA sense strand
caccaacauuugaagcuau

SEQ ID NO: 1254913 - RNA, 19 nt, Homo sapiens
  misc_RNA (1)...(19): siRNA sense strand
ugaggagccaccaacauuu

SEQ ID NO: 1254914 - RNA, 19 nt, Homo sapiens
  misc_RNA (1)...(19): siRNA sense strand
ggaaggaauacuugacagu

SEQ ID NO: 1254915 - RNA, 19 nt, Homo sapiens
  misc_RNA (1)...(19): siRNA sense strand
gaggaaggaauacuugaca

SEQ ID NO: 1254916 - RNA, 19 nt, Homo sapiens
  misc_RNA (1)...(19): siRNA sense strand
ccaguuccaaagugucuua

SEQ ID NO: 1254917 - RNA, 19 nt, Homo sapiens
  misc_RNA (1)...(19): siRNA sense strand
ugaguaucuugaugcagua

SEQ ID NO: 1254918 - RNA, 19 nt, Homo sapiens
  misc_RNA (1)...(19): siRNA sense strand
caccuuuagugaaguagaa

SEQ ID NO: 1254919 - RNA, 19 nt, Homo sapiens
  misc_RNA (1)...(19): siRNA sense strand
acagauaucaggauuugga

SEQ ID NO: 1254920 - RNA, 19 nt, Homo sapiens
  misc_RNA (1)...(19): siRNA sense strand
ucauugcugugauuguuau

SEQ ID NO: 1254921 - RNA, 19 nt, Homo sapiens
  misc_RNA (1)...(19): siRNA sense strand
ucagaugcacuuuauuugu

SEQ ID NO: 1254922 - RNA, 19 nt, Homo sapiens
  misc_RNA (1)...(19): siRNA sense strand
gugcugcuccagaguguaa

SEQ ID NO: 1254923 - RNA, 19 nt, Homo sapiens
  misc_RNA (1)...(19): siRNA sense strand
ggaaaacacaccuuuagug

SEQ ID NO: 1254924 - RNA, 19 nt, Homo sapiens
  misc_RNA (1)...(19): siRNA sense strand
aaggaucaguagcaauuug

SEQ ID NO: 1254925 - RNA, 19 nt, Homo sapiens
  misc_RNA (1)...(19): siRNA sense strand
uauauacgggauccuuuaa

SEQ ID NO: 1254926 - RNA, 19 nt, Homo sapiens
  misc_RNA (1)...(19): siRNA sense strand
ugaaguagaaguauuugag

SEQ ID NO: 1254927 - RNA, 19 nt, Homo sapiens
  misc_RNA (1)...(19): siRNA sense strand
cuugacaguuuggauguuu

SEQ ID NO: 1254928 - RNA, 19 nt, Homo sapiens
  misc_RNA (1)...(19): siRNA sense strand
cauauauacgggauccuuu

SEQ ID NO: 1254929 - RNA, 19 nt, Homo sapiens
  misc_RNA (1)...(19): siRNA sense strand
auauauacgggauccuuua

SEQ ID NO: 1254930 - RNA, 19 nt, Homo sapiens
  misc_RNA (1)...(19): siRNA sense strand
cuuaaaggaucaguagcaa

SEQ ID NO: 1254931 - RNA, 19 nt, Homo sapiens
  misc_RNA (1)...(19): siRNA sense strand
uaaaccugaggaaggaaua

SEQ ID NO: 1254932 - RNA, 19 nt, Homo sapiens
  misc_RNA (1)...(19): siRNA sense strand
agaugacgccuguuauaga

SEQ ID NO: 1254933 - RNA, 19 nt, Homo sapiens
  misc_RNA (1)...(19): siRNA sense strand
ugugauuguuauugccaua

SEQ ID NO: 1254934 - RNA, 19 nt, Homo sapiens
  misc_RNA (1)...(19): siRNA sense strand
gagagcacgauuuauugug

SEQ ID NO: 1254935 - RNA, 19 nt, Homo sapiens
  misc_RNA (1)...(19): siRNA sense strand
gaaguauuugaguaucuug

SEQ ID NO: 1254936 - RNA, 19 nt, Homo sapiens
  misc_RNA (1)...(19): siRNA sense strand
ggcuaccugucucagauga

SEQ ID NO: 1254937 - RNA, 19 nt, Homo sapiens
  misc_RNA (1)...(19): siRNA sense strand
gauaucaggauuuggaaaa

SEQ ID NO: 1254938 - RNA, 19 nt, Homo sapiens
  misc_RNA (1)...(19): siRNA sense strand
ccucuugccacccauacua

SEQ ID NO: 1254939 - RNA, 19 nt, Homo sapiens
  misc_RNA (1)...(19): siRNA sense strand
ccaugguguugcugcugua

SEQ ID NO: 1254940 - RNA, 19 nt, Homo sapiens
  misc_RNA (1)...(19): siRNA sense strand
cagaugacgccuguuauag

SEQ ID NO: 1254941 - RNA, 19 nt, Homo sapiens
  misc_RNA (1)...(19): siRNA sense strand
cagaugguggagcugaaua

SEQ ID NO: 1254942 - RNA, 19 nt, Homo sapiens
  misc_RNA (1)...(19): siRNA sense strand
gucauugcugugauuguua

SEQ ID NO: 1254943 - RNA, 19 nt, Homo sapiens
  misc_RNA (1)...(19): siRNA sense strand
ggagccaccaacauuugaa

SEQ ID NO: 1254944 - RNA, 19 nt, Homo sapiens
  misc_RNA (1)...(19): siRNA sense strand
uuggugaacgaguagauua

SEQ ID NO: 1254945 - RNA, 19 nt, Homo sapiens
  misc_RNA (1)...(19): siRNA sense strand
gcgcuuuccuggguugcuu

SEQ ID NO: 1254946 - RNA, 19 nt, Homo sapiens
  misc_RNA (1)...(19): siRNA sense strand
uacuacaaagcaacaguua

SEQ ID NO: 1254947 - RNA, 19 nt, Homo sapiens
  misc_RNA (1)...(19): siRNA sense strand
cuugaugcaguaacuuaua

SEQ ID NO: 1254948 - RNA, 19 nt, Homo sapiens
  misc_RNA (1)...(19): siRNA sense strand
aaacauguccauauauacg

SEQ ID NO: 1254949 - RNA, 19 nt, Homo sapiens
  misc_RNA (1)...(19): siRNA sense strand
guguaaaguggucaaaugu

SEQ ID NO: 1254950 - RNA, 19 nt, Homo sapiens
  misc_RNA (1)...(19): siRNA sense strand
cuuacgaguuugguuauca

SEQ ID NO: 1254951 - RNA, 19 nt, Homo sapiens
  misc_RNA (1)...(19): siRNA sense strand
uacgggauccuuuaaaugg

SEQ ID NO: 1254952 - RNA, 19 nt, Homo sapiens
  misc_RNA (1)...(19): siRNA sense strand
gcagaugguggagcugaau

SEQ ID NO: 1254953 - RNA, 19 nt, Homo sapiens
  misc_RNA (1)...(19): siRNA sense strand
aaccaaaacccuacuauga

SEQ ID NO: 1254954 - RNA, 19 nt, Homo sapiens
  misc_RNA (1)...(19): siRNA sense strand
uugaugcaguaacuuauag

SEQ ID NO: 1254955 - RNA, 19 nt, Homo sapiens
  misc_RNA (1)...(19): siRNA sense strand
ggagcugaauaugccacuu

SEQ ID NO: 1254956 - RNA, 19 nt, Homo sapiens
  misc_RNA (1)...(19): siRNA sense strand
cgauggcagcgacacaauu

SEQ ID NO: 1254957 - RNA, 19 nt, Homo sapiens
  misc_RNA (1)...(19): siRNA sense strand
gauccauuuucacuuauug

SEQ ID NO: 1254958 - RNA, 19 nt, Homo sapiens
  misc_RNA (1)...(19): siRNA sense strand
ggagagagcacgauuuauu

SEQ ID NO: 1254959 - RNA, 19 nt, Homo sapiens
  misc_RNA (1)...(19): siRNA sense strand
agagaaacauguccauaua

SEQ ID NO: 1254960 - RNA, 19 nt, Homo sapiens
  misc_RNA (1)...(19): siRNA sense strand
cagaugcacuuuauuugua

SEQ ID NO: 1254961 - RNA, 19 nt, Homo sapiens
  misc_RNA (1)...(19): siRNA sense strand
ggacuuacgaguuugguua

SEQ ID NO: 1254962 - RNA, 19 nt, Homo sapiens
  misc_RNA (1)...(19): siRNA sense strand
aaacagauaucaggauuug

SEQ ID NO: 1254963 - RNA, 19 nt, Homo sapiens
  misc_RNA (1)...(19): siRNA sense strand
cuauggagcucauugguaa

SEQ ID NO: 1254964 - RNA, 19 nt, Homo sapiens
  misc_RNA (1)...(19): siRNA sense strand
aaacacaccuuuagugaag

SEQ ID NO: 1254965 - RNA, 19 nt, Homo sapiens
  misc_RNA (1)...(19): siRNA sense strand
gaacuuaaaggaucaguag

SEQ ID NO: 1254966 - RNA, 19 nt, Homo sapiens
  misc_RNA (1)...(19): siRNA sense strand
gaaaacagauaucaggauu

SEQ ID NO: 1254967 - RNA, 19 nt, Homo sapiens
  misc_RNA (1)...(19): siRNA sense strand
uaaaggaucaguagcaauu

SEQ ID NO: 1254968 - RNA, 19 nt, Homo sapiens
  misc_RNA (1)...(19): siRNA sense strand
aaaugggacuuacgaguuu

SEQ ID NO: 1254969 - RNA, 19 nt, Homo sapiens
  misc_RNA (1)...(19): siRNA sense strand
guuaucagaugcacuuuau

SEQ ID NO: 1254970 - RNA, 19 nt, Homo sapiens
  misc_RNA (1)...(19): siRNA sense strand
gagcugaauaugccacuua

SEQ ID NO: 1254971 - RNA, 19 nt, Homo sapiens
  misc_RNA (1)...(19): siRNA sense strand
ugagauuggugaacgagua

SEQ ID NO: 1254972 - RNA, 19 nt, Homo sapiens
  misc_RNA (1)...(19): siRNA sense strand
gugaacgaguagauuauaa

SEQ ID NO: 1254973 - RNA, 19 nt, Homo sapiens
  misc_RNA (1)...(19): siRNA sense strand
gagagagcacgauuuauug

SEQ ID NO: 1254974 - RNA, 19 nt, Homo sapiens
  misc_RNA (1)...(19): siRNA sense strand
caaaugggacuuacgaguu

SEQ ID NO: 1254975 - RNA, 19 nt, Homo sapiens
  misc_RNA (1)...(19): siRNA sense strand
ggucauugcugugauuguu

SEQ ID NO: 1254976 - RNA, 19 nt, Homo sapiens
  misc_RNA (1)...(19): siRNA sense strand
ccagauccauuuucacuua

SEQ ID NO: 1254977 - RNA, 19 nt, Homo sapiens
  misc_RNA (1)...(19): siRNA sense strand
gaaggaauacuugacaguu

SEQ ID NO: 1254978 - RNA, 19 nt, Homo sapiens
  misc_RNA (1)...(19): siRNA sense strand
aaggaauacuugacaguuu

SEQ ID NO: 1254979 - RNA, 19 nt, Homo sapiens
  misc_RNA (1)...(19): siRNA sense strand
ucagaugacgccuguuaua

SEQ ID NO: 1254980 - RNA, 19 nt, Homo sapiens
  misc_RNA (1)...(19): siRNA sense strand
gaaaacacaccuuuaguga

SEQ ID NO: 1254981 - RNA, 19 nt, Homo sapiens
  misc_RNA (1)...(19): siRNA sense strand
gaugacgccuguuauagag

SEQ ID NO: 1254982 - RNA, 19 nt, Homo sapiens
  misc_RNA (1)...(19): siRNA sense strand
gagaaacauguccauauau

SEQ ID NO: 1254983 - RNA, 19 nt, Homo sapiens
  misc_RNA (1)...(19): siRNA sense strand
ccacuuaccagacuaaauc

SEQ ID NO: 1254984 - RNA, 19 nt, Homo sapiens
  misc_RNA (1)...(19): siRNA sense strand
acgaguagauuauaagugu

SEQ ID NO: 1254985 - RNA, 19 nt, Homo sapiens
  misc_RNA (1)...(19): siRNA sense strand
cuacaaagcaacaguuaug

SEQ ID NO: 1254986 - RNA, 19 nt, Homo sapiens
  misc_RNA (1)...(19): siRNA sense strand
ccaccaacauuugaagcua

SEQ ID NO: 1254987 - RNA, 19 nt, Homo sapiens
  misc_RNA (1)...(19): siRNA sense strand
uauacgggauccuuuaaau

SEQ ID NO: 1254988 - RNA, 19 nt, Homo sapiens
  misc_RNA (1)...(19): siRNA sense strand
cgaguuugguuaucagaug

SEQ ID NO: 1254989 - RNA, 19 nt, Homo sapiens
  misc_RNA (1)...(19): siRNA sense strand
gaacgaguagauuauaagu

SEQ ID NO: 1254990 - RNA, 19 nt, Homo sapiens
  misc_RNA (1)...(19): siRNA sense strand
gugaggagccaccaacauu

SEQ ID NO: 1254991 - RNA, 19 nt, Homo sapiens
  misc_RNA (1)...(19): siRNA sense strand
gauggcagcgacacaauug

SEQ ID NO: 1254992 - RNA, 19 nt, Homo sapiens
  misc_RNA (1)...(19): siRNA sense strand
ucucagaugacgccuguua

SEQ ID NO: 1254993 - RNA, 19 nt, Homo sapiens
  misc_RNA (1)...(19): siRNA sense strand
gaggagccaccaacauuug

SEQ ID NO: 1254994 - RNA, 19 nt, Homo sapiens
  misc_RNA (1)...(19): siRNA sense strand
gcuauggagcucauuggua

SEQ ID NO: 1254995 - RNA, 19 nt, Homo sapiens
  misc_RNA (1)...(19): siRNA sense strand
acacaccuuuagugaagua

SEQ ID NO: 1254996 - RNA, 19 nt, Homo sapiens
  misc_RNA (1)...(19): siRNA sense strand
uagagaaacauguccauau

SEQ ID NO: 1254997 - RNA, 19 nt, Homo sapiens
  misc_RNA (1)...(19): siRNA sense strand
guuccaaagugucuuaaag

SEQ ID NO: 1254998 - RNA, 19 nt, Homo sapiens
  misc_RNA (1)...(19): siRNA sense strand
ggugaacgaguagauuaua

SEQ ID NO: 1254999 - RNA, 19 nt, Homo sapiens
  misc_RNA (1)...(19): siRNA sense strand
gaaguagaaguauuugagu

SEQ ID NO: 1255000 - RNA, 19 nt, Homo sapiens
  misc_RNA (1)...(19): siRNA sense strand
gaaacauguccauauauac

SEQ ID NO: 1255001 - RNA, 19 nt, Homo sapiens
  misc_RNA (1)...(19): siRNA sense strand
ugacgccuguuauagagaa

SEQ ID NO: 1255002 - RNA, 19 nt, Homo sapiens
  misc_RNA (1)...(19): siRNA sense strand
cgaguagauuauaagugua

SEQ ID NO: 1255003 - RNA, 19 nt, Homo sapiens
  misc_RNA (1)...(19): siRNA sense strand
gcacuuuauuuguaaugag

SEQ ID NO: 1255004 - RNA, 19 nt, Homo sapiens
  misc_RNA (1)...(19): siRNA sense strand
guagaaguauuugaguauc

SEQ ID NO: 1255005 - RNA, 19 nt, Homo sapiens
  misc_RNA (1)...(19): siRNA sense strand
guauuugaguaucuugaug

SEQ ID NO: 1255006 - RNA, 19 nt, Homo sapiens
  misc_RNA (1)...(19): siRNA sense strand
aggaauacuugacaguuug

SEQ ID NO: 1255007 - RNA, 19 nt, Homo sapiens
  misc_RNA (1)...(19): siRNA sense strand
ccaaaacccuacuaugaga

SEQ ID NO: 1255008 - RNA, 19 nt, Homo sapiens
  misc_RNA (1)...(19): siRNA sense strand
aguguaaaguggucaaaug

SEQ ID NO: 1255009 - RNA, 19 nt, Homo sapiens
  misc_RNA (1)...(19): siRNA sense strand
ccacccauacuauuuguga

SEQ ID NO: 1255010 - RNA, 19 nt, Homo sapiens
  misc_RNA (1)...(19): siRNA sense strand
uuggagagagcacgauuua

SEQ ID NO: 1255011 - RNA, 19 nt, Homo sapiens
  misc_RNA (1)...(19): siRNA sense strand
gguuaucagaugcacuuua

SEQ ID NO: 1255012 - RNA, 19 nt, Homo sapiens
  misc_RNA (1)...(19): siRNA sense strand
caccaacauuugaagcuau

SEQ ID NO: 1255013 - RNA, 19 nt, Homo sapiens
  misc_RNA (1)...(19): siRNA sense strand
ugaggagccaccaacauuu

SEQ ID NO: 1255014 - RNA, 19 nt, Homo sapiens
  misc_RNA (1)...(19): siRNA sense strand
ggaaggaauacuugacagu

SEQ ID NO: 1255015 - RNA, 19 nt, Homo sapiens
  misc_RNA (1)...(19): siRNA sense strand
gaggaaggaauacuugaca

SEQ ID NO: 1255016 - RNA, 19 nt, Homo sapiens
  misc_RNA (1)...(19): siRNA sense strand
ccaguuccaaagugucuua

SEQ ID NO: 1255017 - RNA, 19 nt, Homo sapiens
  misc_RNA (1)...(19): siRNA sense strand
ugaguaucuugaugcagua

SEQ ID NO: 1255018 - RNA, 19 nt, Homo sapiens
  misc_RNA (1)...(19): siRNA sense strand
caccuuuagugaaguagaa

SEQ ID NO: 1255019 - RNA, 19 nt, Homo sapiens
  misc_RNA (1)...(19): siRNA sense strand
acagauaucaggauuugga

SEQ ID NO: 1255020 - RNA, 19 nt, Homo sapiens
  misc_RNA (1)...(19): siRNA sense strand
ucauugcugugauuguuau

SEQ ID NO: 1255021 - RNA, 19 nt, Homo sapiens
  misc_RNA (1)...(19): siRNA sense strand
ucagaugcacuuuauuugu

SEQ ID NO: 1255022 - RNA, 19 nt, Homo sapiens
  misc_RNA (1)...(19): siRNA sense strand
gugcugcuccagaguguaa

SEQ ID NO: 1255023 - RNA, 19 nt, Homo sapiens
  misc_RNA (1)...(19): siRNA sense strand
ggaaaacacaccuuuagug

SEQ ID NO: 1255024 - RNA, 19 nt, Homo sapiens
  misc_RNA (1)...(19): siRNA sense strand
aaggaucaguagcaauuug

SEQ ID NO: 1255025 - RNA, 19 nt, Homo sapiens
  misc_RNA (1)...(19): siRNA sense strand
uauauacgggauccuuuaa

SEQ ID NO: 1255026 - RNA, 19 nt, Homo sapiens
  misc_RNA (1)...(19): siRNA sense strand
ugaaguagaaguauuugag

SEQ ID NO: 1255027 - RNA, 19 nt, Homo sapiens
  misc_RNA (1)...(19): siRNA sense strand
cuugacaguuuggauguuu

SEQ ID NO: 1255028 - RNA, 19 nt, Homo sapiens
  misc_RNA (1)...(19): siRNA sense strand
cauauauacgggauccuuu

SEQ ID NO: 1255029 - RNA, 19 nt, Homo sapiens
  misc_RNA (1)...(19): siRNA sense strand
auauauacgggauccuuua

SEQ ID NO: 1255030 - RNA, 19 nt, Homo sapiens
  misc_RNA (1)...(19): siRNA sense strand
cuuaaaggaucaguagcaa

SEQ ID NO: 1255031 - RNA, 19 nt, Homo sapiens
  misc_RNA (1)...(19): siRNA sense strand
uaaaccugaggaaggaaua

SEQ ID NO: 1255032 - RNA, 19 nt, Homo sapiens
  misc_RNA (1)...(19): siRNA sense strand
agaugacgccuguuauaga

SEQ ID NO: 1255033 - RNA, 19 nt, Homo sapiens
  misc_RNA (1)...(19): siRNA sense strand
ugugauuguuauugccaua

SEQ ID NO: 1255034 - RNA, 19 nt, Homo sapiens
  misc_RNA (1)...(19): siRNA sense strand
gagagcacgauuuauugug

SEQ ID NO: 1255035 - RNA, 19 nt, Homo sapiens
  misc_RNA (1)...(19): siRNA sense strand
gaaguauuugaguaucuug

SEQ ID NO: 1255036 - RNA, 19 nt, Homo sapiens
  misc_RNA (1)...(19): siRNA sense strand
ggcuaccugucucagauga

SEQ ID NO: 1255037 - RNA, 19 nt, Homo sapiens
  misc_RNA (1)...(19): siRNA sense strand
gauaucaggauuuggaaaa

SEQ ID NO: 1255038 - RNA, 19 nt, Homo sapiens
  misc_RNA (1)...(19): siRNA sense strand
ccucuugccacccauacua

SEQ ID NO: 1255039 - RNA, 19 nt, Homo sapiens
  misc_RNA (1)...(19): siRNA sense strand
ccaugguguugcugcugua

SEQ ID NO: 1255040 - RNA, 19 nt, Homo sapiens
  misc_RNA (1)...(19): siRNA sense strand
cagaugacgccuguuauag

SEQ ID NO: 1255041 - RNA, 19 nt, Homo sapiens
  misc_RNA (1)...(19): siRNA sense strand
cagaugguggagcugaaua

SEQ ID NO: 1255042 - RNA, 19 nt, Homo sapiens
  misc_RNA (1)...(19): siRNA sense strand
gucauugcugugauuguua

SEQ ID NO: 1255043 - RNA, 19 nt, Homo sapiens
  misc_RNA (1)...(19): siRNA sense strand
ggagccaccaacauuugaa

SEQ ID NO: 1255044 - RNA, 19 nt, Homo sapiens
  misc_RNA (1)...(19): siRNA sense strand
uuggugaacgaguagauua

SEQ ID NO: 1255045 - RNA, 19 nt, Homo sapiens
  misc_RNA (1)...(19): siRNA sense strand
gcgcuuuccuggguugcuu

SEQ ID NO: 1255046 - RNA, 19 nt, Homo sapiens
  misc_RNA (1)...(19): siRNA sense strand
uacuacaaagcaacaguua

SEQ ID NO: 1255047 - RNA, 19 nt, Homo sapiens
  misc_RNA (1)...(19): siRNA sense strand
cuugaugcaguaacuuaua

SEQ ID NO: 1255048 - RNA, 19 nt, Homo sapiens
  misc_RNA (1)...(19): siRNA sense strand
aaacauguccauauauacg

SEQ ID NO: 1255049 - RNA, 19 nt, Homo sapiens
  misc_RNA (1)...(19): siRNA sense strand
guguaaaguggucaaaugu

SEQ ID NO: 1255050 - RNA, 19 nt, Homo sapiens
  misc_RNA (1)...(19): siRNA sense strand
cuuacgaguuugguuauca

SEQ ID NO: 1255051 - RNA, 19 nt, Homo sapiens
  misc_RNA (1)...(19): siRNA sense strand
uacgggauccuuuaaaugg

SEQ ID NO: 1255052 - RNA, 19 nt, Homo sapiens
  misc_RNA (1)...(19): siRNA sense strand
gcagaugguggagcugaau

SEQ ID NO: 1255053 - RNA, 19 nt, Homo sapiens
  misc_RNA (1)...(19): siRNA sense strand
aaccaaaacccuacuauga

SEQ ID NO: 1255054 - RNA, 19 nt, Homo sapiens
  misc_RNA (1)...(19): siRNA sense strand
uugaugcaguaacuuauag

SEQ ID NO: 1255055 - RNA, 19 nt, Homo sapiens
  misc_RNA (1)...(19): siRNA sense strand
ggagcugaauaugccacuu

SEQ ID NO: 1255056 - RNA, 19 nt, Homo sapiens
  misc_RNA (1)...(19): siRNA sense strand
cgauggcagcgacacaauu

SEQ ID NO: 1255057 - RNA, 19 nt, Homo sapiens
  misc_RNA (1)...(19): siRNA sense strand
gauccauuuucacuuauug

SEQ ID NO: 1255058 - RNA, 19 nt, Homo sapiens
  misc_RNA (1)...(19): siRNA sense strand
guacagcaaugauggauuu

SEQ ID NO: 1255059 - RNA, 19 nt, Homo sapiens
  misc_RNA (1)...(19): siRNA sense strand
gagaugaauuccuuugaaa

SEQ ID NO: 1255060 - RNA, 19 nt, Homo sapiens
  misc_RNA (1)...(19): siRNA sense strand
gaagaacgcaugaaacgaa

SEQ ID NO: 1255061 - RNA, 19 nt, Homo sapiens
  misc_RNA (1)...(19): siRNA sense strand
ccacagacauugagaagau

SEQ ID NO: 1255062 - RNA, 19 nt, Homo sapiens
  misc_RNA (1)...(19): siRNA sense strand
gauaaagacacgauugaaa

SEQ ID NO: 1255063 - RNA, 19 nt, Homo sapiens
  misc_RNA (1)...(19): siRNA sense strand
ugacauaacagcuuucaaa

SEQ ID NO: 1255064 - RNA, 19 nt, Homo sapiens
  misc_RNA (1)...(19): siRNA sense strand
gagauacucaggauauuaa

SEQ ID NO: 1255065 - RNA, 19 nt, Homo sapiens
  misc_RNA (1)...(19): siRNA sense strand
caacagauaccaugagaug

SEQ ID NO: 1255066 - RNA, 19 nt, Homo sapiens
  misc_RNA (1)...(19): siRNA sense strand
guucggcgguccaaugaua

SEQ ID NO: 1255067 - RNA, 19 nt, Homo sapiens
  misc_RNA (1)...(19): siRNA sense strand
gaaacgaacaggauaaagu

SEQ ID NO: 1255068 - RNA, 19 nt, Homo sapiens
  misc_RNA (1)...(19): siRNA sense strand
cauaacagcuuucaaacag

SEQ ID NO: 1255069 - RNA, 19 nt, Homo sapiens
  misc_RNA (1)...(19): siRNA sense strand
ggaccuggaugaccuagau

SEQ ID NO: 1255070 - RNA, 19 nt, Homo sapiens
  misc_RNA (1)...(19): siRNA sense strand
caagaauucugucuacauc

SEQ ID NO: 1255071 - RNA, 19 nt, Homo sapiens
  misc_RNA (1)...(19): siRNA sense strand
gaaauucugauguacaaga

SEQ ID NO: 1255072 - RNA, 19 nt, Homo sapiens
  misc_RNA (1)...(19): siRNA sense strand
ggacuggccuauuguguac

SEQ ID NO: 1255073 - RNA, 19 nt, Homo sapiens
  misc_RNA (1)...(19): siRNA sense strand
ggaaccugauucugacgua

SEQ ID NO: 1255074 - RNA, 19 nt, Homo sapiens
  misc_RNA (1)...(19): siRNA sense strand
ugagaugaauuccuuugaa

SEQ ID NO: 1255075 - RNA, 19 nt, Homo sapiens
  misc_RNA (1)...(19): siRNA sense strand
gcaugaaacgaaagaauga

SEQ ID NO: 1255076 - RNA, 19 nt, Homo sapiens
  misc_RNA (1)...(19): siRNA sense strand
ugaccaauauugagaaaca

SEQ ID NO: 1255077 - RNA, 19 nt, Homo sapiens
  misc_RNA (1)...(19): siRNA sense strand
ccucaggaguuguuugaaa

SEQ ID NO: 1255078 - RNA, 19 nt, Homo sapiens
  misc_RNA (1)...(19): siRNA sense strand
gggaaugugacgacuauuu

SEQ ID NO: 1255079 - RNA, 19 nt, Homo sapiens
  misc_RNA (1)...(19): siRNA sense strand
uggcagaggucaagcauuc

SEQ ID NO: 1255080 - RNA, 19 nt, Homo sapiens
  misc_RNA (1)...(19): siRNA sense strand
ucagugacauaacagcuuu

SEQ ID NO: 1255081 - RNA, 19 nt, Homo sapiens
  misc_RNA (1)...(19): siRNA sense strand
gggaugcccugcagaaagu

SEQ ID NO: 1255082 - RNA, 19 nt, Homo sapiens
  misc_RNA (1)...(19): siRNA sense strand
ccagaggcauugacacaga

SEQ ID NO: 1255083 - RNA, 19 nt, Homo sapiens
  misc_RNA (1)...(19): siRNA sense strand
gaaguuugcucggcugaca

SEQ ID NO: 1255084 - RNA, 19 nt, Homo sapiens
  misc_RNA (1)...(19): siRNA sense strand
cugaagacgugguuuguga

SEQ ID NO: 1255085 - RNA, 19 nt, Homo sapiens
  misc_RNA (1)...(19): siRNA sense strand
gguccaaugauacuaauuu

SEQ ID NO: 1255086 - RNA, 19 nt, Homo sapiens
  misc_RNA (1)...(19): siRNA sense strand
caacagauguaugccaaca

SEQ ID NO: 1255087 - RNA, 19 nt, Homo sapiens
  misc_RNA (1)...(19): siRNA sense strand
agacgugguuugugauuga

SEQ ID NO: 1255088 - RNA, 19 nt, Homo sapiens
  misc_RNA (1)...(19): siRNA sense strand
gcgagaauguccacaagca

SEQ ID NO: 1255089 - RNA, 19 nt, Homo sapiens
  misc_RNA (1)...(19): siRNA sense strand
cagagaagguccugcagau

SEQ ID NO: 1255090 - RNA, 19 nt, Homo sapiens
  misc_RNA (1)...(19): siRNA sense strand
gaagacgugguuugugauu

SEQ ID NO: 1255091 - RNA, 19 nt, Homo sapiens
  misc_RNA (1)...(19): siRNA sense strand
gaacgcaugaaacgaaaga

SEQ ID NO: 1255092 - RNA, 19 nt, Homo sapiens
  misc_RNA (1)...(19): siRNA sense strand
gaucuugaccuucuauaca

SEQ ID NO: 1255093 - RNA, 19 nt, Homo sapiens
  misc_RNA (1)...(19): siRNA sense strand
gaagaggaagaacgcauga

SEQ ID NO: 1255094 - RNA, 19 nt, Homo sapiens
  misc_RNA (1)...(19): siRNA sense strand
ccuuugaaauucugaugua

SEQ ID NO: 1255095 - RNA, 19 nt, Homo sapiens
  misc_RNA (1)...(19): siRNA sense strand
gggcagaagugaugcaaaa

SEQ ID NO: 1255096 - RNA, 19 nt, Homo sapiens
  misc_RNA (1)...(19): siRNA sense strand
ggaguuguuugaaauaucg

SEQ ID NO: 1255097 - RNA, 19 nt, Homo sapiens
  misc_RNA (1)...(19): siRNA sense strand
gcaagaauucugucuacau

SEQ ID NO: 1255098 - RNA, 19 nt, Homo sapiens
  misc_RNA (1)...(19): siRNA sense strand
cccguaagcuggaccacua

SEQ ID NO: 1255099 - RNA, 19 nt, Homo sapiens
  misc_RNA (1)...(19): siRNA sense strand
ccaucuuggucccuuauaa

SEQ ID NO: 1255100 - RNA, 19 nt, Homo sapiens
  misc_RNA (1)...(19): siRNA sense strand
cgaacaggauaaagugguu

SEQ ID NO: 1255101 - RNA, 19 nt, Homo sapiens
  misc_RNA (1)...(19): siRNA sense strand
ggagcugacugauaaagac

SEQ ID NO: 1255102 - RNA, 19 nt, Homo sapiens
  misc_RNA (1)...(19): siRNA sense strand
cagcaagaauucugucuac

SEQ ID NO: 1255103 - RNA, 19 nt, Homo sapiens
  misc_RNA (1)...(19): siRNA sense strand
gaagguggucccagcaaga

SEQ ID NO: 1255104 - RNA, 19 nt, Homo sapiens
  misc_RNA (1)...(19): siRNA sense strand
ccacuacauugaauaugga

SEQ ID NO: 1255105 - RNA, 19 nt, Homo sapiens
  misc_RNA (1)...(19): siRNA sense strand
ggaccacuacauugaauau

SEQ ID NO: 1255106 - RNA, 19 nt, Homo sapiens
  misc_RNA (1)...(19): siRNA sense strand
acuaugagaugaauuccuu

SEQ ID NO: 1255107 - RNA, 19 nt, Homo sapiens
  misc_RNA (1)...(19): siRNA sense strand
gcagaaagugcuggaauuc

SEQ ID NO: 1255108 - RNA, 19 nt, Homo sapiens
  misc_RNA (1)...(19): siRNA sense strand
gagaagguccugcagaucu

SEQ ID NO: 1255109 - RNA, 19 nt, Homo sapiens
  misc_RNA (1)...(19): siRNA sense strand
ggagacguguuuggagaug

SEQ ID NO: 1255110 - RNA, 19 nt, Homo sapiens
  misc_RNA (1)...(19): siRNA sense strand
cagaagauccucucagucu

SEQ ID NO: 1255111 - RNA, 19 nt, Homo sapiens
  misc_RNA (1)...(19): siRNA sense strand
guucagcucucuaaaaguu

SEQ ID NO: 1255112 - RNA, 19 nt, Homo sapiens
  misc_RNA (1)...(19): siRNA sense strand
aaaccaggcagaauaaugu

SEQ ID NO: 1255113 - RNA, 19 nt, Homo sapiens
  misc_RNA (1)...(19): siRNA sense strand
ccaagacaauccgcaacaa

SEQ ID NO: 1255114 - RNA, 19 nt, Homo sapiens
  misc_RNA (1)...(19): siRNA sense strand
gcaagaggcaccaaagacu

SEQ ID NO: 1255115 - RNA, 19 nt, Homo sapiens
  misc_RNA (1)...(19): siRNA sense strand
ggacaucaaggccuuaaac

SEQ ID NO: 1255116 - RNA, 19 nt, Homo sapiens
  misc_RNA (1)...(19): siRNA sense strand
gacaguggcaucaccaaga

SEQ ID NO: 1255117 - RNA, 19 nt, Homo sapiens
  misc_RNA (1)...(19): siRNA sense strand
ggaagagugaggacuggaa

SEQ ID NO: 1255118 - RNA, 19 nt, Homo sapiens
  misc_RNA (1)...(19): siRNA sense strand
ugaccagccucaccagugu

SEQ ID NO: 1255119 - RNA, 19 nt, Homo sapiens
  misc_RNA (1)...(19): siRNA sense strand
ccucacaucaucuuacauu

SEQ ID NO: 1255120 - RNA, 19 nt, Homo sapiens
  misc_RNA (1)...(19): siRNA sense strand
ugagaacuaugagaugaau

SEQ ID NO: 1255121 - RNA, 19 nt, Homo sapiens
  misc_RNA (1)...(19): siRNA sense strand
ugcagaaagugcuggaauu

SEQ ID NO: 1255122 - RNA, 19 nt, Homo sapiens
  misc_RNA (1)...(19): siRNA sense strand
guugacagccucugcuuug

SEQ ID NO: 1255123 - RNA, 19 nt, Homo sapiens
  misc_RNA (1)...(19): siRNA sense strand
ggauugagugagcgaguaa

SEQ ID NO: 1255124 - RNA, 19 nt, Homo sapiens
  misc_RNA (1)...(19): siRNA sense strand
cgcaugaacuaccugaaga

SEQ ID NO: 1255125 - RNA, 19 nt, Homo sapiens
  misc_RNA (1)...(19): siRNA sense strand
aaacuuauccgcaugaacu

SEQ ID NO: 1255126 - RNA, 19 nt, Homo sapiens
  misc_RNA (1)...(19): siRNA sense strand
aaacgaacaggauaaagug

SEQ ID NO: 1255127 - RNA, 19 nt, Homo sapiens
  misc_RNA (1)...(19): siRNA sense strand
gaacaggauaaagugguuu

SEQ ID NO: 1255128 - RNA, 19 nt, Homo sapiens
  misc_RNA (1)...(19): siRNA sense strand
cuuauaaugucuccuucaa

SEQ ID NO: 1255129 - RNA, 19 nt, Homo sapiens
  misc_RNA (1)...(19): siRNA sense strand
uaagcuggaccacuacauu

SEQ ID NO: 1255130 - RNA, 19 nt, Homo sapiens
  misc_RNA (1)...(19): siRNA sense strand
caggaguuguuugaaauau

SEQ ID NO: 1255131 - RNA, 19 nt, Homo sapiens
  misc_RNA (1)...(19): siRNA sense strand
aagaacgcaugaaacgaaa

SEQ ID NO: 1255132 - RNA, 19 nt, Homo sapiens
  misc_RNA (1)...(19): siRNA sense strand
ggacaugagagccgacauc

SEQ ID NO: 1255133 - RNA, 19 nt, Homo sapiens
  misc_RNA (1)...(19): siRNA sense strand
ggaaugugacgacuauuuu

SEQ ID NO: 1255134 - RNA, 19 nt, Homo sapiens
  misc_RNA (1)...(19): siRNA sense strand
ucaggaguuguuugaaaua

SEQ ID NO: 1255135 - RNA, 19 nt, Homo sapiens
  misc_RNA (1)...(19): siRNA sense strand
ggucaagcauucguucuac

SEQ ID NO: 1255136 - RNA, 19 nt, Homo sapiens
  misc_RNA (1)...(19): siRNA sense strand
uggccuggcugguuguuga

SEQ ID NO: 1255137 - RNA, 19 nt, Homo sapiens
  misc_RNA (1)...(19): siRNA sense strand
agaggaagaacgcaugaaa

SEQ ID NO: 1255138 - RNA, 19 nt, Homo sapiens
  misc_RNA (1)...(19): siRNA sense strand
gaaagugcuggaauucuac

SEQ ID NO: 1255139 - RNA, 19 nt, Homo sapiens
  misc_RNA (1)...(19): siRNA sense strand
gagauguguucuggaagga

SEQ ID NO: 1255140 - RNA, 19 nt, Homo sapiens
  misc_RNA (1)...(19): siRNA sense strand
ucgggaaugugacgacuau

SEQ ID NO: 1255141 - RNA, 19 nt, Homo sapiens
  misc_RNA (1)...(19): siRNA sense strand
ccugugugguucuuuguga

SEQ ID NO: 1255142 - RNA, 19 nt, Homo sapiens
  misc_RNA (1)...(19): siRNA sense strand
ugacguacaacuugaggaa

SEQ ID NO: 1255143 - RNA, 19 nt, Homo sapiens
  misc_RNA (1)...(19): siRNA sense strand
gggacuaugagaucuuuga

SEQ ID NO: 1255144 - RNA, 19 nt, Homo sapiens
  misc_RNA (1)...(19): siRNA sense strand
uuucauaccaccuuuguug

SEQ ID NO: 1255145 - RNA, 19 nt, Homo sapiens
  misc_RNA (1)...(19): siRNA sense strand
ugaccuagauguggagaag

SEQ ID NO: 1255146 - RNA, 19 nt, Homo sapiens
  misc_RNA (1)...(19): siRNA sense strand
gaaacgugaagaggaagaa

SEQ ID NO: 1255147 - RNA, 19 nt, Homo sapiens
  misc_RNA (1)...(19): siRNA sense strand
gaccuacugugaucugcau

SEQ ID NO: 1255148 - RNA, 19 nt, Homo sapiens
  misc_RNA (1)...(19): siRNA sense strand
ccaguccugugccaauguu

SEQ ID NO: 1255149 - RNA, 19 nt, Homo sapiens
  misc_RNA (1)...(19): siRNA sense strand
uuggagauguguucuggaa

SEQ ID NO: 1255150 - RNA, 19 nt, Homo sapiens
  misc_RNA (1)...(19): siRNA sense strand
uuugagaacuaugagauga

SEQ ID NO: 1255151 - RNA, 19 nt, Homo sapiens
  misc_RNA (1)...(19): siRNA sense strand
caugaugauuggcucacuu

SEQ ID NO: 1255152 - RNA, 19 nt, Homo sapiens
  misc_RNA (1)...(19): siRNA sense strand
caggggaggugauuucuga

SEQ ID NO: 1255153 - RNA, 19 nt, Homo sapiens
  misc_RNA (1)...(19): siRNA sense strand
ggaagaacgcaugaaacga

SEQ ID NO: 1255154 - RNA, 19 nt, Homo sapiens
  misc_RNA (1)...(19): siRNA sense strand
gauuggcucacuucucuau

SEQ ID NO: 1255155 - RNA, 19 nt, Homo sapiens
  misc_RNA (1)...(19): siRNA sense strand
gguggucccagcaagaauu

SEQ ID NO: 1255156 - RNA, 19 nt, Homo sapiens
  misc_RNA (1)...(19): siRNA sense strand
ggugguggccauucuagga

SEQ ID NO: 1255157 - RNA, 19 nt, Homo sapiens
  misc_RNA (1)...(19): siRNA sense strand
gaggugauccaagaugaug

SEQ ID NO: 1255158 - RNA, 19 nt, Homo sapiens
  misc_RNA (1)...(19): siRNA sense strand
guacagcaaugauggauuu

SEQ ID NO: 1255159 - RNA, 19 nt, Homo sapiens
  misc_RNA (1)...(19): siRNA sense strand
gagaugaauuccuuugaaa

SEQ ID NO: 1255160 - RNA, 19 nt, Homo sapiens
  misc_RNA (1)...(19): siRNA sense strand
gaagaacgcaugaaacgaa

SEQ ID NO: 1255161 - RNA, 19 nt, Homo sapiens
  misc_RNA (1)...(19): siRNA sense strand
ccacagacauugagaagau

SEQ ID NO: 1255162 - RNA, 19 nt, Homo sapiens
  misc_RNA (1)...(19): siRNA sense strand
gauaaagacacgauugaaa

SEQ ID NO: 1255163 - RNA, 19 nt, Homo sapiens
  misc_RNA (1)...(19): siRNA sense strand
ugacauaacagcuuucaaa

SEQ ID NO: 1255164 - RNA, 19 nt, Homo sapiens
  misc_RNA (1)...(19): siRNA sense strand
gagauacucaggauauuaa

SEQ ID NO: 1255165 - RNA, 19 nt, Homo sapiens
  misc_RNA (1)...(19): siRNA sense strand
caacagauaccaugagaug

SEQ ID NO: 1255166 - RNA, 19 nt, Homo sapiens
  misc_RNA (1)...(19): siRNA sense strand
guucggcgguccaaugaua

SEQ ID NO: 1255167 - RNA, 19 nt, Homo sapiens
  misc_RNA (1)...(19): siRNA sense strand
gaaacgaacaggauaaagu

SEQ ID NO: 1255168 - RNA, 19 nt, Homo sapiens
  misc_RNA (1)...(19): siRNA sense strand
cauaacagcuuucaaacag

SEQ ID NO: 1255169 - RNA, 19 nt, Homo sapiens
  misc_RNA (1)...(19): siRNA sense strand
ggaccuggaugaccuagau

SEQ ID NO: 1255170 - RNA, 19 nt, Homo sapiens
  misc_RNA (1)...(19): siRNA sense strand
caagaauucugucuacauc

SEQ ID NO: 1255171 - RNA, 19 nt, Homo sapiens
  misc_RNA (1)...(19): siRNA sense strand
gaaauucugauguacaaga

SEQ ID NO: 1255172 - RNA, 19 nt, Homo sapiens
  misc_RNA (1)...(19): siRNA sense strand
ggacuggccuauuguguac

SEQ ID NO: 1255173 - RNA, 19 nt, Homo sapiens
  misc_RNA (1)...(19): siRNA sense strand
ggaaccugauucugacgua

SEQ ID NO: 1255174 - RNA, 19 nt, Homo sapiens
  misc_RNA (1)...(19): siRNA sense strand
ugagaugaauuccuuugaa

SEQ ID NO: 1255175 - RNA, 19 nt, Homo sapiens
  misc_RNA (1)...(19): siRNA sense strand
gcaugaaacgaaagaauga

SEQ ID NO: 1255176 - RNA, 19 nt, Homo sapiens
  misc_RNA (1)...(19): siRNA sense strand
ugaccaauauugagaaaca

SEQ ID NO: 1255177 - RNA, 19 nt, Homo sapiens
  misc_RNA (1)...(19): siRNA sense strand
ccucaggaguuguuugaaa

SEQ ID NO: 1255178 - RNA, 19 nt, Homo sapiens
  misc_RNA (1)...(19): siRNA sense strand
gggaaugugacgacuauuu

SEQ ID NO: 1255179 - RNA, 19 nt, Homo sapiens
  misc_RNA (1)...(19): siRNA sense strand
uggcagaggucaagcauuc

SEQ ID NO: 1255180 - RNA, 19 nt, Homo sapiens
  misc_RNA (1)...(19): siRNA sense strand
ucagugacauaacagcuuu

SEQ ID NO: 1255181 - RNA, 19 nt, Homo sapiens
  misc_RNA (1)...(19): siRNA sense strand
gggaugcccugcagaaagu

SEQ ID NO: 1255182 - RNA, 19 nt, Homo sapiens
  misc_RNA (1)...(19): siRNA sense strand
ccagaggcauugacacaga

SEQ ID NO: 1255183 - RNA, 19 nt, Homo sapiens
  misc_RNA (1)...(19): siRNA sense strand
gaaguuugcucggcugaca

SEQ ID NO: 1255184 - RNA, 19 nt, Homo sapiens
  misc_RNA (1)...(19): siRNA sense strand
cugaagacgugguuuguga

SEQ ID NO: 1255185 - RNA, 19 nt, Homo sapiens
  misc_RNA (1)...(19): siRNA sense strand
gguccaaugauacuaauuu

SEQ ID NO: 1255186 - RNA, 19 nt, Homo sapiens
  misc_RNA (1)...(19): siRNA sense strand
caacagauguaugccaaca

SEQ ID NO: 1255187 - RNA, 19 nt, Homo sapiens
  misc_RNA (1)...(19): siRNA sense strand
agacgugguuugugauuga

SEQ ID NO: 1255188 - RNA, 19 nt, Homo sapiens
  misc_RNA (1)...(19): siRNA sense strand
gcgagaauguccacaagca

SEQ ID NO: 1255189 - RNA, 19 nt, Homo sapiens
  misc_RNA (1)...(19): siRNA sense strand
cagagaagguccugcagau

SEQ ID NO: 1255190 - RNA, 19 nt, Homo sapiens
  misc_RNA (1)...(19): siRNA sense strand
gaagacgugguuugugauu

SEQ ID NO: 1255191 - RNA, 19 nt, Homo sapiens
  misc_RNA (1)...(19): siRNA sense strand
gaacgcaugaaacgaaaga

SEQ ID NO: 1255192 - RNA, 19 nt, Homo sapiens
  misc_RNA (1)...(19): siRNA sense strand
gaucuugaccuucuauaca

SEQ ID NO: 1255193 - RNA, 19 nt, Homo sapiens
  misc_RNA (1)...(19): siRNA sense strand
gaagaggaagaacgcauga

SEQ ID NO: 1255194 - RNA, 19 nt, Homo sapiens
  misc_RNA (1)...(19): siRNA sense strand
ccuuugaaauucugaugua

SEQ ID NO: 1255195 - RNA, 19 nt, Homo sapiens
  misc_RNA (1)...(19): siRNA sense strand
gggcagaagugaugcaaaa

SEQ ID NO: 1255196 - RNA, 19 nt, Homo sapiens
  misc_RNA (1)...(19): siRNA sense strand
ggaguuguuugaaauaucg

SEQ ID NO: 1255197 - RNA, 19 nt, Homo sapiens
  misc_RNA (1)...(19): siRNA sense strand
gcaagaauucugucuacau

SEQ ID NO: 1255198 - RNA, 19 nt, Homo sapiens
  misc_RNA (1)...(19): siRNA sense strand
cccguaagcuggaccacua

SEQ ID NO: 1255199 - RNA, 19 nt, Homo sapiens
  misc_RNA (1)...(19): siRNA sense strand
ccaucuuggucccuuauaa

SEQ ID NO: 1255200 - RNA, 19 nt, Homo sapiens
  misc_RNA (1)...(19): siRNA sense strand
cgaacaggauaaagugguu

SEQ ID NO: 1255201 - RNA, 19 nt, Homo sapiens
  misc_RNA (1)...(19): siRNA sense strand
ggagcugacugauaaagac

SEQ ID NO: 1255202 - RNA, 19 nt, Homo sapiens
  misc_RNA (1)...(19): siRNA sense strand
cagcaagaauucugucuac

SEQ ID NO: 1255203 - RNA, 19 nt, Homo sapiens
  misc_RNA (1)...(19): siRNA sense strand
gaagguggucccagcaaga

SEQ ID NO: 1255204 - RNA, 19 nt, Homo sapiens
  misc_RNA (1)...(19): siRNA sense strand
ccacuacauugaauaugga

SEQ ID NO: 1255205 - RNA, 19 nt, Homo sapiens
  misc_RNA (1)...(19): siRNA sense strand
ggaccacuacauugaauau

SEQ ID NO: 1255206 - RNA, 19 nt, Homo sapiens
  misc_RNA (1)...(19): siRNA sense strand
acuaugagaugaauuccuu

SEQ ID NO: 1255207 - RNA, 19 nt, Homo sapiens
  misc_RNA (1)...(19): siRNA sense strand
gcagaaagugcuggaauuc

SEQ ID NO: 1255208 - RNA, 19 nt, Homo sapiens
  misc_RNA (1)...(19): siRNA sense strand
gagaagguccugcagaucu

SEQ ID NO: 1255209 - RNA, 19 nt, Homo sapiens
  misc_RNA (1)...(19): siRNA sense strand
ggagacguguuuggagaug

SEQ ID NO: 1255210 - RNA, 19 nt, Homo sapiens
  misc_RNA (1)...(19): siRNA sense strand
cagaagauccucucagucu

SEQ ID NO: 1255211 - RNA, 19 nt, Homo sapiens
  misc_RNA (1)...(19): siRNA sense strand
guucagcucucuaaaaguu

SEQ ID NO: 1255212 - RNA, 19 nt, Homo sapiens
  misc_RNA (1)...(19): siRNA sense strand
aaaccaggcagaauaaugu

SEQ ID NO: 1255213 - RNA, 19 nt, Homo sapiens
  misc_RNA (1)...(19): siRNA sense strand
ccaagacaauccgcaacaa

SEQ ID NO: 1255214 - RNA, 19 nt, Homo sapiens
  misc_RNA (1)...(19): siRNA sense strand
gcaagaggcaccaaagacu

SEQ ID NO: 1255215 - RNA, 19 nt, Homo sapiens
  misc_RNA (1)...(19): siRNA sense strand
ggacaucaaggccuuaaac

SEQ ID NO: 1255216 - RNA, 19 nt, Homo sapiens
  misc_RNA (1)...(19): siRNA sense strand
gacaguggcaucaccaaga

SEQ ID NO: 1255217 - RNA, 19 nt, Homo sapiens
  misc_RNA (1)...(19): siRNA sense strand
ggaagagugaggacuggaa

SEQ ID NO: 1255218 - RNA, 19 nt, Homo sapiens
  misc_RNA (1)...(19): siRNA sense strand
ugaccagccucaccagugu

SEQ ID NO: 1255219 - RNA, 19 nt, Homo sapiens
  misc_RNA (1)...(19): siRNA sense strand
ccucacaucaucuuacauu

SEQ ID NO: 1255220 - RNA, 19 nt, Homo sapiens
  misc_RNA (1)...(19): siRNA sense strand
ugagaacuaugagaugaau

SEQ ID NO: 1255221 - RNA, 19 nt, Homo sapiens
  misc_RNA (1)...(19): siRNA sense strand
ugcagaaagugcuggaauu

SEQ ID NO: 1255222 - RNA, 19 nt, Homo sapiens
  misc_RNA (1)...(19): siRNA sense strand
guugacagccucugcuuug

SEQ ID NO: 1255223 - RNA, 19 nt, Homo sapiens
  misc_RNA (1)...(19): siRNA sense strand
ggauugagugagcgaguaa

SEQ ID NO: 1255224 - RNA, 19 nt, Homo sapiens
  misc_RNA (1)...(19): siRNA sense strand
cgcaugaacuaccugaaga

SEQ ID NO: 1255225 - RNA, 19 nt, Homo sapiens
  misc_RNA (1)...(19): siRNA sense strand
aaacuuauccgcaugaacu

SEQ ID NO: 1255226 - RNA, 19 nt, Homo sapiens
  misc_RNA (1)...(19): siRNA sense strand
aaacgaacaggauaaagug

SEQ ID NO: 1255227 - RNA, 19 nt, Homo sapiens
  misc_RNA (1)...(19): siRNA sense strand
gaacaggauaaagugguuu

SEQ ID NO: 1255228 - RNA, 19 nt, Homo sapiens
  misc_RNA (1)...(19): siRNA sense strand
cuuauaaugucuccuucaa

SEQ ID NO: 1255229 - RNA, 19 nt, Homo sapiens
  misc_RNA (1)...(19): siRNA sense strand
uaagcuggaccacuacauu

SEQ ID NO: 1255230 - RNA, 19 nt, Homo sapiens
  misc_RNA (1)...(19): siRNA sense strand
caggaguuguuugaaauau

SEQ ID NO: 1255231 - RNA, 19 nt, Homo sapiens
  misc_RNA (1)...(19): siRNA sense strand
aagaacgcaugaaacgaaa

SEQ ID NO: 1255232 - RNA, 19 nt, Homo sapiens
  misc_RNA (1)...(19): siRNA sense strand
ggacaugagagccgacauc

SEQ ID NO: 1255233 - RNA, 19 nt, Homo sapiens
  misc_RNA (1)...(19): siRNA sense strand
ggaaugugacgacuauuuu

SEQ ID NO: 1255234 - RNA, 19 nt, Homo sapiens
  misc_RNA (1)...(19): siRNA sense strand
ucaggaguuguuugaaaua

SEQ ID NO: 1255235 - RNA, 19 nt, Homo sapiens
  misc_RNA (1)...(19): siRNA sense strand
ggucaagcauucguucuac

SEQ ID NO: 1255236 - RNA, 19 nt, Homo sapiens
  misc_RNA (1)...(19): siRNA sense strand
uggccuggcugguuguuga

SEQ ID NO: 1255237 - RNA, 19 nt, Homo sapiens
  misc_RNA (1)...(19): siRNA sense strand
agaggaagaacgcaugaaa

SEQ ID NO: 1255238 - RNA, 19 nt, Homo sapiens
  misc_RNA (1)...(19): siRNA sense strand
gaaagugcuggaauucuac

SEQ ID NO: 1255239 - RNA, 19 nt, Homo sapiens
  misc_RNA (1)...(19): siRNA sense strand
gagauguguucuggaagga

SEQ ID NO: 1255240 - RNA, 19 nt, Homo sapiens
  misc_RNA (1)...(19): siRNA sense strand
ucgggaaugugacgacuau

SEQ ID NO: 1255241 - RNA, 19 nt, Homo sapiens
  misc_RNA (1)...(19): siRNA sense strand
ccugugugguucuuuguga

SEQ ID NO: 1255242 - RNA, 19 nt, Homo sapiens
  misc_RNA (1)...(19): siRNA sense strand
ugacguacaacuugaggaa

SEQ ID NO: 1255243 - RNA, 19 nt, Homo sapiens
  misc_RNA (1)...(19): siRNA sense strand
gggacuaugagaucuuuga

SEQ ID NO: 1255244 - RNA, 19 nt, Homo sapiens
  misc_RNA (1)...(19): siRNA sense strand
uuucauaccaccuuuguug

SEQ ID NO: 1255245 - RNA, 19 nt, Homo sapiens
  misc_RNA (1)...(19): siRNA sense strand
ugaccuagauguggagaag

SEQ ID NO: 1255246 - RNA, 19 nt, Homo sapiens
  misc_RNA (1)...(19): siRNA sense strand
gaaacgugaagaggaagaa

SEQ ID NO: 1255247 - RNA, 19 nt, Homo sapiens
  misc_RNA (1)...(19): siRNA sense strand
gaccuacugugaucugcau

SEQ ID NO: 1255248 - RNA, 19 nt, Homo sapiens
  misc_RNA (1)...(19): siRNA sense strand
ccaguccugugccaauguu

SEQ ID NO: 1255249 - RNA, 19 nt, Homo sapiens
  misc_RNA (1)...(19): siRNA sense strand
uuggagauguguucuggaa

SEQ ID NO: 1255250 - RNA, 19 nt, Homo sapiens
  misc_RNA (1)...(19): siRNA sense strand
uuugagaacuaugagauga

SEQ ID NO: 1255251 - RNA, 19 nt, Homo sapiens
  misc_RNA (1)...(19): siRNA sense strand
caugaugauuggcucacuu

SEQ ID NO: 1255252 - RNA, 19 nt, Homo sapiens
  misc_RNA (1)...(19): siRNA sense strand
caggggaggugauuucuga

SEQ ID NO: 1255253 - RNA, 19 nt, Homo sapiens
  misc_RNA (1)...(19): siRNA sense strand
ggaagaacgcaugaaacga

SEQ ID NO: 1255254 - RNA, 19 nt, Homo sapiens
  misc_RNA (1)...(19): siRNA sense strand
gauuggcucacuucucuau

SEQ ID NO: 1255255 - RNA, 19 nt, Homo sapiens
  misc_RNA (1)...(19): siRNA sense strand
gguggucccagcaagaauu

SEQ ID NO: 1255256 - RNA, 19 nt, Homo sapiens
  misc_RNA (1)...(19): siRNA sense strand
ggugguggccauucuagga

SEQ ID NO: 1255257 - RNA, 19 nt, Homo sapiens
  misc_RNA (1)...(19): siRNA sense strand
gaggugauccaagaugaug

SEQ ID NO: 1255258 - RNA, 19 nt, Homo sapiens
  misc_RNA (1)...(19): siRNA sense strand
caacagauaucauucguuu

SEQ ID NO: 1255259 - RNA, 19 nt, Homo sapiens
  misc_RNA (1)...(19): siRNA sense strand
ggacagaacuaggcuaaga

SEQ ID NO: 1255260 - RNA, 19 nt, Homo sapiens
  misc_RNA (1)...(19): siRNA sense strand
gauaagcacccaacagaua

SEQ ID NO: 1255261 - RNA, 19 nt, Homo sapiens
  misc_RNA (1)...(19): siRNA sense strand
ggaagaagcacuauauuca

SEQ ID NO: 1255262 - RNA, 19 nt, Homo sapiens
  misc_RNA (1)...(19): siRNA sense strand
gcugaaauguuuacgguuu

SEQ ID NO: 1255263 - RNA, 19 nt, Homo sapiens
  misc_RNA (1)...(19): siRNA sense strand
aaacacagauggucccaaa

SEQ ID NO: 1255264 - RNA, 19 nt, Homo sapiens
  misc_RNA (1)...(19): siRNA sense strand
gguguuaucuuuauacauc

SEQ ID NO: 1255265 - RNA, 19 nt, Homo sapiens
  misc_RNA (1)...(19): siRNA sense strand
agaaaucccuucccacuau

SEQ ID NO: 1255266 - RNA, 19 nt, Homo sapiens
  misc_RNA (1)...(19): siRNA sense strand
gacagacucucaaagaaga

SEQ ID NO: 1255267 - RNA, 19 nt, Homo sapiens
  misc_RNA (1)...(19): siRNA sense strand
gaagcacuauauucaaaug

SEQ ID NO: 1255268 - RNA, 19 nt, Homo sapiens
  misc_RNA (1)...(19): siRNA sense strand
ccaaggguguuaucuuuau

SEQ ID NO: 1255269 - RNA, 19 nt, Homo sapiens
  misc_RNA (1)...(19): siRNA sense strand
gcagaagcccuggacuuua

SEQ ID NO: 1255270 - RNA, 19 nt, Homo sapiens
  misc_RNA (1)...(19): siRNA sense strand
ucaaugaugucgaggagaa

SEQ ID NO: 1255271 - RNA, 19 nt, Homo sapiens
  misc_RNA (1)...(19): siRNA sense strand
gaagaagcacuauauucaa

SEQ ID NO: 1255272 - RNA, 19 nt, Homo sapiens
  misc_RNA (1)...(19): siRNA sense strand
caaggguguuaucuuuaua

SEQ ID NO: 1255273 - RNA, 19 nt, Homo sapiens
  misc_RNA (1)...(19): siRNA sense strand
gaaagaacuucauauuacc

SEQ ID NO: 1255274 - RNA, 19 nt, Homo sapiens
  misc_RNA (1)...(19): siRNA sense strand
uguaaucgcugacguucaa

SEQ ID NO: 1255275 - RNA, 19 nt, Homo sapiens
  misc_RNA (1)...(19): siRNA sense strand
ugaaugaccggguauuuga

SEQ ID NO: 1255276 - RNA, 19 nt, Homo sapiens
  misc_RNA (1)...(19): siRNA sense strand
gaaaucccuucccacuaug

SEQ ID NO: 1255277 - RNA, 19 nt, Homo sapiens
  misc_RNA (1)...(19): siRNA sense strand
gagaaaucccuucccacua

SEQ ID NO: 1255278 - RNA, 19 nt, Homo sapiens
  misc_RNA (1)...(19): siRNA sense strand
gcacccaacagauaucauu

SEQ ID NO: 1255279 - RNA, 19 nt, Homo sapiens
  misc_RNA (1)...(19): siRNA sense strand
ggacagacucucaaagaag

SEQ ID NO: 1255280 - RNA, 19 nt, Homo sapiens
  misc_RNA (1)...(19): siRNA sense strand
acagucacaugauaagaaa

SEQ ID NO: 1255281 - RNA, 19 nt, Homo sapiens
  misc_RNA (1)...(19): siRNA sense strand
cagaagcccuggacuuuac

SEQ ID NO: 1255282 - RNA, 19 nt, Homo sapiens
  misc_RNA (1)...(19): siRNA sense strand
ucuggaugcugaaauguuu

SEQ ID NO: 1255283 - RNA, 19 nt, Homo sapiens
  misc_RNA (1)...(19): siRNA sense strand
cugaaauguuuacgguuua

SEQ ID NO: 1255284 - RNA, 19 nt, Homo sapiens
  misc_RNA (1)...(19): siRNA sense strand
ccuaaaccaucagcuauug

SEQ ID NO: 1255285 - RNA, 19 nt, Homo sapiens
  misc_RNA (1)...(19): siRNA sense strand
gaccggguauuugaagaaa

SEQ ID NO: 1255286 - RNA, 19 nt, Homo sapiens
  misc_RNA (1)...(19): siRNA sense strand
gacagucacaugauaagaa

SEQ ID NO: 1255287 - RNA, 19 nt, Homo sapiens
  misc_RNA (1)...(19): siRNA sense strand
uuccaaggguguuaucuuu

SEQ ID NO: 1255288 - RNA, 19 nt, Homo sapiens
  misc_RNA (1)...(19): siRNA sense strand
accaucagcuauugaauga

SEQ ID NO: 1255289 - RNA, 19 nt, Homo sapiens
  misc_RNA (1)...(19): siRNA sense strand
aagcaauucuccagaggaa

SEQ ID NO: 1255290 - RNA, 19 nt, Homo sapiens
  misc_RNA (1)...(19): siRNA sense strand
ccucggagccuuugucguu

SEQ ID NO: 1255291 - RNA, 19 nt, Homo sapiens
  misc_RNA (1)...(19): siRNA sense strand
cgguuuaacugguacauca

SEQ ID NO: 1255292 - RNA, 19 nt, Homo sapiens
  misc_RNA (1)...(19): siRNA sense strand
uggacagacucucaaagaa

SEQ ID NO: 1255293 - RNA, 19 nt, Homo sapiens
  misc_RNA (1)...(19): siRNA sense strand
caacuaguuacaagcaauu

SEQ ID NO: 1255294 - RNA, 19 nt, Homo sapiens
  misc_RNA (1)...(19): siRNA sense strand
cauauuaccaagccuaaga

SEQ ID NO: 1255295 - RNA, 19 nt, Homo sapiens
  misc_RNA (1)...(19): siRNA sense strand
ccggguauuugaagaaaga

SEQ ID NO: 1255296 - RNA, 19 nt, Homo sapiens
  misc_RNA (1)...(19): siRNA sense strand
ucgguccucuuccucuuua

SEQ ID NO: 1255297 - RNA, 19 nt, Homo sapiens
  misc_RNA (1)...(19): siRNA sense strand
uaaaccaucagcuauugaa

SEQ ID NO: 1255298 - RNA, 19 nt, Homo sapiens
  misc_RNA (1)...(19): siRNA sense strand
guuuacgguuuaacuggua

SEQ ID NO: 1255299 - RNA, 19 nt, Homo sapiens
  misc_RNA (1)...(19): siRNA sense strand
ucaacuaguuacaagcaau

SEQ ID NO: 1255300 - RNA, 19 nt, Homo sapiens
  misc_RNA (1)...(19): siRNA sense strand
caaauggacagacucucaa

SEQ ID NO: 1255301 - RNA, 19 nt, Homo sapiens
  misc_RNA (1)...(19): siRNA sense strand
gaaugaccggguauuugaa

SEQ ID NO: 1255302 - RNA, 19 nt, Homo sapiens
  misc_RNA (1)...(19): siRNA sense strand
ggacaccccuaaaccauca

SEQ ID NO: 1255303 - RNA, 19 nt, Homo sapiens
  misc_RNA (1)...(19): siRNA sense strand
uaacugguacaucaauuuc

SEQ ID NO: 1255304 - RNA, 19 nt, Homo sapiens
  misc_RNA (1)...(19): siRNA sense strand
gcccuggacuuuacaacca

SEQ ID NO: 1255305 - RNA, 19 nt, Homo sapiens
  misc_RNA (1)...(19): siRNA sense strand
gagcccugcuuggcaaaug

SEQ ID NO: 1255306 - RNA, 19 nt, Homo sapiens
  misc_RNA (1)...(19): siRNA sense strand
caggacagaacuaggcuaa

SEQ ID NO: 1255307 - RNA, 19 nt, Homo sapiens
  misc_RNA (1)...(19): siRNA sense strand
caggugugcuggcauugga

SEQ ID NO: 1255308 - RNA, 19 nt, Homo sapiens
  misc_RNA (1)...(19): siRNA sense strand
gacagaacuaggcuaagaa

SEQ ID NO: 1255309 - RNA, 19 nt, Homo sapiens
  misc_RNA (1)...(19): siRNA sense strand
acaaauggacagacucuca

SEQ ID NO: 1255310 - RNA, 19 nt, Homo sapiens
  misc_RNA (1)...(19): siRNA sense strand
cccuggcgaucuucugaua

SEQ ID NO: 1255311 - RNA, 19 nt, Homo sapiens
  misc_RNA (1)...(19): siRNA sense strand
gcaauucuccagaggaaaa

SEQ ID NO: 1255312 - RNA, 19 nt, Homo sapiens
  misc_RNA (1)...(19): siRNA sense strand
gguauuugaagaaagaaga

SEQ ID NO: 1255313 - RNA, 19 nt, Homo sapiens
  misc_RNA (1)...(19): siRNA sense strand
agccgacagucacaugaua

SEQ ID NO: 1255314 - RNA, 19 nt, Homo sapiens
  misc_RNA (1)...(19): siRNA sense strand
gcugacguucaacuaguua

SEQ ID NO: 1255315 - RNA, 19 nt, Homo sapiens
  misc_RNA (1)...(19): siRNA sense strand
uggaagaagcacuauauuc

SEQ ID NO: 1255316 - RNA, 19 nt, Homo sapiens
  misc_RNA (1)...(19): siRNA sense strand
cagcagaagcccuggacuu

SEQ ID NO: 1255317 - RNA, 19 nt, Homo sapiens
  misc_RNA (1)...(19): siRNA sense strand
gagacuguccagcaaggaa

SEQ ID NO: 1255318 - RNA, 19 nt, Homo sapiens
  misc_RNA (1)...(19): siRNA sense strand
gaacuaggcuaagaaaagc

SEQ ID NO: 1255319 - RNA, 19 nt, Homo sapiens
  misc_RNA (1)...(19): siRNA sense strand
cugauaagcacccaacaga

SEQ ID NO: 1255320 - RNA, 19 nt, Homo sapiens
  misc_RNA (1)...(19): siRNA sense strand
ucuggaagaagcacuauau

SEQ ID NO: 1255321 - RNA, 19 nt, Homo sapiens
  misc_RNA (1)...(19): siRNA sense strand
acagaacuaggcuaagaaa

SEQ ID NO: 1255322 - RNA, 19 nt, Homo sapiens
  misc_RNA (1)...(19): siRNA sense strand
ggacuuuacaaccaagcuu

SEQ ID NO: 1255323 - RNA, 19 nt, Homo sapiens
  misc_RNA (1)...(19): siRNA sense strand
gccgacagucacaugauaa

SEQ ID NO: 1255324 - RNA, 19 nt, Homo sapiens
  misc_RNA (1)...(19): siRNA sense strand
ucaaauggugaaagaacuu

SEQ ID NO: 1255325 - RNA, 19 nt, Homo sapiens
  misc_RNA (1)...(19): siRNA sense strand
ggaucuggaagaagcacua

SEQ ID NO: 1255326 - RNA, 19 nt, Homo sapiens
  misc_RNA (1)...(19): siRNA sense strand
agaaagaagagcccugcuu

SEQ ID NO: 1255327 - RNA, 19 nt, Homo sapiens
  misc_RNA (1)...(19): siRNA sense strand
uccaaggguguuaucuuua

SEQ ID NO: 1255328 - RNA, 19 nt, Homo sapiens
  misc_RNA (1)...(19): siRNA sense strand
ucgcugacguucaacuagu

SEQ ID NO: 1255329 - RNA, 19 nt, Homo sapiens
  misc_RNA (1)...(19): siRNA sense strand
gcuaagaaaagcacaauca

SEQ ID NO: 1255330 - RNA, 19 nt, Homo sapiens
  misc_RNA (1)...(19): siRNA sense strand
uacaucaauuucucuccaa

SEQ ID NO: 1255331 - RNA, 19 nt, Homo sapiens
  misc_RNA (1)...(19): siRNA sense strand
ccaaaugaccccagacuuc

SEQ ID NO: 1255332 - RNA, 19 nt, Homo sapiens
  misc_RNA (1)...(19): siRNA sense strand
auaagcacccaacagauau

SEQ ID NO: 1255333 - RNA, 19 nt, Homo sapiens
  misc_RNA (1)...(19): siRNA sense strand
agcagaagcccuggacuuu

SEQ ID NO: 1255334 - RNA, 19 nt, Homo sapiens
  misc_RNA (1)...(19): siRNA sense strand
aagaaaagcacaaucaaug

SEQ ID NO: 1255335 - RNA, 19 nt, Homo sapiens
  misc_RNA (1)...(19): siRNA sense strand
agagaaaauuccagcagaa

SEQ ID NO: 1255336 - RNA, 19 nt, Homo sapiens
  misc_RNA (1)...(19): siRNA sense strand
ugacaaauggacagacucu

SEQ ID NO: 1255337 - RNA, 19 nt, Homo sapiens
  misc_RNA (1)...(19): siRNA sense strand
guucaacuaguuacaagca

SEQ ID NO: 1255338 - RNA, 19 nt, Homo sapiens
  misc_RNA (1)...(19): siRNA sense strand
ugaccggguauuugaagaa

SEQ ID NO: 1255339 - RNA, 19 nt, Homo sapiens
  misc_RNA (1)...(19): siRNA sense strand
guccagcaaggaagaagaa

SEQ ID NO: 1255340 - RNA, 19 nt, Homo sapiens
  misc_RNA (1)...(19): siRNA sense strand
gaaaggcgaugaagaaguu

SEQ ID NO: 1255341 - RNA, 19 nt, Homo sapiens
  misc_RNA (1)...(19): siRNA sense strand
gcagaaaggcgaugaagaa

SEQ ID NO: 1255342 - RNA, 19 nt, Homo sapiens
  misc_RNA (1)...(19): siRNA sense strand
gcaacuaugugguggagaa

SEQ ID NO: 1255343 - RNA, 19 nt, Homo sapiens
  misc_RNA (1)...(19): siRNA sense strand
gcacugggcugcagaaagg

SEQ ID NO: 1255344 - RNA, 19 nt, Homo sapiens
  misc_RNA (1)...(19): siRNA sense strand
ggacggaggugcacgaagu

SEQ ID NO: 1255345 - RNA, 19 nt, Homo sapiens
  misc_RNA (1)...(19): siRNA sense strand
ggcacacgcucuuggaaua

SEQ ID NO: 1255346 - RNA, 19 nt, Homo sapiens
  misc_RNA (1)...(19): siRNA sense strand
gaggauggcuucuucuauc

SEQ ID NO: 1255347 - RNA, 19 nt, Homo sapiens
  misc_RNA (1)...(19): siRNA sense strand
ugaccaaguucacccagua

SEQ ID NO: 1255348 - RNA, 19 nt, Homo sapiens
  misc_RNA (1)...(19): siRNA sense strand
uggagaaggugcccgagaa

SEQ ID NO: 1255349 - RNA, 19 nt, Homo sapiens
  misc_RNA (1)...(19): siRNA sense strand
gauggcuucuucuaucuca

SEQ ID NO: 1255350 - RNA, 19 nt, Homo sapiens
  misc_RNA (1)...(19): siRNA sense strand
cgcaugaccuggcaaagga

SEQ ID NO: 1255351 - RNA, 19 nt, Homo sapiens
  misc_RNA (1)...(19): siRNA sense strand
aagugaagcugcgcaacua

SEQ ID NO: 1255352 - RNA, 19 nt, Homo sapiens
  misc_RNA (1)...(19): siRNA sense strand
gaagugaagcugcgcaacu

SEQ ID NO: 1255353 - RNA, 19 nt, Homo sapiens
  misc_RNA (1)...(19): siRNA sense strand
ggccaguuaucucuccaaa

SEQ ID NO: 1255354 - RNA, 19 nt, Homo sapiens
  misc_RNA (1)...(19): siRNA sense strand
ggcucaaccugaccaaguu

SEQ ID NO: 1255355 - RNA, 19 nt, Homo sapiens
  misc_RNA (1)...(19): siRNA sense strand
gcgaugaagaaguuugaaa

SEQ ID NO: 1255356 - RNA, 19 nt, Homo sapiens
  misc_RNA (1)...(19): siRNA sense strand
ccaagguguuccuaagcuu

SEQ ID NO: 1255357 - RNA, 19 nt, Homo sapiens
  misc_RNA (1)...(19): siRNA sense strand
gcacacgcucuuggaauau

SEQ ID NO: 1255358 - RNA, 19 nt, Homo sapiens
  misc_RNA (1)...(19): siRNA sense strand
guccgaggauggcuucuuc

SEQ ID NO: 1255359 - RNA, 19 nt, Homo sapiens
  misc_RNA (1)...(19): siRNA sense strand
ucaaccaggcccucaaaga

SEQ ID NO: 1255360 - RNA, 19 nt, Homo sapiens
  misc_RNA (1)...(19): siRNA sense strand
caaccaggcccucaaagac

SEQ ID NO: 1255361 - RNA, 19 nt, Homo sapiens
  misc_RNA (1)...(19): siRNA sense strand
cagccacccuccaguccaa

SEQ ID NO: 1255362 - RNA, 19 nt, Homo sapiens
  misc_RNA (1)...(19): siRNA sense strand
gcgacagacuccaguacag

SEQ ID NO: 1255363 - RNA, 19 nt, Homo sapiens
  misc_RNA (1)...(19): siRNA sense strand
ccaguuaucucuccaaaac

SEQ ID NO: 1255364 - RNA, 19 nt, Homo sapiens
  misc_RNA (1)...(19): siRNA sense strand
ccaggguggcuuuguggua

SEQ ID NO: 1255365 - RNA, 19 nt, Homo sapiens
  misc_RNA (1)...(19): siRNA sense strand
gaugaagaaguuugaaagg

SEQ ID NO: 1255366 - RNA, 19 nt, Homo sapiens
  misc_RNA (1)...(19): siRNA sense strand
gggcucaaccugaccaagu

SEQ ID NO: 1255367 - RNA, 19 nt, Homo sapiens
  misc_RNA (1)...(19): siRNA sense strand
gcgcgaggagcacauugaa

SEQ ID NO: 1255368 - RNA, 19 nt, Homo sapiens
  misc_RNA (1)...(19): siRNA sense strand
cgaggauggcuucuucuau

SEQ ID NO: 1255369 - RNA, 19 nt, Homo sapiens
  misc_RNA (1)...(19): siRNA sense strand
ucaccuaccgggaccagaa

SEQ ID NO: 1255370 - RNA, 19 nt, Homo sapiens
  misc_RNA (1)...(19): siRNA sense strand
uguccgggcuugugcuguu

SEQ ID NO: 1255371 - RNA, 19 nt, Homo sapiens
  misc_RNA (1)...(19): siRNA sense strand
ggaggugcacgaagugaag

SEQ ID NO: 1255372 - RNA, 19 nt, Homo sapiens
  misc_RNA (1)...(19): siRNA sense strand
cagaacacgggcuggauug

SEQ ID NO: 1255373 - RNA, 19 nt, Homo sapiens
  misc_RNA (1)...(19): siRNA sense strand
ggagaaggugcccgagaag

SEQ ID NO: 1255374 - RNA, 19 nt, Homo sapiens
  misc_RNA (1)...(19): siRNA sense strand
cgaugaagaaguuugaaag

SEQ ID NO: 1255375 - RNA, 19 nt, Homo sapiens
  misc_RNA (1)...(19): siRNA sense strand
gacacaaggucaccauccu

SEQ ID NO: 1255376 - RNA, 19 nt, Homo sapiens
  misc_RNA (1)...(19): siRNA sense strand
ggaaucugaaggugcugaa

SEQ ID NO: 1255377 - RNA, 19 nt, Homo sapiens
  misc_RNA (1)...(19): siRNA sense strand
ugaagcugcgcaacuaugu

SEQ ID NO: 1255378 - RNA, 19 nt, Homo sapiens
  misc_RNA (1)...(19): siRNA sense strand
ccaagaccccuucgagaaa

SEQ ID NO: 1255379 - RNA, 19 nt, Homo sapiens
  misc_RNA (1)...(19): siRNA sense strand
ucgacgacguggcggcauu

SEQ ID NO: 1255380 - RNA, 19 nt, Homo sapiens
  misc_RNA (1)...(19): siRNA sense strand
ccacucgcccgaagacauc

SEQ ID NO: 1255381 - RNA, 19 nt, Homo sapiens
  misc_RNA (1)...(19): siRNA sense strand
gaagcugcgcaacuaugug

SEQ ID NO: 1255382 - RNA, 19 nt, Homo sapiens
  misc_RNA (1)...(19): siRNA sense strand
gugaagcugcgcaacuaug

SEQ ID NO: 1255383 - RNA, 19 nt, Homo sapiens
  misc_RNA (1)...(19): siRNA sense strand
ccgaggauggcuucuucua

SEQ ID NO: 1255384 - RNA, 19 nt, Homo sapiens
  misc_RNA (1)...(19): siRNA sense strand
gaaaggcgaugaagaaguu

SEQ ID NO: 1255385 - RNA, 19 nt, Homo sapiens
  misc_RNA (1)...(19): siRNA sense strand
gcagaaaggcgaugaagaa

SEQ ID NO: 1255386 - RNA, 19 nt, Homo sapiens
  misc_RNA (1)...(19): siRNA sense strand
gcaacuaugugguggagaa

SEQ ID NO: 1255387 - RNA, 19 nt, Homo sapiens
  misc_RNA (1)...(19): siRNA sense strand
gcacugggcugcagaaagg

SEQ ID NO: 1255388 - RNA, 19 nt, Homo sapiens
  misc_RNA (1)...(19): siRNA sense strand
ggacggaggugcacgaagu

SEQ ID NO: 1255389 - RNA, 19 nt, Homo sapiens
  misc_RNA (1)...(19): siRNA sense strand
ggcacacgcucuuggaaua

SEQ ID NO: 1255390 - RNA, 19 nt, Homo sapiens
  misc_RNA (1)...(19): siRNA sense strand
gaggauggcuucuucuauc

SEQ ID NO: 1255391 - RNA, 19 nt, Homo sapiens
  misc_RNA (1)...(19): siRNA sense strand
ugaccaaguucacccagua

SEQ ID NO: 1255392 - RNA, 19 nt, Homo sapiens
  misc_RNA (1)...(19): siRNA sense strand
uggagaaggugcccgagaa

SEQ ID NO: 1255393 - RNA, 19 nt, Homo sapiens
  misc_RNA (1)...(19): siRNA sense strand
gauggcuucuucuaucuca

SEQ ID NO: 1255394 - RNA, 19 nt, Homo sapiens
  misc_RNA (1)...(19): siRNA sense strand
cgcaugaccuggcaaagga

SEQ ID NO: 1255395 - RNA, 19 nt, Homo sapiens
  misc_RNA (1)...(19): siRNA sense strand
aagugaagcugcgcaacua

SEQ ID NO: 1255396 - RNA, 19 nt, Homo sapiens
  misc_RNA (1)...(19): siRNA sense strand
gaagugaagcugcgcaacu

SEQ ID NO: 1255397 - RNA, 19 nt, Homo sapiens
  misc_RNA (1)...(19): siRNA sense strand
ggccaguuaucucuccaaa

SEQ ID NO: 1255398 - RNA, 19 nt, Homo sapiens
  misc_RNA (1)...(19): siRNA sense strand
ggcucaaccugaccaaguu

SEQ ID NO: 1255399 - RNA, 19 nt, Homo sapiens
  misc_RNA (1)...(19): siRNA sense strand
gcgaugaagaaguuugaaa

SEQ ID NO: 1255400 - RNA, 19 nt, Homo sapiens
  misc_RNA (1)...(19): siRNA sense strand
ccaagguguuccuaagcuu

SEQ ID NO: 1255401 - RNA, 19 nt, Homo sapiens
  misc_RNA (1)...(19): siRNA sense strand
gcacacgcucuuggaauau

SEQ ID NO: 1255402 - RNA, 19 nt, Homo sapiens
  misc_RNA (1)...(19): siRNA sense strand
guccgaggauggcuucuuc

SEQ ID NO: 1255403 - RNA, 19 nt, Homo sapiens
  misc_RNA (1)...(19): siRNA sense strand
ucaaccaggcccucaaaga

SEQ ID NO: 1255404 - RNA, 19 nt, Homo sapiens
  misc_RNA (1)...(19): siRNA sense strand
caaccaggcccucaaagac

SEQ ID NO: 1255405 - RNA, 19 nt, Homo sapiens
  misc_RNA (1)...(19): siRNA sense strand
cagccacccuccaguccaa

SEQ ID NO: 1255406 - RNA, 19 nt, Homo sapiens
  misc_RNA (1)...(19): siRNA sense strand
gcgacagacuccaguacag

SEQ ID NO: 1255407 - RNA, 19 nt, Homo sapiens
  misc_RNA (1)...(19): siRNA sense strand
ccaguuaucucuccaaaac

SEQ ID NO: 1255408 - RNA, 19 nt, Homo sapiens
  misc_RNA (1)...(19): siRNA sense strand
ccaggguggcuuuguggua

SEQ ID NO: 1255409 - RNA, 19 nt, Homo sapiens
  misc_RNA (1)...(19): siRNA sense strand
gaugaagaaguuugaaagg

SEQ ID NO: 1255410 - RNA, 19 nt, Homo sapiens
  misc_RNA (1)...(19): siRNA sense strand
gggcucaaccugaccaagu

SEQ ID NO: 1255411 - RNA, 19 nt, Homo sapiens
  misc_RNA (1)...(19): siRNA sense strand
gcgcgaggagcacauugaa

SEQ ID NO: 1255412 - RNA, 19 nt, Homo sapiens
  misc_RNA (1)...(19): siRNA sense strand
cgaggauggcuucuucuau

SEQ ID NO: 1255413 - RNA, 19 nt, Homo sapiens
  misc_RNA (1)...(19): siRNA sense strand
ucaccuaccgggaccagaa

SEQ ID NO: 1255414 - RNA, 19 nt, Homo sapiens
  misc_RNA (1)...(19): siRNA sense strand
uguccgggcuugugcuguu

SEQ ID NO: 1255415 - RNA, 19 nt, Homo sapiens
  misc_RNA (1)...(19): siRNA sense strand
ggaggugcacgaagugaag

SEQ ID NO: 1255416 - RNA, 19 nt, Homo sapiens
  misc_RNA (1)...(19): siRNA sense strand
cagaacacgggcuggauug

SEQ ID NO: 1255417 - RNA, 19 nt, Homo sapiens
  misc_RNA (1)...(19): siRNA sense strand
ggagaaggugcccgagaag

SEQ ID NO: 1255418 - RNA, 19 nt, Homo sapiens
  misc_RNA (1)...(19): siRNA sense strand
cgaugaagaaguuugaaag

SEQ ID NO: 1255419 - RNA, 19 nt, Homo sapiens
  misc_RNA (1)...(19): siRNA sense strand
gacacaaggucaccauccu

SEQ ID NO: 1255420 - RNA, 19 nt, Homo sapiens
  misc_RNA (1)...(19): siRNA sense strand
ggaaucugaaggugcugaa

SEQ ID NO: 1255421 - RNA, 19 nt, Homo sapiens
  misc_RNA (1)...(19): siRNA sense strand
ugaagcugcgcaacuaugu

SEQ ID NO: 1255422 - RNA, 19 nt, Homo sapiens
  misc_RNA (1)...(19): siRNA sense strand
ccaagaccccuucgagaaa

SEQ ID NO: 1255423 - RNA, 19 nt, Homo sapiens
  misc_RNA (1)...(19): siRNA sense strand
ucgacgacguggcggcauu

SEQ ID NO: 1255424 - RNA, 19 nt, Homo sapiens
  misc_RNA (1)...(19): siRNA sense strand
ccacucgcccgaagacauc

SEQ ID NO: 1255425 - RNA, 19 nt, Homo sapiens
  misc_RNA (1)...(19): siRNA sense strand
gaagcugcgcaacuaugug

SEQ ID NO: 1255426 - RNA, 19 nt, Homo sapiens
  misc_RNA (1)...(19): siRNA sense strand
gugaagcugcgcaacuaug

SEQ ID NO: 1255427 - RNA, 19 nt, Homo sapiens
  misc_RNA (1)...(19): siRNA sense strand
ccgaggauggcuucuucua

SEQ ID NO: 1255428 - RNA, 19 nt, Homo sapiens
  misc_RNA (1)...(19): siRNA sense strand
acacagaccucgccauuga

SEQ ID NO: 1255429 - RNA, 19 nt, Homo sapiens
  misc_RNA (1)...(19): siRNA sense strand
ggauggaccugacuuucaa

SEQ ID NO: 1255430 - RNA, 19 nt, Homo sapiens
  misc_RNA (1)...(19): siRNA sense strand
ccacugugcuggccaugaa

SEQ ID NO: 1255431 - RNA, 19 nt, Homo sapiens
  misc_RNA (1)...(19): siRNA sense strand
ggacgugguggacaaguuu

SEQ ID NO: 1255432 - RNA, 19 nt, Homo sapiens
  misc_RNA (1)...(19): siRNA sense strand
ggauauugaugaccacaca

SEQ ID NO: 1255433 - RNA, 19 nt, Homo sapiens
  misc_RNA (1)...(19): siRNA sense strand
caacccagcccggacaaua

SEQ ID NO: 1255434 - RNA, 19 nt, Homo sapiens
  misc_RNA (1)...(19): siRNA sense strand
ccacacagaccucgccauu

SEQ ID NO: 1255435 - RNA, 19 nt, Homo sapiens
  misc_RNA (1)...(19): siRNA sense strand
uggccaagguggauauuga

SEQ ID NO: 1255436 - RNA, 19 nt, Homo sapiens
  misc_RNA (1)...(19): siRNA sense strand
gggccgagguuagagaaga

SEQ ID NO: 1255437 - RNA, 19 nt, Homo sapiens
  misc_RNA (1)...(19): siRNA sense strand
gggacgugguggacaaguu

SEQ ID NO: 1255438 - RNA, 19 nt, Homo sapiens
  misc_RNA (1)...(19): siRNA sense strand
ccugguggccugacuguaa

SEQ ID NO: 1255439 - RNA, 19 nt, Homo sapiens
  misc_RNA (1)...(19): siRNA sense strand
caauauacaccacgaggau

SEQ ID NO: 1255440 - RNA, 19 nt, Homo sapiens
  misc_RNA (1)...(19): siRNA sense strand
ccaagguggauauugauga

SEQ ID NO: 1255441 - RNA, 19 nt, Homo sapiens
  misc_RNA (1)...(19): siRNA sense strand
ugucagcggugcccacugu

SEQ ID NO: 1255442 - RNA, 19 nt, Homo sapiens
  misc_RNA (1)...(19): siRNA sense strand
ugacaaccuuuaauaucca

SEQ ID NO: 1255443 - RNA, 19 nt, Homo sapiens
  misc_RNA (1)...(19): siRNA sense strand
caagguggauauugaugac

SEQ ID NO: 1255444 - RNA, 19 nt, Homo sapiens
  misc_RNA (1)...(19): siRNA sense strand
ucaaggaugaggaucaguu

SEQ ID NO: 1255445 - RNA, 19 nt, Homo sapiens
  misc_RNA (1)...(19): siRNA sense strand
caaggaugaggaucaguug

SEQ ID NO: 1255446 - RNA, 19 nt, Homo sapiens
  misc_RNA (1)...(19): siRNA sense strand
agaagaugguggccaagca

SEQ ID NO: 1255447 - RNA, 19 nt, Homo sapiens
  misc_RNA (1)...(19): siRNA sense strand
ggaucuccuugacaaccuu

SEQ ID NO: 1255448 - RNA, 19 nt, Homo sapiens
  misc_RNA (1)...(19): siRNA sense strand
agaccucgccauugaguau

SEQ ID NO: 1255449 - RNA, 19 nt, Homo sapiens
  misc_RNA (1)...(19): siRNA sense strand
ggccgagguuagagaagau

SEQ ID NO: 1255450 - RNA, 19 nt, Homo sapiens
  misc_RNA (1)...(19): siRNA sense strand
ccucugucaucuccaggaa

SEQ ID NO: 1255451 - RNA, 19 nt, Homo sapiens
  misc_RNA (1)...(19): siRNA sense strand
gugcuggccaugaagaaug

SEQ ID NO: 1255452 - RNA, 19 nt, Homo sapiens
  misc_RNA (1)...(19): siRNA sense strand
uugacaaccuuuaauaucc

SEQ ID NO: 1255453 - RNA, 19 nt, Homo sapiens
  misc_RNA (1)...(19): siRNA sense strand
gcacgggaagguggugaug

SEQ ID NO: 1255454 - RNA, 19 nt, Homo sapiens
  misc_RNA (1)...(19): siRNA sense strand
cuugacaaccuuuaauauc

SEQ ID NO: 1255455 - RNA, 19 nt, Homo sapiens
  misc_RNA (1)...(19): siRNA sense strand
acccagcccggacaauaua

SEQ ID NO: 1255456 - RNA, 19 nt, Homo sapiens
  misc_RNA (1)...(19): siRNA sense strand
guuccuggccucugucauc

SEQ ID NO: 1255457 - RNA, 19 nt, Homo sapiens
  misc_RNA (1)...(19): siRNA sense strand
aaacagaggugguccauaa

SEQ ID NO: 1255458 - RNA, 19 nt, Homo sapiens
  misc_RNA (1)...(19): siRNA sense strand
cuaggaaacuggaccauua

SEQ ID NO: 1255459 - RNA, 19 nt, Homo sapiens
  misc_RNA (1)...(19): siRNA sense strand
acaaauagccgaaguguuu

SEQ ID NO: 1255460 - RNA, 19 nt, Homo sapiens
  misc_RNA (1)...(19): siRNA sense strand
caugagagcugauaucugu

SEQ ID NO: 1255461 - RNA, 19 nt, Homo sapiens
  misc_RNA (1)...(19): siRNA sense strand
ggaauugacugacaagaag

SEQ ID NO: 1255462 - RNA, 19 nt, Homo sapiens
  misc_RNA (1)...(19): siRNA sense strand
cauaggauuuggaaacaua

SEQ ID NO: 1255463 - RNA, 19 nt, Homo sapiens
  misc_RNA (1)...(19): siRNA sense strand
ggacgaaauuugcccgauu

SEQ ID NO: 1255464 - RNA, 19 nt, Homo sapiens
  misc_RNA (1)...(19): siRNA sense strand
ggauuggccuguaguuuau

SEQ ID NO: 1255465 - RNA, 19 nt, Homo sapiens
  misc_RNA (1)...(19): siRNA sense strand
guggagaggucauuucuga

SEQ ID NO: 1255466 - RNA, 19 nt, Homo sapiens
  misc_RNA (1)...(19): siRNA sense strand
ccauaaacauucaagacua

SEQ ID NO: 1255467 - RNA, 19 nt, Homo sapiens
  misc_RNA (1)...(19): siRNA sense strand
gagcugacgucaugcagaa

SEQ ID NO: 1255468 - RNA, 19 nt, Homo sapiens
  misc_RNA (1)...(19): siRNA sense strand
ucaaggauauuacguuguu

SEQ ID NO: 1255469 - RNA, 19 nt, Homo sapiens
  misc_RNA (1)...(19): siRNA sense strand
gaaacuggaccauuaccua

SEQ ID NO: 1255470 - RNA, 19 nt, Homo sapiens
  misc_RNA (1)...(19): siRNA sense strand
gauauuacguuguucaaac

SEQ ID NO: 1255471 - RNA, 19 nt, Homo sapiens
  misc_RNA (1)...(19): siRNA sense strand
gaaauuugcccgauugaca

SEQ ID NO: 1255472 - RNA, 19 nt, Homo sapiens
  misc_RNA (1)...(19): siRNA sense strand
accaugagaugcugaauaa

SEQ ID NO: 1255473 - RNA, 19 nt, Homo sapiens
  misc_RNA (1)...(19): siRNA sense strand
caagaagaccauugagaaa

SEQ ID NO: 1255474 - RNA, 19 nt, Homo sapiens
  misc_RNA (1)...(19): siRNA sense strand
aaacaaagcagaacaacau

SEQ ID NO: 1255475 - RNA, 19 nt, Homo sapiens
  misc_RNA (1)...(19): siRNA sense strand
cagauauccuuccucagua

SEQ ID NO: 1255476 - RNA, 19 nt, Homo sapiens
  misc_RNA (1)...(19): siRNA sense strand
gacgaaauuugcccgauug

SEQ ID NO: 1255477 - RNA, 19 nt, Homo sapiens
  misc_RNA (1)...(19): siRNA sense strand
cagcaaggauucauuguac

SEQ ID NO: 1255478 - RNA, 19 nt, Homo sapiens
  misc_RNA (1)...(19): siRNA sense strand
gcugauaucuguguucauc

SEQ ID NO: 1255479 - RNA, 19 nt, Homo sapiens
  misc_RNA (1)...(19): siRNA sense strand
gugagcgagucauggauua

SEQ ID NO: 1255480 - RNA, 19 nt, Homo sapiens
  misc_RNA (1)...(19): siRNA sense strand
ggaaucagcagucucuuca

SEQ ID NO: 1255481 - RNA, 19 nt, Homo sapiens
  misc_RNA (1)...(19): siRNA sense strand
ugacaagccuuacaaccau

SEQ ID NO: 1255482 - RNA, 19 nt, Homo sapiens
  misc_RNA (1)...(19): siRNA sense strand
gacaagccuuacaaccaua

SEQ ID NO: 1255483 - RNA, 19 nt, Homo sapiens
  misc_RNA (1)...(19): siRNA sense strand
gaucugcugucuuguuuac

SEQ ID NO: 1255484 - RNA, 19 nt, Homo sapiens
  misc_RNA (1)...(19): siRNA sense strand
uuuguaaacucucuggaua

SEQ ID NO: 1255485 - RNA, 19 nt, Homo sapiens
  misc_RNA (1)...(19): siRNA sense strand
uggauuggccuguaguuua

SEQ ID NO: 1255486 - RNA, 19 nt, Homo sapiens
  misc_RNA (1)...(19): siRNA sense strand
gagcugauaucuguguuca

SEQ ID NO: 1255487 - RNA, 19 nt, Homo sapiens
  misc_RNA (1)...(19): siRNA sense strand
cauaaacauucaagacuag

SEQ ID NO: 1255488 - RNA, 19 nt, Homo sapiens
  misc_RNA (1)...(19): siRNA sense strand
ugauaucuguguucaucua

SEQ ID NO: 1255489 - RNA, 19 nt, Homo sapiens
  misc_RNA (1)...(19): siRNA sense strand
gguuggcucucuucuuuau

SEQ ID NO: 1255490 - RNA, 19 nt, Homo sapiens
  misc_RNA (1)...(19): siRNA sense strand
ggccuguaguuuauaguaa

SEQ ID NO: 1255491 - RNA, 19 nt, Homo sapiens
  misc_RNA (1)...(19): siRNA sense strand
acaagaagaccauugagaa

SEQ ID NO: 1255492 - RNA, 19 nt, Homo sapiens
  misc_RNA (1)...(19): siRNA sense strand
gggaauugacugacaagaa

SEQ ID NO: 1255493 - RNA, 19 nt, Homo sapiens
  misc_RNA (1)...(19): siRNA sense strand
caaaaggcauugauacaga

SEQ ID NO: 1255494 - RNA, 19 nt, Homo sapiens
  misc_RNA (1)...(19): siRNA sense strand
gagcgagucauggauuaua

SEQ ID NO: 1255495 - RNA, 19 nt, Homo sapiens
  misc_RNA (1)...(19): siRNA sense strand
caugagaugcugaauaaug

SEQ ID NO: 1255496 - RNA, 19 nt, Homo sapiens
  misc_RNA (1)...(19): siRNA sense strand
uaaacucucuggauaucau

SEQ ID NO: 1255497 - RNA, 19 nt, Homo sapiens
  misc_RNA (1)...(19): siRNA sense strand
ugaucgaucugcugucuug

SEQ ID NO: 1255498 - RNA, 19 nt, Homo sapiens
  misc_RNA (1)...(19): siRNA sense strand
ucaucgagcugacgucaug

SEQ ID NO: 1255499 - RNA, 19 nt, Homo sapiens
  misc_RNA (1)...(19): siRNA sense strand
gaugaugguuggcucucuu

SEQ ID NO: 1255500 - RNA, 19 nt, Homo sapiens
  misc_RNA (1)...(19): siRNA sense strand
uuaaugaacauccugcuuu

SEQ ID NO: 1255501 - RNA, 19 nt, Homo sapiens
  misc_RNA (1)...(19): siRNA sense strand
ugaacuaucugaaaacuug

SEQ ID NO: 1255502 - RNA, 19 nt, Homo sapiens
  misc_RNA (1)...(19): siRNA sense strand
gacaagaagaccauugaga

SEQ ID NO: 1255503 - RNA, 19 nt, Homo sapiens
  misc_RNA (1)...(19): siRNA sense strand
caaccgauaccaugagaug

SEQ ID NO: 1255504 - RNA, 19 nt, Homo sapiens
  misc_RNA (1)...(19): siRNA sense strand
ggaccauuaccuagaauau

SEQ ID NO: 1255505 - RNA, 19 nt, Homo sapiens
  misc_RNA (1)...(19): siRNA sense strand
ucgaucugcugucuuguuu

SEQ ID NO: 1255506 - RNA, 19 nt, Homo sapiens
  misc_RNA (1)...(19): siRNA sense strand
cagcagcucacgccaauga

SEQ ID NO: 1255507 - RNA, 19 nt, Homo sapiens
  misc_RNA (1)...(19): siRNA sense strand
agaagaccauugagaaagu

SEQ ID NO: 1255508 - RNA, 19 nt, Homo sapiens
  misc_RNA (1)...(19): siRNA sense strand
gccaauagaggaugauuca

SEQ ID NO: 1255509 - RNA, 19 nt, Homo sapiens
  misc_RNA (1)...(19): siRNA sense strand
cguguccucucucuacuuu

SEQ ID NO: 1255510 - RNA, 19 nt, Homo sapiens
  misc_RNA (1)...(19): siRNA sense strand
ccauaucgcuacaauacca

SEQ ID NO: 1255511 - RNA, 19 nt, Homo sapiens
  misc_RNA (1)...(19): siRNA sense strand
ucagauauccuuccucagu

SEQ ID NO: 1255512 - RNA, 19 nt, Homo sapiens
  misc_RNA (1)...(19): siRNA sense strand
gaggugguccauaaacauu

SEQ ID NO: 1255513 - RNA, 19 nt, Homo sapiens
  misc_RNA (1)...(19): siRNA sense strand
cagcucacgccaaugaaua

SEQ ID NO: 1255514 - RNA, 19 nt, Homo sapiens
  misc_RNA (1)...(19): siRNA sense strand
aauagaggaugauucaaca

SEQ ID NO: 1255515 - RNA, 19 nt, Homo sapiens
  misc_RNA (1)...(19): siRNA sense strand
ggacaugagagcugauauc

SEQ ID NO: 1255516 - RNA, 19 nt, Homo sapiens
  misc_RNA (1)...(19): siRNA sense strand
gguauagcaucggagacua

SEQ ID NO: 1255517 - RNA, 19 nt, Homo sapiens
  misc_RNA (1)...(19): siRNA sense strand
gaagaccauugagaaaguc

SEQ ID NO: 1255518 - RNA, 19 nt, Homo sapiens
  misc_RNA (1)...(19): siRNA sense strand
uauauugucucaacauggu

SEQ ID NO: 1255519 - RNA, 19 nt, Homo sapiens
  misc_RNA (1)...(19): siRNA sense strand
augguuggcucucuucuuu

SEQ ID NO: 1255520 - RNA, 19 nt, Homo sapiens
  misc_RNA (1)...(19): siRNA sense strand
gauuguggauuggccugua

SEQ ID NO: 1255521 - RNA, 19 nt, Homo sapiens
  misc_RNA (1)...(19): siRNA sense strand
ccagcaaggauucauugua

SEQ ID NO: 1255522 - RNA, 19 nt, Homo sapiens
  misc_RNA (1)...(19): siRNA sense strand
ucacuaacaccauccaaau

SEQ ID NO: 1255523 - RNA, 19 nt, Homo sapiens
  misc_RNA (1)...(19): siRNA sense strand
ucagcagucucuucaguuc

SEQ ID NO: 1255524 - RNA, 19 nt, Homo sapiens
  misc_RNA (1)...(19): siRNA sense strand
aaacaagaagcgccaaaga

SEQ ID NO: 1255525 - RNA, 19 nt, Homo sapiens
  misc_RNA (1)...(19): siRNA sense strand
cuacgaaucaaacugcuuu

SEQ ID NO: 1255526 - RNA, 19 nt, Homo sapiens
  misc_RNA (1)...(19): siRNA sense strand
cagcuggcuuugagcauug

SEQ ID NO: 1255527 - RNA, 19 nt, Homo sapiens
  misc_RNA (1)...(19): siRNA sense strand
ccagcuggcuuugagcauu

SEQ ID NO: 1255528 - RNA, 19 nt, Homo sapiens
  misc_RNA (1)...(19): siRNA sense strand
cuaacaccauccaaauaga

SEQ ID NO: 1255529 - RNA, 19 nt, Homo sapiens
  misc_RNA (1)...(19): siRNA sense strand
ccaaagacgccaccacaca

SEQ ID NO: 1255530 - RNA, 19 nt, Homo sapiens
  misc_RNA (1)...(19): siRNA sense strand
cagaggugguccauaaaca

SEQ ID NO: 1255531 - RNA, 19 nt, Homo sapiens
  misc_RNA (1)...(19): siRNA sense strand
gaaaugaacaugaaaaggu

SEQ ID NO: 1255532 - RNA, 19 nt, Homo sapiens
  misc_RNA (1)...(19): siRNA sense strand
gagacuacgaggucauuga

SEQ ID NO: 1255533 - RNA, 19 nt, Homo sapiens
  misc_RNA (1)...(19): siRNA sense strand
ggaggacccagcaaggauu

SEQ ID NO: 1255534 - RNA, 19 nt, Homo sapiens
  misc_RNA (1)...(19): siRNA sense strand
gauauccuuccucaguaua

SEQ ID NO: 1255535 - RNA, 19 nt, Homo sapiens
  misc_RNA (1)...(19): siRNA sense strand
gaugaggugguggcuauuu

SEQ ID NO: 1255536 - RNA, 19 nt, Homo sapiens
  misc_RNA (1)...(19): siRNA sense strand
guacguguccucucucuac

SEQ ID NO: 1255537 - RNA, 19 nt, Homo sapiens
  misc_RNA (1)...(19): siRNA sense strand
gauagugugguggacguua

SEQ ID NO: 1255538 - RNA, 19 nt, Homo sapiens
  misc_RNA (1)...(19): siRNA sense strand
acccuaagcucauaaggau

SEQ ID NO: 1255539 - RNA, 19 nt, Homo sapiens
  misc_RNA (1)...(19): siRNA sense strand
uagaggaugauucaacaaa

SEQ ID NO: 1255540 - RNA, 19 nt, Homo sapiens
  misc_RNA (1)...(19): siRNA sense strand
gaaaagguccucuccaucu

SEQ ID NO: 1255541 - RNA, 19 nt, Homo sapiens
  misc_RNA (1)...(19): siRNA sense strand
agucauggauuauauuguc

SEQ ID NO: 1255542 - RNA, 19 nt, Homo sapiens
  misc_RNA (1)...(19): siRNA sense strand
ggaaacauagcuccuacca

SEQ ID NO: 1255543 - RNA, 19 nt, Homo sapiens
  misc_RNA (1)...(19): siRNA sense strand
cacuaacaccauccaaaua

SEQ ID NO: 1255544 - RNA, 19 nt, Homo sapiens
  misc_RNA (1)...(19): siRNA sense strand
ggugguccauaaacauuca

SEQ ID NO: 1255545 - RNA, 19 nt, Homo sapiens
  misc_RNA (1)...(19): siRNA sense strand
ggauauuacguuguucaaa

SEQ ID NO: 1255546 - RNA, 19 nt, Homo sapiens
  misc_RNA (1)...(19): siRNA sense strand
uuaccaugcuggagaaagu

SEQ ID NO: 1255547 - RNA, 19 nt, Homo sapiens
  misc_RNA (1)...(19): siRNA sense strand
gauaucuguguucaucuaa

SEQ ID NO: 1255548 - RNA, 19 nt, Homo sapiens
  misc_RNA (1)...(19): siRNA sense strand
cagcaaauguaugccaaca

SEQ ID NO: 1255549 - RNA, 19 nt, Homo sapiens
  misc_RNA (1)...(19): siRNA sense strand
ugucuuguuuaccuuauga

SEQ ID NO: 1255550 - RNA, 19 nt, Homo sapiens
  misc_RNA (1)...(19): siRNA sense strand
caaagacgccaccacacau

SEQ ID NO: 1255551 - RNA, 19 nt, Homo sapiens
  misc_RNA (1)...(19): siRNA sense strand
uguaaacucucuggauauc

SEQ ID NO: 1255552 - RNA, 19 nt, Homo sapiens
  misc_RNA (1)...(19): siRNA sense strand
uaaugaacauccugcuuuu

SEQ ID NO: 1255553 - RNA, 19 nt, Homo sapiens
  misc_RNA (1)...(19): siRNA sense strand
gagagcugauaucuguguu

SEQ ID NO: 1255554 - RNA, 19 nt, Homo sapiens
  misc_RNA (1)...(19): siRNA sense strand
ugaauaauguacgggacuu

SEQ ID NO: 1255555 - RNA, 19 nt, Homo sapiens
  misc_RNA (1)...(19): siRNA sense strand
augagaugcugaauaaugu

SEQ ID NO: 1255556 - RNA, 19 nt, Homo sapiens
  misc_RNA (1)...(19): siRNA sense strand
ucucucuacuuuaccauga

SEQ ID NO: 1255557 - RNA, 19 nt, Homo sapiens
  misc_RNA (1)...(19): siRNA sense strand
aaacagaggugguccauaa

SEQ ID NO: 1255558 - RNA, 19 nt, Homo sapiens
  misc_RNA (1)...(19): siRNA sense strand
cuaggaaacuggaccauua

SEQ ID NO: 1255559 - RNA, 19 nt, Homo sapiens
  misc_RNA (1)...(19): siRNA sense strand
acaaauagccgaaguguuu

SEQ ID NO: 1255560 - RNA, 19 nt, Homo sapiens
  misc_RNA (1)...(19): siRNA sense strand
caugagagcugauaucugu

SEQ ID NO: 1255561 - RNA, 19 nt, Homo sapiens
  misc_RNA (1)...(19): siRNA sense strand
ggaauugacugacaagaag

SEQ ID NO: 1255562 - RNA, 19 nt, Homo sapiens
  misc_RNA (1)...(19): siRNA sense strand
cauaggauuuggaaacaua

SEQ ID NO: 1255563 - RNA, 19 nt, Homo sapiens
  misc_RNA (1)...(19): siRNA sense strand
ggacgaaauuugcccgauu

SEQ ID NO: 1255564 - RNA, 19 nt, Homo sapiens
  misc_RNA (1)...(19): siRNA sense strand
ggauuggccuguaguuuau

SEQ ID NO: 1255565 - RNA, 19 nt, Homo sapiens
  misc_RNA (1)...(19): siRNA sense strand
guggagaggucauuucuga

SEQ ID NO: 1255566 - RNA, 19 nt, Homo sapiens
  misc_RNA (1)...(19): siRNA sense strand
ccauaaacauucaagacua

SEQ ID NO: 1255567 - RNA, 19 nt, Homo sapiens
  misc_RNA (1)...(19): siRNA sense strand
gagcugacgucaugcagaa

SEQ ID NO: 1255568 - RNA, 19 nt, Homo sapiens
  misc_RNA (1)...(19): siRNA sense strand
ucaaggauauuacguuguu

SEQ ID NO: 1255569 - RNA, 19 nt, Homo sapiens
  misc_RNA (1)...(19): siRNA sense strand
gaaacuggaccauuaccua

SEQ ID NO: 1255570 - RNA, 19 nt, Homo sapiens
  misc_RNA (1)...(19): siRNA sense strand
gauauuacguuguucaaac

SEQ ID NO: 1255571 - RNA, 19 nt, Homo sapiens
  misc_RNA (1)...(19): siRNA sense strand
gaaauuugcccgauugaca

SEQ ID NO: 1255572 - RNA, 19 nt, Homo sapiens
  misc_RNA (1)...(19): siRNA sense strand
accaugagaugcugaauaa

SEQ ID NO: 1255573 - RNA, 19 nt, Homo sapiens
  misc_RNA (1)...(19): siRNA sense strand
caagaagaccauugagaaa

SEQ ID NO: 1255574 - RNA, 19 nt, Homo sapiens
  misc_RNA (1)...(19): siRNA sense strand
aaacaaagcagaacaacau

SEQ ID NO: 1255575 - RNA, 19 nt, Homo sapiens
  misc_RNA (1)...(19): siRNA sense strand
cagauauccuuccucagua

SEQ ID NO: 1255576 - RNA, 19 nt, Homo sapiens
  misc_RNA (1)...(19): siRNA sense strand
gacgaaauuugcccgauug

SEQ ID NO: 1255577 - RNA, 19 nt, Homo sapiens
  misc_RNA (1)...(19): siRNA sense strand
cagcaaggauucauuguac

SEQ ID NO: 1255578 - RNA, 19 nt, Homo sapiens
  misc_RNA (1)...(19): siRNA sense strand
gcugauaucuguguucauc

SEQ ID NO: 1255579 - RNA, 19 nt, Homo sapiens
  misc_RNA (1)...(19): siRNA sense strand
gugagcgagucauggauua

SEQ ID NO: 1255580 - RNA, 19 nt, Homo sapiens
  misc_RNA (1)...(19): siRNA sense strand
ggaaucagcagucucuuca

SEQ ID NO: 1255581 - RNA, 19 nt, Homo sapiens
  misc_RNA (1)...(19): siRNA sense strand
ugacaagccuuacaaccau

SEQ ID NO: 1255582 - RNA, 19 nt, Homo sapiens
  misc_RNA (1)...(19): siRNA sense strand
gacaagccuuacaaccaua

SEQ ID NO: 1255583 - RNA, 19 nt, Homo sapiens
  misc_RNA (1)...(19): siRNA sense strand
gaucugcugucuuguuuac

SEQ ID NO: 1255584 - RNA, 19 nt, Homo sapiens
  misc_RNA (1)...(19): siRNA sense strand
uuuguaaacucucuggaua

SEQ ID NO: 1255585 - RNA, 19 nt, Homo sapiens
  misc_RNA (1)...(19): siRNA sense strand
uggauuggccuguaguuua

SEQ ID NO: 1255586 - RNA, 19 nt, Homo sapiens
  misc_RNA (1)...(19): siRNA sense strand
gagcugauaucuguguuca

SEQ ID NO: 1255587 - RNA, 19 nt, Homo sapiens
  misc_RNA (1)...(19): siRNA sense strand
cauaaacauucaagacuag

SEQ ID NO: 1255588 - RNA, 19 nt, Homo sapiens
  misc_RNA (1)...(19): siRNA sense strand
ugauaucuguguucaucua

SEQ ID NO: 1255589 - RNA, 19 nt, Homo sapiens
  misc_RNA (1)...(19): siRNA sense strand
gguuggcucucuucuuuau

SEQ ID NO: 1255590 - RNA, 19 nt, Homo sapiens
  misc_RNA (1)...(19): siRNA sense strand
ggccuguaguuuauaguaa

SEQ ID NO: 1255591 - RNA, 19 nt, Homo sapiens
  misc_RNA (1)...(19): siRNA sense strand
acaagaagaccauugagaa

SEQ ID NO: 1255592 - RNA, 19 nt, Homo sapiens
  misc_RNA (1)...(19): siRNA sense strand
gggaauugacugacaagaa

SEQ ID NO: 1255593 - RNA, 19 nt, Homo sapiens
  misc_RNA (1)...(19): siRNA sense strand
caaaaggcauugauacaga

SEQ ID NO: 1255594 - RNA, 19 nt, Homo sapiens
  misc_RNA (1)...(19): siRNA sense strand
gagcgagucauggauuaua

SEQ ID NO: 1255595 - RNA, 19 nt, Homo sapiens
  misc_RNA (1)...(19): siRNA sense strand
caugagaugcugaauaaug

SEQ ID NO: 1255596 - RNA, 19 nt, Homo sapiens
  misc_RNA (1)...(19): siRNA sense strand
uaaacucucuggauaucau

SEQ ID NO: 1255597 - RNA, 19 nt, Homo sapiens
  misc_RNA (1)...(19): siRNA sense strand
ugaucgaucugcugucuug

SEQ ID NO: 1255598 - RNA, 19 nt, Homo sapiens
  misc_RNA (1)...(19): siRNA sense strand
ucaucgagcugacgucaug

SEQ ID NO: 1255599 - RNA, 19 nt, Homo sapiens
  misc_RNA (1)...(19): siRNA sense strand
gaugaugguuggcucucuu

SEQ ID NO: 1255600 - RNA, 19 nt, Homo sapiens
  misc_RNA (1)...(19): siRNA sense strand
uuaaugaacauccugcuuu

SEQ ID NO: 1255601 - RNA, 19 nt, Homo sapiens
  misc_RNA (1)...(19): siRNA sense strand
ugaacuaucugaaaacuug

SEQ ID NO: 1255602 - RNA, 19 nt, Homo sapiens
  misc_RNA (1)...(19): siRNA sense strand
gacaagaagaccauugaga

SEQ ID NO: 1255603 - RNA, 19 nt, Homo sapiens
  misc_RNA (1)...(19): siRNA sense strand
caaccgauaccaugagaug

SEQ ID NO: 1255604 - RNA, 19 nt, Homo sapiens
  misc_RNA (1)...(19): siRNA sense strand
ggaccauuaccuagaauau

SEQ ID NO: 1255605 - RNA, 19 nt, Homo sapiens
  misc_RNA (1)...(19): siRNA sense strand
ucgaucugcugucuuguuu

SEQ ID NO: 1255606 - RNA, 19 nt, Homo sapiens
  misc_RNA (1)...(19): siRNA sense strand
cagcagcucacgccaauga

SEQ ID NO: 1255607 - RNA, 19 nt, Homo sapiens
  misc_RNA (1)...(19): siRNA sense strand
agaagaccauugagaaagu

SEQ ID NO: 1255608 - RNA, 19 nt, Homo sapiens
  misc_RNA (1)...(19): siRNA sense strand
gccaauagaggaugauuca

SEQ ID NO: 1255609 - RNA, 19 nt, Homo sapiens
  misc_RNA (1)...(19): siRNA sense strand
cguguccucucucuacuuu

SEQ ID NO: 1255610 - RNA, 19 nt, Homo sapiens
  misc_RNA (1)...(19): siRNA sense strand
ccauaucgcuacaauacca

SEQ ID NO: 1255611 - RNA, 19 nt, Homo sapiens
  misc_RNA (1)...(19): siRNA sense strand
ucagauauccuuccucagu

SEQ ID NO: 1255612 - RNA, 19 nt, Homo sapiens
  misc_RNA (1)...(19): siRNA sense strand
gaggugguccauaaacauu

SEQ ID NO: 1255613 - RNA, 19 nt, Homo sapiens
  misc_RNA (1)...(19): siRNA sense strand
cagcucacgccaaugaaua

SEQ ID NO: 1255614 - RNA, 19 nt, Homo sapiens
  misc_RNA (1)...(19): siRNA sense strand
aauagaggaugauucaaca

SEQ ID NO: 1255615 - RNA, 19 nt, Homo sapiens
  misc_RNA (1)...(19): siRNA sense strand
ggacaugagagcugauauc

SEQ ID NO: 1255616 - RNA, 19 nt, Homo sapiens
  misc_RNA (1)...(19): siRNA sense strand
gguauagcaucggagacua

SEQ ID NO: 1255617 - RNA, 19 nt, Homo sapiens
  misc_RNA (1)...(19): siRNA sense strand
gaagaccauugagaaaguc

SEQ ID NO: 1255618 - RNA, 19 nt, Homo sapiens
  misc_RNA (1)...(19): siRNA sense strand
uauauugucucaacauggu

SEQ ID NO: 1255619 - RNA, 19 nt, Homo sapiens
  misc_RNA (1)...(19): siRNA sense strand
augguuggcucucuucuuu

SEQ ID NO: 1255620 - RNA, 19 nt, Homo sapiens
  misc_RNA (1)...(19): siRNA sense strand
gauuguggauuggccugua

SEQ ID NO: 1255621 - RNA, 19 nt, Homo sapiens
  misc_RNA (1)...(19): siRNA sense strand
ccagcaaggauucauugua

SEQ ID NO: 1255622 - RNA, 19 nt, Homo sapiens
  misc_RNA (1)...(19): siRNA sense strand
ucacuaacaccauccaaau

SEQ ID NO: 1255623 - RNA, 19 nt, Homo sapiens
  misc_RNA (1)...(19): siRNA sense strand
ucagcagucucuucaguuc

SEQ ID NO: 1255624 - RNA, 19 nt, Homo sapiens
  misc_RNA (1)...(19): siRNA sense strand
aaacaagaagcgccaaaga

SEQ ID NO: 1255625 - RNA, 19 nt, Homo sapiens
  misc_RNA (1)...(19): siRNA sense strand
cuacgaaucaaacugcuuu

SEQ ID NO: 1255626 - RNA, 19 nt, Homo sapiens
  misc_RNA (1)...(19): siRNA sense strand
cagcuggcuuugagcauug

SEQ ID NO: 1255627 - RNA, 19 nt, Homo sapiens
  misc_RNA (1)...(19): siRNA sense strand
ccagcuggcuuugagcauu

SEQ ID NO: 1255628 - RNA, 19 nt, Homo sapiens
  misc_RNA (1)...(19): siRNA sense strand
cuaacaccauccaaauaga

SEQ ID NO: 1255629 - RNA, 19 nt, Homo sapiens
  misc_RNA (1)...(19): siRNA sense strand
ccaaagacgccaccacaca

SEQ ID NO: 1255630 - RNA, 19 nt, Homo sapiens
  misc_RNA (1)...(19): siRNA sense strand
cagaggugguccauaaaca

SEQ ID NO: 1255631 - RNA, 19 nt, Homo sapiens
  misc_RNA (1)...(19): siRNA sense strand
gaaaugaacaugaaaaggu

SEQ ID NO: 1255632 - RNA, 19 nt, Homo sapiens
  misc_RNA (1)...(19): siRNA sense strand
gagacuacgaggucauuga

SEQ ID NO: 1255633 - RNA, 19 nt, Homo sapiens
  misc_RNA (1)...(19): siRNA sense strand
ggaggacccagcaaggauu

SEQ ID NO: 1255634 - RNA, 19 nt, Homo sapiens
  misc_RNA (1)...(19): siRNA sense strand
gauauccuuccucaguaua

SEQ ID NO: 1255635 - RNA, 19 nt, Homo sapiens
  misc_RNA (1)...(19): siRNA sense strand
gaugaggugguggcuauuu

SEQ ID NO: 1255636 - RNA, 19 nt, Homo sapiens
  misc_RNA (1)...(19): siRNA sense strand
guacguguccucucucuac

SEQ ID NO: 1255637 - RNA, 19 nt, Homo sapiens
  misc_RNA (1)...(19): siRNA sense strand
gauagugugguggacguua

SEQ ID NO: 1255638 - RNA, 19 nt, Homo sapiens
  misc_RNA (1)...(19): siRNA sense strand
acccuaagcucauaaggau

SEQ ID NO: 1255639 - RNA, 19 nt, Homo sapiens
  misc_RNA (1)...(19): siRNA sense strand
uagaggaugauucaacaaa

SEQ ID NO: 1255640 - RNA, 19 nt, Homo sapiens
  misc_RNA (1)...(19): siRNA sense strand
gaaaagguccucuccaucu

SEQ ID NO: 1255641 - RNA, 19 nt, Homo sapiens
  misc_RNA (1)...(19): siRNA sense strand
agucauggauuauauuguc

SEQ ID NO: 1255642 - RNA, 19 nt, Homo sapiens
  misc_RNA (1)...(19): siRNA sense strand
ggaaacauagcuccuacca

SEQ ID NO: 1255643 - RNA, 19 nt, Homo sapiens
  misc_RNA (1)...(19): siRNA sense strand
cacuaacaccauccaaaua

SEQ ID NO: 1255644 - RNA, 19 nt, Homo sapiens
  misc_RNA (1)...(19): siRNA sense strand
ggugguccauaaacauuca

SEQ ID NO: 1255645 - RNA, 19 nt, Homo sapiens
  misc_RNA (1)...(19): siRNA sense strand
ggauauuacguuguucaaa

SEQ ID NO: 1255646 - RNA, 19 nt, Homo sapiens
  misc_RNA (1)...(19): siRNA sense strand
uuaccaugcuggagaaagu

SEQ ID NO: 1255647 - RNA, 19 nt, Homo sapiens
  misc_RNA (1)...(19): siRNA sense strand
gauaucuguguucaucuaa

SEQ ID NO: 1255648 - RNA, 19 nt, Homo sapiens
  misc_RNA (1)...(19): siRNA sense strand
cagcaaauguaugccaaca

SEQ ID NO: 1255649 - RNA, 19 nt, Homo sapiens
  misc_RNA (1)...(19): siRNA sense strand
ugucuuguuuaccuuauga

SEQ ID NO: 1255650 - RNA, 19 nt, Homo sapiens
  misc_RNA (1)...(19): siRNA sense strand
caaagacgccaccacacau

SEQ ID NO: 1255651 - RNA, 19 nt, Homo sapiens
  misc_RNA (1)...(19): siRNA sense strand
uguaaacucucuggauauc

SEQ ID NO: 1255652 - RNA, 19 nt, Homo sapiens
  misc_RNA (1)...(19): siRNA sense strand
uaaugaacauccugcuuuu

SEQ ID NO: 1255653 - RNA, 19 nt, Homo sapiens
  misc_RNA (1)...(19): siRNA sense strand
gagagcugauaucuguguu

SEQ ID NO: 1255654 - RNA, 19 nt, Homo sapiens
  misc_RNA (1)...(19): siRNA sense strand
ugaauaauguacgggacuu

SEQ ID NO: 1255655 - RNA, 19 nt, Homo sapiens
  misc_RNA (1)...(19): siRNA sense strand
augagaugcugaauaaugu

SEQ ID NO: 1255656 - RNA, 19 nt, Homo sapiens
  misc_RNA (1)...(19): siRNA sense strand
ucucucuacuuuaccauga

SEQ ID NO: 1255657 - RNA, 19 nt, Homo sapiens
  misc_RNA (1)...(19): siRNA sense strand
aaacagaggugguccauaa

SEQ ID NO: 1255658 - RNA, 19 nt, Homo sapiens
  misc_RNA (1)...(19): siRNA sense strand
cuaggaaacuggaccauua

SEQ ID NO: 1255659 - RNA, 19 nt, Homo sapiens
  misc_RNA (1)...(19): siRNA sense strand
acaaauagccgaaguguuu

SEQ ID NO: 1255660 - RNA, 19 nt, Homo sapiens
  misc_RNA (1)...(19): siRNA sense strand
caugagagcugauaucugu

SEQ ID NO: 1255661 - RNA, 19 nt, Homo sapiens
  misc_RNA (1)...(19): siRNA sense strand
ggaauugacugacaagaag

SEQ ID NO: 1255662 - RNA, 19 nt, Homo sapiens
  misc_RNA (1)...(19): siRNA sense strand
cauaggauuuggaaacaua

SEQ ID NO: 1255663 - RNA, 19 nt, Homo sapiens
  misc_RNA (1)...(19): siRNA sense strand
ggacgaaauuugcccgauu

SEQ ID NO: 1255664 - RNA, 19 nt, Homo sapiens
  misc_RNA (1)...(19): siRNA sense strand
ccauaaacauucaagacua

SEQ ID NO: 1255665 - RNA, 19 nt, Homo sapiens
  misc_RNA (1)...(19): siRNA sense strand
guggagaggucauuucuga

SEQ ID NO: 1255666 - RNA, 19 nt, Homo sapiens
  misc_RNA (1)...(19): siRNA sense strand
ucaaggauauuacguuguu

SEQ ID NO: 1255667 - RNA, 19 nt, Homo sapiens
  misc_RNA (1)...(19): siRNA sense strand
gaaacuggaccauuaccua

SEQ ID NO: 1255668 - RNA, 19 nt, Homo sapiens
  misc_RNA (1)...(19): siRNA sense strand
gauauuacguuguucaaac

SEQ ID NO: 1255669 - RNA, 19 nt, Homo sapiens
  misc_RNA (1)...(19): siRNA sense strand
gaaauuugcccgauugaca

SEQ ID NO: 1255670 - RNA, 19 nt, Homo sapiens
  misc_RNA (1)...(19): siRNA sense strand
accaugagaugcugaauaa

SEQ ID NO: 1255671 - RNA, 19 nt, Homo sapiens
  misc_RNA (1)...(19): siRNA sense strand
caagaagaccauugagaaa

SEQ ID NO: 1255672 - RNA, 19 nt, Homo sapiens
  misc_RNA (1)...(19): siRNA sense strand
aaacaaagcagaacaacau

SEQ ID NO: 1255673 - RNA, 19 nt, Homo sapiens
  misc_RNA (1)...(19): siRNA sense strand
cagauauccuuccucagua

SEQ ID NO: 1255674 - RNA, 19 nt, Homo sapiens
  misc_RNA (1)...(19): siRNA sense strand
gacgaaauuugcccgauug

SEQ ID NO: 1255675 - RNA, 19 nt, Homo sapiens
  misc_RNA (1)...(19): siRNA sense strand
cagcaaggauucauuguac

SEQ ID NO: 1255676 - RNA, 19 nt, Homo sapiens
  misc_RNA (1)...(19): siRNA sense strand
gcugauaucuguguucauc

SEQ ID NO: 1255677 - RNA, 19 nt, Homo sapiens
  misc_RNA (1)...(19): siRNA sense strand
gugagcgagucauggauua

SEQ ID NO: 1255678 - RNA, 19 nt, Homo sapiens
  misc_RNA (1)...(19): siRNA sense strand
ggaaucagcagucucuuca

SEQ ID NO: 1255679 - RNA, 19 nt, Homo sapiens
  misc_RNA (1)...(19): siRNA sense strand
ugacaagccuuacaaccau

SEQ ID NO: 1255680 - RNA, 19 nt, Homo sapiens
  misc_RNA (1)...(19): siRNA sense strand
gacaagccuuacaaccaua

SEQ ID NO: 1255681 - RNA, 19 nt, Homo sapiens
  misc_RNA (1)...(19): siRNA sense strand
gaucugcugucuuguuuac

SEQ ID NO: 1255682 - RNA, 19 nt, Homo sapiens
  misc_RNA (1)...(19): siRNA sense strand
gagcugauaucuguguuca

SEQ ID NO: 1255683 - RNA, 19 nt, Homo sapiens
  misc_RNA (1)...(19): siRNA sense strand
cauaaacauucaagacuag

SEQ ID NO: 1255684 - RNA, 19 nt, Homo sapiens
  misc_RNA (1)...(19): siRNA sense strand
ugauaucuguguucaucua

SEQ ID NO: 1255685 - RNA, 19 nt, Homo sapiens
  misc_RNA (1)...(19): siRNA sense strand
gguuggcucucuucuuuau

SEQ ID NO: 1255686 - RNA, 19 nt, Homo sapiens
  misc_RNA (1)...(19): siRNA sense strand
acaagaagaccauugagaa

SEQ ID NO: 1255687 - RNA, 19 nt, Homo sapiens
  misc_RNA (1)...(19): siRNA sense strand
ugaucgaucugcugucuug

SEQ ID NO: 1255688 - RNA, 19 nt, Homo sapiens
  misc_RNA (1)...(19): siRNA sense strand
caaaaggcauugauacaga

SEQ ID NO: 1255689 - RNA, 19 nt, Homo sapiens
  misc_RNA (1)...(19): siRNA sense strand
gagcgagucauggauuaua

SEQ ID NO: 1255690 - RNA, 19 nt, Homo sapiens
  misc_RNA (1)...(19): siRNA sense strand
caugagaugcugaauaaug

SEQ ID NO: 1255691 - RNA, 19 nt, Homo sapiens
  misc_RNA (1)...(19): siRNA sense strand
gggaauugacugacaagaa

SEQ ID NO: 1255692 - RNA, 19 nt, Homo sapiens
  misc_RNA (1)...(19): siRNA sense strand
gaugaugguuggcucucuu

SEQ ID NO: 1255693 - RNA, 19 nt, Homo sapiens
  misc_RNA (1)...(19): siRNA sense strand
uuaaugaacauccugcuuu

SEQ ID NO: 1255694 - RNA, 19 nt, Homo sapiens
  misc_RNA (1)...(19): siRNA sense strand
ugaacuaucugaaaacuug

SEQ ID NO: 1255695 - RNA, 19 nt, Homo sapiens
  misc_RNA (1)...(19): siRNA sense strand
cagcagcucacgccaauga

SEQ ID NO: 1255696 - RNA, 19 nt, Homo sapiens
  misc_RNA (1)...(19): siRNA sense strand
gacaagaagaccauugaga

SEQ ID NO: 1255697 - RNA, 19 nt, Homo sapiens
  misc_RNA (1)...(19): siRNA sense strand
caaccgauaccaugagaug

SEQ ID NO: 1255698 - RNA, 19 nt, Homo sapiens
  misc_RNA (1)...(19): siRNA sense strand
agaagaccauugagaaagu

SEQ ID NO: 1255699 - RNA, 19 nt, Homo sapiens
  misc_RNA (1)...(19): siRNA sense strand
ggaccauuaccuagaauau

SEQ ID NO: 1255700 - RNA, 19 nt, Homo sapiens
  misc_RNA (1)...(19): siRNA sense strand
ucgaucugcugucuuguuu

SEQ ID NO: 1255701 - RNA, 19 nt, Homo sapiens
  misc_RNA (1)...(19): siRNA sense strand
gccaauagaggaugauuca

SEQ ID NO: 1255702 - RNA, 19 nt, Homo sapiens
  misc_RNA (1)...(19): siRNA sense strand
cguguccucucucuacuuu

SEQ ID NO: 1255703 - RNA, 19 nt, Homo sapiens
  misc_RNA (1)...(19): siRNA sense strand
ccauaucgcuacaauacca

SEQ ID NO: 1255704 - RNA, 19 nt, Homo sapiens
  misc_RNA (1)...(19): siRNA sense strand
ucagauauccuuccucagu

SEQ ID NO: 1255705 - RNA, 19 nt, Homo sapiens
  misc_RNA (1)...(19): siRNA sense strand
gaggugguccauaaacauu

SEQ ID NO: 1255706 - RNA, 19 nt, Homo sapiens
  misc_RNA (1)...(19): siRNA sense strand
cagcucacgccaaugaaua

SEQ ID NO: 1255707 - RNA, 19 nt, Homo sapiens
  misc_RNA (1)...(19): siRNA sense strand
aauagaggaugauucaaca

SEQ ID NO: 1255708 - RNA, 19 nt, Homo sapiens
  misc_RNA (1)...(19): siRNA sense strand
ggacaugagagcugauauc

SEQ ID NO: 1255709 - RNA, 19 nt, Homo sapiens
  misc_RNA (1)...(19): siRNA sense strand
gguauagcaucggagacua

SEQ ID NO: 1255710 - RNA, 19 nt, Homo sapiens
  misc_RNA (1)...(19): siRNA sense strand
aaacaagaagcgccaaaga

SEQ ID NO: 1255711 - RNA, 19 nt, Homo sapiens
  misc_RNA (1)...(19): siRNA sense strand
uauauugucucaacauggu

SEQ ID NO: 1255712 - RNA, 19 nt, Homo sapiens
  misc_RNA (1)...(19): siRNA sense strand
augguuggcucucuucuuu

SEQ ID NO: 1255713 - RNA, 19 nt, Homo sapiens
  misc_RNA (1)...(19): siRNA sense strand
ccagcaaggauucauugua

SEQ ID NO: 1255714 - RNA, 19 nt, Homo sapiens
  misc_RNA (1)...(19): siRNA sense strand
ucacuaacaccauccaaau

SEQ ID NO: 1255715 - RNA, 19 nt, Homo sapiens
  misc_RNA (1)...(19): siRNA sense strand
ucagcagucucuucaguuc

SEQ ID NO: 1255716 - RNA, 19 nt, Homo sapiens
  misc_RNA (1)...(19): siRNA sense strand
gaagaccauugagaaaguc

SEQ ID NO: 1255717 - RNA, 19 nt, Homo sapiens
  misc_RNA (1)...(19): siRNA sense strand
cagaggugguccauaaaca

SEQ ID NO: 1255718 - RNA, 19 nt, Homo sapiens
  misc_RNA (1)...(19): siRNA sense strand
cagcuggcuuugagcauug

SEQ ID NO: 1255719 - RNA, 19 nt, Homo sapiens
  misc_RNA (1)...(19): siRNA sense strand
ccagcuggcuuugagcauu

SEQ ID NO: 1255720 - RNA, 19 nt, Homo sapiens
  misc_RNA (1)...(19): siRNA sense strand
cuaacaccauccaaauaga

SEQ ID NO: 1255721 - RNA, 19 nt, Homo sapiens
  misc_RNA (1)...(19): siRNA sense strand
cuacgaaucaaacugcuuu

SEQ ID NO: 1255722 - RNA, 19 nt, Homo sapiens
  misc_RNA (1)...(19): siRNA sense strand
gaaaugaacaugaaaaggu

SEQ ID NO: 1255723 - RNA, 19 nt, Homo sapiens
  misc_RNA (1)...(19): siRNA sense strand
ccaaagacgccaccacaca

SEQ ID NO: 1255724 - RNA, 19 nt, Homo sapiens
  misc_RNA (1)...(19): siRNA sense strand
gagacuacgaggucauuga

SEQ ID NO: 1255725 - RNA, 19 nt, Homo sapiens
  misc_RNA (1)...(19): siRNA sense strand
ggaggacccagcaaggauu

SEQ ID NO: 1255726 - RNA, 19 nt, Homo sapiens
  misc_RNA (1)...(19): siRNA sense strand
gauauccuuccucaguaua

SEQ ID NO: 1255727 - RNA, 19 nt, Homo sapiens
  misc_RNA (1)...(19): siRNA sense strand
gaugaggugguggcuauuu

SEQ ID NO: 1255728 - RNA, 19 nt, Homo sapiens
  misc_RNA (1)...(19): siRNA sense strand
guacguguccucucucuac

SEQ ID NO: 1255729 - RNA, 19 nt, Homo sapiens
  misc_RNA (1)...(19): siRNA sense strand
gauagugugguggacguua

SEQ ID NO: 1255730 - RNA, 19 nt, Homo sapiens
  misc_RNA (1)...(19): siRNA sense strand
acccuaagcucauaaggau

SEQ ID NO: 1255731 - RNA, 19 nt, Homo sapiens
  misc_RNA (1)...(19): siRNA sense strand
uagaggaugauucaacaaa

SEQ ID NO: 1255732 - RNA, 19 nt, Homo sapiens
  misc_RNA (1)...(19): siRNA sense strand
gaaaagguccucuccaucu

SEQ ID NO: 1255733 - RNA, 19 nt, Homo sapiens
  misc_RNA (1)...(19): siRNA sense strand
agucauggauuauauuguc

SEQ ID NO: 1255734 - RNA, 19 nt, Homo sapiens
  misc_RNA (1)...(19): siRNA sense strand
ggaaacauagcuccuacca

SEQ ID NO: 1255735 - RNA, 19 nt, Homo sapiens
  misc_RNA (1)...(19): siRNA sense strand
cacuaacaccauccaaaua

SEQ ID NO: 1255736 - RNA, 19 nt, Homo sapiens
  misc_RNA (1)...(19): siRNA sense strand
ggugguccauaaacauuca

SEQ ID NO: 1255737 - RNA, 19 nt, Homo sapiens
  misc_RNA (1)...(19): siRNA sense strand
ggauauuacguuguucaaa

SEQ ID NO: 1255738 - RNA, 19 nt, Homo sapiens
  misc_RNA (1)...(19): siRNA sense strand
uuaccaugcuggagaaagu

SEQ ID NO: 1255739 - RNA, 19 nt, Homo sapiens
  misc_RNA (1)...(19): siRNA sense strand
gauaucuguguucaucuaa

SEQ ID NO: 1255740 - RNA, 19 nt, Homo sapiens
  misc_RNA (1)...(19): siRNA sense strand
cagcaaauguaugccaaca

SEQ ID NO: 1255741 - RNA, 19 nt, Homo sapiens
  misc_RNA (1)...(19): siRNA sense strand
ugucuuguuuaccuuauga

SEQ ID NO: 1255742 - RNA, 19 nt, Homo sapiens
  misc_RNA (1)...(19): siRNA sense strand
caaagacgccaccacacau

SEQ ID NO: 1255743 - RNA, 19 nt, Homo sapiens
  misc_RNA (1)...(19): siRNA sense strand
caauagaggaugauucaac

SEQ ID NO: 1255744 - RNA, 19 nt, Homo sapiens
  misc_RNA (1)...(19): siRNA sense strand
uaaugaacauccugcuuuu

SEQ ID NO: 1255745 - RNA, 19 nt, Homo sapiens
  misc_RNA (1)...(19): siRNA sense strand
gagagcugauaucuguguu

SEQ ID NO: 1255746 - RNA, 19 nt, Homo sapiens
  misc_RNA (1)...(19): siRNA sense strand
ugaauaauguacgggacuu

SEQ ID NO: 1255747 - RNA, 19 nt, Homo sapiens
  misc_RNA (1)...(19): siRNA sense strand
augagaugcugaauaaugu

SEQ ID NO: 1255748 - RNA, 19 nt, Homo sapiens
  misc_RNA (1)...(19): siRNA sense strand
ucucucuacuuuaccauga

SEQ ID NO: 1255749 - RNA, 19 nt, Homo sapiens
  misc_RNA (1)...(19): siRNA sense strand
gcagucucuucaguucuuu

SEQ ID NO: 1255750 - RNA, 19 nt, Homo sapiens
  misc_RNA (1)...(19): siRNA sense strand
aaucagcagucucuucagu

SEQ ID NO: 1255751 - RNA, 19 nt, Homo sapiens
  misc_RNA (1)...(19): siRNA sense strand
agauauccuuccucaguau

SEQ ID NO: 1255752 - RNA, 19 nt, Homo sapiens
  misc_RNA (1)...(19): siRNA sense strand
guagaguuccaaaccauuc

SEQ ID NO: 1255753 - RNA, 19 nt, Homo sapiens
  misc_RNA (1)...(19): siRNA sense strand
ggauuauauugucucaaca

SEQ ID NO: 1255754 - RNA, 19 nt, Homo sapiens
  misc_RNA (1)...(19): siRNA sense strand
uggauuauauugucucaac

SEQ ID NO: 1255755 - RNA, 19 nt, Homo sapiens
  misc_RNA (1)...(19): siRNA sense strand
gacccuaagcucauaagga

SEQ ID NO: 1255756 - RNA, 19 nt, Homo sapiens
  misc_RNA (1)...(19): siRNA sense strand
gggauugggugauuuuaau

SEQ ID NO: 1255757 - RNA, 19 nt, Homo sapiens
  misc_RNA (1)...(19): siRNA sense strand
aaacagaggugguccauaa

SEQ ID NO: 1255758 - RNA, 19 nt, Homo sapiens
  misc_RNA (1)...(19): siRNA sense strand
cuaggaaacuggaccauua

SEQ ID NO: 1255759 - RNA, 19 nt, Homo sapiens
  misc_RNA (1)...(19): siRNA sense strand
acaaauagccgaaguguuu

SEQ ID NO: 1255760 - RNA, 19 nt, Homo sapiens
  misc_RNA (1)...(19): siRNA sense strand
caugagagcugauaucugu

SEQ ID NO: 1255761 - RNA, 19 nt, Homo sapiens
  misc_RNA (1)...(19): siRNA sense strand
ggaauugacugacaagaag

SEQ ID NO: 1255762 - RNA, 19 nt, Homo sapiens
  misc_RNA (1)...(19): siRNA sense strand
cauaggauuuggaaacaua

SEQ ID NO: 1255763 - RNA, 19 nt, Homo sapiens
  misc_RNA (1)...(19): siRNA sense strand
ggacgaaauuugcccgauu

SEQ ID NO: 1255764 - RNA, 19 nt, Homo sapiens
  misc_RNA (1)...(19): siRNA sense strand
ggauuggccuguaguuuau

SEQ ID NO: 1255765 - RNA, 19 nt, Homo sapiens
  misc_RNA (1)...(19): siRNA sense strand
guggagaggucauuucuga

SEQ ID NO: 1255766 - RNA, 19 nt, Homo sapiens
  misc_RNA (1)...(19): siRNA sense strand
ccauaaacauucaagacua

SEQ ID NO: 1255767 - RNA, 19 nt, Homo sapiens
  misc_RNA (1)...(19): siRNA sense strand
gagcugacgucaugcagaa

SEQ ID NO: 1255768 - RNA, 19 nt, Homo sapiens
  misc_RNA (1)...(19): siRNA sense strand
ucaaggauauuacguuguu

SEQ ID NO: 1255769 - RNA, 19 nt, Homo sapiens
  misc_RNA (1)...(19): siRNA sense strand
gaaacuggaccauuaccua

SEQ ID NO: 1255770 - RNA, 19 nt, Homo sapiens
  misc_RNA (1)...(19): siRNA sense strand
gauauuacguuguucaaac

SEQ ID NO: 1255771 - RNA, 19 nt, Homo sapiens
  misc_RNA (1)...(19): siRNA sense strand
gaaauuugcccgauugaca

SEQ ID NO: 1255772 - RNA, 19 nt, Homo sapiens
  misc_RNA (1)...(19): siRNA sense strand
accaugagaugcugaauaa

SEQ ID NO: 1255773 - RNA, 19 nt, Homo sapiens
  misc_RNA (1)...(19): siRNA sense strand
caagaagaccauugagaaa

SEQ ID NO: 1255774 - RNA, 19 nt, Homo sapiens
  misc_RNA (1)...(19): siRNA sense strand
aaacaaagcagaacaacau

SEQ ID NO: 1255775 - RNA, 19 nt, Homo sapiens
  misc_RNA (1)...(19): siRNA sense strand
cagauauccuuccucagua

SEQ ID NO: 1255776 - RNA, 19 nt, Homo sapiens
  misc_RNA (1)...(19): siRNA sense strand
gacgaaauuugcccgauug

SEQ ID NO: 1255777 - RNA, 19 nt, Homo sapiens
  misc_RNA (1)...(19): siRNA sense strand
cagcaaggauucauuguac

SEQ ID NO: 1255778 - RNA, 19 nt, Homo sapiens
  misc_RNA (1)...(19): siRNA sense strand
gcugauaucuguguucauc

SEQ ID NO: 1255779 - RNA, 19 nt, Homo sapiens
  misc_RNA (1)...(19): siRNA sense strand
gugagcgagucauggauua

SEQ ID NO: 1255780 - RNA, 19 nt, Homo sapiens
  misc_RNA (1)...(19): siRNA sense strand
ggaaucagcagucucuuca

SEQ ID NO: 1255781 - RNA, 19 nt, Homo sapiens
  misc_RNA (1)...(19): siRNA sense strand
ugacaagccuuacaaccau

SEQ ID NO: 1255782 - RNA, 19 nt, Homo sapiens
  misc_RNA (1)...(19): siRNA sense strand
gacaagccuuacaaccaua

SEQ ID NO: 1255783 - RNA, 19 nt, Homo sapiens
  misc_RNA (1)...(19): siRNA sense strand
gaucugcugucuuguuuac

SEQ ID NO: 1255784 - RNA, 19 nt, Homo sapiens
  misc_RNA (1)...(19): siRNA sense strand
uuuguaaacucucuggaua

SEQ ID NO: 1255785 - RNA, 19 nt, Homo sapiens
  misc_RNA (1)...(19): siRNA sense strand
uggauuggccuguaguuua

SEQ ID NO: 1255786 - RNA, 19 nt, Homo sapiens
  misc_RNA (1)...(19): siRNA sense strand
gagcugauaucuguguuca

SEQ ID NO: 1255787 - RNA, 19 nt, Homo sapiens
  misc_RNA (1)...(19): siRNA sense strand
cauaaacauucaagacuag

SEQ ID NO: 1255788 - RNA, 19 nt, Homo sapiens
  misc_RNA (1)...(19): siRNA sense strand
ugauaucuguguucaucua

SEQ ID NO: 1255789 - RNA, 19 nt, Homo sapiens
  misc_RNA (1)...(19): siRNA sense strand
gguuggcucucuucuuuau

SEQ ID NO: 1255790 - RNA, 19 nt, Homo sapiens
  misc_RNA (1)...(19): siRNA sense strand
ggccuguaguuuauaguaa

SEQ ID NO: 1255791 - RNA, 19 nt, Homo sapiens
  misc_RNA (1)...(19): siRNA sense strand
acaagaagaccauugagaa

SEQ ID NO: 1255792 - RNA, 19 nt, Homo sapiens
  misc_RNA (1)...(19): siRNA sense strand
gggaauugacugacaagaa

SEQ ID NO: 1255793 - RNA, 19 nt, Homo sapiens
  misc_RNA (1)...(19): siRNA sense strand
caaaaggcauugauacaga

SEQ ID NO: 1255794 - RNA, 19 nt, Homo sapiens
  misc_RNA (1)...(19): siRNA sense strand
gagcgagucauggauuaua

SEQ ID NO: 1255795 - RNA, 19 nt, Homo sapiens
  misc_RNA (1)...(19): siRNA sense strand
caugagaugcugaauaaug

SEQ ID NO: 1255796 - RNA, 19 nt, Homo sapiens
  misc_RNA (1)...(19): siRNA sense strand
uaaacucucuggauaucau

SEQ ID NO: 1255797 - RNA, 19 nt, Homo sapiens
  misc_RNA (1)...(19): siRNA sense strand
ugaucgaucugcugucuug

SEQ ID NO: 1255798 - RNA, 19 nt, Homo sapiens
  misc_RNA (1)...(19): siRNA sense strand
ucaucgagcugacgucaug

SEQ ID NO: 1255799 - RNA, 19 nt, Homo sapiens
  misc_RNA (1)...(19): siRNA sense strand
gaugaugguuggcucucuu

SEQ ID NO: 1255800 - RNA, 19 nt, Homo sapiens
  misc_RNA (1)...(19): siRNA sense strand
uuaaugaacauccugcuuu

SEQ ID NO: 1255801 - RNA, 19 nt, Homo sapiens
  misc_RNA (1)...(19): siRNA sense strand
ugaacuaucugaaaacuug

SEQ ID NO: 1255802 - RNA, 19 nt, Homo sapiens
  misc_RNA (1)...(19): siRNA sense strand
gacaagaagaccauugaga

SEQ ID NO: 1255803 - RNA, 19 nt, Homo sapiens
  misc_RNA (1)...(19): siRNA sense strand
caaccgauaccaugagaug

SEQ ID NO: 1255804 - RNA, 19 nt, Homo sapiens
  misc_RNA (1)...(19): siRNA sense strand
ggaccauuaccuagaauau

SEQ ID NO: 1255805 - RNA, 19 nt, Homo sapiens
  misc_RNA (1)...(19): siRNA sense strand
ucgaucugcugucuuguuu

SEQ ID NO: 1255806 - RNA, 19 nt, Homo sapiens
  misc_RNA (1)...(19): siRNA sense strand
cagcagcucacgccaauga

SEQ ID NO: 1255807 - RNA, 19 nt, Homo sapiens
  misc_RNA (1)...(19): siRNA sense strand
agaagaccauugagaaagu

SEQ ID NO: 1255808 - RNA, 19 nt, Homo sapiens
  misc_RNA (1)...(19): siRNA sense strand
gccaauagaggaugauuca

SEQ ID NO: 1255809 - RNA, 19 nt, Homo sapiens
  misc_RNA (1)...(19): siRNA sense strand
cguguccucucucuacuuu

SEQ ID NO: 1255810 - RNA, 19 nt, Homo sapiens
  misc_RNA (1)...(19): siRNA sense strand
ccauaucgcuacaauacca

SEQ ID NO: 1255811 - RNA, 19 nt, Homo sapiens
  misc_RNA (1)...(19): siRNA sense strand
ucagauauccuuccucagu

SEQ ID NO: 1255812 - RNA, 19 nt, Homo sapiens
  misc_RNA (1)...(19): siRNA sense strand
gaggugguccauaaacauu

SEQ ID NO: 1255813 - RNA, 19 nt, Homo sapiens
  misc_RNA (1)...(19): siRNA sense strand
cagcucacgccaaugaaua

SEQ ID NO: 1255814 - RNA, 19 nt, Homo sapiens
  misc_RNA (1)...(19): siRNA sense strand
aauagaggaugauucaaca

SEQ ID NO: 1255815 - RNA, 19 nt, Homo sapiens
  misc_RNA (1)...(19): siRNA sense strand
ggacaugagagcugauauc

SEQ ID NO: 1255816 - RNA, 19 nt, Homo sapiens
  misc_RNA (1)...(19): siRNA sense strand
gguauagcaucggagacua

SEQ ID NO: 1255817 - RNA, 19 nt, Homo sapiens
  misc_RNA (1)...(19): siRNA sense strand
gaagaccauugagaaaguc

SEQ ID NO: 1255818 - RNA, 19 nt, Homo sapiens
  misc_RNA (1)...(19): siRNA sense strand
uauauugucucaacauggu

SEQ ID NO: 1255819 - RNA, 19 nt, Homo sapiens
  misc_RNA (1)...(19): siRNA sense strand
augguuggcucucuucuuu

SEQ ID NO: 1255820 - RNA, 19 nt, Homo sapiens
  misc_RNA (1)...(19): siRNA sense strand
gauuguggauuggccugua

SEQ ID NO: 1255821 - RNA, 19 nt, Homo sapiens
  misc_RNA (1)...(19): siRNA sense strand
ccagcaaggauucauugua

SEQ ID NO: 1255822 - RNA, 19 nt, Homo sapiens
  misc_RNA (1)...(19): siRNA sense strand
ucacuaacaccauccaaau

SEQ ID NO: 1255823 - RNA, 19 nt, Homo sapiens
  misc_RNA (1)...(19): siRNA sense strand
ucagcagucucuucaguuc

SEQ ID NO: 1255824 - RNA, 19 nt, Homo sapiens
  misc_RNA (1)...(19): siRNA sense strand
aaacaagaagcgccaaaga

SEQ ID NO: 1255825 - RNA, 19 nt, Homo sapiens
  misc_RNA (1)...(19): siRNA sense strand
cuacgaaucaaacugcuuu

SEQ ID NO: 1255826 - RNA, 19 nt, Homo sapiens
  misc_RNA (1)...(19): siRNA sense strand
cagcuggcuuugagcauug

SEQ ID NO: 1255827 - RNA, 19 nt, Homo sapiens
  misc_RNA (1)...(19): siRNA sense strand
ccagcuggcuuugagcauu

SEQ ID NO: 1255828 - RNA, 19 nt, Homo sapiens
  misc_RNA (1)...(19): siRNA sense strand
cuaacaccauccaaauaga

SEQ ID NO: 1255829 - RNA, 19 nt, Homo sapiens
  misc_RNA (1)...(19): siRNA sense strand
ccaaagacgccaccacaca

SEQ ID NO: 1255830 - RNA, 19 nt, Homo sapiens
  misc_RNA (1)...(19): siRNA sense strand
cagaggugguccauaaaca

SEQ ID NO: 1255831 - RNA, 19 nt, Homo sapiens
  misc_RNA (1)...(19): siRNA sense strand
gaaaugaacaugaaaaggu

SEQ ID NO: 1255832 - RNA, 19 nt, Homo sapiens
  misc_RNA (1)...(19): siRNA sense strand
gagacuacgaggucauuga

SEQ ID NO: 1255833 - RNA, 19 nt, Homo sapiens
  misc_RNA (1)...(19): siRNA sense strand
ggaggacccagcaaggauu

SEQ ID NO: 1255834 - RNA, 19 nt, Homo sapiens
  misc_RNA (1)...(19): siRNA sense strand
gauauccuuccucaguaua

SEQ ID NO: 1255835 - RNA, 19 nt, Homo sapiens
  misc_RNA (1)...(19): siRNA sense strand
gaugaggugguggcuauuu

SEQ ID NO: 1255836 - RNA, 19 nt, Homo sapiens
  misc_RNA (1)...(19): siRNA sense strand
guacguguccucucucuac

SEQ ID NO: 1255837 - RNA, 19 nt, Homo sapiens
  misc_RNA (1)...(19): siRNA sense strand
gauagugugguggacguua

SEQ ID NO: 1255838 - RNA, 19 nt, Homo sapiens
  misc_RNA (1)...(19): siRNA sense strand
acccuaagcucauaaggau

SEQ ID NO: 1255839 - RNA, 19 nt, Homo sapiens
  misc_RNA (1)...(19): siRNA sense strand
uagaggaugauucaacaaa

SEQ ID NO: 1255840 - RNA, 19 nt, Homo sapiens
  misc_RNA (1)...(19): siRNA sense strand
gaaaagguccucuccaucu

SEQ ID NO: 1255841 - RNA, 19 nt, Homo sapiens
  misc_RNA (1)...(19): siRNA sense strand
agucauggauuauauuguc

SEQ ID NO: 1255842 - RNA, 19 nt, Homo sapiens
  misc_RNA (1)...(19): siRNA sense strand
ggaaacauagcuccuacca

SEQ ID NO: 1255843 - RNA, 19 nt, Homo sapiens
  misc_RNA (1)...(19): siRNA sense strand
cacuaacaccauccaaaua

SEQ ID NO: 1255844 - RNA, 19 nt, Homo sapiens
  misc_RNA (1)...(19): siRNA sense strand
ggugguccauaaacauuca

SEQ ID NO: 1255845 - RNA, 19 nt, Homo sapiens
  misc_RNA (1)...(19): siRNA sense strand
ggauauuacguuguucaaa

SEQ ID NO: 1255846 - RNA, 19 nt, Homo sapiens
  misc_RNA (1)...(19): siRNA sense strand
uuaccaugcuggagaaagu

SEQ ID NO: 1255847 - RNA, 19 nt, Homo sapiens
  misc_RNA (1)...(19): siRNA sense strand
gauaucuguguucaucuaa

SEQ ID NO: 1255848 - RNA, 19 nt, Homo sapiens
  misc_RNA (1)...(19): siRNA sense strand
cagcaaauguaugccaaca

SEQ ID NO: 1255849 - RNA, 19 nt, Homo sapiens
  misc_RNA (1)...(19): siRNA sense strand
ugucuuguuuaccuuauga

SEQ ID NO: 1255850 - RNA, 19 nt, Homo sapiens
  misc_RNA (1)...(19): siRNA sense strand
caaagacgccaccacacau

SEQ ID NO: 1255851 - RNA, 19 nt, Homo sapiens
  misc_RNA (1)...(19): siRNA sense strand
uguaaacucucuggauauc

SEQ ID NO: 1255852 - RNA, 19 nt, Homo sapiens
  misc_RNA (1)...(19): siRNA sense strand
uaaugaacauccugcuuuu

SEQ ID NO: 1255853 - RNA, 19 nt, Homo sapiens
  misc_RNA (1)...(19): siRNA sense strand
gagagcugauaucuguguu

SEQ ID NO: 1255854 - RNA, 19 nt, Homo sapiens
  misc_RNA (1)...(19): siRNA sense strand
ugaauaauguacgggacuu

SEQ ID NO: 1255855 - RNA, 19 nt, Homo sapiens
  misc_RNA (1)...(19): siRNA sense strand
augagaugcugaauaaugu

SEQ ID NO: 1255856 - RNA, 19 nt, Homo sapiens
  misc_RNA (1)...(19): siRNA sense strand
ucucucuacuuuaccauga

SEQ ID NO: 1255857 - RNA, 19 nt, Homo sapiens
  misc_RNA (1)...(19): siRNA sense strand
aaacagaggugguccauaa

SEQ ID NO: 1255858 - RNA, 19 nt, Homo sapiens
  misc_RNA (1)...(19): siRNA sense strand
cuaggaaacuggaccauua

SEQ ID NO: 1255859 - RNA, 19 nt, Homo sapiens
  misc_RNA (1)...(19): siRNA sense strand
acaaauagccgaaguguuu

SEQ ID NO: 1255860 - RNA, 19 nt, Homo sapiens
  misc_RNA (1)...(19): siRNA sense strand
caugagagcugauaucugu

SEQ ID NO: 1255861 - RNA, 19 nt, Homo sapiens
  misc_RNA (1)...(19): siRNA sense strand
ggaauugacugacaagaag

SEQ ID NO: 1255862 - RNA, 19 nt, Homo sapiens
  misc_RNA (1)...(19): siRNA sense strand
cauaggauuuggaaacaua

SEQ ID NO: 1255863 - RNA, 19 nt, Homo sapiens
  misc_RNA (1)...(19): siRNA sense strand
ggacgaaauuugcccgauu

SEQ ID NO: 1255864 - RNA, 19 nt, Homo sapiens
  misc_RNA (1)...(19): siRNA sense strand
ggauuggccuguaguuuau

SEQ ID NO: 1255865 - RNA, 19 nt, Homo sapiens
  misc_RNA (1)...(19): siRNA sense strand
guggagaggucauuucuga

SEQ ID NO: 1255866 - RNA, 19 nt, Homo sapiens
  misc_RNA (1)...(19): siRNA sense strand
ccauaaacauucaagacua

SEQ ID NO: 1255867 - RNA, 19 nt, Homo sapiens
  misc_RNA (1)...(19): siRNA sense strand
gagcugacgucaugcagaa

SEQ ID NO: 1255868 - RNA, 19 nt, Homo sapiens
  misc_RNA (1)...(19): siRNA sense strand
ucaaggauauuacguuguu

SEQ ID NO: 1255869 - RNA, 19 nt, Homo sapiens
  misc_RNA (1)...(19): siRNA sense strand
gaaacuggaccauuaccua

SEQ ID NO: 1255870 - RNA, 19 nt, Homo sapiens
  misc_RNA (1)...(19): siRNA sense strand
gauauuacguuguucaaac

SEQ ID NO: 1255871 - RNA, 19 nt, Homo sapiens
  misc_RNA (1)...(19): siRNA sense strand
gaaauuugcccgauugaca

SEQ ID NO: 1255872 - RNA, 19 nt, Homo sapiens
  misc_RNA (1)...(19): siRNA sense strand
accaugagaugcugaauaa

SEQ ID NO: 1255873 - RNA, 19 nt, Homo sapiens
  misc_RNA (1)...(19): siRNA sense strand
caagaagaccauugagaaa

SEQ ID NO: 1255874 - RNA, 19 nt, Homo sapiens
  misc_RNA (1)...(19): siRNA sense strand
aaacaaagcagaacaacau

SEQ ID NO: 1255875 - RNA, 19 nt, Homo sapiens
  misc_RNA (1)...(19): siRNA sense strand
cagauauccuuccucagua

SEQ ID NO: 1255876 - RNA, 19 nt, Homo sapiens
  misc_RNA (1)...(19): siRNA sense strand
gacgaaauuugcccgauug

SEQ ID NO: 1255877 - RNA, 19 nt, Homo sapiens
  misc_RNA (1)...(19): siRNA sense strand
cagcaaggauucauuguac

SEQ ID NO: 1255878 - RNA, 19 nt, Homo sapiens
  misc_RNA (1)...(19): siRNA sense strand
gcugauaucuguguucauc

SEQ ID NO: 1255879 - RNA, 19 nt, Homo sapiens
  misc_RNA (1)...(19): siRNA sense strand
gugagcgagucauggauua

SEQ ID NO: 1255880 - RNA, 19 nt, Homo sapiens
  misc_RNA (1)...(19): siRNA sense strand
ggaaucagcagucucuuca

SEQ ID NO: 1255881 - RNA, 19 nt, Homo sapiens
  misc_RNA (1)...(19): siRNA sense strand
ugacaagccuuacaaccau

SEQ ID NO: 1255882 - RNA, 19 nt, Homo sapiens
  misc_RNA (1)...(19): siRNA sense strand
gacaagccuuacaaccaua

SEQ ID NO: 1255883 - RNA, 19 nt, Homo sapiens
  misc_RNA (1)...(19): siRNA sense strand
gaucugcugucuuguuuac

SEQ ID NO: 1255884 - RNA, 19 nt, Homo sapiens
  misc_RNA (1)...(19): siRNA sense strand
uuuguaaacucucuggaua

SEQ ID NO: 1255885 - RNA, 19 nt, Homo sapiens
  misc_RNA (1)...(19): siRNA sense strand
uggauuggccuguaguuua

SEQ ID NO: 1255886 - RNA, 19 nt, Homo sapiens
  misc_RNA (1)...(19): siRNA sense strand
gagcugauaucuguguuca

SEQ ID NO: 1255887 - RNA, 19 nt, Homo sapiens
  misc_RNA (1)...(19): siRNA sense strand
cauaaacauucaagacuag

SEQ ID NO: 1255888 - RNA, 19 nt, Homo sapiens
  misc_RNA (1)...(19): siRNA sense strand
ugauaucuguguucaucua

SEQ ID NO: 1255889 - RNA, 19 nt, Homo sapiens
  misc_RNA (1)...(19): siRNA sense strand
gguuggcucucuucuuuau

SEQ ID NO: 1255890 - RNA, 19 nt, Homo sapiens
  misc_RNA (1)...(19): siRNA sense strand
ggccuguaguuuauaguaa

SEQ ID NO: 1255891 - RNA, 19 nt, Homo sapiens
  misc_RNA (1)...(19): siRNA sense strand
acaagaagaccauugagaa

SEQ ID NO: 1255892 - RNA, 19 nt, Homo sapiens
  misc_RNA (1)...(19): siRNA sense strand
gggaauugacugacaagaa

SEQ ID NO: 1255893 - RNA, 19 nt, Homo sapiens
  misc_RNA (1)...(19): siRNA sense strand
caaaaggcauugauacaga

SEQ ID NO: 1255894 - RNA, 19 nt, Homo sapiens
  misc_RNA (1)...(19): siRNA sense strand
gagcgagucauggauuaua

SEQ ID NO: 1255895 - RNA, 19 nt, Homo sapiens
  misc_RNA (1)...(19): siRNA sense strand
caugagaugcugaauaaug

SEQ ID NO: 1255896 - RNA, 19 nt, Homo sapiens
  misc_RNA (1)...(19): siRNA sense strand
uaaacucucuggauaucau

SEQ ID NO: 1255897 - RNA, 19 nt, Homo sapiens
  misc_RNA (1)...(19): siRNA sense strand
ugaucgaucugcugucuug

SEQ ID NO: 1255898 - RNA, 19 nt, Homo sapiens
  misc_RNA (1)...(19): siRNA sense strand
ucaucgagcugacgucaug

SEQ ID NO: 1255899 - RNA, 19 nt, Homo sapiens
  misc_RNA (1)...(19): siRNA sense strand
gaugaugguuggcucucuu

SEQ ID NO: 1255900 - RNA, 19 nt, Homo sapiens
  misc_RNA (1)...(19): siRNA sense strand
uuaaugaacauccugcuuu

SEQ ID NO: 1255901 - RNA, 19 nt, Homo sapiens
  misc_RNA (1)...(19): siRNA sense strand
ugaacuaucugaaaacuug

SEQ ID NO: 1255902 - RNA, 19 nt, Homo sapiens
  misc_RNA (1)...(19): siRNA sense strand
gacaagaagaccauugaga

SEQ ID NO: 1255903 - RNA, 19 nt, Homo sapiens
  misc_RNA (1)...(19): siRNA sense strand
caaccgauaccaugagaug

SEQ ID NO: 1255904 - RNA, 19 nt, Homo sapiens
  misc_RNA (1)...(19): siRNA sense strand
ggaccauuaccuagaauau

SEQ ID NO: 1255905 - RNA, 19 nt, Homo sapiens
  misc_RNA (1)...(19): siRNA sense strand
ucgaucugcugucuuguuu

SEQ ID NO: 1255906 - RNA, 19 nt, Homo sapiens
  misc_RNA (1)...(19): siRNA sense strand
cagcagcucacgccaauga

SEQ ID NO: 1255907 - RNA, 19 nt, Homo sapiens
  misc_RNA (1)...(19): siRNA sense strand
agaagaccauugagaaagu

SEQ ID NO: 1255908 - RNA, 19 nt, Homo sapiens
  misc_RNA (1)...(19): siRNA sense strand
gccaauagaggaugauuca

SEQ ID NO: 1255909 - RNA, 19 nt, Homo sapiens
  misc_RNA (1)...(19): siRNA sense strand
cguguccucucucuacuuu

SEQ ID NO: 1255910 - RNA, 19 nt, Homo sapiens
  misc_RNA (1)...(19): siRNA sense strand
ccauaucgcuacaauacca

SEQ ID NO: 1255911 - RNA, 19 nt, Homo sapiens
  misc_RNA (1)...(19): siRNA sense strand
ucagauauccuuccucagu

SEQ ID NO: 1255912 - RNA, 19 nt, Homo sapiens
  misc_RNA (1)...(19): siRNA sense strand
gaggugguccauaaacauu

SEQ ID NO: 1255913 - RNA, 19 nt, Homo sapiens
  misc_RNA (1)...(19): siRNA sense strand
cagcucacgccaaugaaua

SEQ ID NO: 1255914 - RNA, 19 nt, Homo sapiens
  misc_RNA (1)...(19): siRNA sense strand
aauagaggaugauucaaca

SEQ ID NO: 1255915 - RNA, 19 nt, Homo sapiens
  misc_RNA (1)...(19): siRNA sense strand
ggacaugagagcugauauc

SEQ ID NO: 1255916 - RNA, 19 nt, Homo sapiens
  misc_RNA (1)...(19): siRNA sense strand
gguauagcaucggagacua

SEQ ID NO: 1255917 - RNA, 19 nt, Homo sapiens
  misc_RNA (1)...(19): siRNA sense strand
gaagaccauugagaaaguc

SEQ ID NO: 1255918 - RNA, 19 nt, Homo sapiens
  misc_RNA (1)...(19): siRNA sense strand
uauauugucucaacauggu

SEQ ID NO: 1255919 - RNA, 19 nt, Homo sapiens
  misc_RNA (1)...(19): siRNA sense strand
augguuggcucucuucuuu

SEQ ID NO: 1255920 - RNA, 19 nt, Homo sapiens
  misc_RNA (1)...(19): siRNA sense strand
gauuguggauuggccugua

SEQ ID NO: 1255921 - RNA, 19 nt, Homo sapiens
  misc_RNA (1)...(19): siRNA sense strand
ccagcaaggauucauugua

SEQ ID NO: 1255922 - RNA, 19 nt, Homo sapiens
  misc_RNA (1)...(19): siRNA sense strand
ucacuaacaccauccaaau

SEQ ID NO: 1255923 - RNA, 19 nt, Homo sapiens
  misc_RNA (1)...(19): siRNA sense strand
ucagcagucucuucaguuc

SEQ ID NO: 1255924 - RNA, 19 nt, Homo sapiens
  misc_RNA (1)...(19): siRNA sense strand
aaacaagaagcgccaaaga

SEQ ID NO: 1255925 - RNA, 19 nt, Homo sapiens
  misc_RNA (1)...(19): siRNA sense strand
cuacgaaucaaacugcuuu

SEQ ID NO: 1255926 - RNA, 19 nt, Homo sapiens
  misc_RNA (1)...(19): siRNA sense strand
cagcuggcuuugagcauug

SEQ ID NO: 1255927 - RNA, 19 nt, Homo sapiens
  misc_RNA (1)...(19): siRNA sense strand
ccagcuggcuuugagcauu

SEQ ID NO: 1255928 - RNA, 19 nt, Homo sapiens
  misc_RNA (1)...(19): siRNA sense strand
cuaacaccauccaaauaga

SEQ ID NO: 1255929 - RNA, 19 nt, Homo sapiens
  misc_RNA (1)...(19): siRNA sense strand
ccaaagacgccaccacaca

SEQ ID NO: 1255930 - RNA, 19 nt, Homo sapiens
  misc_RNA (1)...(19): siRNA sense strand
cagaggugguccauaaaca

SEQ ID NO: 1255931 - RNA, 19 nt, Homo sapiens
  misc_RNA (1)...(19): siRNA sense strand
gaaaugaacaugaaaaggu

SEQ ID NO: 1255932 - RNA, 19 nt, Homo sapiens
  misc_RNA (1)...(19): siRNA sense strand
gagacuacgaggucauuga

SEQ ID NO: 1255933 - RNA, 19 nt, Homo sapiens
  misc_RNA (1)...(19): siRNA sense strand
ggaggacccagcaaggauu

SEQ ID NO: 1255934 - RNA, 19 nt, Homo sapiens
  misc_RNA (1)...(19): siRNA sense strand
gauauccuuccucaguaua

SEQ ID NO: 1255935 - RNA, 19 nt, Homo sapiens
  misc_RNA (1)...(19): siRNA sense strand
gaugaggugguggcuauuu

SEQ ID NO: 1255936 - RNA, 19 nt, Homo sapiens
  misc_RNA (1)...(19): siRNA sense strand
guacguguccucucucuac

SEQ ID NO: 1255937 - RNA, 19 nt, Homo sapiens
  misc_RNA (1)...(19): siRNA sense strand
gauagugugguggacguua

SEQ ID NO: 1255938 - RNA, 19 nt, Homo sapiens
  misc_RNA (1)...(19): siRNA sense strand
acccuaagcucauaaggau

SEQ ID NO: 1255939 - RNA, 19 nt, Homo sapiens
  misc_RNA (1)...(19): siRNA sense strand
uagaggaugauucaacaaa

SEQ ID NO: 1255940 - RNA, 19 nt, Homo sapiens
  misc_RNA (1)...(19): siRNA sense strand
gaaaagguccucuccaucu

SEQ ID NO: 1255941 - RNA, 19 nt, Homo sapiens
  misc_RNA (1)...(19): siRNA sense strand
agucauggauuauauuguc

SEQ ID NO: 1255942 - RNA, 19 nt, Homo sapiens
  misc_RNA (1)...(19): siRNA sense strand
ggaaacauagcuccuacca

SEQ ID NO: 1255943 - RNA, 19 nt, Homo sapiens
  misc_RNA (1)...(19): siRNA sense strand
cacuaacaccauccaaaua

SEQ ID NO: 1255944 - RNA, 19 nt, Homo sapiens
  misc_RNA (1)...(19): siRNA sense strand
ggugguccauaaacauuca

SEQ ID NO: 1255945 - RNA, 19 nt, Homo sapiens
  misc_RNA (1)...(19): siRNA sense strand
ggauauuacguuguucaaa

SEQ ID NO: 1255946 - RNA, 19 nt, Homo sapiens
  misc_RNA (1)...(19): siRNA sense strand
uuaccaugcuggagaaagu

SEQ ID NO: 1255947 - RNA, 19 nt, Homo sapiens
  misc_RNA (1)...(19): siRNA sense strand
gauaucuguguucaucuaa

SEQ ID NO: 1255948 - RNA, 19 nt, Homo sapiens
  misc_RNA (1)...(19): siRNA sense strand
cagcaaauguaugccaaca

SEQ ID NO: 1255949 - RNA, 19 nt, Homo sapiens
  misc_RNA (1)...(19): siRNA sense strand
ugucuuguuuaccuuauga

SEQ ID NO: 1255950 - RNA, 19 nt, Homo sapiens
  misc_RNA (1)...(19): siRNA sense strand
caaagacgccaccacacau

SEQ ID NO: 1255951 - RNA, 19 nt, Homo sapiens
  misc_RNA (1)...(19): siRNA sense strand
uguaaacucucuggauauc

SEQ ID NO: 1255952 - RNA, 19 nt, Homo sapiens
  misc_RNA (1)...(19): siRNA sense strand
uaaugaacauccugcuuuu

SEQ ID NO: 1255953 - RNA, 19 nt, Homo sapiens
  misc_RNA (1)...(19): siRNA sense strand
gagagcugauaucuguguu

SEQ ID NO: 1255954 - RNA, 19 nt, Homo sapiens
  misc_RNA (1)...(19): siRNA sense strand
ugaauaauguacgggacuu

SEQ ID NO: 1255955 - RNA, 19 nt, Homo sapiens
  misc_RNA (1)...(19): siRNA sense strand
augagaugcugaauaaugu

SEQ ID NO: 1255956 - RNA, 19 nt, Homo sapiens
  misc_RNA (1)...(19): siRNA sense strand
ucucucuacuuuaccauga

SEQ ID NO: 1255957 - RNA, 19 nt, Homo sapiens
  misc_RNA (1)...(19): siRNA sense strand
aaacagaggugguccauaa

SEQ ID NO: 1255958 - RNA, 19 nt, Homo sapiens
  misc_RNA (1)...(19): siRNA sense strand
cuaggaaacuggaccauua

SEQ ID NO: 1255959 - RNA, 19 nt, Homo sapiens
  misc_RNA (1)...(19): siRNA sense strand
acaaauagccgaaguguuu

SEQ ID NO: 1255960 - RNA, 19 nt, Homo sapiens
  misc_RNA (1)...(19): siRNA sense strand
caugagagcugauaucugu

SEQ ID NO: 1255961 - RNA, 19 nt, Homo sapiens
  misc_RNA (1)...(19): siRNA sense strand
ggaauugacugacaagaag

SEQ ID NO: 1255962 - RNA, 19 nt, Homo sapiens
  misc_RNA (1)...(19): siRNA sense strand
cauaggauuuggaaacaua

SEQ ID NO: 1255963 - RNA, 19 nt, Homo sapiens
  misc_RNA (1)...(19): siRNA sense strand
ggacgaaauuugcccgauu

SEQ ID NO: 1255964 - RNA, 19 nt, Homo sapiens
  misc_RNA (1)...(19): siRNA sense strand
ccauaaacauucaagacua

SEQ ID NO: 1255965 - RNA, 19 nt, Homo sapiens
  misc_RNA (1)...(19): siRNA sense strand
guggagaggucauuucuga

SEQ ID NO: 1255966 - RNA, 19 nt, Homo sapiens
  misc_RNA (1)...(19): siRNA sense strand
ucaaggauauuacguuguu

SEQ ID NO: 1255967 - RNA, 19 nt, Homo sapiens
  misc_RNA (1)...(19): siRNA sense strand
gaaacuggaccauuaccua

SEQ ID NO: 1255968 - RNA, 19 nt, Homo sapiens
  misc_RNA (1)...(19): siRNA sense strand
gauauuacguuguucaaac

SEQ ID NO: 1255969 - RNA, 19 nt, Homo sapiens
  misc_RNA (1)...(19): siRNA sense strand
gaaauuugcccgauugaca

SEQ ID NO: 1255970 - RNA, 19 nt, Homo sapiens
  misc_RNA (1)...(19): siRNA sense strand
accaugagaugcugaauaa

SEQ ID NO: 1255971 - RNA, 19 nt, Homo sapiens
  misc_RNA (1)...(19): siRNA sense strand
caagaagaccauugagaaa

SEQ ID NO: 1255972 - RNA, 19 nt, Homo sapiens
  misc_RNA (1)...(19): siRNA sense strand
aaacaaagcagaacaacau

SEQ ID NO: 1255973 - RNA, 19 nt, Homo sapiens
  misc_RNA (1)...(19): siRNA sense strand
cagauauccuuccucagua

SEQ ID NO: 1255974 - RNA, 19 nt, Homo sapiens
  misc_RNA (1)...(19): siRNA sense strand
gacgaaauuugcccgauug

SEQ ID NO: 1255975 - RNA, 19 nt, Homo sapiens
  misc_RNA (1)...(19): siRNA sense strand
cagcaaggauucauuguac

SEQ ID NO: 1255976 - RNA, 19 nt, Homo sapiens
  misc_RNA (1)...(19): siRNA sense strand
gcugauaucuguguucauc

SEQ ID NO: 1255977 - RNA, 19 nt, Homo sapiens
  misc_RNA (1)...(19): siRNA sense strand
gugagcgagucauggauua

SEQ ID NO: 1255978 - RNA, 19 nt, Homo sapiens
  misc_RNA (1)...(19): siRNA sense strand
ggaaucagcagucucuuca

SEQ ID NO: 1255979 - RNA, 19 nt, Homo sapiens
  misc_RNA (1)...(19): siRNA sense strand
ugacaagccuuacaaccau

SEQ ID NO: 1255980 - RNA, 19 nt, Homo sapiens
  misc_RNA (1)...(19): siRNA sense strand
gacaagccuuacaaccaua

SEQ ID NO: 1255981 - RNA, 19 nt, Homo sapiens
  misc_RNA (1)...(19): siRNA sense strand
gaucugcugucuuguuuac

SEQ ID NO: 1255982 - RNA, 19 nt, Homo sapiens
  misc_RNA (1)...(19): siRNA sense strand
gagcugauaucuguguuca

SEQ ID NO: 1255983 - RNA, 19 nt, Homo sapiens
  misc_RNA (1)...(19): siRNA sense strand
cauaaacauucaagacuag

SEQ ID NO: 1255984 - RNA, 19 nt, Homo sapiens
  misc_RNA (1)...(19): siRNA sense strand
ugauaucuguguucaucua

SEQ ID NO: 1255985 - RNA, 19 nt, Homo sapiens
  misc_RNA (1)...(19): siRNA sense strand
gguuggcucucuucuuuau

SEQ ID NO: 1255986 - RNA, 19 nt, Homo sapiens
  misc_RNA (1)...(19): siRNA sense strand
acaagaagaccauugagaa

SEQ ID NO: 1255987 - RNA, 19 nt, Homo sapiens
  misc_RNA (1)...(19): siRNA sense strand
ugaucgaucugcugucuug

SEQ ID NO: 1255988 - RNA, 19 nt, Homo sapiens
  misc_RNA (1)...(19): siRNA sense strand
caaaaggcauugauacaga

SEQ ID NO: 1255989 - RNA, 19 nt, Homo sapiens
  misc_RNA (1)...(19): siRNA sense strand
gagcgagucauggauuaua

SEQ ID NO: 1255990 - RNA, 19 nt, Homo sapiens
  misc_RNA (1)...(19): siRNA sense strand
caugagaugcugaauaaug

SEQ ID NO: 1255991 - RNA, 19 nt, Homo sapiens
  misc_RNA (1)...(19): siRNA sense strand
gggaauugacugacaagaa

SEQ ID NO: 1255992 - RNA, 19 nt, Homo sapiens
  misc_RNA (1)...(19): siRNA sense strand
gaugaugguuggcucucuu

SEQ ID NO: 1255993 - RNA, 19 nt, Homo sapiens
  misc_RNA (1)...(19): siRNA sense strand
uuaaugaacauccugcuuu

SEQ ID NO: 1255994 - RNA, 19 nt, Homo sapiens
  misc_RNA (1)...(19): siRNA sense strand
ugaacuaucugaaaacuug

SEQ ID NO: 1255995 - RNA, 19 nt, Homo sapiens
  misc_RNA (1)...(19): siRNA sense strand
cagcagcucacgccaauga

SEQ ID NO: 1255996 - RNA, 19 nt, Homo sapiens
  misc_RNA (1)...(19): siRNA sense strand
gacaagaagaccauugaga

SEQ ID NO: 1255997 - RNA, 19 nt, Homo sapiens
  misc_RNA (1)...(19): siRNA sense strand
caaccgauaccaugagaug

SEQ ID NO: 1255998 - RNA, 19 nt, Homo sapiens
  misc_RNA (1)...(19): siRNA sense strand
agaagaccauugagaaagu

SEQ ID NO: 1255999 - RNA, 19 nt, Homo sapiens
  misc_RNA (1)...(19): siRNA sense strand
ggaccauuaccuagaauau

SEQ ID NO: 1256000 - RNA, 19 nt, Homo sapiens
  misc_RNA (1)...(19): siRNA sense strand
ucgaucugcugucuuguuu

SEQ ID NO: 1256001 - RNA, 19 nt, Homo sapiens
  misc_RNA (1)...(19): siRNA sense strand
gccaauagaggaugauuca

SEQ ID NO: 1256002 - RNA, 19 nt, Homo sapiens
  misc_RNA (1)...(19): siRNA sense strand
cguguccucucucuacuuu

SEQ ID NO: 1256003 - RNA, 19 nt, Homo sapiens
  misc_RNA (1)...(19): siRNA sense strand
ccauaucgcuacaauacca

SEQ ID NO: 1256004 - RNA, 19 nt, Homo sapiens
  misc_RNA (1)...(19): siRNA sense strand
ucagauauccuuccucagu

SEQ ID NO: 1256005 - RNA, 19 nt, Homo sapiens
  misc_RNA (1)...(19): siRNA sense strand
gaggugguccauaaacauu

SEQ ID NO: 1256006 - RNA, 19 nt, Homo sapiens
  misc_RNA (1)...(19): siRNA sense strand
cagcucacgccaaugaaua

SEQ ID NO: 1256007 - RNA, 19 nt, Homo sapiens
  misc_RNA (1)...(19): siRNA sense strand
aauagaggaugauucaaca

SEQ ID NO: 1256008 - RNA, 19 nt, Homo sapiens
  misc_RNA (1)...(19): siRNA sense strand
ggacaugagagcugauauc

SEQ ID NO: 1256009 - RNA, 19 nt, Homo sapiens
  misc_RNA (1)...(19): siRNA sense strand
gguauagcaucggagacua

SEQ ID NO: 1256010 - RNA, 19 nt, Homo sapiens
  misc_RNA (1)...(19): siRNA sense strand
aaacaagaagcgccaaaga

SEQ ID NO: 1256011 - RNA, 19 nt, Homo sapiens
  misc_RNA (1)...(19): siRNA sense strand
uauauugucucaacauggu

SEQ ID NO: 1256012 - RNA, 19 nt, Homo sapiens
  misc_RNA (1)...(19): siRNA sense strand
augguuggcucucuucuuu

SEQ ID NO: 1256013 - RNA, 19 nt, Homo sapiens
  misc_RNA (1)...(19): siRNA sense strand
ccagcaaggauucauugua

SEQ ID NO: 1256014 - RNA, 19 nt, Homo sapiens
  misc_RNA (1)...(19): siRNA sense strand
ucacuaacaccauccaaau

SEQ ID NO: 1256015 - RNA, 19 nt, Homo sapiens
  misc_RNA (1)...(19): siRNA sense strand
ucagcagucucuucaguuc

SEQ ID NO: 1256016 - RNA, 19 nt, Homo sapiens
  misc_RNA (1)...(19): siRNA sense strand
gaagaccauugagaaaguc

SEQ ID NO: 1256017 - RNA, 19 nt, Homo sapiens
  misc_RNA (1)...(19): siRNA sense strand
cagaggugguccauaaaca

SEQ ID NO: 1256018 - RNA, 19 nt, Homo sapiens
  misc_RNA (1)...(19): siRNA sense strand
cagcuggcuuugagcauug

SEQ ID NO: 1256019 - RNA, 19 nt, Homo sapiens
  misc_RNA (1)...(19): siRNA sense strand
ccagcuggcuuugagcauu

SEQ ID NO: 1256020 - RNA, 19 nt, Homo sapiens
  misc_RNA (1)...(19): siRNA sense strand
cuaacaccauccaaauaga

SEQ ID NO: 1256021 - RNA, 19 nt, Homo sapiens
  misc_RNA (1)...(19): siRNA sense strand
cuacgaaucaaacugcuuu

SEQ ID NO: 1256022 - RNA, 19 nt, Homo sapiens
  misc_RNA (1)...(19): siRNA sense strand
gaaaugaacaugaaaaggu

SEQ ID NO: 1256023 - RNA, 19 nt, Homo sapiens
  misc_RNA (1)...(19): siRNA sense strand
ccaaagacgccaccacaca

SEQ ID NO: 1256024 - RNA, 19 nt, Homo sapiens
  misc_RNA (1)...(19): siRNA sense strand
gagacuacgaggucauuga

SEQ ID NO: 1256025 - RNA, 19 nt, Homo sapiens
  misc_RNA (1)...(19): siRNA sense strand
ggaggacccagcaaggauu

SEQ ID NO: 1256026 - RNA, 19 nt, Homo sapiens
  misc_RNA (1)...(19): siRNA sense strand
gauauccuuccucaguaua

SEQ ID NO: 1256027 - RNA, 19 nt, Homo sapiens
  misc_RNA (1)...(19): siRNA sense strand
gaugaggugguggcuauuu

SEQ ID NO: 1256028 - RNA, 19 nt, Homo sapiens
  misc_RNA (1)...(19): siRNA sense strand
guacguguccucucucuac

SEQ ID NO: 1256029 - RNA, 19 nt, Homo sapiens
  misc_RNA (1)...(19): siRNA sense strand
gauagugugguggacguua

SEQ ID NO: 1256030 - RNA, 19 nt, Homo sapiens
  misc_RNA (1)...(19): siRNA sense strand
acccuaagcucauaaggau

SEQ ID NO: 1256031 - RNA, 19 nt, Homo sapiens
  misc_RNA (1)...(19): siRNA sense strand
uagaggaugauucaacaaa

SEQ ID NO: 1256032 - RNA, 19 nt, Homo sapiens
  misc_RNA (1)...(19): siRNA sense strand
gaaaagguccucuccaucu

SEQ ID NO: 1256033 - RNA, 19 nt, Homo sapiens
  misc_RNA (1)...(19): siRNA sense strand
agucauggauuauauuguc

SEQ ID NO: 1256034 - RNA, 19 nt, Homo sapiens
  misc_RNA (1)...(19): siRNA sense strand
ggaaacauagcuccuacca

SEQ ID NO: 1256035 - RNA, 19 nt, Homo sapiens
  misc_RNA (1)...(19): siRNA sense strand
cacuaacaccauccaaaua

SEQ ID NO: 1256036 - RNA, 19 nt, Homo sapiens
  misc_RNA (1)...(19): siRNA sense strand
ggugguccauaaacauuca

SEQ ID NO: 1256037 - RNA, 19 nt, Homo sapiens
  misc_RNA (1)...(19): siRNA sense strand
ggauauuacguuguucaaa

SEQ ID NO: 1256038 - RNA, 19 nt, Homo sapiens
  misc_RNA (1)...(19): siRNA sense strand
uuaccaugcuggagaaagu

SEQ ID NO: 1256039 - RNA, 19 nt, Homo sapiens
  misc_RNA (1)...(19): siRNA sense strand
gauaucuguguucaucuaa

SEQ ID NO: 1256040 - RNA, 19 nt, Homo sapiens
  misc_RNA (1)...(19): siRNA sense strand
cagcaaauguaugccaaca

SEQ ID NO: 1256041 - RNA, 19 nt, Homo sapiens
  misc_RNA (1)...(19): siRNA sense strand
ugucuuguuuaccuuauga

SEQ ID NO: 1256042 - RNA, 19 nt, Homo sapiens
  misc_RNA (1)...(19): siRNA sense strand
caaagacgccaccacacau

SEQ ID NO: 1256043 - RNA, 19 nt, Homo sapiens
  misc_RNA (1)...(19): siRNA sense strand
caauagaggaugauucaac

SEQ ID NO: 1256044 - RNA, 19 nt, Homo sapiens
  misc_RNA (1)...(19): siRNA sense strand
uaaugaacauccugcuuuu

SEQ ID NO: 1256045 - RNA, 19 nt, Homo sapiens
  misc_RNA (1)...(19): siRNA sense strand
gagagcugauaucuguguu

SEQ ID NO: 1256046 - RNA, 19 nt, Homo sapiens
  misc_RNA (1)...(19): siRNA sense strand
ugaauaauguacgggacuu

SEQ ID NO: 1256047 - RNA, 19 nt, Homo sapiens
  misc_RNA (1)...(19): siRNA sense strand
augagaugcugaauaaugu

SEQ ID NO: 1256048 - RNA, 19 nt, Homo sapiens
  misc_RNA (1)...(19): siRNA sense strand
ucucucuacuuuaccauga

SEQ ID NO: 1256049 - RNA, 19 nt, Homo sapiens
  misc_RNA (1)...(19): siRNA sense strand
gcagucucuucaguucuuu

SEQ ID NO: 1256050 - RNA, 19 nt, Homo sapiens
  misc_RNA (1)...(19): siRNA sense strand
aaucagcagucucuucagu

SEQ ID NO: 1256051 - RNA, 19 nt, Homo sapiens
  misc_RNA (1)...(19): siRNA sense strand
agauauccuuccucaguau

SEQ ID NO: 1256052 - RNA, 19 nt, Homo sapiens
  misc_RNA (1)...(19): siRNA sense strand
guagaguuccaaaccauuc

SEQ ID NO: 1256053 - RNA, 19 nt, Homo sapiens
  misc_RNA (1)...(19): siRNA sense strand
ggauuauauugucucaaca

SEQ ID NO: 1256054 - RNA, 19 nt, Homo sapiens
  misc_RNA (1)...(19): siRNA sense strand
uggauuauauugucucaac

SEQ ID NO: 1256055 - RNA, 19 nt, Homo sapiens
  misc_RNA (1)...(19): siRNA sense strand
gacccuaagcucauaagga

SEQ ID NO: 1256056 - RNA, 19 nt, Homo sapiens
  misc_RNA (1)...(19): siRNA sense strand
gggauugggugauuuuaau

SEQ ID NO: 1256057 - RNA, 19 nt, Homo sapiens
  misc_RNA (1)...(19): siRNA sense strand
gaacauagcuauagaagug

SEQ ID NO: 1256058 - RNA, 19 nt, Homo sapiens
  misc_RNA (1)...(19): siRNA sense strand
gaaaugaacugcaggaaga

SEQ ID NO: 1256059 - RNA, 19 nt, Homo sapiens
  misc_RNA (1)...(19): siRNA sense strand
ggaagaaacuaaugagaaa

SEQ ID NO: 1256060 - RNA, 19 nt, Homo sapiens
  misc_RNA (1)...(19): siRNA sense strand
gaaggaauaugcaggcaaa

SEQ ID NO: 1256061 - RNA, 19 nt, Homo sapiens
  misc_RNA (1)...(19): siRNA sense strand
gacaauacauuacgucauu

SEQ ID NO: 1256062 - RNA, 19 nt, Homo sapiens
  misc_RNA (1)...(19): siRNA sense strand
gggcauaggcuaccauuua

SEQ ID NO: 1256063 - RNA, 19 nt, Homo sapiens
  misc_RNA (1)...(19): siRNA sense strand
gaaaucagacagaguaauu

SEQ ID NO: 1256064 - RNA, 19 nt, Homo sapiens
  misc_RNA (1)...(19): siRNA sense strand
ggaaaggacaaacaaauuu

SEQ ID NO: 1256065 - RNA, 19 nt, Homo sapiens
  misc_RNA (1)...(19): siRNA sense strand
gagaaaggauccuguguuc

SEQ ID NO: 1256066 - RNA, 19 nt, Homo sapiens
  misc_RNA (1)...(19): siRNA sense strand
aagaauggcugauauagaa

SEQ ID NO: 1256067 - RNA, 19 nt, Homo sapiens
  misc_RNA (1)...(19): siRNA sense strand
gcagagauccugaggcuuu

SEQ ID NO: 1256068 - RNA, 19 nt, Homo sapiens
  misc_RNA (1)...(19): siRNA sense strand
gaugauaacuggagacaca

SEQ ID NO: 1256069 - RNA, 19 nt, Homo sapiens
  misc_RNA (1)...(19): siRNA sense strand
gaaagaagccaucagaauc

SEQ ID NO: 1256070 - RNA, 19 nt, Homo sapiens
  misc_RNA (1)...(19): siRNA sense strand
gauccuguguucagaauuu

SEQ ID NO: 1256071 - RNA, 19 nt, Homo sapiens
  misc_RNA (1)...(19): siRNA sense strand
gcagugagagucaucuuua

SEQ ID NO: 1256072 - RNA, 19 nt, Homo sapiens
  misc_RNA (1)...(19): siRNA sense strand
gaaagaaugagaacaguga

SEQ ID NO: 1256073 - RNA, 19 nt, Homo sapiens
  misc_RNA (1)...(19): siRNA sense strand
gcucuucucuguuccuuaa

SEQ ID NO: 1256074 - RNA, 19 nt, Homo sapiens
  misc_RNA (1)...(19): siRNA sense strand
gaaggaaaaucaacuauug

SEQ ID NO: 1256075 - RNA, 19 nt, Homo sapiens
  misc_RNA (1)...(19): siRNA sense strand
caaauccuguguaguauug

SEQ ID NO: 1256076 - RNA, 19 nt, Homo sapiens
  misc_RNA (1)...(19): siRNA sense strand
agagucaucuuuacugaua

SEQ ID NO: 1256077 - RNA, 19 nt, Homo sapiens
  misc_RNA (1)...(19): siRNA sense strand
ggaggaagauauccagaug

SEQ ID NO: 1256078 - RNA, 19 nt, Homo sapiens
  misc_RNA (1)...(19): siRNA sense strand
gcacccaguuuauagauga

SEQ ID NO: 1256079 - RNA, 19 nt, Homo sapiens
  misc_RNA (1)...(19): siRNA sense strand
cauuaaugcugcuaucaua

SEQ ID NO: 1256080 - RNA, 19 nt, Homo sapiens
  misc_RNA (1)...(19): siRNA sense strand
gcuaauaccuuaccuucau

SEQ ID NO: 1256081 - RNA, 19 nt, Homo sapiens
  misc_RNA (1)...(19): siRNA sense strand
ggaaagaagccaucagaau

SEQ ID NO: 1256082 - RNA, 19 nt, Homo sapiens
  misc_RNA (1)...(19): siRNA sense strand
ugaagaaccuggcacaaau

SEQ ID NO: 1256083 - RNA, 19 nt, Homo sapiens
  misc_RNA (1)...(19): siRNA sense strand
ggcauaggcuaccauuuaa

SEQ ID NO: 1256084 - RNA, 19 nt, Homo sapiens
  misc_RNA (1)...(19): siRNA sense strand
gaaacuaacuuuugggauu

SEQ ID NO: 1256085 - RNA, 19 nt, Homo sapiens
  misc_RNA (1)...(19): siRNA sense strand
ugaaugagguguuucugaa

SEQ ID NO: 1256086 - RNA, 19 nt, Homo sapiens
  misc_RNA (1)...(19): siRNA sense strand
gauaguugcuacugaucua

SEQ ID NO: 1256087 - RNA, 19 nt, Homo sapiens
  misc_RNA (1)...(19): siRNA sense strand
ucaaaugucuucaauggau

SEQ ID NO: 1256088 - RNA, 19 nt, Homo sapiens
  misc_RNA (1)...(19): siRNA sense strand
gaguauggguaccgaagua

SEQ ID NO: 1256089 - RNA, 19 nt, Homo sapiens
  misc_RNA (1)...(19): siRNA sense strand
ugaaaggugugguguuuga

SEQ ID NO: 1256090 - RNA, 19 nt, Homo sapiens
  misc_RNA (1)...(19): siRNA sense strand
ggaacugucuccaaauaca

SEQ ID NO: 1256091 - RNA, 19 nt, Homo sapiens
  misc_RNA (1)...(19): siRNA sense strand
gguguacgcugccgugaaa

SEQ ID NO: 1256092 - RNA, 19 nt, Homo sapiens
  misc_RNA (1)...(19): siRNA sense strand
gauuggcucucuauucauu

SEQ ID NO: 1256093 - RNA, 19 nt, Homo sapiens
  misc_RNA (1)...(19): siRNA sense strand
guuaauaccucccuucaca

SEQ ID NO: 1256094 - RNA, 19 nt, Homo sapiens
  misc_RNA (1)...(19): siRNA sense strand
ucauagaaaucgcaacaaa

SEQ ID NO: 1256095 - RNA, 19 nt, Homo sapiens
  misc_RNA (1)...(19): siRNA sense strand
gcaauggacuacuuggaau

SEQ ID NO: 1256096 - RNA, 19 nt, Homo sapiens
  misc_RNA (1)...(19): siRNA sense strand
aaaguucgcuuccuaaagu

SEQ ID NO: 1256097 - RNA, 19 nt, Homo sapiens
  misc_RNA (1)...(19): siRNA sense strand
agacagaccuuguuggaau

SEQ ID NO: 1256098 - RNA, 19 nt, Homo sapiens
  misc_RNA (1)...(19): siRNA sense strand
uauggaaucuccugaaaga

SEQ ID NO: 1256099 - RNA, 19 nt, Homo sapiens
  misc_RNA (1)...(19): siRNA sense strand
gagaguagaagcuuugaaa

SEQ ID NO: 1256100 - RNA, 19 nt, Homo sapiens
  misc_RNA (1)...(19): siRNA sense strand
gaaccagugucuccagaau

SEQ ID NO: 1256101 - RNA, 19 nt, Homo sapiens
  misc_RNA (1)...(19): siRNA sense strand
gaauggacuuugugucuuc

SEQ ID NO: 1256102 - RNA, 19 nt, Homo sapiens
  misc_RNA (1)...(19): siRNA sense strand
uugaagagcauauggauua

SEQ ID NO: 1256103 - RNA, 19 nt, Homo sapiens
  misc_RNA (1)...(19): siRNA sense strand
uaugcuggcuucauccuua

SEQ ID NO: 1256104 - RNA, 19 nt, Homo sapiens
  misc_RNA (1)...(19): siRNA sense strand
ccacuuggauucuucacaa

SEQ ID NO: 1256105 - RNA, 19 nt, Homo sapiens
  misc_RNA (1)...(19): siRNA sense strand
gaaagacaauacauuacgu

SEQ ID NO: 1256106 - RNA, 19 nt, Homo sapiens
  misc_RNA (1)...(19): siRNA sense strand
cagcauuggugacuacaaa

SEQ ID NO: 1256107 - RNA, 19 nt, Homo sapiens
  misc_RNA (1)...(19): siRNA sense strand
uuacagggaucuugauaga

SEQ ID NO: 1256108 - RNA, 19 nt, Homo sapiens
  misc_RNA (1)...(19): siRNA sense strand
aaacuuaagugguggacaa

SEQ ID NO: 1256109 - RNA, 19 nt, Homo sapiens
  misc_RNA (1)...(19): siRNA sense strand
gaucacagauuuucaauag

SEQ ID NO: 1256110 - RNA, 19 nt, Homo sapiens
  misc_RNA (1)...(19): siRNA sense strand
ccagaggagauuauauuua

SEQ ID NO: 1256111 - RNA, 19 nt, Homo sapiens
  misc_RNA (1)...(19): siRNA sense strand
ggagcugggugaucuugaa

SEQ ID NO: 1256112 - RNA, 19 nt, Homo sapiens
  misc_RNA (1)...(19): siRNA sense strand
ugaaaaggaucacagauuu

SEQ ID NO: 1256113 - RNA, 19 nt, Homo sapiens
  misc_RNA (1)...(19): siRNA sense strand
cgugaaaggucucaggaaa

SEQ ID NO: 1256114 - RNA, 19 nt, Homo sapiens
  misc_RNA (1)...(19): siRNA sense strand
ggaauggacuuugugucuu

SEQ ID NO: 1256115 - RNA, 19 nt, Homo sapiens
  misc_RNA (1)...(19): siRNA sense strand
gaaaggauccuguguucag

SEQ ID NO: 1256116 - RNA, 19 nt, Homo sapiens
  misc_RNA (1)...(19): siRNA sense strand
gacagaacauagcuauaga

SEQ ID NO: 1256117 - RNA, 19 nt, Homo sapiens
  misc_RNA (1)...(19): siRNA sense strand
ugggaacugucuccaaaua

SEQ ID NO: 1256118 - RNA, 19 nt, Homo sapiens
  misc_RNA (1)...(19): siRNA sense strand
guacaggaauuagaaaugg

SEQ ID NO: 1256119 - RNA, 19 nt, Homo sapiens
  misc_RNA (1)...(19): siRNA sense strand
ggagaaagagguacaacga

SEQ ID NO: 1256120 - RNA, 19 nt, Homo sapiens
  misc_RNA (1)...(19): siRNA sense strand
uggcccagcuuauacauuu

SEQ ID NO: 1256121 - RNA, 19 nt, Homo sapiens
  misc_RNA (1)...(19): siRNA sense strand
ccucaaaugucuucaaugg

SEQ ID NO: 1256122 - RNA, 19 nt, Homo sapiens
  misc_RNA (1)...(19): siRNA sense strand
ggaaggcugagauguauug

SEQ ID NO: 1256123 - RNA, 19 nt, Homo sapiens
  misc_RNA (1)...(19): siRNA sense strand
ccaagaagcaacgcuauuu

SEQ ID NO: 1256124 - RNA, 19 nt, Homo sapiens
  misc_RNA (1)...(19): siRNA sense strand
ggaagguguucauauccaa

SEQ ID NO: 1256125 - RNA, 19 nt, Homo sapiens
  misc_RNA (1)...(19): siRNA sense strand
cacaugaaguggagaaaga

SEQ ID NO: 1256126 - RNA, 19 nt, Homo sapiens
  misc_RNA (1)...(19): siRNA sense strand
gaaaucgcaacaaaucauu

SEQ ID NO: 1256127 - RNA, 19 nt, Homo sapiens
  misc_RNA (1)...(19): siRNA sense strand
caaaauccauaccucauaa

SEQ ID NO: 1256128 - RNA, 19 nt, Homo sapiens
  misc_RNA (1)...(19): siRNA sense strand
caggaaggcugagauguau

SEQ ID NO: 1256129 - RNA, 19 nt, Homo sapiens
  misc_RNA (1)...(19): siRNA sense strand
cauuuaaguuugcaucuga

SEQ ID NO: 1256130 - RNA, 19 nt, Homo sapiens
  misc_RNA (1)...(19): siRNA sense strand
ggacaggaagguguucaua

SEQ ID NO: 1256131 - RNA, 19 nt, Homo sapiens
  misc_RNA (1)...(19): siRNA sense strand
ccagaucacugcccuccuu

SEQ ID NO: 1256132 - RNA, 19 nt, Homo sapiens
  misc_RNA (1)...(19): siRNA sense strand
gcugaaggcucccgugaag

SEQ ID NO: 1256133 - RNA, 19 nt, Homo sapiens
  misc_RNA (1)...(19): siRNA sense strand
cuuaggagcuucagaaucu

SEQ ID NO: 1256134 - RNA, 19 nt, Homo sapiens
  misc_RNA (1)...(19): siRNA sense strand
gaaagagguacaacgaguu

SEQ ID NO: 1256135 - RNA, 19 nt, Homo sapiens
  misc_RNA (1)...(19): siRNA sense strand
ucacacacuuucaagaaug

SEQ ID NO: 1256136 - RNA, 19 nt, Homo sapiens
  misc_RNA (1)...(19): siRNA sense strand
gccaagcacugguggaugu

SEQ ID NO: 1256137 - RNA, 19 nt, Homo sapiens
  misc_RNA (1)...(19): siRNA sense strand
uaaguugccuguugaggau

SEQ ID NO: 1256138 - RNA, 19 nt, Homo sapiens
  misc_RNA (1)...(19): siRNA sense strand
cauaauagcuacucuuuuc

SEQ ID NO: 1256139 - RNA, 19 nt, Homo sapiens
  misc_RNA (1)...(19): siRNA sense strand
ugagaacagugaaugcuau

SEQ ID NO: 1256140 - RNA, 19 nt, Homo sapiens
  misc_RNA (1)...(19): siRNA sense strand
gcaggucugugcaauagca

SEQ ID NO: 1256141 - RNA, 19 nt, Homo sapiens
  misc_RNA (1)...(19): siRNA sense strand
gauauaggaagccuuguug

SEQ ID NO: 1256142 - RNA, 19 nt, Homo sapiens
  misc_RNA (1)...(19): siRNA sense strand
uaaguuugcaucugaauga

SEQ ID NO: 1256143 - RNA, 19 nt, Homo sapiens
  misc_RNA (1)...(19): siRNA sense strand
cccaagagauaaugaacaa

SEQ ID NO: 1256144 - RNA, 19 nt, Homo sapiens
  misc_RNA (1)...(19): siRNA sense strand
ggcuaugucucaucucuug

SEQ ID NO: 1256145 - RNA, 19 nt, Homo sapiens
  misc_RNA (1)...(19): siRNA sense strand
cagcaggucugugcaauag

SEQ ID NO: 1256146 - RNA, 19 nt, Homo sapiens
  misc_RNA (1)...(19): siRNA sense strand
gaaaauaucagcaaguuca

SEQ ID NO: 1256147 - RNA, 19 nt, Homo sapiens
  misc_RNA (1)...(19): siRNA sense strand
gcuuauacauuuggacuau

SEQ ID NO: 1256148 - RNA, 19 nt, Homo sapiens
  misc_RNA (1)...(19): siRNA sense strand
ucaugacacuccucaaaug

SEQ ID NO: 1256149 - RNA, 19 nt, Homo sapiens
  misc_RNA (1)...(19): siRNA sense strand
ugagagucaucuuuacuga

SEQ ID NO: 1256150 - RNA, 19 nt, Homo sapiens
  misc_RNA (1)...(19): siRNA sense strand
ccauaacaacuuugaauga

SEQ ID NO: 1256151 - RNA, 19 nt, Homo sapiens
  misc_RNA (1)...(19): siRNA sense strand
ucacaggcuuucuucaaau

SEQ ID NO: 1256152 - RNA, 19 nt, Homo sapiens
  misc_RNA (1)...(19): siRNA sense strand
guacugcccucaggagaau

SEQ ID NO: 1256153 - RNA, 19 nt, Homo sapiens
  misc_RNA (1)...(19): siRNA sense strand
gaaguuauaggacuguuag

SEQ ID NO: 1256154 - RNA, 19 nt, Homo sapiens
  misc_RNA (1)...(19): siRNA sense strand
auucaaauccuguguagua

SEQ ID NO: 1256155 - RNA, 19 nt, Homo sapiens
  misc_RNA (1)...(19): siRNA sense strand
gcccagaggagauuauauu

SEQ ID NO: 1256156 - RNA, 19 nt, Homo sapiens
  misc_RNA (1)...(19): siRNA sense strand
ccuguggacuauauuauug

SEQ ID NO: 1256157 - RNA, 19 nt, Homo sapiens
  misc_RNA (1)...(19): siRNA sense strand
gaacauagcuauagaagug

SEQ ID NO: 1256158 - RNA, 19 nt, Homo sapiens
  misc_RNA (1)...(19): siRNA sense strand
gaaaugaacugcaggaaga

SEQ ID NO: 1256159 - RNA, 19 nt, Homo sapiens
  misc_RNA (1)...(19): siRNA sense strand
ggaagaaacuaaugagaaa

SEQ ID NO: 1256160 - RNA, 19 nt, Homo sapiens
  misc_RNA (1)...(19): siRNA sense strand
gaaggaauaugcaggcaaa

SEQ ID NO: 1256161 - RNA, 19 nt, Homo sapiens
  misc_RNA (1)...(19): siRNA sense strand
gacaauacauuacgucauu

SEQ ID NO: 1256162 - RNA, 19 nt, Homo sapiens
  misc_RNA (1)...(19): siRNA sense strand
gggcauaggcuaccauuua

SEQ ID NO: 1256163 - RNA, 19 nt, Homo sapiens
  misc_RNA (1)...(19): siRNA sense strand
gaaaucagacagaguaauu

SEQ ID NO: 1256164 - RNA, 19 nt, Homo sapiens
  misc_RNA (1)...(19): siRNA sense strand
ggaaaggacaaacaaauuu

SEQ ID NO: 1256165 - RNA, 19 nt, Homo sapiens
  misc_RNA (1)...(19): siRNA sense strand
gagaaaggauccuguguuc

SEQ ID NO: 1256166 - RNA, 19 nt, Homo sapiens
  misc_RNA (1)...(19): siRNA sense strand
aagaauggcugauauagaa

SEQ ID NO: 1256167 - RNA, 19 nt, Homo sapiens
  misc_RNA (1)...(19): siRNA sense strand
gaugauaacuggagacaca

SEQ ID NO: 1256168 - RNA, 19 nt, Homo sapiens
  misc_RNA (1)...(19): siRNA sense strand
gaaagaagccaucagaauc

SEQ ID NO: 1256169 - RNA, 19 nt, Homo sapiens
  misc_RNA (1)...(19): siRNA sense strand
gauccuguguucagaauuu

SEQ ID NO: 1256170 - RNA, 19 nt, Homo sapiens
  misc_RNA (1)...(19): siRNA sense strand
gcagugagagucaucuuua

SEQ ID NO: 1256171 - RNA, 19 nt, Homo sapiens
  misc_RNA (1)...(19): siRNA sense strand
gaaagaaugagaacaguga

SEQ ID NO: 1256172 - RNA, 19 nt, Homo sapiens
  misc_RNA (1)...(19): siRNA sense strand
gcucuucucuguuccuuaa

SEQ ID NO: 1256173 - RNA, 19 nt, Homo sapiens
  misc_RNA (1)...(19): siRNA sense strand
gaaggaaaaucaacuauug

SEQ ID NO: 1256174 - RNA, 19 nt, Homo sapiens
  misc_RNA (1)...(19): siRNA sense strand
caaauccuguguaguauug

SEQ ID NO: 1256175 - RNA, 19 nt, Homo sapiens
  misc_RNA (1)...(19): siRNA sense strand
agagucaucuuuacugaua

SEQ ID NO: 1256176 - RNA, 19 nt, Homo sapiens
  misc_RNA (1)...(19): siRNA sense strand
ggaggaagauauccagaug

SEQ ID NO: 1256177 - RNA, 19 nt, Homo sapiens
  misc_RNA (1)...(19): siRNA sense strand
gcacccaguuuauagauga

SEQ ID NO: 1256178 - RNA, 19 nt, Homo sapiens
  misc_RNA (1)...(19): siRNA sense strand
cauuaaugcugcuaucaua

SEQ ID NO: 1256179 - RNA, 19 nt, Homo sapiens
  misc_RNA (1)...(19): siRNA sense strand
gcuaauaccuuaccuucau

SEQ ID NO: 1256180 - RNA, 19 nt, Homo sapiens
  misc_RNA (1)...(19): siRNA sense strand
ggaaagaagccaucagaau

SEQ ID NO: 1256181 - RNA, 19 nt, Homo sapiens
  misc_RNA (1)...(19): siRNA sense strand
ggcauaggcuaccauuuaa

SEQ ID NO: 1256182 - RNA, 19 nt, Homo sapiens
  misc_RNA (1)...(19): siRNA sense strand
gaaacuaacuuuugggauu

SEQ ID NO: 1256183 - RNA, 19 nt, Homo sapiens
  misc_RNA (1)...(19): siRNA sense strand
ugaaugagguguuucugaa

SEQ ID NO: 1256184 - RNA, 19 nt, Homo sapiens
  misc_RNA (1)...(19): siRNA sense strand
gauaguugcuacugaucua

SEQ ID NO: 1256185 - RNA, 19 nt, Homo sapiens
  misc_RNA (1)...(19): siRNA sense strand
ucaaaugucuucaauggau

SEQ ID NO: 1256186 - RNA, 19 nt, Homo sapiens
  misc_RNA (1)...(19): siRNA sense strand
gaguauggguaccgaagua

SEQ ID NO: 1256187 - RNA, 19 nt, Homo sapiens
  misc_RNA (1)...(19): siRNA sense strand
ugaaaggugugguguuuga

SEQ ID NO: 1256188 - RNA, 19 nt, Homo sapiens
  misc_RNA (1)...(19): siRNA sense strand
ggaacugucuccaaauaca

SEQ ID NO: 1256189 - RNA, 19 nt, Homo sapiens
  misc_RNA (1)...(19): siRNA sense strand
gguguacgcugccgugaaa

SEQ ID NO: 1256190 - RNA, 19 nt, Homo sapiens
  misc_RNA (1)...(19): siRNA sense strand
gauuggcucucuauucauu

SEQ ID NO: 1256191 - RNA, 19 nt, Homo sapiens
  misc_RNA (1)...(19): siRNA sense strand
guuaauaccucccuucaca

SEQ ID NO: 1256192 - RNA, 19 nt, Homo sapiens
  misc_RNA (1)...(19): siRNA sense strand
ucauagaaaucgcaacaaa

SEQ ID NO: 1256193 - RNA, 19 nt, Homo sapiens
  misc_RNA (1)...(19): siRNA sense strand
gcaauggacuacuuggaau

SEQ ID NO: 1256194 - RNA, 19 nt, Homo sapiens
  misc_RNA (1)...(19): siRNA sense strand
aaaguucgcuuccuaaagu

SEQ ID NO: 1256195 - RNA, 19 nt, Homo sapiens
  misc_RNA (1)...(19): siRNA sense strand
uauggaaucuccugaaaga

SEQ ID NO: 1256196 - RNA, 19 nt, Homo sapiens
  misc_RNA (1)...(19): siRNA sense strand
gagaguagaagcuuugaaa

SEQ ID NO: 1256197 - RNA, 19 nt, Homo sapiens
  misc_RNA (1)...(19): siRNA sense strand
agacagaccuuguuggaau

SEQ ID NO: 1256198 - RNA, 19 nt, Homo sapiens
  misc_RNA (1)...(19): siRNA sense strand
gaaccagugucuccagaau

SEQ ID NO: 1256199 - RNA, 19 nt, Homo sapiens
  misc_RNA (1)...(19): siRNA sense strand
gaauggacuuugugucuuc

SEQ ID NO: 1256200 - RNA, 19 nt, Homo sapiens
  misc_RNA (1)...(19): siRNA sense strand
uugaagagcauauggauua

SEQ ID NO: 1256201 - RNA, 19 nt, Homo sapiens
  misc_RNA (1)...(19): siRNA sense strand
uaugcuggcuucauccuua

SEQ ID NO: 1256202 - RNA, 19 nt, Homo sapiens
  misc_RNA (1)...(19): siRNA sense strand
ccacuuggauucuucacaa

SEQ ID NO: 1256203 - RNA, 19 nt, Homo sapiens
  misc_RNA (1)...(19): siRNA sense strand
gaaagacaauacauuacgu

SEQ ID NO: 1256204 - RNA, 19 nt, Homo sapiens
  misc_RNA (1)...(19): siRNA sense strand
cagcauuggugacuacaaa

SEQ ID NO: 1256205 - RNA, 19 nt, Homo sapiens
  misc_RNA (1)...(19): siRNA sense strand
uuacagggaucuugauaga

SEQ ID NO: 1256206 - RNA, 19 nt, Homo sapiens
  misc_RNA (1)...(19): siRNA sense strand
aaacuuaagugguggacaa

SEQ ID NO: 1256207 - RNA, 19 nt, Homo sapiens
  misc_RNA (1)...(19): siRNA sense strand
gaucacagauuuucaauag

SEQ ID NO: 1256208 - RNA, 19 nt, Homo sapiens
  misc_RNA (1)...(19): siRNA sense strand
ccagaggagauuauauuua

SEQ ID NO: 1256209 - RNA, 19 nt, Homo sapiens
  misc_RNA (1)...(19): siRNA sense strand
ugaaaaggaucacagauuu

SEQ ID NO: 1256210 - RNA, 19 nt, Homo sapiens
  misc_RNA (1)...(19): siRNA sense strand
cgugaaaggucucaggaaa

SEQ ID NO: 1256211 - RNA, 19 nt, Homo sapiens
  misc_RNA (1)...(19): siRNA sense strand
ggaauggacuuugugucuu

SEQ ID NO: 1256212 - RNA, 19 nt, Homo sapiens
  misc_RNA (1)...(19): siRNA sense strand
gaaaggauccuguguucag

SEQ ID NO: 1256213 - RNA, 19 nt, Homo sapiens
  misc_RNA (1)...(19): siRNA sense strand
gacagaacauagcuauaga

SEQ ID NO: 1256214 - RNA, 19 nt, Homo sapiens
  misc_RNA (1)...(19): siRNA sense strand
ugggaacugucuccaaaua

SEQ ID NO: 1256215 - RNA, 19 nt, Homo sapiens
  misc_RNA (1)...(19): siRNA sense strand
guacaggaauuagaaaugg

SEQ ID NO: 1256216 - RNA, 19 nt, Homo sapiens
  misc_RNA (1)...(19): siRNA sense strand
ggagaaagagguacaacga

SEQ ID NO: 1256217 - RNA, 19 nt, Homo sapiens
  misc_RNA (1)...(19): siRNA sense strand
uggcccagcuuauacauuu

SEQ ID NO: 1256218 - RNA, 19 nt, Homo sapiens
  misc_RNA (1)...(19): siRNA sense strand
ccucaaaugucuucaaugg

SEQ ID NO: 1256219 - RNA, 19 nt, Homo sapiens
  misc_RNA (1)...(19): siRNA sense strand
ccaagaagcaacgcuauuu

SEQ ID NO: 1256220 - RNA, 19 nt, Homo sapiens
  misc_RNA (1)...(19): siRNA sense strand
ggaagguguucauauccaa

SEQ ID NO: 1256221 - RNA, 19 nt, Homo sapiens
  misc_RNA (1)...(19): siRNA sense strand
cacaugaaguggagaaaga

SEQ ID NO: 1256222 - RNA, 19 nt, Homo sapiens
  misc_RNA (1)...(19): siRNA sense strand
gaaaucgcaacaaaucauu

SEQ ID NO: 1256223 - RNA, 19 nt, Homo sapiens
  misc_RNA (1)...(19): siRNA sense strand
caaaauccauaccucauaa

SEQ ID NO: 1256224 - RNA, 19 nt, Homo sapiens
  misc_RNA (1)...(19): siRNA sense strand
cauuuaaguuugcaucuga

SEQ ID NO: 1256225 - RNA, 19 nt, Homo sapiens
  misc_RNA (1)...(19): siRNA sense strand
ggacaggaagguguucaua

SEQ ID NO: 1256226 - RNA, 19 nt, Homo sapiens
  misc_RNA (1)...(19): siRNA sense strand
ccagaucacugcccuccuu

SEQ ID NO: 1256227 - RNA, 19 nt, Homo sapiens
  misc_RNA (1)...(19): siRNA sense strand
gcugaaggcucccgugaag

SEQ ID NO: 1256228 - RNA, 19 nt, Homo sapiens
  misc_RNA (1)...(19): siRNA sense strand
cuuaggagcuucagaaucu

SEQ ID NO: 1256229 - RNA, 19 nt, Homo sapiens
  misc_RNA (1)...(19): siRNA sense strand
gaaagagguacaacgaguu

SEQ ID NO: 1256230 - RNA, 19 nt, Homo sapiens
  misc_RNA (1)...(19): siRNA sense strand
ucacacacuuucaagaaug

SEQ ID NO: 1256231 - RNA, 19 nt, Homo sapiens
  misc_RNA (1)...(19): siRNA sense strand
gccaagcacugguggaugu

SEQ ID NO: 1256232 - RNA, 19 nt, Homo sapiens
  misc_RNA (1)...(19): siRNA sense strand
cauaauagcuacucuuuuc

SEQ ID NO: 1256233 - RNA, 19 nt, Homo sapiens
  misc_RNA (1)...(19): siRNA sense strand
ugagaacagugaaugcuau

SEQ ID NO: 1256234 - RNA, 19 nt, Homo sapiens
  misc_RNA (1)...(19): siRNA sense strand
gcaggucugugcaauagca

SEQ ID NO: 1256235 - RNA, 19 nt, Homo sapiens
  misc_RNA (1)...(19): siRNA sense strand
gauauaggaagccuuguug

SEQ ID NO: 1256236 - RNA, 19 nt, Homo sapiens
  misc_RNA (1)...(19): siRNA sense strand
uaaguuugcaucugaauga

SEQ ID NO: 1256237 - RNA, 19 nt, Homo sapiens
  misc_RNA (1)...(19): siRNA sense strand
cccaagagauaaugaacaa

SEQ ID NO: 1256238 - RNA, 19 nt, Homo sapiens
  misc_RNA (1)...(19): siRNA sense strand
ggcuaugucucaucucuug

SEQ ID NO: 1256239 - RNA, 19 nt, Homo sapiens
  misc_RNA (1)...(19): siRNA sense strand
cagcaggucugugcaauag

SEQ ID NO: 1256240 - RNA, 19 nt, Homo sapiens
  misc_RNA (1)...(19): siRNA sense strand
ucaugacacuccucaaaug

SEQ ID NO: 1256241 - RNA, 19 nt, Homo sapiens
  misc_RNA (1)...(19): siRNA sense strand
gaaaauaucagcaaguuca

SEQ ID NO: 1256242 - RNA, 19 nt, Homo sapiens
  misc_RNA (1)...(19): siRNA sense strand
gcuuauacauuuggacuau

SEQ ID NO: 1256243 - RNA, 19 nt, Homo sapiens
  misc_RNA (1)...(19): siRNA sense strand
ugagagucaucuuuacuga

SEQ ID NO: 1256244 - RNA, 19 nt, Homo sapiens
  misc_RNA (1)...(19): siRNA sense strand
uaucauggccacuuuaaug

SEQ ID NO: 1256245 - RNA, 19 nt, Homo sapiens
  misc_RNA (1)...(19): siRNA sense strand
guacugcccucaggagaau

SEQ ID NO: 1256246 - RNA, 19 nt, Homo sapiens
  misc_RNA (1)...(19): siRNA sense strand
gaaguuauaggacuguuag

SEQ ID NO: 1256247 - RNA, 19 nt, Homo sapiens
  misc_RNA (1)...(19): siRNA sense strand
auucaaauccuguguagua

SEQ ID NO: 1256248 - RNA, 19 nt, Homo sapiens
  misc_RNA (1)...(19): siRNA sense strand
gcccagaggagauuauauu

SEQ ID NO: 1256249 - RNA, 19 nt, Homo sapiens
  misc_RNA (1)...(19): siRNA sense strand
ccuguggacuauauuauug

SEQ ID NO: 1256250 - RNA, 19 nt, Homo sapiens
  misc_RNA (1)...(19): siRNA sense strand
ccauaacaacuuugaauga

SEQ ID NO: 1256251 - RNA, 19 nt, Homo sapiens
  misc_RNA (1)...(19): siRNA sense strand
accaaggcauugaggauua

SEQ ID NO: 1256252 - RNA, 19 nt, Homo sapiens
  misc_RNA (1)...(19): siRNA sense strand
gaguauaacaucacugguu

SEQ ID NO: 1256253 - RNA, 19 nt, Homo sapiens
  misc_RNA (1)...(19): siRNA sense strand
gaauauggaaucuccugaa

SEQ ID NO: 1256254 - RNA, 19 nt, Homo sapiens
  misc_RNA (1)...(19): siRNA sense strand
cgugggaacugucuccaaa

SEQ ID NO: 1256255 - RNA, 19 nt, Homo sapiens
  misc_RNA (1)...(19): siRNA sense strand
guggaugccuuuggaacua

SEQ ID NO: 1256256 - RNA, 19 nt, Homo sapiens
  misc_RNA (1)...(19): siRNA sense strand
cgacagaacauagcuauag

SEQ ID NO: 1256257 - RNA, 19 nt, Homo sapiens
  misc_RNA (1)...(19): siRNA sense strand
gcacuuaccuugcuuccaa

SEQ ID NO: 1256258 - RNA, 19 nt, Homo sapiens
  misc_RNA (1)...(19): siRNA sense strand
gcacauggauucaguaugg

SEQ ID NO: 1256259 - RNA, 19 nt, Homo sapiens
  misc_RNA (1)...(19): siRNA sense strand
guagaaacauggcauauag

SEQ ID NO: 1256260 - RNA, 19 nt, Homo sapiens
  misc_RNA (1)...(19): siRNA sense strand
gcaagcacaugcagaagaa

SEQ ID NO: 1256261 - RNA, 19 nt, Homo sapiens
  misc_RNA (1)...(19): siRNA sense strand
gaacaaagaggaauuagca

SEQ ID NO: 1256262 - RNA, 19 nt, Homo sapiens
  misc_RNA (1)...(19): siRNA sense strand
gaaauaucaucaccuagga

SEQ ID NO: 1256263 - RNA, 19 nt, Homo sapiens
  misc_RNA (1)...(19): siRNA sense strand
caaauauucucaugagguu

SEQ ID NO: 1256264 - RNA, 19 nt, Homo sapiens
  misc_RNA (1)...(19): siRNA sense strand
gaguagagaucgguucuuu

SEQ ID NO: 1256265 - RNA, 19 nt, Homo sapiens
  misc_RNA (1)...(19): siRNA sense strand
gaucaugacucagaggaaa

SEQ ID NO: 1256266 - RNA, 19 nt, Homo sapiens
  misc_RNA (1)...(19): siRNA sense strand
gcccagagcuccuucuuca

SEQ ID NO: 1256267 - RNA, 19 nt, Homo sapiens
  misc_RNA (1)...(19): siRNA sense strand
gaaaggugcuggccaucau

SEQ ID NO: 1256268 - RNA, 19 nt, Homo sapiens
  misc_RNA (1)...(19): siRNA sense strand
guaggaaguuauacaauca

SEQ ID NO: 1256269 - RNA, 19 nt, Homo sapiens
  misc_RNA (1)...(19): siRNA sense strand
agagaaauaucaucaccua

SEQ ID NO: 1256270 - RNA, 19 nt, Homo sapiens
  misc_RNA (1)...(19): siRNA sense strand
ggcagaugcuuauugguaa

SEQ ID NO: 1256271 - RNA, 19 nt, Homo sapiens
  misc_RNA (1)...(19): siRNA sense strand
gauauaacuucuaccagau

SEQ ID NO: 1256272 - RNA, 19 nt, Homo sapiens
  misc_RNA (1)...(19): siRNA sense strand
ccacagauauaacuucuac

SEQ ID NO: 1256273 - RNA, 19 nt, Homo sapiens
  misc_RNA (1)...(19): siRNA sense strand
gaguagcacuuguuaacga

SEQ ID NO: 1256274 - RNA, 19 nt, Homo sapiens
  misc_RNA (1)...(19): siRNA sense strand
gcagaugcuuauugguaaa

SEQ ID NO: 1256275 - RNA, 19 nt, Homo sapiens
  misc_RNA (1)...(19): siRNA sense strand
gaggugugcugcuucauca

SEQ ID NO: 1256276 - RNA, 19 nt, Homo sapiens
  misc_RNA (1)...(19): siRNA sense strand
ggaaauuugucuugaccau

SEQ ID NO: 1256277 - RNA, 19 nt, Homo sapiens
  misc_RNA (1)...(19): siRNA sense strand
guagagaucgguucuuuca

SEQ ID NO: 1256278 - RNA, 19 nt, Homo sapiens
  misc_RNA (1)...(19): siRNA sense strand
caucagaagaccaacauuu

SEQ ID NO: 1256279 - RNA, 19 nt, Homo sapiens
  misc_RNA (1)...(19): siRNA sense strand
aaacauagcuuccaaaacu

SEQ ID NO: 1256280 - RNA, 19 nt, Homo sapiens
  misc_RNA (1)...(19): siRNA sense strand
uagcagcggucacagagaa

SEQ ID NO: 1256281 - RNA, 19 nt, Homo sapiens
  misc_RNA (1)...(19): siRNA sense strand
gagaaaggcuacuguaacc

SEQ ID NO: 1256282 - RNA, 19 nt, Homo sapiens
  misc_RNA (1)...(19): siRNA sense strand
ucucuggacugaacaaaga

SEQ ID NO: 1256283 - RNA, 19 nt, Homo sapiens
  misc_RNA (1)...(19): siRNA sense strand
ggacggacuuugagcacau

SEQ ID NO: 1256284 - RNA, 19 nt, Homo sapiens
  misc_RNA (1)...(19): siRNA sense strand
ggaguggccacagauauaa

SEQ ID NO: 1256285 - RNA, 19 nt, Homo sapiens
  misc_RNA (1)...(19): siRNA sense strand
ucucuuggcucucugcaaa

SEQ ID NO: 1256286 - RNA, 19 nt, Homo sapiens
  misc_RNA (1)...(19): siRNA sense strand
gaaauccaggcagcacuua

SEQ ID NO: 1256287 - RNA, 19 nt, Homo sapiens
  misc_RNA (1)...(19): siRNA sense strand
ucuaccagauccuuaaauu

SEQ ID NO: 1256288 - RNA, 19 nt, Homo sapiens
  misc_RNA (1)...(19): siRNA sense strand
agacaaacauagcuuccaa

SEQ ID NO: 1256289 - RNA, 19 nt, Homo sapiens
  misc_RNA (1)...(19): siRNA sense strand
gcagugcuccuccuccaaa

SEQ ID NO: 1256290 - RNA, 19 nt, Homo sapiens
  misc_RNA (1)...(19): siRNA sense strand
cagaggaaauuugucuuga

SEQ ID NO: 1256291 - RNA, 19 nt, Homo sapiens
  misc_RNA (1)...(19): siRNA sense strand
guucaagacuccacaucug

SEQ ID NO: 1256292 - RNA, 19 nt, Homo sapiens
  misc_RNA (1)...(19): siRNA sense strand
cuaccagauccuuaaauua

SEQ ID NO: 1256293 - RNA, 19 nt, Homo sapiens
  misc_RNA (1)...(19): siRNA sense strand
ucacagagaaauaucauca

SEQ ID NO: 1256294 - RNA, 19 nt, Homo sapiens
  misc_RNA (1)...(19): siRNA sense strand
ccagauccuuaaauuacaa

SEQ ID NO: 1256295 - RNA, 19 nt, Homo sapiens
  misc_RNA (1)...(19): siRNA sense strand
gcauauagggcuagaagca

SEQ ID NO: 1256296 - RNA, 19 nt, Homo sapiens
  misc_RNA (1)...(19): siRNA sense strand
gaauccaccucuguucugu

SEQ ID NO: 1256297 - RNA, 19 nt, Homo sapiens
  misc_RNA (1)...(19): siRNA sense strand
aaugguagcugcagcaaag

SEQ ID NO: 1256298 - RNA, 19 nt, Homo sapiens
  misc_RNA (1)...(19): siRNA sense strand
acaaguaccacaucuucua

SEQ ID NO: 1256299 - RNA, 19 nt, Homo sapiens
  misc_RNA (1)...(19): siRNA sense strand
uaucugaugucacaaguac

SEQ ID NO: 1256300 - RNA, 19 nt, Homo sapiens
  misc_RNA (1)...(19): siRNA sense strand
gaccaaggcgccaggagaa

SEQ ID NO: 1256301 - RNA, 19 nt, Homo sapiens
  misc_RNA (1)...(19): siRNA sense strand
cuucauaccuggagucucu

SEQ ID NO: 1256302 - RNA, 19 nt, Homo sapiens
  misc_RNA (1)...(19): siRNA sense strand
ccaccucuguucuguagga

SEQ ID NO: 1256303 - RNA, 19 nt, Homo sapiens
  misc_RNA (1)...(19): siRNA sense strand
uggcagaugcuuauuggua

SEQ ID NO: 1256304 - RNA, 19 nt, Homo sapiens
  misc_RNA (1)...(19): siRNA sense strand
ggaccugcuucccgagaug

SEQ ID NO: 1256305 - RNA, 19 nt, Homo sapiens
  misc_RNA (1)...(19): siRNA sense strand
ucaccaagccagccaauuc

SEQ ID NO: 1256306 - RNA, 19 nt, Homo sapiens
  misc_RNA (1)...(19): siRNA sense strand
gaucucacccgcaaguuca

SEQ ID NO: 1256307 - RNA, 19 nt, Homo sapiens
  misc_RNA (1)...(19): siRNA sense strand
cgagcggaauuuaugcaaa

SEQ ID NO: 1256308 - RNA, 19 nt, Homo sapiens
  misc_RNA (1)...(19): siRNA sense strand
ggaaauccaggcagcacuu

SEQ ID NO: 1256309 - RNA, 19 nt, Homo sapiens
  misc_RNA (1)...(19): siRNA sense strand
guccaaggcuacugaucuu

SEQ ID NO: 1256310 - RNA, 19 nt, Homo sapiens
  misc_RNA (1)...(19): siRNA sense strand
ucagggcagccaagaauuu

SEQ ID NO: 1256311 - RNA, 19 nt, Homo sapiens
  misc_RNA (1)...(19): siRNA sense strand
cgacgccucuccacuccuu

SEQ ID NO: 1256312 - RNA, 19 nt, Homo sapiens
  misc_RNA (1)...(19): siRNA sense strand
gguggcagaugcuuauugg

SEQ ID NO: 1256313 - RNA, 19 nt, Homo sapiens
  misc_RNA (1)...(19): siRNA sense strand
aaauuugucuugaccaucu

SEQ ID NO: 1256314 - RNA, 19 nt, Homo sapiens
  misc_RNA (1)...(19): siRNA sense strand
gguggaugaucaugacuca

SEQ ID NO: 1256315 - RNA, 19 nt, Homo sapiens
  misc_RNA (1)...(19): siRNA sense strand
ucacaaguaccacaucuuc

SEQ ID NO: 1256316 - RNA, 19 nt, Homo sapiens
  misc_RNA (1)...(19): siRNA sense strand
gaucaucaauggcaaaagu

SEQ ID NO: 1256317 - RNA, 19 nt, Homo sapiens
  misc_RNA (1)...(19): siRNA sense strand
gagggucggcagcagauuu

SEQ ID NO: 1256318 - RNA, 19 nt, Homo sapiens
  misc_RNA (1)...(19): siRNA sense strand
agagaaagacaaacggaaa

SEQ ID NO: 1256319 - RNA, 19 nt, Homo sapiens
  misc_RNA (1)...(19): siRNA sense strand
gauggaguggccacagaua

SEQ ID NO: 1256320 - RNA, 19 nt, Homo sapiens
  misc_RNA (1)...(19): siRNA sense strand
uuaccuugcuuccaauuca

SEQ ID NO: 1256321 - RNA, 19 nt, Homo sapiens
  misc_RNA (1)...(19): siRNA sense strand
cguagaaacauggcauaua

SEQ ID NO: 1256322 - RNA, 19 nt, Homo sapiens
  misc_RNA (1)...(19): siRNA sense strand
gcacaccuaguccagauca

SEQ ID NO: 1256323 - RNA, 19 nt, Homo sapiens
  misc_RNA (1)...(19): siRNA sense strand
gaugauucagacaaacaua

SEQ ID NO: 1256324 - RNA, 19 nt, Homo sapiens
  misc_RNA (1)...(19): siRNA sense strand
uggagucucucuaucaauc

SEQ ID NO: 1256325 - RNA, 19 nt, Homo sapiens
  misc_RNA (1)...(19): siRNA sense strand
cacgaacucucuggacuga

SEQ ID NO: 1256326 - RNA, 19 nt, Homo sapiens
  misc_RNA (1)...(19): siRNA sense strand
gguaaugaguugugauucc

SEQ ID NO: 1256327 - RNA, 19 nt, Homo sapiens
  misc_RNA (1)...(19): siRNA sense strand
aaaccuggacggacuuuga

SEQ ID NO: 1256328 - RNA, 19 nt, Homo sapiens
  misc_RNA (1)...(19): siRNA sense strand
uggaguggccacagauaua

SEQ ID NO: 1256329 - RNA, 19 nt, Homo sapiens
  misc_RNA (1)...(19): siRNA sense strand
ccagagcuccuucuucaca

SEQ ID NO: 1256330 - RNA, 19 nt, Homo sapiens
  misc_RNA (1)...(19): siRNA sense strand
aaugaguugugauuccuuu

SEQ ID NO: 1256331 - RNA, 19 nt, Homo sapiens
  misc_RNA (1)...(19): siRNA sense strand
cgaacucucuggacugaac

SEQ ID NO: 1256332 - RNA, 19 nt, Homo sapiens
  misc_RNA (1)...(19): siRNA sense strand
uaccagauccuuaaauuac

SEQ ID NO: 1256333 - RNA, 19 nt, Homo sapiens
  misc_RNA (1)...(19): siRNA sense strand
ggaauccaccucuguucug

SEQ ID NO: 1256334 - RNA, 19 nt, Homo sapiens
  misc_RNA (1)...(19): siRNA sense strand
cgagggaacugucguuuuc

SEQ ID NO: 1256335 - RNA, 19 nt, Homo sapiens
  misc_RNA (1)...(19): siRNA sense strand
aagggaugauucagacaaa

SEQ ID NO: 1256336 - RNA, 19 nt, Homo sapiens
  misc_RNA (1)...(19): siRNA sense strand
caagggaugauucagacaa

SEQ ID NO: 1256337 - RNA, 19 nt, Homo sapiens
  misc_RNA (1)...(19): siRNA sense strand
auucaaacgucgacucuuc

SEQ ID NO: 1256338 - RNA, 19 nt, Homo sapiens
  misc_RNA (1)...(19): siRNA sense strand
cuucuaggguggaugauca

SEQ ID NO: 1256339 - RNA, 19 nt, Homo sapiens
  misc_RNA (1)...(19): siRNA sense strand
gcucuucucuuggcucucu

SEQ ID NO: 1256340 - RNA, 19 nt, Homo sapiens
  misc_RNA (1)...(19): siRNA sense strand
caggagaaagacuguguuu

SEQ ID NO: 1256341 - RNA, 19 nt, Homo sapiens
  misc_RNA (1)...(19): siRNA sense strand
ucacauccuggacgaauga

SEQ ID NO: 1256342 - RNA, 19 nt, Homo sapiens
  misc_RNA (1)...(19): siRNA sense strand
gcuagaagcaagaguagag

SEQ ID NO: 1256343 - RNA, 19 nt, Homo sapiens
  misc_RNA (1)...(19): siRNA sense strand
caggcuugcuuuccucaga

SEQ ID NO: 1256344 - RNA, 19 nt, Homo sapiens
  misc_RNA (1)...(19): siRNA sense strand
ccuggagucucucuaucaa

SEQ ID NO: 1256345 - RNA, 19 nt, Homo sapiens
  misc_RNA (1)...(19): siRNA sense strand
aaacgucgacucuucauac

SEQ ID NO: 1256346 - RNA, 19 nt, Homo sapiens
  misc_RNA (1)...(19): siRNA sense strand
caaacgucgacucuucaua

SEQ ID NO: 1256347 - RNA, 19 nt, Homo sapiens
  misc_RNA (1)...(19): siRNA sense strand
gagaagagaaagacaaacg

SEQ ID NO: 1256348 - RNA, 19 nt, Homo sapiens
  misc_RNA (1)...(19): siRNA sense strand
gauuugguauuggaagaau

SEQ ID NO: 1256349 - RNA, 19 nt, Homo sapiens
  misc_RNA (1)...(19): siRNA sense strand
ccagagacccugcgauaac

SEQ ID NO: 1256350 - RNA, 19 nt, Homo sapiens
  misc_RNA (1)...(19): siRNA sense strand
ggucugccgucgcaaguac

SEQ ID NO: 1256351 - RNA, 19 nt, Homo sapiens
  misc_RNA (1)...(19): siRNA sense strand
ucagaggaaauuugucuug

SEQ ID NO: 1256352 - RNA, 19 nt, Homo sapiens
  misc_RNA (1)...(19): siRNA sense strand
agaugaugcugacccaaga

SEQ ID NO: 1256353 - RNA, 19 nt, Homo sapiens
  misc_RNA (1)...(19): siRNA sense strand
ugccagagacccugcgaua

SEQ ID NO: 1256354 - RNA, 19 nt, Homo sapiens
  misc_RNA (1)...(19): siRNA sense strand
ggccacagauauaacuucu

SEQ ID NO: 1256355 - RNA, 19 nt, Homo sapiens
  misc_RNA (1)...(19): siRNA sense strand
cagaagaccaacauuugug

SEQ ID NO: 1256356 - RNA, 19 nt, Homo sapiens
  misc_RNA (1)...(19): siRNA sense strand
gguaugugcagcagaugaa

SEQ ID NO: 1256357 - RNA, 19 nt, Homo sapiens
  misc_RNA (1)...(19): siRNA sense strand
gcacuuaccuugcuuccaa

SEQ ID NO: 1256358 - RNA, 19 nt, Homo sapiens
  misc_RNA (1)...(19): siRNA sense strand
gcacauggauucaguaugg

SEQ ID NO: 1256359 - RNA, 19 nt, Homo sapiens
  misc_RNA (1)...(19): siRNA sense strand
guagaaacauggcauauag

SEQ ID NO: 1256360 - RNA, 19 nt, Homo sapiens
  misc_RNA (1)...(19): siRNA sense strand
gcaagcacaugcagaagaa

SEQ ID NO: 1256361 - RNA, 19 nt, Homo sapiens
  misc_RNA (1)...(19): siRNA sense strand
gaacaaagaggaauuagca

SEQ ID NO: 1256362 - RNA, 19 nt, Homo sapiens
  misc_RNA (1)...(19): siRNA sense strand
gaaauaucaucaccuagga

SEQ ID NO: 1256363 - RNA, 19 nt, Homo sapiens
  misc_RNA (1)...(19): siRNA sense strand
caaauauucucaugagguu

SEQ ID NO: 1256364 - RNA, 19 nt, Homo sapiens
  misc_RNA (1)...(19): siRNA sense strand
gaguagagaucgguucuuu

SEQ ID NO: 1256365 - RNA, 19 nt, Homo sapiens
  misc_RNA (1)...(19): siRNA sense strand
gaucaugacucagaggaaa

SEQ ID NO: 1256366 - RNA, 19 nt, Homo sapiens
  misc_RNA (1)...(19): siRNA sense strand
gcccagagcuccuucuuca

SEQ ID NO: 1256367 - RNA, 19 nt, Homo sapiens
  misc_RNA (1)...(19): siRNA sense strand
gaaaggugcuggccaucau

SEQ ID NO: 1256368 - RNA, 19 nt, Homo sapiens
  misc_RNA (1)...(19): siRNA sense strand
guaggaaguuauacaauca

SEQ ID NO: 1256369 - RNA, 19 nt, Homo sapiens
  misc_RNA (1)...(19): siRNA sense strand
agagaaauaucaucaccua

SEQ ID NO: 1256370 - RNA, 19 nt, Homo sapiens
  misc_RNA (1)...(19): siRNA sense strand
ggcagaugcuuauugguaa

SEQ ID NO: 1256371 - RNA, 19 nt, Homo sapiens
  misc_RNA (1)...(19): siRNA sense strand
gauauaacuucuaccagau

SEQ ID NO: 1256372 - RNA, 19 nt, Homo sapiens
  misc_RNA (1)...(19): siRNA sense strand
ccacagauauaacuucuac

SEQ ID NO: 1256373 - RNA, 19 nt, Homo sapiens
  misc_RNA (1)...(19): siRNA sense strand
gaguagcacuuguuaacga

SEQ ID NO: 1256374 - RNA, 19 nt, Homo sapiens
  misc_RNA (1)...(19): siRNA sense strand
gcagaugcuuauugguaaa

SEQ ID NO: 1256375 - RNA, 19 nt, Homo sapiens
  misc_RNA (1)...(19): siRNA sense strand
gaggugugcugcuucauca

SEQ ID NO: 1256376 - RNA, 19 nt, Homo sapiens
  misc_RNA (1)...(19): siRNA sense strand
ggaaauuugucuugaccau

SEQ ID NO: 1256377 - RNA, 19 nt, Homo sapiens
  misc_RNA (1)...(19): siRNA sense strand
guagagaucgguucuuuca

SEQ ID NO: 1256378 - RNA, 19 nt, Homo sapiens
  misc_RNA (1)...(19): siRNA sense strand
caucagaagaccaacauuu

SEQ ID NO: 1256379 - RNA, 19 nt, Homo sapiens
  misc_RNA (1)...(19): siRNA sense strand
aaacauagcuuccaaaacu

SEQ ID NO: 1256380 - RNA, 19 nt, Homo sapiens
  misc_RNA (1)...(19): siRNA sense strand
uagcagcggucacagagaa

SEQ ID NO: 1256381 - RNA, 19 nt, Homo sapiens
  misc_RNA (1)...(19): siRNA sense strand
gagaaaggcuacuguaacc

SEQ ID NO: 1256382 - RNA, 19 nt, Homo sapiens
  misc_RNA (1)...(19): siRNA sense strand
ucucuggacugaacaaaga

SEQ ID NO: 1256383 - RNA, 19 nt, Homo sapiens
  misc_RNA (1)...(19): siRNA sense strand
ggacggacuuugagcacau

SEQ ID NO: 1256384 - RNA, 19 nt, Homo sapiens
  misc_RNA (1)...(19): siRNA sense strand
ggaguggccacagauauaa

SEQ ID NO: 1256385 - RNA, 19 nt, Homo sapiens
  misc_RNA (1)...(19): siRNA sense strand
ucucuuggcucucugcaaa

SEQ ID NO: 1256386 - RNA, 19 nt, Homo sapiens
  misc_RNA (1)...(19): siRNA sense strand
gaaauccaggcagcacuua

SEQ ID NO: 1256387 - RNA, 19 nt, Homo sapiens
  misc_RNA (1)...(19): siRNA sense strand
ucuaccagauccuuaaauu

SEQ ID NO: 1256388 - RNA, 19 nt, Homo sapiens
  misc_RNA (1)...(19): siRNA sense strand
agacaaacauagcuuccaa

SEQ ID NO: 1256389 - RNA, 19 nt, Homo sapiens
  misc_RNA (1)...(19): siRNA sense strand
gcagugcuccuccuccaaa

SEQ ID NO: 1256390 - RNA, 19 nt, Homo sapiens
  misc_RNA (1)...(19): siRNA sense strand
cagaggaaauuugucuuga

SEQ ID NO: 1256391 - RNA, 19 nt, Homo sapiens
  misc_RNA (1)...(19): siRNA sense strand
guucaagacuccacaucug

SEQ ID NO: 1256392 - RNA, 19 nt, Homo sapiens
  misc_RNA (1)...(19): siRNA sense strand
cuaccagauccuuaaauua

SEQ ID NO: 1256393 - RNA, 19 nt, Homo sapiens
  misc_RNA (1)...(19): siRNA sense strand
ucacagagaaauaucauca

SEQ ID NO: 1256394 - RNA, 19 nt, Homo sapiens
  misc_RNA (1)...(19): siRNA sense strand
ccagauccuuaaauuacaa

SEQ ID NO: 1256395 - RNA, 19 nt, Homo sapiens
  misc_RNA (1)...(19): siRNA sense strand
gcauauagggcuagaagca

SEQ ID NO: 1256396 - RNA, 19 nt, Homo sapiens
  misc_RNA (1)...(19): siRNA sense strand
gaauccaccucuguucugu

SEQ ID NO: 1256397 - RNA, 19 nt, Homo sapiens
  misc_RNA (1)...(19): siRNA sense strand
aaugguagcugcagcaaag

SEQ ID NO: 1256398 - RNA, 19 nt, Homo sapiens
  misc_RNA (1)...(19): siRNA sense strand
acaaguaccacaucuucua

SEQ ID NO: 1256399 - RNA, 19 nt, Homo sapiens
  misc_RNA (1)...(19): siRNA sense strand
uaucugaugucacaaguac

SEQ ID NO: 1256400 - RNA, 19 nt, Homo sapiens
  misc_RNA (1)...(19): siRNA sense strand
gaccaaggcgccaggagaa

SEQ ID NO: 1256401 - RNA, 19 nt, Homo sapiens
  misc_RNA (1)...(19): siRNA sense strand
cuucauaccuggagucucu

SEQ ID NO: 1256402 - RNA, 19 nt, Homo sapiens
  misc_RNA (1)...(19): siRNA sense strand
ccaccucuguucuguagga

SEQ ID NO: 1256403 - RNA, 19 nt, Homo sapiens
  misc_RNA (1)...(19): siRNA sense strand
uggcagaugcuuauuggua

SEQ ID NO: 1256404 - RNA, 19 nt, Homo sapiens
  misc_RNA (1)...(19): siRNA sense strand
ggaccugcuucccgagaug

SEQ ID NO: 1256405 - RNA, 19 nt, Homo sapiens
  misc_RNA (1)...(19): siRNA sense strand
ucaccaagccagccaauuc

SEQ ID NO: 1256406 - RNA, 19 nt, Homo sapiens
  misc_RNA (1)...(19): siRNA sense strand
gaucucacccgcaaguuca

SEQ ID NO: 1256407 - RNA, 19 nt, Homo sapiens
  misc_RNA (1)...(19): siRNA sense strand
cgagcggaauuuaugcaaa

SEQ ID NO: 1256408 - RNA, 19 nt, Homo sapiens
  misc_RNA (1)...(19): siRNA sense strand
ggaaauccaggcagcacuu

SEQ ID NO: 1256409 - RNA, 19 nt, Homo sapiens
  misc_RNA (1)...(19): siRNA sense strand
guccaaggcuacugaucuu

SEQ ID NO: 1256410 - RNA, 19 nt, Homo sapiens
  misc_RNA (1)...(19): siRNA sense strand
ucagggcagccaagaauuu

SEQ ID NO: 1256411 - RNA, 19 nt, Homo sapiens
  misc_RNA (1)...(19): siRNA sense strand
cgacgccucuccacuccuu

SEQ ID NO: 1256412 - RNA, 19 nt, Homo sapiens
  misc_RNA (1)...(19): siRNA sense strand
gguggcagaugcuuauugg

SEQ ID NO: 1256413 - RNA, 19 nt, Homo sapiens
  misc_RNA (1)...(19): siRNA sense strand
aaauuugucuugaccaucu

SEQ ID NO: 1256414 - RNA, 19 nt, Homo sapiens
  misc_RNA (1)...(19): siRNA sense strand
gguggaugaucaugacuca

SEQ ID NO: 1256415 - RNA, 19 nt, Homo sapiens
  misc_RNA (1)...(19): siRNA sense strand
ucacaaguaccacaucuuc

SEQ ID NO: 1256416 - RNA, 19 nt, Homo sapiens
  misc_RNA (1)...(19): siRNA sense strand
gaucaucaauggcaaaagu

SEQ ID NO: 1256417 - RNA, 19 nt, Homo sapiens
  misc_RNA (1)...(19): siRNA sense strand
gagggucggcagcagauuu

SEQ ID NO: 1256418 - RNA, 19 nt, Homo sapiens
  misc_RNA (1)...(19): siRNA sense strand
agagaaagacaaacggaaa

SEQ ID NO: 1256419 - RNA, 19 nt, Homo sapiens
  misc_RNA (1)...(19): siRNA sense strand
gauggaguggccacagaua

SEQ ID NO: 1256420 - RNA, 19 nt, Homo sapiens
  misc_RNA (1)...(19): siRNA sense strand
uuaccuugcuuccaauuca

SEQ ID NO: 1256421 - RNA, 19 nt, Homo sapiens
  misc_RNA (1)...(19): siRNA sense strand
cguagaaacauggcauaua

SEQ ID NO: 1256422 - RNA, 19 nt, Homo sapiens
  misc_RNA (1)...(19): siRNA sense strand
gcacaccuaguccagauca

SEQ ID NO: 1256423 - RNA, 19 nt, Homo sapiens
  misc_RNA (1)...(19): siRNA sense strand
gaugauucagacaaacaua

SEQ ID NO: 1256424 - RNA, 19 nt, Homo sapiens
  misc_RNA (1)...(19): siRNA sense strand
uggagucucucuaucaauc

SEQ ID NO: 1256425 - RNA, 19 nt, Homo sapiens
  misc_RNA (1)...(19): siRNA sense strand
cacgaacucucuggacuga

SEQ ID NO: 1256426 - RNA, 19 nt, Homo sapiens
  misc_RNA (1)...(19): siRNA sense strand
gguaaugaguugugauucc

SEQ ID NO: 1256427 - RNA, 19 nt, Homo sapiens
  misc_RNA (1)...(19): siRNA sense strand
aaaccuggacggacuuuga

SEQ ID NO: 1256428 - RNA, 19 nt, Homo sapiens
  misc_RNA (1)...(19): siRNA sense strand
uggaguggccacagauaua

SEQ ID NO: 1256429 - RNA, 19 nt, Homo sapiens
  misc_RNA (1)...(19): siRNA sense strand
ccagagcuccuucuucaca

SEQ ID NO: 1256430 - RNA, 19 nt, Homo sapiens
  misc_RNA (1)...(19): siRNA sense strand
aaugaguugugauuccuuu

SEQ ID NO: 1256431 - RNA, 19 nt, Homo sapiens
  misc_RNA (1)...(19): siRNA sense strand
cgaacucucuggacugaac

SEQ ID NO: 1256432 - RNA, 19 nt, Homo sapiens
  misc_RNA (1)...(19): siRNA sense strand
uaccagauccuuaaauuac

SEQ ID NO: 1256433 - RNA, 19 nt, Homo sapiens
  misc_RNA (1)...(19): siRNA sense strand
ggaauccaccucuguucug

SEQ ID NO: 1256434 - RNA, 19 nt, Homo sapiens
  misc_RNA (1)...(19): siRNA sense strand
cgagggaacugucguuuuc

SEQ ID NO: 1256435 - RNA, 19 nt, Homo sapiens
  misc_RNA (1)...(19): siRNA sense strand
aagggaugauucagacaaa

SEQ ID NO: 1256436 - RNA, 19 nt, Homo sapiens
  misc_RNA (1)...(19): siRNA sense strand
caagggaugauucagacaa

SEQ ID NO: 1256437 - RNA, 19 nt, Homo sapiens
  misc_RNA (1)...(19): siRNA sense strand
auucaaacgucgacucuuc

SEQ ID NO: 1256438 - RNA, 19 nt, Homo sapiens
  misc_RNA (1)...(19): siRNA sense strand
cuucuaggguggaugauca

SEQ ID NO: 1256439 - RNA, 19 nt, Homo sapiens
  misc_RNA (1)...(19): siRNA sense strand
gcucuucucuuggcucucu

SEQ ID NO: 1256440 - RNA, 19 nt, Homo sapiens
  misc_RNA (1)...(19): siRNA sense strand
caggagaaagacuguguuu

SEQ ID NO: 1256441 - RNA, 19 nt, Homo sapiens
  misc_RNA (1)...(19): siRNA sense strand
ucacauccuggacgaauga

SEQ ID NO: 1256442 - RNA, 19 nt, Homo sapiens
  misc_RNA (1)...(19): siRNA sense strand
gcuagaagcaagaguagag

SEQ ID NO: 1256443 - RNA, 19 nt, Homo sapiens
  misc_RNA (1)...(19): siRNA sense strand
caggcuugcuuuccucaga

SEQ ID NO: 1256444 - RNA, 19 nt, Homo sapiens
  misc_RNA (1)...(19): siRNA sense strand
ccuggagucucucuaucaa

SEQ ID NO: 1256445 - RNA, 19 nt, Homo sapiens
  misc_RNA (1)...(19): siRNA sense strand
aaacgucgacucuucauac

SEQ ID NO: 1256446 - RNA, 19 nt, Homo sapiens
  misc_RNA (1)...(19): siRNA sense strand
caaacgucgacucuucaua

SEQ ID NO: 1256447 - RNA, 19 nt, Homo sapiens
  misc_RNA (1)...(19): siRNA sense strand
gagaagagaaagacaaacg

SEQ ID NO: 1256448 - RNA, 19 nt, Homo sapiens
  misc_RNA (1)...(19): siRNA sense strand
gauuugguauuggaagaau

SEQ ID NO: 1256449 - RNA, 19 nt, Homo sapiens
  misc_RNA (1)...(19): siRNA sense strand
ccagagacccugcgauaac

SEQ ID NO: 1256450 - RNA, 19 nt, Homo sapiens
  misc_RNA (1)...(19): siRNA sense strand
ggucugccgucgcaaguac

SEQ ID NO: 1256451 - RNA, 19 nt, Homo sapiens
  misc_RNA (1)...(19): siRNA sense strand
ucagaggaaauuugucuug

SEQ ID NO: 1256452 - RNA, 19 nt, Homo sapiens
  misc_RNA (1)...(19): siRNA sense strand
agaugaugcugacccaaga

SEQ ID NO: 1256453 - RNA, 19 nt, Homo sapiens
  misc_RNA (1)...(19): siRNA sense strand
ugccagagacccugcgaua

SEQ ID NO: 1256454 - RNA, 19 nt, Homo sapiens
  misc_RNA (1)...(19): siRNA sense strand
ggccacagauauaacuucu

SEQ ID NO: 1256455 - RNA, 19 nt, Homo sapiens
  misc_RNA (1)...(19): siRNA sense strand
cagaagaccaacauuugug

SEQ ID NO: 1256456 - RNA, 19 nt, Homo sapiens
  misc_RNA (1)...(19): siRNA sense strand
gguaugugcagcagaugaa

SEQ ID NO: 1256457 - RNA, 19 nt, Homo sapiens
  misc_RNA (1)...(19): siRNA sense strand
cgaauucucuggugguuga

SEQ ID NO: 1256458 - RNA, 19 nt, Homo sapiens
  misc_RNA (1)...(19): siRNA sense strand
cguaugagcuucggauuga

SEQ ID NO: 1256459 - RNA, 19 nt, Homo sapiens
  misc_RNA (1)...(19): siRNA sense strand
gcagcugcauggcuacuug

SEQ ID NO: 1256460 - RNA, 19 nt, Homo sapiens
  misc_RNA (1)...(19): siRNA sense strand
cagaaacuccgacauugaa

SEQ ID NO: 1256461 - RNA, 19 nt, Homo sapiens
  misc_RNA (1)...(19): siRNA sense strand
gcagagcacggacagcuau

SEQ ID NO: 1256462 - RNA, 19 nt, Homo sapiens
  misc_RNA (1)...(19): siRNA sense strand
ucagaaacuccgacauuga

SEQ ID NO: 1256463 - RNA, 19 nt, Homo sapiens
  misc_RNA (1)...(19): siRNA sense strand
cgacauugaacuucggaaa

SEQ ID NO: 1256464 - RNA, 19 nt, Homo sapiens
  misc_RNA (1)...(19): siRNA sense strand
gaagccaguaccagcguuu

SEQ ID NO: 1256465 - RNA, 19 nt, Homo sapiens
  misc_RNA (1)...(19): siRNA sense strand
gaaaggagagacggacauc

SEQ ID NO: 1256466 - RNA, 19 nt, Homo sapiens
  misc_RNA (1)...(19): siRNA sense strand
gaacuucggaaaggagaga

SEQ ID NO: 1256467 - RNA, 19 nt, Homo sapiens
  misc_RNA (1)...(19): siRNA sense strand
agacggacaucgggaggaa

SEQ ID NO: 1256468 - RNA, 19 nt, Homo sapiens
  misc_RNA (1)...(19): siRNA sense strand
gcaggacuccaaggucauu

SEQ ID NO: 1256469 - RNA, 19 nt, Homo sapiens
  misc_RNA (1)...(19): siRNA sense strand
acaccaaaguccuggagau

SEQ ID NO: 1256470 - RNA, 19 nt, Homo sapiens
  misc_RNA (1)...(19): siRNA sense strand
agagaaagcgaagccagua

SEQ ID NO: 1256471 - RNA, 19 nt, Homo sapiens
  misc_RNA (1)...(19): siRNA sense strand
acucagaaacuccgacauu

SEQ ID NO: 1256472 - RNA, 19 nt, Homo sapiens
  misc_RNA (1)...(19): siRNA sense strand
gccggaauccugaaacuca

SEQ ID NO: 1256473 - RNA, 19 nt, Homo sapiens
  misc_RNA (1)...(19): siRNA sense strand
cucagaaacuccgacauug

SEQ ID NO: 1256474 - RNA, 19 nt, Homo sapiens
  misc_RNA (1)...(19): siRNA sense strand
ggaaaggagagacggacau

SEQ ID NO: 1256475 - RNA, 19 nt, Homo sapiens
  misc_RNA (1)...(19): siRNA sense strand
cagcaugcgagccgucauu

SEQ ID NO: 1256476 - RNA, 19 nt, Homo sapiens
  misc_RNA (1)...(19): siRNA sense strand
aaacuccgacauugaacuu

SEQ ID NO: 1256477 - RNA, 19 nt, Homo sapiens
  misc_RNA (1)...(19): siRNA sense strand
agaaugagccgcugaugcu

SEQ ID NO: 1256478 - RNA, 19 nt, Homo sapiens
  misc_RNA (1)...(19): siRNA sense strand
gccgaauucucuggugguu

SEQ ID NO: 1256479 - RNA, 19 nt, Homo sapiens
  misc_RNA (1)...(19): siRNA sense strand
acauugaacuucggaaagg

SEQ ID NO: 1256480 - RNA, 19 nt, Homo sapiens
  misc_RNA (1)...(19): siRNA sense strand
gacauugaacuucggaaag

SEQ ID NO: 1256481 - RNA, 19 nt, Homo sapiens
  misc_RNA (1)...(19): siRNA sense strand
gaaacuccgacauugaacu

SEQ ID NO: 1256482 - RNA, 19 nt, Homo sapiens
  misc_RNA (1)...(19): siRNA sense strand
gcaugcgagccgucauuga

SEQ ID NO: 1256483 - RNA, 19 nt, Homo sapiens
  misc_RNA (1)...(19): siRNA sense strand
gaccugugcaagccgaauu

SEQ ID NO: 1256484 - RNA, 19 nt, Homo sapiens
  misc_RNA (1)...(19): siRNA sense strand
gaaagcgaagccaguacca

SEQ ID NO: 1256485 - RNA, 19 nt, Homo sapiens
  misc_RNA (1)...(19): siRNA sense strand
ggagaaugagccgcugaug

SEQ ID NO: 1256486 - RNA, 19 nt, Homo sapiens
  misc_RNA (1)...(19): siRNA sense strand
cgaauucucuggugguuga

SEQ ID NO: 1256487 - RNA, 19 nt, Homo sapiens
  misc_RNA (1)...(19): siRNA sense strand
cguaugagcuucggauuga

SEQ ID NO: 1256488 - RNA, 19 nt, Homo sapiens
  misc_RNA (1)...(19): siRNA sense strand
gcagcugcauggcuacuug

SEQ ID NO: 1256489 - RNA, 19 nt, Homo sapiens
  misc_RNA (1)...(19): siRNA sense strand
cagaaacuccgacauugaa

SEQ ID NO: 1256490 - RNA, 19 nt, Homo sapiens
  misc_RNA (1)...(19): siRNA sense strand
gcagagcacggacagcuau

SEQ ID NO: 1256491 - RNA, 19 nt, Homo sapiens
  misc_RNA (1)...(19): siRNA sense strand
ucagaaacuccgacauuga

SEQ ID NO: 1256492 - RNA, 19 nt, Homo sapiens
  misc_RNA (1)...(19): siRNA sense strand
cgacauugaacuucggaaa

SEQ ID NO: 1256493 - RNA, 19 nt, Homo sapiens
  misc_RNA (1)...(19): siRNA sense strand
gaagccaguaccagcguuu

SEQ ID NO: 1256494 - RNA, 19 nt, Homo sapiens
  misc_RNA (1)...(19): siRNA sense strand
gaaaggagagacggacauc

SEQ ID NO: 1256495 - RNA, 19 nt, Homo sapiens
  misc_RNA (1)...(19): siRNA sense strand
gaacuucggaaaggagaga

SEQ ID NO: 1256496 - RNA, 19 nt, Homo sapiens
  misc_RNA (1)...(19): siRNA sense strand
agacggacaucgggaggaa

SEQ ID NO: 1256497 - RNA, 19 nt, Homo sapiens
  misc_RNA (1)...(19): siRNA sense strand
gcaggacuccaaggucauu

SEQ ID NO: 1256498 - RNA, 19 nt, Homo sapiens
  misc_RNA (1)...(19): siRNA sense strand
acaccaaaguccuggagau

SEQ ID NO: 1256499 - RNA, 19 nt, Homo sapiens
  misc_RNA (1)...(19): siRNA sense strand
agagaaagcgaagccagua

SEQ ID NO: 1256500 - RNA, 19 nt, Homo sapiens
  misc_RNA (1)...(19): siRNA sense strand
acucagaaacuccgacauu

SEQ ID NO: 1256501 - RNA, 19 nt, Homo sapiens
  misc_RNA (1)...(19): siRNA sense strand
gccggaauccugaaacuca

SEQ ID NO: 1256502 - RNA, 19 nt, Homo sapiens
  misc_RNA (1)...(19): siRNA sense strand
cucagaaacuccgacauug

SEQ ID NO: 1256503 - RNA, 19 nt, Homo sapiens
  misc_RNA (1)...(19): siRNA sense strand
ggaaaggagagacggacau

SEQ ID NO: 1256504 - RNA, 19 nt, Homo sapiens
  misc_RNA (1)...(19): siRNA sense strand
cagcaugcgagccgucauu

SEQ ID NO: 1256505 - RNA, 19 nt, Homo sapiens
  misc_RNA (1)...(19): siRNA sense strand
aaacuccgacauugaacuu

SEQ ID NO: 1256506 - RNA, 19 nt, Homo sapiens
  misc_RNA (1)...(19): siRNA sense strand
agaaugagccgcugaugcu

SEQ ID NO: 1256507 - RNA, 19 nt, Homo sapiens
  misc_RNA (1)...(19): siRNA sense strand
gccgaauucucuggugguu

SEQ ID NO: 1256508 - RNA, 19 nt, Homo sapiens
  misc_RNA (1)...(19): siRNA sense strand
acauugaacuucggaaagg

SEQ ID NO: 1256509 - RNA, 19 nt, Homo sapiens
  misc_RNA (1)...(19): siRNA sense strand
gacauugaacuucggaaag

SEQ ID NO: 1256510 - RNA, 19 nt, Homo sapiens
  misc_RNA (1)...(19): siRNA sense strand
gaaacuccgacauugaacu

SEQ ID NO: 1256511 - RNA, 19 nt, Homo sapiens
  misc_RNA (1)...(19): siRNA sense strand
gcaugcgagccgucauuga

SEQ ID NO: 1256512 - RNA, 19 nt, Homo sapiens
  misc_RNA (1)...(19): siRNA sense strand
gaccugugcaagccgaauu

SEQ ID NO: 1256513 - RNA, 19 nt, Homo sapiens
  misc_RNA (1)...(19): siRNA sense strand
gaaagcgaagccaguacca

SEQ ID NO: 1256514 - RNA, 19 nt, Homo sapiens
  misc_RNA (1)...(19): siRNA sense strand
ggagaaugagccgcugaug

SEQ ID NO: 1256515 - RNA, 19 nt, Homo sapiens
  misc_RNA (1)...(19): siRNA sense strand
cgaauucucuggugguuga

SEQ ID NO: 1256516 - RNA, 19 nt, Homo sapiens
  misc_RNA (1)...(19): siRNA sense strand
cagaaacuccgacauugaa

SEQ ID NO: 1256517 - RNA, 19 nt, Homo sapiens
  misc_RNA (1)...(19): siRNA sense strand
gcagagcacggacagcuau

SEQ ID NO: 1256518 - RNA, 19 nt, Homo sapiens
  misc_RNA (1)...(19): siRNA sense strand
ucagaaacuccgacauuga

SEQ ID NO: 1256519 - RNA, 19 nt, Homo sapiens
  misc_RNA (1)...(19): siRNA sense strand
cgacauugaacuucggaaa

SEQ ID NO: 1256520 - RNA, 19 nt, Homo sapiens
  misc_RNA (1)...(19): siRNA sense strand
gaagccaguaccagcguuu

SEQ ID NO: 1256521 - RNA, 19 nt, Homo sapiens
  misc_RNA (1)...(19): siRNA sense strand
gaaaggagagacggacauc

SEQ ID NO: 1256522 - RNA, 19 nt, Homo sapiens
  misc_RNA (1)...(19): siRNA sense strand
gaacuucggaaaggagaga

SEQ ID NO: 1256523 - RNA, 19 nt, Homo sapiens
  misc_RNA (1)...(19): siRNA sense strand
agacggacaucgggaggaa

SEQ ID NO: 1256524 - RNA, 19 nt, Homo sapiens
  misc_RNA (1)...(19): siRNA sense strand
gcaggacuccaaggucauu

SEQ ID NO: 1256525 - RNA, 19 nt, Homo sapiens
  misc_RNA (1)...(19): siRNA sense strand
gccggaauccugaaacuca

SEQ ID NO: 1256526 - RNA, 19 nt, Homo sapiens
  misc_RNA (1)...(19): siRNA sense strand
agagaaagcgaagccagua

SEQ ID NO: 1256527 - RNA, 19 nt, Homo sapiens
  misc_RNA (1)...(19): siRNA sense strand
acucagaaacuccgacauu

SEQ ID NO: 1256528 - RNA, 19 nt, Homo sapiens
  misc_RNA (1)...(19): siRNA sense strand
acaccaaaguccuggagau

SEQ ID NO: 1256529 - RNA, 19 nt, Homo sapiens
  misc_RNA (1)...(19): siRNA sense strand
cucagaaacuccgacauug

SEQ ID NO: 1256530 - RNA, 19 nt, Homo sapiens
  misc_RNA (1)...(19): siRNA sense strand
ggaaaggagagacggacau

SEQ ID NO: 1256531 - RNA, 19 nt, Homo sapiens
  misc_RNA (1)...(19): siRNA sense strand
cagcaugcgagccgucauu

SEQ ID NO: 1256532 - RNA, 19 nt, Homo sapiens
  misc_RNA (1)...(19): siRNA sense strand
aaacuccgacauugaacuu

SEQ ID NO: 1256533 - RNA, 19 nt, Homo sapiens
  misc_RNA (1)...(19): siRNA sense strand
gcaugcgagccgucauuga

SEQ ID NO: 1256534 - RNA, 19 nt, Homo sapiens
  misc_RNA (1)...(19): siRNA sense strand
gccgaauucucuggugguu

SEQ ID NO: 1256535 - RNA, 19 nt, Homo sapiens
  misc_RNA (1)...(19): siRNA sense strand
acauugaacuucggaaagg

SEQ ID NO: 1256536 - RNA, 19 nt, Homo sapiens
  misc_RNA (1)...(19): siRNA sense strand
gacauugaacuucggaaag

SEQ ID NO: 1256537 - RNA, 19 nt, Homo sapiens
  misc_RNA (1)...(19): siRNA sense strand
gaaacuccgacauugaacu

SEQ ID NO: 1256538 - RNA, 19 nt, Homo sapiens
  misc_RNA (1)...(19): siRNA sense strand
gaccugugcaagccgaauu

SEQ ID NO: 1256539 - RNA, 19 nt, Homo sapiens
  misc_RNA (1)...(19): siRNA sense strand
gaaagcgaagccaguacca

SEQ ID NO: 1256540 - RNA, 19 nt, Homo sapiens
  misc_RNA (1)...(19): siRNA sense strand
cgaauucucuggugguuga

SEQ ID NO: 1256541 - RNA, 19 nt, Homo sapiens
  misc_RNA (1)...(19): siRNA sense strand
cguaugagcuucggauuga

SEQ ID NO: 1256542 - RNA, 19 nt, Homo sapiens
  misc_RNA (1)...(19): siRNA sense strand
gcagcugcauggcuacuug

SEQ ID NO: 1256543 - RNA, 19 nt, Homo sapiens
  misc_RNA (1)...(19): siRNA sense strand
cagaaacuccgacauugaa

SEQ ID NO: 1256544 - RNA, 19 nt, Homo sapiens
  misc_RNA (1)...(19): siRNA sense strand
gcagagcacggacagcuau

SEQ ID NO: 1256545 - RNA, 19 nt, Homo sapiens
  misc_RNA (1)...(19): siRNA sense strand
ucagaaacuccgacauuga

SEQ ID NO: 1256546 - RNA, 19 nt, Homo sapiens
  misc_RNA (1)...(19): siRNA sense strand
cgacauugaacuucggaaa

SEQ ID NO: 1256547 - RNA, 19 nt, Homo sapiens
  misc_RNA (1)...(19): siRNA sense strand
gaagccaguaccagcguuu

SEQ ID NO: 1256548 - RNA, 19 nt, Homo sapiens
  misc_RNA (1)...(19): siRNA sense strand
gaaaggagagacggacauc

SEQ ID NO: 1256549 - RNA, 19 nt, Homo sapiens
  misc_RNA (1)...(19): siRNA sense strand
gaacuucggaaaggagaga

SEQ ID NO: 1256550 - RNA, 19 nt, Homo sapiens
  misc_RNA (1)...(19): siRNA sense strand
agacggacaucgggaggaa

SEQ ID NO: 1256551 - RNA, 19 nt, Homo sapiens
  misc_RNA (1)...(19): siRNA sense strand
gcaggacuccaaggucauu

SEQ ID NO: 1256552 - RNA, 19 nt, Homo sapiens
  misc_RNA (1)...(19): siRNA sense strand
acaccaaaguccuggagau

SEQ ID NO: 1256553 - RNA, 19 nt, Homo sapiens
  misc_RNA (1)...(19): siRNA sense strand
agagaaagcgaagccagua

SEQ ID NO: 1256554 - RNA, 19 nt, Homo sapiens
  misc_RNA (1)...(19): siRNA sense strand
acucagaaacuccgacauu

SEQ ID NO: 1256555 - RNA, 19 nt, Homo sapiens
  misc_RNA (1)...(19): siRNA sense strand
gccggaauccugaaacuca

SEQ ID NO: 1256556 - RNA, 19 nt, Homo sapiens
  misc_RNA (1)...(19): siRNA sense strand
cucagaaacuccgacauug

SEQ ID NO: 1256557 - RNA, 19 nt, Homo sapiens
  misc_RNA (1)...(19): siRNA sense strand
ggaaaggagagacggacau

SEQ ID NO: 1256558 - RNA, 19 nt, Homo sapiens
  misc_RNA (1)...(19): siRNA sense strand
cagcaugcgagccgucauu

SEQ ID NO: 1256559 - RNA, 19 nt, Homo sapiens
  misc_RNA (1)...(19): siRNA sense strand
aaacuccgacauugaacuu

SEQ ID NO: 1256560 - RNA, 19 nt, Homo sapiens
  misc_RNA (1)...(19): siRNA sense strand
agaaugagccgcugaugcu

SEQ ID NO: 1256561 - RNA, 19 nt, Homo sapiens
  misc_RNA (1)...(19): siRNA sense strand
gccgaauucucuggugguu

SEQ ID NO: 1256562 - RNA, 19 nt, Homo sapiens
  misc_RNA (1)...(19): siRNA sense strand
acauugaacuucggaaagg

SEQ ID NO: 1256563 - RNA, 19 nt, Homo sapiens
  misc_RNA (1)...(19): siRNA sense strand
gacauugaacuucggaaag

SEQ ID NO: 1256564 - RNA, 19 nt, Homo sapiens
  misc_RNA (1)...(19): siRNA sense strand
gaaacuccgacauugaacu

SEQ ID NO: 1256565 - RNA, 19 nt, Homo sapiens
  misc_RNA (1)...(19): siRNA sense strand
gcaugcgagccgucauuga

SEQ ID NO: 1256566 - RNA, 19 nt, Homo sapiens
  misc_RNA (1)...(19): siRNA sense strand
gaccugugcaagccgaauu

SEQ ID NO: 1256567 - RNA, 19 nt, Homo sapiens
  misc_RNA (1)...(19): siRNA sense strand
gaaagcgaagccaguacca

SEQ ID NO: 1256568 - RNA, 19 nt, Homo sapiens
  misc_RNA (1)...(19): siRNA sense strand
ggagaaugagccgcugaug

SEQ ID NO: 1256569 - RNA, 19 nt, Homo sapiens
  misc_RNA (1)...(19): siRNA sense strand
cgaauucucuggugguuga

SEQ ID NO: 1256570 - RNA, 19 nt, Homo sapiens
  misc_RNA (1)...(19): siRNA sense strand
cguaugagcuucggauuga

SEQ ID NO: 1256571 - RNA, 19 nt, Homo sapiens
  misc_RNA (1)...(19): siRNA sense strand
gcagcugcauggcuacuug

SEQ ID NO: 1256572 - RNA, 19 nt, Homo sapiens
  misc_RNA (1)...(19): siRNA sense strand
cagaaacuccgacauugaa

SEQ ID NO: 1256573 - RNA, 19 nt, Homo sapiens
  misc_RNA (1)...(19): siRNA sense strand
gcagagcacggacagcuau

SEQ ID NO: 1256574 - RNA, 19 nt, Homo sapiens
  misc_RNA (1)...(19): siRNA sense strand
ucagaaacuccgacauuga

SEQ ID NO: 1256575 - RNA, 19 nt, Homo sapiens
  misc_RNA (1)...(19): siRNA sense strand
cgacauugaacuucggaaa

SEQ ID NO: 1256576 - RNA, 19 nt, Homo sapiens
  misc_RNA (1)...(19): siRNA sense strand
gaagccaguaccagcguuu

SEQ ID NO: 1256577 - RNA, 19 nt, Homo sapiens
  misc_RNA (1)...(19): siRNA sense strand
gaaaggagagacggacauc

SEQ ID NO: 1256578 - RNA, 19 nt, Homo sapiens
  misc_RNA (1)...(19): siRNA sense strand
gaacuucggaaaggagaga

SEQ ID NO: 1256579 - RNA, 19 nt, Homo sapiens
  misc_RNA (1)...(19): siRNA sense strand
agacggacaucgggaggaa

SEQ ID NO: 1256580 - RNA, 19 nt, Homo sapiens
  misc_RNA (1)...(19): siRNA sense strand
gcaggacuccaaggucauu

SEQ ID NO: 1256581 - RNA, 19 nt, Homo sapiens
  misc_RNA (1)...(19): siRNA sense strand
acaccaaaguccuggagau

SEQ ID NO: 1256582 - RNA, 19 nt, Homo sapiens
  misc_RNA (1)...(19): siRNA sense strand
agagaaagcgaagccagua

SEQ ID NO: 1256583 - RNA, 19 nt, Homo sapiens
  misc_RNA (1)...(19): siRNA sense strand
acucagaaacuccgacauu

SEQ ID NO: 1256584 - RNA, 19 nt, Homo sapiens
  misc_RNA (1)...(19): siRNA sense strand
gccggaauccugaaacuca

SEQ ID NO: 1256585 - RNA, 19 nt, Homo sapiens
  misc_RNA (1)...(19): siRNA sense strand
cucagaaacuccgacauug

SEQ ID NO: 1256586 - RNA, 19 nt, Homo sapiens
  misc_RNA (1)...(19): siRNA sense strand
ggaaaggagagacggacau

SEQ ID NO: 1256587 - RNA, 19 nt, Homo sapiens
  misc_RNA (1)...(19): siRNA sense strand
cagcaugcgagccgucauu

SEQ ID NO: 1256588 - RNA, 19 nt, Homo sapiens
  misc_RNA (1)...(19): siRNA sense strand
aaacuccgacauugaacuu

SEQ ID NO: 1256589 - RNA, 19 nt, Homo sapiens
  misc_RNA (1)...(19): siRNA sense strand
agaaugagccgcugaugcu

SEQ ID NO: 1256590 - RNA, 19 nt, Homo sapiens
  misc_RNA (1)...(19): siRNA sense strand
gccgaauucucuggugguu

SEQ ID NO: 1256591 - RNA, 19 nt, Homo sapiens
  misc_RNA (1)...(19): siRNA sense strand
acauugaacuucggaaagg

SEQ ID NO: 1256592 - RNA, 19 nt, Homo sapiens
  misc_RNA (1)...(19): siRNA sense strand
gacauugaacuucggaaag

SEQ ID NO: 1256593 - RNA, 19 nt, Homo sapiens
  misc_RNA (1)...(19): siRNA sense strand
gaaacuccgacauugaacu

SEQ ID NO: 1256594 - RNA, 19 nt, Homo sapiens
  misc_RNA (1)...(19): siRNA sense strand
gcaugcgagccgucauuga

SEQ ID NO: 1256595 - RNA, 19 nt, Homo sapiens
  misc_RNA (1)...(19): siRNA sense strand
gaccugugcaagccgaauu

SEQ ID NO: 1256596 - RNA, 19 nt, Homo sapiens
  misc_RNA (1)...(19): siRNA sense strand
gaaagcgaagccaguacca

SEQ ID NO: 1256597 - RNA, 19 nt, Homo sapiens
  misc_RNA (1)...(19): siRNA sense strand
ggagaaugagccgcugaug

SEQ ID NO: 1256598 - RNA, 19 nt, Homo sapiens
  misc_RNA (1)...(19): siRNA sense strand
agaagaaacugcucaagaa

SEQ ID NO: 1256599 - RNA, 19 nt, Homo sapiens
  misc_RNA (1)...(19): siRNA sense strand
ucaagagccugaagaauau

SEQ ID NO: 1256600 - RNA, 19 nt, Homo sapiens
  misc_RNA (1)...(19): siRNA sense strand
gcuccugggugaccuguua

SEQ ID NO: 1256601 - RNA, 19 nt, Homo sapiens
  misc_RNA (1)...(19): siRNA sense strand
ugaagcaacugcagaaaga

SEQ ID NO: 1256602 - RNA, 19 nt, Homo sapiens
  misc_RNA (1)...(19): siRNA sense strand
ggagccaucucuucccuuu

SEQ ID NO: 1256603 - RNA, 19 nt, Homo sapiens
  misc_RNA (1)...(19): siRNA sense strand
ccagauggguccacacuga

SEQ ID NO: 1256604 - RNA, 19 nt, Homo sapiens
  misc_RNA (1)...(19): siRNA sense strand
ucucacagcucaaguaugu

SEQ ID NO: 1256605 - RNA, 19 nt, Homo sapiens
  misc_RNA (1)...(19): siRNA sense strand
gcacagauuugagguagau

SEQ ID NO: 1256606 - RNA, 19 nt, Homo sapiens
  misc_RNA (1)...(19): siRNA sense strand
acagagauguggcagagua

SEQ ID NO: 1256607 - RNA, 19 nt, Homo sapiens
  misc_RNA (1)...(19): siRNA sense strand
uggugaagcuguugaauga

SEQ ID NO: 1256608 - RNA, 19 nt, Homo sapiens
  misc_RNA (1)...(19): siRNA sense strand
acacggauauuuacagaga

SEQ ID NO: 1256609 - RNA, 19 nt, Homo sapiens
  misc_RNA (1)...(19): siRNA sense strand
acacccagcuguucucaaa

SEQ ID NO: 1256610 - RNA, 19 nt, Homo sapiens
  misc_RNA (1)...(19): siRNA sense strand
ggacacagaugccccacua

SEQ ID NO: 1256611 - RNA, 19 nt, Homo sapiens
  misc_RNA (1)...(19): siRNA sense strand
cucaagagccugaagaaua

SEQ ID NO: 1256612 - RNA, 19 nt, Homo sapiens
  misc_RNA (1)...(19): siRNA sense strand
ccacaggcaucuccuaugg

SEQ ID NO: 1256613 - RNA, 19 nt, Homo sapiens
  misc_RNA (1)...(19): siRNA sense strand
gcagaggugugguguggau

SEQ ID NO: 1256614 - RNA, 19 nt, Homo sapiens
  misc_RNA (1)...(19): siRNA sense strand
gggcggaucugcuuaucug

SEQ ID NO: 1256615 - RNA, 19 nt, Homo sapiens
  misc_RNA (1)...(19): siRNA sense strand
ccaugaugcugucaccuuu

SEQ ID NO: 1256616 - RNA, 19 nt, Homo sapiens
  misc_RNA (1)...(19): siRNA sense strand
agauugagguggaggugua

SEQ ID NO: 1256617 - RNA, 19 nt, Homo sapiens
  misc_RNA (1)...(19): siRNA sense strand
gaccuuugcugucaugucu

SEQ ID NO: 1256618 - RNA, 19 nt, Homo sapiens
  misc_RNA (1)...(19): siRNA sense strand
agacacggauauuuacaga

SEQ ID NO: 1256619 - RNA, 19 nt, Homo sapiens
  misc_RNA (1)...(19): siRNA sense strand
gaacgacuccaugaucaau

SEQ ID NO: 1256620 - RNA, 19 nt, Homo sapiens
  misc_RNA (1)...(19): siRNA sense strand
gaagaaacugcucaagaag

SEQ ID NO: 1256621 - RNA, 19 nt, Homo sapiens
  misc_RNA (1)...(19): siRNA sense strand
ugccagacacggauauuua

SEQ ID NO: 1256622 - RNA, 19 nt, Homo sapiens
  misc_RNA (1)...(19): siRNA sense strand
ccacugucccucaucuaua

SEQ ID NO: 1256623 - RNA, 19 nt, Homo sapiens
  misc_RNA (1)...(19): siRNA sense strand
gugaagcuguugaaugaca

SEQ ID NO: 1256624 - RNA, 19 nt, Homo sapiens
  misc_RNA (1)...(19): siRNA sense strand
gcagccaucaucauuguga

SEQ ID NO: 1256625 - RNA, 19 nt, Homo sapiens
  misc_RNA (1)...(19): siRNA sense strand
ggucuaaagcacagauuug

SEQ ID NO: 1256626 - RNA, 19 nt, Homo sapiens
  misc_RNA (1)...(19): siRNA sense strand
ccucaucauugucaaacuu

SEQ ID NO: 1256627 - RNA, 19 nt, Homo sapiens
  misc_RNA (1)...(19): siRNA sense strand
ggagauaagauggaagaug

SEQ ID NO: 1256628 - RNA, 19 nt, Homo sapiens
  misc_RNA (1)...(19): siRNA sense strand
gagcucaggagauaagaug

SEQ ID NO: 1256629 - RNA, 19 nt, Homo sapiens
  misc_RNA (1)...(19): siRNA sense strand
gcagaaagaggagaagcuu

SEQ ID NO: 1256630 - RNA, 19 nt, Homo sapiens
  misc_RNA (1)...(19): siRNA sense strand
gcugaguucuacagugaug

SEQ ID NO: 1256631 - RNA, 19 nt, Homo sapiens
  misc_RNA (1)...(19): siRNA sense strand
ucaaugagacagccagaga

SEQ ID NO: 1256632 - RNA, 19 nt, Homo sapiens
  misc_RNA (1)...(19): siRNA sense strand
guacucagaggccaaggaa

SEQ ID NO: 1256633 - RNA, 19 nt, Homo sapiens
  misc_RNA (1)...(19): siRNA sense strand
aagaagaaacugcucaaga

SEQ ID NO: 1256634 - RNA, 19 nt, Homo sapiens
  misc_RNA (1)...(19): siRNA sense strand
aggagaagcuucggaaaca

SEQ ID NO: 1256635 - RNA, 19 nt, Homo sapiens
  misc_RNA (1)...(19): siRNA sense strand
gaggcgagacuaccacaug

SEQ ID NO: 1256636 - RNA, 19 nt, Homo sapiens
  misc_RNA (1)...(19): siRNA sense strand
gaagaugcaacagccaaug

SEQ ID NO: 1256637 - RNA, 19 nt, Homo sapiens
  misc_RNA (1)...(19): siRNA sense strand
uaagauggaagaugcaaca

SEQ ID NO: 1256638 - RNA, 19 nt, Homo sapiens
  misc_RNA (1)...(19): siRNA sense strand
cuucaucuacuuccuguuu

SEQ ID NO: 1256639 - RNA, 19 nt, Homo sapiens
  misc_RNA (1)...(19): siRNA sense strand
augcugaguucuacaguga

SEQ ID NO: 1256640 - RNA, 19 nt, Homo sapiens
  misc_RNA (1)...(19): siRNA sense strand
gugguuggguuugccauug

SEQ ID NO: 1256641 - RNA, 19 nt, Homo sapiens
  misc_RNA (1)...(19): siRNA sense strand
acgacuccaugaucaauga

SEQ ID NO: 1256642 - RNA, 19 nt, Homo sapiens
  misc_RNA (1)...(19): siRNA sense strand
augcauccaucaccaagaa

SEQ ID NO: 1256643 - RNA, 19 nt, Homo sapiens
  misc_RNA (1)...(19): siRNA sense strand
gcuugaggcugggcacuuc

SEQ ID NO: 1256644 - RNA, 19 nt, Homo sapiens
  misc_RNA (1)...(19): siRNA sense strand
gcgagacuaccacauggaa

SEQ ID NO: 1256645 - RNA, 19 nt, Homo sapiens
  misc_RNA (1)...(19): siRNA sense strand
caggagauaagauggaaga

SEQ ID NO: 1256646 - RNA, 19 nt, Homo sapiens
  misc_RNA (1)...(19): siRNA sense strand
gaggagaagcuucggaaac

SEQ ID NO: 1256647 - RNA, 19 nt, Homo sapiens
  misc_RNA (1)...(19): siRNA sense strand
uugaacgacuccaugauca

SEQ ID NO: 1256648 - RNA, 19 nt, Homo sapiens
  misc_RNA (1)...(19): siRNA sense strand
caacagccaauggucaaga

SEQ ID NO: 1256649 - RNA, 19 nt, Homo sapiens
  misc_RNA (1)...(19): siRNA sense strand
ggaagaugcaacagccaau

SEQ ID NO: 1256650 - RNA, 19 nt, Homo sapiens
  misc_RNA (1)...(19): siRNA sense strand
cuucuacccugucuucauc

SEQ ID NO: 1256651 - RNA, 19 nt, Homo sapiens
  misc_RNA (1)...(19): siRNA sense strand
guguuuggccuccaucuga

SEQ ID NO: 1256652 - RNA, 19 nt, Homo sapiens
  misc_RNA (1)...(19): siRNA sense strand
gaagaagaaacugcucaag

SEQ ID NO: 1256653 - RNA, 19 nt, Homo sapiens
  misc_RNA (1)...(19): siRNA sense strand
cccgugaguugcucuaugu

SEQ ID NO: 1256654 - RNA, 19 nt, Homo sapiens
  misc_RNA (1)...(19): siRNA sense strand
ggagaagcuucggaaacag

SEQ ID NO: 1256655 - RNA, 19 nt, Homo sapiens
  misc_RNA (1)...(19): siRNA sense strand
gauaagauggaagaugcaa

SEQ ID NO: 1256656 - RNA, 19 nt, Homo sapiens
  misc_RNA (1)...(19): siRNA sense strand
ugaagcuguugaaugacaa

SEQ ID NO: 1256657 - RNA, 19 nt, Homo sapiens
  misc_RNA (1)...(19): siRNA sense strand
gcucaggagauaagaugga

SEQ ID NO: 1256658 - RNA, 19 nt, Homo sapiens
  misc_RNA (1)...(19): siRNA sense strand
gcuaccggguggacagcaa

SEQ ID NO: 1256659 - RNA, 19 nt, Homo sapiens
  misc_RNA (1)...(19): siRNA sense strand
ggugggcagugugacagaa

SEQ ID NO: 1256660 - RNA, 19 nt, Homo sapiens
  misc_RNA (1)...(19): siRNA sense strand
cagcucaaguauguguuug

SEQ ID NO: 1256661 - RNA, 19 nt, Homo sapiens
  misc_RNA (1)...(19): siRNA sense strand
guggugaagcuguugaaug

SEQ ID NO: 1256662 - RNA, 19 nt, Homo sapiens
  misc_RNA (1)...(19): siRNA sense strand
cacugucccucaucuauac

SEQ ID NO: 1256663 - RNA, 19 nt, Homo sapiens
  misc_RNA (1)...(19): siRNA sense strand
gccacugucccucaucuau

SEQ ID NO: 1256664 - RNA, 19 nt, Homo sapiens
  misc_RNA (1)...(19): siRNA sense strand
gcacuucccggcacaucuc

SEQ ID NO: 1256665 - RNA, 19 nt, Homo sapiens
  misc_RNA (1)...(19): siRNA sense strand
ccuauggcaugggucuaaa

SEQ ID NO: 1256666 - RNA, 19 nt, Homo sapiens
  misc_RNA (1)...(19): siRNA sense strand
ugggugcccucuccuuugu

SEQ ID NO: 1256667 - RNA, 19 nt, Homo sapiens
  misc_RNA (1)...(19): siRNA sense strand
gggucuaaagcacagauuu

SEQ ID NO: 1256668 - RNA, 19 nt, Homo sapiens
  misc_RNA (1)...(19): siRNA sense strand
gcagcugcccaugccgaua

SEQ ID NO: 1256669 - RNA, 19 nt, Homo sapiens
  misc_RNA (1)...(19): siRNA sense strand
aacagccaauggucaagaa

SEQ ID NO: 1256670 - RNA, 19 nt, Homo sapiens
  misc_RNA (1)...(19): siRNA sense strand
cuacagugaugcgcugaag

SEQ ID NO: 1256671 - RNA, 19 nt, Homo sapiens
  misc_RNA (1)...(19): siRNA sense strand
uuaucuggcuggugaccuu

SEQ ID NO: 1256672 - RNA, 19 nt, Homo sapiens
  misc_RNA (1)...(19): siRNA sense strand
gucuaaagcacagauuuga

SEQ ID NO: 1256673 - RNA, 19 nt, Homo sapiens
  misc_RNA (1)...(19): siRNA sense strand
gggccacugucccucaucu

SEQ ID NO: 1256674 - RNA, 19 nt, Homo sapiens
  misc_RNA (1)...(19): siRNA sense strand
ggugagcucaggagauaag

SEQ ID NO: 1256675 - RNA, 19 nt, Homo sapiens
  misc_RNA (1)...(19): siRNA sense strand
uuccucaucucccagaaga

SEQ ID NO: 1256676 - RNA, 19 nt, Homo sapiens
  misc_RNA (1)...(19): siRNA sense strand
acggauauuuacagagaug

SEQ ID NO: 1256677 - RNA, 19 nt, Homo sapiens
  misc_RNA (1)...(19): siRNA sense strand
gggccucaguaaccuuauc

SEQ ID NO: 1256678 - RNA, 19 nt, Homo sapiens
  misc_RNA (1)...(19): siRNA sense strand
aaagcacagauuugaggua

SEQ ID NO: 1256679 - RNA, 19 nt, Homo sapiens
  misc_RNA (1)...(19): siRNA sense strand
ggccacaggcaucuccuau

SEQ ID NO: 1256680 - RNA, 19 nt, Homo sapiens
  misc_RNA (1)...(19): siRNA sense strand
cagccaucaucauugugaa

SEQ ID NO: 1256681 - RNA, 19 nt, Homo sapiens
  misc_RNA (1)...(19): siRNA sense strand
ggcugggccugauccacuu

SEQ ID NO: 1256682 - RNA, 19 nt, Homo sapiens
  misc_RNA (1)...(19): siRNA sense strand
cagccaauggucaagaaga

SEQ ID NO: 1256683 - RNA, 19 nt, Homo sapiens
  misc_RNA (1)...(19): siRNA sense strand
acucagaggccaaggaagu

SEQ ID NO: 1256684 - RNA, 19 nt, Homo sapiens
  misc_RNA (1)...(19): siRNA sense strand
gugccagacacggauauuu

SEQ ID NO: 1256685 - RNA, 19 nt, Homo sapiens
  misc_RNA (1)...(19): siRNA sense strand
ggugguugcggucaucuuc

SEQ ID NO: 1256686 - RNA, 19 nt, Homo sapiens
  misc_RNA (1)...(19): siRNA sense strand
agaagaaacugcucaagaa

SEQ ID NO: 1256687 - RNA, 19 nt, Homo sapiens
  misc_RNA (1)...(19): siRNA sense strand
ucaagagccugaagaauau

SEQ ID NO: 1256688 - RNA, 19 nt, Homo sapiens
  misc_RNA (1)...(19): siRNA sense strand
gcuccugggugaccuguua

SEQ ID NO: 1256689 - RNA, 19 nt, Homo sapiens
  misc_RNA (1)...(19): siRNA sense strand
ugaagcaacugcagaaaga

SEQ ID NO: 1256690 - RNA, 19 nt, Homo sapiens
  misc_RNA (1)...(19): siRNA sense strand
ggagccaucucuucccuuu

SEQ ID NO: 1256691 - RNA, 19 nt, Homo sapiens
  misc_RNA (1)...(19): siRNA sense strand
ccagauggguccacacuga

SEQ ID NO: 1256692 - RNA, 19 nt, Homo sapiens
  misc_RNA (1)...(19): siRNA sense strand
ucucacagcucaaguaugu

SEQ ID NO: 1256693 - RNA, 19 nt, Homo sapiens
  misc_RNA (1)...(19): siRNA sense strand
gcacagauuugagguagau

SEQ ID NO: 1256694 - RNA, 19 nt, Homo sapiens
  misc_RNA (1)...(19): siRNA sense strand
acagagauguggcagagua

SEQ ID NO: 1256695 - RNA, 19 nt, Homo sapiens
  misc_RNA (1)...(19): siRNA sense strand
uggugaagcuguugaauga

SEQ ID NO: 1256696 - RNA, 19 nt, Homo sapiens
  misc_RNA (1)...(19): siRNA sense strand
acacggauauuuacagaga

SEQ ID NO: 1256697 - RNA, 19 nt, Homo sapiens
  misc_RNA (1)...(19): siRNA sense strand
acacccagcuguucucaaa

SEQ ID NO: 1256698 - RNA, 19 nt, Homo sapiens
  misc_RNA (1)...(19): siRNA sense strand
ggacacagaugccccacua

SEQ ID NO: 1256699 - RNA, 19 nt, Homo sapiens
  misc_RNA (1)...(19): siRNA sense strand
cucaagagccugaagaaua

SEQ ID NO: 1256700 - RNA, 19 nt, Homo sapiens
  misc_RNA (1)...(19): siRNA sense strand
ccacaggcaucuccuaugg

SEQ ID NO: 1256701 - RNA, 19 nt, Homo sapiens
  misc_RNA (1)...(19): siRNA sense strand
gcagaggugugguguggau

SEQ ID NO: 1256702 - RNA, 19 nt, Homo sapiens
  misc_RNA (1)...(19): siRNA sense strand
gggcggaucugcuuaucug

SEQ ID NO: 1256703 - RNA, 19 nt, Homo sapiens
  misc_RNA (1)...(19): siRNA sense strand
ccaugaugcugucaccuuu

SEQ ID NO: 1256704 - RNA, 19 nt, Homo sapiens
  misc_RNA (1)...(19): siRNA sense strand
agauugagguggaggugua

SEQ ID NO: 1256705 - RNA, 19 nt, Homo sapiens
  misc_RNA (1)...(19): siRNA sense strand
gaccuuugcugucaugucu

SEQ ID NO: 1256706 - RNA, 19 nt, Homo sapiens
  misc_RNA (1)...(19): siRNA sense strand
agacacggauauuuacaga

SEQ ID NO: 1256707 - RNA, 19 nt, Homo sapiens
  misc_RNA (1)...(19): siRNA sense strand
gaacgacuccaugaucaau

SEQ ID NO: 1256708 - RNA, 19 nt, Homo sapiens
  misc_RNA (1)...(19): siRNA sense strand
gaagaaacugcucaagaag

SEQ ID NO: 1256709 - RNA, 19 nt, Homo sapiens
  misc_RNA (1)...(19): siRNA sense strand
ugccagacacggauauuua

SEQ ID NO: 1256710 - RNA, 19 nt, Homo sapiens
  misc_RNA (1)...(19): siRNA sense strand
ccacugucccucaucuaua

SEQ ID NO: 1256711 - RNA, 19 nt, Homo sapiens
  misc_RNA (1)...(19): siRNA sense strand
gugaagcuguugaaugaca

SEQ ID NO: 1256712 - RNA, 19 nt, Homo sapiens
  misc_RNA (1)...(19): siRNA sense strand
gcagccaucaucauuguga

SEQ ID NO: 1256713 - RNA, 19 nt, Homo sapiens
  misc_RNA (1)...(19): siRNA sense strand
ggucuaaagcacagauuug

SEQ ID NO: 1256714 - RNA, 19 nt, Homo sapiens
  misc_RNA (1)...(19): siRNA sense strand
ccucaucauugucaaacuu

SEQ ID NO: 1256715 - RNA, 19 nt, Homo sapiens
  misc_RNA (1)...(19): siRNA sense strand
ggagauaagauggaagaug

SEQ ID NO: 1256716 - RNA, 19 nt, Homo sapiens
  misc_RNA (1)...(19): siRNA sense strand
gagcucaggagauaagaug

SEQ ID NO: 1256717 - RNA, 19 nt, Homo sapiens
  misc_RNA (1)...(19): siRNA sense strand
gcagaaagaggagaagcuu

SEQ ID NO: 1256718 - RNA, 19 nt, Homo sapiens
  misc_RNA (1)...(19): siRNA sense strand
gcugaguucuacagugaug

SEQ ID NO: 1256719 - RNA, 19 nt, Homo sapiens
  misc_RNA (1)...(19): siRNA sense strand
ucaaugagacagccagaga

SEQ ID NO: 1256720 - RNA, 19 nt, Homo sapiens
  misc_RNA (1)...(19): siRNA sense strand
guacucagaggccaaggaa

SEQ ID NO: 1256721 - RNA, 19 nt, Homo sapiens
  misc_RNA (1)...(19): siRNA sense strand
aagaagaaacugcucaaga

SEQ ID NO: 1256722 - RNA, 19 nt, Homo sapiens
  misc_RNA (1)...(19): siRNA sense strand
aggagaagcuucggaaaca

SEQ ID NO: 1256723 - RNA, 19 nt, Homo sapiens
  misc_RNA (1)...(19): siRNA sense strand
gaggcgagacuaccacaug

SEQ ID NO: 1256724 - RNA, 19 nt, Homo sapiens
  misc_RNA (1)...(19): siRNA sense strand
gaagaugcaacagccaaug

SEQ ID NO: 1256725 - RNA, 19 nt, Homo sapiens
  misc_RNA (1)...(19): siRNA sense strand
uaagauggaagaugcaaca

SEQ ID NO: 1256726 - RNA, 19 nt, Homo sapiens
  misc_RNA (1)...(19): siRNA sense strand
cuucaucuacuuccuguuu

SEQ ID NO: 1256727 - RNA, 19 nt, Homo sapiens
  misc_RNA (1)...(19): siRNA sense strand
augcugaguucuacaguga

SEQ ID NO: 1256728 - RNA, 19 nt, Homo sapiens
  misc_RNA (1)...(19): siRNA sense strand
gugguuggguuugccauug

SEQ ID NO: 1256729 - RNA, 19 nt, Homo sapiens
  misc_RNA (1)...(19): siRNA sense strand
acgacuccaugaucaauga

SEQ ID NO: 1256730 - RNA, 19 nt, Homo sapiens
  misc_RNA (1)...(19): siRNA sense strand
augcauccaucaccaagaa

SEQ ID NO: 1256731 - RNA, 19 nt, Homo sapiens
  misc_RNA (1)...(19): siRNA sense strand
gcuugaggcugggcacuuc

SEQ ID NO: 1256732 - RNA, 19 nt, Homo sapiens
  misc_RNA (1)...(19): siRNA sense strand
gcgagacuaccacauggaa

SEQ ID NO: 1256733 - RNA, 19 nt, Homo sapiens
  misc_RNA (1)...(19): siRNA sense strand
caggagauaagauggaaga

SEQ ID NO: 1256734 - RNA, 19 nt, Homo sapiens
  misc_RNA (1)...(19): siRNA sense strand
gaggagaagcuucggaaac

SEQ ID NO: 1256735 - RNA, 19 nt, Homo sapiens
  misc_RNA (1)...(19): siRNA sense strand
uugaacgacuccaugauca

SEQ ID NO: 1256736 - RNA, 19 nt, Homo sapiens
  misc_RNA (1)...(19): siRNA sense strand
caacagccaauggucaaga

SEQ ID NO: 1256737 - RNA, 19 nt, Homo sapiens
  misc_RNA (1)...(19): siRNA sense strand
ggaagaugcaacagccaau

SEQ ID NO: 1256738 - RNA, 19 nt, Homo sapiens
  misc_RNA (1)...(19): siRNA sense strand
cuucuacccugucuucauc

SEQ ID NO: 1256739 - RNA, 19 nt, Homo sapiens
  misc_RNA (1)...(19): siRNA sense strand
guguuuggccuccaucuga

SEQ ID NO: 1256740 - RNA, 19 nt, Homo sapiens
  misc_RNA (1)...(19): siRNA sense strand
gaagaagaaacugcucaag

SEQ ID NO: 1256741 - RNA, 19 nt, Homo sapiens
  misc_RNA (1)...(19): siRNA sense strand
cccgugaguugcucuaugu

SEQ ID NO: 1256742 - RNA, 19 nt, Homo sapiens
  misc_RNA (1)...(19): siRNA sense strand
ggagaagcuucggaaacag

SEQ ID NO: 1256743 - RNA, 19 nt, Homo sapiens
  misc_RNA (1)...(19): siRNA sense strand
gauaagauggaagaugcaa

SEQ ID NO: 1256744 - RNA, 19 nt, Homo sapiens
  misc_RNA (1)...(19): siRNA sense strand
ugaagcuguugaaugacaa

SEQ ID NO: 1256745 - RNA, 19 nt, Homo sapiens
  misc_RNA (1)...(19): siRNA sense strand
gcucaggagauaagaugga

SEQ ID NO: 1256746 - RNA, 19 nt, Homo sapiens
  misc_RNA (1)...(19): siRNA sense strand
gcuaccggguggacagcaa

SEQ ID NO: 1256747 - RNA, 19 nt, Homo sapiens
  misc_RNA (1)...(19): siRNA sense strand
ggugggcagugugacagaa

SEQ ID NO: 1256748 - RNA, 19 nt, Homo sapiens
  misc_RNA (1)...(19): siRNA sense strand
cagcucaaguauguguuug

SEQ ID NO: 1256749 - RNA, 19 nt, Homo sapiens
  misc_RNA (1)...(19): siRNA sense strand
guggugaagcuguugaaug

SEQ ID NO: 1256750 - RNA, 19 nt, Homo sapiens
  misc_RNA (1)...(19): siRNA sense strand
cacugucccucaucuauac

SEQ ID NO: 1256751 - RNA, 19 nt, Homo sapiens
  misc_RNA (1)...(19): siRNA sense strand
gccacugucccucaucuau

SEQ ID NO: 1256752 - RNA, 19 nt, Homo sapiens
  misc_RNA (1)...(19): siRNA sense strand
gcacuucccggcacaucuc

SEQ ID NO: 1256753 - RNA, 19 nt, Homo sapiens
  misc_RNA (1)...(19): siRNA sense strand
ccuauggcaugggucuaaa

SEQ ID NO: 1256754 - RNA, 19 nt, Homo sapiens
  misc_RNA (1)...(19): siRNA sense strand
ugggugcccucuccuuugu

SEQ ID NO: 1256755 - RNA, 19 nt, Homo sapiens
  misc_RNA (1)...(19): siRNA sense strand
gggucuaaagcacagauuu

SEQ ID NO: 1256756 - RNA, 19 nt, Homo sapiens
  misc_RNA (1)...(19): siRNA sense strand
gcagcugcccaugccgaua

SEQ ID NO: 1256757 - RNA, 19 nt, Homo sapiens
  misc_RNA (1)...(19): siRNA sense strand
aacagccaauggucaagaa

SEQ ID NO: 1256758 - RNA, 19 nt, Homo sapiens
  misc_RNA (1)...(19): siRNA sense strand
cuacagugaugcgcugaag

SEQ ID NO: 1256759 - RNA, 19 nt, Homo sapiens
  misc_RNA (1)...(19): siRNA sense strand
uuaucuggcuggugaccuu

SEQ ID NO: 1256760 - RNA, 19 nt, Homo sapiens
  misc_RNA (1)...(19): siRNA sense strand
gucuaaagcacagauuuga

SEQ ID NO: 1256761 - RNA, 19 nt, Homo sapiens
  misc_RNA (1)...(19): siRNA sense strand
gggccacugucccucaucu

SEQ ID NO: 1256762 - RNA, 19 nt, Homo sapiens
  misc_RNA (1)...(19): siRNA sense strand
ggugagcucaggagauaag

SEQ ID NO: 1256763 - RNA, 19 nt, Homo sapiens
  misc_RNA (1)...(19): siRNA sense strand
uuccucaucucccagaaga

SEQ ID NO: 1256764 - RNA, 19 nt, Homo sapiens
  misc_RNA (1)...(19): siRNA sense strand
acggauauuuacagagaug

SEQ ID NO: 1256765 - RNA, 19 nt, Homo sapiens
  misc_RNA (1)...(19): siRNA sense strand
gggccucaguaaccuuauc

SEQ ID NO: 1256766 - RNA, 19 nt, Homo sapiens
  misc_RNA (1)...(19): siRNA sense strand
aaagcacagauuugaggua

SEQ ID NO: 1256767 - RNA, 19 nt, Homo sapiens
  misc_RNA (1)...(19): siRNA sense strand
ggccacaggcaucuccuau

SEQ ID NO: 1256768 - RNA, 19 nt, Homo sapiens
  misc_RNA (1)...(19): siRNA sense strand
cagccaucaucauugugaa

SEQ ID NO: 1256769 - RNA, 19 nt, Homo sapiens
  misc_RNA (1)...(19): siRNA sense strand
ggcugggccugauccacuu

SEQ ID NO: 1256770 - RNA, 19 nt, Homo sapiens
  misc_RNA (1)...(19): siRNA sense strand
cagccaauggucaagaaga

SEQ ID NO: 1256771 - RNA, 19 nt, Homo sapiens
  misc_RNA (1)...(19): siRNA sense strand
acucagaggccaaggaagu

SEQ ID NO: 1256772 - RNA, 19 nt, Homo sapiens
  misc_RNA (1)...(19): siRNA sense strand
gugccagacacggauauuu

SEQ ID NO: 1256773 - RNA, 19 nt, Homo sapiens
  misc_RNA (1)...(19): siRNA sense strand
ggugguugcggucaucuuc

SEQ ID NO: 1256774 - RNA, 19 nt, Homo sapiens
  misc_RNA (1)...(19): siRNA sense strand
agaagaaacugcucaagaa

SEQ ID NO: 1256775 - RNA, 19 nt, Homo sapiens
  misc_RNA (1)...(19): siRNA sense strand
ucaagagccugaagaauau

SEQ ID NO: 1256776 - RNA, 19 nt, Homo sapiens
  misc_RNA (1)...(19): siRNA sense strand
gcuccugggugaccuguua

SEQ ID NO: 1256777 - RNA, 19 nt, Homo sapiens
  misc_RNA (1)...(19): siRNA sense strand
ugaagcaacugcagaaaga

SEQ ID NO: 1256778 - RNA, 19 nt, Homo sapiens
  misc_RNA (1)...(19): siRNA sense strand
ggagccaucucuucccuuu

SEQ ID NO: 1256779 - RNA, 19 nt, Homo sapiens
  misc_RNA (1)...(19): siRNA sense strand
ccagauggguccacacuga

SEQ ID NO: 1256780 - RNA, 19 nt, Homo sapiens
  misc_RNA (1)...(19): siRNA sense strand
ucucacagcucaaguaugu

SEQ ID NO: 1256781 - RNA, 19 nt, Homo sapiens
  misc_RNA (1)...(19): siRNA sense strand
gcacagauuugagguagau

SEQ ID NO: 1256782 - RNA, 19 nt, Homo sapiens
  misc_RNA (1)...(19): siRNA sense strand
acagagauguggcagagua

SEQ ID NO: 1256783 - RNA, 19 nt, Homo sapiens
  misc_RNA (1)...(19): siRNA sense strand
uggugaagcuguugaauga

SEQ ID NO: 1256784 - RNA, 19 nt, Homo sapiens
  misc_RNA (1)...(19): siRNA sense strand
acacggauauuuacagaga

SEQ ID NO: 1256785 - RNA, 19 nt, Homo sapiens
  misc_RNA (1)...(19): siRNA sense strand
acacccagcuguucucaaa

SEQ ID NO: 1256786 - RNA, 19 nt, Homo sapiens
  misc_RNA (1)...(19): siRNA sense strand
ggacacagaugccccacua

SEQ ID NO: 1256787 - RNA, 19 nt, Homo sapiens
  misc_RNA (1)...(19): siRNA sense strand
cucaagagccugaagaaua

SEQ ID NO: 1256788 - RNA, 19 nt, Homo sapiens
  misc_RNA (1)...(19): siRNA sense strand
ccacaggcaucuccuaugg

SEQ ID NO: 1256789 - RNA, 19 nt, Homo sapiens
  misc_RNA (1)...(19): siRNA sense strand
gcagaggugugguguggau

SEQ ID NO: 1256790 - RNA, 19 nt, Homo sapiens
  misc_RNA (1)...(19): siRNA sense strand
gggcggaucugcuuaucug

SEQ ID NO: 1256791 - RNA, 19 nt, Homo sapiens
  misc_RNA (1)...(19): siRNA sense strand
ccaugaugcugucaccuuu

SEQ ID NO: 1256792 - RNA, 19 nt, Homo sapiens
  misc_RNA (1)...(19): siRNA sense strand
agauugagguggaggugua

SEQ ID NO: 1256793 - RNA, 19 nt, Homo sapiens
  misc_RNA (1)...(19): siRNA sense strand
gaccuuugcugucaugucu

SEQ ID NO: 1256794 - RNA, 19 nt, Homo sapiens
  misc_RNA (1)...(19): siRNA sense strand
agacacggauauuuacaga

SEQ ID NO: 1256795 - RNA, 19 nt, Homo sapiens
  misc_RNA (1)...(19): siRNA sense strand
gaacgacuccaugaucaau

SEQ ID NO: 1256796 - RNA, 19 nt, Homo sapiens
  misc_RNA (1)...(19): siRNA sense strand
gaagaaacugcucaagaag

SEQ ID NO: 1256797 - RNA, 19 nt, Homo sapiens
  misc_RNA (1)...(19): siRNA sense strand
ugccagacacggauauuua

SEQ ID NO: 1256798 - RNA, 19 nt, Homo sapiens
  misc_RNA (1)...(19): siRNA sense strand
ccacugucccucaucuaua

SEQ ID NO: 1256799 - RNA, 19 nt, Homo sapiens
  misc_RNA (1)...(19): siRNA sense strand
gugaagcuguugaaugaca

SEQ ID NO: 1256800 - RNA, 19 nt, Homo sapiens
  misc_RNA (1)...(19): siRNA sense strand
gcagccaucaucauuguga

SEQ ID NO: 1256801 - RNA, 19 nt, Homo sapiens
  misc_RNA (1)...(19): siRNA sense strand
ggucuaaagcacagauuug

SEQ ID NO: 1256802 - RNA, 19 nt, Homo sapiens
  misc_RNA (1)...(19): siRNA sense strand
ccucaucauugucaaacuu

SEQ ID NO: 1256803 - RNA, 19 nt, Homo sapiens
  misc_RNA (1)...(19): siRNA sense strand
ggagauaagauggaagaug

SEQ ID NO: 1256804 - RNA, 19 nt, Homo sapiens
  misc_RNA (1)...(19): siRNA sense strand
gagcucaggagauaagaug

SEQ ID NO: 1256805 - RNA, 19 nt, Homo sapiens
  misc_RNA (1)...(19): siRNA sense strand
gcagaaagaggagaagcuu

SEQ ID NO: 1256806 - RNA, 19 nt, Homo sapiens
  misc_RNA (1)...(19): siRNA sense strand
gcugaguucuacagugaug

SEQ ID NO: 1256807 - RNA, 19 nt, Homo sapiens
  misc_RNA (1)...(19): siRNA sense strand
ucaaugagacagccagaga

SEQ ID NO: 1256808 - RNA, 19 nt, Homo sapiens
  misc_RNA (1)...(19): siRNA sense strand
guacucagaggccaaggaa

SEQ ID NO: 1256809 - RNA, 19 nt, Homo sapiens
  misc_RNA (1)...(19): siRNA sense strand
aagaagaaacugcucaaga

SEQ ID NO: 1256810 - RNA, 19 nt, Homo sapiens
  misc_RNA (1)...(19): siRNA sense strand
aggagaagcuucggaaaca

SEQ ID NO: 1256811 - RNA, 19 nt, Homo sapiens
  misc_RNA (1)...(19): siRNA sense strand
gaggcgagacuaccacaug

SEQ ID NO: 1256812 - RNA, 19 nt, Homo sapiens
  misc_RNA (1)...(19): siRNA sense strand
gaagaugcaacagccaaug

SEQ ID NO: 1256813 - RNA, 19 nt, Homo sapiens
  misc_RNA (1)...(19): siRNA sense strand
uaagauggaagaugcaaca

SEQ ID NO: 1256814 - RNA, 19 nt, Homo sapiens
  misc_RNA (1)...(19): siRNA sense strand
cuucaucuacuuccuguuu

SEQ ID NO: 1256815 - RNA, 19 nt, Homo sapiens
  misc_RNA (1)...(19): siRNA sense strand
augcugaguucuacaguga

SEQ ID NO: 1256816 - RNA, 19 nt, Homo sapiens
  misc_RNA (1)...(19): siRNA sense strand
gugguuggguuugccauug

SEQ ID NO: 1256817 - RNA, 19 nt, Homo sapiens
  misc_RNA (1)...(19): siRNA sense strand
acgacuccaugaucaauga

SEQ ID NO: 1256818 - RNA, 19 nt, Homo sapiens
  misc_RNA (1)...(19): siRNA sense strand
augcauccaucaccaagaa

SEQ ID NO: 1256819 - RNA, 19 nt, Homo sapiens
  misc_RNA (1)...(19): siRNA sense strand
gcuugaggcugggcacuuc

SEQ ID NO: 1256820 - RNA, 19 nt, Homo sapiens
  misc_RNA (1)...(19): siRNA sense strand
gcgagacuaccacauggaa

SEQ ID NO: 1256821 - RNA, 19 nt, Homo sapiens
  misc_RNA (1)...(19): siRNA sense strand
caggagauaagauggaaga

SEQ ID NO: 1256822 - RNA, 19 nt, Homo sapiens
  misc_RNA (1)...(19): siRNA sense strand
gaggagaagcuucggaaac

SEQ ID NO: 1256823 - RNA, 19 nt, Homo sapiens
  misc_RNA (1)...(19): siRNA sense strand
uugaacgacuccaugauca

SEQ ID NO: 1256824 - RNA, 19 nt, Homo sapiens
  misc_RNA (1)...(19): siRNA sense strand
caacagccaauggucaaga

SEQ ID NO: 1256825 - RNA, 19 nt, Homo sapiens
  misc_RNA (1)...(19): siRNA sense strand
ggaagaugcaacagccaau

SEQ ID NO: 1256826 - RNA, 19 nt, Homo sapiens
  misc_RNA (1)...(19): siRNA sense strand
cuucuacccugucuucauc

SEQ ID NO: 1256827 - RNA, 19 nt, Homo sapiens
  misc_RNA (1)...(19): siRNA sense strand
guguuuggccuccaucuga

SEQ ID NO: 1256828 - RNA, 19 nt, Homo sapiens
  misc_RNA (1)...(19): siRNA sense strand
gaagaagaaacugcucaag

SEQ ID NO: 1256829 - RNA, 19 nt, Homo sapiens
  misc_RNA (1)...(19): siRNA sense strand
cccgugaguugcucuaugu

SEQ ID NO: 1256830 - RNA, 19 nt, Homo sapiens
  misc_RNA (1)...(19): siRNA sense strand
ggagaagcuucggaaacag

SEQ ID NO: 1256831 - RNA, 19 nt, Homo sapiens
  misc_RNA (1)...(19): siRNA sense strand
gauaagauggaagaugcaa

SEQ ID NO: 1256832 - RNA, 19 nt, Homo sapiens
  misc_RNA (1)...(19): siRNA sense strand
ugaagcuguugaaugacaa

SEQ ID NO: 1256833 - RNA, 19 nt, Homo sapiens
  misc_RNA (1)...(19): siRNA sense strand
gcucaggagauaagaugga

SEQ ID NO: 1256834 - RNA, 19 nt, Homo sapiens
  misc_RNA (1)...(19): siRNA sense strand
gcuaccggguggacagcaa

SEQ ID NO: 1256835 - RNA, 19 nt, Homo sapiens
  misc_RNA (1)...(19): siRNA sense strand
ggugggcagugugacagaa

SEQ ID NO: 1256836 - RNA, 19 nt, Homo sapiens
  misc_RNA (1)...(19): siRNA sense strand
cagcucaaguauguguuug

SEQ ID NO: 1256837 - RNA, 19 nt, Homo sapiens
  misc_RNA (1)...(19): siRNA sense strand
guggugaagcuguugaaug

SEQ ID NO: 1256838 - RNA, 19 nt, Homo sapiens
  misc_RNA (1)...(19): siRNA sense strand
cacugucccucaucuauac

SEQ ID NO: 1256839 - RNA, 19 nt, Homo sapiens
  misc_RNA (1)...(19): siRNA sense strand
gccacugucccucaucuau

SEQ ID NO: 1256840 - RNA, 19 nt, Homo sapiens
  misc_RNA (1)...(19): siRNA sense strand
gcacuucccggcacaucuc

SEQ ID NO: 1256841 - RNA, 19 nt, Homo sapiens
  misc_RNA (1)...(19): siRNA sense strand
ccuauggcaugggucuaaa

SEQ ID NO: 1256842 - RNA, 19 nt, Homo sapiens
  misc_RNA (1)...(19): siRNA sense strand
ugggugcccucuccuuugu

SEQ ID NO: 1256843 - RNA, 19 nt, Homo sapiens
  misc_RNA (1)...(19): siRNA sense strand
gggucuaaagcacagauuu

SEQ ID NO: 1256844 - RNA, 19 nt, Homo sapiens
  misc_RNA (1)...(19): siRNA sense strand
gcagcugcccaugccgaua

SEQ ID NO: 1256845 - RNA, 19 nt, Homo sapiens
  misc_RNA (1)...(19): siRNA sense strand
aacagccaauggucaagaa

SEQ ID NO: 1256846 - RNA, 19 nt, Homo sapiens
  misc_RNA (1)...(19): siRNA sense strand
cuacagugaugcgcugaag

SEQ ID NO: 1256847 - RNA, 19 nt, Homo sapiens
  misc_RNA (1)...(19): siRNA sense strand
uuaucuggcuggugaccuu

SEQ ID NO: 1256848 - RNA, 19 nt, Homo sapiens
  misc_RNA (1)...(19): siRNA sense strand
gucuaaagcacagauuuga

SEQ ID NO: 1256849 - RNA, 19 nt, Homo sapiens
  misc_RNA (1)...(19): siRNA sense strand
gggccacugucccucaucu

SEQ ID NO: 1256850 - RNA, 19 nt, Homo sapiens
  misc_RNA (1)...(19): siRNA sense strand
ggugagcucaggagauaag

SEQ ID NO: 1256851 - RNA, 19 nt, Homo sapiens
  misc_RNA (1)...(19): siRNA sense strand
uuccucaucucccagaaga

SEQ ID NO: 1256852 - RNA, 19 nt, Homo sapiens
  misc_RNA (1)...(19): siRNA sense strand
acggauauuuacagagaug

SEQ ID NO: 1256853 - RNA, 19 nt, Homo sapiens
  misc_RNA (1)...(19): siRNA sense strand
gggccucaguaaccuuauc

SEQ ID NO: 1256854 - RNA, 19 nt, Homo sapiens
  misc_RNA (1)...(19): siRNA sense strand
aaagcacagauuugaggua

SEQ ID NO: 1256855 - RNA, 19 nt, Homo sapiens
  misc_RNA (1)...(19): siRNA sense strand
ggccacaggcaucuccuau

SEQ ID NO: 1256856 - RNA, 19 nt, Homo sapiens
  misc_RNA (1)...(19): siRNA sense strand
cagccaucaucauugugaa

SEQ ID NO: 1256857 - RNA, 19 nt, Homo sapiens
  misc_RNA (1)...(19): siRNA sense strand
ggcugggccugauccacuu

SEQ ID NO: 1256858 - RNA, 19 nt, Homo sapiens
  misc_RNA (1)...(19): siRNA sense strand
cagccaauggucaagaaga

SEQ ID NO: 1256859 - RNA, 19 nt, Homo sapiens
  misc_RNA (1)...(19): siRNA sense strand
acucagaggccaaggaagu

SEQ ID NO: 1256860 - RNA, 19 nt, Homo sapiens
  misc_RNA (1)...(19): siRNA sense strand
gugccagacacggauauuu

SEQ ID NO: 1256861 - RNA, 19 nt, Homo sapiens
  misc_RNA (1)...(19): siRNA sense strand
ggugguugcggucaucuuc

SEQ ID NO: 1256862 - RNA, 19 nt, Homo sapiens
  misc_RNA (1)...(19): siRNA sense strand
gaaagaugauggaaacaug

SEQ ID NO: 1256863 - RNA, 19 nt, Homo sapiens
  misc_RNA (1)...(19): siRNA sense strand
ugugguagcuugugacuuu

SEQ ID NO: 1256864 - RNA, 19 nt, Homo sapiens
  misc_RNA (1)...(19): siRNA sense strand
ggauaaauacaccaugaua

SEQ ID NO: 1256865 - RNA, 19 nt, Homo sapiens
  misc_RNA (1)...(19): siRNA sense strand
gaguuucucucguaucgua

SEQ ID NO: 1256866 - RNA, 19 nt, Homo sapiens
  misc_RNA (1)...(19): siRNA sense strand
gcuacugcaucuuaugaua

SEQ ID NO: 1256867 - RNA, 19 nt, Homo sapiens
  misc_RNA (1)...(19): siRNA sense strand
ggucagagauuuaacuuuu

SEQ ID NO: 1256868 - RNA, 19 nt, Homo sapiens
  misc_RNA (1)...(19): siRNA sense strand
uaugggaccugaaagauga

SEQ ID NO: 1256869 - RNA, 19 nt, Homo sapiens
  misc_RNA (1)...(19): siRNA sense strand
gagaauugaugaggauuau

SEQ ID NO: 1256870 - RNA, 19 nt, Homo sapiens
  misc_RNA (1)...(19): siRNA sense strand
ggaaacaugaugaaaguau

SEQ ID NO: 1256871 - RNA, 19 nt, Homo sapiens
  misc_RNA (1)...(19): siRNA sense strand
ggagaauugaugaggauua

SEQ ID NO: 1256872 - RNA, 19 nt, Homo sapiens
  misc_RNA (1)...(19): siRNA sense strand
gaaguggucagagauuuaa

SEQ ID NO: 1256873 - RNA, 19 nt, Homo sapiens
  misc_RNA (1)...(19): siRNA sense strand
guacagcugugcauucucu

SEQ ID NO: 1256874 - RNA, 19 nt, Homo sapiens
  misc_RNA (1)...(19): siRNA sense strand
ggaauuugggcaccuguuu

SEQ ID NO: 1256875 - RNA, 19 nt, Homo sapiens
  misc_RNA (1)...(19): siRNA sense strand
gaaaacuccuccuuaacuu

SEQ ID NO: 1256876 - RNA, 19 nt, Homo sapiens
  misc_RNA (1)...(19): siRNA sense strand
ugaaguggucagagauuua

SEQ ID NO: 1256877 - RNA, 19 nt, Homo sapiens
  misc_RNA (1)...(19): siRNA sense strand
uaucugggauccacauaau

SEQ ID NO: 1256878 - RNA, 19 nt, Homo sapiens
  misc_RNA (1)...(19): siRNA sense strand
gaugauggaaacaugauga

SEQ ID NO: 1256879 - RNA, 19 nt, Homo sapiens
  misc_RNA (1)...(19): siRNA sense strand
gguacgaucuguaucuuuu

SEQ ID NO: 1256880 - RNA, 19 nt, Homo sapiens
  misc_RNA (1)...(19): siRNA sense strand
ucccuagccugcaacauuu

SEQ ID NO: 1256881 - RNA, 19 nt, Homo sapiens
  misc_RNA (1)...(19): siRNA sense strand
ccugaaagaugauggaaac

SEQ ID NO: 1256882 - RNA, 19 nt, Homo sapiens
  misc_RNA (1)...(19): siRNA sense strand
aagccuugcugaugauaaa

SEQ ID NO: 1256883 - RNA, 19 nt, Homo sapiens
  misc_RNA (1)...(19): siRNA sense strand
gauggaaacaugaugaaag

SEQ ID NO: 1256884 - RNA, 19 nt, Homo sapiens
  misc_RNA (1)...(19): siRNA sense strand
uagaaggacaucaccauga

SEQ ID NO: 1256885 - RNA, 19 nt, Homo sapiens
  misc_RNA (1)...(19): siRNA sense strand
gcugugccuucucuacuga

SEQ ID NO: 1256886 - RNA, 19 nt, Homo sapiens
  misc_RNA (1)...(19): siRNA sense strand
gaguaugggaccugaaaga

SEQ ID NO: 1256887 - RNA, 19 nt, Homo sapiens
  misc_RNA (1)...(19): siRNA sense strand
gauaaauacaccaugauac

SEQ ID NO: 1256888 - RNA, 19 nt, Homo sapiens
  misc_RNA (1)...(19): siRNA sense strand
cuugguagaucauacugaa

SEQ ID NO: 1256889 - RNA, 19 nt, Homo sapiens
  misc_RNA (1)...(19): siRNA sense strand
ccaccuacuccaauauuug

SEQ ID NO: 1256890 - RNA, 19 nt, Homo sapiens
  misc_RNA (1)...(19): siRNA sense strand
cagaguaugggaccugaaa

SEQ ID NO: 1256891 - RNA, 19 nt, Homo sapiens
  misc_RNA (1)...(19): siRNA sense strand
ccgauuccuuccaagcuuu

SEQ ID NO: 1256892 - RNA, 19 nt, Homo sapiens
  misc_RNA (1)...(19): siRNA sense strand
gucccuagccugcaacauu

SEQ ID NO: 1256893 - RNA, 19 nt, Homo sapiens
  misc_RNA (1)...(19): siRNA sense strand
guaugggaccugaaagaug

SEQ ID NO: 1256894 - RNA, 19 nt, Homo sapiens
  misc_RNA (1)...(19): siRNA sense strand
gguagaucauacugaagug

SEQ ID NO: 1256895 - RNA, 19 nt, Homo sapiens
  misc_RNA (1)...(19): siRNA sense strand
gauuauccagugcaaguug

SEQ ID NO: 1256896 - RNA, 19 nt, Homo sapiens
  misc_RNA (1)...(19): siRNA sense strand
gaauuugggcaccuguuuc

SEQ ID NO: 1256897 - RNA, 19 nt, Homo sapiens
  misc_RNA (1)...(19): siRNA sense strand
ugacggaaguguguauuuu

SEQ ID NO: 1256898 - RNA, 19 nt, Homo sapiens
  misc_RNA (1)...(19): siRNA sense strand
aaagaugauggaaacauga

SEQ ID NO: 1256899 - RNA, 19 nt, Homo sapiens
  misc_RNA (1)...(19): siRNA sense strand
gccgauuccuuccaagcuu

SEQ ID NO: 1256900 - RNA, 19 nt, Homo sapiens
  misc_RNA (1)...(19): siRNA sense strand
gaaacuagaaggacaucac

SEQ ID NO: 1256901 - RNA, 19 nt, Homo sapiens
  misc_RNA (1)...(19): siRNA sense strand
caugauacggaaacuagaa

SEQ ID NO: 1256902 - RNA, 19 nt, Homo sapiens
  misc_RNA (1)...(19): siRNA sense strand
ggaaaacuccuccuuaacu

SEQ ID NO: 1256903 - RNA, 19 nt, Homo sapiens
  misc_RNA (1)...(19): siRNA sense strand
auggaaacaugaugaaagu

SEQ ID NO: 1256904 - RNA, 19 nt, Homo sapiens
  misc_RNA (1)...(19): siRNA sense strand
gcaugucaauccgaagagu

SEQ ID NO: 1256905 - RNA, 19 nt, Homo sapiens
  misc_RNA (1)...(19): siRNA sense strand
cccaccuacuccaauauuu

SEQ ID NO: 1256906 - RNA, 19 nt, Homo sapiens
  misc_RNA (1)...(19): siRNA sense strand
caucagaauuggguguaca

SEQ ID NO: 1256907 - RNA, 19 nt, Homo sapiens
  misc_RNA (1)...(19): siRNA sense strand
acucuucuaugcuguguuc

SEQ ID NO: 1256908 - RNA, 19 nt, Homo sapiens
  misc_RNA (1)...(19): siRNA sense strand
gaugcccacccaagaaguu

SEQ ID NO: 1256909 - RNA, 19 nt, Homo sapiens
  misc_RNA (1)...(19): siRNA sense strand
ggaccugaaagaugaugga

SEQ ID NO: 1256910 - RNA, 19 nt, Homo sapiens
  misc_RNA (1)...(19): siRNA sense strand
gagugaugcccacccaaga

SEQ ID NO: 1256911 - RNA, 19 nt, Homo sapiens
  misc_RNA (1)...(19): siRNA sense strand
gauacggaaacuagaagga

SEQ ID NO: 1256912 - RNA, 19 nt, Homo sapiens
  misc_RNA (1)...(19): siRNA sense strand
guguacagcugugcauucu

SEQ ID NO: 1256913 - RNA, 19 nt, Homo sapiens
  misc_RNA (1)...(19): siRNA sense strand
guucaggagcugccgauuc

SEQ ID NO: 1256914 - RNA, 19 nt, Homo sapiens
  misc_RNA (1)...(19): siRNA sense strand
ggucuuugcugugccuucu

SEQ ID NO: 1256915 - RNA, 19 nt, Homo sapiens
  misc_RNA (1)...(19): siRNA sense strand
ggaauauggauaaauacac

SEQ ID NO: 1256916 - RNA, 19 nt, Homo sapiens
  misc_RNA (1)...(19): siRNA sense strand
ugaaagaugauggaaacau

SEQ ID NO: 1256917 - RNA, 19 nt, Homo sapiens
  misc_RNA (1)...(19): siRNA sense strand
ucucucguaucguauuuag

SEQ ID NO: 1256918 - RNA, 19 nt, Homo sapiens
  misc_RNA (1)...(19): siRNA sense strand
gguguacagcugugcauuc

SEQ ID NO: 1256919 - RNA, 19 nt, Homo sapiens
  misc_RNA (1)...(19): siRNA sense strand
ucuccugacucuucuaugc

SEQ ID NO: 1256920 - RNA, 19 nt, Homo sapiens
  misc_RNA (1)...(19): siRNA sense strand
auggagacauucugaugga

SEQ ID NO: 1256921 - RNA, 19 nt, Homo sapiens
  misc_RNA (1)...(19): siRNA sense strand
cuggagaauugaugaggau

SEQ ID NO: 1256922 - RNA, 19 nt, Homo sapiens
  misc_RNA (1)...(19): siRNA sense strand
ggguacgaucuguaucuuu

SEQ ID NO: 1256923 - RNA, 19 nt, Homo sapiens
  misc_RNA (1)...(19): siRNA sense strand
cuccuuaacuugguagauc

SEQ ID NO: 1256924 - RNA, 19 nt, Homo sapiens
  misc_RNA (1)...(19): siRNA sense strand
ugcauucucuccugacucu

SEQ ID NO: 1256925 - RNA, 19 nt, Homo sapiens
  misc_RNA (1)...(19): siRNA sense strand
gaaagaugauggaaacaug

SEQ ID NO: 1256926 - RNA, 19 nt, Homo sapiens
  misc_RNA (1)...(19): siRNA sense strand
ggucagagauuuaacuuuu

SEQ ID NO: 1256927 - RNA, 19 nt, Homo sapiens
  misc_RNA (1)...(19): siRNA sense strand
uaugggaccugaaagauga

SEQ ID NO: 1256928 - RNA, 19 nt, Homo sapiens
  misc_RNA (1)...(19): siRNA sense strand
ggaaacaugaugaaaguau

SEQ ID NO: 1256929 - RNA, 19 nt, Homo sapiens
  misc_RNA (1)...(19): siRNA sense strand
gaaguggucagagauuuaa

SEQ ID NO: 1256930 - RNA, 19 nt, Homo sapiens
  misc_RNA (1)...(19): siRNA sense strand
guacagcugugcauucucu

SEQ ID NO: 1256931 - RNA, 19 nt, Homo sapiens
  misc_RNA (1)...(19): siRNA sense strand
gaaaacuccuccuuaacuu

SEQ ID NO: 1256932 - RNA, 19 nt, Homo sapiens
  misc_RNA (1)...(19): siRNA sense strand
ugaaguggucagagauuua

SEQ ID NO: 1256933 - RNA, 19 nt, Homo sapiens
  misc_RNA (1)...(19): siRNA sense strand
gaugauggaaacaugauga

SEQ ID NO: 1256934 - RNA, 19 nt, Homo sapiens
  misc_RNA (1)...(19): siRNA sense strand
ccugaaagaugauggaaac

SEQ ID NO: 1256935 - RNA, 19 nt, Homo sapiens
  misc_RNA (1)...(19): siRNA sense strand
gauggaaacaugaugaaag

SEQ ID NO: 1256936 - RNA, 19 nt, Homo sapiens
  misc_RNA (1)...(19): siRNA sense strand
gaguaugggaccugaaaga

SEQ ID NO: 1256937 - RNA, 19 nt, Homo sapiens
  misc_RNA (1)...(19): siRNA sense strand
cuugguagaucauacugaa

SEQ ID NO: 1256938 - RNA, 19 nt, Homo sapiens
  misc_RNA (1)...(19): siRNA sense strand
cagaguaugggaccugaaa

SEQ ID NO: 1256939 - RNA, 19 nt, Homo sapiens
  misc_RNA (1)...(19): siRNA sense strand
gguagaucauacugaagug

SEQ ID NO: 1256940 - RNA, 19 nt, Homo sapiens
  misc_RNA (1)...(19): siRNA sense strand
guaugggaccugaaagaug

SEQ ID NO: 1256941 - RNA, 19 nt, Homo sapiens
  misc_RNA (1)...(19): siRNA sense strand
aaagaugauggaaacauga

SEQ ID NO: 1256942 - RNA, 19 nt, Homo sapiens
  misc_RNA (1)...(19): siRNA sense strand
ggaaaacuccuccuuaacu

SEQ ID NO: 1256943 - RNA, 19 nt, Homo sapiens
  misc_RNA (1)...(19): siRNA sense strand
auggaaacaugaugaaagu

SEQ ID NO: 1256944 - RNA, 19 nt, Homo sapiens
  misc_RNA (1)...(19): siRNA sense strand
caucagaauuggguguaca

SEQ ID NO: 1256945 - RNA, 19 nt, Homo sapiens
  misc_RNA (1)...(19): siRNA sense strand
acucuucuaugcuguguuc

SEQ ID NO: 1256946 - RNA, 19 nt, Homo sapiens
  misc_RNA (1)...(19): siRNA sense strand
ggaccugaaagaugaugga

SEQ ID NO: 1256947 - RNA, 19 nt, Homo sapiens
  misc_RNA (1)...(19): siRNA sense strand
guguacagcugugcauucu

SEQ ID NO: 1256948 - RNA, 19 nt, Homo sapiens
  misc_RNA (1)...(19): siRNA sense strand
ugaaagaugauggaaacau

SEQ ID NO: 1256949 - RNA, 19 nt, Homo sapiens
  misc_RNA (1)...(19): siRNA sense strand
gguguacagcugugcauuc

SEQ ID NO: 1256950 - RNA, 19 nt, Homo sapiens
  misc_RNA (1)...(19): siRNA sense strand
ucuccugacucuucuaugc

SEQ ID NO: 1256951 - RNA, 19 nt, Homo sapiens
  misc_RNA (1)...(19): siRNA sense strand
cuccuuaacuugguagauc

SEQ ID NO: 1256952 - RNA, 19 nt, Homo sapiens
  misc_RNA (1)...(19): siRNA sense strand
ugcauucucuccugacucu

SEQ ID NO: 1256953 - RNA, 19 nt, Homo sapiens
  misc_RNA (1)...(19): siRNA sense strand
gaaagaugauggaaacaug

SEQ ID NO: 1256954 - RNA, 19 nt, Homo sapiens
  misc_RNA (1)...(19): siRNA sense strand
ugugguagcuugugacuuu

SEQ ID NO: 1256955 - RNA, 19 nt, Homo sapiens
  misc_RNA (1)...(19): siRNA sense strand
ggauaaauacaccaugaua

SEQ ID NO: 1256956 - RNA, 19 nt, Homo sapiens
  misc_RNA (1)...(19): siRNA sense strand
gaguuucucucguaucgua

SEQ ID NO: 1256957 - RNA, 19 nt, Homo sapiens
  misc_RNA (1)...(19): siRNA sense strand
gcuacugcaucuuaugaua

SEQ ID NO: 1256958 - RNA, 19 nt, Homo sapiens
  misc_RNA (1)...(19): siRNA sense strand
ggucagagauuuaacuuuu

SEQ ID NO: 1256959 - RNA, 19 nt, Homo sapiens
  misc_RNA (1)...(19): siRNA sense strand
uaugggaccugaaagauga

SEQ ID NO: 1256960 - RNA, 19 nt, Homo sapiens
  misc_RNA (1)...(19): siRNA sense strand
gagaauugaugaggauuau

SEQ ID NO: 1256961 - RNA, 19 nt, Homo sapiens
  misc_RNA (1)...(19): siRNA sense strand
ggaaacaugaugaaaguau

SEQ ID NO: 1256962 - RNA, 19 nt, Homo sapiens
  misc_RNA (1)...(19): siRNA sense strand
ggagaauugaugaggauua

SEQ ID NO: 1256963 - RNA, 19 nt, Homo sapiens
  misc_RNA (1)...(19): siRNA sense strand
gaaguggucagagauuuaa

SEQ ID NO: 1256964 - RNA, 19 nt, Homo sapiens
  misc_RNA (1)...(19): siRNA sense strand
guacagcugugcauucucu

SEQ ID NO: 1256965 - RNA, 19 nt, Homo sapiens
  misc_RNA (1)...(19): siRNA sense strand
ggaauuugggcaccuguuu

SEQ ID NO: 1256966 - RNA, 19 nt, Homo sapiens
  misc_RNA (1)...(19): siRNA sense strand
gaaaacuccuccuuaacuu

SEQ ID NO: 1256967 - RNA, 19 nt, Homo sapiens
  misc_RNA (1)...(19): siRNA sense strand
ugaaguggucagagauuua

SEQ ID NO: 1256968 - RNA, 19 nt, Homo sapiens
  misc_RNA (1)...(19): siRNA sense strand
uaucugggauccacauaau

SEQ ID NO: 1256969 - RNA, 19 nt, Homo sapiens
  misc_RNA (1)...(19): siRNA sense strand
gaugauggaaacaugauga

SEQ ID NO: 1256970 - RNA, 19 nt, Homo sapiens
  misc_RNA (1)...(19): siRNA sense strand
gguacgaucuguaucuuuu

SEQ ID NO: 1256971 - RNA, 19 nt, Homo sapiens
  misc_RNA (1)...(19): siRNA sense strand
ucccuagccugcaacauuu

SEQ ID NO: 1256972 - RNA, 19 nt, Homo sapiens
  misc_RNA (1)...(19): siRNA sense strand
ccugaaagaugauggaaac

SEQ ID NO: 1256973 - RNA, 19 nt, Homo sapiens
  misc_RNA (1)...(19): siRNA sense strand
aagccuugcugaugauaaa

SEQ ID NO: 1256974 - RNA, 19 nt, Homo sapiens
  misc_RNA (1)...(19): siRNA sense strand
gauggaaacaugaugaaag

SEQ ID NO: 1256975 - RNA, 19 nt, Homo sapiens
  misc_RNA (1)...(19): siRNA sense strand
uagaaggacaucaccauga

SEQ ID NO: 1256976 - RNA, 19 nt, Homo sapiens
  misc_RNA (1)...(19): siRNA sense strand
gcugugccuucucuacuga

SEQ ID NO: 1256977 - RNA, 19 nt, Homo sapiens
  misc_RNA (1)...(19): siRNA sense strand
gaguaugggaccugaaaga

SEQ ID NO: 1256978 - RNA, 19 nt, Homo sapiens
  misc_RNA (1)...(19): siRNA sense strand
gauaaauacaccaugauac

SEQ ID NO: 1256979 - RNA, 19 nt, Homo sapiens
  misc_RNA (1)...(19): siRNA sense strand
cuugguagaucauacugaa

SEQ ID NO: 1256980 - RNA, 19 nt, Homo sapiens
  misc_RNA (1)...(19): siRNA sense strand
ccaccuacuccaauauuug

SEQ ID NO: 1256981 - RNA, 19 nt, Homo sapiens
  misc_RNA (1)...(19): siRNA sense strand
cagaguaugggaccugaaa

SEQ ID NO: 1256982 - RNA, 19 nt, Homo sapiens
  misc_RNA (1)...(19): siRNA sense strand
ccgauuccuuccaagcuuu

SEQ ID NO: 1256983 - RNA, 19 nt, Homo sapiens
  misc_RNA (1)...(19): siRNA sense strand
gucccuagccugcaacauu

SEQ ID NO: 1256984 - RNA, 19 nt, Homo sapiens
  misc_RNA (1)...(19): siRNA sense strand
guaugggaccugaaagaug

SEQ ID NO: 1256985 - RNA, 19 nt, Homo sapiens
  misc_RNA (1)...(19): siRNA sense strand
gauuauccagugcaaguug

SEQ ID NO: 1256986 - RNA, 19 nt, Homo sapiens
  misc_RNA (1)...(19): siRNA sense strand
gaauuugggcaccuguuuc

SEQ ID NO: 1256987 - RNA, 19 nt, Homo sapiens
  misc_RNA (1)...(19): siRNA sense strand
gguagaucauacugaagug

SEQ ID NO: 1256988 - RNA, 19 nt, Homo sapiens
  misc_RNA (1)...(19): siRNA sense strand
ugacggaaguguguauuuu

SEQ ID NO: 1256989 - RNA, 19 nt, Homo sapiens
  misc_RNA (1)...(19): siRNA sense strand
aaagaugauggaaacauga

SEQ ID NO: 1256990 - RNA, 19 nt, Homo sapiens
  misc_RNA (1)...(19): siRNA sense strand
gccgauuccuuccaagcuu

SEQ ID NO: 1256991 - RNA, 19 nt, Homo sapiens
  misc_RNA (1)...(19): siRNA sense strand
gaaacuagaaggacaucac

SEQ ID NO: 1256992 - RNA, 19 nt, Homo sapiens
  misc_RNA (1)...(19): siRNA sense strand
caugauacggaaacuagaa

SEQ ID NO: 1256993 - RNA, 19 nt, Homo sapiens
  misc_RNA (1)...(19): siRNA sense strand
ggaaaacuccuccuuaacu

SEQ ID NO: 1256994 - RNA, 19 nt, Homo sapiens
  misc_RNA (1)...(19): siRNA sense strand
auggaaacaugaugaaagu

SEQ ID NO: 1256995 - RNA, 19 nt, Homo sapiens
  misc_RNA (1)...(19): siRNA sense strand
gcaugucaauccgaagagu

SEQ ID NO: 1256996 - RNA, 19 nt, Homo sapiens
  misc_RNA (1)...(19): siRNA sense strand
cccaccuacuccaauauuu

SEQ ID NO: 1256997 - RNA, 19 nt, Homo sapiens
  misc_RNA (1)...(19): siRNA sense strand
caucagaauuggguguaca

SEQ ID NO: 1256998 - RNA, 19 nt, Homo sapiens
  misc_RNA (1)...(19): siRNA sense strand
acucuucuaugcuguguuc

SEQ ID NO: 1256999 - RNA, 19 nt, Homo sapiens
  misc_RNA (1)...(19): siRNA sense strand
gaugcccacccaagaaguu

SEQ ID NO: 1257000 - RNA, 19 nt, Homo sapiens
  misc_RNA (1)...(19): siRNA sense strand
ggaccugaaagaugaugga

SEQ ID NO: 1257001 - RNA, 19 nt, Homo sapiens
  misc_RNA (1)...(19): siRNA sense strand
gagugaugcccacccaaga

SEQ ID NO: 1257002 - RNA, 19 nt, Homo sapiens
  misc_RNA (1)...(19): siRNA sense strand
gauacggaaacuagaagga

SEQ ID NO: 1257003 - RNA, 19 nt, Homo sapiens
  misc_RNA (1)...(19): siRNA sense strand
ggucaacgagaaagagauc

SEQ ID NO: 1257004 - RNA, 19 nt, Homo sapiens
  misc_RNA (1)...(19): siRNA sense strand
guguacagcugugcauucu

SEQ ID NO: 1257005 - RNA, 19 nt, Homo sapiens
  misc_RNA (1)...(19): siRNA sense strand
guucaggagcugccgauuc

SEQ ID NO: 1257006 - RNA, 19 nt, Homo sapiens
  misc_RNA (1)...(19): siRNA sense strand
ggucuuugcugugccuucu

SEQ ID NO: 1257007 - RNA, 19 nt, Homo sapiens
  misc_RNA (1)...(19): siRNA sense strand
ggaauauggauaaauacac

SEQ ID NO: 1257008 - RNA, 19 nt, Homo sapiens
  misc_RNA (1)...(19): siRNA sense strand
ugaaagaugauggaaacau

SEQ ID NO: 1257009 - RNA, 19 nt, Homo sapiens
  misc_RNA (1)...(19): siRNA sense strand
ucucucguaucguauuuag

SEQ ID NO: 1257010 - RNA, 19 nt, Homo sapiens
  misc_RNA (1)...(19): siRNA sense strand
gguguacagcugugcauuc

SEQ ID NO: 1257011 - RNA, 19 nt, Homo sapiens
  misc_RNA (1)...(19): siRNA sense strand
ucuccugacucuucuaugc

SEQ ID NO: 1257012 - RNA, 19 nt, Homo sapiens
  misc_RNA (1)...(19): siRNA sense strand
auggagacauucugaugga

SEQ ID NO: 1257013 - RNA, 19 nt, Homo sapiens
  misc_RNA (1)...(19): siRNA sense strand
cuggagaauugaugaggau

SEQ ID NO: 1257014 - RNA, 19 nt, Homo sapiens
  misc_RNA (1)...(19): siRNA sense strand
ggguacgaucuguaucuuu

SEQ ID NO: 1257015 - RNA, 19 nt, Homo sapiens
  misc_RNA (1)...(19): siRNA sense strand
ugcauucucuccugacucu

SEQ ID NO: 1257016 - RNA, 19 nt, Homo sapiens
  misc_RNA (1)...(19): siRNA sense strand
cuccuuaacuugguagauc

SEQ ID NO: 1257017 - RNA, 19 nt, Homo sapiens
  misc_RNA (1)...(19): siRNA sense strand
ggaaagaguuuauguucua

SEQ ID NO: 1257018 - RNA, 19 nt, Homo sapiens
  misc_RNA (1)...(19): siRNA sense strand
cagaagaacuguuugauug

SEQ ID NO: 1257019 - RNA, 19 nt, Homo sapiens
  misc_RNA (1)...(19): siRNA sense strand
gagaagagcuccagcagau

SEQ ID NO: 1257020 - RNA, 19 nt, Homo sapiens
  misc_RNA (1)...(19): siRNA sense strand
gcaauugugugccaucaaa

SEQ ID NO: 1257021 - RNA, 19 nt, Homo sapiens
  misc_RNA (1)...(19): siRNA sense strand
ggagacaaaucaucaggaa

SEQ ID NO: 1257022 - RNA, 19 nt, Homo sapiens
  misc_RNA (1)...(19): siRNA sense strand
gaagagcuccagcagauaa

SEQ ID NO: 1257023 - RNA, 19 nt, Homo sapiens
  misc_RNA (1)...(19): siRNA sense strand
caagaucuguggagacaaa

SEQ ID NO: 1257024 - RNA, 19 nt, Homo sapiens
  misc_RNA (1)...(19): siRNA sense strand
guuguucacuucagaauuu

SEQ ID NO: 1257025 - RNA, 19 nt, Homo sapiens
  misc_RNA (1)...(19): siRNA sense strand
gcaccugacugaagaugaa

SEQ ID NO: 1257026 - RNA, 19 nt, Homo sapiens
  misc_RNA (1)...(19): siRNA sense strand
gaaauuauuccaugcaaga

SEQ ID NO: 1257027 - RNA, 19 nt, Homo sapiens
  misc_RNA (1)...(19): siRNA sense strand
ggaagaaauugagaacuau

SEQ ID NO: 1257028 - RNA, 19 nt, Homo sapiens
  misc_RNA (1)...(19): siRNA sense strand
caaggugucuacauuaaga

SEQ ID NO: 1257029 - RNA, 19 nt, Homo sapiens
  misc_RNA (1)...(19): siRNA sense strand
ccgagaagauggaauacua

SEQ ID NO: 1257030 - RNA, 19 nt, Homo sapiens
  misc_RNA (1)...(19): siRNA sense strand
gaagauggaauacuaacaa

SEQ ID NO: 1257031 - RNA, 19 nt, Homo sapiens
  misc_RNA (1)...(19): siRNA sense strand
cagcuuguaugcagaagua

SEQ ID NO: 1257032 - RNA, 19 nt, Homo sapiens
  misc_RNA (1)...(19): siRNA sense strand
gaucaaauugugcuucuaa

SEQ ID NO: 1257033 - RNA, 19 nt, Homo sapiens
  misc_RNA (1)...(19): siRNA sense strand
gcagagagacagcuuguau

SEQ ID NO: 1257034 - RNA, 19 nt, Homo sapiens
  misc_RNA (1)...(19): siRNA sense strand
caaacgcauugauggauuu

SEQ ID NO: 1257035 - RNA, 19 nt, Homo sapiens
  misc_RNA (1)...(19): siRNA sense strand
gaagaacuguuugauugau

SEQ ID NO: 1257036 - RNA, 19 nt, Homo sapiens
  misc_RNA (1)...(19): siRNA sense strand
uagaacaccuugcacagaa

SEQ ID NO: 1257037 - RNA, 19 nt, Homo sapiens
  misc_RNA (1)...(19): siRNA sense strand
aggaagaaauugagaacua

SEQ ID NO: 1257038 - RNA, 19 nt, Homo sapiens
  misc_RNA (1)...(19): siRNA sense strand
gaacaccuugcacagaaua

SEQ ID NO: 1257039 - RNA, 19 nt, Homo sapiens
  misc_RNA (1)...(19): siRNA sense strand
aaucaaaccagaaccaaua

SEQ ID NO: 1257040 - RNA, 19 nt, Homo sapiens
  misc_RNA (1)...(19): siRNA sense strand
guagggaugucucgagaug

SEQ ID NO: 1257041 - RNA, 19 nt, Homo sapiens
  misc_RNA (1)...(19): siRNA sense strand
gaggugauguggcaauugu

SEQ ID NO: 1257042 - RNA, 19 nt, Homo sapiens
  misc_RNA (1)...(19): siRNA sense strand
gcucauggcugcaagaaaa

SEQ ID NO: 1257043 - RNA, 19 nt, Homo sapiens
  misc_RNA (1)...(19): siRNA sense strand
ggaaaccugccaauacuug

SEQ ID NO: 1257044 - RNA, 19 nt, Homo sapiens
  misc_RNA (1)...(19): siRNA sense strand
gaggugguguuuaucagaa

SEQ ID NO: 1257045 - RNA, 19 nt, Homo sapiens
  misc_RNA (1)...(19): siRNA sense strand
ccaaacgcauugauggauu

SEQ ID NO: 1257046 - RNA, 19 nt, Homo sapiens
  misc_RNA (1)...(19): siRNA sense strand
uuacagaagcuauacagua

SEQ ID NO: 1257047 - RNA, 19 nt, Homo sapiens
  misc_RNA (1)...(19): siRNA sense strand
gaaccaauaugugacuaca

SEQ ID NO: 1257048 - RNA, 19 nt, Homo sapiens
  misc_RNA (1)...(19): siRNA sense strand
caacacguccuacagaaga

SEQ ID NO: 1257049 - RNA, 19 nt, Homo sapiens
  misc_RNA (1)...(19): siRNA sense strand
gugaagacuuuauuagcuu

SEQ ID NO: 1257050 - RNA, 19 nt, Homo sapiens
  misc_RNA (1)...(19): siRNA sense strand
uaugcaaggugucuacauu

SEQ ID NO: 1257051 - RNA, 19 nt, Homo sapiens
  misc_RNA (1)...(19): siRNA sense strand
ucaccgagaagauggaaua

SEQ ID NO: 1257052 - RNA, 19 nt, Homo sapiens
  misc_RNA (1)...(19): siRNA sense strand
ccagucaggucuugauauc

SEQ ID NO: 1257053 - RNA, 19 nt, Homo sapiens
  misc_RNA (1)...(19): siRNA sense strand
gauggaauacuaacaaagu

SEQ ID NO: 1257054 - RNA, 19 nt, Homo sapiens
  misc_RNA (1)...(19): siRNA sense strand
gaaugugccgugccuuuga

SEQ ID NO: 1257055 - RNA, 19 nt, Homo sapiens
  misc_RNA (1)...(19): siRNA sense strand
ggagaagucagcaaagcaa

SEQ ID NO: 1257056 - RNA, 19 nt, Homo sapiens
  misc_RNA (1)...(19): siRNA sense strand
ugcaaggugucuacauuaa

SEQ ID NO: 1257057 - RNA, 19 nt, Homo sapiens
  misc_RNA (1)...(19): siRNA sense strand
acagaagaaucaccgagaa

SEQ ID NO: 1257058 - RNA, 19 nt, Homo sapiens
  misc_RNA (1)...(19): siRNA sense strand
gaagaaucaccgagaagau

SEQ ID NO: 1257059 - RNA, 19 nt, Homo sapiens
  misc_RNA (1)...(19): siRNA sense strand
ucagaagaacuguuugauu

SEQ ID NO: 1257060 - RNA, 19 nt, Homo sapiens
  misc_RNA (1)...(19): siRNA sense strand
cgaccucaguaacuacauu

SEQ ID NO: 1257061 - RNA, 19 nt, Homo sapiens
  misc_RNA (1)...(19): siRNA sense strand
caaaccagaaccaauaugu

SEQ ID NO: 1257062 - RNA, 19 nt, Homo sapiens
  misc_RNA (1)...(19): siRNA sense strand
agacaaaucaucaggaauc

SEQ ID NO: 1257063 - RNA, 19 nt, Homo sapiens
  misc_RNA (1)...(19): siRNA sense strand
gacugaagaugaaauugca

SEQ ID NO: 1257064 - RNA, 19 nt, Homo sapiens
  misc_RNA (1)...(19): siRNA sense strand
guccauggcagaauuagaa

SEQ ID NO: 1257065 - RNA, 19 nt, Homo sapiens
  misc_RNA (1)...(19): siRNA sense strand
uacaguaugugguggaguu

SEQ ID NO: 1257066 - RNA, 19 nt, Homo sapiens
  misc_RNA (1)...(19): siRNA sense strand
gccaauacuugagagaaga

SEQ ID NO: 1257067 - RNA, 19 nt, Homo sapiens
  misc_RNA (1)...(19): siRNA sense strand
gaaaccugccaauacuuga

SEQ ID NO: 1257068 - RNA, 19 nt, Homo sapiens
  misc_RNA (1)...(19): siRNA sense strand
aaauucagcuagcucuuca

SEQ ID NO: 1257069 - RNA, 19 nt, Homo sapiens
  misc_RNA (1)...(19): siRNA sense strand
gacauugugcgacuucauu

SEQ ID NO: 1257070 - RNA, 19 nt, Homo sapiens
  misc_RNA (1)...(19): siRNA sense strand
cgagaagauggaauacuaa

SEQ ID NO: 1257071 - RNA, 19 nt, Homo sapiens
  misc_RNA (1)...(19): siRNA sense strand
agaaaccgcugccaacacu

SEQ ID NO: 1257072 - RNA, 19 nt, Homo sapiens
  misc_RNA (1)...(19): siRNA sense strand
cuaugcaccugacugaaga

SEQ ID NO: 1257073 - RNA, 19 nt, Homo sapiens
  misc_RNA (1)...(19): siRNA sense strand
cgacgucuucaaauccuua

SEQ ID NO: 1257074 - RNA, 19 nt, Homo sapiens
  misc_RNA (1)...(19): siRNA sense strand
cagaaugugccgugccuuu

SEQ ID NO: 1257075 - RNA, 19 nt, Homo sapiens
  misc_RNA (1)...(19): siRNA sense strand
gggaggugauguggcaauu

SEQ ID NO: 1257076 - RNA, 19 nt, Homo sapiens
  misc_RNA (1)...(19): siRNA sense strand
gaaucaaaccagaaccaau

SEQ ID NO: 1257077 - RNA, 19 nt, Homo sapiens
  misc_RNA (1)...(19): siRNA sense strand
ccaacgggcugacggaacu

SEQ ID NO: 1257078 - RNA, 19 nt, Homo sapiens
  misc_RNA (1)...(19): siRNA sense strand
gaucuguggagacaaauca

SEQ ID NO: 1257079 - RNA, 19 nt, Homo sapiens
  misc_RNA (1)...(19): siRNA sense strand
ucaaauccuuagguuguga

SEQ ID NO: 1257080 - RNA, 19 nt, Homo sapiens
  misc_RNA (1)...(19): siRNA sense strand
gaagaaauugagaacuauc

SEQ ID NO: 1257081 - RNA, 19 nt, Homo sapiens
  misc_RNA (1)...(19): siRNA sense strand
ucgagaugcuguaaaauuu

SEQ ID NO: 1257082 - RNA, 19 nt, Homo sapiens
  misc_RNA (1)...(19): siRNA sense strand
ucagcuagcucuucaacac

SEQ ID NO: 1257083 - RNA, 19 nt, Homo sapiens
  misc_RNA (1)...(19): siRNA sense strand
gguugugaagacuuuauua

SEQ ID NO: 1257084 - RNA, 19 nt, Homo sapiens
  misc_RNA (1)...(19): siRNA sense strand
aaccagaaccaauauguga

SEQ ID NO: 1257085 - RNA, 19 nt, Homo sapiens
  misc_RNA (1)...(19): siRNA sense strand
aaucaucaggaauccauua

SEQ ID NO: 1257086 - RNA, 19 nt, Homo sapiens
  misc_RNA (1)...(19): siRNA sense strand
gcuucuaccuggacauaca

SEQ ID NO: 1257087 - RNA, 19 nt, Homo sapiens
  misc_RNA (1)...(19): siRNA sense strand
guaugcagaaguacagaaa

SEQ ID NO: 1257088 - RNA, 19 nt, Homo sapiens
  misc_RNA (1)...(19): siRNA sense strand
caaaucaucaggaauccau

SEQ ID NO: 1257089 - RNA, 19 nt, Homo sapiens
  misc_RNA (1)...(19): siRNA sense strand
ggaaucaaaccagaaccaa

SEQ ID NO: 1257090 - RNA, 19 nt, Homo sapiens
  misc_RNA (1)...(19): siRNA sense strand
acgcauugauggauuuaug

SEQ ID NO: 1257091 - RNA, 19 nt, Homo sapiens
  misc_RNA (1)...(19): siRNA sense strand
cuuagguugugaagacuuu

SEQ ID NO: 1257092 - RNA, 19 nt, Homo sapiens
  misc_RNA (1)...(19): siRNA sense strand
agaagaacuguuugauuga

SEQ ID NO: 1257093 - RNA, 19 nt, Homo sapiens
  misc_RNA (1)...(19): siRNA sense strand
aaugcaaauugauggguaa

SEQ ID NO: 1257094 - RNA, 19 nt, Homo sapiens
  misc_RNA (1)...(19): siRNA sense strand
cuucaaauccuuagguugu

SEQ ID NO: 1257095 - RNA, 19 nt, Homo sapiens
  misc_RNA (1)...(19): siRNA sense strand
cugccaacacugucgauua

SEQ ID NO: 1257096 - RNA, 19 nt, Homo sapiens
  misc_RNA (1)...(19): siRNA sense strand
gcaaggugucuacauuaag

SEQ ID NO: 1257097 - RNA, 19 nt, Homo sapiens
  misc_RNA (1)...(19): siRNA sense strand
ugugaagacuuuauuagcu

SEQ ID NO: 1257098 - RNA, 19 nt, Homo sapiens
  misc_RNA (1)...(19): siRNA sense strand
acgacgaccucaguaacua

SEQ ID NO: 1257099 - RNA, 19 nt, Homo sapiens
  misc_RNA (1)...(19): siRNA sense strand
ugacuacacaccagcauca

SEQ ID NO: 1257100 - RNA, 19 nt, Homo sapiens
  misc_RNA (1)...(19): siRNA sense strand
aaagcaauauacccagaca

SEQ ID NO: 1257101 - RNA, 19 nt, Homo sapiens
  misc_RNA (1)...(19): siRNA sense strand
cucuagaggugguguuuau

SEQ ID NO: 1257102 - RNA, 19 nt, Homo sapiens
  misc_RNA (1)...(19): siRNA sense strand
cuaaaucgcaucuggaaac

SEQ ID NO: 1257103 - RNA, 19 nt, Homo sapiens
  misc_RNA (1)...(19): siRNA sense strand
cagcuucuaccuggacaua

SEQ ID NO: 1257104 - RNA, 19 nt, Homo sapiens
  misc_RNA (1)...(19): siRNA sense strand
guucuaugcaccugacuga

SEQ ID NO: 1257105 - RNA, 19 nt, Homo sapiens
  misc_RNA (1)...(19): siRNA sense strand
cagaaccaauaugugacua

SEQ ID NO: 1257106 - RNA, 19 nt, Homo sapiens
  misc_RNA (1)...(19): siRNA sense strand
ugccaacacugucgauuac

SEQ ID NO: 1257107 - RNA, 19 nt, Homo sapiens
  misc_RNA (1)...(19): siRNA sense strand
ggaguuguucacuucagaa

SEQ ID NO: 1257108 - RNA, 19 nt, Homo sapiens
  misc_RNA (1)...(19): siRNA sense strand
uggaaagaguuuauguucu

SEQ ID NO: 1257109 - RNA, 19 nt, Homo sapiens
  misc_RNA (1)...(19): siRNA sense strand
gaagacuuuauuagcuuug

SEQ ID NO: 1257110 - RNA, 19 nt, Homo sapiens
  misc_RNA (1)...(19): siRNA sense strand
gaagucagcaaagcaaugc

SEQ ID NO: 1257111 - RNA, 19 nt, Homo sapiens
  misc_RNA (1)...(19): siRNA sense strand
guagaaaccgcugccaaca

SEQ ID NO: 1257112 - RNA, 19 nt, Homo sapiens
  misc_RNA (1)...(19): siRNA sense strand
ggugguguuuaucagaaug

SEQ ID NO: 1257113 - RNA, 19 nt, Homo sapiens
  misc_RNA (1)...(19): siRNA sense strand
cuggaaaccugccaauacu

SEQ ID NO: 1257114 - RNA, 19 nt, Homo sapiens
  misc_RNA (1)...(19): siRNA sense strand
gaucgaaccaguagaaacc

SEQ ID NO: 1257115 - RNA, 19 nt, Homo sapiens
  misc_RNA (1)...(19): siRNA sense strand
cgucagaagaacuguuuga

SEQ ID NO: 1257116 - RNA, 19 nt, Homo sapiens
  misc_RNA (1)...(19): siRNA sense strand
gccuuugacucucagaaca

SEQ ID NO: 1257117 - RNA, 19 nt, Homo sapiens
  misc_RNA (1)...(19): siRNA sense strand
ggaaagaguuuauguucua

SEQ ID NO: 1257118 - RNA, 19 nt, Homo sapiens
  misc_RNA (1)...(19): siRNA sense strand
cagaagaacuguuugauug

SEQ ID NO: 1257119 - RNA, 19 nt, Homo sapiens
  misc_RNA (1)...(19): siRNA sense strand
gagaagagcuccagcagau

SEQ ID NO: 1257120 - RNA, 19 nt, Homo sapiens
  misc_RNA (1)...(19): siRNA sense strand
gcaauugugugccaucaaa

SEQ ID NO: 1257121 - RNA, 19 nt, Homo sapiens
  misc_RNA (1)...(19): siRNA sense strand
ggagacaaaucaucaggaa

SEQ ID NO: 1257122 - RNA, 19 nt, Homo sapiens
  misc_RNA (1)...(19): siRNA sense strand
gaagagcuccagcagauaa

SEQ ID NO: 1257123 - RNA, 19 nt, Homo sapiens
  misc_RNA (1)...(19): siRNA sense strand
caagaucuguggagacaaa

SEQ ID NO: 1257124 - RNA, 19 nt, Homo sapiens
  misc_RNA (1)...(19): siRNA sense strand
guuguucacuucagaauuu

SEQ ID NO: 1257125 - RNA, 19 nt, Homo sapiens
  misc_RNA (1)...(19): siRNA sense strand
gcaccugacugaagaugaa

SEQ ID NO: 1257126 - RNA, 19 nt, Homo sapiens
  misc_RNA (1)...(19): siRNA sense strand
gaaauuauuccaugcaaga

SEQ ID NO: 1257127 - RNA, 19 nt, Homo sapiens
  misc_RNA (1)...(19): siRNA sense strand
ggaagaaauugagaacuau

SEQ ID NO: 1257128 - RNA, 19 nt, Homo sapiens
  misc_RNA (1)...(19): siRNA sense strand
caaggugucuacauuaaga

SEQ ID NO: 1257129 - RNA, 19 nt, Homo sapiens
  misc_RNA (1)...(19): siRNA sense strand
ccgagaagauggaauacua

SEQ ID NO: 1257130 - RNA, 19 nt, Homo sapiens
  misc_RNA (1)...(19): siRNA sense strand
gaagauggaauacuaacaa

SEQ ID NO: 1257131 - RNA, 19 nt, Homo sapiens
  misc_RNA (1)...(19): siRNA sense strand
cagcuuguaugcagaagua

SEQ ID NO: 1257132 - RNA, 19 nt, Homo sapiens
  misc_RNA (1)...(19): siRNA sense strand
gaucaaauugugcuucuaa

SEQ ID NO: 1257133 - RNA, 19 nt, Homo sapiens
  misc_RNA (1)...(19): siRNA sense strand
gcagagagacagcuuguau

SEQ ID NO: 1257134 - RNA, 19 nt, Homo sapiens
  misc_RNA (1)...(19): siRNA sense strand
caaacgcauugauggauuu

SEQ ID NO: 1257135 - RNA, 19 nt, Homo sapiens
  misc_RNA (1)...(19): siRNA sense strand
gaagaacuguuugauugau

SEQ ID NO: 1257136 - RNA, 19 nt, Homo sapiens
  misc_RNA (1)...(19): siRNA sense strand
uagaacaccuugcacagaa

SEQ ID NO: 1257137 - RNA, 19 nt, Homo sapiens
  misc_RNA (1)...(19): siRNA sense strand
aggaagaaauugagaacua

SEQ ID NO: 1257138 - RNA, 19 nt, Homo sapiens
  misc_RNA (1)...(19): siRNA sense strand
gaacaccuugcacagaaua

SEQ ID NO: 1257139 - RNA, 19 nt, Homo sapiens
  misc_RNA (1)...(19): siRNA sense strand
aaucaaaccagaaccaaua

SEQ ID NO: 1257140 - RNA, 19 nt, Homo sapiens
  misc_RNA (1)...(19): siRNA sense strand
guagggaugucucgagaug

SEQ ID NO: 1257141 - RNA, 19 nt, Homo sapiens
  misc_RNA (1)...(19): siRNA sense strand
gaggugauguggcaauugu

SEQ ID NO: 1257142 - RNA, 19 nt, Homo sapiens
  misc_RNA (1)...(19): siRNA sense strand
gcucauggcugcaagaaaa

SEQ ID NO: 1257143 - RNA, 19 nt, Homo sapiens
  misc_RNA (1)...(19): siRNA sense strand
ggaaaccugccaauacuug

SEQ ID NO: 1257144 - RNA, 19 nt, Homo sapiens
  misc_RNA (1)...(19): siRNA sense strand
gaggugguguuuaucagaa

SEQ ID NO: 1257145 - RNA, 19 nt, Homo sapiens
  misc_RNA (1)...(19): siRNA sense strand
ccaaacgcauugauggauu

SEQ ID NO: 1257146 - RNA, 19 nt, Homo sapiens
  misc_RNA (1)...(19): siRNA sense strand
uuacagaagcuauacagua

SEQ ID NO: 1257147 - RNA, 19 nt, Homo sapiens
  misc_RNA (1)...(19): siRNA sense strand
gaaccaauaugugacuaca

SEQ ID NO: 1257148 - RNA, 19 nt, Homo sapiens
  misc_RNA (1)...(19): siRNA sense strand
caacacguccuacagaaga

SEQ ID NO: 1257149 - RNA, 19 nt, Homo sapiens
  misc_RNA (1)...(19): siRNA sense strand
gugaagacuuuauuagcuu

SEQ ID NO: 1257150 - RNA, 19 nt, Homo sapiens
  misc_RNA (1)...(19): siRNA sense strand
uaugcaaggugucuacauu

SEQ ID NO: 1257151 - RNA, 19 nt, Homo sapiens
  misc_RNA (1)...(19): siRNA sense strand
ucaccgagaagauggaaua

SEQ ID NO: 1257152 - RNA, 19 nt, Homo sapiens
  misc_RNA (1)...(19): siRNA sense strand
ccagucaggucuugauauc

SEQ ID NO: 1257153 - RNA, 19 nt, Homo sapiens
  misc_RNA (1)...(19): siRNA sense strand
gauggaauacuaacaaagu

SEQ ID NO: 1257154 - RNA, 19 nt, Homo sapiens
  misc_RNA (1)...(19): siRNA sense strand
gaaugugccgugccuuuga

SEQ ID NO: 1257155 - RNA, 19 nt, Homo sapiens
  misc_RNA (1)...(19): siRNA sense strand
ggagaagucagcaaagcaa

SEQ ID NO: 1257156 - RNA, 19 nt, Homo sapiens
  misc_RNA (1)...(19): siRNA sense strand
ugcaaggugucuacauuaa

SEQ ID NO: 1257157 - RNA, 19 nt, Homo sapiens
  misc_RNA (1)...(19): siRNA sense strand
acagaagaaucaccgagaa

SEQ ID NO: 1257158 - RNA, 19 nt, Homo sapiens
  misc_RNA (1)...(19): siRNA sense strand
gaagaaucaccgagaagau

SEQ ID NO: 1257159 - RNA, 19 nt, Homo sapiens
  misc_RNA (1)...(19): siRNA sense strand
ucagaagaacuguuugauu

SEQ ID NO: 1257160 - RNA, 19 nt, Homo sapiens
  misc_RNA (1)...(19): siRNA sense strand
cgaccucaguaacuacauu

SEQ ID NO: 1257161 - RNA, 19 nt, Homo sapiens
  misc_RNA (1)...(19): siRNA sense strand
caaaccagaaccaauaugu

SEQ ID NO: 1257162 - RNA, 19 nt, Homo sapiens
  misc_RNA (1)...(19): siRNA sense strand
agacaaaucaucaggaauc

SEQ ID NO: 1257163 - RNA, 19 nt, Homo sapiens
  misc_RNA (1)...(19): siRNA sense strand
gacugaagaugaaauugca

SEQ ID NO: 1257164 - RNA, 19 nt, Homo sapiens
  misc_RNA (1)...(19): siRNA sense strand
guccauggcagaauuagaa

SEQ ID NO: 1257165 - RNA, 19 nt, Homo sapiens
  misc_RNA (1)...(19): siRNA sense strand
uacaguaugugguggaguu

SEQ ID NO: 1257166 - RNA, 19 nt, Homo sapiens
  misc_RNA (1)...(19): siRNA sense strand
gccaauacuugagagaaga

SEQ ID NO: 1257167 - RNA, 19 nt, Homo sapiens
  misc_RNA (1)...(19): siRNA sense strand
gaaaccugccaauacuuga

SEQ ID NO: 1257168 - RNA, 19 nt, Homo sapiens
  misc_RNA (1)...(19): siRNA sense strand
aaauucagcuagcucuuca

SEQ ID NO: 1257169 - RNA, 19 nt, Homo sapiens
  misc_RNA (1)...(19): siRNA sense strand
gacauugugcgacuucauu

SEQ ID NO: 1257170 - RNA, 19 nt, Homo sapiens
  misc_RNA (1)...(19): siRNA sense strand
cgagaagauggaauacuaa

SEQ ID NO: 1257171 - RNA, 19 nt, Homo sapiens
  misc_RNA (1)...(19): siRNA sense strand
agaaaccgcugccaacacu

SEQ ID NO: 1257172 - RNA, 19 nt, Homo sapiens
  misc_RNA (1)...(19): siRNA sense strand
cuaugcaccugacugaaga

SEQ ID NO: 1257173 - RNA, 19 nt, Homo sapiens
  misc_RNA (1)...(19): siRNA sense strand
cgacgucuucaaauccuua

SEQ ID NO: 1257174 - RNA, 19 nt, Homo sapiens
  misc_RNA (1)...(19): siRNA sense strand
cagaaugugccgugccuuu

SEQ ID NO: 1257175 - RNA, 19 nt, Homo sapiens
  misc_RNA (1)...(19): siRNA sense strand
gggaggugauguggcaauu

SEQ ID NO: 1257176 - RNA, 19 nt, Homo sapiens
  misc_RNA (1)...(19): siRNA sense strand
gaaucaaaccagaaccaau

SEQ ID NO: 1257177 - RNA, 19 nt, Homo sapiens
  misc_RNA (1)...(19): siRNA sense strand
ccaacgggcugacggaacu

SEQ ID NO: 1257178 - RNA, 19 nt, Homo sapiens
  misc_RNA (1)...(19): siRNA sense strand
gaucuguggagacaaauca

SEQ ID NO: 1257179 - RNA, 19 nt, Homo sapiens
  misc_RNA (1)...(19): siRNA sense strand
ucaaauccuuagguuguga

SEQ ID NO: 1257180 - RNA, 19 nt, Homo sapiens
  misc_RNA (1)...(19): siRNA sense strand
gaagaaauugagaacuauc

SEQ ID NO: 1257181 - RNA, 19 nt, Homo sapiens
  misc_RNA (1)...(19): siRNA sense strand
ucgagaugcuguaaaauuu

SEQ ID NO: 1257182 - RNA, 19 nt, Homo sapiens
  misc_RNA (1)...(19): siRNA sense strand
ucagcuagcucuucaacac

SEQ ID NO: 1257183 - RNA, 19 nt, Homo sapiens
  misc_RNA (1)...(19): siRNA sense strand
gguugugaagacuuuauua

SEQ ID NO: 1257184 - RNA, 19 nt, Homo sapiens
  misc_RNA (1)...(19): siRNA sense strand
aaccagaaccaauauguga

SEQ ID NO: 1257185 - RNA, 19 nt, Homo sapiens
  misc_RNA (1)...(19): siRNA sense strand
aaucaucaggaauccauua

SEQ ID NO: 1257186 - RNA, 19 nt, Homo sapiens
  misc_RNA (1)...(19): siRNA sense strand
gcuucuaccuggacauaca

SEQ ID NO: 1257187 - RNA, 19 nt, Homo sapiens
  misc_RNA (1)...(19): siRNA sense strand
guaugcagaaguacagaaa

SEQ ID NO: 1257188 - RNA, 19 nt, Homo sapiens
  misc_RNA (1)...(19): siRNA sense strand
caaaucaucaggaauccau

SEQ ID NO: 1257189 - RNA, 19 nt, Homo sapiens
  misc_RNA (1)...(19): siRNA sense strand
ggaaucaaaccagaaccaa

SEQ ID NO: 1257190 - RNA, 19 nt, Homo sapiens
  misc_RNA (1)...(19): siRNA sense strand
acgcauugauggauuuaug

SEQ ID NO: 1257191 - RNA, 19 nt, Homo sapiens
  misc_RNA (1)...(19): siRNA sense strand
cuuagguugugaagacuuu

SEQ ID NO: 1257192 - RNA, 19 nt, Homo sapiens
  misc_RNA (1)...(19): siRNA sense strand
agaagaacuguuugauuga

SEQ ID NO: 1257193 - RNA, 19 nt, Homo sapiens
  misc_RNA (1)...(19): siRNA sense strand
aaugcaaauugauggguaa

SEQ ID NO: 1257194 - RNA, 19 nt, Homo sapiens
  misc_RNA (1)...(19): siRNA sense strand
cuucaaauccuuagguugu

SEQ ID NO: 1257195 - RNA, 19 nt, Homo sapiens
  misc_RNA (1)...(19): siRNA sense strand
cugccaacacugucgauua

SEQ ID NO: 1257196 - RNA, 19 nt, Homo sapiens
  misc_RNA (1)...(19): siRNA sense strand
gcaaggugucuacauuaag

SEQ ID NO: 1257197 - RNA, 19 nt, Homo sapiens
  misc_RNA (1)...(19): siRNA sense strand
ugugaagacuuuauuagcu

SEQ ID NO: 1257198 - RNA, 19 nt, Homo sapiens
  misc_RNA (1)...(19): siRNA sense strand
acgacgaccucaguaacua

SEQ ID NO: 1257199 - RNA, 19 nt, Homo sapiens
  misc_RNA (1)...(19): siRNA sense strand
ugacuacacaccagcauca

SEQ ID NO: 1257200 - RNA, 19 nt, Homo sapiens
  misc_RNA (1)...(19): siRNA sense strand
aaagcaauauacccagaca

SEQ ID NO: 1257201 - RNA, 19 nt, Homo sapiens
  misc_RNA (1)...(19): siRNA sense strand
cucuagaggugguguuuau

SEQ ID NO: 1257202 - RNA, 19 nt, Homo sapiens
  misc_RNA (1)...(19): siRNA sense strand
cuaaaucgcaucuggaaac

SEQ ID NO: 1257203 - RNA, 19 nt, Homo sapiens
  misc_RNA (1)...(19): siRNA sense strand
cagcuucuaccuggacaua

SEQ ID NO: 1257204 - RNA, 19 nt, Homo sapiens
  misc_RNA (1)...(19): siRNA sense strand
guucuaugcaccugacuga

SEQ ID NO: 1257205 - RNA, 19 nt, Homo sapiens
  misc_RNA (1)...(19): siRNA sense strand
cagaaccaauaugugacua

SEQ ID NO: 1257206 - RNA, 19 nt, Homo sapiens
  misc_RNA (1)...(19): siRNA sense strand
ugccaacacugucgauuac

SEQ ID NO: 1257207 - RNA, 19 nt, Homo sapiens
  misc_RNA (1)...(19): siRNA sense strand
ggaguuguucacuucagaa

SEQ ID NO: 1257208 - RNA, 19 nt, Homo sapiens
  misc_RNA (1)...(19): siRNA sense strand
uggaaagaguuuauguucu

SEQ ID NO: 1257209 - RNA, 19 nt, Homo sapiens
  misc_RNA (1)...(19): siRNA sense strand
gaagacuuuauuagcuuug

SEQ ID NO: 1257210 - RNA, 19 nt, Homo sapiens
  misc_RNA (1)...(19): siRNA sense strand
gaagucagcaaagcaaugc

SEQ ID NO: 1257211 - RNA, 19 nt, Homo sapiens
  misc_RNA (1)...(19): siRNA sense strand
guagaaaccgcugccaaca

SEQ ID NO: 1257212 - RNA, 19 nt, Homo sapiens
  misc_RNA (1)...(19): siRNA sense strand
ggugguguuuaucagaaug

SEQ ID NO: 1257213 - RNA, 19 nt, Homo sapiens
  misc_RNA (1)...(19): siRNA sense strand
cuggaaaccugccaauacu

SEQ ID NO: 1257214 - RNA, 19 nt, Homo sapiens
  misc_RNA (1)...(19): siRNA sense strand
gaucgaaccaguagaaacc

SEQ ID NO: 1257215 - RNA, 19 nt, Homo sapiens
  misc_RNA (1)...(19): siRNA sense strand
cgucagaagaacuguuuga

SEQ ID NO: 1257216 - RNA, 19 nt, Homo sapiens
  misc_RNA (1)...(19): siRNA sense strand
gccuuugacucucagaaca

SEQ ID NO: 1257217 - RNA, 19 nt, Homo sapiens
  misc_RNA (1)...(19): siRNA sense strand
ggaaagaguuuauguucua

SEQ ID NO: 1257218 - RNA, 19 nt, Homo sapiens
  misc_RNA (1)...(19): siRNA sense strand
cagaagaacuguuugauug

SEQ ID NO: 1257219 - RNA, 19 nt, Homo sapiens
  misc_RNA (1)...(19): siRNA sense strand
gagaagagcuccagcagau

SEQ ID NO: 1257220 - RNA, 19 nt, Homo sapiens
  misc_RNA (1)...(19): siRNA sense strand
gcaauugugugccaucaaa

SEQ ID NO: 1257221 - RNA, 19 nt, Homo sapiens
  misc_RNA (1)...(19): siRNA sense strand
ggagacaaaucaucaggaa

SEQ ID NO: 1257222 - RNA, 19 nt, Homo sapiens
  misc_RNA (1)...(19): siRNA sense strand
gaagagcuccagcagauaa

SEQ ID NO: 1257223 - RNA, 19 nt, Homo sapiens
  misc_RNA (1)...(19): siRNA sense strand
caagaucuguggagacaaa

SEQ ID NO: 1257224 - RNA, 19 nt, Homo sapiens
  misc_RNA (1)...(19): siRNA sense strand
guuguucacuucagaauuu

SEQ ID NO: 1257225 - RNA, 19 nt, Homo sapiens
  misc_RNA (1)...(19): siRNA sense strand
gcaccugacugaagaugaa

SEQ ID NO: 1257226 - RNA, 19 nt, Homo sapiens
  misc_RNA (1)...(19): siRNA sense strand
gaaauuauuccaugcaaga

SEQ ID NO: 1257227 - RNA, 19 nt, Homo sapiens
  misc_RNA (1)...(19): siRNA sense strand
ggaagaaauugagaacuau

SEQ ID NO: 1257228 - RNA, 19 nt, Homo sapiens
  misc_RNA (1)...(19): siRNA sense strand
caaggugucuacauuaaga

SEQ ID NO: 1257229 - RNA, 19 nt, Homo sapiens
  misc_RNA (1)...(19): siRNA sense strand
ccgagaagauggaauacua

SEQ ID NO: 1257230 - RNA, 19 nt, Homo sapiens
  misc_RNA (1)...(19): siRNA sense strand
gaagauggaauacuaacaa

SEQ ID NO: 1257231 - RNA, 19 nt, Homo sapiens
  misc_RNA (1)...(19): siRNA sense strand
cagcuuguaugcagaagua

SEQ ID NO: 1257232 - RNA, 19 nt, Homo sapiens
  misc_RNA (1)...(19): siRNA sense strand
gaucaaauugugcuucuaa

SEQ ID NO: 1257233 - RNA, 19 nt, Homo sapiens
  misc_RNA (1)...(19): siRNA sense strand
gcagagagacagcuuguau

SEQ ID NO: 1257234 - RNA, 19 nt, Homo sapiens
  misc_RNA (1)...(19): siRNA sense strand
caaacgcauugauggauuu

SEQ ID NO: 1257235 - RNA, 19 nt, Homo sapiens
  misc_RNA (1)...(19): siRNA sense strand
gaagaacuguuugauugau

SEQ ID NO: 1257236 - RNA, 19 nt, Homo sapiens
  misc_RNA (1)...(19): siRNA sense strand
uagaacaccuugcacagaa

SEQ ID NO: 1257237 - RNA, 19 nt, Homo sapiens
  misc_RNA (1)...(19): siRNA sense strand
aggaagaaauugagaacua

SEQ ID NO: 1257238 - RNA, 19 nt, Homo sapiens
  misc_RNA (1)...(19): siRNA sense strand
gaacaccuugcacagaaua

SEQ ID NO: 1257239 - RNA, 19 nt, Homo sapiens
  misc_RNA (1)...(19): siRNA sense strand
aaucaaaccagaaccaaua

SEQ ID NO: 1257240 - RNA, 19 nt, Homo sapiens
  misc_RNA (1)...(19): siRNA sense strand
guagggaugucucgagaug

SEQ ID NO: 1257241 - RNA, 19 nt, Homo sapiens
  misc_RNA (1)...(19): siRNA sense strand
gaggugauguggcaauugu

SEQ ID NO: 1257242 - RNA, 19 nt, Homo sapiens
  misc_RNA (1)...(19): siRNA sense strand
gcucauggcugcaagaaaa

SEQ ID NO: 1257243 - RNA, 19 nt, Homo sapiens
  misc_RNA (1)...(19): siRNA sense strand
ggaaaccugccaauacuug

SEQ ID NO: 1257244 - RNA, 19 nt, Homo sapiens
  misc_RNA (1)...(19): siRNA sense strand
gaggugguguuuaucagaa

SEQ ID NO: 1257245 - RNA, 19 nt, Homo sapiens
  misc_RNA (1)...(19): siRNA sense strand
ccaaacgcauugauggauu

SEQ ID NO: 1257246 - RNA, 19 nt, Homo sapiens
  misc_RNA (1)...(19): siRNA sense strand
uuacagaagcuauacagua

SEQ ID NO: 1257247 - RNA, 19 nt, Homo sapiens
  misc_RNA (1)...(19): siRNA sense strand
gaaccaauaugugacuaca

SEQ ID NO: 1257248 - RNA, 19 nt, Homo sapiens
  misc_RNA (1)...(19): siRNA sense strand
caacacguccuacagaaga

SEQ ID NO: 1257249 - RNA, 19 nt, Homo sapiens
  misc_RNA (1)...(19): siRNA sense strand
gugaagacuuuauuagcuu

SEQ ID NO: 1257250 - RNA, 19 nt, Homo sapiens
  misc_RNA (1)...(19): siRNA sense strand
uaugcaaggugucuacauu

SEQ ID NO: 1257251 - RNA, 19 nt, Homo sapiens
  misc_RNA (1)...(19): siRNA sense strand
ucaccgagaagauggaaua

SEQ ID NO: 1257252 - RNA, 19 nt, Homo sapiens
  misc_RNA (1)...(19): siRNA sense strand
ccagucaggucuugauauc

SEQ ID NO: 1257253 - RNA, 19 nt, Homo sapiens
  misc_RNA (1)...(19): siRNA sense strand
gauggaauacuaacaaagu

SEQ ID NO: 1257254 - RNA, 19 nt, Homo sapiens
  misc_RNA (1)...(19): siRNA sense strand
gaaugugccgugccuuuga

SEQ ID NO: 1257255 - RNA, 19 nt, Homo sapiens
  misc_RNA (1)...(19): siRNA sense strand
ggagaagucagcaaagcaa

SEQ ID NO: 1257256 - RNA, 19 nt, Homo sapiens
  misc_RNA (1)...(19): siRNA sense strand
ugcaaggugucuacauuaa

SEQ ID NO: 1257257 - RNA, 19 nt, Homo sapiens
  misc_RNA (1)...(19): siRNA sense strand
acagaagaaucaccgagaa

SEQ ID NO: 1257258 - RNA, 19 nt, Homo sapiens
  misc_RNA (1)...(19): siRNA sense strand
gaagaaucaccgagaagau

SEQ ID NO: 1257259 - RNA, 19 nt, Homo sapiens
  misc_RNA (1)...(19): siRNA sense strand
ucagaagaacuguuugauu

SEQ ID NO: 1257260 - RNA, 19 nt, Homo sapiens
  misc_RNA (1)...(19): siRNA sense strand
cgaccucaguaacuacauu

SEQ ID NO: 1257261 - RNA, 19 nt, Homo sapiens
  misc_RNA (1)...(19): siRNA sense strand
caaaccagaaccaauaugu

SEQ ID NO: 1257262 - RNA, 19 nt, Homo sapiens
  misc_RNA (1)...(19): siRNA sense strand
agacaaaucaucaggaauc

SEQ ID NO: 1257263 - RNA, 19 nt, Homo sapiens
  misc_RNA (1)...(19): siRNA sense strand
gacugaagaugaaauugca

SEQ ID NO: 1257264 - RNA, 19 nt, Homo sapiens
  misc_RNA (1)...(19): siRNA sense strand
guccauggcagaauuagaa

SEQ ID NO: 1257265 - RNA, 19 nt, Homo sapiens
  misc_RNA (1)...(19): siRNA sense strand
uacaguaugugguggaguu

SEQ ID NO: 1257266 - RNA, 19 nt, Homo sapiens
  misc_RNA (1)...(19): siRNA sense strand
gccaauacuugagagaaga

SEQ ID NO: 1257267 - RNA, 19 nt, Homo sapiens
  misc_RNA (1)...(19): siRNA sense strand
gaaaccugccaauacuuga

SEQ ID NO: 1257268 - RNA, 19 nt, Homo sapiens
  misc_RNA (1)...(19): siRNA sense strand
aaauucagcuagcucuuca

SEQ ID NO: 1257269 - RNA, 19 nt, Homo sapiens
  misc_RNA (1)...(19): siRNA sense strand
gacauugugcgacuucauu

SEQ ID NO: 1257270 - RNA, 19 nt, Homo sapiens
  misc_RNA (1)...(19): siRNA sense strand
cgagaagauggaauacuaa

SEQ ID NO: 1257271 - RNA, 19 nt, Homo sapiens
  misc_RNA (1)...(19): siRNA sense strand
agaaaccgcugccaacacu

SEQ ID NO: 1257272 - RNA, 19 nt, Homo sapiens
  misc_RNA (1)...(19): siRNA sense strand
cuaugcaccugacugaaga

SEQ ID NO: 1257273 - RNA, 19 nt, Homo sapiens
  misc_RNA (1)...(19): siRNA sense strand
cgacgucuucaaauccuua

SEQ ID NO: 1257274 - RNA, 19 nt, Homo sapiens
  misc_RNA (1)...(19): siRNA sense strand
cagaaugugccgugccuuu

SEQ ID NO: 1257275 - RNA, 19 nt, Homo sapiens
  misc_RNA (1)...(19): siRNA sense strand
gggaggugauguggcaauu

SEQ ID NO: 1257276 - RNA, 19 nt, Homo sapiens
  misc_RNA (1)...(19): siRNA sense strand
gaaucaaaccagaaccaau

SEQ ID NO: 1257277 - RNA, 19 nt, Homo sapiens
  misc_RNA (1)...(19): siRNA sense strand
ccaacgggcugacggaacu

SEQ ID NO: 1257278 - RNA, 19 nt, Homo sapiens
  misc_RNA (1)...(19): siRNA sense strand
gaucuguggagacaaauca

SEQ ID NO: 1257279 - RNA, 19 nt, Homo sapiens
  misc_RNA (1)...(19): siRNA sense strand
ucaaauccuuagguuguga

SEQ ID NO: 1257280 - RNA, 19 nt, Homo sapiens
  misc_RNA (1)...(19): siRNA sense strand
gaagaaauugagaacuauc

SEQ ID NO: 1257281 - RNA, 19 nt, Homo sapiens
  misc_RNA (1)...(19): siRNA sense strand
ucgagaugcuguaaaauuu

SEQ ID NO: 1257282 - RNA, 19 nt, Homo sapiens
  misc_RNA (1)...(19): siRNA sense strand
ucagcuagcucuucaacac

SEQ ID NO: 1257283 - RNA, 19 nt, Homo sapiens
  misc_RNA (1)...(19): siRNA sense strand
gguugugaagacuuuauua

SEQ ID NO: 1257284 - RNA, 19 nt, Homo sapiens
  misc_RNA (1)...(19): siRNA sense strand
aaccagaaccaauauguga

SEQ ID NO: 1257285 - RNA, 19 nt, Homo sapiens
  misc_RNA (1)...(19): siRNA sense strand
aaucaucaggaauccauua

SEQ ID NO: 1257286 - RNA, 19 nt, Homo sapiens
  misc_RNA (1)...(19): siRNA sense strand
gcuucuaccuggacauaca

SEQ ID NO: 1257287 - RNA, 19 nt, Homo sapiens
  misc_RNA (1)...(19): siRNA sense strand
guaugcagaaguacagaaa

SEQ ID NO: 1257288 - RNA, 19 nt, Homo sapiens
  misc_RNA (1)...(19): siRNA sense strand
caaaucaucaggaauccau

SEQ ID NO: 1257289 - RNA, 19 nt, Homo sapiens
  misc_RNA (1)...(19): siRNA sense strand
ggaaucaaaccagaaccaa

SEQ ID NO: 1257290 - RNA, 19 nt, Homo sapiens
  misc_RNA (1)...(19): siRNA sense strand
acgcauugauggauuuaug

SEQ ID NO: 1257291 - RNA, 19 nt, Homo sapiens
  misc_RNA (1)...(19): siRNA sense strand
cuuagguugugaagacuuu

SEQ ID NO: 1257292 - RNA, 19 nt, Homo sapiens
  misc_RNA (1)...(19): siRNA sense strand
agaagaacuguuugauuga

SEQ ID NO: 1257293 - RNA, 19 nt, Homo sapiens
  misc_RNA (1)...(19): siRNA sense strand
aaugcaaauugauggguaa

SEQ ID NO: 1257294 - RNA, 19 nt, Homo sapiens
  misc_RNA (1)...(19): siRNA sense strand
cuucaaauccuuagguugu

SEQ ID NO: 1257295 - RNA, 19 nt, Homo sapiens
  misc_RNA (1)...(19): siRNA sense strand
cugccaacacugucgauua

SEQ ID NO: 1257296 - RNA, 19 nt, Homo sapiens
  misc_RNA (1)...(19): siRNA sense strand
gcaaggugucuacauuaag

SEQ ID NO: 1257297 - RNA, 19 nt, Homo sapiens
  misc_RNA (1)...(19): siRNA sense strand
ugugaagacuuuauuagcu

SEQ ID NO: 1257298 - RNA, 19 nt, Homo sapiens
  misc_RNA (1)...(19): siRNA sense strand
acgacgaccucaguaacua

SEQ ID NO: 1257299 - RNA, 19 nt, Homo sapiens
  misc_RNA (1)...(19): siRNA sense strand
ugacuacacaccagcauca

SEQ ID NO: 1257300 - RNA, 19 nt, Homo sapiens
  misc_RNA (1)...(19): siRNA sense strand
aaagcaauauacccagaca

SEQ ID NO: 1257301 - RNA, 19 nt, Homo sapiens
  misc_RNA (1)...(19): siRNA sense strand
cucuagaggugguguuuau

SEQ ID NO: 1257302 - RNA, 19 nt, Homo sapiens
  misc_RNA (1)...(19): siRNA sense strand
cuaaaucgcaucuggaaac

SEQ ID NO: 1257303 - RNA, 19 nt, Homo sapiens
  misc_RNA (1)...(19): siRNA sense strand
cagcuucuaccuggacaua

SEQ ID NO: 1257304 - RNA, 19 nt, Homo sapiens
  misc_RNA (1)...(19): siRNA sense strand
guucuaugcaccugacuga

SEQ ID NO: 1257305 - RNA, 19 nt, Homo sapiens
  misc_RNA (1)...(19): siRNA sense strand
cagaaccaauaugugacua

SEQ ID NO: 1257306 - RNA, 19 nt, Homo sapiens
  misc_RNA (1)...(19): siRNA sense strand
ugccaacacugucgauuac

SEQ ID NO: 1257307 - RNA, 19 nt, Homo sapiens
  misc_RNA (1)...(19): siRNA sense strand
ggaguuguucacuucagaa

SEQ ID NO: 1257308 - RNA, 19 nt, Homo sapiens
  misc_RNA (1)...(19): siRNA sense strand
uggaaagaguuuauguucu

SEQ ID NO: 1257309 - RNA, 19 nt, Homo sapiens
  misc_RNA (1)...(19): siRNA sense strand
gaagacuuuauuagcuuug

SEQ ID NO: 1257310 - RNA, 19 nt, Homo sapiens
  misc_RNA (1)...(19): siRNA sense strand
gaagucagcaaagcaaugc

SEQ ID NO: 1257311 - RNA, 19 nt, Homo sapiens
  misc_RNA (1)...(19): siRNA sense strand
guagaaaccgcugccaaca

SEQ ID NO: 1257312 - RNA, 19 nt, Homo sapiens
  misc_RNA (1)...(19): siRNA sense strand
ggugguguuuaucagaaug

SEQ ID NO: 1257313 - RNA, 19 nt, Homo sapiens
  misc_RNA (1)...(19): siRNA sense strand
cuggaaaccugccaauacu

SEQ ID NO: 1257314 - RNA, 19 nt, Homo sapiens
  misc_RNA (1)...(19): siRNA sense strand
gaucgaaccaguagaaacc

SEQ ID NO: 1257315 - RNA, 19 nt, Homo sapiens
  misc_RNA (1)...(19): siRNA sense strand
cgucagaagaacuguuuga

SEQ ID NO: 1257316 - RNA, 19 nt, Homo sapiens
  misc_RNA (1)...(19): siRNA sense strand
gccuuugacucucagaaca

SEQ ID NO: 1257317 - RNA, 19 nt, Homo sapiens
  misc_RNA (1)...(19): siRNA sense strand
ggaaagaguuuauguucua

SEQ ID NO: 1257318 - RNA, 19 nt, Homo sapiens
  misc_RNA (1)...(19): siRNA sense strand
cagaagaacuguuugauug

SEQ ID NO: 1257319 - RNA, 19 nt, Homo sapiens
  misc_RNA (1)...(19): siRNA sense strand
gagaagagcuccagcagau

SEQ ID NO: 1257320 - RNA, 19 nt, Homo sapiens
  misc_RNA (1)...(19): siRNA sense strand
gcaauugugugccaucaaa

SEQ ID NO: 1257321 - RNA, 19 nt, Homo sapiens
  misc_RNA (1)...(19): siRNA sense strand
ggagacaaaucaucaggaa

SEQ ID NO: 1257322 - RNA, 19 nt, Homo sapiens
  misc_RNA (1)...(19): siRNA sense strand
gaagagcuccagcagauaa

SEQ ID NO: 1257323 - RNA, 19 nt, Homo sapiens
  misc_RNA (1)...(19): siRNA sense strand
caagaucuguggagacaaa

SEQ ID NO: 1257324 - RNA, 19 nt, Homo sapiens
  misc_RNA (1)...(19): siRNA sense strand
guuguucacuucagaauuu

SEQ ID NO: 1257325 - RNA, 19 nt, Homo sapiens
  misc_RNA (1)...(19): siRNA sense strand
gcaccugacugaagaugaa

SEQ ID NO: 1257326 - RNA, 19 nt, Homo sapiens
  misc_RNA (1)...(19): siRNA sense strand
gaaauuauuccaugcaaga

SEQ ID NO: 1257327 - RNA, 19 nt, Homo sapiens
  misc_RNA (1)...(19): siRNA sense strand
ggaagaaauugagaacuau

SEQ ID NO: 1257328 - RNA, 19 nt, Homo sapiens
  misc_RNA (1)...(19): siRNA sense strand
caaggugucuacauuaaga

SEQ ID NO: 1257329 - RNA, 19 nt, Homo sapiens
  misc_RNA (1)...(19): siRNA sense strand
ccgagaagauggaauacua

SEQ ID NO: 1257330 - RNA, 19 nt, Homo sapiens
  misc_RNA (1)...(19): siRNA sense strand
gaagauggaauacuaacaa

SEQ ID NO: 1257331 - RNA, 19 nt, Homo sapiens
  misc_RNA (1)...(19): siRNA sense strand
cagcuuguaugcagaagua

SEQ ID NO: 1257332 - RNA, 19 nt, Homo sapiens
  misc_RNA (1)...(19): siRNA sense strand
gaucaaauugugcuucuaa

SEQ ID NO: 1257333 - RNA, 19 nt, Homo sapiens
  misc_RNA (1)...(19): siRNA sense strand
gcagagagacagcuuguau

SEQ ID NO: 1257334 - RNA, 19 nt, Homo sapiens
  misc_RNA (1)...(19): siRNA sense strand
caaacgcauugauggauuu

SEQ ID NO: 1257335 - RNA, 19 nt, Homo sapiens
  misc_RNA (1)...(19): siRNA sense strand
gaagaacuguuugauugau

SEQ ID NO: 1257336 - RNA, 19 nt, Homo sapiens
  misc_RNA (1)...(19): siRNA sense strand
uagaacaccuugcacagaa

SEQ ID NO: 1257337 - RNA, 19 nt, Homo sapiens
  misc_RNA (1)...(19): siRNA sense strand
aggaagaaauugagaacua

SEQ ID NO: 1257338 - RNA, 19 nt, Homo sapiens
  misc_RNA (1)...(19): siRNA sense strand
gaacaccuugcacagaaua

SEQ ID NO: 1257339 - RNA, 19 nt, Homo sapiens
  misc_RNA (1)...(19): siRNA sense strand
aaucaaaccagaaccaaua

SEQ ID NO: 1257340 - RNA, 19 nt, Homo sapiens
  misc_RNA (1)...(19): siRNA sense strand
guagggaugucucgagaug

SEQ ID NO: 1257341 - RNA, 19 nt, Homo sapiens
  misc_RNA (1)...(19): siRNA sense strand
gaggugauguggcaauugu

SEQ ID NO: 1257342 - RNA, 19 nt, Homo sapiens
  misc_RNA (1)...(19): siRNA sense strand
gcucauggcugcaagaaaa

SEQ ID NO: 1257343 - RNA, 19 nt, Homo sapiens
  misc_RNA (1)...(19): siRNA sense strand
ggaaaccugccaauacuug

SEQ ID NO: 1257344 - RNA, 19 nt, Homo sapiens
  misc_RNA (1)...(19): siRNA sense strand
gaggugguguuuaucagaa

SEQ ID NO: 1257345 - RNA, 19 nt, Homo sapiens
  misc_RNA (1)...(19): siRNA sense strand
ccaaacgcauugauggauu

SEQ ID NO: 1257346 - RNA, 19 nt, Homo sapiens
  misc_RNA (1)...(19): siRNA sense strand
uuacagaagcuauacagua

SEQ ID NO: 1257347 - RNA, 19 nt, Homo sapiens
  misc_RNA (1)...(19): siRNA sense strand
gaaccaauaugugacuaca

SEQ ID NO: 1257348 - RNA, 19 nt, Homo sapiens
  misc_RNA (1)...(19): siRNA sense strand
caacacguccuacagaaga

SEQ ID NO: 1257349 - RNA, 19 nt, Homo sapiens
  misc_RNA (1)...(19): siRNA sense strand
gugaagacuuuauuagcuu

SEQ ID NO: 1257350 - RNA, 19 nt, Homo sapiens
  misc_RNA (1)...(19): siRNA sense strand
uaugcaaggugucuacauu

SEQ ID NO: 1257351 - RNA, 19 nt, Homo sapiens
  misc_RNA (1)...(19): siRNA sense strand
ucaccgagaagauggaaua

SEQ ID NO: 1257352 - RNA, 19 nt, Homo sapiens
  misc_RNA (1)...(19): siRNA sense strand
ccagucaggucuugauauc

SEQ ID NO: 1257353 - RNA, 19 nt, Homo sapiens
  misc_RNA (1)...(19): siRNA sense strand
gauggaauacuaacaaagu

SEQ ID NO: 1257354 - RNA, 19 nt, Homo sapiens
  misc_RNA (1)...(19): siRNA sense strand
gaaugugccgugccuuuga

SEQ ID NO: 1257355 - RNA, 19 nt, Homo sapiens
  misc_RNA (1)...(19): siRNA sense strand
ggagaagucagcaaagcaa

SEQ ID NO: 1257356 - RNA, 19 nt, Homo sapiens
  misc_RNA (1)...(19): siRNA sense strand
ugcaaggugucuacauuaa

SEQ ID NO: 1257357 - RNA, 19 nt, Homo sapiens
  misc_RNA (1)...(19): siRNA sense strand
acagaagaaucaccgagaa

SEQ ID NO: 1257358 - RNA, 19 nt, Homo sapiens
  misc_RNA (1)...(19): siRNA sense strand
gaagaaucaccgagaagau

SEQ ID NO: 1257359 - RNA, 19 nt, Homo sapiens
  misc_RNA (1)...(19): siRNA sense strand
ucagaagaacuguuugauu

SEQ ID NO: 1257360 - RNA, 19 nt, Homo sapiens
  misc_RNA (1)...(19): siRNA sense strand
cgaccucaguaacuacauu

SEQ ID NO: 1257361 - RNA, 19 nt, Homo sapiens
  misc_RNA (1)...(19): siRNA sense strand
caaaccagaaccaauaugu

SEQ ID NO: 1257362 - RNA, 19 nt, Homo sapiens
  misc_RNA (1)...(19): siRNA sense strand
agacaaaucaucaggaauc

SEQ ID NO: 1257363 - RNA, 19 nt, Homo sapiens
  misc_RNA (1)...(19): siRNA sense strand
gacugaagaugaaauugca

SEQ ID NO: 1257364 - RNA, 19 nt, Homo sapiens
  misc_RNA (1)...(19): siRNA sense strand
guccauggcagaauuagaa

SEQ ID NO: 1257365 - RNA, 19 nt, Homo sapiens
  misc_RNA (1)...(19): siRNA sense strand
uacaguaugugguggaguu

SEQ ID NO: 1257366 - RNA, 19 nt, Homo sapiens
  misc_RNA (1)...(19): siRNA sense strand
gccaauacuugagagaaga

SEQ ID NO: 1257367 - RNA, 19 nt, Homo sapiens
  misc_RNA (1)...(19): siRNA sense strand
gaaaccugccaauacuuga

SEQ ID NO: 1257368 - RNA, 19 nt, Homo sapiens
  misc_RNA (1)...(19): siRNA sense strand
aaauucagcuagcucuuca

SEQ ID NO: 1257369 - RNA, 19 nt, Homo sapiens
  misc_RNA (1)...(19): siRNA sense strand
gacauugugcgacuucauu

SEQ ID NO: 1257370 - RNA, 19 nt, Homo sapiens
  misc_RNA (1)...(19): siRNA sense strand
cgagaagauggaauacuaa

SEQ ID NO: 1257371 - RNA, 19 nt, Homo sapiens
  misc_RNA (1)...(19): siRNA sense strand
agaaaccgcugccaacacu

SEQ ID NO: 1257372 - RNA, 19 nt, Homo sapiens
  misc_RNA (1)...(19): siRNA sense strand
cuaugcaccugacugaaga

SEQ ID NO: 1257373 - RNA, 19 nt, Homo sapiens
  misc_RNA (1)...(19): siRNA sense strand
cgacgucuucaaauccuua

SEQ ID NO: 1257374 - RNA, 19 nt, Homo sapiens
  misc_RNA (1)...(19): siRNA sense strand
cagaaugugccgugccuuu

SEQ ID NO: 1257375 - RNA, 19 nt, Homo sapiens
  misc_RNA (1)...(19): siRNA sense strand
gggaggugauguggcaauu

SEQ ID NO: 1257376 - RNA, 19 nt, Homo sapiens
  misc_RNA (1)...(19): siRNA sense strand
gaaucaaaccagaaccaau

SEQ ID NO: 1257377 - RNA, 19 nt, Homo sapiens
  misc_RNA (1)...(19): siRNA sense strand
ccaacgggcugacggaacu

SEQ ID NO: 1257378 - RNA, 19 nt, Homo sapiens
  misc_RNA (1)...(19): siRNA sense strand
gaucuguggagacaaauca

SEQ ID NO: 1257379 - RNA, 19 nt, Homo sapiens
  misc_RNA (1)...(19): siRNA sense strand
ucaaauccuuagguuguga

SEQ ID NO: 1257380 - RNA, 19 nt, Homo sapiens
  misc_RNA (1)...(19): siRNA sense strand
gaagaaauugagaacuauc

SEQ ID NO: 1257381 - RNA, 19 nt, Homo sapiens
  misc_RNA (1)...(19): siRNA sense strand
ucgagaugcuguaaaauuu

SEQ ID NO: 1257382 - RNA, 19 nt, Homo sapiens
  misc_RNA (1)...(19): siRNA sense strand
ucagcuagcucuucaacac

SEQ ID NO: 1257383 - RNA, 19 nt, Homo sapiens
  misc_RNA (1)...(19): siRNA sense strand
gguugugaagacuuuauua

SEQ ID NO: 1257384 - RNA, 19 nt, Homo sapiens
  misc_RNA (1)...(19): siRNA sense strand
aaccagaaccaauauguga

SEQ ID NO: 1257385 - RNA, 19 nt, Homo sapiens
  misc_RNA (1)...(19): siRNA sense strand
aaucaucaggaauccauua

SEQ ID NO: 1257386 - RNA, 19 nt, Homo sapiens
  misc_RNA (1)...(19): siRNA sense strand
gcuucuaccuggacauaca

SEQ ID NO: 1257387 - RNA, 19 nt, Homo sapiens
  misc_RNA (1)...(19): siRNA sense strand
guaugcagaaguacagaaa

SEQ ID NO: 1257388 - RNA, 19 nt, Homo sapiens
  misc_RNA (1)...(19): siRNA sense strand
caaaucaucaggaauccau

SEQ ID NO: 1257389 - RNA, 19 nt, Homo sapiens
  misc_RNA (1)...(19): siRNA sense strand
ggaaucaaaccagaaccaa

SEQ ID NO: 1257390 - RNA, 19 nt, Homo sapiens
  misc_RNA (1)...(19): siRNA sense strand
acgcauugauggauuuaug

SEQ ID NO: 1257391 - RNA, 19 nt, Homo sapiens
  misc_RNA (1)...(19): siRNA sense strand
cuuagguugugaagacuuu

SEQ ID NO: 1257392 - RNA, 19 nt, Homo sapiens
  misc_RNA (1)...(19): siRNA sense strand
agaagaacuguuugauuga

SEQ ID NO: 1257393 - RNA, 19 nt, Homo sapiens
  misc_RNA (1)...(19): siRNA sense strand
aaugcaaauugauggguaa

SEQ ID NO: 1257394 - RNA, 19 nt, Homo sapiens
  misc_RNA (1)...(19): siRNA sense strand
cuucaaauccuuagguugu

SEQ ID NO: 1257395 - RNA, 19 nt, Homo sapiens
  misc_RNA (1)...(19): siRNA sense strand
cugccaacacugucgauua

SEQ ID NO: 1257396 - RNA, 19 nt, Homo sapiens
  misc_RNA (1)...(19): siRNA sense strand
gcaaggugucuacauuaag

SEQ ID NO: 1257397 - RNA, 19 nt, Homo sapiens
  misc_RNA (1)...(19): siRNA sense strand
ugugaagacuuuauuagcu

SEQ ID NO: 1257398 - RNA, 19 nt, Homo sapiens
  misc_RNA (1)...(19): siRNA sense strand
acgacgaccucaguaacua

SEQ ID NO: 1257399 - RNA, 19 nt, Homo sapiens
  misc_RNA (1)...(19): siRNA sense strand
ugacuacacaccagcauca

SEQ ID NO: 1257400 - RNA, 19 nt, Homo sapiens
  misc_RNA (1)...(19): siRNA sense strand
aaagcaauauacccagaca

SEQ ID NO: 1257401 - RNA, 19 nt, Homo sapiens
  misc_RNA (1)...(19): siRNA sense strand
cucuagaggugguguuuau

SEQ ID NO: 1257402 - RNA, 19 nt, Homo sapiens
  misc_RNA (1)...(19): siRNA sense strand
cuaaaucgcaucuggaaac

SEQ ID NO: 1257403 - RNA, 19 nt, Homo sapiens
  misc_RNA (1)...(19): siRNA sense strand
cagcuucuaccuggacaua

SEQ ID NO: 1257404 - RNA, 19 nt, Homo sapiens
  misc_RNA (1)...(19): siRNA sense strand
guucuaugcaccugacuga

SEQ ID NO: 1257405 - RNA, 19 nt, Homo sapiens
  misc_RNA (1)...(19): siRNA sense strand
cagaaccaauaugugacua

SEQ ID NO: 1257406 - RNA, 19 nt, Homo sapiens
  misc_RNA (1)...(19): siRNA sense strand
ugccaacacugucgauuac

SEQ ID NO: 1257407 - RNA, 19 nt, Homo sapiens
  misc_RNA (1)...(19): siRNA sense strand
ggaguuguucacuucagaa

SEQ ID NO: 1257408 - RNA, 19 nt, Homo sapiens
  misc_RNA (1)...(19): siRNA sense strand
uggaaagaguuuauguucu

SEQ ID NO: 1257409 - RNA, 19 nt, Homo sapiens
  misc_RNA (1)...(19): siRNA sense strand
gaagacuuuauuagcuuug

SEQ ID NO: 1257410 - RNA, 19 nt, Homo sapiens
  misc_RNA (1)...(19): siRNA sense strand
gaagucagcaaagcaaugc

SEQ ID NO: 1257411 - RNA, 19 nt, Homo sapiens
  misc_RNA (1)...(19): siRNA sense strand
guagaaaccgcugccaaca

SEQ ID NO: 1257412 - RNA, 19 nt, Homo sapiens
  misc_RNA (1)...(19): siRNA sense strand
ggugguguuuaucagaaug

SEQ ID NO: 1257413 - RNA, 19 nt, Homo sapiens
  misc_RNA (1)...(19): siRNA sense strand
cuggaaaccugccaauacu

SEQ ID NO: 1257414 - RNA, 19 nt, Homo sapiens
  misc_RNA (1)...(19): siRNA sense strand
gaucgaaccaguagaaacc

SEQ ID NO: 1257415 - RNA, 19 nt, Homo sapiens
  misc_RNA (1)...(19): siRNA sense strand
cgucagaagaacuguuuga

SEQ ID NO: 1257416 - RNA, 19 nt, Homo sapiens
  misc_RNA (1)...(19): siRNA sense strand
gccuuugacucucagaaca

SEQ ID NO: 1257417 - RNA, 19 nt, Homo sapiens
  misc_RNA (1)...(19): siRNA sense strand
ggaaagaguuuauguucua

SEQ ID NO: 1257418 - RNA, 19 nt, Homo sapiens
  misc_RNA (1)...(19): siRNA sense strand
cagaagaacuguuugauug

SEQ ID NO: 1257419 - RNA, 19 nt, Homo sapiens
  misc_RNA (1)...(19): siRNA sense strand
gagaagagcuccagcagau

SEQ ID NO: 1257420 - RNA, 19 nt, Homo sapiens
  misc_RNA (1)...(19): siRNA sense strand
gcaauugugugccaucaaa

SEQ ID NO: 1257421 - RNA, 19 nt, Homo sapiens
  misc_RNA (1)...(19): siRNA sense strand
ggagacaaaucaucaggaa

SEQ ID NO: 1257422 - RNA, 19 nt, Homo sapiens
  misc_RNA (1)...(19): siRNA sense strand
gaagagcuccagcagauaa

SEQ ID NO: 1257423 - RNA, 19 nt, Homo sapiens
  misc_RNA (1)...(19): siRNA sense strand
caagaucuguggagacaaa

SEQ ID NO: 1257424 - RNA, 19 nt, Homo sapiens
  misc_RNA (1)...(19): siRNA sense strand
guuguucacuucagaauuu

SEQ ID NO: 1257425 - RNA, 19 nt, Homo sapiens
  misc_RNA (1)...(19): siRNA sense strand
gcaccugacugaagaugaa

SEQ ID NO: 1257426 - RNA, 19 nt, Homo sapiens
  misc_RNA (1)...(19): siRNA sense strand
gaaauuauuccaugcaaga

SEQ ID NO: 1257427 - RNA, 19 nt, Homo sapiens
  misc_RNA (1)...(19): siRNA sense strand
ggaagaaauugagaacuau

SEQ ID NO: 1257428 - RNA, 19 nt, Homo sapiens
  misc_RNA (1)...(19): siRNA sense strand
caaggugucuacauuaaga

SEQ ID NO: 1257429 - RNA, 19 nt, Homo sapiens
  misc_RNA (1)...(19): siRNA sense strand
ccgagaagauggaauacua

SEQ ID NO: 1257430 - RNA, 19 nt, Homo sapiens
  misc_RNA (1)...(19): siRNA sense strand
gaagauggaauacuaacaa

SEQ ID NO: 1257431 - RNA, 19 nt, Homo sapiens
  misc_RNA (1)...(19): siRNA sense strand
cagcuuguaugcagaagua

SEQ ID NO: 1257432 - RNA, 19 nt, Homo sapiens
  misc_RNA (1)...(19): siRNA sense strand
gaucaaauugugcuucuaa

SEQ ID NO: 1257433 - RNA, 19 nt, Homo sapiens
  misc_RNA (1)...(19): siRNA sense strand
gcagagagacagcuuguau

SEQ ID NO: 1257434 - RNA, 19 nt, Homo sapiens
  misc_RNA (1)...(19): siRNA sense strand
caaacgcauugauggauuu

SEQ ID NO: 1257435 - RNA, 19 nt, Homo sapiens
  misc_RNA (1)...(19): siRNA sense strand
gaagaacuguuugauugau
